United States Patent Application Publication US 2016/0319361 A1 - sequence listing, part 5

SEQ ID NO: 106997 - DNA, 30 bp, Artificial Sequence
  Synthetic oligonucleotide
cgccatcagcaagaccagtccttacctctg

SEQ ID NO: 106998 - DNA, 30 bp, Artificial Sequence
  Synthetic oligonucleotide
aagatgtggcggagcgtgaaacaggctctg

SEQ ID NO: 106999 - DNA, 30 bp, Artificial Sequence
  Synthetic oligonucleotide
cacaaaagcgatacataatgatgggctctg

SEQ ID NO: 107000 - DNA, 30 bp, Artificial Sequence
  Synthetic oligonucleotide
tacggccaacccaatttattgccttctctg

SEQ ID NO: 107001 - DNA, 30 bp, Artificial Sequence
  Synthetic oligonucleotide
ccggtacaggacggtattccgaggagtctg

SEQ ID NO: 107002 - DNA, 30 bp, Artificial Sequence
  Synthetic oligonucleotide
taaggtcacgggtagtcaattcaaggtctg

SEQ ID NO: 107003 - DNA, 30 bp, Artificial Sequence
  Synthetic oligonucleotide
caccaaggtgactacaaatttgagggtctg

SEQ ID NO: 107004 - DNA, 30 bp, Artificial Sequence
  Synthetic oligonucleotide
atcccgggatgctatagactcacgggtctg

SEQ ID NO: 107005 - DNA, 30 bp, Artificial Sequence
  Synthetic oligonucleotide
agaggaaaaatatgtcatgatctgtgtctg

SEQ ID NO: 107006 - DNA, 30 bp, Artificial Sequence
  Synthetic oligonucleotide
acatcggttgtgaactatgtttgcattctg

SEQ ID NO: 107007 - DNA, 30 bp, Artificial Sequence
  Synthetic oligonucleotide
aagcgaaaagacagggggcaacaacttctg

SEQ ID NO: 107008 - DNA, 30 bp, Artificial Sequence
  Synthetic oligonucleotide
acaagcggggcaatctatatgagacttctg

SEQ ID NO: 107009 - DNA, 30 bp, Artificial Sequence
  Synthetic oligonucleotide
aaaggtagccatttacaaggatggcttctg

SEQ ID NO: 107010 - DNA, 30 bp, Artificial Sequence
  Synthetic oligonucleotide
tgggcgtgatcagagtgcatgcatcttctg

SEQ ID NO: 107011 - DNA, 30 bp, Artificial Sequence
  Synthetic oligonucleotide
aagtatgaaatcaactcttccgctcttctg

SEQ ID NO: 107012 - DNA, 30 bp, Artificial Sequence
  Synthetic oligonucleotide
ctgcgatcaatgatcccgacacgggttctg

SEQ ID NO: 107013 - DNA, 30 bp, Artificial Sequence
  Synthetic oligonucleotide
cgctcgtcgcggcaagcgtgggttgttctg

SEQ ID NO: 107014 - DNA, 30 bp, Artificial Sequence
  Synthetic oligonucleotide
aacgcttaatggtaagctggatagtttctg

SEQ ID NO: 107015 - DNA, 30 bp, Artificial Sequence
  Synthetic oligonucleotide
actagaagaacgatcgccttataaaaagtg

SEQ ID NO: 107016 - DNA, 30 bp, Artificial Sequence
  Synthetic oligonucleotide
cacgaccactggtgtcggaaagtcaaagtg

SEQ ID NO: 107017 - DNA, 30 bp, Artificial Sequence
  Synthetic oligonucleotide
taatagaggcagtcgatggtgtagaaagtg

SEQ ID NO: 107018 - DNA, 30 bp, Artificial Sequence
  Synthetic oligonucleotide
aacattctatgctcggacaataataaagtg

SEQ ID NO: 107019 - DNA, 30 bp, Artificial Sequence
  Synthetic oligonucleotide
taggagatgggtgtgtctcaaactaaagtg

SEQ ID NO: 107020 - DNA, 30 bp, Artificial Sequence
  Synthetic oligonucleotide
ggcgacatcgaaacagccttcactaaagtg

SEQ ID NO: 107021 - DNA, 30 bp, Artificial Sequence
  Synthetic oligonucleotide
cgtgactcccaaatccgtagactacaagtg

SEQ ID NO: 107022 - DNA, 30 bp, Artificial Sequence
  Synthetic oligonucleotide
aggtgcgctttatccgtgacaatccaagtg

SEQ ID NO: 107023 - DNA, 30 bp, Artificial Sequence
  Synthetic oligonucleotide
agttaatgctacagattcctagtccaagtg

SEQ ID NO: 107024 - DNA, 30 bp, Artificial Sequence
  Synthetic oligonucleotide
acaaggcgtagagtacgaccgtccgaagtg

SEQ ID NO: 107025 - DNA, 30 bp, Artificial Sequence
  Synthetic oligonucleotide
ggcaggacaagccgggagggcacataagtg

SEQ ID NO: 107026 - DNA, 30 bp, Artificial Sequence
  Synthetic oligonucleotide
ggcgaactctagaatttcataagataagtg

SEQ ID NO: 107027 - DNA, 30 bp, Artificial Sequence
  Synthetic oligonucleotide
ccgcatacaatttgaggaagatactaagtg

SEQ ID NO: 107028 - DNA, 30 bp, Artificial Sequence
  Synthetic oligonucleotide
agtcttatatccgaactatagatctaagtg

SEQ ID NO: 107029 - DNA, 30 bp, Artificial Sequence
  Synthetic oligonucleotide
gtttccaattggcatatgaccccgtaagtg

SEQ ID NO: 107030 - DNA, 30 bp, Artificial Sequence
  Synthetic oligonucleotide
gaacttgtacgaacgaccaactattaagtg

SEQ ID NO: 107031 - DNA, 30 bp, Artificial Sequence
  Synthetic oligonucleotide
ggggccttcagatcaagatgttattaagtg

SEQ ID NO: 107032 - DNA, 30 bp, Artificial Sequence
  Synthetic oligonucleotide
ctcacggtgcatttagaagtataaacagtg

SEQ ID NO: 107033 - DNA, 31 bp, Artificial Sequence
  Synthetic oligonucleotide
ataacggttgtttgtcgttacccacacagtg

SEQ ID NO: 107034 - DNA, 30 bp, Artificial Sequence
  Synthetic oligonucleotide
gtggcgtcaagccccgcaataaaaccagtg

SEQ ID NO: 107035 - DNA, 30 bp, Artificial Sequence
  Synthetic oligonucleotide
gttgcaaaggcgagaggtgcatgcccagtg

SEQ ID NO: 107036 - DNA, 30 bp, Artificial Sequence
  Synthetic oligonucleotide
cgttaggggctaactgaatgtaaagcagtg

SEQ ID NO: 107037 - DNA, 30 bp, Artificial Sequence
  Synthetic oligonucleotide
ggcgttctattcgtgggagacagagcagtg

SEQ ID NO: 107038 - DNA, 30 bp, Artificial Sequence
  Synthetic oligonucleotide
tcggcagtgaatatagcgcgacgagcagtg

SEQ ID NO: 107039 - DNA, 31 bp, Artificial Sequence
  Synthetic oligonucleotide
ggggagttcgaatactccgtaaccatcagtg

SEQ ID NO: 107040 - DNA, 30 bp, Artificial Sequence
  Synthetic oligonucleotide
gcttgaggatacgatgaggacccctcagtg

SEQ ID NO: 107041 - DNA, 30 bp, Artificial Sequence
  Synthetic oligonucleotide
ccgcgttagtgtgtggggttacggtcagtg

SEQ ID NO: 107042 - DNA, 30 bp, Artificial Sequence
  Synthetic oligonucleotide
atggggcgccgtaccaaatgtgcaagagtg

SEQ ID NO: 107043 - DNA, 32 bp, Artificial Sequence
  Synthetic oligonucleotide
atatctacatcgtcagatagccaaagagagtg

SEQ ID NO: 107044 - DNA, 30 bp, Artificial Sequence
  Synthetic oligonucleotide
cagctgacggctctccgattgaagagagtg

SEQ ID NO: 107045 - DNA, 30 bp, Artificial Sequence
  Synthetic oligonucleotide
ctgctttcacacgtagcgtaaatgagagtg

SEQ ID NO: 107046 - DNA, 30 bp, Artificial Sequence
  Synthetic oligonucleotide
gcaaccaccaggaattaaattatgagagtg

SEQ ID NO: 107047 - DNA, 30 bp, Artificial Sequence
  Synthetic oligonucleotide
gcaagtctgggcaattgcacataacgagtg

SEQ ID NO: 107048 - DNA, 30 bp, Artificial Sequence
  Synthetic oligonucleotide
accaggggggccgtcacggaaaaccgagtg

SEQ ID NO: 107049 - DNA, 30 bp, Artificial Sequence
  Synthetic oligonucleotide
agcccatatttacagatgcgcaatcgagtg

SEQ ID NO: 107050 - DNA, 30 bp, Artificial Sequence
  Synthetic oligonucleotide
ctacgtcgttcaggtcctgagatgggagtg

SEQ ID NO: 107051 - DNA, 30 bp, Artificial Sequence
  Synthetic oligonucleotide
atatggatccctgcaaagcaattgggagtg

SEQ ID NO: 107052 - DNA, 30 bp, Artificial Sequence
  Synthetic oligonucleotide
tagtctgttcaatgtgcaatcggtggagtg

SEQ ID NO: 107053 - DNA, 30 bp, Artificial Sequence
  Synthetic oligonucleotide
tccttgacttaagtgaggcgggagtgagtg

SEQ ID NO: 107054 - DNA, 30 bp, Artificial Sequence
  Synthetic oligonucleotide
ataagcccgaaccgtattccggattgagtg

SEQ ID NO: 107055 - DNA, 30 bp, Artificial Sequence
  Synthetic oligonucleotide
aggcctacggcttgggcaaaggtaatagtg

SEQ ID NO: 107056 - DNA, 30 bp, Artificial Sequence
  Synthetic oligonucleotide
gtggactacggaatgtggcgacgcatagtg

SEQ ID NO: 107057 - DNA, 30 bp, Artificial Sequence
  Synthetic oligonucleotide
agtagagagggctcagctattagactagtg

SEQ ID NO: 107058 - DNA, 30 bp, Artificial Sequence
  Synthetic oligonucleotide
ataagggcaagggatataaaccagctagtg

SEQ ID NO: 107059 - DNA, 30 bp, Artificial Sequence
  Synthetic oligonucleotide
aaggaataaatcgtcttgaacatagtagtg

SEQ ID NO: 107060 - DNA, 30 bp, Artificial Sequence
  Synthetic oligonucleotide
ttccggtgcaaactcgagctaaccgtagtg

SEQ ID NO: 107061 - DNA, 30 bp, Artificial Sequence
  Synthetic oligonucleotide
ccttgggagggcagtttcaatggcgtagtg

SEQ ID NO: 107062 - DNA, 30 bp, Artificial Sequence
  Synthetic oligonucleotide
tcccccaggacagttgggcgagagttagtg

SEQ ID NO: 107063 - DNA, 30 bp, Artificial Sequence
  Synthetic oligonucleotide
accgaaggattaaactttgattagttagtg

SEQ ID NO: 107064 - DNA, 30 bp, Artificial Sequence
  Synthetic oligonucleotide
catatccgttcgtcgtctgcctctaacgtg

SEQ ID NO: 107065 - DNA, 30 bp, Artificial Sequence
  Synthetic oligonucleotide
tgacaacgctcaaccaactcacaagacgtg

SEQ ID NO: 107066 - DNA, 30 bp, Artificial Sequence
  Synthetic oligonucleotide
ctcatgatggagaactcaaggaaatacgtg

SEQ ID NO: 107067 - DNA, 30 bp, Artificial Sequence
  Synthetic oligonucleotide
gctcaccacaggtgggtcgctatatacgtg

SEQ ID NO: 107068 - DNA, 30 bp, Artificial Sequence
  Synthetic oligonucleotide
aggttgaggaggttcggatacgcaaccgtg

SEQ ID NO: 107069 - DNA, 30 bp, Artificial Sequence
  Synthetic oligonucleotide
cggaaataccggagacgatggtacaccgtg

SEQ ID NO: 107070 - DNA, 30 bp, Artificial Sequence
  Synthetic oligonucleotide
acacccgtatttggtgtcattcgacccgtg

SEQ ID NO: 107071 - DNA, 30 bp, Artificial Sequence
  Synthetic oligonucleotide
ggtataacagtcattaggcacaggcccgtg

SEQ ID NO: 107072 - DNA, 30 bp, Artificial Sequence
  Synthetic oligonucleotide
tatacccaatggtggaagggcttggccgtg

SEQ ID NO: 107073 - DNA, 30 bp, Artificial Sequence
  Synthetic oligonucleotide
caattgcagggcgaatttcagtcacgcgtg

SEQ ID NO: 107074 - DNA, 30 bp, Artificial Sequence
  Synthetic oligonucleotide
acggtaaccctaacctacactcaccgcgtg

SEQ ID NO: 107075 - DNA, 30 bp, Artificial Sequence
  Synthetic oligonucleotide
tctgtgctgcgcctgggcgggatcggcgtg

SEQ ID NO: 107076 - DNA, 30 bp, Artificial Sequence
  Synthetic oligonucleotide
gtggaccataccaaaacctctgtatgcgtg

SEQ ID NO: 107077 - DNA, 30 bp, Artificial Sequence
  Synthetic oligonucleotide
gaaaacgatgttcagcaacgggactgcgtg

SEQ ID NO: 107078 - DNA, 30 bp, Artificial Sequence
  Synthetic oligonucleotide
aaacaaggtgagtcctaactatactgcgtg

SEQ ID NO: 107079 - DNA, 30 bp, Artificial Sequence
  Synthetic oligonucleotide
caaacgattaacggtgaaaataattgcgtg

SEQ ID NO: 107080 - DNA, 30 bp, Artificial Sequence
  Synthetic oligonucleotide
aactgttaaaaacgtcaaacttaaatcgtg

SEQ ID NO: 107081 - DNA, 30 bp, Artificial Sequence
  Synthetic oligonucleotide
tcgggtatgttgagcaaataatcgatcgtg

SEQ ID NO: 107082 - DNA, 30 bp, Artificial Sequence
  Synthetic oligonucleotide
agaccgagaagtgcagaacaggcgctcgtg

SEQ ID NO: 107083 - DNA, 30 bp, Artificial Sequence
  Synthetic oligonucleotide
cgattctagattttgtattctcggctcgtg

SEQ ID NO: 107084 - DNA, 30 bp, Artificial Sequence
  Synthetic oligonucleotide
catacgagtgtacagcgggtagttctcgtg

SEQ ID NO: 107085 - DNA, 30 bp, Artificial Sequence
  Synthetic oligonucleotide
tcgagctggggagggggtgctgtattcgtg

SEQ ID NO: 107086 - DNA, 30 bp, Artificial Sequence
  Synthetic oligonucleotide
cgtcccgtgcccctgtggtacgacttcgtg

SEQ ID NO: 107087 - DNA, 30 bp, Artificial Sequence
  Synthetic oligonucleotide
ctgaccgggttttgtggtaggtacttcgtg

SEQ ID NO: 107088 - DNA, 30 bp, Artificial Sequence
  Synthetic oligonucleotide
ccttggcactgccgccttaataccttcgtg

SEQ ID NO: 107089 - DNA, 30 bp, Artificial Sequence
  Synthetic oligonucleotide
ggatgttgatggatgatagatcaaaaggtg

SEQ ID NO: 107090 - DNA, 30 bp, Artificial Sequence
  Synthetic oligonucleotide
gtggacatgcgtagggcgtgtcggaaggtg

SEQ ID NO: 107091 - DNA, 30 bp, Artificial Sequence
  Synthetic oligonucleotide
gtgtaactcgatggagagcccagacaggtg

SEQ ID NO: 107092 - DNA, 30 bp, Artificial Sequence
  Synthetic oligonucleotide
cccattggtgcaacccaacttgaccaggtg

SEQ ID NO: 107093 - DNA, 30 bp, Artificial Sequence
  Synthetic oligonucleotide
tccatctgagtgcccatctagatccaggtg

SEQ ID NO: 107094 - DNA, 30 bp, Artificial Sequence
  Synthetic oligonucleotide
gggtggctgttgcataattaaaagcaggtg

SEQ ID NO: 107095 - DNA, 30 bp, Artificial Sequence
  Synthetic oligonucleotide
caatttcagaaacaaaagtaatcgcaggtg

SEQ ID NO: 107096 - DNA, 30 bp, Artificial Sequence
  Synthetic oligonucleotide
agacgtaagcggtagtgagggttagaggtg

SEQ ID NO: 107097 - DNA, 30 bp, Artificial Sequence
  Synthetic oligonucleotide
gagtatcctatggaagaaacaaacgaggtg

SEQ ID NO: 107098 - DNA, 30 bp, Artificial Sequence
  Synthetic oligonucleotide
ctcacatattactaatgcttatacgaggtg

SEQ ID NO: 107099 - DNA, 30 bp, Artificial Sequence
  Synthetic oligonucleotide
tttggagcactatggagatctaaggaggtg

SEQ ID NO: 107100 - DNA, 30 bp, Artificial Sequence
  Synthetic oligonucleotide
ctagggttcaatgcatgcaagcgtgaggtg

SEQ ID NO: 107101 - DNA, 30 bp, Artificial Sequence
  Synthetic oligonucleotide
ccgagacttccggccgtaggactataggtg

SEQ ID NO: 107102 - DNA, 30 bp, Artificial Sequence
  Synthetic oligonucleotide
gggctccggatgaaagcgtaggggtaggtg

SEQ ID NO: 107103 - DNA, 30 bp, Artificial Sequence
  Synthetic oligonucleotide
atgggtatgttagaacatgggcaaacggtg

SEQ ID NO: 107104 - DNA, 30 bp, Artificial Sequence
  Synthetic oligonucleotide
cgatagatcgcgtgcctttttagaccggtg

SEQ ID NO: 107105 - DNA, 30 bp, Artificial Sequence
  Synthetic oligonucleotide
caaacgtacaagctataattgggcccggtg

SEQ ID NO: 107106 - DNA, 30 bp, Artificial Sequence
  Synthetic oligonucleotide
ccgtactgcgggtgccagcttaccgcggtg

SEQ ID NO: 107107 - DNA, 30 bp, Artificial Sequence
  Synthetic oligonucleotide
acgaggtaggtctacgaccttcaggcggtg

SEQ ID NO: 107108 - DNA, 30 bp, Artificial Sequence
  Synthetic oligonucleotide
ggcagtaatgaagttagagctaatgcggtg

SEQ ID NO: 107109 - DNA, 30 bp, Artificial Sequence
  Synthetic oligonucleotide
gggcgaaaacgggacattataattgcggtg

SEQ ID NO: 107110 - DNA, 30 bp, Artificial Sequence
  Synthetic oligonucleotide
gttacattctgctacgaccgatactcggtg

SEQ ID NO: 107111 - DNA, 30 bp, Artificial Sequence
  Synthetic oligonucleotide
ccgcgatcacacgataacaatcgctcggtg

SEQ ID NO: 107112 - DNA, 30 bp, Artificial Sequence
  Synthetic oligonucleotide
atacgatgggaggatagatattgctcggtg

SEQ ID NO: 107113 - DNA, 30 bp, Artificial Sequence
  Synthetic oligonucleotide
cgataatcaatgtatgcgaattattcggtg

SEQ ID NO: 107114 - DNA, 30 bp, Artificial Sequence
  Synthetic oligonucleotide
tgatgttcttttgtagtgatgtcaagggtg

SEQ ID NO: 107115 - DNA, 30 bp, Artificial Sequence
  Synthetic oligonucleotide
tggagcgggtaaagtgattgacacagggtg

SEQ ID NO: 107116 - DNA, 31 bp, Artificial Sequence
  Synthetic oligonucleotide
ggggacaatataagtgtgggtaaccagggtg

SEQ ID NO: 107117 - DNA, 30 bp, Artificial Sequence
  Synthetic oligonucleotide
aagcgagagttttgaccgggtatcagggtg

SEQ ID NO: 107118 - DNA, 30 bp, Artificial Sequence
  Synthetic oligonucleotide
ttctgtacagaccgccagtcggagagggtg

SEQ ID NO: 107119 - DNA, 29 bp, Artificial Sequence
  Synthetic oligonucleotide
agccagcctcaactactaaaatgcgggtg

SEQ ID NO: 107120 - DNA, 30 bp, Artificial Sequence
  Synthetic oligonucleotide
atagctcaagggtcattcgaattgcgggtg

SEQ ID NO: 107121 - DNA, 30 bp, Artificial Sequence
  Synthetic oligonucleotide
agaaattcaagaatgcggtaccatcgggtg

SEQ ID NO: 107122 - DNA, 30 bp, Artificial Sequence
  Synthetic oligonucleotide
cgaatcgtattataagtgaagaccggggtg

SEQ ID NO: 107123 - DNA, 30 bp, Artificial Sequence
  Synthetic oligonucleotide
ccaggtagcccgatgtccggtgggggggtg

SEQ ID NO: 107124 - DNA, 30 bp, Artificial Sequence
  Synthetic oligonucleotide
tatctagctaacgagagcaaaaaatgggtg

SEQ ID NO: 107125 - DNA, 30 bp, Artificial Sequence
  Synthetic oligonucleotide
gcccggaaatatatactagatacatgggtg

SEQ ID NO: 107126 - DNA, 30 bp, Artificial Sequence
  Synthetic oligonucleotide
cgtccaatgaatatcgcccggatatgggtg

SEQ ID NO: 107127 - DNA, 30 bp, Artificial Sequence
  Synthetic oligonucleotide
cggcgaggccgtcaccatctgccgtgggtg

SEQ ID NO: 107128 - DNA, 30 bp, Artificial Sequence
  Synthetic oligonucleotide
tttgtgcgcggcaaaagccgggggatggtg

SEQ ID NO: 107129 - DNA, 30 bp, Artificial Sequence
  Synthetic oligonucleotide
tcagagtggcaccgttgaaacgctatggtg

SEQ ID NO: 107130 - DNA, 30 bp, Artificial Sequence
  Synthetic oligonucleotide
tgcatggtgacttgagcctggagtatggtg

SEQ ID NO: 107131 - DNA, 30 bp, Artificial Sequence
  Synthetic oligonucleotide
taggatcacgggtgcacacgatcactggtg

SEQ ID NO: 107132 - DNA, 30 bp, Artificial Sequence
  Synthetic oligonucleotide
gtcacaacatcgtgagcacccctactggtg

SEQ ID NO: 107133 - DNA, 30 bp, Artificial Sequence
  Synthetic oligonucleotide
tcctcacataccaaatggttgggcctggtg

SEQ ID NO: 107134 - DNA, 30 bp, Artificial Sequence
  Synthetic oligonucleotide
agagaaggatgctcgaacatgaacttggtg

SEQ ID NO: 107135 - DNA, 30 bp, Artificial Sequence
  Synthetic oligonucleotide
cggctgtattaagataaatgggctttggtg

SEQ ID NO: 107136 - DNA, 30 bp, Artificial Sequence
  Synthetic oligonucleotide
gcggagaccagggtggaaagggttttggtg

SEQ ID NO: 107137 - DNA, 30 bp, Artificial Sequence
  Synthetic oligonucleotide
actgctcaaaggagggtgctaaggaatgtg

SEQ ID NO: 107138 - DNA, 30 bp, Artificial Sequence
  Synthetic oligonucleotide
cgcatcgtagctgccacagtgtgtaatgtg

SEQ ID NO: 107139 - DNA, 30 bp, Artificial Sequence
  Synthetic oligonucleotide
tggcagacgcaaggtggtagtcttaatgtg

SEQ ID NO: 107140 - DNA, 30 bp, Artificial Sequence
  Synthetic oligonucleotide
actgcgagctcggacggaggggttaatgtg

SEQ ID NO: 107141 - DNA, 31 bp, Artificial Sequence
  Synthetic oligonucleotide
ttagttcactgggacggggaaaacgcatgtg

SEQ ID NO: 107142 - DNA, 30 bp, Artificial Sequence
  Synthetic oligonucleotide
cccatacaccacaggatccgcgtgcatgtg

SEQ ID NO: 107143 - DNA, 30 bp, Artificial Sequence
  Synthetic oligonucleotide
ctgagttcgccgttttgcattgtgcatgtg

SEQ ID NO: 107144 - DNA, 30 bp, Artificial Sequence
  Synthetic oligonucleotide
gatagcataccagggtacgcgcgcgatgtg

SEQ ID NO: 107145 - DNA, 30 bp, Artificial Sequence
  Synthetic oligonucleotide
gttcagggcggtttgtcggtagcctatgtg

SEQ ID NO: 107146 - DNA, 30 bp, Artificial Sequence
  Synthetic oligonucleotide
aacggtcaatcaggtactcttgagtatgtg

SEQ ID NO: 107147 - DNA, 30 bp, Artificial Sequence
  Synthetic oligonucleotide
gtgcactaaggtaataccgcctcgtatgtg

SEQ ID NO: 107148 - DNA, 30 bp, Artificial Sequence
  Synthetic oligonucleotide
tgacggggtgaaaacgttcttgcaactgtg

SEQ ID NO: 107149 - DNA, 30 bp, Artificial Sequence
  Synthetic oligonucleotide
cacggtcaaggttgtcaccggcccactgtg

SEQ ID NO: 107150 - DNA, 30 bp, Artificial Sequence
  Synthetic oligonucleotide
ccaacatcccgacattacaatatcactgtg

SEQ ID NO: 107151 - DNA, 30 bp, Artificial Sequence
  Synthetic oligonucleotide
tccgatggcgttcggggaaaccagcctgtg

SEQ ID NO: 107152 - DNA, 30 bp, Artificial Sequence
  Synthetic oligonucleotide
ccacgagctagcgttcgtctgtcatctgtg

SEQ ID NO: 107153 - DNA, 30 bp, Artificial Sequence
  Synthetic oligonucleotide
taaacaaaagttcaaaatgcacgatctgtg

SEQ ID NO: 107154 - DNA, 30 bp, Artificial Sequence
  Synthetic oligonucleotide
aacaacgaaggtcatgaggtggactctgtg

SEQ ID NO: 107155 - DNA, 30 bp, Artificial Sequence
  Synthetic oligonucleotide
tgtacaaacctcactagtcactattctgtg

SEQ ID NO: 107156 - DNA, 30 bp, Artificial Sequence
  Synthetic oligonucleotide
gtgggcctatttgctcataccaaaagtgtg

SEQ ID NO: 107157 - DNA, 30 bp, Artificial Sequence
  Synthetic oligonucleotide
aatacacgaactcaatgtggtgccagtgtg

SEQ ID NO: 107158 - DNA, 30 bp, Artificial Sequence
  Synthetic oligonucleotide
ggtctagaataagaatgaagttagagtgtg

SEQ ID NO: 107159 - DNA, 30 bp, Artificial Sequence
  Synthetic oligonucleotide
tagggtccgaaaagcaggcaagtgagtgtg

SEQ ID NO: 107160 - DNA, 30 bp, Artificial Sequence
  Synthetic oligonucleotide
gtgagtggggattcaccacatggaggtgtg

SEQ ID NO: 107161 - DNA, 30 bp, Artificial Sequence
  Synthetic oligonucleotide
actgtttctgagtgagaggggttcggtgtg

SEQ ID NO: 107162 - DNA, 30 bp, Artificial Sequence
  Synthetic oligonucleotide
tcaaaaagatatctatgggcaattggtgtg

SEQ ID NO: 107163 - DNA, 30 bp, Artificial Sequence
  Synthetic oligonucleotide
agctttgtcacaaccagttcgtagtgtgtg

SEQ ID NO: 107164 - DNA, 30 bp, Artificial Sequence
  Synthetic oligonucleotide
gagagtcacttcggtgaataggtgtgtgtg

SEQ ID NO: 107165 - DNA, 30 bp, Artificial Sequence
  Synthetic oligonucleotide
gtggaggtaatctgctgggggcattgtgtg

SEQ ID NO: 107166 - DNA, 30 bp, Artificial Sequence
  Synthetic oligonucleotide
cgtcataccgcaaaacctatcagaattgtg

SEQ ID NO: 107167 - DNA, 30 bp, Artificial Sequence
  Synthetic oligonucleotide
gtacgaatgcaagagcgaagaggaattgtg

SEQ ID NO: 107168 - DNA, 30 bp, Artificial Sequence
  Synthetic oligonucleotide
tgttaacaacgatatttcggactaattgtg

SEQ ID NO: 107169 - DNA, 30 bp, Artificial Sequence
  Synthetic oligonucleotide
ggactagcggtgatgggtggttatattgtg

SEQ ID NO: 107170 - DNA, 30 bp, Artificial Sequence
  Synthetic oligonucleotide
gaatgcgagtgaactgtgctcggtattgtg

SEQ ID NO: 107171 - DNA, 30 bp, Artificial Sequence
  Synthetic oligonucleotide
gtagtaccgaggaagtgtggcctacttgtg

SEQ ID NO: 107172 - DNA, 30 bp, Artificial Sequence
  Synthetic oligonucleotide
aagtgtgacaagactatcttgagagttgtg

SEQ ID NO: 107173 - DNA, 30 bp, Artificial Sequence
  Synthetic oligonucleotide
taatgaggcggcagaggatgaaacgttgtg

SEQ ID NO: 107174 - DNA, 30 bp, Artificial Sequence
  Synthetic oligonucleotide
aaaggtcaggtaaggtttgagtgtgttgtg

SEQ ID NO: 107175 - DNA, 30 bp, Artificial Sequence
  Synthetic oligonucleotide
gaaccttacgagcgatgaaaggtatttgtg

SEQ ID NO: 107176 - DNA, 30 bp, Artificial Sequence
  Synthetic oligonucleotide
ccttgacttggtgcgttgcgcttctttgtg

SEQ ID NO: 107177 - DNA, 30 bp, Artificial Sequence
  Synthetic oligonucleotide
gactgaggcgagctcaagacccgttttgtg

SEQ ID NO: 107178 - DNA, 30 bp, Artificial Sequence
  Synthetic oligonucleotide
gggcagatggtaaaaggattaggaaaattg

SEQ ID NO: 107179 - DNA, 30 bp, Artificial Sequence
  Synthetic oligonucleotide
cgtattgagtagcgttgtaacatcaaattg

SEQ ID NO: 107180 - DNA, 30 bp, Artificial Sequence
  Synthetic oligonucleotide
gttctattgaactcatcaaccgaacaattg

SEQ ID NO: 107181 - DNA, 30 bp, Artificial Sequence
  Synthetic oligonucleotide
agtaccctaacctaatttccagcacaattg

SEQ ID NO: 107182 - DNA, 30 bp, Artificial Sequence
  Synthetic oligonucleotide
acaacaggtcctagccactgtctccaattg

SEQ ID NO: 107183 - DNA, 30 bp, Artificial Sequence
  Synthetic oligonucleotide
gccacgggcggtgagtggtagttccaattg

SEQ ID NO: 107184 - DNA, 30 bp, Artificial Sequence
  Synthetic oligonucleotide
cacgtgtcatctctgtcaagccaagaattg

SEQ ID NO: 107185 - DNA, 30 bp, Artificial Sequence
  Synthetic oligonucleotide
agacatatccgacgtgtatgagctgaattg

SEQ ID NO: 107186 - DNA, 30 bp, Artificial Sequence
  Synthetic oligonucleotide
gatattggctgggaggattgctctgaattg

SEQ ID NO: 107187 - DNA, 30 bp, Artificial Sequence
  Synthetic oligonucleotide
cagtaaattgcgttttccagatgtgaattg

SEQ ID NO: 107188 - DNA, 30 bp, Artificial Sequence
  Synthetic oligonucleotide
tcatttgtgcccgttacgatcgttgaattg

SEQ ID NO: 107189 - DNA, 30 bp, Artificial Sequence
  Synthetic oligonucleotide
ggtccgcactgtaagtgagtttgataattg

SEQ ID NO: 107190 - DNA, 30 bp, Artificial Sequence
  Synthetic oligonucleotide
taagatgtaagggatctaagtttataattg

SEQ ID NO: 107191 - DNA, 30 bp, Artificial Sequence
  Synthetic oligonucleotide
cagatgcggcagacctgtatgctctaattg

SEQ ID NO: 107192 - DNA, 30 bp, Artificial Sequence
  Synthetic oligonucleotide
ctatgctggaagctacggtggaagtaattg

SEQ ID NO: 107193 - DNA, 30 bp, Artificial Sequence
  Synthetic oligonucleotide
ttacgtggtctttttcgcggaacgacattg

SEQ ID NO: 107194 - DNA, 30 bp, Artificial Sequence
  Synthetic oligonucleotide
tcgtagacacattctagactgcaaccattg

SEQ ID NO: 107195 - DNA, 30 bp, Artificial Sequence
  Synthetic oligonucleotide
gtctccccgcacatagcatttagaccattg

SEQ ID NO: 107196 - DNA, 30 bp, Artificial Sequence
  Synthetic oligonucleotide
cgtatacaagtcatcgatgtactcgcattg

SEQ ID NO: 107197 - DNA, 30 bp, Artificial Sequence
  Synthetic oligonucleotide
gagatctcggggaaagatttcaaggcattg

SEQ ID NO: 107198 - DNA, 30 bp, Artificial Sequence
  Synthetic oligonucleotide
tcgtggtcaaaggggaagagtttggcattg

SEQ ID NO: 107199 - DNA, 30 bp, Artificial Sequence
  Synthetic oligonucleotide
aagtagagttaaaagctgcgacgatcattg

SEQ ID NO: 107200 - DNA, 30 bp, Artificial Sequence
  Synthetic oligonucleotide
ttagatagaacatagagctcagcaagattg

SEQ ID NO: 107201 - DNA, 30 bp, Artificial Sequence
  Synthetic oligonucleotide
cacgtgggactagggggtagtgcaagattg

SEQ ID NO: 107202 - DNA, 30 bp, Artificial Sequence
  Synthetic oligonucleotide
ctcggcgactgaccctgcagggtaagattg

SEQ ID NO: 107203 - DNA, 30 bp, Artificial Sequence
  Synthetic oligonucleotide
gacgctagtccggaatgcacgagcagattg

SEQ ID NO: 107204 - DNA, 30 bp, Artificial Sequence
  Synthetic oligonucleotide
gggttccagacctaggcaaatctgagattg

SEQ ID NO: 107205 - DNA, 30 bp, Artificial Sequence
  Synthetic oligonucleotide
aatgtccatatccatcaatcataacgattg

SEQ ID NO: 107206 - DNA, 30 bp, Artificial Sequence
  Synthetic oligonucleotide
ctcggaattcctagtacatatccgggattg

SEQ ID NO: 107207 - DNA, 30 bp, Artificial Sequence
  Synthetic oligonucleotide
ctgacagtgaaaacacctcacaggggattg

SEQ ID NO: 107208 - DNA, 30 bp, Artificial Sequence
  Synthetic oligonucleotide
gctaactcgtagtgccgagatcgtggattg

SEQ ID NO: 107209 - DNA, 30 bp, Artificial Sequence
  Synthetic oligonucleotide
ctccctaacgcccagcaagcgtattgattg

SEQ ID NO: 107210 - DNA, 30 bp, Artificial Sequence
  Synthetic oligonucleotide
gtcagagccggtggtagtgtatggatattg

SEQ ID NO: 107211 - DNA, 30 bp, Artificial Sequence
  Synthetic oligonucleotide
caagggtattgcgcacgaatgacgctattg

SEQ ID NO: 107212 - DNA, 30 bp, Artificial Sequence
  Synthetic oligonucleotide
taacgtttaaagtgtatgtggttgctattg

SEQ ID NO: 107213 - DNA, 30 bp, Artificial Sequence
  Synthetic oligonucleotide
catggactacccagaaagtgatccgtattg

SEQ ID NO: 107214 - DNA, 30 bp, Artificial Sequence
  Synthetic oligonucleotide
acattcacttaatgcgaacagaacttattg

SEQ ID NO: 107215 - DNA, 30 bp, Artificial Sequence
  Synthetic oligonucleotide
gagctattgacaggggacggaacccacttg

SEQ ID NO: 107216 - DNA, 30 bp, Artificial Sequence
  Synthetic oligonucleotide
gctgcatcaacgtaggaatgcagcgacttg

SEQ ID NO: 107217 - DNA, 30 bp, Artificial Sequence
  Synthetic oligonucleotide
gctggacatcgcccacgcgtgacttacttg

SEQ ID NO: 107218 - DNA, 30 bp, Artificial Sequence
  Synthetic oligonucleotide
atctggagtgcctcgaggaaattaaccttg

SEQ ID NO: 107219 - DNA, 30 bp, Artificial Sequence
  Synthetic oligonucleotide
tacagattgactctagagccacccaccttg

SEQ ID NO: 107220 - DNA, 30 bp, Artificial Sequence
  Synthetic oligonucleotide
ccatcggaagacttagcttcactcaccttg

SEQ ID NO: 107221 - DNA, 30 bp, Artificial Sequence
  Synthetic oligonucleotide
attatcctcaattatcgaaatgcacccttg

SEQ ID NO: 107222 - DNA, 30 bp, Artificial Sequence
  Synthetic oligonucleotide
cagtataactaagcgcgaaaagagcccttg

SEQ ID NO: 107223 - DNA, 30 bp, Artificial Sequence
  Synthetic oligonucleotide
tcatggtctcgtactagggtaaaagccttg

SEQ ID NO: 107224 - DNA, 30 bp, Artificial Sequence
  Synthetic oligonucleotide
tgaatgagcacgcatgagtaacaggccttg

SEQ ID NO: 107225 - DNA, 30 bp, Artificial Sequence
  Synthetic oligonucleotide
tctgcgaagaaatcgcagacttcggccttg

SEQ ID NO: 107226 - DNA, 30 bp, Artificial Sequence
  Synthetic oligonucleotide
tctgcggtcccgactatctctcgggccttg

SEQ ID NO: 107227 - DNA, 30 bp, Artificial Sequence
  Synthetic oligonucleotide
gccgagaacggttggctagatgtggccttg

SEQ ID NO: 107228 - DNA, 30 bp, Artificial Sequence
  Synthetic oligonucleotide
ggtccacctcaagaaagactacttagcttg

SEQ ID NO: 107229 - DNA, 30 bp, Artificial Sequence
  Synthetic oligonucleotide
agtggcggccggctctaatacacgggcttg

SEQ ID NO: 107230 - DNA, 30 bp, Artificial Sequence
  Synthetic oligonucleotide
acggcgctggagaattagcggcggggcttg

SEQ ID NO: 107231 - DNA, 30 bp, Artificial Sequence
  Synthetic oligonucleotide
taccagctaacggaattccagagtggcttg

SEQ ID NO: 107232 - DNA, 31 bp, Artificial Sequence
  Synthetic oligonucleotide
agctcactggtgccatgtcgcggaatgcttg

SEQ ID NO: 107233 - DNA, 30 bp, Artificial Sequence
  Synthetic oligonucleotide
tatcaggatgactgaggtactcactgcttg

SEQ ID NO: 107234 - DNA, 30 bp, Artificial Sequence
  Synthetic oligonucleotide
cgttgatcttgggcgtggaactcctgcttg

SEQ ID NO: 107235 - DNA, 30 bp, Artificial Sequence
  Synthetic oligonucleotide
gttaccgtgggcggataatactcgtgcttg

SEQ ID NO: 107236 - DNA, 30 bp, Artificial Sequence
  Synthetic oligonucleotide
cgtatgcaagttttctcaggtacaatcttg

SEQ ID NO: 107237 - DNA, 30 bp, Artificial Sequence
  Synthetic oligonucleotide
agattgcttgggacatctccgctaatcttg

SEQ ID NO: 107238 - DNA, 30 bp, Artificial Sequence
  Synthetic oligonucleotide
cgtgggctatgtagccacaatcaactcttg

SEQ ID NO: 107239 - DNA, 30 bp, Artificial Sequence
  Synthetic oligonucleotide
ctacagtcagaatgagattgagtgctcttg

SEQ ID NO: 107240 - DNA, 30 bp, Artificial Sequence
  Synthetic oligonucleotide
gccgtaatcaacgcgtaggcgacagtcttg

SEQ ID NO: 107241 - DNA, 30 bp, Artificial Sequence
  Synthetic oligonucleotide
agcacgtagatggagtggtataaggtcttg

SEQ ID NO: 107242 - DNA, 30 bp, Artificial Sequence
  Synthetic oligonucleotide
tgaattgacagaaacggatatccgttcttg

SEQ ID NO: 107243 - DNA, 30 bp, Artificial Sequence
  Synthetic oligonucleotide
tcttgtgaaatgcggaattaagccaagttg

SEQ ID NO: 107244 - DNA, 30 bp, Artificial Sequence
  Synthetic oligonucleotide
tgtaaggcgctcatggcgagagcgcagttg

SEQ ID NO: 107245 - DNA, 30 bp, Artificial Sequence
  Synthetic oligonucleotide
gaggtgactggacggcattgtctggagttg

SEQ ID NO: 107246 - DNA, 30 bp, Artificial Sequence
  Synthetic oligonucleotide
gcttctgtgtaccgcacaggtgatgagttg

SEQ ID NO: 107247 - DNA, 30 bp, Artificial Sequence
  Synthetic oligonucleotide
cattaaatagcaatggtaatttgtgagttg

SEQ ID NO: 107248 - DNA, 30 bp, Artificial Sequence
  Synthetic oligonucleotide
agggactcatcctgaggatcagttgagttg

SEQ ID NO: 107249 - DNA, 30 bp, Artificial Sequence
  Synthetic oligonucleotide
tatcaccaggcccacgtgtcgaggtagttg

SEQ ID NO: 107250 - DNA, 30 bp, Artificial Sequence
  Synthetic oligonucleotide
ttgagccaagggttaacaatgagaacgttg

SEQ ID NO: 107251 - DNA, 30 bp, Artificial Sequence
  Synthetic oligonucleotide
tagcaaatggtggtgtgacagtccacgttg

SEQ ID NO: 107252 - DNA, 30 bp, Artificial Sequence
  Synthetic oligonucleotide
ggcttgcgtagaccgaacttacgcacgttg

SEQ ID NO: 107253 - DNA, 30 bp, Artificial Sequence
  Synthetic oligonucleotide
tgtataaggtgttgtacagggaacgcgttg

SEQ ID NO: 107254 - DNA, 30 bp, Artificial Sequence
  Synthetic oligonucleotide
tgcgtgagaggtcctatccggggatcgttg

SEQ ID NO: 107255 - DNA, 30 bp, Artificial Sequence
  Synthetic oligonucleotide
ggttcagcgtcgtcagagaattgctcgttg

SEQ ID NO: 107256 - DNA, 30 bp, Artificial Sequence
  Synthetic oligonucleotide
tgggaggtcaggagggaggtcatccggttg

SEQ ID NO: 107257 - DNA, 30 bp, Artificial Sequence
  Synthetic oligonucleotide
caagtattgatgtatccagctagagggttg

SEQ ID NO: 107258 - DNA, 30 bp, Artificial Sequence
  Synthetic oligonucleotide
attggtcaataggtatcgtgttgagggttg

SEQ ID NO: 107259 - DNA, 30 bp, Artificial Sequence
  Synthetic oligonucleotide
gcgacgggggtggtacggtttagggggttg

SEQ ID NO: 107260 - DNA, 30 bp, Artificial Sequence
  Synthetic oligonucleotide
gcatcggaacaacgtaagaccatggggttg

SEQ ID NO: 107261 - DNA, 30 bp, Artificial Sequence
  Synthetic oligonucleotide
cgcaggcgcgcgcgcgatttgcgatggttg

SEQ ID NO: 107262 - DNA, 30 bp, Artificial Sequence
  Synthetic oligonucleotide
aggtctaagtagcacagccattcactgttg

SEQ ID NO: 107263 - DNA, 30 bp, Artificial Sequence
  Synthetic oligonucleotide
cccccatacgttgtgagcgaaaaagtgttg

SEQ ID NO: 107264 - DNA, 30 bp, Artificial Sequence
  Synthetic oligonucleotide
ttatgggtaggaatgggcgggcgtgtgttg

SEQ ID NO: 107265 - DNA, 30 bp, Artificial Sequence
  Synthetic oligonucleotide
gcgtggcagcatctagccccgcatttgttg

SEQ ID NO: 107266 - DNA, 30 bp, Artificial Sequence
  Synthetic oligonucleotide
actcaacgtacacacagcctgccaaatttg

SEQ ID NO: 107267 - DNA, 30 bp, Artificial Sequence
  Synthetic oligonucleotide
ccacaggtgtgaaagatggcacggaatttg

SEQ ID NO: 107268 - DNA, 30 bp, Artificial Sequence
  Synthetic oligonucleotide
acaaggacgtttgtgtgctgccttaatttg

SEQ ID NO: 107269 - DNA, 30 bp, Artificial Sequence
  Synthetic oligonucleotide
aaccttatacgtggcgagctccaacatttg

SEQ ID NO: 107270 - DNA, 30 bp, Artificial Sequence
  Synthetic oligonucleotide
ccagcttggtcttatgagcggcaacatttg

SEQ ID NO: 107271 - DNA, 30 bp, Artificial Sequence
  Synthetic oligonucleotide
tagtatcaaatcctcagtaaggaacatttg

SEQ ID NO: 107272 - DNA, 30 bp, Artificial Sequence
  Synthetic oligonucleotide
gtctggactaatcgaaaaccttgccatttg

SEQ ID NO: 107273 - DNA, 30 bp, Artificial Sequence
  Synthetic oligonucleotide
tgcagatagtgagagaagtgccagcatttg

SEQ ID NO: 107274 - DNA, 30 bp, Artificial Sequence
  Synthetic oligonucleotide
ttcgggcctagacggggttggaaagatttg

SEQ ID NO: 107275 - DNA, 30 bp, Artificial Sequence
  Synthetic oligonucleotide
ccgcagatcgaacataggacagaggatttg

SEQ ID NO: 107276 - DNA, 30 bp, Artificial Sequence
  Synthetic oligonucleotide
agtgcagggagcgataaacaactggatttg

SEQ ID NO: 107277 - DNA, 30 bp, Artificial Sequence
  Synthetic oligonucleotide
agagcagtaagtccaggcgtcgttgatttg

SEQ ID NO: 107278 - DNA, 30 bp, Artificial Sequence
  Synthetic oligonucleotide
acgacaaagtgggtatcatgcgacactttg

SEQ ID NO: 107279 - DNA, 30 bp, Artificial Sequence
  Synthetic oligonucleotide
ggatccgacccacgaggatgaactactttg

SEQ ID NO: 107280 - DNA, 30 bp, Artificial Sequence
  Synthetic oligonucleotide
gcgttgtcggtccgtgatctgtctcctttg

SEQ ID NO: 107281 - DNA, 30 bp, Artificial Sequence
  Synthetic oligonucleotide
acaaaggtaatccttcgaatagttcctttg

SEQ ID NO: 107282 - DNA, 30 bp, Artificial Sequence
  Synthetic oligonucleotide
agtgtggtcggagaggtgaatgaatctttg

SEQ ID NO: 107283 - DNA, 30 bp, Artificial Sequence
  Synthetic oligonucleotide
aacaagtcatcgctacgtcaatcctctttg

SEQ ID NO: 107284 - DNA, 30 bp, Artificial Sequence
  Synthetic oligonucleotide
tggcttgcagcaagcattattacaagtttg

SEQ ID NO: 107285 - DNA, 30 bp, Artificial Sequence
  Synthetic oligonucleotide
tgctaaccgccgtgccagggctgccgtttg

SEQ ID NO: 107286 - DNA, 30 bp, Artificial Sequence
  Synthetic oligonucleotide
atgccaataagggaggactccgtgcgtttg

SEQ ID NO: 107287 - DNA, 30 bp, Artificial Sequence
  Synthetic oligonucleotide
cgcgggtgaggtggtagcggctaaggtttg

SEQ ID NO: 107288 - DNA, 30 bp, Artificial Sequence
  Synthetic oligonucleotide
ggtcgtgctctaagattgatagtaggtttg

SEQ ID NO: 107289 - DNA, 30 bp, Artificial Sequence
  Synthetic oligonucleotide
cataggctaagcctacgcgtgaatggtttg

SEQ ID NO: 107290 - DNA, 30 bp, Artificial Sequence
  Synthetic oligonucleotide
tgaacagcgacatagtagtgagtatgtttg

SEQ ID NO: 107291 - DNA, 30 bp, Artificial Sequence
  Synthetic oligonucleotide
tcacactgctgtaggctaggctagtgtttg

SEQ ID NO: 107292 - DNA, 30 bp, Artificial Sequence
  Synthetic oligonucleotide
cggtgaggaaggagagtctaggggtgtttg

SEQ ID NO: 107293 - DNA, 30 bp, Artificial Sequence
  Synthetic oligonucleotide
ggttgcgtatgaagatcacgatgttgtttg

SEQ ID NO: 107294 - DNA, 30 bp, Artificial Sequence
  Synthetic oligonucleotide
gcaactgtgtgcctcaggaccatttgtttg

SEQ ID NO: 107295 - DNA, 30 bp, Artificial Sequence
  Synthetic oligonucleotide
caattatacacaaagtctcccccaattttg

SEQ ID NO: 107296 - DNA, 30 bp, Artificial Sequence
  Synthetic oligonucleotide
aatagcacggcagtctgattgcgcattttg

SEQ ID NO: 107297 - DNA, 30 bp, Artificial Sequence
  Synthetic oligonucleotide
aacggacaaaccattgccctattcattttg

SEQ ID NO: 107298 - DNA, 30 bp, Artificial Sequence
  Synthetic oligonucleotide
ccgccgcagggctagacagcgacacttttg

SEQ ID NO: 107299 - DNA, 30 bp, Artificial Sequence
  Synthetic oligonucleotide
tacaagccagaacggcattagtaccttttg

SEQ ID NO: 107300 - DNA, 30 bp, Artificial Sequence
  Synthetic oligonucleotide
ctaaaacgtcgtcgatagcaatggcttttg

SEQ ID NO: 107301 - DNA, 30 bp, Artificial Sequence
  Synthetic oligonucleotide
ggcatgattgttggggtcaacgaagttttg

SEQ ID NO: 107302 - DNA, 30 bp, Artificial Sequence
  Synthetic oligonucleotide
ggcatctctaacgtacaagaaacagttttg

SEQ ID NO: 107303 - DNA, 30 bp, Artificial Sequence
  Synthetic oligonucleotide
tgagaaggtgcgtggaggaaacgagttttg

SEQ ID NO: 107304 - DNA, 30 bp, Artificial Sequence
  Synthetic oligonucleotide
catcatgcataactgccttaataggttttg

SEQ ID NO: 107305 - DNA, 30 bp, Artificial Sequence
  Synthetic oligonucleotide
gtaagagactgaatagaacgaatggaaaat

SEQ ID NO: 107306 - DNA, 30 bp, Artificial Sequence
  Synthetic oligonucleotide
gccgtcatagaagccaattcagatgaaaat

SEQ ID NO: 107307 - DNA, 30 bp, Artificial Sequence
  Synthetic oligonucleotide
ggtaattgtgggtaccaaccacactaaaat

SEQ ID NO: 107308 - DNA, 30 bp, Artificial Sequence
  Synthetic oligonucleotide
tagcatgcgggacgggagggatagtaaaat

SEQ ID NO: 107309 - DNA, 30 bp, Artificial Sequence
  Synthetic oligonucleotide
taacgaacgcacggtccgcgggtgtaaaat

SEQ ID NO: 107310 - DNA, 30 bp, Artificial Sequence
  Synthetic oligonucleotide
ggaggtagatcgcccggtgctgattaaaat

SEQ ID NO: 107311 - DNA, 30 bp, Artificial Sequence
  Synthetic oligonucleotide
ccaaacgttacagttaaagcacgttaaaat

SEQ ID NO: 107312 - DNA, 30 bp, Artificial Sequence
  Synthetic oligonucleotide
tgacctgttgccaaacagcccgtaacaaat

SEQ ID NO: 107313 - DNA, 30 bp, Artificial Sequence
  Synthetic oligonucleotide
ggatagtcagagtgagccgacaggacaaat

SEQ ID NO: 107314 - DNA, 30 bp, Artificial Sequence
  Synthetic oligonucleotide
gggctgtgttaacaagatttttaaccaaat

SEQ ID NO: 107315 - DNA, 30 bp, Artificial Sequence
  Synthetic oligonucleotide
cggccggaagaagttacagtttgaccaaat

SEQ ID NO: 107316 - DNA, 30 bp, Artificial Sequence
  Synthetic oligonucleotide
acaaaagtaggtctattggcgataccaaat

SEQ ID NO: 107317 - DNA, 30 bp, Artificial Sequence
  Synthetic oligonucleotide
agtcgtaaccaaaatatgatatagccaaat

SEQ ID NO: 107318 - DNA, 30 bp, Artificial Sequence
  Synthetic oligonucleotide
taacggtggaagccccactagacagcaaat

SEQ ID NO: 107319 - DNA, 30 bp, Artificial Sequence
  Synthetic oligonucleotide
atttggcagacaaggaaactatcagcaaat

SEQ ID NO: 107320 - DNA, 30 bp, Artificial Sequence
  Synthetic oligonucleotide
ttaacctgaaccggtgggaagagagcaaat

SEQ ID NO: 107321 - DNA, 30 bp, Artificial Sequence
  Synthetic oligonucleotide
aagtcgatccgtgcttataggtgagcaaat

SEQ ID NO: 107322 - DNA, 30 bp, Artificial Sequence
  Synthetic oligonucleotide
caaaccgactctacgtaaaacgatgcaaat

SEQ ID NO: 107323 - DNA, 30 bp, Artificial Sequence
  Synthetic oligonucleotide
gagacagcgcctatactgagcttccgaaat

SEQ ID NO: 107324 - DNA, 30 bp, Artificial Sequence
  Synthetic oligonucleotide
ttaaggtcacatcctgcatgggatcgaaat

SEQ ID NO: 107325 - DNA, 30 bp, Artificial Sequence
  Synthetic oligonucleotide
cgtatatagctcataaaattcgagggaaat

SEQ ID NO: 107326 - DNA, 30 bp, Artificial Sequence
  Synthetic oligonucleotide
ctgtcatacaggggctgcgatccgggaaat

SEQ ID NO: 107327 - DNA, 30 bp, Artificial Sequence
  Synthetic oligonucleotide
cgaaggctactatggtgcgtttcgggaaat

SEQ ID NO: 107328 - DNA, 30 bp, Artificial Sequence
  Synthetic oligonucleotide
gaggaagtatcatacatctgatatggaaat

SEQ ID NO: 107329 - DNA, 30 bp, Artificial Sequence
  Synthetic oligonucleotide
cacgacgactccgtaaagcagaactgaaat

SEQ ID NO: 107330 - DNA, 30 bp, Artificial Sequence
  Synthetic oligonucleotide
agcaagaacagaagttactcgacctgaaat

SEQ ID NO: 107331 - DNA, 30 bp, Artificial Sequence
  Synthetic oligonucleotide
gtcagattagggacttaaaaaccactaaat

SEQ ID NO: 107332 - DNA, 30 bp, Artificial Sequence
  Synthetic oligonucleotide
gtttgtcggtaagaaaaatcctcactaaat

SEQ ID NO: 107333 - DNA, 30 bp, Artificial Sequence
  Synthetic oligonucleotide
cgaagtgcgaggacgtccctggacgtaaat

SEQ ID NO: 107334 - DNA, 30 bp, Artificial Sequence
  Synthetic oligonucleotide
cgggtacaccgaaatgggagacaattaaat

SEQ ID NO: 107335 - DNA, 30 bp, Artificial Sequence
  Synthetic oligonucleotide
cctttggaaaggcaggtgtcgagcaacaat

SEQ ID NO: 107336 - DNA, 30 bp, Artificial Sequence
  Synthetic oligonucleotide
ggttagccgggagcgtagttagagaacaat

SEQ ID NO: 107337 - DNA, 30 bp, Artificial Sequence
  Synthetic oligonucleotide
tggcatcgtgatctccgagtcattaacaat

SEQ ID NO: 107338 - DNA, 30 bp, Artificial Sequence
  Synthetic oligonucleotide
ttagagcagcatgggccacggaaacacaat

SEQ ID NO: 107339 - DNA, 30 bp, Artificial Sequence
  Synthetic oligonucleotide
ttcgctgggcaacgttgtaaagtacacaat

SEQ ID NO: 107340 - DNA, 30 bp, Artificial Sequence
  Synthetic oligonucleotide
gtcgcgggcgaacgagtccacgtgcacaat

SEQ ID NO: 107341 - DNA, 30 bp, Artificial Sequence
  Synthetic oligonucleotide
ggtatctcgcatgccaccagaggtcacaat

SEQ ID NO: 107342 - DNA, 30 bp, Artificial Sequence
  Synthetic oligonucleotide
ggccgttgccaagagcgcagggtagacaat

SEQ ID NO: 107343 - DNA, 30 bp, Artificial Sequence
  Synthetic oligonucleotide
aaccgaggatgaacgtttgccgccgacaat

SEQ ID NO: 107344 - DNA, 30 bp, Artificial Sequence
  Synthetic oligonucleotide
ggtgagaagactatgagaatgggatacaat

SEQ ID NO: 107345 - DNA, 30 bp, Artificial Sequence
  Synthetic oligonucleotide
actaaggcccacagagctaaaatatacaat

SEQ ID NO: 107346 - DNA, 30 bp, Artificial Sequence
  Synthetic oligonucleotide
gcggaatacggcgtatttttcccgaccaat

SEQ ID NO: 107347 - DNA, 30 bp, Artificial Sequence
  Synthetic oligonucleotide
aagcgtaatgacaggtcggttaggaccaat

SEQ ID NO: 107348 - DNA, 30 bp, Artificial Sequence
  Synthetic oligonucleotide
aaggggctgacatcaccgatttccgccaat

SEQ ID NO: 107349 - DNA, 30 bp, Artificial Sequence
  Synthetic oligonucleotide
cacgaaacatttcgcccacggggtgccaat

SEQ ID NO: 107350 - DNA, 30 bp, Artificial Sequence
  Synthetic oligonucleotide
gggacgacgtagggcgtctctaaaagcaat

SEQ ID NO: 107351 - DNA, 30 bp, Artificial Sequence
  Synthetic oligonucleotide
cgtatggaccggagaacttaaggaagcaat

SEQ ID NO: 107352 - DNA, 30 bp, Artificial Sequence
  Synthetic oligonucleotide
taggccggtacaattcaaggttacagcaat

SEQ ID NO: 107353 - DNA, 30 bp, Artificial Sequence
  Synthetic oligonucleotide
gccttgggaataattaaaaaggtgcgcaat

SEQ ID NO: 107354 - DNA, 30 bp, Artificial Sequence
  Synthetic oligonucleotide
gttagcgcacaaggccaggaggtgcgcaat

SEQ ID NO: 107355 - DNA, 30 bp, Artificial Sequence
  Synthetic oligonucleotide
cgattgtccattgatcgccgggaaggcaat

SEQ ID NO: 107356 - DNA, 30 bp, Artificial Sequence
  Synthetic oligonucleotide
tacttggctgtgtggcgggtctgaggcaat

SEQ ID NO: 107357 - DNA, 30 bp, Artificial Sequence
  Synthetic oligonucleotide
ggcggacaaggtacgtggagcaagtgcaat

SEQ ID NO: 107358 - DNA, 30 bp, Artificial Sequence
  Synthetic oligonucleotide
acacagagcgtaacccgggttcggtgcaat

SEQ ID NO: 107359 - DNA, 30 bp, Artificial Sequence
  Synthetic oligonucleotide
cgacatgctaaaaacgcaacgctgtgcaat

SEQ ID NO: 107360 - DNA, 30 bp, Artificial Sequence
  Synthetic oligonucleotide
tctactgaatcgttaggcgctctgtgcaat

SEQ ID NO: 107361 - DNA, 30 bp, Artificial Sequence
  Synthetic oligonucleotide
gtggcattgtggggcaggtaagttatcaat

SEQ ID NO: 107362 - DNA, 30 bp, Artificial Sequence
  Synthetic oligonucleotide
atgaaccgacagttcaagactatcctcaat

SEQ ID NO: 107363 - DNA, 30 bp, Artificial Sequence
  Synthetic oligonucleotide
caacgtaagtgaccggggctgtttctcaat

SEQ ID NO: 107364 - DNA, 30 bp, Artificial Sequence
  Synthetic oligonucleotide
gcgtcaaaaatcgatcgtgcgacagtcaat

SEQ ID NO: 107365 - DNA, 30 bp, Artificial Sequence
  Synthetic oligonucleotide
tccttcagcgaatcatagcatacagtcaat

SEQ ID NO: 107366 - DNA, 30 bp, Artificial Sequence
  Synthetic oligonucleotide
ctaaactttcctcagatactaagggtcaat

SEQ ID NO: 107367 - DNA, 30 bp, Artificial Sequence
  Synthetic oligonucleotide
acataaggtcaggataaggccggattcaat

SEQ ID NO: 107368 - DNA, 30 bp, Artificial Sequence
  Synthetic oligonucleotide
attgatacagctactaggacaccgaagaat

SEQ ID NO: 107369 - DNA, 30 bp, Artificial Sequence
  Synthetic oligonucleotide
taccacaatcgtaagtggcaattgaagaat

SEQ ID NO: 107370 - DNA, 30 bp, Artificial Sequence
  Synthetic oligonucleotide
ccaggtgataatgagcaaaagccacagaat

SEQ ID NO: 107371 - DNA, 30 bp, Artificial Sequence
  Synthetic oligonucleotide
ataaccaagaacgaggtttcagagcagaat

SEQ ID NO: 107372 - DNA, 30 bp, Artificial Sequence
  Synthetic oligonucleotide
acgtctggcttgtgataggtgcccgagaat

SEQ ID NO: 107373 - DNA, 30 bp, Artificial Sequence
  Synthetic oligonucleotide
ggtcttcggttcaaaggtttagccgagaat

SEQ ID NO: 107374 - DNA, 30 bp, Artificial Sequence
  Synthetic oligonucleotide
ggaataggagcgatagagaggtcctagaat

SEQ ID NO: 107375 - DNA, 30 bp, Artificial Sequence
  Synthetic oligonucleotide
aagtcaagaggattataggtgtcgtagaat

SEQ ID NO: 107376 - DNA, 30 bp, Artificial Sequence
  Synthetic oligonucleotide
taggcacgccctattgtacgatcttagaat

SEQ ID NO: 107377 - DNA, 30 bp, Artificial Sequence
  Synthetic oligonucleotide
caggaagaatacgcttatcgaggttagaat

SEQ ID NO: 107378 - DNA, 30 bp, Artificial Sequence
  Synthetic oligonucleotide
atcacaagcggcgtgtacactttcacgaat

SEQ ID NO: 107379 - DNA, 30 bp, Artificial Sequence
  Synthetic oligonucleotide
gtccgagtaacagtttgaatatggacgaat

SEQ ID NO: 107380 - DNA, 30 bp, Artificial Sequence
  Synthetic oligonucleotide
agcggcatcccattctacgcccctacgaat

SEQ ID NO: 107381 - DNA, 30 bp, Artificial Sequence
  Synthetic oligonucleotide
tcatgctccacgtagatacaagagccgaat

SEQ ID NO: 107382 - DNA, 30 bp, Artificial Sequence
  Synthetic oligonucleotide
aacataaggcaacaacactctgggccgaat

SEQ ID NO: 107383 - DNA, 30 bp, Artificial Sequence
  Synthetic oligonucleotide
agaagatcacataacaagccctttgcgaat

SEQ ID NO: 107384 - DNA, 30 bp, Artificial Sequence
  Synthetic oligonucleotide
ggctggcctctcaaaactacgccatcgaat

SEQ ID NO: 107385 - DNA, 30 bp, Artificial Sequence
  Synthetic oligonucleotide
ggggccagcgaatatgctatcacctcgaat

SEQ ID NO: 107386 - DNA, 30 bp, Artificial Sequence
  Synthetic oligonucleotide
atgtggttattatagtcaatcgcctcgaat

SEQ ID NO: 107387 - DNA, 30 bp, Artificial Sequence
  Synthetic oligonucleotide
acgatacgggctaagtatcagaagtcgaat

SEQ ID NO: 107388 - DNA, 30 bp, Artificial Sequence
  Synthetic oligonucleotide
ttgggggctaattcaaaaatcacgtcgaat

SEQ ID NO: 107389 - DNA, 30 bp, Artificial Sequence
  Synthetic oligonucleotide
tgagcaatattgaagtacttagacaggaat

SEQ ID NO: 107390 - DNA, 30 bp, Artificial Sequence
  Synthetic oligonucleotide
ggaattaatccagcgtgcgttgataggaat

SEQ ID NO: 107391 - DNA, 30 bp, Artificial Sequence
  Synthetic oligonucleotide
aaaacaagctgcaatatgttgcctaggaat

SEQ ID NO: 107392 - DNA, 30 bp, Artificial Sequence
  Synthetic oligonucleotide
aagtgcggcgagctccaacgtcttaggaat

SEQ ID NO: 107393 - DNA, 30 bp, Artificial Sequence
  Synthetic oligonucleotide
atgaggaagtcatcttccgcccgtcggaat

SEQ ID NO: 107394 - DNA, 30 bp, Artificial Sequence
  Synthetic oligonucleotide
ccttcctgcatggcgagggtacgggggaat

SEQ ID NO: 107395 - DNA, 30 bp, Artificial Sequence
  Synthetic oligonucleotide
tacatgaggtattatgttgacatggggaat

SEQ ID NO: 107396 - DNA, 30 bp, Artificial Sequence
  Synthetic oligonucleotide
gtgggcttgttatccgagaaccgctggaat

SEQ ID NO: 107397 - DNA, 30 bp, Artificial Sequence
  Synthetic oligonucleotide
gatgaatcgtcgaaacgacaactttggaat

SEQ ID NO: 107398 - DNA, 30 bp, Artificial Sequence
  Synthetic oligonucleotide
accacctagcttcgagacatccaaatgaat

SEQ ID NO: 107399 - DNA, 30 bp, Artificial Sequence
  Synthetic oligonucleotide
caccgaattggatgacactgagatatgaat

SEQ ID NO: 107400 - DNA, 30 bp, Artificial Sequence
  Synthetic oligonucleotide
gcaagaagtgtggttgaggtatatatgaat

SEQ ID NO: 107401 - DNA, 30 bp, Artificial Sequence
  Synthetic oligonucleotide
cgacatggaaagggagatcccggtatgaat

SEQ ID NO: 107402 - DNA, 30 bp, Artificial Sequence
  Synthetic oligonucleotide
acgtatgctccgtaactatcagaactgaat

SEQ ID NO: 107403 - DNA, 30 bp, Artificial Sequence
  Synthetic oligonucleotide
aacatagtcagcagaggtgcttaactgaat

SEQ ID NO: 107404 - DNA, 30 bp, Artificial Sequence
  Synthetic oligonucleotide
aatgatacatgtcacatgggtcgactgaat

SEQ ID NO: 107405 - DNA, 30 bp, Artificial Sequence
  Synthetic oligonucleotide
acatcagtccttcaggaaacgaagctgaat

SEQ ID NO: 107406 - DNA, 30 bp, Artificial Sequence
  Synthetic oligonucleotide
aacataaatgacttcttaaaaagagtgaat

SEQ ID NO: 107407 - DNA, 30 bp, Artificial Sequence
  Synthetic oligonucleotide
ccacagttgttgtgacgtgcaccattgaat

SEQ ID NO: 107408 - DNA, 30 bp, Artificial Sequence
  Synthetic oligonucleotide
gtgtcgtgtctgtggaccaggatattgaat

SEQ ID NO: 107409 - DNA, 30 bp, Artificial Sequence
  Synthetic oligonucleotide
cctaaaaacacgcctgcgtcgcccttgaat

SEQ ID NO: 107410 - DNA, 30 bp, Artificial Sequence
  Synthetic oligonucleotide
ctccgtacccctagccaaagagtcttgaat

SEQ ID NO: 107411 - DNA, 30 bp, Artificial Sequence
  Synthetic oligonucleotide
accatcccacaatgcgtgattttcttgaat

SEQ ID NO: 107412 - DNA, 30 bp, Artificial Sequence
  Synthetic oligonucleotide
caagggccgaagtacacacaacccaataat

SEQ ID NO: 107413 - DNA, 30 bp, Artificial Sequence
  Synthetic oligonucleotide
ggaccaggtagctgaggattcgggaataat

SEQ ID NO: 107414 - DNA, 30 bp, Artificial Sequence
  Synthetic oligonucleotide
aaggccggaaaaactgaagcgtttaataat

SEQ ID NO: 107415 - DNA, 30 bp, Artificial Sequence
  Synthetic oligonucleotide
tgccggtaaaacgagggagaggagcataat

SEQ ID NO: 107416 - DNA, 30 bp, Artificial Sequence
  Synthetic oligonucleotide
cgaagatatgcgggacaaggggcgcataat

SEQ ID NO: 107417 - DNA, 30 bp, Artificial Sequence
  Synthetic oligonucleotide
cagccggttagtaacggatatgaggataat

SEQ ID NO: 107418 - DNA, 30 bp, Artificial Sequence
  Synthetic oligonucleotide
aaacaaaccgtgcaactcacgtgggataat

SEQ ID NO: 107419 - DNA, 30 bp, Artificial Sequence
  Synthetic oligonucleotide
tagggtcgaggaagctcacccgtggataat

SEQ ID NO: 107420 - DNA, 30 bp, Artificial Sequence
  Synthetic oligonucleotide
cgtagacggaacgtacagttccctgataat

SEQ ID NO: 107421 - DNA, 30 bp, Artificial Sequence
  Synthetic oligonucleotide
ggccagtaccgaagtggctggacgtataat

SEQ ID NO: 107422 - DNA, 30 bp, Artificial Sequence
  Synthetic oligonucleotide
tcggtagcatggcgtcaggtgcgccctaat

SEQ ID NO: 107423 - DNA, 30 bp, Artificial Sequence
  Synthetic oligonucleotide
atggctacggagagaaataccactcctaat

SEQ ID NO: 107424 - DNA, 30 bp, Artificial Sequence
  Synthetic oligonucleotide
ggcaagatttaatatgcttactgtcctaat

SEQ ID NO: 107425 - DNA, 30 bp, Artificial Sequence
  Synthetic oligonucleotide
tggtcatgcggggcaccttgtggagctaat

SEQ ID NO: 107426 - DNA, 30 bp, Artificial Sequence
  Synthetic oligonucleotide
taaggagaattgagaataccctcatctaat

SEQ ID NO: 107427 - DNA, 30 bp, Artificial Sequence
  Synthetic oligonucleotide
gctgcgaccggggcgagtaagttatctaat

SEQ ID NO: 107428 - DNA, 30 bp, Artificial Sequence
  Synthetic oligonucleotide
cggtgtggcaatcttccaaatgcaagtaat

SEQ ID NO: 107429 - DNA, 30 bp, Artificial Sequence
  Synthetic oligonucleotide
ctatgacagaagtgggtagcatgaagtaat

SEQ ID NO: 107430 - DNA, 30 bp, Artificial Sequence
  Synthetic oligonucleotide
accgtgtgggttcagtgatgtttgagtaat

SEQ ID NO: 107431 - DNA, 30 bp, Artificial Sequence
  Synthetic oligonucleotide
aacgagtcgagattaggagggggtggtaat

SEQ ID NO: 107432 - DNA, 30 bp, Artificial Sequence
  Synthetic oligonucleotide
aggctagcgacgttttatctgggtggtaat

SEQ ID NO: 107433 - DNA, 30 bp, Artificial Sequence
  Synthetic oligonucleotide
tgtgacttaggacaaatacatgatcttaat

SEQ ID NO: 107434 - DNA, 30 bp, Artificial Sequence
  Synthetic oligonucleotide
acgcgactagagagtcggcgttcagttaat

SEQ ID NO: 107435 - DNA, 30 bp, Artificial Sequence
  Synthetic oligonucleotide
tactactaactagcgcgcggaggctttaat

SEQ ID NO: 107436 - DNA, 30 bp, Artificial Sequence
  Synthetic oligonucleotide
aggttgcaccacggtcaacactgctttaat

SEQ ID NO: 107437 - DNA, 30 bp, Artificial Sequence
  Synthetic oligonucleotide
ccgggccaagcacgcctccaaacgtttaat

SEQ ID NO: 107438 - DNA, 30 bp, Artificial Sequence
  Synthetic oligonucleotide
tagcgttagcgccgactgggcattaaacat

SEQ ID NO: 107439 - DNA, 30 bp, Artificial Sequence
  Synthetic oligonucleotide
agaaacggtcgctgtgtcgtccttaaacat

SEQ ID NO: 107440 - DNA, 30 bp, Artificial Sequence
  Synthetic oligonucleotide
gtggtgtcgagtaccgtgctggcacaacat

SEQ ID NO: 107441 - DNA, 30 bp, Artificial Sequence
  Synthetic oligonucleotide
aaagagtgaaattgaaacggattacaacat

SEQ ID NO: 107442 - DNA, 30 bp, Artificial Sequence
  Synthetic oligonucleotide
ccaaaatagggagctgccatgcaccaacat

SEQ ID NO: 107443 - DNA, 30 bp, Artificial Sequence
  Synthetic oligonucleotide
catgacggcggcggaagagaacgccaacat

SEQ ID NO: 107444 - DNA, 30 bp, Artificial Sequence
  Synthetic oligonucleotide
tgagctggctaaggggcacgatgccaacat

SEQ ID NO: 107445 - DNA, 30 bp, Artificial Sequence
  Synthetic oligonucleotide
tcgtttgaatcgggcggacctgggcaacat

SEQ ID NO: 107446 - DNA, 30 bp, Artificial Sequence
  Synthetic oligonucleotide
gaagagcagggcaagatcacccccgaacat

SEQ ID NO: 107447 - DNA, 30 bp, Artificial Sequence
  Synthetic oligonucleotide
caaatccttccgtaagcaagagtcgaacat

SEQ ID NO: 107448 - DNA, 30 bp, Artificial Sequence
  Synthetic oligonucleotide
tgttgcgtgggagcgcatggtaaggaacat

SEQ ID NO: 107449 - DNA, 30 bp, Artificial Sequence
  Synthetic oligonucleotide
ccgctatcgatactagatcctgcggaacat

SEQ ID NO: 107450 - DNA, 30 bp, Artificial Sequence
  Synthetic oligonucleotide
caatcggctacgacctgaattgcggaacat

SEQ ID NO: 107451 - DNA, 30 bp, Artificial Sequence
  Synthetic oligonucleotide
tgtcatgcgggacaactagctctggaacat

SEQ ID NO: 107452 - DNA, 30 bp, Artificial Sequence
  Synthetic oligonucleotide
aggtctgcgacaagcctgtaagcataacat

SEQ ID NO: 107453 - DNA, 31 bp, Artificial Sequence
  Synthetic oligonucleotide
actgcagccaaagctccaagcaggataacat

SEQ ID NO: 107454 - DNA, 30 bp, Artificial Sequence
  Synthetic oligonucleotide
gaagaatgtcaagagcacggtgggtaacat

SEQ ID NO: 107455 - DNA, 30 bp, Artificial Sequence
  Synthetic oligonucleotide
agaggcatctgggccgtcaaatgaccacat

SEQ ID NO: 107456 - DNA, 30 bp, Artificial Sequence
  Synthetic oligonucleotide
gggtaacacgtatctaatcggaaagcacat

SEQ ID NO: 107457 - DNA, 30 bp, Artificial Sequence
  Synthetic oligonucleotide
cgacctctattaaagagcgatgtagcacat

SEQ ID NO: 107458 - DNA, 30 bp, Artificial Sequence
  Synthetic oligonucleotide
ctaacgctataatgggcgtaaagggcacat

SEQ ID NO: 107459 - DNA, 30 bp, Artificial Sequence
  Synthetic oligonucleotide
tggggaggtgtaccagtcgcatgggcacat

SEQ ID NO: 107460 - DNA, 30 bp, Artificial Sequence
  Synthetic oligonucleotide
ccggcggaattggcgaagtcgtctgcacat

SEQ ID NO: 107461 - DNA, 30 bp, Artificial Sequence
  Synthetic oligonucleotide
tgcaacgaaccagcgtccgagagctcacat

SEQ ID NO: 107462 - DNA, 30 bp, Artificial Sequence
  Synthetic oligonucleotide
acgcggtagcctgtttattcaatctcacat

SEQ ID NO: 107463 - DNA, 30 bp, Artificial Sequence
  Synthetic oligonucleotide
ctcgagcaaattagaacccgaaccggacat

SEQ ID NO: 107464 - DNA, 30 bp, Artificial Sequence
  Synthetic oligonucleotide
atagtcaactgtagtacggaacccggacat

SEQ ID NO: 107465 - DNA, 30 bp, Artificial Sequence
  Synthetic oligonucleotide
tttggaacactgctctaaagcaatggacat

SEQ ID NO: 107466 - DNA, 30 bp, Artificial Sequence
  Synthetic oligonucleotide
tgacacggaacggttttatagaatggacat

SEQ ID NO: 107467 - DNA, 30 bp, Artificial Sequence
  Synthetic oligonucleotide
tgcaagtaggatacatcgttcggaatacat

SEQ ID NO: 107468 - DNA, 30 bp, Artificial Sequence
  Synthetic oligonucleotide
cggacctaagagggtcatcgtgtcatacat

SEQ ID NO: 107469 - DNA, 30 bp, Artificial Sequence
  Synthetic oligonucleotide
gtggagttatggttccagggccaactacat

SEQ ID NO: 107470 - DNA, 30 bp, Artificial Sequence
  Synthetic oligonucleotide
ggcgtgaggtgacttaatgagccactacat

SEQ ID NO: 107471 - DNA, 30 bp, Artificial Sequence
  Synthetic oligonucleotide
tccttggggataatatcaacgtcgctacat

SEQ ID NO: 107472 - DNA, 30 bp, Artificial Sequence
  Synthetic oligonucleotide
gcataggggtgcaaagtcccatttgtacat

SEQ ID NO: 107473 - DNA, 30 bp, Artificial Sequence
  Synthetic oligonucleotide
gtttcgactgagtgtaagcccacaaaccat

SEQ ID NO: 107474 - DNA, 30 bp, Artificial Sequence
  Synthetic oligonucleotide
gagcgcagagcataaaagtacgctcaccat

SEQ ID NO: 107475 - DNA, 30 bp, Artificial Sequence
  Synthetic oligonucleotide
gctgcgaatagctggaggttgtaagaccat

SEQ ID NO: 107476 - DNA, 30 bp, Artificial Sequence
  Synthetic oligonucleotide
caaacgtcgcacgggcaaactatttaccat

SEQ ID NO: 107477 - DNA, 30 bp, Artificial Sequence
  Synthetic oligonucleotide
aaagggccgactgttcctctttcaacccat

SEQ ID NO: 107478 - DNA, 30 bp, Artificial Sequence
  Synthetic oligonucleotide
tcagataaatacgggtaacaagggacccat

SEQ ID NO: 107479 - DNA, 30 bp, Artificial Sequence
  Synthetic oligonucleotide
cggtaagccccacaaaaccctggtacccat

SEQ ID NO: 107480 - DNA, 30 bp, Artificial Sequence
  Synthetic oligonucleotide
cgagaatcgggaaccacggcattcgcccat

SEQ ID NO: 107481 - DNA, 29 bp, Artificial Sequence
  Synthetic oligonucleotide
cgtatagcgtgatccgattagtggcccat

SEQ ID NO: 107482 - DNA, 30 bp, Artificial Sequence
  Synthetic oligonucleotide
tacactagtccaattacagtaagatcccat

SEQ ID NO: 107483 - DNA, 30 bp, Artificial Sequence
  Synthetic oligonucleotide
aacgagcgagttatcgctcaacacagccat

SEQ ID NO: 107484 - DNA, 30 bp, Artificial Sequence
  Synthetic oligonucleotide
gtgacacacacggaggatagtacccgccat

SEQ ID NO: 107485 - DNA, 30 bp, Artificial Sequence
  Synthetic oligonucleotide
catgctcactcatatttcaggctcggccat

SEQ ID NO: 107486 - DNA, 30 bp, Artificial Sequence
  Synthetic oligonucleotide
cggacacttatgggagcagatctcggccat

SEQ ID NO: 107487 - DNA, 30 bp, Artificial Sequence
  Synthetic oligonucleotide
tgatttcaccggtaggaagtaaagggccat

SEQ ID NO: 107488 - DNA, 30 bp, Artificial Sequence
  Synthetic oligonucleotide
tgcaaggcaagcagacagaatccgtgccat

SEQ ID NO: 107489 - DNA, 30 bp, Artificial Sequence
  Synthetic oligonucleotide
acaaattataaatccaagggtacaatccat

SEQ ID NO: 107490 - DNA, 30 bp, Artificial Sequence
  Synthetic oligonucleotide
agcggcatcactatgagatgcgatatccat

SEQ ID NO: 107491 - DNA, 30 bp, Artificial Sequence
  Synthetic oligonucleotide
gcttgatgatggggtaagaaagtcctccat

SEQ ID NO: 107492 - DNA, 30 bp, Artificial Sequence
  Synthetic oligonucleotide
tgtctcgacaggacggaaggttggctccat

SEQ ID NO: 107493 - DNA, 30 bp, Artificial Sequence
  Synthetic oligonucleotide
tacagtgtaacagtgaaagaggcagtccat

SEQ ID NO: 107494 - DNA, 30 bp, Artificial Sequence
  Synthetic oligonucleotide
gacaagtgtcgtggacgagagtttttccat

SEQ ID NO: 107495 - DNA, 30 bp, Artificial Sequence
  Synthetic oligonucleotide
aaggttattaaatcaatgaccgaaaagcat

SEQ ID NO: 107496 - DNA, 30 bp, Artificial Sequence
  Synthetic oligonucleotide
tcggtagtgtgacgtaattcgccaaagcat

SEQ ID NO: 107497 - DNA, 30 bp, Artificial Sequence
  Synthetic oligonucleotide
agagaggtcatttcgctacatctcaagcat

SEQ ID NO: 107498 - DNA, 30 bp, Artificial Sequence
  Synthetic oligonucleotide
tcgtaactagacccaatcctcggtaagcat

SEQ ID NO: 107499 - DNA, 30 bp, Artificial Sequence
  Synthetic oligonucleotide
tgctaagacatggtgacatgtagacagcat

SEQ ID NO: 107500 - DNA, 30 bp, Artificial Sequence
  Synthetic oligonucleotide
agctgtggttgcaggggacctcccgagcat

SEQ ID NO: 107501 - DNA, 30 bp, Artificial Sequence
  Synthetic oligonucleotide
actgagcgggtagcgaaacatgaggagcat

SEQ ID NO: 107502 - DNA, 30 bp, Artificial Sequence
  Synthetic oligonucleotide
tccagaggcgcgggatggtatgtatagcat

SEQ ID NO: 107503 - DNA, 30 bp, Artificial Sequence
  Synthetic oligonucleotide
aggaactgggcaaagtcattttctacgcat

SEQ ID NO: 107504 - DNA, 30 bp, Artificial Sequence
  Synthetic oligonucleotide
atcaaagtatggagaactctcgtgtcgcat

SEQ ID NO: 107505 - DNA, 30 bp, Artificial Sequence
  Synthetic oligonucleotide
gtcgcacttactttttagtccaacaggcat

SEQ ID NO: 107506 - DNA, 30 bp, Artificial Sequence
  Synthetic oligonucleotide
gggccacgcgtcacaagaatgtcgaggcat

SEQ ID NO: 107507 - DNA, 30 bp, Artificial Sequence
  Synthetic oligonucleotide
actcgagatcgaatacaagggcggaggcat

SEQ ID NO: 107508 - DNA, 30 bp, Artificial Sequence
  Synthetic oligonucleotide
ctataaaatccgcgaaaccaactgaggcat

SEQ ID NO: 107509 - DNA, 30 bp, Artificial Sequence
  Synthetic oligonucleotide
ggtatgggagaatttcagacagcccggcat

SEQ ID NO: 107510 - DNA, 30 bp, Artificial Sequence
  Synthetic oligonucleotide
cggtgttatgttaaacaagatgagcggcat

SEQ ID NO: 107511 - DNA, 30 bp, Artificial Sequence
  Synthetic oligonucleotide
tccaaagtgacacagttgcttaacgggcat

SEQ ID NO: 107512 - DNA, 30 bp, Artificial Sequence
  Synthetic oligonucleotide
ttcgaataaaagggtctaggtcaaatgcat

SEQ ID NO: 107513 - DNA, 30 bp, Artificial Sequence
  Synthetic oligonucleotide
agggatactcattactaaaagataatgcat

SEQ ID NO: 107514 - DNA, 30 bp, Artificial Sequence
  Synthetic oligonucleotide
taaggggcgtaagataccctctacctgcat

SEQ ID NO: 107515 - DNA, 30 bp, Artificial Sequence
  Synthetic oligonucleotide
tgaacctcagttactagcgttagcttgcat

SEQ ID NO: 107516 - DNA, 30 bp, Artificial Sequence
  Synthetic oligonucleotide
taaacataaaacgctgcgtagggcaatcat

SEQ ID NO: 107517 - DNA, 30 bp, Artificial Sequence
  Synthetic oligonucleotide
cctcgtagggtcaccgcacccgcgcatcat

SEQ ID NO: 107518 - DNA, 30 bp, Artificial Sequence
  Synthetic oligonucleotide
atagcgttagcagacatggcagatcatcat

SEQ ID NO: 107519 - DNA, 30 bp, Artificial Sequence
  Synthetic oligonucleotide
gcataaacgtctggtgtaccagaagatcat

SEQ ID NO: 107520 - DNA, 30 bp, Artificial Sequence
  Synthetic oligonucleotide
gagccgtatacaaagaggaatacggatcat

SEQ ID NO: 107521 - DNA, 30 bp, Artificial Sequence
  Synthetic oligonucleotide
cagggtgccacacctaggcacgcggatcat

SEQ ID NO: 107522 - DNA, 30 bp, Artificial Sequence
  Synthetic oligonucleotide
aaacactgcatacggtgaagtagggatcat

SEQ ID NO: 107523 - DNA, 30 bp, Artificial Sequence
  Synthetic oligonucleotide
tcggggttgcgaagaggcaaagttgatcat

SEQ ID NO: 107524 - DNA, 30 bp, Artificial Sequence
  Synthetic oligonucleotide
cgaataaggaggtgggaacgacgacctcat

SEQ ID NO: 107525 - DNA, 30 bp, Artificial Sequence
  Synthetic oligonucleotide
atacgtatcgcgagcagcgcactacctcat

SEQ ID NO: 107526 - DNA, 30 bp, Artificial Sequence
  Synthetic oligonucleotide
actgactaaaacttgtgtgatccgcctcat

SEQ ID NO: 107527 - DNA, 30 bp, Artificial Sequence
  Synthetic oligonucleotide
tacaacggccaacatccacttccgcctcat

SEQ ID NO: 107528 - DNA, 30 bp, Artificial Sequence
  Synthetic oligonucleotide
ttgttggggaaacacccgattagtagtcat

SEQ ID NO: 107529 - DNA, 30 bp, Artificial Sequence
  Synthetic oligonucleotide
tattatcggaattcgcaaacccttagtcat

SEQ ID NO: 107530 - DNA, 30 bp, Artificial Sequence
  Synthetic oligonucleotide
gagccataaacaaacaaactggcacgtcat

SEQ ID NO: 107531 - DNA, 30 bp, Artificial Sequence
  Synthetic oligonucleotide
agcttcaataggatgccacacgtccgtcat

SEQ ID NO: 107532 - DNA, 30 bp, Artificial Sequence
  Synthetic oligonucleotide
tggctaacaggatgttaggtaggaggtcat

SEQ ID NO: 107533 - DNA, 30 bp, Artificial Sequence
  Synthetic oligonucleotide
actgcacctaacggaatgcttggaggtcat

SEQ ID NO: 107534 - DNA, 30 bp, Artificial Sequence
  Synthetic oligonucleotide
cagtcacagacggttgtggggaggggtcat

SEQ ID NO: 107535 - DNA, 30 bp, Artificial Sequence
  Synthetic oligonucleotide
cataatgatgtggatgtcgttgggtgtcat

SEQ ID NO: 107536 - DNA, 30 bp, Artificial Sequence
  Synthetic oligonucleotide
tgggctccacaatcaacgtacaaacttcat

SEQ ID NO: 107537 - DNA, 30 bp, Artificial Sequence
  Synthetic oligonucleotide
ggacggctgtttagccaactatgacttcat

SEQ ID NO: 107538 - DNA, 31 bp, Artificial Sequence
  Synthetic oligonucleotide
caatcgtggtcatacaggaggttagtttcat

SEQ ID NO: 107539 - DNA, 34 bp, Artificial Sequence
  Synthetic oligonucleotide
gatactagaccaccacgtgtccctcagaaaagat

SEQ ID NO: 107540 - DNA, 30 bp, Artificial Sequence
  Synthetic oligonucleotide
tgctcccgagcgttagggtaaagcaaagat

SEQ ID NO: 107541 - DNA, 30 bp, Artificial Sequence
  Synthetic oligonucleotide
ttatgagaggttacttgccaggggaaagat

SEQ ID NO: 107542 - DNA, 30 bp, Artificial Sequence
  Synthetic oligonucleotide
attcgacagaggaccaggcagaggcaagat

SEQ ID NO: 107543 - DNA, 30 bp, Artificial Sequence
  Synthetic oligonucleotide
agctcgtaggatggaacgtgggatcaagat

SEQ ID NO: 107544 - DNA, 30 bp, Artificial Sequence
  Synthetic oligonucleotide
acctggcgtgctatggattgtagtcaagat

SEQ ID NO: 107545 - DNA, 30 bp, Artificial Sequence
  Synthetic oligonucleotide
tctctcagcacactagcagatgaggaagat

SEQ ID NO: 107546 - DNA, 30 bp, Artificial Sequence
  Synthetic oligonucleotide
aaggcgtctcagccctgtttttaggaagat

SEQ ID NO: 107547 - DNA, 30 bp, Artificial Sequence
  Synthetic oligonucleotide
gcggattaaggtctgagtgaggcataagat

SEQ ID NO: 107548 - DNA, 30 bp, Artificial Sequence
  Synthetic oligonucleotide
agtcccgacagagatttgaagctgtaagat

SEQ ID NO: 107549 - DNA, 30 bp, Artificial Sequence
  Synthetic oligonucleotide
aaatggtggaggcccttgagtggttaagat

SEQ ID NO: 107550 - DNA, 30 bp, Artificial Sequence
  Synthetic oligonucleotide
taatacttcctacgaaacaccgcaacagat

SEQ ID NO: 107551 - DNA, 30 bp, Artificial Sequence
  Synthetic oligonucleotide
ccaatgaggagtcgcgactaacccacagat

SEQ ID NO: 107552 - DNA, 30 bp, Artificial Sequence
  Synthetic oligonucleotide
gttaactgggtgataaggaaatgcacagat

SEQ ID NO: 107553 - DNA, 30 bp, Artificial Sequence
  Synthetic oligonucleotide
tatggatctcggcgccggagttcgacagat

SEQ ID NO: 107554 - DNA, 30 bp, Artificial Sequence
  Synthetic oligonucleotide
cggtcccctcattcaataaataggacagat

SEQ ID NO: 107555 - DNA, 30 bp, Artificial Sequence
  Synthetic oligonucleotide
gtcacggtatcaccgggtacatgaccagat

SEQ ID NO: 107556 - DNA, 30 bp, Artificial Sequence
  Synthetic oligonucleotide
gctgatctaagctggttcattttaccagat

SEQ ID NO: 107557 - DNA, 30 bp, Artificial Sequence
  Synthetic oligonucleotide
agtaaggagcactacgtagcgccgccagat

SEQ ID NO: 107558 - DNA, 30 bp, Artificial Sequence
  Synthetic oligonucleotide
tctcaatgaaaatcggcgatacggccagat

SEQ ID NO: 107559 - DNA, 30 bp, Artificial Sequence
  Synthetic oligonucleotide
agtagtgcattcacgtcgctggggccagat

SEQ ID NO: 107560 - DNA, 30 bp, Artificial Sequence
  Synthetic oligonucleotide
agaagcgttactacgccttgtatgccagat

SEQ ID NO: 107561 - DNA, 30 bp, Artificial Sequence
  Synthetic oligonucleotide
ggtcgtacgcacgtggtgcctctgccagat

SEQ ID NO: 107562 - DNA, 30 bp, Artificial Sequence
  Synthetic oligonucleotide
agtatctaaagtaacatcatgggtccagat

SEQ ID NO: 107563 - DNA, 30 bp, Artificial Sequence
  Synthetic oligonucleotide
gccccggatagcaaccaacaatacgcagat

SEQ ID NO: 107564 - DNA, 30 bp, Artificial Sequence
  Synthetic oligonucleotide
gaatcggggatacggccatcgggcgcagat

SEQ ID NO: 107565 - DNA, 30 bp, Artificial Sequence
  Synthetic oligonucleotide
gaggggttaccctacacttcatgctcagat

SEQ ID NO: 107566 - DNA, 30 bp, Artificial Sequence
  Synthetic oligonucleotide
cgtctgtcttattccacacgtcaaagagat

SEQ ID NO: 107567 - DNA, 30 bp, Artificial Sequence
  Synthetic oligonucleotide
acgggagtccgtagaggttgagcaagagat

SEQ ID NO: 107568 - DNA, 30 bp, Artificial Sequence
  Synthetic oligonucleotide
tagagcccaaccgggggacaaatcagagat

SEQ ID NO: 107569 - DNA, 30 bp, Artificial Sequence
  Synthetic oligonucleotide
aggcattcggttttcggggggtgtagagat

SEQ ID NO: 107570 - DNA, 30 bp, Artificial Sequence
  Synthetic oligonucleotide
tgagaagtaaatagatgggacttacgagat

SEQ ID NO: 107571 - DNA, 30 bp, Artificial Sequence
  Synthetic oligonucleotide
aggcgctgggagagattggcattaggagat

SEQ ID NO: 107572 - DNA, 30 bp, Artificial Sequence
  Synthetic oligonucleotide
tccggcgaaagcgatcatattgactgagat

SEQ ID NO: 107573 - DNA, 30 bp, Artificial Sequence
  Synthetic oligonucleotide
gggcgaatgtcctgacatacttattgagat

SEQ ID NO: 107574 - DNA, 30 bp, Artificial Sequence
  Synthetic oligonucleotide
gtaagggagccttaagttagtaaaatagat

SEQ ID NO: 107575 - DNA, 30 bp, Artificial Sequence
  Synthetic oligonucleotide
gcctctcgcagttggcacgacccaatagat

SEQ ID NO: 107576 - DNA, 30 bp, Artificial Sequence
  Synthetic oligonucleotide
ggctcatgcgttgctgggcggcgaatagat

SEQ ID NO: 107577 - DNA, 30 bp, Artificial Sequence
  Synthetic oligonucleotide
gcagggagcaccgaggaagcactaatagat

SEQ ID NO: 107578 - DNA, 30 bp, Artificial Sequence
  Synthetic oligonucleotide
cgctgtaacgagtatcagagcttaatagat

SEQ ID NO: 107579 - DNA, 30 bp, Artificial Sequence
  Synthetic oligonucleotide
gtaggacttcgagaggtaaggccgatagat

SEQ ID NO: 107580 - DNA, 30 bp, Artificial Sequence
  Synthetic oligonucleotide
gtacagggttatggggccaccaggatagat

SEQ ID NO: 107581 - DNA, 30 bp, Artificial Sequence
  Synthetic oligonucleotide
ggaccaactggacggaataaccttctagat

SEQ ID NO: 107582 - DNA, 30 bp, Artificial Sequence
  Synthetic oligonucleotide
taacagagacattaatatgcacgtgtagat

SEQ ID NO: 107583 - DNA, 30 bp, Artificial Sequence
  Synthetic oligonucleotide
ctggcgcatttggaatctgagagcttagat

SEQ ID NO: 107584 - DNA, 30 bp, Artificial Sequence
  Synthetic oligonucleotide
tgtaaaaccggtgtccggagtgtaaacgat

SEQ ID NO: 107585 - DNA, 31 bp, Artificial Sequence
  Synthetic oligonucleotide
atgcctactatccgaccaacctcgcaacgat

SEQ ID NO: 107586 - DNA, 30 bp, Artificial Sequence
  Synthetic oligonucleotide
cacaagcatctgccatgagcaattcacgat

SEQ ID NO: 107587 - DNA, 30 bp, Artificial Sequence
  Synthetic oligonucleotide
ctaacggtgagtcgggtgcggcaagacgat

SEQ ID NO: 107588 - DNA, 30 bp, Artificial Sequence
  Synthetic oligonucleotide
tcggtgtgagacattccgcacagggacgat

SEQ ID NO: 107589 - DNA, 30 bp, Artificial Sequence
  Synthetic oligonucleotide
actaaaggtttgccacgttatcagaccgat

SEQ ID NO: 107590 - DNA, 30 bp, Artificial Sequence
  Synthetic oligonucleotide
cgtcccgatggccaagcggctgtacccgat

SEQ ID NO: 107591 - DNA, 30 bp, Artificial Sequence
  Synthetic oligonucleotide
tccgtaatatggatacgatataacgccgat

SEQ ID NO: 107592 - DNA, 30 bp, Artificial Sequence
  Synthetic oligonucleotide
gacattatgtataggacagtacacgccgat

SEQ ID NO: 107593 - DNA, 30 bp, Artificial Sequence
  Synthetic oligonucleotide
agggaacgggattttgagaaggcaagcgat

SEQ ID NO: 107594 - DNA, 31 bp, Artificial Sequence
  Synthetic oligonucleotide
tcctaggcctggatcgataaacagtagcgat

SEQ ID NO: 107595 - DNA, 30 bp, Artificial Sequence
  Synthetic oligonucleotide
ccagggacggtactagactgaactggcgat

SEQ ID NO: 107596 - DNA, 30 bp, Artificial Sequence
  Synthetic oligonucleotide
ctagatccgaggtcagtcagcgcctgcgat

SEQ ID NO: 107597 - DNA, 30 bp, Artificial Sequence
  Synthetic oligonucleotide
agtgcaaacagtataattgcatcctgcgat

SEQ ID NO: 107598 - DNA, 30 bp, Artificial Sequence
  Synthetic oligonucleotide
gaaagtgaagggttgggtcaaagttgcgat

SEQ ID NO: 107599 - DNA, 30 bp, Artificial Sequence
  Synthetic oligonucleotide
tggtcgacactaggacagtccgccatcgat

SEQ ID NO: 107600 - DNA, 30 bp, Artificial Sequence
  Synthetic oligonucleotide
cgggaaatgtaggaacgtactgacctcgat

SEQ ID NO: 107601 - DNA, 30 bp, Artificial Sequence
  Synthetic oligonucleotide
cagtagcgtcgctcgatatcgcggctcgat

SEQ ID NO: 107602 - DNA, 30 bp, Artificial Sequence
  Synthetic oligonucleotide
cgttggtaactacgtccgcaatcagtcgat

SEQ ID NO: 107603 - DNA, 29 bp, Artificial Sequence
  Synthetic oligonucleotide
tccaatgcacattgagagaaggagtcgat

SEQ ID NO: 107604 - DNA, 30 bp, Artificial Sequence
  Synthetic oligonucleotide
aagacacgccgatttagcggattcgtcgat

SEQ ID NO: 107605 - DNA, 30 bp, Artificial Sequence
  Synthetic oligonucleotide
aggagctctaaagtctcattcaaattcgat

SEQ ID NO: 107606 - DNA, 30 bp, Artificial Sequence
  Synthetic oligonucleotide
aaatcaattcataaacgatgaatattcgat

SEQ ID NO: 107607 - DNA, 30 bp, Artificial Sequence
  Synthetic oligonucleotide
gagaaagaaagtctagtacagttattcgat

SEQ ID NO: 107608 - DNA, 30 bp, Artificial Sequence
  Synthetic oligonucleotide
cggcgtcagtcctgcagtagaaccttcgat

SEQ ID NO: 107609 - DNA, 30 bp, Artificial Sequence
  Synthetic oligonucleotide
acagggagttaacggaactcgataaaggat

SEQ ID NO: 107610 - DNA, 30 bp, Artificial Sequence
  Synthetic oligonucleotide
tctttgccggagtgcgttaagaggaaggat

SEQ ID NO: 107611 - DNA, 30 bp, Artificial Sequence
  Synthetic oligonucleotide
cgaaggaaatcaacctgctcggggaaggat

SEQ ID NO: 107612 - DNA, 30 bp, Artificial Sequence
  Synthetic oligonucleotide
acaccgacccaccttaacgcagttaaggat

SEQ ID NO: 107613 - DNA, 30 bp, Artificial Sequence
  Synthetic oligonucleotide
cgcaagggtagggcaggccgtcaacaggat

SEQ ID NO: 107614 - DNA, 30 bp, Artificial Sequence
  Synthetic oligonucleotide
tgcttgtggcgcgttggtgccgtccaggat

SEQ ID NO: 107615 - DNA, 30 bp, Artificial Sequence
  Synthetic oligonucleotide
caagtctaggcacggtccaatgtccaggat

SEQ ID NO: 107616 - DNA, 30 bp, Artificial Sequence
  Synthetic oligonucleotide
ggtgataaatgacaaagaattacgcaggat

SEQ ID NO: 107617 - DNA, 30 bp, Artificial Sequence
  Synthetic oligonucleotide
cccaatgacggggaagtggtacaagaggat

SEQ ID NO: 107618 - DNA, 30 bp, Artificial Sequence
  Synthetic oligonucleotide
gttatcctgcgtgtccaagcccccgaggat

SEQ ID NO: 107619 - DNA, 30 bp, Artificial Sequence
  Synthetic oligonucleotide
cctctattcaagtcggatacaagataggat

SEQ ID NO: 107620 - DNA, 30 bp, Artificial Sequence
  Synthetic oligonucleotide
atcgggctcataccatgaaggggataggat

SEQ ID NO: 107621 - DNA, 30 bp, Artificial Sequence
  Synthetic oligonucleotide
cacgcagacacagctcgtgatgcctaggat

SEQ ID NO: 107622 - DNA, 30 bp, Artificial Sequence
  Synthetic oligonucleotide
cctgtgaaagatttaagtggattaccggat

SEQ ID NO: 107623 - DNA, 30 bp, Artificial Sequence
  Synthetic oligonucleotide
gaaagatgagggaactgtttactgtcggat

SEQ ID NO: 107624 - DNA, 30 bp, Artificial Sequence
  Synthetic oligonucleotide
caagcataatacagtgaccggttttcggat

SEQ ID NO: 107625 - DNA, 30 bp, Artificial Sequence
  Synthetic oligonucleotide
tatactcaacagccacgggtaaaaagggat

SEQ ID NO: 107626 - DNA, 30 bp, Artificial Sequence
  Synthetic oligonucleotide
tagacgaccgtctccgtggcgaggagggat

SEQ ID NO: 107627 - DNA, 30 bp, Artificial Sequence
  Synthetic oligonucleotide
aatagggattgacaacgagtcccacgggat

SEQ ID NO: 107628 - DNA, 30 bp, Artificial Sequence
  Synthetic oligonucleotide
gcgagtgcacgcagttaactggtccgggat

SEQ ID NO: 107629 - DNA, 30 bp, Artificial Sequence
  Synthetic oligonucleotide
tacttcgattaggtggagtgcataggggat

SEQ ID NO: 107630 - DNA, 30 bp, Artificial Sequence
  Synthetic oligonucleotide
ggccaggtacgagacatgagtcgtggggat

SEQ ID NO: 107631 - DNA, 30 bp, Artificial Sequence
  Synthetic oligonucleotide
acaggaagacaattactacttgggtgggat

SEQ ID NO: 107632 - DNA, 30 bp, Artificial Sequence
  Synthetic oligonucleotide
gcgcagtttgaacgagaggatcccatggat

SEQ ID NO: 107633 - DNA, 30 bp, Artificial Sequence
  Synthetic oligonucleotide
cgatttgggatggtcaaggtgggcatggat

SEQ ID NO: 107634 - DNA, 30 bp, Artificial Sequence
  Synthetic oligonucleotide
acctggcgcccttgaccgcaaacggtggat

SEQ ID NO: 107635 - DNA, 30 bp, Artificial Sequence
  Synthetic oligonucleotide
gacgataagccccgtgtggatgtattggat

SEQ ID NO: 107636 - DNA, 30 bp, Artificial Sequence
  Synthetic oligonucleotide
aagctattgcgccgaacgtacggaaatgat

SEQ ID NO: 107637 - DNA, 30 bp, Artificial Sequence
  Synthetic oligonucleotide
gtgtggagacgaaggacagcggtaaatgat

SEQ ID NO: 107638 - DNA, 30 bp, Artificial Sequence
  Synthetic oligonucleotide
tcacacaggtcgggcacagttgtcaatgat

SEQ ID NO: 107639 - DNA, 30 bp, Artificial Sequence
  Synthetic oligonucleotide
actttcgataacaaggtgggtcagaatgat

SEQ ID NO: 107640 - DNA, 30 bp, Artificial Sequence
  Synthetic oligonucleotide
tgccaatcatgtggatcaaggtagaatgat

SEQ ID NO: 107641 - DNA, 30 bp, Artificial Sequence
  Synthetic oligonucleotide
attgtccagccaaaaatgtagcgagatgat

SEQ ID NO: 107642 - DNA, 30 bp, Artificial Sequence
  Synthetic oligonucleotide
cggtccggtgattcaaataggtgcgatgat

SEQ ID NO: 107643 - DNA, 30 bp, Artificial Sequence
  Synthetic oligonucleotide
gcgcacggttgttcaagcaaataggatgat

SEQ ID NO: 107644 - DNA, 30 bp, Artificial Sequence
  Synthetic oligonucleotide
acccaaatcaagcgtatcatgtgggatgat

SEQ ID NO: 107645 - DNA, 30 bp, Artificial Sequence
  Synthetic oligonucleotide
ggaaagactttcaccgcacgaaggactgat

SEQ ID NO: 107646 - DNA, 30 bp, Artificial Sequence
  Synthetic oligonucleotide
ggtcagcagatttggcgagagttgactgat

SEQ ID NO: 107647 - DNA, 30 bp, Artificial Sequence
  Synthetic oligonucleotide
aagacacgggaacgttcatccagtactgat

SEQ ID NO: 107648 - DNA, 30 bp, Artificial Sequence
  Synthetic oligonucleotide
cccaaaggtaaggtgtccgtgtcgcctgat

SEQ ID NO: 107649 - DNA, 30 bp, Artificial Sequence
  Synthetic oligonucleotide
gtgtaagttcaaagggactgatgggctgat

SEQ ID NO: 107650 - DNA, 30 bp, Artificial Sequence
  Synthetic oligonucleotide
gtgcgatctaaagcacactacttaagtgat

SEQ ID NO: 107651 - DNA, 30 bp, Artificial Sequence
  Synthetic oligonucleotide
ccgtttagggcaggattacacaagagtgat

SEQ ID NO: 107652 - DNA, 30 bp, Artificial Sequence
  Synthetic oligonucleotide
ttcgtgctcagagaggcgtgttagagtgat

SEQ ID NO: 107653 - DNA, 30 bp, Artificial Sequence
  Synthetic oligonucleotide
gtctcgggtagccgtatacatgtgagtgat

SEQ ID NO: 107654 - DNA, 30 bp, Artificial Sequence
  Synthetic oligonucleotide
ctcagaacagacgatactaaaactagtgat

SEQ ID NO: 107655 - DNA, 30 bp, Artificial Sequence
  Synthetic oligonucleotide
acgaaacactttagcatgcctcaccgtgat

SEQ ID NO: 107656 - DNA, 30 bp, Artificial Sequence
  Synthetic oligonucleotide
gcgcatcttacgctcggaactccaggtgat

SEQ ID NO: 107657 - DNA, 30 bp, Artificial Sequence
  Synthetic oligonucleotide
gcttatggggccgtcaaagcggaatgtgat

SEQ ID NO: 107658 - DNA, 31 bp, Artificial Sequence
  Synthetic oligonucleotide
ttcctaccgactcgaggttgacagagttgat

SEQ ID NO: 107659 - DNA, 30 bp, Artificial Sequence
  Synthetic oligonucleotide
gcggttagggcgcaagcctacgtagttgat

SEQ ID NO: 107660 - DNA, 30 bp, Artificial Sequence
  Synthetic oligonucleotide
cttcatcgcggataagactagtgggttgat

SEQ ID NO: 107661 - DNA, 30 bp, Artificial Sequence
  Synthetic oligonucleotide
aagcgttagctctcgagggcaccaaaatat

SEQ ID NO: 107662 - DNA, 30 bp, Artificial Sequence
  Synthetic oligonucleotide
tagacaaggggttcgattcagccaaaatat

SEQ ID NO: 107663 - DNA, 30 bp, Artificial Sequence
  Synthetic oligonucleotide
caagtcagcagagaggtcggccccaaatat

SEQ ID NO: 107664 - DNA, 30 bp, Artificial Sequence
  Synthetic oligonucleotide
tcgttccagtgaaccacagaagccaaatat

SEQ ID NO: 107665 - DNA, 30 bp, Artificial Sequence
  Synthetic oligonucleotide
acggagcaaaactcgtaggcgaaccaatat

SEQ ID NO: 107666 - DNA, 30 bp, Artificial Sequence
  Synthetic oligonucleotide
tagatgggagtcggacacgcgcaggaatat

SEQ ID NO: 107667 - DNA, 30 bp, Artificial Sequence
  Synthetic oligonucleotide
cctgtgggccgatagcaaaggaaataatat

SEQ ID NO: 107668 - DNA, 30 bp, Artificial Sequence
  Synthetic oligonucleotide
tcttaggcctatttgagactatagacatat

SEQ ID NO: 107669 - DNA, 30 bp, Artificial Sequence
  Synthetic oligonucleotide
tgatggggatggatcgattgctatacatat

SEQ ID NO: 107670 - DNA, 30 bp, Artificial Sequence
  Synthetic oligonucleotide
gctaaaggatcccacgtcaagcatgcatat

SEQ ID NO: 107671 - DNA, 29 bp, Artificial Sequence
  Synthetic oligonucleotide
acatgcgcccataggtaatcagtgcatat

SEQ ID NO: 107672 - DNA, 30 bp, Artificial Sequence
  Synthetic oligonucleotide
gccacaactaggcgagccgacaggtcatat

SEQ ID NO: 107673 - DNA, 30 bp, Artificial Sequence
  Synthetic oligonucleotide
tgaacgatctgcctcgcagtgcggtcatat

SEQ ID NO: 107674 - DNA, 30 bp, Artificial Sequence
  Synthetic oligonucleotide
agcaatagggagtttgaattagagagatat

SEQ ID NO: 107675 - DNA, 30 bp, Artificial Sequence
  Synthetic oligonucleotide
cagcgtgtgaatattgacaggattcgatat

SEQ ID NO: 107676 - DNA, 30 bp, Artificial Sequence
  Synthetic oligonucleotide
agggagctgcggatagaggagcaaggatat

SEQ ID NO: 107677 - DNA, 31 bp, Artificial Sequence
  Synthetic oligonucleotide
tcgaacgttactaaggtatgggagaggatat

SEQ ID NO: 107678 - DNA, 30 bp, Artificial Sequence
  Synthetic oligonucleotide
tgggaactgcgtatggaacaatgaggatat

SEQ ID NO: 107679 - DNA, 30 bp, Artificial Sequence
  Synthetic oligonucleotide
agctgcaaggtttgtcgtgtcggcggatat

SEQ ID NO: 107680 - DNA, 30 bp, Artificial Sequence
  Synthetic oligonucleotide
accgatagaacctccgccggccggggatat

SEQ ID NO: 107681 - DNA, 30 bp, Artificial Sequence
  Synthetic oligonucleotide
cgatctcgatgctaatctaagacatgatat

SEQ ID NO: 107682 - DNA, 30 bp, Artificial Sequence
  Synthetic oligonucleotide
ctgacaacaaccgaaagaccctagtgatat

SEQ ID NO: 107683 - DNA, 30 bp, Artificial Sequence
  Synthetic oligonucleotide
tggtgtcgattagggagaaattggtgatat

SEQ ID NO: 107684 - DNA, 30 bp, Artificial Sequence
  Synthetic oligonucleotide
acgattgacgttgggtaaacttcttgatat

SEQ ID NO: 107685 - DNA, 30 bp, Artificial Sequence
  Synthetic oligonucleotide
taaagggacacagtgaatggattcatatat

SEQ ID NO: 107686 - DNA, 30 bp, Artificial Sequence
  Synthetic oligonucleotide
gaacgcgacagtagggtgacccagatatat

SEQ ID NO: 107687 - DNA, 30 bp, Artificial Sequence
  Synthetic oligonucleotide
ggttacaggaatgccgaatgataactatat

SEQ ID NO: 107688 - DNA, 30 bp, Artificial Sequence
  Synthetic oligonucleotide
agcctttgggcacaagctgctagcctatat

SEQ ID NO: 107689 - DNA, 30 bp, Artificial Sequence
  Synthetic oligonucleotide
acgatacctacaccgtgaatggtgctatat

SEQ ID NO: 107690 - DNA, 30 bp, Artificial Sequence
  Synthetic oligonucleotide
tgccaacgggaagattgacaagcgaactat

SEQ ID NO: 107691 - DNA, 30 bp, Artificial Sequence
  Synthetic oligonucleotide
gatacttggcaaagccttgagtggcactat

SEQ ID NO: 107692 - DNA, 30 bp, Artificial Sequence
  Synthetic oligonucleotide
tagcgaagcgtggcccacgagatgcactat

SEQ ID NO: 107693 - DNA, 30 bp, Artificial Sequence
  Synthetic oligonucleotide
gacggagtcctcaggggcgccgtagactat

SEQ ID NO: 107694 - DNA, 30 bp, Artificial Sequence
  Synthetic oligonucleotide
aggtgaagccgggccgttgtacacgactat

SEQ ID NO: 107695 - DNA, 30 bp, Artificial Sequence
  Synthetic oligonucleotide
tcaaccgaattgcaaaccacgttcgactat

SEQ ID NO: 107696 - DNA, 30 bp, Artificial Sequence
  Synthetic oligonucleotide
atcgcgctggttaatacaaactgggactat

SEQ ID NO: 107697 - DNA, 30 bp, Artificial Sequence
  Synthetic oligonucleotide
gagacatcgcgcagacatcgaacatactat

SEQ ID NO: 107698 - DNA, 30 bp, Artificial Sequence
  Synthetic oligonucleotide
tctggagtaagatcgaaaacccggtactat

SEQ ID NO: 107699 - DNA, 30 bp, Artificial Sequence
  Synthetic oligonucleotide
cgacgacagagaagacagggggcagcctat

SEQ ID NO: 107700 - DNA, 30 bp, Artificial Sequence
  Synthetic oligonucleotide
atggtaacaaacgatcaggttatgtcctat

SEQ ID NO: 107701 - DNA, 30 bp, Artificial Sequence
  Synthetic oligonucleotide
ttgttgtgttctcgttttgtgttttcctat

SEQ ID NO: 107702 - DNA, 30 bp, Artificial Sequence
  Synthetic oligonucleotide
cctcaggaaggaagtatacctagcagctat

SEQ ID NO: 107703 - DNA, 30 bp, Artificial Sequence
  Synthetic oligonucleotide
acgactctaatcgtcggtgacgaaggctat

SEQ ID NO: 107704 - DNA, 30 bp, Artificial Sequence
  Synthetic oligonucleotide
tcagagtcgaggcagtggacttatggctat

SEQ ID NO: 107705 - DNA, 30 bp, Artificial Sequence
  Synthetic oligonucleotide
tgaacaacgttaaatgtcgattgctgctat

SEQ ID NO: 107706 - DNA, 30 bp, Artificial Sequence
  Synthetic oligonucleotide
tcctgaataggaccgtgcgtattactctat

SEQ ID NO: 107707 - DNA, 30 bp, Artificial Sequence
  Synthetic oligonucleotide
tggcgattaggaagcaatacatacctctat

SEQ ID NO: 107708 - DNA, 30 bp, Artificial Sequence
  Synthetic oligonucleotide
acttgtcatgggttgggagttatggtctat

SEQ ID NO: 107709 - DNA, 30 bp, Artificial Sequence
  Synthetic oligonucleotide
aagaatcaacacggtataggctataagtat

SEQ ID NO: 107710 - DNA, 30 bp, Artificial Sequence
  Synthetic oligonucleotide
ttcttccgattcattaacgtccaccagtat

SEQ ID NO: 107711 - DNA, 30 bp, Artificial Sequence
  Synthetic oligonucleotide
acgcattgcagatatgtagggcaccagtat

SEQ ID NO: 107712 - DNA, 30 bp, Artificial Sequence
  Synthetic oligonucleotide
agcagggggaccagggacaggagccagtat

SEQ ID NO: 107713 - DNA, 30 bp, Artificial Sequence
  Synthetic oligonucleotide
gcgcagagaggtaaaacaaaggggcagtat

SEQ ID NO: 107714 - DNA, 30 bp, Artificial Sequence
  Synthetic oligonucleotide
gtccaaaagaatgcaagattaatagagtat

SEQ ID NO: 107715 - DNA, 30 bp, Artificial Sequence
  Synthetic oligonucleotide
atagcaacattatagagttagagcgagtat

SEQ ID NO: 107716 - DNA, 30 bp, Artificial Sequence
  Synthetic oligonucleotide
gggcaccacattctatcgtgctcaacgtat

SEQ ID NO: 107717 - DNA, 30 bp, Artificial Sequence
  Synthetic oligonucleotide
caggttccgtatagtagactcgagacgtat

SEQ ID NO: 107718 - DNA, 30 bp, Artificial Sequence
  Synthetic oligonucleotide
gaccgattgtgacgtaaaatgacgacgtat

SEQ ID NO: 107719 - DNA, 30 bp, Artificial Sequence
  Synthetic oligonucleotide
tggatcctcgcaaagtatagaccgacgtat

SEQ ID NO: 107720 - DNA, 30 bp, Artificial Sequence
  Synthetic oligonucleotide
ttggctattattgtaacaagtcaagcgtat

SEQ ID NO: 107721 - DNA, 30 bp, Artificial Sequence
  Synthetic oligonucleotide
cagcttaagtgagggacaaggctagcgtat

SEQ ID NO: 107722 - DNA, 30 bp, Artificial Sequence
  Synthetic oligonucleotide
caagaatcgtttggggtggcggtagcgtat

SEQ ID NO: 107723 - DNA, 30 bp, Artificial Sequence
  Synthetic oligonucleotide
ggaccatataaaaaaggcagatacgcgtat

SEQ ID NO: 107724 - DNA, 30 bp, Artificial Sequence
  Synthetic oligonucleotide
taatatagctaggatcaaggcaatgcgtat

SEQ ID NO: 107725 - DNA, 30 bp, Artificial Sequence
  Synthetic oligonucleotide
cgaggctagcgtagtcgacagatatcgtat

SEQ ID NO: 107726 - DNA, 30 bp, Artificial Sequence
  Synthetic oligonucleotide
gaaaaggctagtttcaaaagacgaaggtat

SEQ ID NO: 107727 - DNA, 30 bp, Artificial Sequence
  Synthetic oligonucleotide
agaggtcctacgaggtcgagtcacaggtat

SEQ ID NO: 107728 - DNA, 30 bp, Artificial Sequence
  Synthetic oligonucleotide
agaacatgcagtccgtgagaggataggtat

SEQ ID NO: 107729 - DNA, 30 bp, Artificial Sequence
  Synthetic oligonucleotide
ggactgtgtgggggtgtgaatgttcggtat

SEQ ID NO: 107730 - DNA, 30 bp, Artificial Sequence
  Synthetic oligonucleotide
aatagtacaggaaaatccagactagggtat

SEQ ID NO: 107731 - DNA, 30 bp, Artificial Sequence
  Synthetic oligonucleotide
gggctggtaaagtgatgtgtcggggggtat

SEQ ID NO: 107732 - DNA, 30 bp, Artificial Sequence
  Synthetic oligonucleotide
ccggtaaaatgaacccgggcaaacatgtat

SEQ ID NO: 107733 - DNA, 30 bp, Artificial Sequence
  Synthetic oligonucleotide
gctagtcacaggtaagccagtcacatgtat

SEQ ID NO: 107734 - DNA, 30 bp, Artificial Sequence
  Synthetic oligonucleotide
agcttagatgtctcggcgtagaccatgtat

SEQ ID NO: 107735 - DNA, 30 bp, Artificial Sequence
  Synthetic oligonucleotide
tcgcaaggatgcatcggattagcactgtat

SEQ ID NO: 107736 - DNA, 30 bp, Artificial Sequence
  Synthetic oligonucleotide
aggttagcgcgtgcgtgtaaccaggtgtat

SEQ ID NO: 107737 - DNA, 30 bp, Artificial Sequence
  Synthetic oligonucleotide
aacggcgcgtatggtaggcgttcggtgtat

SEQ ID NO: 107738 - DNA, 30 bp, Artificial Sequence
  Synthetic oligonucleotide
tcttatctgttgtgttttactcttgtgtat

SEQ ID NO: 107739 - DNA, 30 bp, Artificial Sequence
  Synthetic oligonucleotide
agaatgttgtatgctggtggactgaattat

SEQ ID NO: 107740 - DNA, 30 bp, Artificial Sequence
  Synthetic oligonucleotide
cacaccactaaaatctctcgcggtcattat

SEQ ID NO: 107741 - DNA, 30 bp, Artificial Sequence
  Synthetic oligonucleotide
ggatggtcaagagataaagtagcggattat

SEQ ID NO: 107742 - DNA, 30 bp, Artificial Sequence
  Synthetic oligonucleotide
ctcatgagcccaaaggaaacgctatattat

SEQ ID NO: 107743 - DNA, 30 bp, Artificial Sequence
  Synthetic oligonucleotide
aataggggctcagaataaaccgattattat

SEQ ID NO: 107744 - DNA, 30 bp, Artificial Sequence
  Synthetic oligonucleotide
cgacccccgagaggtcacgctccgacttat

SEQ ID NO: 107745 - DNA, 30 bp, Artificial Sequence
  Synthetic oligonucleotide
ctccggaaataactacacacgtacccttat

SEQ ID NO: 107746 - DNA, 30 bp, Artificial Sequence
  Synthetic oligonucleotide
ccgaggcaaggtctcaagatacgcccttat

SEQ ID NO: 107747 - DNA, 30 bp, Artificial Sequence
  Synthetic oligonucleotide
ctcaagggatatcaacagtctgagccttat

SEQ ID NO: 107748 - DNA, 30 bp, Artificial Sequence
  Synthetic oligonucleotide
cagggtctgtaggtcagacaccacagttat

SEQ ID NO: 107749 - DNA, 31 bp, Artificial Sequence
  Synthetic oligonucleotide
aactacagaggggcttagcgcgggaggttat

SEQ ID NO: 107750 - DNA, 30 bp, Artificial Sequence
  Synthetic oligonucleotide
attgaaaggtcgcacgaggaacgctgttat

SEQ ID NO: 107751 - DNA, 30 bp, Artificial Sequence
  Synthetic oligonucleotide
tcggtctgacaaagcccacaatagtgttat

SEQ ID NO: 107752 - DNA, 30 bp, Artificial Sequence
  Synthetic oligonucleotide
tattagaaggggaaagtagtaacttgttat

SEQ ID NO: 107753 - DNA, 30 bp, Artificial Sequence
  Synthetic oligonucleotide
tctcgcatattagtcaagagcacaatttat

SEQ ID NO: 107754 - DNA, 30 bp, Artificial Sequence
  Synthetic oligonucleotide
taaatcgatctcatatgataagcgaaaact

SEQ ID NO: 107755 - DNA, 30 bp, Artificial Sequence
  Synthetic oligonucleotide
cgatccaagaggcaaatccgtcggaaaact

SEQ ID NO: 107756 - DNA, 30 bp, Artificial Sequence
  Synthetic oligonucleotide
aatgagaactcgaagttaagaccacaaact

SEQ ID NO: 107757 - DNA, 30 bp, Artificial Sequence
  Synthetic oligonucleotide
gtcacaaagtcctgtcaacacgagcaaact

SEQ ID NO: 107758 - DNA, 30 bp, Artificial Sequence
  Synthetic oligonucleotide
gttacaccgataacaaagctcaggcaaact

SEQ ID NO: 107759 - DNA, 30 bp, Artificial Sequence
  Synthetic oligonucleotide
ttggggccgaggctgaatacttcataaact

SEQ ID NO: 107760 - DNA, 30 bp, Artificial Sequence
  Synthetic oligonucleotide
tgaggataccgttgtcaccaatgctaaact

SEQ ID NO: 107761 - DNA, 30 bp, Artificial Sequence
  Synthetic oligonucleotide
aaatgcagataagcgtctgcgtgtacaact

SEQ ID NO: 107762 - DNA, 30 bp, Artificial Sequence
  Synthetic oligonucleotide
ggtcgcaaacgcgtgaattaacttacaact

SEQ ID NO: 107763 - DNA, 30 bp, Artificial Sequence
  Synthetic oligonucleotide
acgtgaccatctggcattgcagggccaact

SEQ ID NO: 107764 - DNA, 30 bp, Artificial Sequence
  Synthetic oligonucleotide
tgcgcctatccgcgtgggggtgaagcaact

SEQ ID NO: 107765 - DNA, 30 bp, Artificial Sequence
  Synthetic oligonucleotide
gatagcctctaactcaggatattggcaact

SEQ ID NO: 107766 - DNA, 30 bp, Artificial Sequence
  Synthetic oligonucleotide
aaataaatgtggaccaaactactcagaact

SEQ ID NO: 107767 - DNA, 30 bp, Artificial Sequence
  Synthetic oligonucleotide
acggctgatcatgacataggaacgagaact

SEQ ID NO: 107768 - DNA, 30 bp, Artificial Sequence
  Synthetic oligonucleotide
ctcatgcttcacgatctcgtaggccgaact

SEQ ID NO: 107769 - DNA, 30 bp, Artificial Sequence
  Synthetic oligonucleotide
atggaagaacagtgcctaaatcagggaact

SEQ ID NO: 107770 - DNA, 30 bp, Artificial Sequence
  Synthetic oligonucleotide
aaagagaaggtgcgtaatttaggctgaact

SEQ ID NO: 107771 - DNA, 30 bp, Artificial Sequence
  Synthetic oligonucleotide
gctcaaaaatatgcggccgggatgtgaact

SEQ ID NO: 107772 - DNA, 30 bp, Artificial Sequence
  Synthetic oligonucleotide
taacacctacggtaggaatgaataataact

SEQ ID NO: 107773 - DNA, 30 bp, Artificial Sequence
  Synthetic oligonucleotide
atggatacataaattaggaatttaataact

SEQ ID NO: 107774 - DNA, 30 bp, Artificial Sequence
  Synthetic oligonucleotide
aatgggtatgacaggccacggaacataact

SEQ ID NO: 107775 - DNA, 30 bp, Artificial Sequence
  Synthetic oligonucleotide
aaagcaaggggggcactagtgtaactaact

SEQ ID NO: 107776 - DNA, 30 bp, Artificial Sequence
  Synthetic oligonucleotide
acgaaataatgaacgagaccggtactaact

SEQ ID NO: 107777 - DNA, 30 bp, Artificial Sequence
  Synthetic oligonucleotide
ctgaagcggatcctcaaggacagcctaact

SEQ ID NO: 107778 - DNA, 30 bp, Artificial Sequence
  Synthetic oligonucleotide
cagtgcacgggcagaagcttgagcctaact

SEQ ID NO: 107779 - DNA, 30 bp, Artificial Sequence
  Synthetic oligonucleotide
cgtcaataccgcagttaaaattacgtaact

SEQ ID NO: 107780 - DNA, 30 bp, Artificial Sequence
  Synthetic oligonucleotide
aacacaaccgtagctgggcgtgatgtaact

SEQ ID NO: 107781 - DNA, 30 bp, Artificial Sequence
  Synthetic oligonucleotide
ggtaatttgtggggagaagggtacttaact

SEQ ID NO: 107782 - DNA, 30 bp, Artificial Sequence
  Synthetic oligonucleotide
ccatctatagtacaggtccgatataacact

SEQ ID NO: 107783 - DNA, 30 bp, Artificial Sequence
  Synthetic oligonucleotide
gcaatgctcagatcagtagagacacacact

SEQ ID NO: 107784 - DNA, 30 bp, Artificial Sequence
  Synthetic oligonucleotide
caggaaacactggccagtaatcgccacact

SEQ ID NO: 107785 - DNA, 30 bp, Artificial Sequence
  Synthetic oligonucleotide
tccactgcgaaagaagttaacagtcacact

SEQ ID NO: 107786 - DNA, 30 bp, Artificial Sequence
  Synthetic oligonucleotide
cgaagcgtcgagctggcactccgtcacact

SEQ ID NO: 107787 - DNA, 30 bp, Artificial Sequence
  Synthetic oligonucleotide
agggattgcacaccgaggatgcagtacact

SEQ ID NO: 107788 - DNA, 30 bp, Artificial Sequence
  Synthetic oligonucleotide
acgttatactgatgcccaattaattacact

SEQ ID NO: 107789 - DNA, 30 bp, Artificial Sequence
  Synthetic oligonucleotide
ggaacaataatggtccgtgaaggcaccact

SEQ ID NO: 107790 - DNA, 30 bp, Artificial Sequence
  Synthetic oligonucleotide
actcggaaaagcgaatgtcaaaaccccact

SEQ ID NO: 107791 - DNA, 30 bp, Artificial Sequence
  Synthetic oligonucleotide
aaccagccgatcataagtaaacaccccact

SEQ ID NO: 107792 - DNA, 30 bp, Artificial Sequence
  Synthetic oligonucleotide
ttgtgtatggctcggctatagctagccact

SEQ ID NO: 107793 - DNA, 30 bp, Artificial Sequence
  Synthetic oligonucleotide
aagcaatgctctcaggtagagggatccact

SEQ ID NO: 107794 - DNA, 30 bp, Artificial Sequence
  Synthetic oligonucleotide
caaccatacgtacgacacttacagtccact

SEQ ID NO: 107795 - DNA, 30 bp, Artificial Sequence
  Synthetic oligonucleotide
ggaccgagttaagacagtatcgattccact

SEQ ID NO: 107796 - DNA, 30 bp, Artificial Sequence
  Synthetic oligonucleotide
ggtacggtaggtgccactctataaagcact

SEQ ID NO: 107797 - DNA, 30 bp, Artificial Sequence
  Synthetic oligonucleotide
aatcagtaagcacggatagcggtaagcact

SEQ ID NO: 107798 - DNA, 30 bp, Artificial Sequence
  Synthetic oligonucleotide
actggcccgacgttcactaacgatagcact

SEQ ID NO: 107799 - DNA, 30 bp, Artificial Sequence
  Synthetic oligonucleotide
agtccctggaaggacactagtgcgggcact

SEQ ID NO: 107800 - DNA, 30 bp, Artificial Sequence
  Synthetic oligonucleotide
cctgcaatacccacaacaataccaatcact

SEQ ID NO: 107801 - DNA, 30 bp, Artificial Sequence
  Synthetic oligonucleotide
gagatagccctgtgacgccacgctatcact

SEQ ID NO: 107802 - DNA, 30 bp, Artificial Sequence
  Synthetic oligonucleotide
cagccatatcctactggtctgagtatcact

SEQ ID NO: 107803 - DNA, 30 bp, Artificial Sequence
  Synthetic oligonucleotide
gcgcacgtccctgtttgtcacaagctcact

SEQ ID NO: 107804 - DNA, 30 bp, Artificial Sequence
  Synthetic oligonucleotide
tgtgagacgatacgggaggggacaaagact

SEQ ID NO: 107805 - DNA, 30 bp, Artificial Sequence
  Synthetic oligonucleotide
gtgcggcgaaagtgcatgggctttaagact

SEQ ID NO: 107806 - DNA, 30 bp, Artificial Sequence
  Synthetic oligonucleotide
atgaggagacgtctacgtgagtaagagact

SEQ ID NO: 107807 - DNA, 30 bp, Artificial Sequence
  Synthetic oligonucleotide
gtcgggaaggtgcacggcaatcaatagact

SEQ ID NO: 107808 - DNA, 30 bp, Artificial Sequence
  Synthetic oligonucleotide
ttatggtcgacggacgtttcccattagact

SEQ ID NO: 107809 - DNA, 30 bp, Artificial Sequence
  Synthetic oligonucleotide
ctcggagagcgtgataaccggtttccgact

SEQ ID NO: 107810 - DNA, 30 bp, Artificial Sequence
  Synthetic oligonucleotide
gtggatagccggttccgtgagactgcgact

SEQ ID NO: 107811 - DNA, 30 bp, Artificial Sequence
  Synthetic oligonucleotide
tgcgcacctactaacttatgtaaatcgact

SEQ ID NO: 107812 - DNA, 30 bp, Artificial Sequence
  Synthetic oligonucleotide
taacgccgaccgaatctatacctatcgact

SEQ ID NO: 107813 - DNA, 30 bp, Artificial Sequence
  Synthetic oligonucleotide
gaaggtgacccaggcattgtatgccggact

SEQ ID NO: 107814 - DNA, 30 bp, Artificial Sequence
  Synthetic oligonucleotide
ggtggagaaccggagccgtggtcgcggact

SEQ ID NO: 107815 - DNA, 30 bp, Artificial Sequence
  Synthetic oligonucleotide
gatcaacctacgagatggggacaggggact

SEQ ID NO: 107816 - DNA, 30 bp, Artificial Sequence
  Synthetic oligonucleotide
gacggaaggttgcctaattaatatgggact

SEQ ID NO: 107817 - DNA, 30 bp, Artificial Sequence
  Synthetic oligonucleotide
ccaacaaatgagggctacgaagaaatgact

SEQ ID NO: 107818 - DNA, 30 bp, Artificial Sequence
  Synthetic oligonucleotide
taaggggccatctaactatgtcaactgact

SEQ ID NO: 107819 - DNA, 30 bp, Artificial Sequence
  Synthetic oligonucleotide
acgtcagtcctgtggccctccgtggtgact

SEQ ID NO: 107820 - DNA, 30 bp, Artificial Sequence
  Synthetic oligonucleotide
accggcgctggtccaccaaaccttgtgact

SEQ ID NO: 107821 - DNA, 30 bp, Artificial Sequence
  Synthetic oligonucleotide
aacgagttgtctcaccatagcctgttgact

SEQ ID NO: 107822 - DNA, 30 bp, Artificial Sequence
  Synthetic oligonucleotide
cgaggctatggtgagttacatgcacatact

SEQ ID NO: 107823 - DNA, 30 bp, Artificial Sequence
  Synthetic oligonucleotide
catggatacgcactagtggtgagagatact

SEQ ID NO: 107824 - DNA, 30 bp, Artificial Sequence
  Synthetic oligonucleotide
ccctaagtctaacactcactacgcgatact

SEQ ID NO: 107825 - DNA, 30 bp, Artificial Sequence
  Synthetic oligonucleotide
gtgagtaaaaggggtattcgtctcgatact

SEQ ID NO: 107826 - DNA, 30 bp, Artificial Sequence
  Synthetic oligonucleotide
actctagtactagaaaacaggcagtatact

SEQ ID NO: 107827 - DNA, 30 bp, Artificial Sequence
  Synthetic oligonucleotide
aatgtcaaaaactggttgagcgagactact

SEQ ID NO: 107828 - DNA, 30 bp, Artificial Sequence
  Synthetic oligonucleotide
attggatcggcgccacccgtaggacctact

SEQ ID NO: 107829 - DNA, 30 bp, Artificial Sequence
  Synthetic oligonucleotide
ttacatgagctgaccagaactcctgctact

SEQ ID NO: 107830 - DNA, 30 bp, Artificial Sequence
  Synthetic oligonucleotide
agccagataggaggagatgaaattgctact

SEQ ID NO: 107831 - DNA, 30 bp, Artificial Sequence
  Synthetic oligonucleotide
tagcttcagtaaaagagagtgacatctact

SEQ ID NO: 107832 - DNA, 30 bp, Artificial Sequence
  Synthetic oligonucleotide
ttaggtggtggtaaagtaggccaaggtact

SEQ ID NO: 107833 - DNA, 30 bp, Artificial Sequence
  Synthetic oligonucleotide
ggcggtgtgggcagctaccaatagggtact

SEQ ID NO: 107834 - DNA, 30 bp, Artificial Sequence
  Synthetic oligonucleotide
tagtgtagtcagaaggcttgatgtggtact

SEQ ID NO: 107835 - DNA, 30 bp, Artificial Sequence
  Synthetic oligonucleotide
tgacagctgtgtgatattgcagggtgtact

SEQ ID NO: 107836 - DNA, 30 bp, Artificial Sequence
  Synthetic oligonucleotide
ggcggccgcagattcagcgactaaattact

SEQ ID NO: 107837 - DNA, 30 bp, Artificial Sequence
  Synthetic oligonucleotide
tagatcttcaatcgtagtctgggaattact

SEQ ID NO: 107838 - DNA, 30 bp, Artificial Sequence
  Synthetic oligonucleotide
agacagagggcatgatactctatacttact

SEQ ID NO: 107839 - DNA, 30 bp, Artificial Sequence
  Synthetic oligonucleotide
tgctaataaccaacaaggaacgatcttact

SEQ ID NO: 107840 - DNA, 30 bp, Artificial Sequence
  Synthetic oligonucleotide
accaactgtatcgttatgccccttcttact

SEQ ID NO: 107841 - DNA, 30 bp, Artificial Sequence
  Synthetic oligonucleotide
ggtcgcaggaggggatcatgactcgttact

SEQ ID NO: 107842 - DNA, 30 bp, Artificial Sequence
  Synthetic oligonucleotide
cacggcgcccgcgggatagacgaaaaacct

SEQ ID NO: 107843 - DNA, 30 bp, Artificial Sequence
  Synthetic oligonucleotide
ggataacacaatccgatggacatacaacct

SEQ ID NO: 107844 - DNA, 30 bp, Artificial Sequence
  Synthetic oligonucleotide
gccttcgcgagtgctttcggggaccaacct

SEQ ID NO: 107845 - DNA, 30 bp, Artificial Sequence
  Synthetic oligonucleotide
agatccgagttaatactctagtggcaacct

SEQ ID NO: 107846 - DNA, 30 bp, Artificial Sequence
  Synthetic oligonucleotide
tcgaatgtcgcttctatcgctggggaacct

SEQ ID NO: 107847 - DNA, 30 bp, Artificial Sequence
  Synthetic oligonucleotide
gcgtaacagggtactggtgcaaggtaacct

SEQ ID NO: 107848 - DNA, 30 bp, Artificial Sequence
  Synthetic oligonucleotide
gtatcgttaaataaggcagggaggtaacct

SEQ ID NO: 107849 - DNA, 30 bp, Artificial Sequence
  Synthetic oligonucleotide
gcaaatcacaatagcgtcaaacattaacct

SEQ ID NO: 107850 - DNA, 30 bp, Artificial Sequence
  Synthetic oligonucleotide
cctaaagcttaggtatcatgagggacacct

SEQ ID NO: 107851 - DNA, 30 bp, Artificial Sequence
  Synthetic oligonucleotide
acgcggaccgtgaaagccaaaccgccacct

SEQ ID NO: 107852 - DNA, 30 bp, Artificial Sequence
  Synthetic oligonucleotide
ctcaagttcacagagcgatatgcttcacct

SEQ ID NO: 107853 - DNA, 30 bp, Artificial Sequence
  Synthetic oligonucleotide
taaaaaaacgcacaacgccggcagagacct

SEQ ID NO: 107854 - DNA, 30 bp, Artificial Sequence
  Synthetic oligonucleotide
cgagtgcctatagcaggaacctgacgacct

SEQ ID NO: 107855 - DNA, 30 bp, Artificial Sequence
  Synthetic oligonucleotide
tcagacagtgacgatacgaatgaccgacct

SEQ ID NO: 107856 - DNA, 30 bp, Artificial Sequence
  Synthetic oligonucleotide
tcagcactagctggagtttttgggtgacct

SEQ ID NO: 107857 - DNA, 30 bp, Artificial Sequence
  Synthetic oligonucleotide
gcgtgaaagcttcaaaggcccttgtgacct

SEQ ID NO: 107858 - DNA, 30 bp, Artificial Sequence
  Synthetic oligonucleotide
aggtacaattaatgggtatggagaatacct

SEQ ID NO: 107859 - DNA, 30 bp, Artificial Sequence
  Synthetic oligonucleotide
tggaagagcaggtcgcgctgactcctacct

SEQ ID NO: 107860 - DNA, 30 bp, Artificial Sequence
  Synthetic oligonucleotide
aataaggaaaatcaagtcggtgtgctacct

SEQ ID NO: 107861 - DNA, 30 bp, Artificial Sequence
  Synthetic oligonucleotide
aacccaggtgagcactgaggggtgaaccct

SEQ ID NO: 107862 - DNA, 30 bp, Artificial Sequence
  Synthetic oligonucleotide
atgagcctgtcgtagtgcacaggtaaccct

SEQ ID NO: 107863 - DNA, 31 bp, Artificial Sequence
  Synthetic oligonucleotide
ctgttagcatcagcgaattatataagaccct

SEQ ID NO: 107864 - DNA, 30 bp, Artificial Sequence
  Synthetic oligonucleotide
ggcttgtctggtcaatggtttttggaccct

SEQ ID NO: 107865 - DNA, 30 bp, Artificial Sequence
  Synthetic oligonucleotide
tggtcgtcatcgggttagtaccttgaccct

SEQ ID NO: 107866 - DNA, 30 bp, Artificial Sequence
  Synthetic oligonucleotide
gacctacgtgtactaaaagcgcgataccct

SEQ ID NO: 107867 - DNA, 30 bp, Artificial Sequence
  Synthetic oligonucleotide
gattggctcaacattgccaacgaaacccct

SEQ ID NO: 107868 - DNA, 30 bp, Artificial Sequence
  Synthetic oligonucleotide
ccgcacatgtgctcgtagtgatgcacccct

SEQ ID NO: 107869 - DNA, 30 bp, Artificial Sequence
  Synthetic oligonucleotide
ggattgtagacagtggatgtcatgccccct

SEQ ID NO: 107870 - DNA, 30 bp, Artificial Sequence
  Synthetic oligonucleotide
ttggttgatctggagagacaatgagcccct

SEQ ID NO: 107871 - DNA, 30 bp, Artificial Sequence
  Synthetic oligonucleotide
ccagccttgcgaggtattgacgagagccct

SEQ ID NO: 107872 - DNA, 30 bp, Artificial Sequence
  Synthetic oligonucleotide
ggaaaagaggagataaaccatcttatccct

SEQ ID NO: 107873 - DNA, 30 bp, Artificial Sequence
  Synthetic oligonucleotide
actgccaatgttaacaaactagtgctccct

SEQ ID NO: 107874 - DNA, 30 bp, Artificial Sequence
  Synthetic oligonucleotide
gccgaaattgaacgctcgagcagaaagcct

SEQ ID NO: 107875 - DNA, 30 bp, Artificial Sequence
  Synthetic oligonucleotide
ctaaagttaagtatggtgatagggaagcct

SEQ ID NO: 107876 - DNA, 30 bp, Artificial Sequence
  Synthetic oligonucleotide
cccaacgcagcgtgaacaggggggcagcct

SEQ ID NO: 107877 - DNA, 30 bp, Artificial Sequence
  Synthetic oligonucleotide
gtcagcgcaatgcaggagtaaaccgagcct

SEQ ID NO: 107878 - DNA, 30 bp, Artificial Sequence
  Synthetic oligonucleotide
acactgtggaacgacttgctacccgagcct

SEQ ID NO: 107879 - DNA, 30 bp, Artificial Sequence
  Synthetic oligonucleotide
tacgtgcacaaaaaagcgggcaaggagcct

SEQ ID NO: 107880 - DNA, 30 bp, Artificial Sequence
  Synthetic oligonucleotide
ggcgggggtcaccgcgatcaagattagcct

SEQ ID NO: 107881 - DNA, 30 bp, Artificial Sequence
  Synthetic oligonucleotide
ggataattaccgcgggataacgtcacgcct

SEQ ID NO: 107882 - DNA, 30 bp, Artificial Sequence
  Synthetic oligonucleotide
cactatagacaagctccatcgagtccgcct

SEQ ID NO: 107883 - DNA, 30 bp, Artificial Sequence
  Synthetic oligonucleotide
ctagttcatcgtaaggcatcggtatcgcct

SEQ ID NO: 107884 - DNA, 30 bp, Artificial Sequence
  Synthetic oligonucleotide
ttgagtgtcagaaaagggcgcgagtcgcct

SEQ ID NO: 107885 - DNA, 30 bp, Artificial Sequence
  Synthetic oligonucleotide
tcgtcaatccctattcctagtctccggcct

SEQ ID NO: 107886 - DNA, 30 bp, Artificial Sequence
  Synthetic oligonucleotide
aacgctgtgtgggcaggggatctcgggcct

SEQ ID NO: 107887 - DNA, 30 bp, Artificial Sequence
  Synthetic oligonucleotide
ggtcctgcctagaacaagatcgtttggcct

SEQ ID NO: 107888 - DNA, 30 bp, Artificial Sequence
  Synthetic oligonucleotide
tcgccttactcagggtacagcaacatgcct

SEQ ID NO: 107889 - DNA, 30 bp, Artificial Sequence
  Synthetic oligonucleotide
caggtacatgtgggcatttactttatgcct

SEQ ID NO: 107890 - DNA, 30 bp, Artificial Sequence
  Synthetic oligonucleotide
cgaaaaagggtgattatgtgtggactgcct

SEQ ID NO: 107891 - DNA, 30 bp, Artificial Sequence
  Synthetic oligonucleotide
acatattctggataagagtaagtgctgcct

SEQ ID NO: 107892 - DNA, 30 bp, Artificial Sequence
  Synthetic oligonucleotide
tcagctttagaagtggggttgggagtgcct

SEQ ID NO: 107893 - DNA, 30 bp, Artificial Sequence
  Synthetic oligonucleotide
ggggtaagctagaaaaggaccggacatcct

SEQ ID NO: 107894 - DNA, 30 bp, Artificial Sequence
  Synthetic oligonucleotide
caatcacgttggggacaacgaaaggatcct

SEQ ID NO: 107895 - DNA, 30 bp, Artificial Sequence
  Synthetic oligonucleotide
gagccacatagctgatccacgtcatatcct

SEQ ID NO: 107896 - DNA, 30 bp, Artificial Sequence
  Synthetic oligonucleotide
aatgaagggaaggccttatttcagtatcct

SEQ ID NO: 107897 - DNA, 30 bp, Artificial Sequence
  Synthetic oligonucleotide
agctggatcgccaaacatgcaatttatcct

SEQ ID NO: 107898 - DNA, 30 bp, Artificial Sequence
  Synthetic oligonucleotide
ggcgagactggatcaggcacagcaactcct

SEQ ID NO: 107899 - DNA, 30 bp, Artificial Sequence
  Synthetic oligonucleotide
gcaattatagcggatgtagagctagctcct

SEQ ID NO: 107900 - DNA, 30 bp, Artificial Sequence
  Synthetic oligonucleotide
actagtggagtgccgtgacttagggctcct

SEQ ID NO: 107901 - DNA, 30 bp, Artificial Sequence
  Synthetic oligonucleotide
agactggcgaacgtcggcgattcgtctcct

SEQ ID NO: 107902 - DNA, 30 bp, Artificial Sequence
  Synthetic oligonucleotide
tcggggccaaaggcacttgttaagcgtcct

SEQ ID NO: 107903 - DNA, 30 bp, Artificial Sequence
  Synthetic oligonucleotide
ggacagagctgattcgagacgatgggtcct

SEQ ID NO: 107904 - DNA, 30 bp, Artificial Sequence
  Synthetic oligonucleotide
ttcacgtgcgcggagctctgagtgggtcct

SEQ ID NO: 107905 - DNA, 30 bp, Artificial Sequence
  Synthetic oligonucleotide
gtggcacggtttcgtggtagacagattcct

SEQ ID NO: 107906 - DNA, 30 bp, Artificial Sequence
  Synthetic oligonucleotide
atgggggcttgatctgcgcaaaaacttcct

SEQ ID NO: 107907 - DNA, 30 bp, Artificial Sequence
  Synthetic oligonucleotide
ccttcacaccaggatcctgcgtggcttcct

SEQ ID NO: 107908 - DNA, 30 bp, Artificial Sequence
  Synthetic oligonucleotide
catttaatgcaacagtgggcccaagttcct

SEQ ID NO: 107909 - DNA, 30 bp, Artificial Sequence
  Synthetic oligonucleotide
gggtaaaggtgccttaacatcagcgttcct

SEQ ID NO: 107910 - DNA, 30 bp, Artificial Sequence
  Synthetic oligonucleotide
aggtctgatatcagaattcgcgaggttcct

SEQ ID NO: 107911 - DNA, 30 bp, Artificial Sequence
  Synthetic oligonucleotide
aattagataacaaagtggaccgactttcct

SEQ ID NO: 107912 - DNA, 30 bp, Artificial Sequence
  Synthetic oligonucleotide
catcgggtacataagcctcagacaaaagct

SEQ ID NO: 107913 - DNA, 30 bp, Artificial Sequence
  Synthetic oligonucleotide
caccagcactcgcacatccactgggaagct

SEQ ID NO: 107914 - DNA, 30 bp, Artificial Sequence
  Synthetic oligonucleotide
taatgcggtaatgacccatacggataagct

SEQ ID NO: 107915 - DNA, 30 bp, Artificial Sequence
  Synthetic oligonucleotide
ggccgccttcaggcgatgatagtataagct

SEQ ID NO: 107916 - DNA, 30 bp, Artificial Sequence
  Synthetic oligonucleotide
cgctaagtcggcagtgggtgggtataagct

SEQ ID NO: 107917 - DNA, 30 bp, Artificial Sequence
  Synthetic oligonucleotide
tgcgtccaaaaacggacgttccactaagct

SEQ ID NO: 107918 - DNA, 30 bp, Artificial Sequence
  Synthetic oligonucleotide
gcgtgttccctgtgtaaaccggagtaagct

SEQ ID NO: 107919 - DNA, 30 bp, Artificial Sequence
  Synthetic oligonucleotide
agcacgcaaacagtgaccgcgacaacagct

SEQ ID NO: 107920 - DNA, 30 bp, Artificial Sequence
  Synthetic oligonucleotide
gccacaccaggcggtctccaaggaacagct

SEQ ID NO: 107921 - DNA, 30 bp, Artificial Sequence
  Synthetic oligonucleotide
caaacaaagtgctaagaagaacgcacagct

SEQ ID NO: 107922 - DNA, 30 bp, Artificial Sequence
  Synthetic oligonucleotide
cgcacacacgccctcgctataaacccagct

SEQ ID NO: 107923 - DNA, 30 bp, Artificial Sequence
  Synthetic oligonucleotide
gatcctaagagaagtgcgctagccccagct

SEQ ID NO: 107924 - DNA, 29 bp, Artificial Sequence
  Synthetic oligonucleotide
ctacgtttgtcaggtcataaacagcagct

SEQ ID NO: 107925 - DNA, 30 bp, Artificial Sequence
  Synthetic oligonucleotide
tcaacgtcgtacacatatatcccggcagct

SEQ ID NO: 107926 - DNA, 30 bp, Artificial Sequence
  Synthetic oligonucleotide
ggaaaaccataaaaacgccggccggcagct

SEQ ID NO: 107927 - DNA, 30 bp, Artificial Sequence
  Synthetic oligonucleotide
atgtaagagatagggggccgaagtgcagct

SEQ ID NO: 107928 - DNA, 30 bp, Artificial Sequence
  Synthetic oligonucleotide
cgtaaaaatacttaactggtgaagtcagct

SEQ ID NO: 107929 - DNA, 30 bp, Artificial Sequence
  Synthetic oligonucleotide
actatgggcgcttggaggcgtaagagagct

SEQ ID NO: 107930 - DNA, 30 bp, Artificial Sequence
  Synthetic oligonucleotide
gtactggcttatatgttagaaggtagagct

SEQ ID NO: 107931 - DNA, 30 bp, Artificial Sequence
  Synthetic oligonucleotide
cgggaaggactgggcattaccatcggagct

SEQ ID NO: 107932 - DNA, 30 bp, Artificial Sequence
  Synthetic oligonucleotide
atcgctgtcaggatggtgtggcagggagct

SEQ ID NO: 107933 - DNA, 30 bp, Artificial Sequence
  Synthetic oligonucleotide
atagtactgtgtcagtacgcaaaatgagct

SEQ ID NO: 107934 - DNA, 30 bp, Artificial Sequence
  Synthetic oligonucleotide
ccctacgacctagttaccggtacaatagct

SEQ ID NO: 107935 - DNA, 30 bp, Artificial Sequence
  Synthetic oligonucleotide
cagagtaaccaggggggagttccaatagct

SEQ ID NO: 107936 - DNA, 30 bp, Artificial Sequence
  Synthetic oligonucleotide
atgtatgcagacagatcagaattagtagct

SEQ ID NO: 107937 - DNA, 30 bp, Artificial Sequence
  Synthetic oligonucleotide
ggacagtctagaaagagagcagttttagct

SEQ ID NO: 107938 - DNA, 30 bp, Artificial Sequence
  Synthetic oligonucleotide
ttgaattcgaaccgatgaaggaaatacgct

SEQ ID NO: 107939 - DNA, 30 bp, Artificial Sequence
  Synthetic oligonucleotide
ctcagagcgagtttcgtaagagagcccgct

SEQ ID NO: 107940 - DNA, 30 bp, Artificial Sequence
  Synthetic oligonucleotide
catagggaaggatacgccttacccgccgct

SEQ ID NO: 107941 - DNA, 30 bp, Artificial Sequence
  Synthetic oligonucleotide
accatcgaacgggctataaatgctgccgct

SEQ ID NO: 107942 - DNA, 30 bp, Artificial Sequence
  Synthetic oligonucleotide
tcgggggcaggcaatttaccaagttccgct

SEQ ID NO: 107943 - DNA, 30 bp, Artificial Sequence
  Synthetic oligonucleotide
gccaaccggtttggaaagaacggaagcgct

SEQ ID NO: 107944 - DNA, 30 bp, Artificial Sequence
  Synthetic oligonucleotide
tgggaattcgagatacgacatagcagcgct

SEQ ID NO: 107945 - DNA, 29 bp, Artificial Sequence
  Synthetic oligonucleotide
tgatcgtacatagggatgtattccgcgct

SEQ ID NO: 107946 - DNA, 30 bp, Artificial Sequence
  Synthetic oligonucleotide
ggctgactaagaagcagacacttccgcgct

SEQ ID NO: 107947 - DNA, 30 bp, Artificial Sequence
  Synthetic oligonucleotide
tcctaggctttgacatctaacagtcgcgct

SEQ ID NO: 107948 - DNA, 30 bp, Artificial Sequence
  Synthetic oligonucleotide
gcgagaaagccgctaggcaatactggcgct

SEQ ID NO: 107949 - DNA, 30 bp, Artificial Sequence
  Synthetic oligonucleotide
acgtgtaaccggatgcaatgctcatgcgct

SEQ ID NO: 107950 - DNA, 30 bp, Artificial Sequence
  Synthetic oligonucleotide
aggcggagaccacctatataagagtgcgct

SEQ ID NO: 107951 - DNA, 30 bp, Artificial Sequence
  Synthetic oligonucleotide
tgaatacagaacccgtacggcagttgcgct

SEQ ID NO: 107952 - DNA, 30 bp, Artificial Sequence
  Synthetic oligonucleotide
tggactgagcctatacagaacttaatcgct

SEQ ID NO: 107953 - DNA, 30 bp, Artificial Sequence
  Synthetic oligonucleotide
tagtaagtgcagggaagcacggaactcgct

SEQ ID NO: 107954 - DNA, 30 bp, Artificial Sequence
  Synthetic oligonucleotide
gaggcgagacgtgtgacagtgttcctcgct

SEQ ID NO: 107955 - DNA, 30 bp, Artificial Sequence
  Synthetic oligonucleotide
caaacgaaagccataaatgcaaagttcgct

SEQ ID NO: 107956 - DNA, 30 bp, Artificial Sequence
  Synthetic oligonucleotide
gctaatgttcgagacggtgtcgtgttcgct

SEQ ID NO: 107957 - DNA, 30 bp, Artificial Sequence
  Synthetic oligonucleotide
taactacggacgttgtaaatgtaaaaggct

SEQ ID NO: 107958 - DNA, 30 bp, Artificial Sequence
  Synthetic oligonucleotide
agggatgcgtcatatgcgagacgaaaggct

SEQ ID NO: 107959 - DNA, 30 bp, Artificial Sequence
  Synthetic oligonucleotide
tctagtggtcacgtatcgggacacaaggct

SEQ ID NO: 107960 - DNA, 30 bp, Artificial Sequence
  Synthetic oligonucleotide
tgtaaaccgtggtaaggtaaaaggaaggct

SEQ ID NO: 107961 - DNA, 30 bp, Artificial Sequence
  Synthetic oligonucleotide
gaacctcaaaagtcctaaggagggcaggct

SEQ ID NO: 107962 - DNA, 30 bp, Artificial Sequence
  Synthetic oligonucleotide
accccagagagtcaagaatacgaataggct

SEQ ID NO: 107963 - DNA, 30 bp, Artificial Sequence
  Synthetic oligonucleotide
cctcggggggcgtgttgtgtgcaaccggct

SEQ ID NO: 107964 - DNA, 30 bp, Artificial Sequence
  Synthetic oligonucleotide
ccttcgggcacataagatgagtgatcggct

SEQ ID NO: 107965 - DNA, 30 bp, Artificial Sequence
  Synthetic oligonucleotide
gaaaccggcctgccatcgaagatatcggct

SEQ ID NO: 107966 - DNA, 30 bp, Artificial Sequence
  Synthetic oligonucleotide
taagtgcaaacttcctgcaagaagcgggct

SEQ ID NO: 107967 - DNA, 30 bp, Artificial Sequence
  Synthetic oligonucleotide
aagagcaaagttgattacgggtgtcgggct

SEQ ID NO: 107968 - DNA, 30 bp, Artificial Sequence
  Synthetic oligonucleotide
ggacaggcaaacgcgaggaatccctgggct

SEQ ID NO: 107969 - DNA, 30 bp, Artificial Sequence
  Synthetic oligonucleotide
ttaagcccgataacgtttagcagttgggct

SEQ ID NO: 107970 - DNA, 30 bp, Artificial Sequence
  Synthetic oligonucleotide
agacacacgctttactcctaccccatggct

SEQ ID NO: 107971 - DNA, 30 bp, Artificial Sequence
  Synthetic oligonucleotide
gcactcactcagatatcgacgaatatggct

SEQ ID NO: 107972 - DNA, 30 bp, Artificial Sequence
  Synthetic oligonucleotide
tgtcggatcaatgtcacattgtctatggct

SEQ ID NO: 107973 - DNA, 30 bp, Artificial Sequence
  Synthetic oligonucleotide
tgactccacactatcacacaatccctggct

SEQ ID NO: 107974 - DNA, 30 bp, Artificial Sequence
  Synthetic oligonucleotide
gatgggaaattcgggatccatcatctggct

SEQ ID NO: 107975 - DNA, 30 bp, Artificial Sequence
  Synthetic oligonucleotide
gacatacaaagttcacatgcattcgtggct

SEQ ID NO: 107976 - DNA, 30 bp, Artificial Sequence
  Synthetic oligonucleotide
tagtgaccttgtgggtaatggtttgtggct

SEQ ID NO: 107977 - DNA, 30 bp, Artificial Sequence
  Synthetic oligonucleotide
acgcaaattatcccaactacagcattggct

SEQ ID NO: 107978 - DNA, 30 bp, Artificial Sequence
  Synthetic oligonucleotide
ttgttcctgagcattaacaagggcttggct

SEQ ID NO: 107979 - DNA, 30 bp, Artificial Sequence
  Synthetic oligonucleotide
catggccataaaatgctcaactcgaatgct

SEQ ID NO: 107980 - DNA, 30 bp, Artificial Sequence
  Synthetic oligonucleotide
cagggcactatagcagaagcgtggaatgct

SEQ ID NO: 107981 - DNA, 30 bp, Artificial Sequence
  Synthetic oligonucleotide
ggtcatacgggggtatatcggattcatgct

SEQ ID NO: 107982 - DNA, 30 bp, Artificial Sequence
  Synthetic oligonucleotide
ggggctatccaagttagcgcgcgtgatgct

SEQ ID NO: 107983 - DNA, 30 bp, Artificial Sequence
  Synthetic oligonucleotide
gttaacacgggaaggagagtatgtgatgct

SEQ ID NO: 107984 - DNA, 30 bp, Artificial Sequence
  Synthetic oligonucleotide
tgtagcaaaggcatttgagggattactgct

SEQ ID NO: 107985 - DNA, 30 bp, Artificial Sequence
  Synthetic oligonucleotide
cgatcctagaataactttggcctacctgct

SEQ ID NO: 107986 - DNA, 30 bp, Artificial Sequence
  Synthetic oligonucleotide
acggtccccgaatggtttccggtttctgct

SEQ ID NO: 107987 - DNA, 30 bp, Artificial Sequence
  Synthetic oligonucleotide
cccacgcctgggggagtgcgcctgagtgct

SEQ ID NO: 107988 - DNA, 30 bp, Artificial Sequence
  Synthetic oligonucleotide
ctgcaggggggatgtggttgggtgagtgct

SEQ ID NO: 107989 - DNA, 30 bp, Artificial Sequence
  Synthetic oligonucleotide
atctgtagagatcagcatgtgggcggtgct

SEQ ID NO: 107990 - DNA, 30 bp, Artificial Sequence
  Synthetic oligonucleotide
ccgtacgtattgtgaagtgagatatgtgct

SEQ ID NO: 107991 - DNA, 30 bp, Artificial Sequence
  Synthetic oligonucleotide
agcaaaatctgacgggatagaaggtgtgct

SEQ ID NO: 107992 - DNA, 30 bp, Artificial Sequence
  Synthetic oligonucleotide
catcgcatcctaacatcagtaatccttgct

SEQ ID NO: 107993 - DNA, 30 bp, Artificial Sequence
  Synthetic oligonucleotide
aggcaatacgttaaagagatcgtccttgct

SEQ ID NO: 107994 - DNA, 30 bp, Artificial Sequence
  Synthetic oligonucleotide
gatcagtactagatcggggggggagttgct

SEQ ID NO: 107995 - DNA, 30 bp, Artificial Sequence
  Synthetic oligonucleotide
gtgcggattgagagaacaggagcgtttgct

SEQ ID NO: 107996 - DNA, 30 bp, Artificial Sequence
  Synthetic oligonucleotide
gaggggacactaaatgcgtaaagccaatct

SEQ ID NO: 107997 - DNA, 30 bp, Artificial Sequence
  Synthetic oligonucleotide
aaacgacgagttggcgtctgtggctaatct

SEQ ID NO: 107998 - DNA, 30 bp, Artificial Sequence
  Synthetic oligonucleotide
cttaggcccccaaccatgccggaaacatct

SEQ ID NO: 107999 - DNA, 30 bp, Artificial Sequence
  Synthetic oligonucleotide
taatattggagaaaagggagtctgccatct

SEQ ID NO: 108000 - DNA, 30 bp, Artificial Sequence
  Synthetic oligonucleotide
tgggtatcggaggacttgaggtccgcatct

SEQ ID NO: 108001 - DNA, 30 bp, Artificial Sequence
  Synthetic oligonucleotide
cgaaaccaatcgcagctcgtcgacagatct

SEQ ID NO: 108002 - DNA, 30 bp, Artificial Sequence
  Synthetic oligonucleotide
cagttggctagcaagtccaggtgacgatct

SEQ ID NO: 108003 - DNA, 30 bp, Artificial Sequence
  Synthetic oligonucleotide
tgaacagtgaaagtatatatgagccgatct

SEQ ID NO: 108004 - DNA, 30 bp, Artificial Sequence
  Synthetic oligonucleotide
gtgcagtattcacctgctgggtggcgatct

SEQ ID NO: 108005 - DNA, 30 bp, Artificial Sequence
  Synthetic oligonucleotide
tatcggcaggattctcgagcgaatggatct

SEQ ID NO: 108006 - DNA, 30 bp, Artificial Sequence
  Synthetic oligonucleotide
agtatttagagaacatatgagcgctgatct

SEQ ID NO: 108007 - DNA, 30 bp, Artificial Sequence
  Synthetic oligonucleotide
gtcaacacattcaatgtatcggaaatatct

SEQ ID NO: 108008 - DNA, 30 bp, Artificial Sequence
  Synthetic oligonucleotide
agttgcgatctaatgtttacgacaatatct

SEQ ID NO: 108009 - DNA, 30 bp, Artificial Sequence
  Synthetic oligonucleotide
aggttaacccagcagcaataactactatct

SEQ ID NO: 108010 - DNA, 30 bp, Artificial Sequence
  Synthetic oligonucleotide
atggacactctcgtcctgtttcgagtatct

SEQ ID NO: 108011 - DNA, 30 bp, Artificial Sequence
  Synthetic oligonucleotide
cagtgataatagtagcggttaaaggtatct

SEQ ID NO: 108012 - DNA, 30 bp, Artificial Sequence
  Synthetic oligonucleotide
acttaggttgcctgtcgcctcacattatct

SEQ ID NO: 108013 - DNA, 30 bp, Artificial Sequence
  Synthetic oligonucleotide
aaggagtggcatagcgacattgaaaactct

SEQ ID NO: 108014 - DNA, 30 bp, Artificial Sequence
  Synthetic oligonucleotide
tcggaagcatatatgaggatggagtactct

SEQ ID NO: 108015 - DNA, 30 bp, Artificial Sequence
  Synthetic oligonucleotide
aagagaatgacacggtactgcgtgtactct

SEQ ID NO: 108016 - DNA, 30 bp, Artificial Sequence
  Synthetic oligonucleotide
gtcgagaccgggggcacgaaagcaacctct

SEQ ID NO: 108017 - DNA, 30 bp, Artificial Sequence
  Synthetic oligonucleotide
gcctgactgaagcggtactacaatacctct

SEQ ID NO: 108018 - DNA, 30 bp, Artificial Sequence
  Synthetic oligonucleotide
aggctggggtgcctgaaattactgccctct

SEQ ID NO: 108019 - DNA, 30 bp, Artificial Sequence
  Synthetic oligonucleotide
gcgaggggacttggctcgaagtcagcctct

SEQ ID NO: 108020 - DNA, 30 bp, Artificial Sequence
  Synthetic oligonucleotide
gaggtgatagggttaacagggtgagcctct

SEQ ID NO: 108021 - DNA, 30 bp, Artificial Sequence
  Synthetic oligonucleotide
tccaggttgaatcggagatcctaatcctct

SEQ ID NO: 108022 - DNA, 29 bp, Artificial Sequence
  Synthetic oligonucleotide
gcagtaaacaatggagggaagggtcctct

SEQ ID NO: 108023 - DNA, 30 bp, Artificial Sequence
  Synthetic oligonucleotide
tagtgctccaatcagagtgcacaatgctct

SEQ ID NO: 108024 - DNA, 30 bp, Artificial Sequence
  Synthetic oligonucleotide
gcacgactgtccatgccgtgagtctgctct

SEQ ID NO: 108025 - DNA, 30 bp, Artificial Sequence
  Synthetic oligonucleotide
agttgtagaattgccgataacgaaatctct

SEQ ID NO: 108026 - DNA, 30 bp, Artificial Sequence
  Synthetic oligonucleotide
gcggattaagacagcgacggtccattctct

SEQ ID NO: 108027 - DNA, 30 bp, Artificial Sequence
  Synthetic oligonucleotide
ggccaaagtagatcgacaacacaaaagtct

SEQ ID NO: 108028 - DNA, 30 bp, Artificial Sequence
  Synthetic oligonucleotide
acagacagggtcagggtcagcggcaagtct

SEQ ID NO: 108029 - DNA, 30 bp, Artificial Sequence
  Synthetic oligonucleotide
ttcgtgcgactcaggagctggcggaagtct

SEQ ID NO: 108030 - DNA, 30 bp, Artificial Sequence
  Synthetic oligonucleotide
actcggtatgcggtgaacaacatccagtct

SEQ ID NO: 108031 - DNA, 30 bp, Artificial Sequence
  Synthetic oligonucleotide
tatgcatgctatttagtgagaagttagtct

SEQ ID NO: 108032 - DNA, 30 bp, Artificial Sequence
  Synthetic oligonucleotide
cgccaataaagatagagacagctcacgtct

SEQ ID NO: 108033 - DNA, 30 bp, Artificial Sequence
  Synthetic oligonucleotide
ggagtaagaaagtgggaatggcatacgtct

SEQ ID NO: 108034 - DNA, 30 bp, Artificial Sequence
  Synthetic oligonucleotide
gacctaccacagatgatagtgcagccgtct

SEQ ID NO: 108035 - DNA, 30 bp, Artificial Sequence
  Synthetic oligonucleotide
tgtcggaaagagataggtgttttgccgtct

SEQ ID NO: 108036 - DNA, 30 bp, Artificial Sequence
  Synthetic oligonucleotide
tccgtgtacaaaggagaataagaagcgtct

SEQ ID NO: 108037 - DNA, 30 bp, Artificial Sequence
  Synthetic oligonucleotide
acatagcactagggtggagacatggcgtct

SEQ ID NO: 108038 - DNA, 30 bp, Artificial Sequence
  Synthetic oligonucleotide
cgactaactttgcgttaccaagattcgtct

SEQ ID NO: 108039 - DNA, 30 bp, Artificial Sequence
  Synthetic oligonucleotide
caggtccataacccgaaacagagttcgtct

SEQ ID NO: 108040 - DNA, 30 bp, Artificial Sequence
  Synthetic oligonucleotide
ctgggacagtgatcgtcggcctcccggtct

SEQ ID NO: 108041 - DNA, 30 bp, Artificial Sequence
  Synthetic oligonucleotide
cggcaccgtggtattaggtttaaagggtct

SEQ ID NO: 108042 - DNA, 30 bp, Artificial Sequence
  Synthetic oligonucleotide
acgttgtgtacagcaagaaaagtggggtct

SEQ ID NO: 108043 - DNA, 30 bp, Artificial Sequence
  Synthetic oligonucleotide
aagggagtgtctttttgcatgcttgggtct

SEQ ID NO: 108044 - DNA, 30 bp, Artificial Sequence
  Synthetic oligonucleotide
tcaggttcgcgctggcatcggtcatggtct

SEQ ID NO: 108045 - DNA, 30 bp, Artificial Sequence
  Synthetic oligonucleotide
acggttctgaataaacgggcaatctggtct

SEQ ID NO: 108046 - DNA, 30 bp, Artificial Sequence
  Synthetic oligonucleotide
cacctatgccaatgagttctagtctggtct

SEQ ID NO: 108047 - DNA, 30 bp, Artificial Sequence
  Synthetic oligonucleotide
cggacccatcgattgcaaggcaattggtct

SEQ ID NO: 108048 - DNA, 31 bp, Artificial Sequence
  Synthetic oligonucleotide
cgttagtgccgatttagtaacgaggatgtct

SEQ ID NO: 108049 - DNA, 30 bp, Artificial Sequence
  Synthetic oligonucleotide
tatcccgaatcgaggttatacctactgtct

SEQ ID NO: 108050 - DNA, 30 bp, Artificial Sequence
  Synthetic oligonucleotide
gttaagacaagggccagttatcgagtgtct

SEQ ID NO: 108051 - DNA, 30 bp, Artificial Sequence
  Synthetic oligonucleotide
ggtgcttgctatctggaggttggggtgtct

SEQ ID NO: 108052 - DNA, 30 bp, Artificial Sequence
  Synthetic oligonucleotide
aggaatacacttcacaagtaacatgtgtct

SEQ ID NO: 108053 - DNA, 30 bp, Artificial Sequence
  Synthetic oligonucleotide
cagaatggtgatgggacactaagtttgtct

SEQ ID NO: 108054 - DNA, 30 bp, Artificial Sequence
  Synthetic oligonucleotide
tgggatacgcctgggtctcgtagggattct

SEQ ID NO: 108055 - DNA, 30 bp, Artificial Sequence
  Synthetic oligonucleotide
taaacatggtggttcggagagccgtattct

SEQ ID NO: 108056 - DNA, 30 bp, Artificial Sequence
  Synthetic oligonucleotide
ccgcatagcaacccgttttgaagttattct

SEQ ID NO: 108057 - DNA, 30 bp, Artificial Sequence
  Synthetic oligonucleotide
ttgtaatccagtaatggggaaactccttct

SEQ ID NO: 108058 - DNA, 30 bp, Artificial Sequence
  Synthetic oligonucleotide
cgagatttgagaatgctttaacttgcttct

SEQ ID NO: 108059 - DNA, 30 bp, Artificial Sequence
  Synthetic oligonucleotide
cctgtgaacaagcgcgagaaaggtcgttct

SEQ ID NO: 108060 - DNA, 30 bp, Artificial Sequence
  Synthetic oligonucleotide
actagcggcgtgacgaggaggagatgttct

SEQ ID NO: 108061 - DNA, 30 bp, Artificial Sequence
  Synthetic oligonucleotide
ggctggcgggaacttgacattggactttct

SEQ ID NO: 108062 - DNA, 30 bp, Artificial Sequence
  Synthetic oligonucleotide
ccaaggataccgacagttgatattgtttct

SEQ ID NO: 108063 - DNA, 30 bp, Artificial Sequence
  Synthetic oligonucleotide
gcactcgcctagcctgcctgcgacaaaagt

SEQ ID NO: 108064 - DNA, 30 bp, Artificial Sequence
  Synthetic oligonucleotide
ttccaagtgtttgtcaaagtgagcaaaagt

SEQ ID NO: 108065 - DNA, 30 bp, Artificial Sequence
  Synthetic oligonucleotide
cagcgtttgagacccaaacgaggtaaaagt

SEQ ID NO: 108066 - DNA, 30 bp, Artificial Sequence
  Synthetic oligonucleotide
gtctagtggctaggggtagaacgtcaaagt

SEQ ID NO: 108067 - DNA, 30 bp, Artificial Sequence
  Synthetic oligonucleotide
ttgagagcagggtcaaagaagagcgaaagt

SEQ ID NO: 108068 - DNA, 30 bp, Artificial Sequence
  Synthetic oligonucleotide
aagtacatctaaaaggtacaaacggaaagt

SEQ ID NO: 108069 - DNA, 30 bp, Artificial Sequence
  Synthetic oligonucleotide
gaacaataaacgtgatgtttgcaataaagt

SEQ ID NO: 108070 - DNA, 30 bp, Artificial Sequence
  Synthetic oligonucleotide
ttacggaccgtgattgagccgcactaaagt

SEQ ID NO: 108071 - DNA, 30 bp, Artificial Sequence
  Synthetic oligonucleotide
gacgtaatcgtgcatgggggtgggtaaagt

SEQ ID NO: 108072 - DNA, 30 bp, Artificial Sequence
  Synthetic oligonucleotide
cgtaaagtttgcctacgtattgggtaaagt

SEQ ID NO: 108073 - DNA, 30 bp, Artificial Sequence
  Synthetic oligonucleotide
gcaaggatagatacggacgtacattaaagt

SEQ ID NO: 108074 - DNA, 30 bp, Artificial Sequence
  Synthetic oligonucleotide
agggagggtccgaacggcgccgcaacaagt

SEQ ID NO: 108075 - DNA, 30 bp, Artificial Sequence
  Synthetic oligonucleotide
acgatgaggcacaatgaatgtcgaacaagt

SEQ ID NO: 108076 - DNA, 30 bp, Artificial Sequence
  Synthetic oligonucleotide
gacggctggtacacccgtggcaggacaagt

SEQ ID NO: 108077 - DNA, 30 bp, Artificial Sequence
  Synthetic oligonucleotide
acaccgcgtctcgtaagtctggtaccaagt

SEQ ID NO: 108078 - DNA, 30 bp, Artificial Sequence
  Synthetic oligonucleotide
taatgcaatacgcccaatttaatgccaagt

SEQ ID NO: 108079 - DNA, 30 bp, Artificial Sequence
  Synthetic oligonucleotide
gatgcgatcgggctagagccagcagcaagt

SEQ ID NO: 108080 - DNA, 30 bp, Artificial Sequence
  Synthetic oligonucleotide
ctcaagtcagattatcagtgtcgatcaagt

SEQ ID NO: 108081 - DNA, 30 bp, Artificial Sequence
  Synthetic oligonucleotide
acggagcgtggcccagccgcgcagtcaagt

SEQ ID NO: 108082 - DNA, 30 bp, Artificial Sequence
  Synthetic oligonucleotide
gtcggcattccgaggggacgcgtaagaagt

SEQ ID NO: 108083 - DNA, 30 bp, Artificial Sequence
  Synthetic oligonucleotide
gccatacggctaaccttatcccagagaagt

SEQ ID NO: 108084 - DNA, 30 bp, Artificial Sequence
  Synthetic oligonucleotide
acaggtatatggaattgtggttgtcgaagt

SEQ ID NO: 108085 - DNA, 30 bp, Artificial Sequence
  Synthetic oligonucleotide
ctccagcgctacgaaacgggcaggggaagt

SEQ ID NO: 108086 - DNA, 31 bp, Artificial Sequence
  Synthetic oligonucleotide
tggtatgccgcggatggaggtgggtggaagt

SEQ ID NO: 108087 - DNA, 30 bp, Artificial Sequence
  Synthetic oligonucleotide
tgtcagagtagactcgcggacgaatgaagt

SEQ ID NO: 108088 - DNA, 30 bp, Artificial Sequence
  Synthetic oligonucleotide
tgctcggggattccggtcgccggctgaagt

SEQ ID NO: 108089 - DNA, 30 bp, Artificial Sequence
  Synthetic oligonucleotide
tcgatccacgtgggtggctaaaattgaagt

SEQ ID NO: 108090 - DNA, 30 bp, Artificial Sequence
  Synthetic oligonucleotide
ggagggaacattgccgaacccactataagt

SEQ ID NO: 108091 - DNA, 30 bp, Artificial Sequence
  Synthetic oligonucleotide
ttgacctcgaggagaatcattaacctaagt

SEQ ID NO: 108092 - DNA, 30 bp, Artificial Sequence
  Synthetic oligonucleotide
aggtgtggattaccgcttactacgctaagt

SEQ ID NO: 108093 - DNA, 30 bp, Artificial Sequence
  Synthetic oligonucleotide
tccatgcctcttcgctaaaagaatctaagt

SEQ ID NO: 108094 - DNA, 30 bp, Artificial Sequence
  Synthetic oligonucleotide
gggctgacgcgtctgattgagtgagtaagt

SEQ ID NO: 108095 - DNA, 30 bp, Artificial Sequence
  Synthetic oligonucleotide
aaggtagttgcaatcgccggcatgttaagt

SEQ ID NO: 108096 - DNA, 30 bp, Artificial Sequence
  Synthetic oligonucleotide
aaggttcgggctaagccacttatgttaagt

SEQ ID NO: 108097 - DNA, 30 bp, Artificial Sequence
  Synthetic oligonucleotide
gaacgtagaccaatatccataaatttaagt

SEQ ID NO: 108098 - DNA, 30 bp, Artificial Sequence
  Synthetic oligonucleotide
tcggatgatgctcacagtgacagaaacagt

SEQ ID NO: 108099 - DNA, 30 bp, Artificial Sequence
  Synthetic oligonucleotide
acacaaaccttaactcactaaggaaacagt

SEQ ID NO: 108100 - DNA, 30 bp, Artificial Sequence
  Synthetic oligonucleotide
ccactaacagcaaacggctgtatcaacagt

SEQ ID NO: 108101 - DNA, 30 bp, Artificial Sequence
  Synthetic oligonucleotide
ggtgaatgagtcttcgggctgtgacacagt

SEQ ID NO: 108102 - DNA, 30 bp, Artificial Sequence
  Synthetic oligonucleotide
cagaactccggttcaaggaggggccacagt

SEQ ID NO: 108103 - DNA, 30 bp, Artificial Sequence
  Synthetic oligonucleotide
tccagtcatcatacagagcaaatgcacagt

SEQ ID NO: 108104 - DNA, 30 bp, Artificial Sequence
  Synthetic oligonucleotide
tccgcgcggcagtccgatagcatgcacagt

SEQ ID NO: 108105 - DNA, 30 bp, Artificial Sequence
  Synthetic oligonucleotide
cgtctcgttaatcagatcatgtctcacagt

SEQ ID NO: 108106 - DNA, 30 bp, Artificial Sequence
  Synthetic oligonucleotide
aaggcgccgaaagcttgcaggcaatacagt

SEQ ID NO: 108107 - DNA, 30 bp, Artificial Sequence
  Synthetic oligonucleotide
ggggttgcgttatatcgggtgggctacagt

SEQ ID NO: 108108 - DNA, 30 bp, Artificial Sequence
  Synthetic oligonucleotide
taggaaaacggaagacagttggtttacagt

SEQ ID NO: 108109 - DNA, 30 bp, Artificial Sequence
  Synthetic oligonucleotide
gatcaagtcgcaagtggcattcggaccagt

SEQ ID NO: 108110 - DNA, 30 bp, Artificial Sequence
  Synthetic oligonucleotide
aatggggcaagtgatggccagggtaccagt

SEQ ID NO: 108111 - DNA, 30 bp, Artificial Sequence
  Synthetic oligonucleotide
agagatgatccacagagcgaaaatcccagt

SEQ ID NO: 108112 - DNA, 30 bp, Artificial Sequence
  Synthetic oligonucleotide
acagaatctaaggcatacccgaatgccagt

SEQ ID NO: 108113 - DNA, 30 bp, Artificial Sequence
  Synthetic oligonucleotide
gcgtacgcgtcgcgtaagccgatatccagt

SEQ ID NO: 108114 - DNA, 30 bp, Artificial Sequence
  Synthetic oligonucleotide
gaggccggtagcgaactagacgcctccagt

SEQ ID NO: 108115 - DNA, 30 bp, Artificial Sequence
  Synthetic oligonucleotide
ttgtggaaatcgactacttgacaaagcagt

SEQ ID NO: 108116 - DNA, 30 bp, Artificial Sequence
  Synthetic oligonucleotide
atggagcgggaggggagagtctcaagcagt

SEQ ID NO: 108117 - DNA, 30 bp, Artificial Sequence
  Synthetic oligonucleotide
ggtcgatgaagatgtagcgtatcgagcagt

SEQ ID NO: 108118 - DNA, 30 bp, Artificial Sequence
  Synthetic oligonucleotide
acgtcaagagtcagctcgggtcatagcagt

SEQ ID NO: 108119 - DNA, 30 bp, Artificial Sequence
  Synthetic oligonucleotide
cagataaaagggcactacaatcaacgcagt

SEQ ID NO: 108120 - DNA, 30 bp, Artificial Sequence
  Synthetic oligonucleotide
agaagaacagtagagactaagaagcgcagt

SEQ ID NO: 108121 - DNA, 30 bp, Artificial Sequence
  Synthetic oligonucleotide
actaacagtcgatatgtaaagctcggcagt

SEQ ID NO: 108122 - DNA, 30 bp, Artificial Sequence
  Synthetic oligonucleotide
ctgattggcgtgaagattgccgatggcagt

SEQ ID NO: 108123 - DNA, 30 bp, Artificial Sequence
  Synthetic oligonucleotide
aaaatgcacgtcaccgttgaccttggcagt

SEQ ID NO: 108124 - DNA, 30 bp, Artificial Sequence
  Synthetic oligonucleotide
ccaaacggccggcggggaacatcctgcagt

SEQ ID NO: 108125 - DNA, 30 bp, Artificial Sequence
  Synthetic oligonucleotide
agggaagcttacactgcataaaatatcagt

SEQ ID NO: 108126 - DNA, 30 bp, Artificial Sequence
  Synthetic oligonucleotide
tacgatccagagcgaaaggcagctatcagt

SEQ ID NO: 108127 - DNA, 30 bp, Artificial Sequence
  Synthetic oligonucleotide
tcggtacatcttgcttagtaatcactcagt

SEQ ID NO: 108128 - DNA, 30 bp, Artificial Sequence
  Synthetic oligonucleotide
agatattggcacaggtatcgacgactcagt

SEQ ID NO: 108129 - DNA, 30 bp, Artificial Sequence
  Synthetic oligonucleotide
gtgcggttagggtttgagaatgtcctcagt

SEQ ID NO: 108130 - DNA, 31 bp, Artificial Sequence
  Synthetic oligonucleotide
acgtaaagcaagctctgttctccaattcagt

SEQ ID NO: 108131 - DNA, 30 bp, Artificial Sequence
  Synthetic oligonucleotide
tccgttagcttaatacacgtacttaagagt

SEQ ID NO: 108132 - DNA, 30 bp, Artificial Sequence
  Synthetic oligonucleotide
aatggcgcaattcaacgatttggccagagt

SEQ ID NO: 108133 - DNA, 30 bp, Artificial Sequence
  Synthetic oligonucleotide
ccgctccaagaaggcttccgttcatagagt

SEQ ID NO: 108134 - DNA, 30 bp, Artificial Sequence
  Synthetic oligonucleotide
agaaaaggggcaccttgatcccgatagagt

SEQ ID NO: 108135 - DNA, 30 bp, Artificial Sequence
  Synthetic oligonucleotide
ctcaatacaaaataaaaattaagaacgagt

SEQ ID NO: 108136 - DNA, 30 bp, Artificial Sequence
  Synthetic oligonucleotide
gaaggtgagaatagtacagtagtaacgagt

SEQ ID NO: 108137 - DNA, 30 bp, Artificial Sequence
  Synthetic oligonucleotide
cctagactcgtacaagtagcgaggacgagt

SEQ ID NO: 108138 - DNA, 30 bp, Artificial Sequence
  Synthetic oligonucleotide
tcttgcttaccgtctattctaaaaccgagt

SEQ ID NO: 108139 - DNA, 30 bp, Artificial Sequence
  Synthetic oligonucleotide
gcgtttgaaaatcgtacatatcaaccgagt

SEQ ID NO: 108140 - DNA, 30 bp, Artificial Sequence
  Synthetic oligonucleotide
ttcgagcaacgaacaaagggccacgcgagt

SEQ ID NO: 108141 - DNA, 30 bp, Artificial Sequence
  Synthetic oligonucleotide
gctatcaagaaaataagaacatacgcgagt

SEQ ID NO: 108142 - DNA, 30 bp, Artificial Sequence
  Synthetic oligonucleotide
gcgttcaatatagcgtacaagaccgcgagt

SEQ ID NO: 108143 - DNA, 30 bp, Artificial Sequence
  Synthetic oligonucleotide
cgtcaggactagcatcggtctagcgcgagt

SEQ ID NO: 108144 - DNA, 28 bp, Artificial Sequence
  Synthetic oligonucleotide
gcgcgggcgcacaaaccatctatcgagt

SEQ ID NO: 108145 - DNA, 30 bp, Artificial Sequence
  Synthetic oligonucleotide
ctgtcttacgggcatgagtctaactcgagt

SEQ ID NO: 108146 - DNA, 30 bp, Artificial Sequence
  Synthetic oligonucleotide
tacagaggtcgggagacattagtaaggagt

SEQ ID NO: 108147 - DNA, 30 bp, Artificial Sequence
  Synthetic oligonucleotide
aacgggtgaatgtgtggaggaagcaggagt

SEQ ID NO: 108148 - DNA, 30 bp, Artificial Sequence
  Synthetic oligonucleotide
ccacgggagaagccagctctctgcaggagt

SEQ ID NO: 108149 - DNA, 30 bp, Artificial Sequence
  Synthetic oligonucleotide
catcaaggcgtggaaagccctggtaggagt

SEQ ID NO: 108150 - DNA, 30 bp, Artificial Sequence
  Synthetic oligonucleotide
cggattgccgtcgtatgtctgtttaggagt

SEQ ID NO: 108151 - DNA, 30 bp, Artificial Sequence
  Synthetic oligonucleotide
acgattcgaacttagagtcgtgcacggagt

SEQ ID NO: 108152 - DNA, 30 bp, Artificial Sequence
  Synthetic oligonucleotide
tgtggcggtacagttgaacaactacggagt

SEQ ID NO: 108153 - DNA, 30 bp, Artificial Sequence
  Synthetic oligonucleotide
ttccaaaaacgcagtgtataacaccggagt

SEQ ID NO: 108154 - DNA, 30 bp, Artificial Sequence
  Synthetic oligonucleotide
ccggttgatcccaggtacacagtccggagt

SEQ ID NO: 108155 - DNA, 30 bp, Artificial Sequence
  Synthetic oligonucleotide
tcgcgcattcgtttgtcctaggggcggagt

SEQ ID NO: 108156 - DNA, 30 bp, Artificial Sequence
  Synthetic oligonucleotide
cctttgatcaagtaacatgaagcagggagt

SEQ ID NO: 108157 - DNA, 30 bp, Artificial Sequence
  Synthetic oligonucleotide
aaggaaaataaacgtccgccccgagggagt

SEQ ID NO: 108158 - DNA, 30 bp, Artificial Sequence
  Synthetic oligonucleotide
tgattcatacatgctcacaacgtagggagt

SEQ ID NO: 108159 - DNA, 30 bp, Artificial Sequence
  Synthetic oligonucleotide
tctacggcgtttgagaagagggtagggagt

SEQ ID NO: 108160 - DNA, 30 bp, Artificial Sequence
  Synthetic oligonucleotide
agaacgttggtcaacggcgggaatgggagt

SEQ ID NO: 108161 - DNA, 30 bp, Artificial Sequence
  Synthetic oligonucleotide
atgatgtaaccctataggaacctatggagt

SEQ ID NO: 108162 - DNA, 30 bp, Artificial Sequence
  Synthetic oligonucleotide
acacaggaggtttgtgccacttcctggagt

SEQ ID NO: 108163 - DNA, 30 bp, Artificial Sequence
  Synthetic oligonucleotide
cagagcccgtaattggtgtttaggtggagt

SEQ ID NO: 108164 - DNA, 30 bp, Artificial Sequence
  Synthetic oligonucleotide
ctacgtcacaaacccaaacaattgtggagt

SEQ ID NO: 108165 - DNA, 30 bp, Artificial Sequence
  Synthetic oligonucleotide
agagcatggctaaaccagaatataatgagt

SEQ ID NO: 108166 - DNA, 30 bp, Artificial Sequence
  Synthetic oligonucleotide
tattggagcgagataattcgtgttatgagt

SEQ ID NO: 108167 - DNA, 30 bp, Artificial Sequence
  Synthetic oligonucleotide
gactgtagaggaatatacgaatgactgagt

SEQ ID NO: 108168 - DNA, 30 bp, Artificial Sequence
  Synthetic oligonucleotide
gcactagtatacgcgaggaatatgctgagt

SEQ ID NO: 108169 - DNA, 30 bp, Artificial Sequence
  Synthetic oligonucleotide
ttggttggaacgtgtgctgctaacgtgagt

SEQ ID NO: 108170 - DNA, 30 bp, Artificial Sequence
  Synthetic oligonucleotide
gagaaatcaaagaaatcatcgtgcgtgagt

SEQ ID NO: 108171 - DNA, 30 bp, Artificial Sequence
  Synthetic oligonucleotide
accaaatgtgatcgggggggacaggtgagt

SEQ ID NO: 108172 - DNA, 30 bp, Artificial Sequence
  Synthetic oligonucleotide
gggcagaagcatgcggggtgaatggtgagt

SEQ ID NO: 108173 - DNA, 30 bp, Artificial Sequence
  Synthetic oligonucleotide
ggcacgcctcaggcgtcttggattgtgagt

SEQ ID NO: 108174 - DNA, 30 bp, Artificial Sequence
  Synthetic oligonucleotide
taatggattctcagtgcgcaccttgtgagt

SEQ ID NO: 108175 - DNA, 30 bp, Artificial Sequence
  Synthetic oligonucleotide
tgaacatggatctaagggtaggaattgagt

SEQ ID NO: 108176 - DNA, 29 bp, Artificial Sequence
  Synthetic oligonucleotide
acgctccagtcgggacacatacgttgagt

SEQ ID NO: 108177 - DNA, 30 bp, Artificial Sequence
  Synthetic oligonucleotide
cacccggagcagcaaaggatataaaatagt

SEQ ID NO: 108178 - DNA, 30 bp, Artificial Sequence
  Synthetic oligonucleotide
ccacgttcgcaaattatgaagcgcaatagt

SEQ ID NO: 108179 - DNA, 30 bp, Artificial Sequence
  Synthetic oligonucleotide
attaagtggcaggtacgcaacgtcaatagt

SEQ ID NO: 108180 - DNA, 30 bp, Artificial Sequence
  Synthetic oligonucleotide
aacgaggccacgaaagatgtgtttcatagt

SEQ ID NO: 108181 - DNA, 30 bp, Artificial Sequence
  Synthetic oligonucleotide
tttaacggctaaatgtactcaacggatagt

SEQ ID NO: 108182 - DNA, 30 bp, Artificial Sequence
  Synthetic oligonucleotide
aacaacagatccggtaatcggcgggatagt

SEQ ID NO: 108183 - DNA, 28 bp, Artificial Sequence
  Synthetic oligonucleotide
cagatcgagaacacgaatcaaatatagt

SEQ ID NO: 108184 - DNA, 30 bp, Artificial Sequence
  Synthetic oligonucleotide
tgcacccggagtggcatgcgcgaatatagt

SEQ ID NO: 108185 - DNA, 30 bp, Artificial Sequence
  Synthetic oligonucleotide
taggcaacgccctgtactatcagcactagt

SEQ ID NO: 108186 - DNA, 30 bp, Artificial Sequence
  Synthetic oligonucleotide
aaacagaacccgacccactgaaggactagt

SEQ ID NO: 108187 - DNA, 30 bp, Artificial Sequence
  Synthetic oligonucleotide
agtacagaatagcgatactggtctactagt

SEQ ID NO: 108188 - DNA, 30 bp, Artificial Sequence
  Synthetic oligonucleotide
aggaatagcaacctgagtgtgatacctagt

SEQ ID NO: 108189 - DNA, 30 bp, Artificial Sequence
  Synthetic oligonucleotide
cgaattagcggcatcgaattagtgcctagt

SEQ ID NO: 108190 - DNA, 30 bp, Artificial Sequence
  Synthetic oligonucleotide
gtgcgatacaagtcaagagcatcagctagt

SEQ ID NO: 108191 - DNA, 30 bp, Artificial Sequence
  Synthetic oligonucleotide
aggtcattggcaaagctgtattaggctagt

SEQ ID NO: 108192 - DNA, 30 bp, Artificial Sequence
  Synthetic oligonucleotide
ggggtgaagaactgattggcagaaagtagt

SEQ ID NO: 108193 - DNA, 30 bp, Artificial Sequence
  Synthetic oligonucleotide
ttagctcgtgaaagtagtccacagagtagt

SEQ ID NO: 108194 - DNA, 29 bp, Artificial Sequence
  Synthetic oligonucleotide
ttagtgagagatacatttgaaatagtagt

SEQ ID NO: 108195 - DNA, 30 bp, Artificial Sequence
  Synthetic oligonucleotide
caccctgcctaaaggatcgaccgacgtagt

SEQ ID NO: 108196 - DNA, 30 bp, Artificial Sequence
  Synthetic oligonucleotide
aaacaaaccataataaggcgcaatcgtagt

SEQ ID NO: 108197 - DNA, 30 bp, Artificial Sequence
  Synthetic oligonucleotide
atgacaggccagttacgatagccaggtagt

SEQ ID NO: 108198 - DNA, 30 bp, Artificial Sequence
  Synthetic oligonucleotide
ccagacgcggaagacgcaagtggaggtagt

SEQ ID NO: 108199 - DNA, 30 bp, Artificial Sequence
  Synthetic oligonucleotide
aacaaacattagatcacgaatccgggtagt

SEQ ID NO: 108200 - DNA, 30 bp, Artificial Sequence
  Synthetic oligonucleotide
gacgatagaacaagacatataagaattagt

SEQ ID NO: 108201 - DNA, 30 bp, Artificial Sequence
  Synthetic oligonucleotide
aggggcacacggcgagcattacctattagt

SEQ ID NO: 108202 - DNA, 30 bp, Artificial Sequence
  Synthetic oligonucleotide
agttagccgaattgggagagacgacttagt

SEQ ID NO: 108203 - DNA, 30 bp, Artificial Sequence
  Synthetic oligonucleotide
catgctgatgtagttaggatcgatcttagt

SEQ ID NO: 108204 - DNA, 30 bp, Artificial Sequence
  Synthetic oligonucleotide
taccaagggtgactgtagcagtctcttagt

SEQ ID NO: 108205 - DNA, 30 bp, Artificial Sequence
  Synthetic oligonucleotide
cacgtcacggcgaatcatgcgttcgttagt

SEQ ID NO: 108206 - DNA, 30 bp, Artificial Sequence
  Synthetic oligonucleotide
attagtggagttaagataatagcacaacgt

SEQ ID NO: 108207 - DNA, 30 bp, Artificial Sequence
  Synthetic oligonucleotide
gtgcgagtaggattaccgagaccagaacgt

SEQ ID NO: 108208 - DNA, 30 bp, Artificial Sequence
  Synthetic oligonucleotide
aagacacaaaataaatgacgacgataacgt

SEQ ID NO: 108209 - DNA, 30 bp, Artificial Sequence
  Synthetic oligonucleotide
ggcgagataagcatgctccgttgaccacgt

SEQ ID NO: 108210 - DNA, 30 bp, Artificial Sequence
  Synthetic oligonucleotide
gcggcatggtggtccctcagcttcccacgt

SEQ ID NO: 108211 - DNA, 30 bp, Artificial Sequence
  Synthetic oligonucleotide
gcgatctggacgtgaaaggtagagccacgt

SEQ ID NO: 108212 - DNA, 30 bp, Artificial Sequence
  Synthetic oligonucleotide
ggacctcaccagtaggcccacaagtcacgt

SEQ ID NO: 108213 - DNA, 30 bp, Artificial Sequence
  Synthetic oligonucleotide
agatgcttaaaccaaacagccagaagacgt

SEQ ID NO: 108214 - DNA, 30 bp, Artificial Sequence
  Synthetic oligonucleotide
aatccgcacgggaggactcacgagagacgt

SEQ ID NO: 108215 - DNA, 30 bp, Artificial Sequence
  Synthetic oligonucleotide
atgagacggctcagaccctgcaggagacgt

SEQ ID NO: 108216 - DNA, 30 bp, Artificial Sequence
  Synthetic oligonucleotide
gcggagatgaagtggttattatgtagacgt

SEQ ID NO: 108217 - DNA, 30 bp, Artificial Sequence
  Synthetic oligonucleotide
agggctacatgtgactaagggtcccgacgt

SEQ ID NO: 108218 - DNA, 30 bp, Artificial Sequence
  Synthetic oligonucleotide
cagacggactccggggccaataacggacgt

SEQ ID NO: 108219 - DNA, 30 bp, Artificial Sequence
  Synthetic oligonucleotide
caacgggtgaattcagaggccatatgacgt

SEQ ID NO: 108220 - DNA, 30 bp, Artificial Sequence
  Synthetic oligonucleotide
taataaagcagtcgtaatgggaagtgacgt

SEQ ID NO: 108221 - DNA, 30 bp, Artificial Sequence
  Synthetic oligonucleotide
cacccaggagggagggcttggtttatacgt

SEQ ID NO: 108222 - DNA, 30 bp, Artificial Sequence
  Synthetic oligonucleotide
cagagttcgacagggattgataggctacgt

SEQ ID NO: 108223 - DNA, 30 bp, Artificial Sequence
  Synthetic oligonucleotide
gtaagatcacggtaattcatactgctacgt

SEQ ID NO: 108224 - DNA, 30 bp, Artificial Sequence
  Synthetic oligonucleotide
caatagacgagatgcgtgggcgcggtacgt

SEQ ID NO: 108225 - DNA, 30 bp, Artificial Sequence
  Synthetic oligonucleotide
ggcgggcgagcttccttcgagacattacgt

SEQ ID NO: 108226 - DNA, 30 bp, Artificial Sequence
  Synthetic oligonucleotide
ctggggttgttcgaggctagtgcataccgt

SEQ ID NO: 108227 - DNA, 30 bp, Artificial Sequence
  Synthetic oligonucleotide
ggtgagaacccttgaagataagtcacccgt

SEQ ID NO: 108228 - DNA, 30 bp, Artificial Sequence
  Synthetic oligonucleotide
acacgcaggagtgcctcaagggtgacccgt

SEQ ID NO: 108229 - DNA, 30 bp, Artificial Sequence
  Synthetic oligonucleotide
cgcccctaaggggttggcacccatgcccgt

SEQ ID NO: 108230 - DNA, 30 bp, Artificial Sequence
  Synthetic oligonucleotide
atctaccagtgctcaggccattgttcccgt

SEQ ID NO: 108231 - DNA, 30 bp, Artificial Sequence
  Synthetic oligonucleotide
tctaagagcaggtcctcggaaaggcgccgt

SEQ ID NO: 108232 - DNA, 30 bp, Artificial Sequence
  Synthetic oligonucleotide
tcggggctgacagtcctatgtgaaggccgt

SEQ ID NO: 108233 - DNA, 30 bp, Artificial Sequence
  Synthetic oligonucleotide
tcgtacgtttcgtggataaaagtaggccgt

SEQ ID NO: 108234 - DNA, 30 bp, Artificial Sequence
  Synthetic oligonucleotide
tagaacccacattagccatataggtgccgt

SEQ ID NO: 108235 - DNA, 30 bp, Artificial Sequence
  Synthetic oligonucleotide
agctacatcgaacaactgacgagcctccgt

SEQ ID NO: 108236 - DNA, 30 bp, Artificial Sequence
  Synthetic oligonucleotide
tccaagaaaattaggtccacgtgcctccgt

SEQ ID NO: 108237 - DNA, 30 bp, Artificial Sequence
  Synthetic oligonucleotide
gttaaaacctatgataactgcgagctccgt

SEQ ID NO: 108238 - DNA, 30 bp, Artificial Sequence
  Synthetic oligonucleotide
ctgtcgggtgcaagtaatccctgaaagcgt

SEQ ID NO: 108239 - DNA, 30 bp, Artificial Sequence
  Synthetic oligonucleotide
ccgatctagatggtcgatcgttctaagcgt

SEQ ID NO: 108240 - DNA, 30 bp, Artificial Sequence
  Synthetic oligonucleotide
ggcagaggccaagtcgcagggaatcagcgt

SEQ ID NO: 108241 - DNA, 30 bp, Artificial Sequence
  Synthetic oligonucleotide
ttatgagcggtcaactccaaaattcagcgt

SEQ ID NO: 108242 - DNA, 30 bp, Artificial Sequence
  Synthetic oligonucleotide
ccgttgtaggatcgtgtacgaatcgagcgt

SEQ ID NO: 108243 - DNA, 30 bp, Artificial Sequence
  Synthetic oligonucleotide
ggaacagacttaatcatatcgcgatagcgt

SEQ ID NO: 108244 - DNA, 30 bp, Artificial Sequence
  Synthetic oligonucleotide
cacgtgcagtcgcgattaaggtcctagcgt

SEQ ID NO: 108245 - DNA, 30 bp, Artificial Sequence
  Synthetic oligonucleotide
gagaggatcgtaaccggagggggctagcgt

SEQ ID NO: 108246 - DNA, 30 bp, Artificial Sequence
  Synthetic oligonucleotide
gacggacccacgaggtacagggtctagcgt

SEQ ID NO: 108247 - DNA, 29 bp, Artificial Sequence
  Synthetic oligonucleotide
gacagtggatgaggcatcggaacacgcgt

SEQ ID NO: 108248 - DNA, 31 bp, Artificial Sequence
  Synthetic oligonucleotide
gtcgtactgcttatgcacacatgcgccgcgt

SEQ ID NO: 108249 - DNA, 30 bp, Artificial Sequence
  Synthetic oligonucleotide
cgggataatattattaggggtagagcgcgt

SEQ ID NO: 108250 - DNA, 30 bp, Artificial Sequence
  Synthetic oligonucleotide
acgcacccgactatcactacaggctcgcgt

SEQ ID NO: 108251 - DNA, 30 bp, Artificial Sequence
  Synthetic oligonucleotide
acgtgtatagatcacctaaggaaaaggcgt

SEQ ID NO: 108252 - DNA, 30 bp, Artificial Sequence
  Synthetic oligonucleotide
cggcaaaaacaactcccaattcagaggcgt

SEQ ID NO: 108253 - DNA, 30 bp, Artificial Sequence
  Synthetic oligonucleotide
cccgctcgaaaggcgtgatataggaggcgt

SEQ ID NO: 108254 - DNA, 30 bp, Artificial Sequence
  Synthetic oligonucleotide
ggtcacgtaccggcacactcatcccggcgt

SEQ ID NO: 108255 - DNA, 30 bp, Artificial Sequence
  Synthetic oligonucleotide
tcagacctattgcgcacgggtcctgggcgt

SEQ ID NO: 108256 - DNA, 30 bp, Artificial Sequence
  Synthetic oligonucleotide
tggagccatatggaaaacgcgcaatggcgt

SEQ ID NO: 108257 - DNA, 30 bp, Artificial Sequence
  Synthetic oligonucleotide
atgctgggatatagctaaatgggttggcgt

SEQ ID NO: 108258 - DNA, 30 bp, Artificial Sequence
  Synthetic oligonucleotide
acatagatgggttgagtatcagaaatgcgt

SEQ ID NO: 108259 - DNA, 30 bp, Artificial Sequence
  Synthetic oligonucleotide
acaatgccactcgttgagggtacaatgcgt

SEQ ID NO: 108260 - DNA, 30 bp, Artificial Sequence
  Synthetic oligonucleotide
gctatactaggtgtcggctgggtaatgcgt

SEQ ID NO: 108261 - DNA, 30 bp, Artificial Sequence
  Synthetic oligonucleotide
catggacttctttacaagcccaagatgcgt

SEQ ID NO: 108262 - DNA, 30 bp, Artificial Sequence
  Synthetic oligonucleotide
gccaggctgacaggggtactatagatgcgt

SEQ ID NO: 108263 - DNA, 30 bp, Artificial Sequence
  Synthetic oligonucleotide
agatatcacccgtaaatgttgcatatgcgt

SEQ ID NO: 108264 - DNA, 30 bp, Artificial Sequence
  Synthetic oligonucleotide
atggatctttatgcctgaggattggtgcgt

SEQ ID NO: 108265 - DNA, 30 bp, Artificial Sequence
  Synthetic oligonucleotide
ccttctgctcaaataagaagagatttgcgt

SEQ ID NO: 108266 - DNA, 30 bp, Artificial Sequence
  Synthetic oligonucleotide
acggtctgggggcactacatcccgaatcgt

SEQ ID NO: 108267 - DNA, 30 bp, Artificial Sequence
  Synthetic oligonucleotide
gcctgaagaggcagttttaagcagcatcgt

SEQ ID NO: 108268 - DNA, 30 bp, Artificial Sequence
  Synthetic oligonucleotide
tctcgcgtagtgagaatttccgaggatcgt

SEQ ID NO: 108269 - DNA, 30 bp, Artificial Sequence
  Synthetic oligonucleotide
ttcggttaagtctgggtaatggctgatcgt

SEQ ID NO: 108270 - DNA, 30 bp, Artificial Sequence
  Synthetic oligonucleotide
ggacggcgattgttccaatccgttgatcgt

SEQ ID NO: 108271 - DNA, 30 bp, Artificial Sequence
  Synthetic oligonucleotide
gtgtctccgactagtgtaccgcaaactcgt

SEQ ID NO: 108272 - DNA, 30 bp, Artificial Sequence
  Synthetic oligonucleotide
atttcggtaatggcgtcttatcgagctcgt

SEQ ID NO: 108273 - DNA, 30 bp, Artificial Sequence
  Synthetic oligonucleotide
gtcaaacccaagttaaaatgctactctcgt

SEQ ID NO: 108274 - DNA, 30 bp, Artificial Sequence
  Synthetic oligonucleotide
aggagtggatgcacaaaggtatggagtcgt

SEQ ID NO: 108275 - DNA, 30 bp, Artificial Sequence
  Synthetic oligonucleotide
taaggatatgtgaattaggggggtagtcgt

SEQ ID NO: 108276 - DNA, 30 bp, Artificial Sequence
  Synthetic oligonucleotide
ctggcggttagtagtactgtagggcgtcgt

SEQ ID NO: 108277 - DNA, 30 bp, Artificial Sequence
  Synthetic oligonucleotide
ccgacaattgagtccatatacttcggtcgt

SEQ ID NO: 108278 - DNA, 30 bp, Artificial Sequence
  Synthetic oligonucleotide
acctatcatgggtgttggggagatggtcgt

SEQ ID NO: 108279 - DNA, 30 bp, Artificial Sequence
  Synthetic oligonucleotide
gagcatgaccttgcttaagtgacatgtcgt

SEQ ID NO: 108280 - DNA, 30 bp, Artificial Sequence
  Synthetic oligonucleotide
cgtctacaagaagctttaaagtgaattcgt

SEQ ID NO: 108281 - DNA, 30 bp, Artificial Sequence
  Synthetic oligonucleotide
ctagtgacaagaaacgcaatacgcattcgt

SEQ ID NO: 108282 - DNA, 30 bp, Artificial Sequence
  Synthetic oligonucleotide
gtgtggtccaaggccgaaggagtcattcgt

SEQ ID NO: 108283 - DNA, 30 bp, Artificial Sequence
  Synthetic oligonucleotide
agatatgcctgcagtagttaatagattcgt

SEQ ID NO: 108284 - DNA, 30 bp, Artificial Sequence
  Synthetic oligonucleotide
cctcgaagctgcatggacaaatttattcgt

SEQ ID NO: 108285 - DNA, 30 bp, Artificial Sequence
  Synthetic oligonucleotide
cacagttatatggtccgaatagcgcttcgt

SEQ ID NO: 108286 - DNA, 30 bp, Artificial Sequence
  Synthetic oligonucleotide
agtagggttgggtacattttttcgcttcgt

SEQ ID NO: 108287 - DNA, 30 bp, Artificial Sequence
  Synthetic oligonucleotide
accggtattaacgtcgatgattgatttcgt

SEQ ID NO: 108288 - DNA, 30 bp, Artificial Sequence
  Synthetic oligonucleotide
aggatcagcagttcatgaggttcgaaaggt

SEQ ID NO: 108289 - DNA, 30 bp, Artificial Sequence
  Synthetic oligonucleotide
gtggacatgggcaacaccggccgtaaaggt

SEQ ID NO: 108290 - DNA, 30 bp, Artificial Sequence
  Synthetic oligonucleotide
taatcgagctctaatggtataggacaaggt

SEQ ID NO: 108291 - DNA, 30 bp, Artificial Sequence
  Synthetic oligonucleotide
gctagggttcaagtccgtggtcatcaaggt

SEQ ID NO: 108292 - DNA, 30 bp, Artificial Sequence
  Synthetic oligonucleotide
cgacaatttgcacctccccgtcaagaaggt

SEQ ID NO: 108293 - DNA, 30 bp, Artificial Sequence
  Synthetic oligonucleotide
caagaagtcgtctaagggacgccggaaggt

SEQ ID NO: 108294 - DNA, 30 bp, Artificial Sequence
  Synthetic oligonucleotide
tggaatcgtaagttgacacagtgggaaggt

SEQ ID NO: 108295 - DNA, 30 bp, Artificial Sequence
  Synthetic oligonucleotide
ggaagttgtggaggtgaaggctcctaaggt

SEQ ID NO: 108296 - DNA, 30 bp, Artificial Sequence
  Synthetic oligonucleotide
gccaaaatcagggcaataatcctgtaaggt

SEQ ID NO: 108297 - DNA, 30 bp, Artificial Sequence
  Synthetic oligonucleotide
aaatgctcaagcaggatgacttaaacaggt

SEQ ID NO: 108298 - DNA, 30 bp, Artificial Sequence
  Synthetic oligonucleotide
tctagatgggcagtgtggtgcttgacaggt

SEQ ID NO: 108299 - DNA, 30 bp, Artificial Sequence
  Synthetic oligonucleotide
tgcatgcgttgtttcactaggggaccaggt

SEQ ID NO: 108300 - DNA, 30 bp, Artificial Sequence
  Synthetic oligonucleotide
ggtgtatatatcagagcttagtcgccaggt

SEQ ID NO: 108301 - DNA, 30 bp, Artificial Sequence
  Synthetic oligonucleotide
cgagcctcactacacgcggtcttgccaggt

SEQ ID NO: 108302 - DNA, 30 bp, Artificial Sequence
  Synthetic oligonucleotide
caggacgtgcagggttctagcttcgcaggt

SEQ ID NO: 108303 - DNA, 30 bp, Artificial Sequence
  Synthetic oligonucleotide
atacacagccaataggacagtccggcaggt

SEQ ID NO: 108304 - DNA, 30 bp, Artificial Sequence
  Synthetic oligonucleotide
tcggggtgataattccaatccgtgagaggt

SEQ ID NO: 108305 - DNA, 30 bp, Artificial Sequence
  Synthetic oligonucleotide
atcgcccatgaaatgtggaccgtccgaggt

SEQ ID NO: 108306 - DNA, 30 bp, Artificial Sequence
  Synthetic oligonucleotide
gaaaacagatcacggcttgcgcagggaggt

SEQ ID NO: 108307 - DNA, 30 bp, Artificial Sequence
  Synthetic oligonucleotide
ctcagctgggaggagggacagataataggt

SEQ ID NO: 108308 - DNA, 30 bp, Artificial Sequence
  Synthetic oligonucleotide
tccatcgcgtgggcagcatcgaacataggt

SEQ ID NO: 108309 - DNA, 30 bp, Artificial Sequence
  Synthetic oligonucleotide
atagcacaaaaatcttctgacaaactaggt

SEQ ID NO: 108310 - DNA, 30 bp, Artificial Sequence
  Synthetic oligonucleotide
gaccggcgagggactcctatacccctaggt

SEQ ID NO: 108311 - DNA, 30 bp, Artificial Sequence
  Synthetic oligonucleotide
gtatccagggcgaagcgtttaatagtaggt

SEQ ID NO: 108312 - DNA, 30 bp, Artificial Sequence
  Synthetic oligonucleotide
tccaagaacaattatgaagtaagcgtaggt

SEQ ID NO: 108313 - DNA, 30 bp, Artificial Sequence
  Synthetic oligonucleotide
acagacaaggcatccgtttgggcattaggt

SEQ ID NO: 108314 - DNA, 30 bp, Artificial Sequence
  Synthetic oligonucleotide
gcacgtaggaaactcgctttctgattaggt

SEQ ID NO: 108315 - DNA, 30 bp, Artificial Sequence
  Synthetic oligonucleotide
accggatcatgtacaattcaggacttaggt

SEQ ID NO: 108316 - DNA, 30 bp, Artificial Sequence
  Synthetic oligonucleotide
gggacaatatatagtaccaccgcgttaggt

SEQ ID NO: 108317 - DNA, 30 bp, Artificial Sequence
  Synthetic oligonucleotide
tagtaacggggacggcttagtgttttaggt

SEQ ID NO: 108318 - DNA, 30 bp, Artificial Sequence
  Synthetic oligonucleotide
tgcgaaaggattttgttccaactcaacggt

SEQ ID NO: 108319 - DNA, 30 bp, Artificial Sequence
  Synthetic oligonucleotide
gtgatacaggtgggatagtaggtgaacggt

SEQ ID NO: 108320 - DNA, 30 bp, Artificial Sequence
  Synthetic oligonucleotide
ctcaatcaaaagttacccaccgaacacggt

SEQ ID NO: 108321 - DNA, 30 bp, Artificial Sequence
  Synthetic oligonucleotide
tgggagttaccgagaactaactagtacggt

SEQ ID NO: 108322 - DNA, 30 bp, Artificial Sequence
  Synthetic oligonucleotide
cgcgaacggaatatacacacggggtacggt

SEQ ID NO: 108323 - DNA, 30 bp, Artificial Sequence
  Synthetic oligonucleotide
tgaggcaaaatgcctgttatggcaaccggt

SEQ ID NO: 108324 - DNA, 30 bp, Artificial Sequence
  Synthetic oligonucleotide
caaagagtgtgagctcgggtaaggcccggt

SEQ ID NO: 108325 - DNA, 30 bp, Artificial Sequence
  Synthetic oligonucleotide
aaacaatgatctaactacacctacgccggt

SEQ ID NO: 108326 - DNA, 30 bp, Artificial Sequence
  Synthetic oligonucleotide
acggaggctgtcacctgaaacaaggccggt

SEQ ID NO: 108327 - DNA, 30 bp, Artificial Sequence
  Synthetic oligonucleotide
actgaagtacacggaaggactatgtccggt

SEQ ID NO: 108328 - DNA, 30 bp, Artificial Sequence
  Synthetic oligonucleotide
ttcaccaggcacgtctcacataagagcggt

SEQ ID NO: 108329 - DNA, 30 bp, Artificial Sequence
  Synthetic oligonucleotide
gtcgatagtgggtacacaactgggagcggt

SEQ ID NO: 108330 - DNA, 30 bp, Artificial Sequence
  Synthetic oligonucleotide
gccgtctgtatgttcaccggggggcgcggt

SEQ ID NO: 108331 - DNA, 30 bp, Artificial Sequence
  Synthetic oligonucleotide
ggggagaggaaggacagtaacaaatgcggt

SEQ ID NO: 108332 - DNA, 30 bp, Artificial Sequence
  Synthetic oligonucleotide
tctcacgccattgggtgacagggttgcggt

SEQ ID NO: 108333 - DNA, 30 bp, Artificial Sequence
  Synthetic oligonucleotide
tcgcgtcctcgaatgttgactgtaatcggt

SEQ ID NO: 108334 - DNA, 30 bp, Artificial Sequence
  Synthetic oligonucleotide
ttgcggtggaagacgcgggtaatcatcggt

SEQ ID NO: 108335 - DNA, 30 bp, Artificial Sequence
  Synthetic oligonucleotide
cagttaaaatgggatttagtgatcctcggt

SEQ ID NO: 108336 - DNA, 30 bp, Artificial Sequence
  Synthetic oligonucleotide
gtcacaaagtgtggtgagtgtggtgtcggt

SEQ ID NO: 108337 - DNA, 30 bp, Artificial Sequence
  Synthetic oligonucleotide
actgttgaacgatatcttgtgacattcggt

SEQ ID NO: 108338 - DNA, 30 bp, Artificial Sequence
  Synthetic oligonucleotide
tggagtagaaacgttactctttgcttcggt

SEQ ID NO: 108339 - DNA, 30 bp, Artificial Sequence
  Synthetic oligonucleotide
atgcagtgcatatgctgaatcgatcagggt

SEQ ID NO: 108340 - DNA, 30 bp, Artificial Sequence
  Synthetic oligonucleotide
ggtgcaaaccatacggcaatagctcagggt

SEQ ID NO: 108341 - DNA, 30 bp, Artificial Sequence
  Synthetic oligonucleotide
gcttgtgtaagattatgttcgaccgagggt

SEQ ID NO: 108342 - DNA, 30 bp, Artificial Sequence
  Synthetic oligonucleotide
cgaactcaggcaaggtaatagatcgagggt

SEQ ID NO: 108343 - DNA, 30 bp, Artificial Sequence
  Synthetic oligonucleotide
agagggcgtataggtcaaaacttatagggt

SEQ ID NO: 108344 - DNA, 30 bp, Artificial Sequence
  Synthetic oligonucleotide
cacgggctatgaaccttcgtactcacgggt

SEQ ID NO: 108345 - DNA, 30 bp, Artificial Sequence
  Synthetic oligonucleotide
agtgtaagaacggtccaacggaggacgggt

SEQ ID NO: 108346 - DNA, 30 bp, Artificial Sequence
  Synthetic oligonucleotide
tctaaaggcaatcgacttgtacaaccgggt

SEQ ID NO: 108347 - DNA, 30 bp, Artificial Sequence
  Synthetic oligonucleotide
gtccgtgtacgattttgggcatgcccgggt

SEQ ID NO: 108348 - DNA, 30 bp, Artificial Sequence
  Synthetic oligonucleotide
tcctagcgttgcaaaaccttataagcgggt

SEQ ID NO: 108349 - DNA, 30 bp, Artificial Sequence
  Synthetic oligonucleotide
gatgggagaaacccaagtcgcggatcgggt

SEQ ID NO: 108350 - DNA, 30 bp, Artificial Sequence
  Synthetic oligonucleotide
gcaaggagaccggaatcctttcgtaggggt

SEQ ID NO: 108351 - DNA, 30 bp, Artificial Sequence
  Synthetic oligonucleotide
atcatcgaacgtaaggacgaaattaggggt

SEQ ID NO: 108352 - DNA, 30 bp, Artificial Sequence
  Synthetic oligonucleotide
cagcggaatgtcgtcgataacttccggggt

SEQ ID NO: 108353 - DNA, 30 bp, Artificial Sequence
  Synthetic oligonucleotide
agagcaacggcttcatcctacaatcggggt

SEQ ID NO: 108354 - DNA, 30 bp, Artificial Sequence
  Synthetic oligonucleotide
agctgggaagcgtgcagagcggcagggggt

SEQ ID NO: 108355 - DNA, 30 bp, Artificial Sequence
  Synthetic oligonucleotide
cggaaccatcctcaatttgtggacgggggt

SEQ ID NO: 108356 - DNA, 30 bp, Artificial Sequence
  Synthetic oligonucleotide
caggacggaggggggggctagcgatggggt

SEQ ID NO: 108357 - DNA, 30 bp, Artificial Sequence
  Synthetic oligonucleotide
aggagtgtcggtcgaccgccgaagtggggt

SEQ ID NO: 108358 - DNA, 30 bp, Artificial Sequence
  Synthetic oligonucleotide
gggcaagacagggagtggcgttggtggggt

SEQ ID NO: 108359 - DNA, 30 bp, Artificial Sequence
  Synthetic oligonucleotide
actgggcagtatgcttagccgtaaatgggt

SEQ ID NO: 108360 - DNA, 30 bp, Artificial Sequence
  Synthetic oligonucleotide
atcactttttaggacagaatggtaatgggt

SEQ ID NO: 108361 - DNA, 30 bp, Artificial Sequence
  Synthetic oligonucleotide
gtctaatcggacgagcgtgacaccatgggt

SEQ ID NO: 108362 - DNA, 30 bp, Artificial Sequence
  Synthetic oligonucleotide
tattgacgaggccgacgcacgaagatgggt

SEQ ID NO: 108363 - DNA, 30 bp, Artificial Sequence
  Synthetic oligonucleotide
gcgccaatgatcttggggaaagaactgggt

SEQ ID NO: 108364 - DNA, 30 bp, Artificial Sequence
  Synthetic oligonucleotide
cgcgtgagatgttgctcagggcgaaatggt

SEQ ID NO: 108365 - DNA, 30 bp, Artificial Sequence
  Synthetic oligonucleotide
ctaggatggaatacgagacagaccaatggt

SEQ ID NO: 108366 - DNA, 30 bp, Artificial Sequence
  Synthetic oligonucleotide
attaaacattacagatttaccatcaatggt

SEQ ID NO: 108367 - DNA, 30 bp, Artificial Sequence
  Synthetic oligonucleotide
tcgggctgtgggttagcgtcataacatggt

SEQ ID NO: 108368 - DNA, 30 bp, Artificial Sequence
  Synthetic oligonucleotide
agatacttaataacaaccaagtagcatggt

SEQ ID NO: 108369 - DNA, 30 bp, Artificial Sequence
  Synthetic oligonucleotide
tcgttgttataagtgagtacggttcatggt

SEQ ID NO: 108370 - DNA, 30 bp, Artificial Sequence
  Synthetic oligonucleotide
agcttgcaaagctgatctatgaccgatggt

SEQ ID NO: 108371 - DNA, 30 bp, Artificial Sequence
  Synthetic oligonucleotide
cacagcgtgacttggcggaaaactgatggt

SEQ ID NO: 108372 - DNA, 30 bp, Artificial Sequence
  Synthetic oligonucleotide
ccgcatagagtagtggctttacgatatggt

SEQ ID NO: 108373 - DNA, 30 bp, Artificial Sequence
  Synthetic oligonucleotide
atgaaataaacccgttgcggcgaaactggt

SEQ ID NO: 108374 - DNA, 30 bp, Artificial Sequence
  Synthetic oligonucleotide
ccgttagggggagcttactttccaactggt

SEQ ID NO: 108375 - DNA, 30 bp, Artificial Sequence
  Synthetic oligonucleotide
acaaatgggtagccactctccgcaactggt

SEQ ID NO: 108376 - DNA, 30 bp, Artificial Sequence
  Synthetic oligonucleotide
aagttgcgggacacactggtgacgactggt

SEQ ID NO: 108377 - DNA, 30 bp, Artificial Sequence
  Synthetic oligonucleotide
cgtgatggcaatttcgaatgggtgactggt

SEQ ID NO: 108378 - DNA, 30 bp, Artificial Sequence
  Synthetic oligonucleotide
cctgagccggcaggatcagggatctctggt

SEQ ID NO: 108379 - DNA, 30 bp, Artificial Sequence
  Synthetic oligonucleotide
gctcgtggggaggcttcagtaacgtctggt

SEQ ID NO: 108380 - DNA, 30 bp, Artificial Sequence
  Synthetic oligonucleotide
tacatgggcacgaatatccccagttctggt

SEQ ID NO: 108381 - DNA, 30 bp, Artificial Sequence
  Synthetic oligonucleotide
acggtatgcggggggccagtgaaaagtggt

SEQ ID NO: 108382 - DNA, 30 bp, Artificial Sequence
  Synthetic oligonucleotide
tcatcaccaactacttaaccttatagtggt

SEQ ID NO: 108383 - DNA, 30 bp, Artificial Sequence
  Synthetic oligonucleotide
taatatgactaggtgccgatagttagtggt

SEQ ID NO: 108384 - DNA, 30 bp, Artificial Sequence
  Synthetic oligonucleotide
cgtttgatctgtatgaaggcagatcgtggt

SEQ ID NO: 108385 - DNA, 30 bp, Artificial Sequence
  Synthetic oligonucleotide
catattaacgtcaaattgaaaactcgtggt

SEQ ID NO: 108386 - DNA, 30 bp, Artificial Sequence
  Synthetic oligonucleotide
tgctaataacccagtcacggtagtggtggt

SEQ ID NO: 108387 - DNA, 31 bp, Artificial Sequence
  Synthetic oligonucleotide
atgggagttcacaaccatccacgttggtggt

SEQ ID NO: 108388 - DNA, 30 bp, Artificial Sequence
  Synthetic oligonucleotide
cacactcggaatcagctcttaaaaattggt

SEQ ID NO: 108389 - DNA, 30 bp, Artificial Sequence
  Synthetic oligonucleotide
tgtggcgggacctgtagccgggtaattggt

SEQ ID NO: 108390 - DNA, 30 bp, Artificial Sequence
  Synthetic oligonucleotide
tgacatactgtgctgagaaccggacttggt

SEQ ID NO: 108391 - DNA, 30 bp, Artificial Sequence
  Synthetic oligonucleotide
acagtgagtgggagtctataagggcttggt

SEQ ID NO: 108392 - DNA, 30 bp, Artificial Sequence
  Synthetic oligonucleotide
agccagaaacgcgagttgcttgccgttggt

SEQ ID NO: 108393 - DNA, 30 bp, Artificial Sequence
  Synthetic oligonucleotide
cgggaataaagcggtcaagtatgttttggt

SEQ ID NO: 108394 - DNA, 30 bp, Artificial Sequence
  Synthetic oligonucleotide
agacgaaactctagatttgccaaaaaatgt

SEQ ID NO: 108395 - DNA, 30 bp, Artificial Sequence
  Synthetic oligonucleotide
caaccgtaccggtgagcagtacaaaaatgt

SEQ ID NO: 108396 - DNA, 30 bp, Artificial Sequence
  Synthetic oligonucleotide
cacactagacgaaggctccttagaaaatgt

SEQ ID NO: 108397 - DNA, 30 bp, Artificial Sequence
  Synthetic oligonucleotide
ctagtttctgagtgatgactatggaaatgt

SEQ ID NO: 108398 - DNA, 30 bp, Artificial Sequence
  Synthetic oligonucleotide
cacgttccggtccgtaaataccataaatgt

SEQ ID NO: 108399 - DNA, 30 bp, Artificial Sequence
  Synthetic oligonucleotide
caaactaagcactgaaaagcagctgaatgt

SEQ ID NO: 108400 - DNA, 30 bp, Artificial Sequence
  Synthetic oligonucleotide
ctcaatacccgaaatcagcaataataatgt

SEQ ID NO: 108401 - DNA, 30 bp, Artificial Sequence
  Synthetic oligonucleotide
aaagtggaagagactatcggaatcacatgt

SEQ ID NO: 108402 - DNA, 30 bp, Artificial Sequence
  Synthetic oligonucleotide
tcagggagtgccatatgccctgatccatgt

SEQ ID NO: 108403 - DNA, 30 bp, Artificial Sequence
  Synthetic oligonucleotide
gactaaaaaaatgaccacagtatggcatgt

SEQ ID NO: 108404 - DNA, 30 bp, Artificial Sequence
  Synthetic oligonucleotide
agcatggccgattggaccctccgtgcatgt

SEQ ID NO: 108405 - DNA, 30 bp, Artificial Sequence
  Synthetic oligonucleotide
gaacgatgcacaacgaataacggctcatgt

SEQ ID NO: 108406 - DNA, 30 bp, Artificial Sequence
  Synthetic oligonucleotide
agatcgctggggcagccgtggtcaagatgt

SEQ ID NO: 108407 - DNA, 30 bp, Artificial Sequence
  Synthetic oligonucleotide
cagaacggttctgataaggatgggagatgt

SEQ ID NO: 108408 - DNA, 30 bp, Artificial Sequence
  Synthetic oligonucleotide
tggtaatctcctaaatctagcaatagatgt

SEQ ID NO: 108409 - DNA, 30 bp, Artificial Sequence
  Synthetic oligonucleotide
acctgtgggcaatgattataagatagatgt

SEQ ID NO: 108410 - DNA, 30 bp, Artificial Sequence
  Synthetic oligonucleotide
atacatgcatgggctgagtgcgatagatgt

SEQ ID NO: 108411 - DNA, 30 bp, Artificial Sequence
  Synthetic oligonucleotide
ggcgtttccgtcacacatgtcgagcgatgt

SEQ ID NO: 108412 - DNA, 30 bp, Artificial Sequence
  Synthetic oligonucleotide
tcgccaagcggtagtgtaaggtttggatgt

SEQ ID NO: 108413 - DNA, 30 bp, Artificial Sequence
  Synthetic oligonucleotide
acaagcctgggtatcgaagatctttgatgt

SEQ ID NO: 108414 - DNA, 30 bp, Artificial Sequence
  Synthetic oligonucleotide
gcgctaaatcagatgctccctgagatatgt

SEQ ID NO: 108415 - DNA, 30 bp, Artificial Sequence
  Synthetic oligonucleotide
gacgcaaagacgatggttaggctcctatgt

SEQ ID NO: 108416 - DNA, 30 bp, Artificial Sequence
  Synthetic oligonucleotide
tagacgaatccgatttaaatgcacttatgt

SEQ ID NO: 108417 - DNA, 30 bp, Artificial Sequence
  Synthetic oligonucleotide
caggagactaggggtctcgcagtgttatgt

SEQ ID NO: 108418 - DNA, 30 bp, Artificial Sequence
  Synthetic oligonucleotide
acgaggctaagatccttttacgcaaactgt

SEQ ID NO: 108419 - DNA, 30 bp, Artificial Sequence
  Synthetic oligonucleotide
taccatacgcaaagtgagccaatacactgt

SEQ ID NO: 108420 - DNA, 30 bp, Artificial Sequence
  Synthetic oligonucleotide
tggttacagaatgtgacataatcagactgt

SEQ ID NO: 108421 - DNA, 30 bp, Artificial Sequence
  Synthetic oligonucleotide
gaagggcgtttcggcaggatgtatgactgt

SEQ ID NO: 108422 - DNA, 30 bp, Artificial Sequence
  Synthetic oligonucleotide
tctaataaaccaaggtgagtagtatactgt

SEQ ID NO: 108423 - DNA, 30 bp, Artificial Sequence
  Synthetic oligonucleotide
gtactaacgtggggggttgtgggctactgt

SEQ ID NO: 108424 - DNA, 30 bp, Artificial Sequence
  Synthetic oligonucleotide
gggagggaataaaggtcttccagttactgt

SEQ ID NO: 108425 - DNA, 30 bp, Artificial Sequence
  Synthetic oligonucleotide
ttgccacccatgagtgggttccatacctgt

SEQ ID NO: 108426 - DNA, 30 bp, Artificial Sequence
  Synthetic oligonucleotide
ggggcaacttgctctcgagtatctccctgt

SEQ ID NO: 108427 - DNA, 30 bp, Artificial Sequence
  Synthetic oligonucleotide
cgacaaaggcttaatagggctaacgcctgt

SEQ ID NO: 108428 - DNA, 30 bp, Artificial Sequence
  Synthetic oligonucleotide
gctgtacaaaggcgatctagagttgcctgt

SEQ ID NO: 108429 - DNA, 30 bp, Artificial Sequence
  Synthetic oligonucleotide
tcagaacgcagtggaatcgtgtacagctgt

SEQ ID NO: 108430 - DNA, 30 bp, Artificial Sequence
  Synthetic oligonucleotide
cttactccgttgaaggtgccggctagctgt

SEQ ID NO: 108431 - DNA, 30 bp, Artificial Sequence
  Synthetic oligonucleotide
acgcacgtaattaggcgggaagaacgctgt

SEQ ID NO: 108432 - DNA, 30 bp, Artificial Sequence
  Synthetic oligonucleotide
gactgctagtcaccaccagagaaaggctgt

SEQ ID NO: 108433 - DNA, 30 bp, Artificial Sequence
  Synthetic oligonucleotide
tgtaagacttgcgcgcataaacaaggctgt

SEQ ID NO: 108434 - DNA, 30 bp, Artificial Sequence
  Synthetic oligonucleotide
agagagataccagtctagaagccaggctgt

SEQ ID NO: 108435 - DNA, 30 bp, Artificial Sequence
  Synthetic oligonucleotide
cgaagtttcggttattggctaaggggctgt

SEQ ID NO: 108436 - DNA, 30 bp, Artificial Sequence
  Synthetic oligonucleotide
tactaaaaagtgtcattgtgccaatgctgt

SEQ ID NO: 108437 - DNA, 30 bp, Artificial Sequence
  Synthetic oligonucleotide
cgagtccactagcgctgcgtcgagtgctgt

SEQ ID NO: 108438 - DNA, 30 bp, Artificial Sequence
  Synthetic oligonucleotide
ggcccgatgggtaaataatatgtttgctgt

SEQ ID NO: 108439 - DNA, 30 bp, Artificial Sequence
  Synthetic oligonucleotide
gagactaagcgagtccgccgttacatctgt

SEQ ID NO: 108440 - DNA, 30 bp, Artificial Sequence
  Synthetic oligonucleotide
ggcgcctaggagagtgtagtaggtatctgt

SEQ ID NO: 108441 - DNA, 30 bp, Artificial Sequence
  Synthetic oligonucleotide
aagacaagaagacctttgaattttatctgt

SEQ ID NO: 108442 - DNA, 30 bp, Artificial Sequence
  Synthetic oligonucleotide
aggtagtggtgtgccccttgaaggctctgt

SEQ ID NO: 108443 - DNA, 30 bp, Artificial Sequence
  Synthetic oligonucleotide
taagaaaaacatcaaatccattgtttctgt

SEQ ID NO: 108444 - DNA, 30 bp, Artificial Sequence
  Synthetic oligonucleotide
cccgtaagacgtgaagaaattgaaaagtgt

SEQ ID NO: 108445 - DNA, 30 bp, Artificial Sequence
  Synthetic oligonucleotide
cgtcacttaaaacgtacggcatgaaagtgt

SEQ ID NO: 108446 - DNA, 30 bp, Artificial Sequence
  Synthetic oligonucleotide
tccgcagaagcacaaggcccagtaaagtgt

SEQ ID NO: 108447 - DNA, 30 bp, Artificial Sequence
  Synthetic oligonucleotide
ctcggaacttcatgaggctgagtcaagtgt

SEQ ID NO: 108448 - DNA, 30 bp, Artificial Sequence
  Synthetic oligonucleotide
acctccgtacatgaggattgggatcagtgt

SEQ ID NO: 108449 - DNA, 30 bp, Artificial Sequence
  Synthetic oligonucleotide
caatgtaagttctccgtcggatatcagtgt

SEQ ID NO: 108450 - DNA, 30 bp, Artificial Sequence
  Synthetic oligonucleotide
tccatacaagatgttcactcgagagagtgt

SEQ ID NO: 108451 - DNA, 30 bp, Artificial Sequence
  Synthetic oligonucleotide
tttatggaccagctagtcaaaagggagtgt

SEQ ID NO: 108452 - DNA, 30 bp, Artificial Sequence
  Synthetic oligonucleotide
agggcactagaaggaacgagcctctagtgt

SEQ ID NO: 108453 - DNA, 30 bp, Artificial Sequence
  Synthetic oligonucleotide
tgacaactagttacccagttcaattagtgt

SEQ ID NO: 108454 - DNA, 30 bp, Artificial Sequence
  Synthetic oligonucleotide
acagtacattggtaggcggcgagcacgtgt

SEQ ID NO: 108455 - DNA, 30 bp, Artificial Sequence
  Synthetic oligonucleotide
cgattagtcgagagttccatgtgtacgtgt

SEQ ID NO: 108456 - DNA, 30 bp, Artificial Sequence
  Synthetic oligonucleotide
cagtggataagacgaattgcatacccgtgt

SEQ ID NO: 108457 - DNA, 30 bp, Artificial Sequence
  Synthetic oligonucleotide
acctccacactggatcgcgatatgccgtgt

SEQ ID NO: 108458 - DNA, 30 bp, Artificial Sequence
  Synthetic oligonucleotide
cacaatccatatggccccgcgactccgtgt

SEQ ID NO: 108459 - DNA, 30 bp, Artificial Sequence
  Synthetic oligonucleotide
ctcgtctgaaagactatggtaaccgcgtgt

SEQ ID NO: 108460 - DNA, 30 bp, Artificial Sequence
  Synthetic oligonucleotide
ggttcattaagacgacgggtggtagggtgt

SEQ ID NO: 108461 - DNA, 30 bp, Artificial Sequence
  Synthetic oligonucleotide
agggctgggagtaaagacttgttggggtgt

SEQ ID NO: 108462 - DNA, 30 bp, Artificial Sequence
  Synthetic oligonucleotide
caagcggcataatacgaatggctcatgtgt

SEQ ID NO: 108463 - DNA, 30 bp, Artificial Sequence
  Synthetic oligonucleotide
cgttccaacacaggaagaaatacgatgtgt

SEQ ID NO: 108464 - DNA, 30 bp, Artificial Sequence
  Synthetic oligonucleotide
gacgcgatcgaatgacatcaaaatatgtgt

SEQ ID NO: 108465 - DNA, 30 bp, Artificial Sequence
  Synthetic oligonucleotide
ggaaaacaccttaaacttggagctctgtgt

SEQ ID NO: 108466 - DNA, 30 bp, Artificial Sequence
  Synthetic oligonucleotide
tgactataatggtgggacggccaagtgtgt

SEQ ID NO: 108467 - DNA, 30 bp, Artificial Sequence
  Synthetic oligonucleotide
aacccataccatggagcgggccgagtgtgt

SEQ ID NO: 108468 - DNA, 30 bp, Artificial Sequence
  Synthetic oligonucleotide
cgaaactttggacgtctgcacggagtgtgt

SEQ ID NO: 108469 - DNA, 31 bp, Artificial Sequence
  Synthetic oligonucleotide
cgtgacgacttgtgcagattcgtttgtgtgt

SEQ ID NO: 108470 - DNA, 30 bp, Artificial Sequence
  Synthetic oligonucleotide
caagggcatcctaagatggatgctttgtgt

SEQ ID NO: 108471 - DNA, 30 bp, Artificial Sequence
  Synthetic oligonucleotide
gcgtaaaaaggccatccctgttgaaattgt

SEQ ID NO: 108472 - DNA, 30 bp, Artificial Sequence
  Synthetic oligonucleotide
acagaagattggcaggagcctaccaattgt

SEQ ID NO: 108473 - DNA, 30 bp, Artificial Sequence
  Synthetic oligonucleotide
cctaacgttacggtgcggtcagccaattgt

SEQ ID NO: 108474 - DNA, 30 bp, Artificial Sequence
  Synthetic oligonucleotide
gcgaaaggtagataatctgcccgtaattgt

SEQ ID NO: 108475 - DNA, 30 bp, Artificial Sequence
  Synthetic oligonucleotide
atgggcatgctgctgaagaagtcccattgt

SEQ ID NO: 108476 - DNA, 30 bp, Artificial Sequence
  Synthetic oligonucleotide
agtatggcggtgctgatcccttgagattgt

SEQ ID NO: 108477 - DNA, 30 bp, Artificial Sequence
  Synthetic oligonucleotide
ccattcaatccgcagaagcagaccgattgt

SEQ ID NO: 108478 - DNA, 30 bp, Artificial Sequence
  Synthetic oligonucleotide
attagagttcgtgacagggtaatggattgt

SEQ ID NO: 108479 - DNA, 30 bp, Artificial Sequence
  Synthetic oligonucleotide
aggcggtgggttgtatgtgagctggattgt

SEQ ID NO: 108480 - DNA, 30 bp, Artificial Sequence
  Synthetic oligonucleotide
tatgcgtggtcaaaacgttagctggattgt

SEQ ID NO: 108481 - DNA, 30 bp, Artificial Sequence
  Synthetic oligonucleotide
gcacactcgtgcagtagtttgtcgtattgt

SEQ ID NO: 108482 - DNA, 30 bp, Artificial Sequence
  Synthetic oligonucleotide
tacgcgattgtatccggataggcaccttgt

SEQ ID NO: 108483 - DNA, 30 bp, Artificial Sequence
  Synthetic oligonucleotide
tgtagtgaagagccaacgttcgatccttgt

SEQ ID NO: 108484 - DNA, 30 bp, Artificial Sequence
  Synthetic oligonucleotide
catcgtttcgcaaggaagggtcaatcttgt

SEQ ID NO: 108485 - DNA, 30 bp, Artificial Sequence
  Synthetic oligonucleotide
cgtaaaccgtgtcgggggggccgctcttgt

SEQ ID NO: 108486 - DNA, 30 bp, Artificial Sequence
  Synthetic oligonucleotide
tctgacgattcaaaacggacatggtcttgt

SEQ ID NO: 108487 - DNA, 30 bp, Artificial Sequence
  Synthetic oligonucleotide
aggctggcgacaaatgaagagttaggttgt

SEQ ID NO: 108488 - DNA, 30 bp, Artificial Sequence
  Synthetic oligonucleotide
tcgttgattaacatgcgggaccggggttgt

SEQ ID NO: 108489 - DNA, 30 bp, Artificial Sequence
  Synthetic oligonucleotide
cagtaaagcgtagctcagggtgattgttgt

SEQ ID NO: 108490 - DNA, 30 bp, Artificial Sequence
  Synthetic oligonucleotide
aacgatgggtgagaatcgaccacagtttgt

SEQ ID NO: 108491 - DNA, 30 bp, Artificial Sequence
  Synthetic oligonucleotide
gcctccccaggtgtaatacgagctgtttgt

SEQ ID NO: 108492 - DNA, 30 bp, Artificial Sequence
  Synthetic oligonucleotide
tacagtaggaaggtcagaaggatattttgt

SEQ ID NO: 108493 - DNA, 30 bp, Artificial Sequence
  Synthetic oligonucleotide
cgcgacgttctcctggatcactggttttgt

SEQ ID NO: 108494 - DNA, 30 bp, Artificial Sequence
  Synthetic oligonucleotide
ggccgagaaccagcgccgaggatgaaaatt

SEQ ID NO: 108495 - DNA, 30 bp, Artificial Sequence
  Synthetic oligonucleotide
cacctcgaggtacgtaatccgggtaaaatt

SEQ ID NO: 108496 - DNA, 30 bp, Artificial Sequence
  Synthetic oligonucleotide
gaccgccaatagacatttgtcgaagaaatt

SEQ ID NO: 108497 - DNA, 30 bp, Artificial Sequence
  Synthetic oligonucleotide
gttactggaaacagcgcttaggtcgaaatt

SEQ ID NO: 108498 - DNA, 30 bp, Artificial Sequence
  Synthetic oligonucleotide
atggtcggggcgctgatcagacaggaaatt

SEQ ID NO: 108499 - DNA, 30 bp, Artificial Sequence
  Synthetic oligonucleotide
gcgggtattcgcgagatagctattgaaatt

SEQ ID NO: 108500 - DNA, 30 bp, Artificial Sequence
  Synthetic oligonucleotide
atgcggcctaacaaacgtctaaaataaatt

SEQ ID NO: 108501 - DNA, 30 bp, Artificial Sequence
  Synthetic oligonucleotide
acggataagaatactaggcaaagataaatt

SEQ ID NO: 108502 - DNA, 30 bp, Artificial Sequence
  Synthetic oligonucleotide
tgagcctcggcggatacgatgcactaaatt

SEQ ID NO: 108503 - DNA, 30 bp, Artificial Sequence
  Synthetic oligonucleotide
ataaggaagtcaaacactagcagctaaatt

SEQ ID NO: 108504 - DNA, 30 bp, Artificial Sequence
  Synthetic oligonucleotide
gttaaaccgagataaattacacggacaatt

SEQ ID NO: 108505 - DNA, 30 bp, Artificial Sequence
  Synthetic oligonucleotide
ggttagaccgagttgaaacggagtacaatt

SEQ ID NO: 108506 - DNA, 30 bp, Artificial Sequence
  Synthetic oligonucleotide
gcgaccgtagcgaggcttcgttgaccaatt

SEQ ID NO: 108507 - DNA, 30 bp, Artificial Sequence
  Synthetic oligonucleotide
ggggccctggcgaataaataatgcccaatt

SEQ ID NO: 108508 - DNA, 30 bp, Artificial Sequence
  Synthetic oligonucleotide
cgtggatgaagctgaaatgtgattccaatt

SEQ ID NO: 108509 - DNA, 30 bp, Artificial Sequence
  Synthetic oligonucleotide
tagggtacgatctagctgaccagagcaatt

SEQ ID NO: 108510 - DNA, 30 bp, Artificial Sequence
  Synthetic oligonucleotide
ctattctcgcgtgactgccttaatgcaatt

SEQ ID NO: 108511 - DNA, 30 bp, Artificial Sequence
  Synthetic oligonucleotide
gcccagcggagagataggtcacactcaatt

SEQ ID NO: 108512 - DNA, 30 bp, Artificial Sequence
  Synthetic oligonucleotide
tcagggaaggttatatcagtccacagaatt

SEQ ID NO: 108513 - DNA, 30 bp, Artificial Sequence
  Synthetic oligonucleotide
acaccaggtttcagctccattggcagaatt

SEQ ID NO: 108514 - DNA, 30 bp, Artificial Sequence
  Synthetic oligonucleotide
ggaccgtaccaggtcaagactctcagaatt

SEQ ID NO: 108515 - DNA, 30 bp, Artificial Sequence
  Synthetic oligonucleotide
agatacagagcaaggcggactgatagaatt

SEQ ID NO: 108516 - DNA, 30 bp, Artificial Sequence
  Synthetic oligonucleotide
aaggctttaaacttagtagcgaaacgaatt

SEQ ID NO: 108517 - DNA, 30 bp, Artificial Sequence
  Synthetic oligonucleotide
taatcaagcggttatcagtcacaacgaatt

SEQ ID NO: 108518 - DNA, 30 bp, Artificial Sequence
  Synthetic oligonucleotide
taacaagacgattagtcatcaagacgaatt

SEQ ID NO: 108519 - DNA, 30 bp, Artificial Sequence
  Synthetic oligonucleotide
cgtaggttcgagggctgaaagttgcgaatt

SEQ ID NO: 108520 - DNA, 30 bp, Artificial Sequence
  Synthetic oligonucleotide
tgtaataagcatgtgagttagagtcgaatt

SEQ ID NO: 108521 - DNA, 30 bp, Artificial Sequence
  Synthetic oligonucleotide
aatgacaccggctgtggacttagtggaatt

SEQ ID NO: 108522 - DNA, 30 bp, Artificial Sequence
  Synthetic oligonucleotide
tgggagctccgtcgatccatcagctgaatt

SEQ ID NO: 108523 - DNA, 30 bp, Artificial Sequence
  Synthetic oligonucleotide
accaatactcgaagaggtgggtgtataatt

SEQ ID NO: 108524 - DNA, 30 bp, Artificial Sequence
  Synthetic oligonucleotide
tactaaaataacactcgtagagcgctaatt

SEQ ID NO: 108525 - DNA, 30 bp, Artificial Sequence
  Synthetic oligonucleotide
tacggtaaaatagaaattgtaggagtaatt

SEQ ID NO: 108526 - DNA, 30 bp, Artificial Sequence
  Synthetic oligonucleotide
ctcgatggaacgctcgctcaccacgtaatt

SEQ ID NO: 108527 - DNA, 30 bp, Artificial Sequence
  Synthetic oligonucleotide
caaccgaaacgacgggaatccctggtaatt

SEQ ID NO: 108528 - DNA, 30 bp, Artificial Sequence
  Synthetic oligonucleotide
tcggttgaggaaccaaccaggggtgtaatt

SEQ ID NO: 108529 - DNA, 31 bp, Artificial Sequence
  Synthetic oligonucleotide
cgcgaaagtcacgggatcttgaggtttaatt

SEQ ID NO: 108530 - DNA, 30 bp, Artificial Sequence
  Synthetic oligonucleotide
agagggtatacgcgtgaaaactcgaacatt

SEQ ID NO: 108531 - DNA, 30 bp, Artificial Sequence
  Synthetic oligonucleotide
gggaatcaagctcgtaacatacttaacatt

SEQ ID NO: 108532 - DNA, 30 bp, Artificial Sequence
  Synthetic oligonucleotide
cgataagttttattcggtagatctcacatt

SEQ ID NO: 108533 - DNA, 30 bp, Artificial Sequence
  Synthetic oligonucleotide
gggaaaacacagtcaacccacggatacatt

SEQ ID NO: 108534 - DNA, 30 bp, Artificial Sequence
  Synthetic oligonucleotide
gagcatctggttaacagcaattactacatt

SEQ ID NO: 108535 - DNA, 30 bp, Artificial Sequence
  Synthetic oligonucleotide
aggaataagctatgtctgtacaacaccatt

SEQ ID NO: 108536 - DNA, 30 bp, Artificial Sequence
  Synthetic oligonucleotide
tttaatgagaagagtcatccctaagccatt

SEQ ID NO: 108537 - DNA, 30 bp, Artificial Sequence
  Synthetic oligonucleotide
ctaaccaagtacgcaaagtaggtcgccatt

SEQ ID NO: 108538 - DNA, 30 bp, Artificial Sequence
  Synthetic oligonucleotide
agacgtacatggtaggcgttcttgagcatt

SEQ ID NO: 108539 - DNA, 30 bp, Artificial Sequence
  Synthetic oligonucleotide
agagagttacgcaccggtttattccgcatt

SEQ ID NO: 108540 - DNA, 30 bp, Artificial Sequence
  Synthetic oligonucleotide
ctactacagttcagtagaaggtagcgcatt

SEQ ID NO: 108541 - DNA, 30 bp, Artificial Sequence
  Synthetic oligonucleotide
tgaacagagtgttctaacctacccggcatt

SEQ ID NO: 108542 - DNA, 30 bp, Artificial Sequence
  Synthetic oligonucleotide
tacgtgggggagtttttcacgggtgtcatt

SEQ ID NO: 108543 - DNA, 30 bp, Artificial Sequence
  Synthetic oligonucleotide
gggggaccaagtcacaagtccggattcatt

SEQ ID NO: 108544 - DNA, 30 bp, Artificial Sequence
  Synthetic oligonucleotide
agtaaaaggtagtaataagggcacaagatt

SEQ ID NO: 108545 - DNA, 30 bp, Artificial Sequence
  Synthetic oligonucleotide
gctaacgtagtgtcgtcagcaacacagatt

SEQ ID NO: 108546 - DNA, 30 bp, Artificial Sequence
  Synthetic oligonucleotide
gtaacattgacaagtagagtaaggcagatt

SEQ ID NO: 108547 - DNA, 30 bp, Artificial Sequence
  Synthetic oligonucleotide
cgaacacgtcttggcgatgagggcgagatt

SEQ ID NO: 108548 - DNA, 30 bp, Artificial Sequence
  Synthetic oligonucleotide
gcaaacagggaacagacttacatcgagatt

SEQ ID NO: 108549 - DNA, 30 bp, Artificial Sequence
  Synthetic oligonucleotide
ctggaaaggaccggtacgccaaaggagatt

SEQ ID NO: 108550 - DNA, 30 bp, Artificial Sequence
  Synthetic oligonucleotide
tggaaaaggtacgtgagggttattgagatt

SEQ ID NO: 108551 - DNA, 30 bp, Artificial Sequence
  Synthetic oligonucleotide
taaccatcatgtgacctacttgaatagatt

SEQ ID NO: 108552 - DNA, 30 bp, Artificial Sequence
  Synthetic oligonucleotide
gcgtacgcaaccgattcgaagtaatagatt

SEQ ID NO: 108553 - DNA, 30 bp, Artificial Sequence
  Synthetic oligonucleotide
aaaacaggacgacagtacggcgggacgatt

SEQ ID NO: 108554 - DNA, 30 bp, Artificial Sequence
  Synthetic oligonucleotide
caactgccaatgcagaggcgggttacgatt

SEQ ID NO: 108555 - DNA, 30 bp, Artificial Sequence
  Synthetic oligonucleotide
aaacatggtggtgtcggtgggtctgcgatt

SEQ ID NO: 108556 - DNA, 30 bp, Artificial Sequence
  Synthetic oligonucleotide
agggttgtggatgcaactctcacatcgatt

SEQ ID NO: 108557 - DNA, 30 bp, Artificial Sequence
  Synthetic oligonucleotide
gcgacctgaaaggcactgtcaccatcgatt

SEQ ID NO: 108558 - DNA, 30 bp, Artificial Sequence
  Synthetic oligonucleotide
cgggaaaggtcgagaagtgagttcaggatt

SEQ ID NO: 108559 - DNA, 30 bp, Artificial Sequence
  Synthetic oligonucleotide
ccgtaggagcgtgaatggggacgtaggatt

SEQ ID NO: 108560 - DNA, 30 bp, Artificial Sequence
  Synthetic oligonucleotide
aggaacgtaacgcacgcgacgtttaggatt

SEQ ID NO: 108561 - DNA, 30 bp, Artificial Sequence
  Synthetic oligonucleotide
gatgaaaccatgttcgagtaaacagggatt

SEQ ID NO: 108562 - DNA, 30 bp, Artificial Sequence
  Synthetic oligonucleotide
tcttaagtgcgactgcacagataggggatt

SEQ ID NO: 108563 - DNA, 30 bp, Artificial Sequence
  Synthetic oligonucleotide
tatagtggcgtcaaacagtggtatgggatt

SEQ ID NO: 108564 - DNA, 30 bp, Artificial Sequence
  Synthetic oligonucleotide
aaggagcaggtgggacaaaccatatggatt

SEQ ID NO: 108565 - DNA, 30 bp, Artificial Sequence
  Synthetic oligonucleotide
gcgactagtggcgcgtgccttccttggatt

SEQ ID NO: 108566 - DNA, 30 bp, Artificial Sequence
  Synthetic oligonucleotide
agatagagggttagaaattatcaaatgatt

SEQ ID NO: 108567 - DNA, 30 bp, Artificial Sequence
  Synthetic oligonucleotide
agtagggctaaggtaaatactataatgatt

SEQ ID NO: 108568 - DNA, 30 bp, Artificial Sequence
  Synthetic oligonucleotide
gtgggacccgctgtaactgagatgatgatt

SEQ ID NO: 108569 - DNA, 30 bp, Artificial Sequence
  Synthetic oligonucleotide
tcattgcacatgggtttaaggaatatgatt

SEQ ID NO: 108570 - DNA, 30 bp, Artificial Sequence
  Synthetic oligonucleotide
gatgaaagaaggcgtctgcaagttatgatt

SEQ ID NO: 108571 - DNA, 30 bp, Artificial Sequence
  Synthetic oligonucleotide
aagagtggaagcacaccagttgggctgatt

SEQ ID NO: 108572 - DNA, 30 bp, Artificial Sequence
  Synthetic oligonucleotide
tcctggagactctattaaggatacgtgatt

SEQ ID NO: 108573 - DNA, 30 bp, Artificial Sequence
  Synthetic oligonucleotide
acgggcgacaaaggtacggtccaggtgatt

SEQ ID NO: 108574 - DNA, 30 bp, Artificial Sequence
  Synthetic oligonucleotide
ttacataacagagtatcttcgcctgtgatt

SEQ ID NO: 108575 - DNA, 30 bp, Artificial Sequence
  Synthetic oligonucleotide
agttcatacccatcgactaaccgaaatatt

SEQ ID NO: 108576 - DNA, 30 bp, Artificial Sequence
  Synthetic oligonucleotide
agcacctccgcgggctcgagttcacatatt

SEQ ID NO: 108577 - DNA, 30 bp, Artificial Sequence
  Synthetic oligonucleotide
aggggtaaggcaagaaaccggtatgatatt

SEQ ID NO: 108578 - DNA, 30 bp, Artificial Sequence
  Synthetic oligonucleotide
cgctctgaacccgcctcatgccctgatatt

SEQ ID NO: 108579 - DNA, 30 bp, Artificial Sequence
  Synthetic oligonucleotide
aaaacacaggagagacttgcgcactatatt

SEQ ID NO: 108580 - DNA, 30 bp, Artificial Sequence
  Synthetic oligonucleotide
caagagctagaagagggatggttgtatatt

SEQ ID NO: 108581 - DNA, 30 bp, Artificial Sequence
  Synthetic oligonucleotide
ccgtgcacaatctaggacagtagttatatt

SEQ ID NO: 108582 - DNA, 30 bp, Artificial Sequence
  Synthetic oligonucleotide
ggtggtccattatgggctcgagtttatatt

SEQ ID NO: 108583 - DNA, 30 bp, Artificial Sequence
  Synthetic oligonucleotide
ggggtccgtaaaagtgtggtgtgcactatt

SEQ ID NO: 108584 - DNA, 30 bp, Artificial Sequence
  Synthetic oligonucleotide
ttacactgggctgaggtaagaaggactatt

SEQ ID NO: 108585 - DNA, 30 bp, Artificial Sequence
  Synthetic oligonucleotide
gagagaagtaagacagtcgaggctcctatt

SEQ ID NO: 108586 - DNA, 30 bp, Artificial Sequence
  Synthetic oligonucleotide
cgaacagattaccctagaggtggaagtatt

SEQ ID NO: 108587 - DNA, 30 bp, Artificial Sequence
  Synthetic oligonucleotide
cactgcgtgcgaggagattcgctgcgtatt

SEQ ID NO: 108588 - DNA, 30 bp, Artificial Sequence
  Synthetic oligonucleotide
cgtcgcatccaaaaatcaagtaatcgtatt

SEQ ID NO: 108589 - DNA, 30 bp, Artificial Sequence
  Synthetic oligonucleotide
cggtcataggacggagaaggacaaggtatt

SEQ ID NO: 108590 - DNA, 30 bp, Artificial Sequence
  Synthetic oligonucleotide
ctggcacgctcatctggaggctacggtatt

SEQ ID NO: 108591 - DNA, 30 bp, Artificial Sequence
  Synthetic oligonucleotide
gggccaaccatcacacagcctaagggtatt

SEQ ID NO: 108592 - DNA, 30 bp, Artificial Sequence
  Synthetic oligonucleotide
gtcgcatagactgacgacatgatgggtatt

SEQ ID NO: 108593 - DNA, 30 bp, Artificial Sequence
  Synthetic oligonucleotide
tgaatgacgagataggtggcgggtggtatt

SEQ ID NO: 108594 - DNA, 30 bp, Artificial Sequence
  Synthetic oligonucleotide
caaggggtgccctgttgcaaatcctgtatt

SEQ ID NO: 108595 - DNA, 30 bp, Artificial Sequence
  Synthetic oligonucleotide
acctgcagagtggggacgttatgagttatt

SEQ ID NO: 108596 - DNA, 30 bp, Artificial Sequence
  Synthetic oligonucleotide
cgggcagggatgcccgaccaggactttatt

SEQ ID NO: 108597 - DNA, 30 bp, Artificial Sequence
  Synthetic oligonucleotide
ccgcgggcaacacaagagtaggccaaactt

SEQ ID NO: 108598 - DNA, 30 bp, Artificial Sequence
  Synthetic oligonucleotide
ggagaatgtcatggggacttccgagaactt

SEQ ID NO: 108599 - DNA, 30 bp, Artificial Sequence
  Synthetic oligonucleotide
gctagagtcatgaatagcatgtcctaactt

SEQ ID NO: 108600 - DNA, 30 bp, Artificial Sequence
  Synthetic oligonucleotide
gtgagtgagaattccgctggaatgtaactt

SEQ ID NO: 108601 - DNA, 30 bp, Artificial Sequence
  Synthetic oligonucleotide
aacgcgttaaatgggagccgctaaacactt

SEQ ID NO: 108602 - DNA, 30 bp, Artificial Sequence
  Synthetic oligonucleotide
ctttagaggaaacctattcgacgaacactt

SEQ ID NO: 108603 - DNA, 30 bp, Artificial Sequence
  Synthetic oligonucleotide
gcgaggtgagtacgggatcccggaacactt

SEQ ID NO: 108604 - DNA, 30 bp, Artificial Sequence
  Synthetic oligonucleotide
tctaggaagaacgtcgaatcaggtacactt

SEQ ID NO: 108605 - DNA, 30 bp, Artificial Sequence
  Synthetic oligonucleotide
ggaaatacgacttcatgtgagtcctcactt

SEQ ID NO: 108606 - DNA, 30 bp, Artificial Sequence
  Synthetic oligonucleotide
atagagtgactttcaagggtacgacgactt

SEQ ID NO: 108607 - DNA, 30 bp, Artificial Sequence
  Synthetic oligonucleotide
cgacgtggatccgagcgccgacaccgactt

SEQ ID NO: 108608 - DNA, 30 bp, Artificial Sequence
  Synthetic oligonucleotide
cgtgcctgaccagctgactgcgaccgactt

SEQ ID NO: 108609 - DNA, 30 bp, Artificial Sequence
  Synthetic oligonucleotide
aaacaggaggcggttaatttgggaggactt

SEQ ID NO: 108610 - DNA, 30 bp, Artificial Sequence
  Synthetic oligonucleotide
acatctgcgtacccatttaccacgtgactt

SEQ ID NO: 108611 - DNA, 30 bp, Artificial Sequence
  Synthetic oligonucleotide
tagcgtcggggagctgtcaggacttgactt

SEQ ID NO: 108612 - DNA, 30 bp, Artificial Sequence
  Synthetic oligonucleotide
aggtaaagcttgagcgaaatcaacctactt

SEQ ID NO: 108613 - DNA, 30 bp, Artificial Sequence
  Synthetic oligonucleotide
tgtcgcatgtcgagcagcgagggggtactt

SEQ ID NO: 108614 - DNA, 30 bp, Artificial Sequence
  Synthetic oligonucleotide
atgtcgtctcatcagctgtcctctgtactt

SEQ ID NO: 108615 - DNA, 30 bp, Artificial Sequence
  Synthetic oligonucleotide
gacgtgtctaagctaccgcgatcaaacctt

SEQ ID NO: 108616 - DNA, 30 bp, Artificial Sequence
  Synthetic oligonucleotide
ggcacgaacaatcgaaaacacgttcacctt

SEQ ID NO: 108617 - DNA, 30 bp, Artificial Sequence
  Synthetic oligonucleotide
cgacgggaaggttgcaccataaaccccctt

SEQ ID NO: 108618 - DNA, 30 bp, Artificial Sequence
  Synthetic oligonucleotide
ataaacggagggtgctgagattagtccctt

SEQ ID NO: 108619 - DNA, 30 bp, Artificial Sequence
  Synthetic oligonucleotide
cacaatcgaggaataggaactttcagcctt

SEQ ID NO: 108620 - DNA, 30 bp, Artificial Sequence
  Synthetic oligonucleotide
tctaaacaatcaccggcctatgctggcctt

SEQ ID NO: 108621 - DNA, 30 bp, Artificial Sequence
  Synthetic oligonucleotide
cggatttgcgaatggcacctcagtgtcctt

SEQ ID NO: 108622 - DNA, 30 bp, Artificial Sequence
  Synthetic oligonucleotide
acggcgtacgaggccctgttcgttgtcctt

SEQ ID NO: 108623 - DNA, 30 bp, Artificial Sequence
  Synthetic oligonucleotide
acggccatatgggggactaaccacaagctt

SEQ ID NO: 108624 - DNA, 30 bp, Artificial Sequence
  Synthetic oligonucleotide
ggttagcaagcatattgagtggatcagctt

SEQ ID NO: 108625 - DNA, 30 bp, Artificial Sequence
  Synthetic oligonucleotide
agagaggtttaaaacgttatgtcagagctt

SEQ ID NO: 108626 - DNA, 30 bp, Artificial Sequence
  Synthetic oligonucleotide
gaacttcgaacagcgggggaaccgacgctt

SEQ ID NO: 108627 - DNA, 30 bp, Artificial Sequence
  Synthetic oligonucleotide
gaagagggagcacaatgcttcggaccgctt

SEQ ID NO: 108628 - DNA, 30 bp, Artificial Sequence
  Synthetic oligonucleotide
acgaggtgcagtcaaatgttataagcgctt

SEQ ID NO: 108629 - DNA, 30 bp, Artificial Sequence
  Synthetic oligonucleotide
cggccgagatagcggggaatggtaaggctt

SEQ ID NO: 108630 - DNA, 30 bp, Artificial Sequence
  Synthetic oligonucleotide
gaaacgtctataaccggaggtacgaggctt

SEQ ID NO: 108631 - DNA, 30 bp, Artificial Sequence
  Synthetic oligonucleotide
tgctaactatcgggggtcgaggaagggctt

SEQ ID NO: 108632 - DNA, 30 bp, Artificial Sequence
  Synthetic oligonucleotide
tggggtagggaaccagtatttaacgggctt

SEQ ID NO: 108633 - DNA, 30 bp, Artificial Sequence
  Synthetic oligonucleotide
gtggtagggggcctaataagcgaactgctt

SEQ ID NO: 108634 - DNA, 30 bp, Artificial Sequence
  Synthetic oligonucleotide
gcgacagcgcacggaagtaccagactgctt

SEQ ID NO: 108635 - DNA, 30 bp, Artificial Sequence
  Synthetic oligonucleotide
atcacaaagcccacagacgggcggctgctt

SEQ ID NO: 108636 - DNA, 30 bp, Artificial Sequence
  Synthetic oligonucleotide
agggataggtctgtctaatgtagattgctt

SEQ ID NO: 108637 - DNA, 30 bp, Artificial Sequence
  Synthetic oligonucleotide
cgtaaaaaagcacgataagtgcgcaatctt

SEQ ID NO: 108638 - DNA, 30 bp, Artificial Sequence
  Synthetic oligonucleotide
aagcggcgggcggcgttcatatgccatctt

SEQ ID NO: 108639 - DNA, 30 bp, Artificial Sequence
  Synthetic oligonucleotide
ggctggtcactgggagaggaagtgcatctt

SEQ ID NO: 108640 - DNA, 30 bp, Artificial Sequence
  Synthetic oligonucleotide
tgtgcaaagaaaaacaaaactagtcatctt

SEQ ID NO: 108641 - DNA, 30 bp, Artificial Sequence
  Synthetic oligonucleotide
atgtacctatgagcacgtgtatcagatctt

SEQ ID NO: 108642 - DNA, 30 bp, Artificial Sequence
  Synthetic oligonucleotide
gggattctactaagccccaggaaggatctt

SEQ ID NO: 108643 - DNA, 30 bp, Artificial Sequence
  Synthetic oligonucleotide
agtactgggggtttaaggtaaggtgatctt

SEQ ID NO: 108644 - DNA, 30 bp, Artificial Sequence
  Synthetic oligonucleotide
tgcgaccaccactccgtagctcgatatctt

SEQ ID NO: 108645 - DNA, 30 bp, Artificial Sequence
  Synthetic oligonucleotide
tccagaaggcagttcaaatcgagttatctt

SEQ ID NO: 108646 - DNA, 30 bp, Artificial Sequence
  Synthetic oligonucleotide
cgttgggatcttcaatgtgatagtgctctt

SEQ ID NO: 108647 - DNA, 30 bp, Artificial Sequence
  Synthetic oligonucleotide
tgaacctcggcccccatggtttcgtctctt

SEQ ID NO: 108648 - DNA, 30 bp, Artificial Sequence
  Synthetic oligonucleotide
tgagaatgcactaaagaatggaatggtctt

SEQ ID NO: 108649 - DNA, 30 bp, Artificial Sequence
  Synthetic oligonucleotide
agcaatcggggaggtcttaacaggattctt

SEQ ID NO: 108650 - DNA, 30 bp, Artificial Sequence
  Synthetic oligonucleotide
gccaccgcagagtttagaagtagcaaagtt

SEQ ID NO: 108651 - DNA, 30 bp, Artificial Sequence
  Synthetic oligonucleotide
cactatagtgagtttacacaggagaaagtt

SEQ ID NO: 108652 - DNA, 30 bp, Artificial Sequence
  Synthetic oligonucleotide
ctaatggcatattttctgcttggacaagtt

SEQ ID NO: 108653 - DNA, 30 bp, Artificial Sequence
  Synthetic oligonucleotide
tgatgtgctcctgctaaccattgacaagtt

SEQ ID NO: 108654 - DNA, 30 bp, Artificial Sequence
  Synthetic oligonucleotide
gaacacaattatggtcctgttcgccaagtt

SEQ ID NO: 108655 - DNA, 30 bp, Artificial Sequence
  Synthetic oligonucleotide
tgtaaaaaacatggaactaattgggaagtt

SEQ ID NO: 108656 - DNA, 30 bp, Artificial Sequence
  Synthetic oligonucleotide
tgacatgaccaggttgatggtgaataagtt

SEQ ID NO: 108657 - DNA, 30 bp, Artificial Sequence
  Synthetic oligonucleotide
acggccatttgcatgtgagacaggtaagtt

SEQ ID NO: 108658 - DNA, 30 bp, Artificial Sequence
  Synthetic oligonucleotide
cgataaatagtatgtacagcatcttaagtt

SEQ ID NO: 108659 - DNA, 30 bp, Artificial Sequence
  Synthetic oligonucleotide
tagttcactttaaaacggagtgtaacagtt

SEQ ID NO: 108660 - DNA, 30 bp, Artificial Sequence
  Synthetic oligonucleotide
acgccggtgtttgagtgctcttcgccagtt

SEQ ID NO: 108661 - DNA, 30 bp, Artificial Sequence
  Synthetic oligonucleotide
cttggacaaaaggtttatgacagagcagtt

SEQ ID NO: 108662 - DNA, 30 bp, Artificial Sequence
  Synthetic oligonucleotide
tatcaacgaatctgttagcacatgtcagtt

SEQ ID NO: 108663 - DNA, 30 bp, Artificial Sequence
  Synthetic oligonucleotide
ggagctaaggtatccgagggccatagagtt

SEQ ID NO: 108664 - DNA, 30 bp, Artificial Sequence
  Synthetic oligonucleotide
gtcgggcacggaacgctttaggtaggagtt

SEQ ID NO: 108665 - DNA, 30 bp, Artificial Sequence
  Synthetic oligonucleotide
tcagctctatggtggcggcctaagggagtt

SEQ ID NO: 108666 - DNA, 30 bp, Artificial Sequence
  Synthetic oligonucleotide
accgaacggaacctaacacaatggggagtt

SEQ ID NO: 108667 - DNA, 30 bp, Artificial Sequence
  Synthetic oligonucleotide
gcgggtgagacgtatagtggctatggagtt

SEQ ID NO: 108668 - DNA, 30 bp, Artificial Sequence
  Synthetic oligonucleotide
agatctataagacatgtcttgagatgagtt

SEQ ID NO: 108669 - DNA, 30 bp, Artificial Sequence
  Synthetic oligonucleotide
tctaatgtactaaggtgatgatgatgagtt

SEQ ID NO: 108670 - DNA, 30 bp, Artificial Sequence
  Synthetic oligonucleotide
tgccccatgacgtcactggtgaactgagtt

SEQ ID NO: 108671 - DNA, 30 bp, Artificial Sequence
  Synthetic oligonucleotide
gtaataggaggtgatgccttcaggtgagtt

SEQ ID NO: 108672 - DNA, 30 bp, Artificial Sequence
  Synthetic oligonucleotide
cagacgtattacacgcggagacattgagtt

SEQ ID NO: 108673 - DNA, 30 bp, Artificial Sequence
  Synthetic oligonucleotide
cgacacgacatctcgtatgaccattgagtt

SEQ ID NO: 108674 - DNA, 30 bp, Artificial Sequence
  Synthetic oligonucleotide
acaatactatcctggactagtgatgtagtt

SEQ ID NO: 108675 - DNA, 30 bp, Artificial Sequence
  Synthetic oligonucleotide
aatgcaaaacttagcatggcacgtgtagtt

SEQ ID NO: 108676 - DNA, 30 bp, Artificial Sequence
  Synthetic oligonucleotide
gattggacaatcgagccgatcaaattagtt

SEQ ID NO: 108677 - DNA, 30 bp, Artificial Sequence
  Synthetic oligonucleotide
ggccggtcgatctaggctatgaacttagtt

SEQ ID NO: 108678 - DNA, 30 bp, Artificial Sequence
  Synthetic oligonucleotide
gatgatccaaaaggggccatgtgtttagtt

SEQ ID NO: 108679 - DNA, 30 bp, Artificial Sequence
  Synthetic oligonucleotide
taacaccatctgggatgccctcggcacgtt

SEQ ID NO: 108680 - DNA, 30 bp, Artificial Sequence
  Synthetic oligonucleotide
gagatgccagggcaagcagccggtcacgtt

SEQ ID NO: 108681 - DNA, 28 bp, Artificial Sequence
  Synthetic oligonucleotide
agggcatactggtgcctgaagtgacgtt

SEQ ID NO: 108682 - DNA, 30 bp, Artificial Sequence
  Synthetic oligonucleotide
gtgaggacataacgattgattattgacgtt

SEQ ID NO: 108683 - DNA, 30 bp, Artificial Sequence
  Synthetic oligonucleotide
ggaacaaagtgcttgcggtaatccaccgtt

SEQ ID NO: 108684 - DNA, 30 bp, Artificial Sequence
  Synthetic oligonucleotide
actgtcctcccgcaatggggaatcaccgtt

SEQ ID NO: 108685 - DNA, 30 bp, Artificial Sequence
  Synthetic oligonucleotide
gcgtgcagacaccttacacattaccccgtt

SEQ ID NO: 108686 - DNA, 30 bp, Artificial Sequence
  Synthetic oligonucleotide
cgccggccgagttagcagtctgtccccgtt

SEQ ID NO: 108687 - DNA, 30 bp, Artificial Sequence
  Synthetic oligonucleotide
tcgaggacccccacactcaaatatcccgtt

SEQ ID NO: 108688 - DNA, 30 bp, Artificial Sequence
  Synthetic oligonucleotide
tcggaaacacattgacttcgatgggccgtt

SEQ ID NO: 108689 - DNA, 30 bp, Artificial Sequence
  Synthetic oligonucleotide
gacgttatttagtcctcgattcgatccgtt

SEQ ID NO: 108690 - DNA, 30 bp, Artificial Sequence
  Synthetic oligonucleotide
tgcctgccgagttctcgtttaccgtccgtt

SEQ ID NO: 108691 - DNA, 30 bp, Artificial Sequence
  Synthetic oligonucleotide
aaacgtttaagggcagcggagggttccgtt

SEQ ID NO: 108692 - DNA, 30 bp, Artificial Sequence
  Synthetic oligonucleotide
aacaccatcgggaagcttaccgacagcgtt

SEQ ID NO: 108693 - DNA, 30 bp, Artificial Sequence
  Synthetic oligonucleotide
gtggtggcctgaagtcacaaattgagcgtt

SEQ ID NO: 108694 - DNA, 30 bp, Artificial Sequence
  Synthetic oligonucleotide
gctggcataccgaactaagatgagggcgtt

SEQ ID NO: 108695 - DNA, 30 bp, Artificial Sequence
  Synthetic oligonucleotide
tcgttacgtcgatgataacactcgggcgtt

SEQ ID NO: 108696 - DNA, 30 bp, Artificial Sequence
  Synthetic oligonucleotide
cgacttgtcacgtgtgccaaaagatgcgtt

SEQ ID NO: 108697 - DNA, 30 bp, Artificial Sequence
  Synthetic oligonucleotide
ttaggctcggaaagaaagcagaattgcgtt

SEQ ID NO: 108698 - DNA, 30 bp, Artificial Sequence
  Synthetic oligonucleotide
gcgaatggcttaagtagcaacagtatcgtt

SEQ ID NO: 108699 - DNA, 30 bp, Artificial Sequence
  Synthetic oligonucleotide
agaaggcgtttcctacttgtctcaaaggtt

SEQ ID NO: 108700 - DNA, 30 bp, Artificial Sequence
  Synthetic oligonucleotide
gcctcacaataacaaattaactcgcaggtt

SEQ ID NO: 108701 - DNA, 30 bp, Artificial Sequence
  Synthetic oligonucleotide
gtgtataagggatcagaatgcgcagaggtt

SEQ ID NO: 108702 - DNA, 30 bp, Artificial Sequence
  Synthetic oligonucleotide
gacaagctgtgcgggggtcgtggagaggtt

SEQ ID NO: 108703 - DNA, 30 bp, Artificial Sequence
  Synthetic oligonucleotide
gattgatcagctgagcaatcacacgaggtt

SEQ ID NO: 108704 - DNA, 30 bp, Artificial Sequence
  Synthetic oligonucleotide
catatctaggatccactctgcctcgaggtt

SEQ ID NO: 108705 - DNA, 30 bp, Artificial Sequence
  Synthetic oligonucleotide
cacccgcgatagaaaatcggactaacggtt

SEQ ID NO: 108706 - DNA, 30 bp, Artificial Sequence
  Synthetic oligonucleotide
tgacagggataaagcgatcgacgaccggtt

SEQ ID NO: 108707 - DNA, 30 bp, Artificial Sequence
  Synthetic oligonucleotide
gcatgaacaactcggagattcggtccggtt

SEQ ID NO: 108708 - DNA, 30 bp, Artificial Sequence
  Synthetic oligonucleotide
aagggacattggtctaattaaacgtcggtt

SEQ ID NO: 108709 - DNA, 30 bp, Artificial Sequence
  Synthetic oligonucleotide
aacgacacaacgcgataagttacaagggtt

SEQ ID NO: 108710 - DNA, 30 bp, Artificial Sequence
  Synthetic oligonucleotide
aagggacagtaaacgtcacaggcaagggtt

SEQ ID NO: 108711 - DNA, 30 bp, Artificial Sequence
  Synthetic oligonucleotide
cctactcagagttgccaacccaggagggtt

SEQ ID NO: 108712 - DNA, 30 bp, Artificial Sequence
  Synthetic oligonucleotide
actgagacactatccatgaataaccgggtt

SEQ ID NO: 108713 - DNA, 30 bp, Artificial Sequence
  Synthetic oligonucleotide
ctgagagtcacgcttgagcgagcaggggtt

SEQ ID NO: 108714 - DNA, 30 bp, Artificial Sequence
  Synthetic oligonucleotide
aaatcagctaaaatgtcatggtcaggggtt

SEQ ID NO: 108715 - DNA, 29 bp, Artificial Sequence
  Synthetic oligonucleotide
gcgtcaggaaacgatggcgaataggggtt

SEQ ID NO: 108716 - DNA, 30 bp, Artificial Sequence
  Synthetic oligonucleotide
gcagcagctgccaactagcggaatggggtt

SEQ ID NO: 108717 - DNA, 30 bp, Artificial Sequence
  Synthetic oligonucleotide
cgtgtcaaaagtaatgtagttccttgggtt

SEQ ID NO: 108718 - DNA, 30 bp, Artificial Sequence
  Synthetic oligonucleotide
cacctccggataataagaggctatatggtt

SEQ ID NO: 108719 - DNA, 30 bp, Artificial Sequence
  Synthetic oligonucleotide
tccgcgttttcacagcttgacagagtggtt

SEQ ID NO: 108720 - DNA, 30 bp, Artificial Sequence
  Synthetic oligonucleotide
aggtgtgacaaatttagagcacacgtggtt

SEQ ID NO: 108721 - DNA, 30 bp, Artificial Sequence
  Synthetic oligonucleotide
tgatagtgaccgtgatcaaccattgtggtt

SEQ ID NO: 108722 - DNA, 31 bp, Artificial Sequence
  Synthetic oligonucleotide
ataggcctaacacggagtgtggaccttggtt

SEQ ID NO: 108723 - DNA, 30 bp, Artificial Sequence
  Synthetic oligonucleotide
atgaagatgggaccacggctattaaatgtt

SEQ ID NO: 108724 - DNA, 30 bp, Artificial Sequence
  Synthetic oligonucleotide
gcacagtattgattcagaggattcgatgtt

SEQ ID NO: 108725 - DNA, 30 bp, Artificial Sequence
  Synthetic oligonucleotide
gccgaatcaacggtgatccagaagactgtt

SEQ ID NO: 108726 - DNA, 30 bp, Artificial Sequence
  Synthetic oligonucleotide
cacaacacaggagacgattggcggactgtt

SEQ ID NO: 108727 - DNA, 30 bp, Artificial Sequence
  Synthetic oligonucleotide
tccgagagtcaacggttcgtggctgctgtt

SEQ ID NO: 108728 - DNA, 30 bp, Artificial Sequence
  Synthetic oligonucleotide
acacggcaggttggtgcagtcgattctgtt

SEQ ID NO: 108729 - DNA, 30 bp, Artificial Sequence
  Synthetic oligonucleotide
taagtcatcgtataggtaaggcaccgtgtt

SEQ ID NO: 108730 - DNA, 30 bp, Artificial Sequence
  Synthetic oligonucleotide
tctgatggagaaaggaaagacctgggtgtt

SEQ ID NO: 108731 - DNA, 30 bp, Artificial Sequence
  Synthetic oligonucleotide
ggcaatgtcacaagaacgggagcctgtgtt

SEQ ID NO: 108732 - DNA, 30 bp, Artificial Sequence
  Synthetic oligonucleotide
agatggttacagaagtcgttttagtgtgtt

SEQ ID NO: 108733 - DNA, 30 bp, Artificial Sequence
  Synthetic oligonucleotide
cgatacaactattcgcgtatggttattgtt

SEQ ID NO: 108734 - DNA, 30 bp, Artificial Sequence
  Synthetic oligonucleotide
tgtacggatccaagcctgcccgcgaaattt

SEQ ID NO: 108735 - DNA, 30 bp, Artificial Sequence
  Synthetic oligonucleotide
aagagcagtctgtcaaggcttggacaattt

SEQ ID NO: 108736 - DNA, 30 bp, Artificial Sequence
  Synthetic oligonucleotide
cgctactgtactacatcttgatgacaattt

SEQ ID NO: 108737 - DNA, 30 bp, Artificial Sequence
  Synthetic oligonucleotide
gtaagcggcacagggtctgaaaagcaattt

SEQ ID NO: 108738 - DNA, 30 bp, Artificial Sequence
  Synthetic oligonucleotide
gactgttcaaatggcagtcaaagataattt

SEQ ID NO: 108739 - DNA, 30 bp, Artificial Sequence
  Synthetic oligonucleotide
cggtcccgaggtgcgtaatggtcaacattt

SEQ ID NO: 108740 - DNA, 30 bp, Artificial Sequence
  Synthetic oligonucleotide
acgtgcttcagcaccatttagccgacattt

SEQ ID NO: 108741 - DNA, 30 bp, Artificial Sequence
  Synthetic oligonucleotide
catcgcaagaggcacgtgtagagtccattt

SEQ ID NO: 108742 - DNA, 30 bp, Artificial Sequence
  Synthetic oligonucleotide
acctagacccggggacgaggaccatcattt

SEQ ID NO: 108743 - DNA, 30 bp, Artificial Sequence
  Synthetic oligonucleotide
aagatgtaaaatccagggaccatatcattt

SEQ ID NO: 108744 - DNA, 30 bp, Artificial Sequence
  Synthetic oligonucleotide
cgatatctaaggagcgtaacgcgttcattt

SEQ ID NO: 108745 - DNA, 30 bp, Artificial Sequence
  Synthetic oligonucleotide
gggaaataatggaattgtcgggacagattt

SEQ ID NO: 108746 - DNA, 30 bp, Artificial Sequence
  Synthetic oligonucleotide
ctgccaaagctatggtatgaagtgagattt

SEQ ID NO: 108747 - DNA, 30 bp, Artificial Sequence
  Synthetic oligonucleotide
taggaataactccactagataagccgattt

SEQ ID NO: 108748 - DNA, 30 bp, Artificial Sequence
  Synthetic oligonucleotide
cggagtgaccgatgagaactggcgcgattt

SEQ ID NO: 108749 - DNA, 30 bp, Artificial Sequence
  Synthetic oligonucleotide
cgttagcgaactttattgctatccggattt

SEQ ID NO: 108750 - DNA, 30 bp, Artificial Sequence
  Synthetic oligonucleotide
atagatcgagacgacataagttccggattt

SEQ ID NO: 108751 - DNA, 30 bp, Artificial Sequence
  Synthetic oligonucleotide
cgggccagaagagagagtcctataatattt

SEQ ID NO: 108752 - DNA, 30 bp, Artificial Sequence
  Synthetic oligonucleotide
cgggcatcgaggacaggccggaacatattt

SEQ ID NO: 108753 - DNA, 30 bp, Artificial Sequence
  Synthetic oligonucleotide
gtgcaggcactcaagaggagaaggatattt

SEQ ID NO: 108754 - DNA, 30 bp, Artificial Sequence
  Synthetic oligonucleotide
cggtcgctttgtcggccatcggggatattt

SEQ ID NO: 108755 - DNA, 30 bp, Artificial Sequence
  Synthetic oligonucleotide
cgaaccgcctggagcacacgtgtgatattt

SEQ ID NO: 108756 - DNA, 30 bp, Artificial Sequence
  Synthetic oligonucleotide
gtcacgattgacgggcaacaactactattt

SEQ ID NO: 108757 - DNA, 30 bp, Artificial Sequence
  Synthetic oligonucleotide
aggtatggaacctcgcttacagtggtattt

SEQ ID NO: 108758 - DNA, 30 bp, Artificial Sequence
  Synthetic oligonucleotide
ggggtgggctgtcactttcggtcgaacttt

SEQ ID NO: 108759 - DNA, 30 bp, Artificial Sequence
  Synthetic oligonucleotide
cggtaatcggccgaaaggttgaaacacttt

SEQ ID NO: 108760 - DNA, 30 bp, Artificial Sequence
  Synthetic oligonucleotide
gcccaaagagagtaacgcataacaaccttt

SEQ ID NO: 108761 - DNA, 30 bp, Artificial Sequence
  Synthetic oligonucleotide
ccagcatgagtagcaccgataaatgccttt

SEQ ID NO: 108762 - DNA, 30 bp, Artificial Sequence
  Synthetic oligonucleotide
aacagggcaagattgtcaaccaggtccttt

SEQ ID NO: 108763 - DNA, 30 bp, Artificial Sequence
  Synthetic oligonucleotide
gacaatatcaaggtcacgggggaaagcttt

SEQ ID NO: 108764 - DNA, 30 bp, Artificial Sequence
  Synthetic oligonucleotide
agtacgggaggtctggatagaacttgcttt

SEQ ID NO: 108765 - DNA, 30 bp, Artificial Sequence
  Synthetic oligonucleotide
gtatggcgggtcagttgtattaagatcttt

SEQ ID NO: 108766 - DNA, 30 bp, Artificial Sequence
  Synthetic oligonucleotide
gataagtgatatagcatcgaagatatcttt

SEQ ID NO: 108767 - DNA, 30 bp, Artificial Sequence
  Synthetic oligonucleotide
tcgaagactaggttagtggaatacctcttt

SEQ ID NO: 108768 - DNA, 30 bp, Artificial Sequence
  Synthetic oligonucleotide
cgttcgaacaaggagaagaactaagtcttt

SEQ ID NO: 108769 - DNA, 30 bp, Artificial Sequence
  Synthetic oligonucleotide
acctgggacatataaggacagtagaagttt

SEQ ID NO: 108770 - DNA, 30 bp, Artificial Sequence
  Synthetic oligonucleotide
tcactccgggctaggaaatatgtgaagttt

SEQ ID NO: 108771 - DNA, 30 bp, Artificial Sequence
  Synthetic oligonucleotide
tagtaaatagtactggtaatttataagttt

SEQ ID NO: 108772 - DNA, 30 bp, Artificial Sequence
  Synthetic oligonucleotide
ggtgtacttctcgataaatcaagtaagttt

SEQ ID NO: 108773 - DNA, 30 bp, Artificial Sequence
  Synthetic oligonucleotide
aagcatagcgcagggaaaacgccctagttt

SEQ ID NO: 108774 - DNA, 30 bp, Artificial Sequence
  Synthetic oligonucleotide
ccacgggatgtataggagtcttaagcgttt

SEQ ID NO: 108775 - DNA, 30 bp, Artificial Sequence
  Synthetic oligonucleotide
tgtaaggaccactcagtgtccaactcgttt

SEQ ID NO: 108776 - DNA, 30 bp, Artificial Sequence
  Synthetic oligonucleotide
gcttggaaaacgagcacagattaaaggttt

SEQ ID NO: 108777 - DNA, 30 bp, Artificial Sequence
  Synthetic oligonucleotide
catcggttgcgggagtaaaaatctaggttt

SEQ ID NO: 108778 - DNA, 30 bp, Artificial Sequence
  Synthetic oligonucleotide
tgcattacctggacacaacaaggacggttt

SEQ ID NO: 108779 - DNA, 30 bp, Artificial Sequence
  Synthetic oligonucleotide
gtaagggttgcggggtggcgtatccggttt

SEQ ID NO: 108780 - DNA, 30 bp, Artificial Sequence
  Synthetic oligonucleotide
cacgcgcactaataaataagtgtccggttt

SEQ ID NO: 108781 - DNA, 30 bp, Artificial Sequence
  Synthetic oligonucleotide
cgattagtggaagacctcatccgcgggttt

SEQ ID NO: 108782 - DNA, 30 bp, Artificial Sequence
  Synthetic oligonucleotide
cacgcgtctgtacgtgagggttttctgttt

SEQ ID NO: 108783 - DNA, 30 bp, Artificial Sequence
  Synthetic oligonucleotide
attgggcacacacgtatgggaactaatttt

SEQ ID NO: 108784 - DNA, 30 bp, Artificial Sequence
  Synthetic oligonucleotide
ccttctggagaagaattcgtgtctgatttt

SEQ ID NO: 108785 - DNA, 30 bp, Artificial Sequence
  Synthetic oligonucleotide
ataggccaagggaatttgagccgttatttt

SEQ ID NO: 108786 - DNA, 28 bp, Artificial Sequence
  Synthetic oligonucleotide
cgcgggagccgacacgcaaagaactttt

SEQ ID NO: 108787 - DNA, 30 bp, Artificial Sequence
  Synthetic oligonucleotide
gctacgtgtgcaggagacaacttgcctttt

SEQ ID NO: 108788 - DNA, 30 bp, Artificial Sequence
  Synthetic oligonucleotide
cgtcacgaacacattattccaacgtctttt

SEQ ID NO: 108789 - DNA, 30 bp, Artificial Sequence
  Synthetic oligonucleotide
cagacccagaatcgtgatagattgagtttt

SEQ ID NO: 108790 - DNA, 30 bp, Artificial Sequence
  Synthetic oligonucleotide
aagacgactaaaaacaggggaaatcgtttt

SEQ ID NO: 108791 - DNA, 30 bp, Artificial Sequence
  Synthetic oligonucleotide
actcaacagcgacgggacggggcttgtttt

SEQ ID NO: 108792 - DNA, 30 bp, Artificial Sequence
  Synthetic oligonucleotide
gaacggtaaaatcacattgcgaccattttt

SEQ ID NO: 108793 - DNA, 30 bp, Artificial Sequence
  Synthetic oligonucleotide
atcagaggtaaacttataccgtgtattttt

SEQ ID NO: 108794 - DNA, 30 bp, Artificial Sequence
  Synthetic oligonucleotide
aaggcatattggctactgcggattgttttt

SEQ ID NO: 108795 - DNA, 30 bp, Artificial Sequence
  Synthetic oligonucleotide
cgggctttgcgcggaagggacgtctttttt

SEQ ID NO: 108796 - DNA, 30 bp, Artificial Sequence
  Synthetic oligonucleotide
ggcttaattagccggcgtatgttacaaaaa

SEQ ID NO: 108797 - DNA, 30 bp, Artificial Sequence
  Synthetic oligonucleotide
tgcagagttataagcagcagtctccaaaaa

SEQ ID NO: 108798 - DNA, 30 bp, Artificial Sequence
  Synthetic oligonucleotide
cggaaattgttcatactattccggcaaaaa

SEQ ID NO: 108799 - DNA, 30 bp, Artificial Sequence
  Synthetic oligonucleotide
tcacaggaaagtacccgcacttacgaaaaa

SEQ ID NO: 108800 - DNA, 30 bp, Artificial Sequence
  Synthetic oligonucleotide
gtaccgtgtactgcggaagccggtgaaaaa

SEQ ID NO: 108801 - DNA, 30 bp, Artificial Sequence
  Synthetic oligonucleotide
ggaagaaaatggaaaaacgtaattgaaaaa

SEQ ID NO: 108802 - DNA, 30 bp, Artificial Sequence
  Synthetic oligonucleotide
ctgccgggagcgttgggcaattagtaaaaa

SEQ ID NO: 108803 - DNA, 30 bp, Artificial Sequence
  Synthetic oligonucleotide
aatgcgacaatcgaaagtcatgcttaaaaa

SEQ ID NO: 108804 - DNA, 30 bp, Artificial Sequence
  Synthetic oligonucleotide
gacgagcctacgactgataccataacaaaa

SEQ ID NO: 108805 - DNA, 30 bp, Artificial Sequence
  Synthetic oligonucleotide
accggcataaggaagataaagcgtacaaaa

SEQ ID NO: 108806 - DNA, 30 bp, Artificial Sequence
  Synthetic oligonucleotide
ccatttcaccaaaaaggacctgaaccaaaa

SEQ ID NO: 108807 - DNA, 30 bp, Artificial Sequence
  Synthetic oligonucleotide
gtaacgctctacacgttattgcgaccaaaa

SEQ ID NO: 108808 - DNA, 30 bp, Artificial Sequence
  Synthetic oligonucleotide
acaaaaattggttagatgaagcaagcaaaa

SEQ ID NO: 108809 - DNA, 30 bp, Artificial Sequence
  Synthetic oligonucleotide
cgtaacgaactgtagtcatacttagcaaaa

SEQ ID NO: 108810 - DNA, 30 bp, Artificial Sequence
  Synthetic oligonucleotide
gtttgccgagacacgtcgatgggctcaaaa

SEQ ID NO: 108811 - DNA, 30 bp, Artificial Sequence
  Synthetic oligonucleotide
tatgggtcgaaagtctccgcgctctcaaaa

SEQ ID NO: 108812 - DNA, 30 bp, Artificial Sequence
  Synthetic oligonucleotide
ctaaccttaaaaacttgccaatcgtcaaaa

SEQ ID NO: 108813 - DNA, 30 bp, Artificial Sequence
  Synthetic oligonucleotide
tgataagcgattgtcagtctgagttcaaaa

SEQ ID NO: 108814 - DNA, 30 bp, Artificial Sequence
  Synthetic oligonucleotide
gatggagctatcacgaatgggtcaagaaaa

SEQ ID NO: 108815 - DNA, 30 bp, Artificial Sequence
  Synthetic oligonucleotide
agggcggaaatggtgggtaaaggaagaaaa

SEQ ID NO: 108816 - DNA, 30 bp, Artificial Sequence
  Synthetic oligonucleotide
tgagtacttattagcgtttttgggagaaaa

SEQ ID NO: 108817 - DNA, 30 bp, Artificial Sequence
  Synthetic oligonucleotide
ggagtaacagtcgcttcacgatggagaaaa

SEQ ID NO: 108818 - DNA, 30 bp, Artificial Sequence
  Synthetic oligonucleotide
gcatctaattacggcaaggcgaagcgaaaa

SEQ ID NO: 108819 - DNA, 30 bp, Artificial Sequence
  Synthetic oligonucleotide
tagttaacaagatcgatacgatggcgaaaa

SEQ ID NO: 108820 - DNA, 30 bp, Artificial Sequence
  Synthetic oligonucleotide
cgagtagcctaaactaggaatcctcgaaaa

SEQ ID NO: 108821 - DNA, 30 bp, Artificial Sequence
  Synthetic oligonucleotide
acgagtactgaacagcggatctgtcgaaaa

SEQ ID NO: 108822 - DNA, 30 bp, Artificial Sequence
  Synthetic oligonucleotide
gggagttgggatcaagtcacgtccggaaaa

SEQ ID NO: 108823 - DNA, 30 bp, Artificial Sequence
  Synthetic oligonucleotide
cgtatacacttgcaggatggagagggaaaa

SEQ ID NO: 108824 - DNA, 30 bp, Artificial Sequence
  Synthetic oligonucleotide
tagccgtgagccgcaaagtacgcgggaaaa

SEQ ID NO: 108825 - DNA, 30 bp, Artificial Sequence
  Synthetic oligonucleotide
ctcatgggttcggaccgacctcggtgaaaa

SEQ ID NO: 108826 - DNA, 30 bp, Artificial Sequence
  Synthetic oligonucleotide
ctcgctgaatcagtgggtgctatttgaaaa

SEQ ID NO: 108827 - DNA, 30 bp, Artificial Sequence
  Synthetic oligonucleotide
cggcgtacggagaggcccacctccataaaa

SEQ ID NO: 108828 - DNA, 30 bp, Artificial Sequence
  Synthetic oligonucleotide
aggtagtgcaatagctagaacgatctaaaa

SEQ ID NO: 108829 - DNA, 30 bp, Artificial Sequence
  Synthetic oligonucleotide
tagtggccagttgcaagtgtaatagtaaaa

SEQ ID NO: 108830 - DNA, 30 bp, Artificial Sequence
  Synthetic oligonucleotide
gtatccgctgggccgcctcgataggtaaaa

SEQ ID NO: 108831 - DNA, 29 bp, Artificial Sequence
  Synthetic oligonucleotide
agtgcaaaggattaaattgtcgtgtaaaa

SEQ ID NO: 108832 - DNA, 30 bp, Artificial Sequence
  Synthetic oligonucleotide
cctagaattatcacgggacaagcattaaaa

SEQ ID NO: 108833 - DNA, 30 bp, Artificial Sequence
  Synthetic oligonucleotide
cacgacagaaatgcccggcggtcgttaaaa

SEQ ID NO: 108834 - DNA, 30 bp, Artificial Sequence
  Synthetic oligonucleotide
cggtgagtctatcttaaccttaacaacaaa

SEQ ID NO: 108835 - DNA, 30 bp, Artificial Sequence
  Synthetic oligonucleotide
cagcggataacgtgattttcgccgaacaaa

SEQ ID NO: 108836 - DNA, 30 bp, Artificial Sequence
  Synthetic oligonucleotide
catgcagattgtcgcccacgcactaacaaa

SEQ ID NO: 108837 - DNA, 30 bp, Artificial Sequence
  Synthetic oligonucleotide
tcctcggacgcattcacgaattgtaacaaa

SEQ ID NO: 108838 - DNA, 30 bp, Artificial Sequence
  Synthetic oligonucleotide
ttacgagtaatatgttcaggcttacacaaa

SEQ ID NO: 108839 - DNA, 30 bp, Artificial Sequence
  Synthetic oligonucleotide
atggggtgcttccgaaacgttcagcacaaa

SEQ ID NO: 108840 - DNA, 30 bp, Artificial Sequence
  Synthetic oligonucleotide
tcaagattaaccgctgaggggtggcacaaa

SEQ ID NO: 108841 - DNA, 30 bp, Artificial Sequence
  Synthetic oligonucleotide
aggtgctaatttcgccatgtagtgcacaaa

SEQ ID NO: 108842 - DNA, 30 bp, Artificial Sequence
  Synthetic oligonucleotide
tcggcccgtgagcaggaacggttggacaaa

SEQ ID NO: 108843 - DNA, 30 bp, Artificial Sequence
  Synthetic oligonucleotide
ccgagctgcaaatcggtaggagctgacaaa

SEQ ID NO: 108844 - DNA, 30 bp, Artificial Sequence
  Synthetic oligonucleotide
ggcgcgaacggtggtcagaagggatacaaa

SEQ ID NO: 108845 - DNA, 30 bp, Artificial Sequence
  Synthetic oligonucleotide
attacgccccagtgacctgccgcctacaaa

SEQ ID NO: 108846 - DNA, 30 bp, Artificial Sequence
  Synthetic oligonucleotide
gtcacgaaggtgactgaagtgatgtacaaa

SEQ ID NO: 108847 - DNA, 30 bp, Artificial Sequence
  Synthetic oligonucleotide
aacggacggtagtgtccagcgccttacaaa

SEQ ID NO: 108848 - DNA, 30 bp, Artificial Sequence
  Synthetic oligonucleotide
aactagtgcatgtggcaactaatttacaaa

SEQ ID NO: 108849 - DNA, 30 bp, Artificial Sequence
  Synthetic oligonucleotide
ggcgctgcacagattcagcgcatgaccaaa

SEQ ID NO: 108850 - DNA, 30 bp, Artificial Sequence
  Synthetic oligonucleotide
acctgacgttctcgtcgattgctgaccaaa

SEQ ID NO: 108851 - DNA, 30 bp, Artificial Sequence
  Synthetic oligonucleotide
taatataacgatgatccgtgcactaccaaa

SEQ ID NO: 108852 - DNA, 30 bp, Artificial Sequence
  Synthetic oligonucleotide
cagagggcgaagccaccccaatggcccaaa

SEQ ID NO: 108853 - DNA, 30 bp, Artificial Sequence
  Synthetic oligonucleotide
taagcccactgacctcacaccgatcccaaa

SEQ ID NO: 108854 - DNA, 30 bp, Artificial Sequence
  Synthetic oligonucleotide
ggagcaatttctgacaaggtaagtcccaaa

SEQ ID NO: 108855 - DNA, 30 bp, Artificial Sequence
  Synthetic oligonucleotide
tcgtcataggctcttataccgtgcgccaaa

SEQ ID NO: 108856 - DNA, 30 bp, Artificial Sequence
  Synthetic oligonucleotide
ccactctattgactaaaggagctggccaaa

SEQ ID NO: 108857 - DNA, 30 bp, Artificial Sequence
  Synthetic oligonucleotide
cgagtgaacagttggacctcgaaatccaaa

SEQ ID NO: 108858 - DNA, 30 bp, Artificial Sequence
  Synthetic oligonucleotide
ctaagatccggaccagatgagacatccaaa

SEQ ID NO: 108859 - DNA, 30 bp, Artificial Sequence
  Synthetic oligonucleotide
taccgaataccggtacgactatgatccaaa

SEQ ID NO: 108860 - DNA, 30 bp, Artificial Sequence
  Synthetic oligonucleotide
attggtctatctatcggagggtatagcaaa

SEQ ID NO: 108861 - DNA, 30 bp, Artificial Sequence
  Synthetic oligonucleotide
ttgtgcaaaaggtgaacaaataaacgcaaa

SEQ ID NO: 108862 - DNA, 31 bp, Artificial Sequence
  Synthetic oligonucleotide
atgtgataaagattgtgtgcttgtgcgcaaa

SEQ ID NO: 108863 - DNA, 30 bp, Artificial Sequence
  Synthetic oligonucleotide
caagcaattagtcagagggatgacggcaaa

SEQ ID NO: 108864 - DNA, 30 bp, Artificial Sequence
  Synthetic oligonucleotide
agggttgatactatcgacttgaccggcaaa

SEQ ID NO: 108865 - DNA, 30 bp, Artificial Sequence
  Synthetic oligonucleotide
tcgtggcttgtctgtctatccttcggcaaa

SEQ ID NO: 108866 - DNA, 30 bp, Artificial Sequence
  Synthetic oligonucleotide
tgcccgctggagcaggctgcgcagggcaaa

SEQ ID NO: 108867 - DNA, 30 bp, Artificial Sequence
  Synthetic oligonucleotide
tgcaacgatggactaccttacgttggcaaa

SEQ ID NO: 108868 - DNA, 30 bp, Artificial Sequence
  Synthetic oligonucleotide
cggcccaaacgggcctgtattaaatgcaaa

SEQ ID NO: 108869 - DNA, 30 bp, Artificial Sequence
  Synthetic oligonucleotide
gtggtcacgctaatagagaccgcatgcaaa

SEQ ID NO: 108870 - DNA, 30 bp, Artificial Sequence
  Synthetic oligonucleotide
tgcacggtacggcaccaagtcctatgcaaa

SEQ ID NO: 108871 - DNA, 30 bp, Artificial Sequence
  Synthetic oligonucleotide
tacaagcaccttcgtaggatgtgctgcaaa

SEQ ID NO: 108872 - DNA, 30 bp, Artificial Sequence
  Synthetic oligonucleotide
aatggcgtagggaacagtaatccgatcaaa

SEQ ID NO: 108873 - DNA, 30 bp, Artificial Sequence
  Synthetic oligonucleotide
caggcgctaaggactccttctcttatcaaa

SEQ ID NO: 108874 - DNA, 30 bp, Artificial Sequence
  Synthetic oligonucleotide
caaacgggagtcaccgacccacgactcaaa

SEQ ID NO: 108875 - DNA, 30 bp, Artificial Sequence
  Synthetic oligonucleotide
cagacgtattggttgatactcggactcaaa

SEQ ID NO: 108876 - DNA, 30 bp, Artificial Sequence
  Synthetic oligonucleotide
agataaagtgacgtctgtaggggtctcaaa

SEQ ID NO: 108877 - DNA, 30 bp, Artificial Sequence
  Synthetic oligonucleotide
atggtcggatctaaacacaaccgggtcaaa

SEQ ID NO: 108878 - DNA, 30 bp, Artificial Sequence
  Synthetic oligonucleotide
catcgcctgagtcctgctctcggggtcaaa

SEQ ID NO: 108879 - DNA, 30 bp, Artificial Sequence
  Synthetic oligonucleotide
agcaagtgggttggttttcacttggtcaaa

SEQ ID NO: 108880 - DNA, 30 bp, Artificial Sequence
  Synthetic oligonucleotide
ttcagccgtgtatctaaaagggcattcaaa

SEQ ID NO: 108881 - DNA, 30 bp, Artificial Sequence
  Synthetic oligonucleotide
agacgagtggataaggtacttgagttcaaa

SEQ ID NO: 108882 - DNA, 30 bp, Artificial Sequence
  Synthetic oligonucleotide
agtttcgatgcacactgacgcctcaagaaa

SEQ ID NO: 108883 - DNA, 30 bp, Artificial Sequence
  Synthetic oligonucleotide
aagagtgggagatgtcgcggaaagaagaaa

SEQ ID NO: 108884 - DNA, 30 bp, Artificial Sequence
  Synthetic oligonucleotide
gaaacctagtagagagtattaccgaagaaa

SEQ ID NO: 108885 - DNA, 30 bp, Artificial Sequence
  Synthetic oligonucleotide
tgacatggcaaccgagggcaggggaagaaa

SEQ ID NO: 108886 - DNA, 30 bp, Artificial Sequence
  Synthetic oligonucleotide
tatgaacaaacgatagccgaatggaagaaa

SEQ ID NO: 108887 - DNA, 30 bp, Artificial Sequence
  Synthetic oligonucleotide
aagaggattcggaagagggatcctaagaaa

SEQ ID NO: 108888 - DNA, 30 bp, Artificial Sequence
  Synthetic oligonucleotide
aaacgcaaaaccgaccggctctaacagaaa

SEQ ID NO: 108889 - DNA, 30 bp, Artificial Sequence
  Synthetic oligonucleotide
gtcaaaaatacaatgaaggaataccagaaa

SEQ ID NO: 108890 - DNA, 30 bp, Artificial Sequence
  Synthetic oligonucleotide
taagttgggacaaaacagccatgccagaaa

SEQ ID NO: 108891 - DNA, 30 bp, Artificial Sequence
  Synthetic oligonucleotide
aggtaataagcactaagaagtgttcagaaa

SEQ ID NO: 108892 - DNA, 30 bp, Artificial Sequence
  Synthetic oligonucleotide
cagatattgtattgagtgttattcgagaaa

SEQ ID NO: 108893 - DNA, 30 bp, Artificial Sequence
  Synthetic oligonucleotide
gggggagagggacaacggttatgggagaaa

SEQ ID NO: 108894 - DNA, 30 bp, Artificial Sequence
  Synthetic oligonucleotide
gctggggaaaagttggggatgctggagaaa

SEQ ID NO: 108895 - DNA, 30 bp, Artificial Sequence
  Synthetic oligonucleotide
gcctagtattacaaaactctgggctagaaa

SEQ ID NO: 108896 - DNA, 30 bp, Artificial Sequence
  Synthetic oligonucleotide
tagaatcggggtcgagaaaacatctagaaa

SEQ ID NO: 108897 - DNA, 30 bp, Artificial Sequence
  Synthetic oligonucleotide
gcagcccacgagagtttaagtcagtagaaa

SEQ ID NO: 108898 - DNA, 30 bp, Artificial Sequence
  Synthetic oligonucleotide
gtggctaaagagacaaccctcggaacgaaa

SEQ ID NO: 108899 - DNA, 30 bp, Artificial Sequence
  Synthetic oligonucleotide
ttgtctgctggggaaagattgtccacgaaa

SEQ ID NO: 108900 - DNA, 30 bp, Artificial Sequence
  Synthetic oligonucleotide
ctcggtacgaccttgccagacctcacgaaa

SEQ ID NO: 108901 - DNA, 30 bp, Artificial Sequence
  Synthetic oligonucleotide
ttggaatgatgttctcgcgggaggacgaaa

SEQ ID NO: 108902 - DNA, 30 bp, Artificial Sequence
  Synthetic oligonucleotide
cctcagcacattaacctcgagaaaccgaaa

SEQ ID NO: 108903 - DNA, 30 bp, Artificial Sequence
  Synthetic oligonucleotide
acaaagccatactggttacgtggcccgaaa

SEQ ID NO: 108904 - DNA, 30 bp, Artificial Sequence
  Synthetic oligonucleotide
cggtgttcggtacggctgagttaagcgaaa

SEQ ID NO: 108905 - DNA, 30 bp, Artificial Sequence
  Synthetic oligonucleotide
tataaagcactgcacagtgttgtctcgaaa

SEQ ID NO: 108906 - DNA, 30 bp, Artificial Sequence
  Synthetic oligonucleotide
taaaccacgtctagaaacctgttgtcgaaa

SEQ ID NO: 108907 - DNA, 30 bp, Artificial Sequence
  Synthetic oligonucleotide
cggccattctaatgatatgggaagaggaaa

SEQ ID NO: 108908 - DNA, 30 bp, Artificial Sequence
  Synthetic oligonucleotide
accacgcaaacggctttaccggagaggaaa

SEQ ID NO: 108909 - DNA, 30 bp, Artificial Sequence
  Synthetic oligonucleotide
accgatagtagcctttagttatggaggaaa

SEQ ID NO: 108910 - DNA, 30 bp, Artificial Sequence
  Synthetic oligonucleotide
ttaactaaagtcgggaaacagtcgcggaaa

SEQ ID NO: 108911 - DNA, 30 bp, Artificial Sequence
  Synthetic oligonucleotide
taggcacacgtggttaggttcgggcggaaa

SEQ ID NO: 108912 - DNA, 30 bp, Artificial Sequence
  Synthetic oligonucleotide
gccgtccagcacttaacagccaaagggaaa

SEQ ID NO: 108913 - DNA, 30 bp, Artificial Sequence
  Synthetic oligonucleotide
ttggtgcgacctaagataggggaagggaaa

SEQ ID NO: 108914 - DNA, 30 bp, Artificial Sequence
  Synthetic oligonucleotide
gcaattgggaactacgattatagggggaaa

SEQ ID NO: 108915 - DNA, 30 bp, Artificial Sequence
  Synthetic oligonucleotide
cgccgagaacatagatagtacatggggaaa

SEQ ID NO: 108916 - DNA, 30 bp, Artificial Sequence
  Synthetic oligonucleotide
gtatactaacgcggactagattaatggaaa

SEQ ID NO: 108917 - DNA, 30 bp, Artificial Sequence
  Synthetic oligonucleotide
ctgcgtgcagagacaattacgggctggaaa

SEQ ID NO: 108918 - DNA, 30 bp, Artificial Sequence
  Synthetic oligonucleotide
tgccagggcaagcacaaattaatctggaaa

SEQ ID NO: 108919 - DNA, 30 bp, Artificial Sequence
  Synthetic oligonucleotide
cagctggtcataggccagtagatctggaaa

SEQ ID NO: 108920 - DNA, 30 bp, Artificial Sequence
  Synthetic oligonucleotide
cctaacggttcgacgttgacgaggtggaaa

SEQ ID NO: 108921 - DNA, 30 bp, Artificial Sequence
  Synthetic oligonucleotide
cgaccaacaaagatcttgttagtgtggaaa

SEQ ID NO: 108922 - DNA, 30 bp, Artificial Sequence
  Synthetic oligonucleotide
agcgacgtgccgagacggccgagaatgaaa

SEQ ID NO: 108923 - DNA, 30 bp, Artificial Sequence
  Synthetic oligonucleotide
atgtctgttacttcagggaaagtgatgaaa

SEQ ID NO: 108924 - DNA, 30 bp, Artificial Sequence
  Synthetic oligonucleotide
agttgggtatccatagcccatactatgaaa

SEQ ID NO: 108925 - DNA, 30 bp, Artificial Sequence
  Synthetic oligonucleotide
actgataagagggttacgacagggctgaaa

SEQ ID NO: 108926 - DNA, 30 bp, Artificial Sequence
  Synthetic oligonucleotide
ggtggaatagtggaacgtggtgcagtgaaa

SEQ ID NO: 108927 - DNA, 30 bp, Artificial Sequence
  Synthetic oligonucleotide
taaggtgctgcgtggcgaaatatagtgaaa

SEQ ID NO: 108928 - DNA, 30 bp, Artificial Sequence
  Synthetic oligonucleotide
cgacgcataaagataggagtagatgtgaaa

SEQ ID NO: 108929 - DNA, 30 bp, Artificial Sequence
  Synthetic oligonucleotide
acctcaaagcaaaccggttcagttgtgaaa

SEQ ID NO: 108930 - DNA, 30 bp, Artificial Sequence
  Synthetic oligonucleotide
gaggctagctcgggacctggatgattgaaa

SEQ ID NO: 108931 - DNA, 30 bp, Artificial Sequence
  Synthetic oligonucleotide
atgtaagagtgagatcagcgtcgaaataaa

SEQ ID NO: 108932 - DNA, 30 bp, Artificial Sequence
  Synthetic oligonucleotide
ctcataaaactcgaatgggattccaataaa

SEQ ID NO: 108933 - DNA, 30 bp, Artificial Sequence
  Synthetic oligonucleotide
attgaacaacatgagtgatattccaataaa

SEQ ID NO: 108934 - DNA, 30 bp, Artificial Sequence
  Synthetic oligonucleotide
taaagattactcgagtgcagccataataaa

SEQ ID NO: 108935 - DNA, 30 bp, Artificial Sequence
  Synthetic oligonucleotide
tgacgatggcgcaactgacggattaataaa

SEQ ID NO: 108936 - DNA, 30 bp, Artificial Sequence
  Synthetic oligonucleotide
cggtagcttcaggaaacgaaggtacataaa

SEQ ID NO: 108937 - DNA, 30 bp, Artificial Sequence
  Synthetic oligonucleotide
ctaaaatccgttagccgaaaagtccataaa

SEQ ID NO: 108938 - DNA, 30 bp, Artificial Sequence
  Synthetic oligonucleotide
gatgtgttcaagaattccgagatgcataaa

SEQ ID NO: 108939 - DNA, 30 bp, Artificial Sequence
  Synthetic oligonucleotide
gcgagagtgtagcccgtcgttacagataaa

SEQ ID NO: 108940 - DNA, 30 bp, Artificial Sequence
  Synthetic oligonucleotide
atggtgcgaccgagaaagatcgaggataaa

SEQ ID NO: 108941 - DNA, 30 bp, Artificial Sequence
  Synthetic oligonucleotide
agggacaaatacctttgatcgcttgataaa

SEQ ID NO: 108942 - DNA, 30 bp, Artificial Sequence
  Synthetic oligonucleotide
atgcaaacacagttaacgagaccatataaa

SEQ ID NO: 108943 - DNA, 30 bp, Artificial Sequence
  Synthetic oligonucleotide
cgtggtcgggcgaaatgcaccgtatataaa

SEQ ID NO: 108944 - DNA, 33 bp, Artificial Sequence
  Synthetic oligonucleotide
ttgcgcttttgtgtaggtttactcccgtataaa

SEQ ID NO: 108945 - DNA, 30 bp, Artificial Sequence
  Synthetic oligonucleotide
cgcgatctcgagacaacccgctattataaa

SEQ ID NO: 108946 - DNA, 30 bp, Artificial Sequence
  Synthetic oligonucleotide
gcaaacttgggacaagactgacagactaaa

SEQ ID NO: 108947 - DNA, 30 bp, Artificial Sequence
  Synthetic oligonucleotide
actgaatgtgggtgtctcgtgattactaaa

SEQ ID NO: 108948 - DNA, 30 bp, Artificial Sequence
  Synthetic oligonucleotide
atggcgaggtgggcgatccagtaacctaaa

SEQ ID NO: 108949 - DNA, 30 bp, Artificial Sequence
  Synthetic oligonucleotide
caagttcaaaatgagagaggggatcctaaa

SEQ ID NO: 108950 - DNA, 30 bp, Artificial Sequence
  Synthetic oligonucleotide
agtctaaacagaactcggagcttagctaaa

SEQ ID NO: 108951 - DNA, 30 bp, Artificial Sequence
  Synthetic oligonucleotide
gaacctaggatctgcagggggttagctaaa

SEQ ID NO: 108952 - DNA, 30 bp, Artificial Sequence
  Synthetic oligonucleotide
cgcgaccatgaatacggttgggacgctaaa

SEQ ID NO: 108953 - DNA, 30 bp, Artificial Sequence
  Synthetic oligonucleotide
cacgagaagcatcgctgggtattcgctaaa

SEQ ID NO: 108954 - DNA, 30 bp, Artificial Sequence
  Synthetic oligonucleotide
agtagaatcattggcgcggatgtggctaaa

SEQ ID NO: 108955 - DNA, 30 bp, Artificial Sequence
  Synthetic oligonucleotide
acgttaggtgtccgataagatggtgctaaa

SEQ ID NO: 108956 - DNA, 30 bp, Artificial Sequence
  Synthetic oligonucleotide
ataaacaatggacaagactgaacatctaaa

SEQ ID NO: 108957 - DNA, 30 bp, Artificial Sequence
  Synthetic oligonucleotide
ctggatatcggctggtcaaccagctctaaa

SEQ ID NO: 108958 - DNA, 30 bp, Artificial Sequence
  Synthetic oligonucleotide
gaagagtacccactcgaatatagttctaaa

SEQ ID NO: 108959 - DNA, 30 bp, Artificial Sequence
  Synthetic oligonucleotide
aagaacaatgatgggaggcgcaacagtaaa

SEQ ID NO: 108960 - DNA, 30 bp, Artificial Sequence
  Synthetic oligonucleotide
actgactggacttaccatgcgacgagtaaa

SEQ ID NO: 108961 - DNA, 30 bp, Artificial Sequence
  Synthetic oligonucleotide
gctgtctagcgaccaaaggtaaatagtaaa

SEQ ID NO: 108962 - DNA, 30 bp, Artificial Sequence
  Synthetic oligonucleotide
gagctagtgtactgatactgcgaccgtaaa

SEQ ID NO: 108963 - DNA, 30 bp, Artificial Sequence
  Synthetic oligonucleotide
gtgagagtgccatgcgcgatcggccgtaaa

SEQ ID NO: 108964 - DNA, 30 bp, Artificial Sequence
  Synthetic oligonucleotide
aaacgcacaactcgatagagggctcgtaaa

SEQ ID NO: 108965 - DNA, 30 bp, Artificial Sequence
  Synthetic oligonucleotide
tcacatattaagccacgcggtgtaggtaaa

SEQ ID NO: 108966 - DNA, 30 bp, Artificial Sequence
  Synthetic oligonucleotide
aggctaggtagccgagtcaaaaacggtaaa

SEQ ID NO: 108967 - DNA, 30 bp, Artificial Sequence
  Synthetic oligonucleotide
attcaatgacagacgcgttagaccggtaaa

SEQ ID NO: 108968 - DNA, 30 bp, Artificial Sequence
  Synthetic oligonucleotide
tacaacgtgcaccatgcgtcgaagggtaaa

SEQ ID NO: 108969 - DNA, 30 bp, Artificial Sequence
  Synthetic oligonucleotide
cccgaagacattcaaagcagggaaattaaa

SEQ ID NO: 108970 - DNA, 30 bp, Artificial Sequence
  Synthetic oligonucleotide
acggcgaaaaagagccaaggctccattaaa

SEQ ID NO: 108971 - DNA, 30 bp, Artificial Sequence
  Synthetic oligonucleotide
gggcagatccaatcatgggttagccttaaa

SEQ ID NO: 108972 - DNA, 30 bp, Artificial Sequence
  Synthetic oligonucleotide
taacgctactgggttattggactgcttaaa

SEQ ID NO: 108973 - DNA, 30 bp, Artificial Sequence
  Synthetic oligonucleotide
gtcaagtccctgataggggatcgagttaaa

SEQ ID NO: 108974 - DNA, 30 bp, Artificial Sequence
  Synthetic oligonucleotide
cggggaagcatgagctgtatgttatttaaa

SEQ ID NO: 108975 - DNA, 30 bp, Artificial Sequence
  Synthetic oligonucleotide
tagcggcatagcccgagggaacggtttaaa

SEQ ID NO: 108976 - DNA, 30 bp, Artificial Sequence
  Synthetic oligonucleotide
tagagacacatagaattccatgtgcaacaa

SEQ ID NO: 108977 - DNA, 30 bp, Artificial Sequence
  Synthetic oligonucleotide
actcggaaatatgtattccctcgagaacaa

SEQ ID NO: 108978 - DNA, 30 bp, Artificial Sequence
  Synthetic oligonucleotide
cgtacccattggtgactggtaggagaacaa

SEQ ID NO: 108979 - DNA, 30 bp, Artificial Sequence
  Synthetic oligonucleotide
caggagcaacatacaagtcgctgtgaacaa

SEQ ID NO: 108980 - DNA, 30 bp, Artificial Sequence
  Synthetic oligonucleotide
caaatccaaaagctaggcgggcttgaacaa

SEQ ID NO: 108981 - DNA, 30 bp, Artificial Sequence
  Synthetic oligonucleotide
cgcgcgagtagacatctcggaatctaacaa

SEQ ID NO: 108982 - DNA, 30 bp, Artificial Sequence
  Synthetic oligonucleotide
ggcacctacaggaaatatgcgccgtaacaa

SEQ ID NO: 108983 - DNA, 30 bp, Artificial Sequence
  Synthetic oligonucleotide
tagatcgagtgcgcttcatcagtgtaacaa

SEQ ID NO: 108984 - DNA, 30 bp, Artificial Sequence
  Synthetic oligonucleotide
tcgtagtgagctgtttgtcagtcaacacaa

SEQ ID NO: 108985 - DNA, 30 bp, Artificial Sequence
  Synthetic oligonucleotide
cactggacagtctggagtccgatcacacaa

SEQ ID NO: 108986 - DNA, 30 bp, Artificial Sequence
  Synthetic oligonucleotide
gcactccgtctataagacatctctacacaa

SEQ ID NO: 108987 - DNA, 30 bp, Artificial Sequence
  Synthetic oligonucleotide
atgtgtaggtagaaacctcgaccaccacaa

SEQ ID NO: 108988 - DNA, 30 bp, Artificial Sequence
  Synthetic oligonucleotide
cgttgggagaattgcaggaagtccccacaa

SEQ ID NO: 108989 - DNA, 30 bp, Artificial Sequence
  Synthetic oligonucleotide
cgtcacggttgcagtgaaaaagcgccacaa

SEQ ID NO: 108990 - DNA, 30 bp, Artificial Sequence
  Synthetic oligonucleotide
acttcccatcgttaaaggggcaatccacaa

SEQ ID NO: 108991 - DNA, 30 bp, Artificial Sequence
  Synthetic oligonucleotide
gtacttacaagcttggaagactgtgcacaa

SEQ ID NO: 108992 - DNA, 31 bp, Artificial Sequence
  Synthetic oligonucleotide
cggtgacgttttttgggaactgggctcacaa

SEQ ID NO: 108993 - DNA, 30 bp, Artificial Sequence
  Synthetic oligonucleotide
aacgtgcttaacgtcattaggtgctcacaa

SEQ ID NO: 108994 - DNA, 30 bp, Artificial Sequence
  Synthetic oligonucleotide
cttaacccaaaattgagctgaatgtcacaa

SEQ ID NO: 108995 - DNA, 30 bp, Artificial Sequence
  Synthetic oligonucleotide
tcgcggcaaggtggggtatcttaaagacaa

SEQ ID NO: 108996 - DNA, 30 bp, Artificial Sequence
  Synthetic oligonucleotide
cgtttagcaccgtgtgtgtgttacagacaa

SEQ ID NO: 108997 - DNA, 30 bp, Artificial Sequence
  Synthetic oligonucleotide
aaacagccattgagaggctttccgagacaa

SEQ ID NO: 108998 - DNA, 30 bp, Artificial Sequence
  Synthetic oligonucleotide
tgatgatctagaactttaaaaaggagacaa

SEQ ID NO: 108999 - DNA, 30 bp, Artificial Sequence
  Synthetic oligonucleotide
caatgggacagaacctcatgctagcgacaa

SEQ ID NO: 109000 - DNA, 30 bp, Artificial Sequence
  Synthetic oligonucleotide
tgcatttagaatgcgaaaatgtttcgacaa

SEQ ID NO: 109001 - DNA, 30 bp, Artificial Sequence
  Synthetic oligonucleotide
tcataagtgaataacccaccgtaaggacaa

SEQ ID NO: 109002 - DNA, 30 bp, Artificial Sequence
  Synthetic oligonucleotide
gcagggcccgatactccgtcgatcggacaa

SEQ ID NO: 109003 - DNA, 30 bp, Artificial Sequence
  Synthetic oligonucleotide
attgagcccgtataaaaaataaagggacaa

SEQ ID NO: 109004 - DNA, 30 bp, Artificial Sequence
  Synthetic oligonucleotide
ggggcgaaatcatcgccaattacgggacaa

SEQ ID NO: 109005 - DNA, 31 bp, Artificial Sequence
  Synthetic oligonucleotide
atgactggcgccaggcagtacgtggggacaa

SEQ ID NO: 109006 - DNA, 30 bp, Artificial Sequence
  Synthetic oligonucleotide
ggacagaagcttaccgactagccatgacaa

SEQ ID NO: 109007 - DNA, 30 bp, Artificial Sequence
  Synthetic oligonucleotide
cttgcgctgagccgatggcgagcttgacaa

SEQ ID NO: 109008 - DNA, 30 bp, Artificial Sequence
  Synthetic oligonucleotide
catgcggacgtccgaggggaatcttgacaa

SEQ ID NO: 109009 - DNA, 30 bp, Artificial Sequence
  Synthetic oligonucleotide
tcgtggtcaaaaaccatgttgatttgacaa

SEQ ID NO: 109010 - DNA, 30 bp, Artificial Sequence
  Synthetic oligonucleotide
ctgggggagtaggctcatataaccatacaa

SEQ ID NO: 109011 - DNA, 30 bp, Artificial Sequence
  Synthetic oligonucleotide
ggctatgagttgacgtatgtgagcctacaa

SEQ ID NO: 109012 - DNA, 30 bp, Artificial Sequence
  Synthetic oligonucleotide
ggcgtacatggcgttcaatcaatagtacaa

SEQ ID NO: 109013 - DNA, 30 bp, Artificial Sequence
  Synthetic oligonucleotide
taatgccactcccatctttgcaaattacaa

SEQ ID NO: 109014 - DNA, 30 bp, Artificial Sequence
  Synthetic oligonucleotide
cgtcttacgaaatccaattttctcaaccaa

SEQ ID NO: 109015 - DNA, 30 bp, Artificial Sequence
  Synthetic oligonucleotide
ctatttagctcaattgggggagtcaaccaa

SEQ ID NO: 109016 - DNA, 30 bp, Artificial Sequence
  Synthetic oligonucleotide
gtccagagacgagagaacaggatgaaccaa

SEQ ID NO: 109017 - DNA, 31 bp, Artificial Sequence
  Synthetic oligonucleotide
tcttagggctgtgacatagtcagccgaccaa

SEQ ID NO: 109018 - DNA, 30 bp, Artificial Sequence
  Synthetic oligonucleotide
gagagtgtttgaaccggtagtctcgaccaa

SEQ ID NO: 109019 - DNA, 30 bp, Artificial Sequence
  Synthetic oligonucleotide
gttaaaggtacaatgtgcgaacaggaccaa

SEQ ID NO: 109020 - DNA, 30 bp, Artificial Sequence
  Synthetic oligonucleotide
actaagttgaaatgttagcgggttgaccaa

SEQ ID NO: 109021 - DNA, 30 bp, Artificial Sequence
  Synthetic oligonucleotide
aaaaaaagattggccaaaagaacctaccaa

SEQ ID NO: 109022 - DNA, 30 bp, Artificial Sequence
  Synthetic oligonucleotide
aaagtcagtctatggccactccgctaccaa

SEQ ID NO: 109023 - DNA, 30 bp, Artificial Sequence
  Synthetic oligonucleotide
aggacgacgtcccgcacaacagacccccaa

SEQ ID NO: 109024 - DNA, 30 bp, Artificial Sequence
  Synthetic oligonucleotide
ttacgagggagatgtctaaaacccgcccaa

SEQ ID NO: 109025 - DNA, 30 bp, Artificial Sequence
  Synthetic oligonucleotide
cagaaagataacgtgacatctcgggcccaa

SEQ ID NO: 109026 - DNA, 30 bp, Artificial Sequence
  Synthetic oligonucleotide
tggctcgtgttgcatgctcatctggcccaa

SEQ ID NO: 109027 - DNA, 30 bp, Artificial Sequence
  Synthetic oligonucleotide
aagatgggggcccgatatcacaaatcccaa

SEQ ID NO: 109028 - DNA, 30 bp, Artificial Sequence
  Synthetic oligonucleotide
atcggcgactttgccggacgtaaatcccaa

SEQ ID NO: 109029 - DNA, 30 bp, Artificial Sequence
  Synthetic oligonucleotide
ggtgtggtcgtaggcggtatctcgtcccaa

SEQ ID NO: 109030 - DNA, 30 bp, Artificial Sequence
  Synthetic oligonucleotide
ggagtctcggaactctcgcaccggtcccaa

SEQ ID NO: 109031 - DNA, 30 bp, Artificial Sequence
  Synthetic oligonucleotide
tccatatggtggacatacgaaccacgccaa

SEQ ID NO: 109032 - DNA, 30 bp, Artificial Sequence
  Synthetic oligonucleotide
gcccccatataaaaagcactgtgtggccaa

SEQ ID NO: 109033 - DNA, 30 bp, Artificial Sequence
  Synthetic oligonucleotide
tccgataggaatgctttccgatcatgccaa

SEQ ID NO: 109034 - DNA, 30 bp, Artificial Sequence
  Synthetic oligonucleotide
aaacgatcttccaaactttactcctgccaa

SEQ ID NO: 109035 - DNA, 30 bp, Artificial Sequence
  Synthetic oligonucleotide
ctagaacagtctccagagacatgttgccaa

SEQ ID NO: 109036 - DNA, 30 bp, Artificial Sequence
  Synthetic oligonucleotide
cacaaacaaaaaccttacggctccatccaa

SEQ ID NO: 109037 - DNA, 30 bp, Artificial Sequence
  Synthetic oligonucleotide
tatgtaacgagttaaggcaaaaagatccaa

SEQ ID NO: 109038 - DNA, 30 bp, Artificial Sequence
  Synthetic oligonucleotide
ctcggcatgcgacacctcattcctatccaa

SEQ ID NO: 109039 - DNA, 30 bp, Artificial Sequence
  Synthetic oligonucleotide
caaaaccgtgataacgaagggaaagtccaa

SEQ ID NO: 109040 - DNA, 30 bp, Artificial Sequence
  Synthetic oligonucleotide
gaccttgggatcgggtgcgaacacgtccaa

SEQ ID NO: 109041 - DNA, 30 bp, Artificial Sequence
  Synthetic oligonucleotide
tgttgggataattattcacgcctcgtccaa

SEQ ID NO: 109042 - DNA, 30 bp, Artificial Sequence
  Synthetic oligonucleotide
cgtattaaatacatcggtttgggtgtccaa

SEQ ID NO: 109043 - DNA, 30 bp, Artificial Sequence
  Synthetic oligonucleotide
acgtccgcccgtgatagtccaattttccaa

SEQ ID NO: 109044 - DNA, 30 bp, Artificial Sequence
  Synthetic oligonucleotide
ggaagtggtgtgatgcgggtagaaaagcaa

SEQ ID NO: 109045 - DNA, 30 bp, Artificial Sequence
  Synthetic oligonucleotide
tatcacaaagggatataaatagataagcaa

SEQ ID NO: 109046 - DNA, 30 bp, Artificial Sequence
  Synthetic oligonucleotide
gggccaaggaaatcagtcaccatacagcaa

SEQ ID NO: 109047 - DNA, 30 bp, Artificial Sequence
  Synthetic oligonucleotide
ctacaggaacggtgtcccctcgctcagcaa

SEQ ID NO: 109048 - DNA, 30 bp, Artificial Sequence
  Synthetic oligonucleotide
gtgcaccgtgcgcggatcaacggagagcaa

SEQ ID NO: 109049 - DNA, 30 bp, Artificial Sequence
  Synthetic oligonucleotide
caggtgaaaatatcaatttggtgagagcaa

SEQ ID NO: 109050 - DNA, 30 bp, Artificial Sequence
  Synthetic oligonucleotide
ttggtattacataagtgtcaattagagcaa

SEQ ID NO: 109051 - DNA, 30 bp, Artificial Sequence
  Synthetic oligonucleotide
cagataagtgaaaaagtaagtttcgagcaa

SEQ ID NO: 109052 - DNA, 30 bp, Artificial Sequence
  Synthetic oligonucleotide
agttgttcaggctactaactgaaggagcaa

SEQ ID NO: 109053 - DNA, 30 bp, Artificial Sequence
  Synthetic oligonucleotide
aaactagcgtgatcataggagggggagcaa

SEQ ID NO: 109054 - DNA, 30 bp, Artificial Sequence
  Synthetic oligonucleotide
caccagggtagcgcaacaactcgtgagcaa

SEQ ID NO: 109055 - DNA, 30 bp, Artificial Sequence
  Synthetic oligonucleotide
tacgttagactatcataggtttgctagcaa

SEQ ID NO: 109056 - DNA, 30 bp, Artificial Sequence
  Synthetic oligonucleotide
agctcgcgggcgactcatggactgtagcaa

SEQ ID NO: 109057 - DNA, 30 bp, Artificial Sequence
  Synthetic oligonucleotide
gagccggcacgcggtaggtaagtgtagcaa

SEQ ID NO: 109058 - DNA, 30 bp, Artificial Sequence
  Synthetic oligonucleotide
ttaggtgggggccagtcagaattcacgcaa

SEQ ID NO: 109059 - DNA, 30 bp, Artificial Sequence
  Synthetic oligonucleotide
ggagttaagaccatgggacactagacgcaa

SEQ ID NO: 109060 - DNA, 30 bp, Artificial Sequence
  Synthetic oligonucleotide
gtcttagtcaactggacgctcgatacgcaa

SEQ ID NO: 109061 - DNA, 30 bp, Artificial Sequence
  Synthetic oligonucleotide
gaacggtcaagattttccgacgatccgcaa

SEQ ID NO: 109062 - DNA, 30 bp, Artificial Sequence
  Synthetic oligonucleotide
accgcgcgtatccgacttgaatttccgcaa

SEQ ID NO: 109063 - DNA, 30 bp, Artificial Sequence
  Synthetic oligonucleotide
tcagagacacttagaccgaaacatgcgcaa

SEQ ID NO: 109064 - DNA, 30 bp, Artificial Sequence
  Synthetic oligonucleotide
taaaatacggataggacttatcaatcgcaa

SEQ ID NO: 109065 - DNA, 30 bp, Artificial Sequence
  Synthetic oligonucleotide
catgtggagataatctcgatattatcgcaa

SEQ ID NO: 109066 - DNA, 30 bp, Artificial Sequence
  Synthetic oligonucleotide
agtaaatgatatcaggggtgaagctcgcaa

SEQ ID NO: 109067 - DNA, 30 bp, Artificial Sequence
  Synthetic oligonucleotide
gacatcacaacgtatatagcgtgctcgcaa

SEQ ID NO: 109068 - DNA, 30 bp, Artificial Sequence
  Synthetic oligonucleotide
ttgcccaatctacgactaaaaccgaggcaa

SEQ ID NO: 109069 - DNA, 30 bp, Artificial Sequence
  Synthetic oligonucleotide
aataggtccgtatgacagcagtagcggcaa

SEQ ID NO: 109070 - DNA, 30 bp, Artificial Sequence
  Synthetic oligonucleotide
tgactcgtatgtataaatgcggctcggcaa

SEQ ID NO: 109071 - DNA, 30 bp, Artificial Sequence
  Synthetic oligonucleotide
cagagtagccacatagggcccacggggcaa

SEQ ID NO: 109072 - DNA, 30 bp, Artificial Sequence
  Synthetic oligonucleotide
cggctaatcccgggggatgggccggggcaa

SEQ ID NO: 109073 - DNA, 30 bp, Artificial Sequence
  Synthetic oligonucleotide
gcacgtgacggcgtgaaagttgttgggcaa

SEQ ID NO: 109074 - DNA, 30 bp, Artificial Sequence
  Synthetic oligonucleotide
gtattttgaaccaccaccgaactatggcaa

SEQ ID NO: 109075 - DNA, 30 bp, Artificial Sequence
  Synthetic oligonucleotide
cgaaccatatgtgatttgcatttatggcaa

SEQ ID NO: 109076 - DNA, 30 bp, Artificial Sequence
  Synthetic oligonucleotide
gacttgaataacgtgggaaatacctggcaa

SEQ ID NO: 109077 - DNA, 30 bp, Artificial Sequence
  Synthetic oligonucleotide
catcaaattcgacaaatggaactctggcaa

SEQ ID NO: 109078 - DNA, 30 bp, Artificial Sequence
  Synthetic oligonucleotide
cgtcaaagactatgtggaagataaatgcaa

SEQ ID NO: 109079 - DNA, 30 bp, Artificial Sequence
  Synthetic oligonucleotide
cggtgacaagttaaaaaggccgtaatgcaa

SEQ ID NO: 109080 - DNA, 30 bp, Artificial Sequence
  Synthetic oligonucleotide
ggaaaggggttgtaaatcagcttactgcaa

SEQ ID NO: 109081 - DNA, 30 bp, Artificial Sequence
  Synthetic oligonucleotide
tggatcgtggccgactatgatcccctgcaa

SEQ ID NO: 109082 - DNA, 30 bp, Artificial Sequence
  Synthetic oligonucleotide
gcctcgagaaaccttagataggaagtgcaa

SEQ ID NO: 109083 - DNA, 30 bp, Artificial Sequence
  Synthetic oligonucleotide
taggtgcgcaagggacttcggaccgtgcaa

SEQ ID NO: 109084 - DNA, 30 bp, Artificial Sequence
  Synthetic oligonucleotide
tcagtcaaacgttcaactaatagtgtgcaa

SEQ ID NO: 109085 - DNA, 30 bp, Artificial Sequence
  Synthetic oligonucleotide
cgtcagcggcaacacgggcccaaattgcaa

SEQ ID NO: 109086 - DNA, 31 bp, Artificial Sequence
  Synthetic oligonucleotide
ggcgttatgctagaagagaacgcaattgcaa

SEQ ID NO: 109087 - DNA, 30 bp, Artificial Sequence
  Synthetic oligonucleotide
tggtatggtaaatgaatgcacgacttgcaa

SEQ ID NO: 109088 - DNA, 30 bp, Artificial Sequence
  Synthetic oligonucleotide
atagacctccatcagtaatctcgcttgcaa

SEQ ID NO: 109089 - DNA, 30 bp, Artificial Sequence
  Synthetic oligonucleotide
aagcacaaaatttactcagagggaaatcaa

SEQ ID NO: 109090 - DNA, 30 bp, Artificial Sequence
  Synthetic oligonucleotide
acaatcatgcgccgatgtcatttaaatcaa

SEQ ID NO: 109091 - DNA, 30 bp, Artificial Sequence
  Synthetic oligonucleotide
aggacgcacggggtaagggtataacatcaa

SEQ ID NO: 109092 - DNA, 30 bp, Artificial Sequence
  Synthetic oligonucleotide
ggaccaaggattatatttacaggacatcaa

SEQ ID NO: 109093 - DNA, 30 bp, Artificial Sequence
  Synthetic oligonucleotide
gggggtctccaggctggcgagtagcatcaa

SEQ ID NO: 109094 - DNA, 30 bp, Artificial Sequence
  Synthetic oligonucleotide
atcgtctggagtattccagagcatcatcaa

SEQ ID NO: 109095 - DNA, 30 bp, Artificial Sequence
  Synthetic oligonucleotide
ttgctttaacaggccacaaccaccgatcaa

SEQ ID NO: 109096 - DNA, 30 bp, Artificial Sequence
  Synthetic oligonucleotide
accagtggcccacgttcaagataatatcaa

SEQ ID NO: 109097 - DNA, 30 bp, Artificial Sequence
  Synthetic oligonucleotide
aagtggttcccccttcctacataagctcaa

SEQ ID NO: 109098 - DNA, 30 bp, Artificial Sequence
  Synthetic oligonucleotide
atacgacaaggaccattttcgccagctcaa

SEQ ID NO: 109099 - DNA, 30 bp, Artificial Sequence
  Synthetic oligonucleotide
cgagctactgatggggttccgaacgctcaa

SEQ ID NO: 109100 - DNA, 30 bp, Artificial Sequence
  Synthetic oligonucleotide
agctagtgtaattgattcccctatgctcaa

SEQ ID NO: 109101 - DNA, 30 bp, Artificial Sequence
  Synthetic oligonucleotide
gtgatcctagaccacgcgacttaatctcaa

SEQ ID NO: 109102 - DNA, 30 bp, Artificial Sequence
  Synthetic oligonucleotide
tctttcacaaggcccccggatgtatctcaa

SEQ ID NO: 109103 - DNA, 30 bp, Artificial Sequence
  Synthetic oligonucleotide
gcaaatcaccatgtgtcgccagattctcaa

SEQ ID NO: 109104 - DNA, 30 bp, Artificial Sequence
  Synthetic oligonucleotide
tcggacacactaatccagctcaatagtcaa

SEQ ID NO: 109105 - DNA, 30 bp, Artificial Sequence
  Synthetic oligonucleotide
ggtgcgctggaacatgtttgataacgtcaa

SEQ ID NO: 109106 - DNA, 30 bp, Artificial Sequence
  Synthetic oligonucleotide
gaatcgtgggttgggaacagaggacgtcaa

SEQ ID NO: 109107 - DNA, 30 bp, Artificial Sequence
  Synthetic oligonucleotide
gacgagtatgagattggttacggacgtcaa

SEQ ID NO: 109108 - DNA, 30 bp, Artificial Sequence
  Synthetic oligonucleotide
gcaggctcgaagggttcccgatgaggtcaa

SEQ ID NO: 109109 - DNA, 30 bp, Artificial Sequence
  Synthetic oligonucleotide
aagtggggagaatgttggttgacgggtcaa

SEQ ID NO: 109110 - DNA, 30 bp, Artificial Sequence
  Synthetic oligonucleotide
agagacgtccagacatagtagtggggtcaa

SEQ ID NO: 109111 - DNA, 30 bp, Artificial Sequence
  Synthetic oligonucleotide
aggaggctacatcaaatagagatgggtcaa

SEQ ID NO: 109112 - DNA, 30 bp, Artificial Sequence
  Synthetic oligonucleotide
cgtaaaagtccttacggactgacatgtcaa

SEQ ID NO: 109113 - DNA, 30 bp, Artificial Sequence
  Synthetic oligonucleotide
cggtttcctgcctcacatattgtatgtcaa

SEQ ID NO: 109114 - DNA, 30 bp, Artificial Sequence
  Synthetic oligonucleotide
atgtggggaaaggtgtgttaacggtgtcaa

SEQ ID NO: 109115 - DNA, 30 bp, Artificial Sequence
  Synthetic oligonucleotide
cggggggacatgtaacatgggcgaattcaa

SEQ ID NO: 109116 - DNA, 30 bp, Artificial Sequence
  Synthetic oligonucleotide
gtaccagtctcaagtgcctagcaccttcaa

SEQ ID NO: 109117 - DNA, 30 bp, Artificial Sequence
  Synthetic oligonucleotide
gttgcacccccagataactgtcgagttcaa

SEQ ID NO: 109118 - DNA, 30 bp, Artificial Sequence
  Synthetic oligonucleotide
tggagggataactatttgcgaaacgttcaa

SEQ ID NO: 109119 - DNA, 30 bp, Artificial Sequence
  Synthetic oligonucleotide
tgtaaggcgggctcataaacgaccgttcaa

SEQ ID NO: 109120 - DNA, 30 bp, Artificial Sequence
  Synthetic oligonucleotide
ataaaagtcaattgtatgaggatcgttcaa

SEQ ID NO: 109121 - DNA, 30 bp, Artificial Sequence
  Synthetic oligonucleotide
tctaaaacagtttcgagtgtcggctttcaa

SEQ ID NO: 109122 - DNA, 30 bp, Artificial Sequence
  Synthetic oligonucleotide
agtcagactgtggcgcggacttcttttcaa

SEQ ID NO: 109123 - DNA, 30 bp, Artificial Sequence
  Synthetic oligonucleotide
agatttggcaacaggcttaatcggcaagaa

SEQ ID NO: 109124 - DNA, 30 bp, Artificial Sequence
  Synthetic oligonucleotide
gcatatccgtaattcccaagcatgcaagaa

SEQ ID NO: 109125 - DNA, 30 bp, Artificial Sequence
  Synthetic oligonucleotide
tgacgggcgaaccagcggttacctcaagaa

SEQ ID NO: 109126 - DNA, 30 bp, Artificial Sequence
  Synthetic oligonucleotide
taagatgggagtaaacatgtggcagaagaa

SEQ ID NO: 109127 - DNA, 30 bp, Artificial Sequence
  Synthetic oligonucleotide
agaaatatcatatatggatagaaggaagaa

SEQ ID NO: 109128 - DNA, 30 bp, Artificial Sequence
  Synthetic oligonucleotide
cgtgcgtgttctcctactcgatgggaagaa

SEQ ID NO: 109129 - DNA, 30 bp, Artificial Sequence
  Synthetic oligonucleotide
gtggacgtatacggcaacgtgtttgaagaa

SEQ ID NO: 109130 - DNA, 30 bp, Artificial Sequence
  Synthetic oligonucleotide
cagactagaaattaaaagcactggtaagaa

SEQ ID NO: 109131 - DNA, 30 bp, Artificial Sequence
  Synthetic oligonucleotide
accagggtaaacttgaacgacatgtaagaa

SEQ ID NO: 109132 - DNA, 30 bp, Artificial Sequence
  Synthetic oligonucleotide
cggcgtttgcttgcattatgagtgtaagaa

SEQ ID NO: 109133 - DNA, 30 bp, Artificial Sequence
  Synthetic oligonucleotide
tgttagcggtgttccagggataattaagaa

SEQ ID NO: 109134 - DNA, 30 bp, Artificial Sequence
  Synthetic oligonucleotide
tagacagtcggtattcgttgccgttaagaa

SEQ ID NO: 109135 - DNA, 30 bp, Artificial Sequence
  Synthetic oligonucleotide
aggtcgcgggctatctgcaggatgccagaa

SEQ ID NO: 109136 - DNA, 30 bp, Artificial Sequence
  Synthetic oligonucleotide
agaatggatggtaaggtagaagccgcagaa

SEQ ID NO: 109137 - DNA, 30 bp, Artificial Sequence
  Synthetic oligonucleotide
ataaacagaatgtggaactagttggcagaa

SEQ ID NO: 109138 - DNA, 30 bp, Artificial Sequence
  Synthetic oligonucleotide
catttgccggcaccgcaaaaaacatcagaa

SEQ ID NO: 109139 - DNA, 30 bp, Artificial Sequence
  Synthetic oligonucleotide
aaacgggggtttgcatcggcattatcagaa

SEQ ID NO: 109140 - DNA, 30 bp, Artificial Sequence
  Synthetic oligonucleotide
acgaaatctggattcagatacaaaagagaa

SEQ ID NO: 109141 - DNA, 30 bp, Artificial Sequence
  Synthetic oligonucleotide
acattagatcgagtcatgtcggccagagaa

SEQ ID NO: 109142 - DNA, 30 bp, Artificial Sequence
  Synthetic oligonucleotide
gagacacaaatacggataacacgcagagaa

SEQ ID NO: 109143 - DNA, 30 bp, Artificial Sequence
  Synthetic oligonucleotide
actcgggtccagtgtccgaccgtcagagaa

SEQ ID NO: 109144 - DNA, 30 bp, Artificial Sequence
  Synthetic oligonucleotide
gctaactcccgcatatgttgacagagagaa

SEQ ID NO: 109145 - DNA, 30 bp, Artificial Sequence
  Synthetic oligonucleotide
aaaataattgccttccgacagaaacgagaa

SEQ ID NO: 109146 - DNA, 30 bp, Artificial Sequence
  Synthetic oligonucleotide
ggtataactcgccagccacagttccgagaa

SEQ ID NO: 109147 - DNA, 30 bp, Artificial Sequence
  Synthetic oligonucleotide
caggggccatcccgagggttcccaggagaa

SEQ ID NO: 109148 - DNA, 30 bp, Artificial Sequence
  Synthetic oligonucleotide
aagcggttaaactgcccaacgataggagaa

SEQ ID NO: 109149 - DNA, 30 bp, Artificial Sequence
  Synthetic oligonucleotide
tgggtactatgtaacactcttctaggagaa

SEQ ID NO: 109150 - DNA, 30 bp, Artificial Sequence
  Synthetic oligonucleotide
tggggggacgaggtctgagaagagggagaa

SEQ ID NO: 109151 - DNA, 30 bp, Artificial Sequence
  Synthetic oligonucleotide
agtcacgaggaaacgttggcgtcgggagaa

SEQ ID NO: 109152 - DNA, 30 bp, Artificial Sequence
  Synthetic oligonucleotide
aaatagcgaaaggaaccgattctgggagaa

SEQ ID NO: 109153 - DNA, 30 bp, Artificial Sequence
  Synthetic oligonucleotide
accggcagggatacgagcagttaatgagaa

SEQ ID NO: 109154 - DNA, 30 bp, Artificial Sequence
  Synthetic oligonucleotide
agtgttaatgaggaacggaacatatgagaa

SEQ ID NO: 109155 - DNA, 30 bp, Artificial Sequence
  Synthetic oligonucleotide
gtgctctaagcacattcggtacggatagaa

SEQ ID NO: 109156 - DNA, 30 bp, Artificial Sequence
  Synthetic oligonucleotide
tgaccgaactccggcacatgaagactagaa

SEQ ID NO: 109157 - DNA, 30 bp, Artificial Sequence
  Synthetic oligonucleotide
ccgacagcgggtgctcgctccaccctagaa

SEQ ID NO: 109158 - DNA, 30 bp, Artificial Sequence
  Synthetic oligonucleotide
gtcggggacaggatttaacattagctagaa

SEQ ID NO: 109159 - DNA, 30 bp, Artificial Sequence
  Synthetic oligonucleotide
gttcgcccaagacagggcggaactctagaa

SEQ ID NO: 109160 - DNA, 30 bp, Artificial Sequence
  Synthetic oligonucleotide
gcctatggttacgagtcaataacagtagaa

SEQ ID NO: 109161 - DNA, 30 bp, Artificial Sequence
  Synthetic oligonucleotide
ctcgcgcccaaggattcactaacagtagaa

SEQ ID NO: 109162 - DNA, 30 bp, Artificial Sequence
  Synthetic oligonucleotide
tgggtgaacaacaagtactacgtcgtagaa

SEQ ID NO: 109163 - DNA, 30 bp, Artificial Sequence
  Synthetic oligonucleotide
aaaacgcgaacggcaacctaagcggtagaa

SEQ ID NO: 109164 - DNA, 30 bp, Artificial Sequence
  Synthetic oligonucleotide
taagtgggcgcatcgctaaacggggtagaa

SEQ ID NO: 109165 - DNA, 30 bp, Artificial Sequence
  Synthetic oligonucleotide
gcaaaagcagattcggcctggcatgtagaa

SEQ ID NO: 109166 - DNA, 30 bp, Artificial Sequence
  Synthetic oligonucleotide
caacggaggagcagtgccgccactgtagaa

SEQ ID NO: 109167 - DNA, 30 bp, Artificial Sequence
  Synthetic oligonucleotide
gcctgcgtagtggccggcaatgctgtagaa

SEQ ID NO: 109168 - DNA, 30 bp, Artificial Sequence
  Synthetic oligonucleotide
ggaggacaggcatggcatgaaaaattagaa

SEQ ID NO: 109169 - DNA, 30 bp, Artificial Sequence
  Synthetic oligonucleotide
ccacggactatcaaaaatgcgcggttagaa

SEQ ID NO: 109170 - DNA, 30 bp, Artificial Sequence
  Synthetic oligonucleotide
aggaaagatggtacgacttaaaaaaacgaa

SEQ ID NO: 109171 - DNA, 30 bp, Artificial Sequence
  Synthetic oligonucleotide
cgccttcataggaacgactgtataaacgaa

SEQ ID NO: 109172 - DNA, 30 bp, Artificial Sequence
  Synthetic oligonucleotide
cagttcagcaagtagattcggttcaacgaa

SEQ ID NO: 109173 - DNA, 30 bp, Artificial Sequence
  Synthetic oligonucleotide
caggctcaagctagcagcggttataacgaa

SEQ ID NO: 109174 - DNA, 30 bp, Artificial Sequence
  Synthetic oligonucleotide
tacagttcttgcagaaacggcgggcacgaa

SEQ ID NO: 109175 - DNA, 30 bp, Artificial Sequence
  Synthetic oligonucleotide
gtcgtcacggtccaaagaccactatacgaa

SEQ ID NO: 109176 - DNA, 30 bp, Artificial Sequence
  Synthetic oligonucleotide
gagcacagagttcacacctattcgtacgaa

SEQ ID NO: 109177 - DNA, 30 bp, Artificial Sequence
  Synthetic oligonucleotide
gtcagacatagtgtggacggtaattacgaa

SEQ ID NO: 109178 - DNA, 30 bp, Artificial Sequence
  Synthetic oligonucleotide
cggatagagggctgtgatatatattacgaa

SEQ ID NO: 109179 - DNA, 30 bp, Artificial Sequence
  Synthetic oligonucleotide
tttcaataaattcggcggaaacgaaccgaa

SEQ ID NO: 109180 - DNA, 30 bp, Artificial Sequence
  Synthetic oligonucleotide
ttcgaaagtcccaaggaaagatccaccgaa

SEQ ID NO: 109181 - DNA, 30 bp, Artificial Sequence
  Synthetic oligonucleotide
tgtccacggtatggaacacgccagaccgaa

SEQ ID NO: 109182 - DNA, 30 bp, Artificial Sequence
  Synthetic oligonucleotide
ggtgccagattattcaagcgtcagcccgaa

SEQ ID NO: 109183 - DNA, 30 bp, Artificial Sequence
  Synthetic oligonucleotide
acgctattggtggaaggttattaagccgaa

SEQ ID NO: 109184 - DNA, 30 bp, Artificial Sequence
  Synthetic oligonucleotide
tctgtgaataagcaccccggagaggccgaa

SEQ ID NO: 109185 - DNA, 30 bp, Artificial Sequence
  Synthetic oligonucleotide
ggatatacgtgtaaaattaaactatccgaa

SEQ ID NO: 109186 - DNA, 30 bp, Artificial Sequence
  Synthetic oligonucleotide
atcaagtaagcctctgacaaaacctccgaa

SEQ ID NO: 109187 - DNA, 30 bp, Artificial Sequence
  Synthetic oligonucleotide
gggaaaattgtgaccttcaacggaagcgaa

SEQ ID NO: 109188 - DNA, 30 bp, Artificial Sequence
  Synthetic oligonucleotide
gtgtaatgatcggtgcgcgtctgaagcgaa

SEQ ID NO: 109189 - DNA, 30 bp, Artificial Sequence
  Synthetic oligonucleotide
taattatcgagacatgtctatcagagcgaa

SEQ ID NO: 109190 - DNA, 30 bp, Artificial Sequence
  Synthetic oligonucleotide
agctatcgcaggcgtgatatttggagcgaa

SEQ ID NO: 109191 - DNA, 30 bp, Artificial Sequence
  Synthetic oligonucleotide
gaaggccatacgagttcacttcgtcgcgaa

SEQ ID NO: 109192 - DNA, 30 bp, Artificial Sequence
  Synthetic oligonucleotide
ttcgaaagcagataacgtagcgttcgcgaa

SEQ ID NO: 109193 - DNA, 30 bp, Artificial Sequence
  Synthetic oligonucleotide
tcgcctaccctgacacatctaaacggcgaa

SEQ ID NO: 109194 - DNA, 30 bp, Artificial Sequence
  Synthetic oligonucleotide
agcgcaaagtgaagaggcgccgggggcgaa

SEQ ID NO: 109195 - DNA, 30 bp, Artificial Sequence
  Synthetic oligonucleotide
gtctggagttatgttccagcggggggcgaa

SEQ ID NO: 109196 - DNA, 30 bp, Artificial Sequence
  Synthetic oligonucleotide
aatctacaagctataacaagtcgcatcgaa

SEQ ID NO: 109197 - DNA, 30 bp, Artificial Sequence
  Synthetic oligonucleotide
ggatgtatttagaaaacatttcctatcgaa

SEQ ID NO: 109198 - DNA, 30 bp, Artificial Sequence
  Synthetic oligonucleotide
aacgcgtttgtaggttagtagtgtatcgaa

SEQ ID NO: 109199 - DNA, 29 bp, Artificial Sequence
  Synthetic oligonucleotide
gtgaacttgtcggcgagagaaacctcgaa

SEQ ID NO: 109200 - DNA, 30 bp, Artificial Sequence
  Synthetic oligonucleotide
ggtttgagcttaaaagatggttccgtcgaa

SEQ ID NO: 109201 - DNA, 30 bp, Artificial Sequence
  Synthetic oligonucleotide
caagtaaaaacgcccagtggaagcgtcgaa

SEQ ID NO: 109202 - DNA, 30 bp, Artificial Sequence
  Synthetic oligonucleotide
tagcagagcggttcccaatcgaaggtcgaa

SEQ ID NO: 109203 - DNA, 30 bp, Artificial Sequence
  Synthetic oligonucleotide
gcgaatttaggaaacaaaattacggtcgaa

SEQ ID NO: 109204 - DNA, 30 bp, Artificial Sequence
  Synthetic oligonucleotide
cgaactctgcgcacatttctgggattcgaa

SEQ ID NO: 109205 - DNA, 30 bp, Artificial Sequence
  Synthetic oligonucleotide
ccgtaacctatcttctggggactgttcgaa

SEQ ID NO: 109206 - DNA, 30 bp, Artificial Sequence
  Synthetic oligonucleotide
gttatccaccgggccggaggtctaaaggaa

SEQ ID NO: 109207 - DNA, 30 bp, Artificial Sequence
  Synthetic oligonucleotide
agatagcccaagtcagctaaattaaaggaa

SEQ ID NO: 109208 - DNA, 30 bp, Artificial Sequence
  Synthetic oligonucleotide
agggggtcatagagttaaggtcacaaggaa

SEQ ID NO: 109209 - DNA, 30 bp, Artificial Sequence
  Synthetic oligonucleotide
ggcaacccacaaatctaggccgacaaggaa

SEQ ID NO: 109210 - DNA, 30 bp, Artificial Sequence
  Synthetic oligonucleotide
attggtggagaaggcttggcattcaaggaa

SEQ ID NO: 109211 - DNA, 30 bp, Artificial Sequence
  Synthetic oligonucleotide
acgggtctagcgcgaatgctagggaaggaa

SEQ ID NO: 109212 - DNA, 30 bp, Artificial Sequence
  Synthetic oligonucleotide
cttatgatcggttactcttagagtaaggaa

SEQ ID NO: 109213 - DNA, 30 bp, Artificial Sequence
  Synthetic oligonucleotide
tggtgctgttatgacctcttcattaaggaa

SEQ ID NO: 109214 - DNA, 30 bp, Artificial Sequence
  Synthetic oligonucleotide
gataaggagaaatgtcgtcaaccccaggaa

SEQ ID NO: 109215 - DNA, 30 bp, Artificial Sequence
  Synthetic oligonucleotide
cgacctcctcgcgaaacattgtaagaggaa

SEQ ID NO: 109216 - DNA, 30 bp, Artificial Sequence
  Synthetic oligonucleotide
aatgaagttacctcgtcgcaatgagaggaa

SEQ ID NO: 109217 - DNA, 30 bp, Artificial Sequence
  Synthetic oligonucleotide
cacgcaaataattgacgaattatagaggaa

SEQ ID NO: 109218 - DNA, 30 bp, Artificial Sequence
  Synthetic oligonucleotide
ggtaagactggagcacaatgcaccgaggaa

SEQ ID NO: 109219 - DNA, 30 bp, Artificial Sequence
  Synthetic oligonucleotide
gagcaggtatacaggaggatccgcgaggaa

SEQ ID NO: 109220 - DNA, 30 bp, Artificial Sequence
  Synthetic oligonucleotide
tcttgaacaggatgatccgggggcgaggaa

SEQ ID NO: 109221 - DNA, 30 bp, Artificial Sequence
  Synthetic oligonucleotide
gctcacttaccgggtggcctcagggaggaa

SEQ ID NO: 109222 - DNA, 30 bp, Artificial Sequence
  Synthetic oligonucleotide
gcagaaaagcagagctcacggagggaggaa

SEQ ID NO: 109223 - DNA, 30 bp, Artificial Sequence
  Synthetic oligonucleotide
ctagacattttacacgaatagcatgaggaa

SEQ ID NO: 109224 - DNA, 30 bp, Artificial Sequence
  Synthetic oligonucleotide
aaggaagtagtagggcagcacactgaggaa

SEQ ID NO: 109225 - DNA, 30 bp, Artificial Sequence
  Synthetic oligonucleotide
ggtccgcgtaagcctaagcaaagataggaa

SEQ ID NO: 109226 - DNA, 30 bp, Artificial Sequence
  Synthetic oligonucleotide
agagggcagcagcttatatcgacttaggaa

SEQ ID NO: 109227 - DNA, 30 bp, Artificial Sequence
  Synthetic oligonucleotide
gggctcacagccacccacctatacccggaa

SEQ ID NO: 109228 - DNA, 30 bp, Artificial Sequence
  Synthetic oligonucleotide
tggccaacggtaacgacaagaccgccggaa

SEQ ID NO: 109229 - DNA, 30 bp, Artificial Sequence
  Synthetic oligonucleotide
tggaatgaaagactagcttgacaagcggaa

SEQ ID NO: 109230 - DNA, 29 bp, Artificial Sequence
  Synthetic oligonucleotide
atcgataacggccaagggaaaaggcggaa

SEQ ID NO: 109231 - DNA, 30 bp, Artificial Sequence
  Synthetic oligonucleotide
tggagtaagaggggcgtgtattaggcggaa

SEQ ID NO: 109232 - DNA, 30 bp, Artificial Sequence
  Synthetic oligonucleotide
gcacgtgctgagtatatcctgacaagggaa

SEQ ID NO: 109233 - DNA, 30 bp, Artificial Sequence
  Synthetic oligonucleotide
atagaatataactcaatgaaacagagggaa

SEQ ID NO: 109234 - DNA, 30 bp, Artificial Sequence
  Synthetic oligonucleotide
cgacgaagtcattatataactggacgggaa

SEQ ID NO: 109235 - DNA, 30 bp, Artificial Sequence
  Synthetic oligonucleotide
tgaaagaccgttaagacttagcggcgggaa

SEQ ID NO: 109236 - DNA, 30 bp, Artificial Sequence
  Synthetic oligonucleotide
actcgtaacggtcgacaagctcgaggggaa

SEQ ID NO: 109237 - DNA, 30 bp, Artificial Sequence
  Synthetic oligonucleotide
tgtcgcgcttgaggctaattattgggggaa

SEQ ID NO: 109238 - DNA, 30 bp, Artificial Sequence
  Synthetic oligonucleotide
acaacgatatcgcgtcaacacactggggaa

SEQ ID NO: 109239 - DNA, 30 bp, Artificial Sequence
  Synthetic oligonucleotide
cgtactaacctcacaagccgccttggggaa

SEQ ID NO: 109240 - DNA, 30 bp, Artificial Sequence
  Synthetic oligonucleotide
aacacggagcttaggaggtatggaatggaa

SEQ ID NO: 109241 - DNA, 30 bp, Artificial Sequence
  Synthetic oligonucleotide
acgtacgtagggtatgccgagtacatggaa

SEQ ID NO: 109242 - DNA, 30 bp, Artificial Sequence
  Synthetic oligonucleotide
ccttatgaactggcttaagaacgtatggaa

SEQ ID NO: 109243 - DNA, 30 bp, Artificial Sequence
  Synthetic oligonucleotide
gggtccatgattacttaatgacttatggaa

SEQ ID NO: 109244 - DNA, 30 bp, Artificial Sequence
  Synthetic oligonucleotide
actcgcgtggatacccgcagtgacctggaa

SEQ ID NO: 109245 - DNA, 30 bp, Artificial Sequence
  Synthetic oligonucleotide
cgactgtgtttatgacaaactcgcctggaa

SEQ ID NO: 109246 - DNA, 30 bp, Artificial Sequence
  Synthetic oligonucleotide
catcacggggactggggggctttgctggaa

SEQ ID NO: 109247 - DNA, 30 bp, Artificial Sequence
  Synthetic oligonucleotide
aacggccagagagtggatacgattgtggaa

SEQ ID NO: 109248 - DNA, 30 bp, Artificial Sequence
  Synthetic oligonucleotide
ccaggtcgaggtgcctgccacgaccatgaa

SEQ ID NO: 109249 - DNA, 30 bp, Artificial Sequence
  Synthetic oligonucleotide
ggccatcacctgaaggccggctgccatgaa

SEQ ID NO: 109250 - DNA, 30 bp, Artificial Sequence
  Synthetic oligonucleotide
cggacactagatagaaaacatttccatgaa

SEQ ID NO: 109251 - DNA, 30 bp, Artificial Sequence
  Synthetic oligonucleotide
cgtaggttactggatatagtatagcatgaa

SEQ ID NO: 109252 - DNA, 30 bp, Artificial Sequence
  Synthetic oligonucleotide
cggcaatcaataagcgtaaataggcatgaa

SEQ ID NO: 109253 - DNA, 30 bp, Artificial Sequence
  Synthetic oligonucleotide
ccagcgcgcttgatgtcccaaatagatgaa

SEQ ID NO: 109254 - DNA, 30 bp, Artificial Sequence
  Synthetic oligonucleotide
agggtaaaccagcaagaagccagcgatgaa

SEQ ID NO: 109255 - DNA, 30 bp, Artificial Sequence
  Synthetic oligonucleotide
tcatagacctgaaggtctagccaggatgaa

SEQ ID NO: 109256 - DNA, 30 bp, Artificial Sequence
  Synthetic oligonucleotide
acgtgaggcctcaagaaaggcggggatgaa

SEQ ID NO: 109257 - DNA, 30 bp, Artificial Sequence
  Synthetic oligonucleotide
cggaagaactttcttttctatagctatgaa

SEQ ID NO: 109258 - DNA, 30 bp, Artificial Sequence
  Synthetic oligonucleotide
acacaattgcacccaaccagaatctatgaa

SEQ ID NO: 109259 - DNA, 30 bp, Artificial Sequence
  Synthetic oligonucleotide
ttctatcagcgataaaactgcgcaactgaa

SEQ ID NO: 109260 - DNA, 30 bp, Artificial Sequence
  Synthetic oligonucleotide
tgcatattgagatagtactaaagaactgaa

SEQ ID NO: 109261 - DNA, 30 bp, Artificial Sequence
  Synthetic oligonucleotide
tgggaatgagcgtggacagcagccactgaa

SEQ ID NO: 109262 - DNA, 30 bp, Artificial Sequence
  Synthetic oligonucleotide
ctgccaagaatccgtggagtaggcactgaa

SEQ ID NO: 109263 - DNA, 30 bp, Artificial Sequence
  Synthetic oligonucleotide
cgggccggataactactacgtagacctgaa

SEQ ID NO: 109264 - DNA, 30 bp, Artificial Sequence
  Synthetic oligonucleotide
gctcaaggtacgttggatacccgacctgaa

SEQ ID NO: 109265 - DNA, 30 bp, Artificial Sequence
  Synthetic oligonucleotide
tagggaacaactgaactttcggttcctgaa

SEQ ID NO: 109266 - DNA, 30 bp, Artificial Sequence
  Synthetic oligonucleotide
aacacgggaaggtgtggacggtaatctgaa

SEQ ID NO: 109267 - DNA, 30 bp, Artificial Sequence
  Synthetic oligonucleotide
cgcaaagtggagctctatgttacatctgaa

SEQ ID NO: 109268 - DNA, 30 bp, Artificial Sequence
  Synthetic oligonucleotide
gtcatgaagaaattagagcgataaagtgaa

SEQ ID NO: 109269 - DNA, 30 bp, Artificial Sequence
  Synthetic oligonucleotide
gcctgagtaagtctaccatacataagtgaa

SEQ ID NO: 109270 - DNA, 30 bp, Artificial Sequence
  Synthetic oligonucleotide
taagagtgtataccgggagaacttagtgaa

SEQ ID NO: 109271 - DNA, 30 bp, Artificial Sequence
  Synthetic oligonucleotide
agtccacacgagcatcaagcgagacgtgaa

SEQ ID NO: 109272 - DNA, 30 bp, Artificial Sequence
  Synthetic oligonucleotide
tagtcacagtcgcaatgtcgtaggcgtgaa

SEQ ID NO: 109273 - DNA, 30 bp, Artificial Sequence
  Synthetic oligonucleotide
caaaaccttttgtagcatgcccatcgtgaa

SEQ ID NO: 109274 - DNA, 30 bp, Artificial Sequence
  Synthetic oligonucleotide
gggctcgaaagtctttgcgagactcgtgaa

SEQ ID NO: 109275 - DNA, 30 bp, Artificial Sequence
  Synthetic oligonucleotide
tgcaaaacttgtaatgctaaaaagggtgaa

SEQ ID NO: 109276 - DNA, 30 bp, Artificial Sequence
  Synthetic oligonucleotide
gatccgcgggaattatcgtgcacgggtgaa

SEQ ID NO: 109277 - DNA, 30 bp, Artificial Sequence
  Synthetic oligonucleotide
gggttaccatggtcgacagagttgggtgaa

SEQ ID NO: 109278 - DNA, 30 bp, Artificial Sequence
  Synthetic oligonucleotide
atcagctaaacgtgaagcacgtgatgtgaa

SEQ ID NO: 109279 - DNA, 30 bp, Artificial Sequence
  Synthetic oligonucleotide
gtaactccgcaagtgggaacatcctgtgaa

SEQ ID NO: 109280 - DNA, 30 bp, Artificial Sequence
  Synthetic oligonucleotide
ggcatctgtcgaaaaacgggagagtgtgaa

SEQ ID NO: 109281 - DNA, 30 bp, Artificial Sequence
  Synthetic oligonucleotide
ggtgacgggttcagttgcagtccgtgtgaa

SEQ ID NO: 109282 - DNA, 30 bp, Artificial Sequence
  Synthetic oligonucleotide
tgagggtaggggttaacgacccgttgtgaa

SEQ ID NO: 109283 - DNA, 30 bp, Artificial Sequence
  Synthetic oligonucleotide
cccagtaagcggtgagcatcggaaattgaa

SEQ ID NO: 109284 - DNA, 30 bp, Artificial Sequence
  Synthetic oligonucleotide
acagggccacgatcgaaaatggtaattgaa

SEQ ID NO: 109285 - DNA, 30 bp, Artificial Sequence
  Synthetic oligonucleotide
tggactaggggattatctcggaccattgaa

SEQ ID NO: 109286 - DNA, 30 bp, Artificial Sequence
  Synthetic oligonucleotide
aaggaagaatcagtctaggccatcattgaa

SEQ ID NO: 109287 - DNA, 30 bp, Artificial Sequence
  Synthetic oligonucleotide
attcagcctccgcgcgaggagctcattgaa

SEQ ID NO: 109288 - DNA, 30 bp, Artificial Sequence
  Synthetic oligonucleotide
atagaagacatggtccacggctgcgttgaa

SEQ ID NO: 109289 - DNA, 30 bp, Artificial Sequence
  Synthetic oligonucleotide
gatagcggaactcatttagagtgcgttgaa

SEQ ID NO: 109290 - DNA, 30 bp, Artificial Sequence
  Synthetic oligonucleotide
aggaaacaacgatcgcttatccaggttgaa

SEQ ID NO: 109291 - DNA, 30 bp, Artificial Sequence
  Synthetic oligonucleotide
gcgggtgtaagcaataagctgcatgttgaa

SEQ ID NO: 109292 - DNA, 30 bp, Artificial Sequence
  Synthetic oligonucleotide
cagatgcgcaacgctgataatccctttgaa

SEQ ID NO: 109293 - DNA, 30 bp, Artificial Sequence
  Synthetic oligonucleotide
agctaaacacctctggctgggagctttgaa

SEQ ID NO: 109294 - DNA, 30 bp, Artificial Sequence
  Synthetic oligonucleotide
cgggtcacatatcgcaagtctgtttttgaa

SEQ ID NO: 109295 - DNA, 30 bp, Artificial Sequence
  Synthetic oligonucleotide
tccgaggctggcgatacagaactaaaataa

SEQ ID NO: 109296 - DNA, 30 bp, Artificial Sequence
  Synthetic oligonucleotide
actgagtcgaaaagaatctacaagaaataa

SEQ ID NO: 109297 - DNA, 30 bp, Artificial Sequence
  Synthetic oligonucleotide
gcccaaggtccaccggtgcgtaagaaataa

SEQ ID NO: 109298 - DNA, 30 bp, Artificial Sequence
  Synthetic oligonucleotide
aaagatattacaaaggcgtcttggaaataa

SEQ ID NO: 109299 - DNA, 30 bp, Artificial Sequence
  Synthetic oligonucleotide
gatgcataaacaacaatcgatgggcaataa

SEQ ID NO: 109300 - DNA, 30 bp, Artificial Sequence
  Synthetic oligonucleotide
ggggtttcagaaatgtagtaggatcaataa

SEQ ID NO: 109301 - DNA, 30 bp, Artificial Sequence
  Synthetic oligonucleotide
tatttcgagcgagcagacttagctcaataa

SEQ ID NO: 109302 - DNA, 30 bp, Artificial Sequence
  Synthetic oligonucleotide
aaacgggttacagtccgtggaaacgaataa

SEQ ID NO: 109303 - DNA, 30 bp, Artificial Sequence
  Synthetic oligonucleotide
gaaacacgtacagtaatgacaccggaataa

SEQ ID NO: 109304 - DNA, 30 bp, Artificial Sequence
  Synthetic oligonucleotide
cgacggtatgcagatggaccccatgaataa

SEQ ID NO: 109305 - DNA, 30 bp, Artificial Sequence
  Synthetic oligonucleotide
agacaatgcccggccaaagaaacataataa

SEQ ID NO: 109306 - DNA, 30 bp, Artificial Sequence
  Synthetic oligonucleotide
gtgaggggggctcaaggagcacgataataa

SEQ ID NO: 109307 - DNA, 30 bp, Artificial Sequence
  Synthetic oligonucleotide
ccgagatacgcatcgaaccatctataataa

SEQ ID NO: 109308 - DNA, 30 bp, Artificial Sequence
  Synthetic oligonucleotide
aaggggtacatgcactgcacccattaataa

SEQ ID NO: 109309 - DNA, 30 bp, Artificial Sequence
  Synthetic oligonucleotide
cgatcacagtacggttcgattttttaataa

SEQ ID NO: 109310 - DNA, 30 bp, Artificial Sequence
  Synthetic oligonucleotide
acaatcctgaaatacgaactcttaacataa

SEQ ID NO: 109311 - DNA, 30 bp, Artificial Sequence
  Synthetic oligonucleotide
atcgcactccagagtttttaaccgacataa

SEQ ID NO: 109312 - DNA, 30 bp, Artificial Sequence
  Synthetic oligonucleotide
cctgggcggtaggtaagggtcgcaccataa

SEQ ID NO: 109313 - DNA, 30 bp, Artificial Sequence
  Synthetic oligonucleotide
ggattgtgaatcatatatggggatgcataa

SEQ ID NO: 109314 - DNA, 30 bp, Artificial Sequence
  Synthetic oligonucleotide
acattaaaggaggcttatatagaatcataa

SEQ ID NO: 109315 - DNA, 30 bp, Artificial Sequence
  Synthetic oligonucleotide
gtgaggtgaggttgcagagcagtttcataa

SEQ ID NO: 109316 - DNA, 30 bp, Artificial Sequence
  Synthetic oligonucleotide
ggcctaactcgcccggtgtcacaacgataa

SEQ ID NO: 109317 - DNA, 30 bp, Artificial Sequence
  Synthetic oligonucleotide
gacgatagcactcacaagcagacacgataa

SEQ ID NO: 109318 - DNA, 30 bp, Artificial Sequence
  Synthetic oligonucleotide
tcactaaacgttagtaacgattatcgataa

SEQ ID NO: 109319 - DNA, 30 bp, Artificial Sequence
  Synthetic oligonucleotide
tggctccgaggcgctgtgacaaaaggataa

SEQ ID NO: 109320 - DNA, 30 bp, Artificial Sequence
  Synthetic oligonucleotide
gtacgttggtggtgacactaggccggataa

SEQ ID NO: 109321 - DNA, 30 bp, Artificial Sequence
  Synthetic oligonucleotide
tcgaatgccggcttaggagatatcggataa

SEQ ID NO: 109322 - DNA, 30 bp, Artificial Sequence
  Synthetic oligonucleotide
gaatgagaatctaacgtgagtcagggataa

SEQ ID NO: 109323 - DNA, 30 bp, Artificial Sequence
  Synthetic oligonucleotide
ggagatcccaaaaatgtccagcgtggataa

SEQ ID NO: 109324 - DNA, 30 bp, Artificial Sequence
  Synthetic oligonucleotide
ggggtgcagaggtactacttgattggataa

SEQ ID NO: 109325 - DNA, 30 bp, Artificial Sequence
  Synthetic oligonucleotide
agtagggaggcttgggcaaacgttggataa

SEQ ID NO: 109326 - DNA, 30 bp, Artificial Sequence
  Synthetic oligonucleotide
ggcgagcatctgtaaagcccatttggataa

SEQ ID NO: 109327 - DNA, 30 bp, Artificial Sequence
  Synthetic oligonucleotide
atgtgacgacttgcggcacatccatgataa

SEQ ID NO: 109328 - DNA, 31 bp, Artificial Sequence
  Synthetic oligonucleotide
tgagcattgaaaagttcgtcaggtatgataa

SEQ ID NO: 109329 - DNA, 30 bp, Artificial Sequence
  Synthetic oligonucleotide
gatgatatggacaatatgatttgcatataa

SEQ ID NO: 109330 - DNA, 30 bp, Artificial Sequence
  Synthetic oligonucleotide
tttaccggacagaacctgtgtcggatataa

SEQ ID NO: 109331 - DNA, 30 bp, Artificial Sequence
  Synthetic oligonucleotide
caggtgcaaaatgaagtggacagtctataa

SEQ ID NO: 109332 - DNA, 30 bp, Artificial Sequence
  Synthetic oligonucleotide
gatgatagtgcatagcaaaaataaaactaa

SEQ ID NO: 109333 - DNA, 30 bp, Artificial Sequence
  Synthetic oligonucleotide
tcacacgacgttcttcattatcgaaactaa

SEQ ID NO: 109334 - DNA, 30 bp, Artificial Sequence
  Synthetic oligonucleotide
actagttcacggcgaggactgggaaactaa

SEQ ID NO: 109335 - DNA, 30 bp, Artificial Sequence
  Synthetic oligonucleotide
taacatcatctgtgatacgacggacactaa

SEQ ID NO: 109336 - DNA, 30 bp, Artificial Sequence
  Synthetic oligonucleotide
aaaaccagtgactatatcaccaaagactaa

SEQ ID NO: 109337 - DNA, 30 bp, Artificial Sequence
  Synthetic oligonucleotide
gcggatattagcaacaaaaaataatactaa

SEQ ID NO: 109338 - DNA, 30 bp, Artificial Sequence
  Synthetic oligonucleotide
gaaggaatccagaatcctaagtacacctaa

SEQ ID NO: 109339 - DNA, 30 bp, Artificial Sequence
  Synthetic oligonucleotide
cgccaaggaccgcatgaggagatgacctaa

SEQ ID NO: 109340 - DNA, 30 bp, Artificial Sequence
  Synthetic oligonucleotide
gttcgcatttccgagtgagttctgccctaa

SEQ ID NO: 109341 - DNA, 30 bp, Artificial Sequence
  Synthetic oligonucleotide
ccagaaacggattagggcgcacaggcctaa

SEQ ID NO: 109342 - DNA, 30 bp, Artificial Sequence
  Synthetic oligonucleotide
gtctcatacatgtcaaccttaccggcctaa

SEQ ID NO: 109343 - DNA, 30 bp, Artificial Sequence
  Synthetic oligonucleotide
tagtgctcgataaggtccgtgtttgcctaa

SEQ ID NO: 109344 - DNA, 30 bp, Artificial Sequence
  Synthetic oligonucleotide
gatggctgaagtttattcgtcacatcctaa

SEQ ID NO: 109345 - DNA, 30 bp, Artificial Sequence
  Synthetic oligonucleotide
ccgggcaatggattacaaaacacctcctaa

SEQ ID NO: 109346 - DNA, 30 bp, Artificial Sequence
  Synthetic oligonucleotide
cttgggacgtactcgaggaaatggtcctaa

SEQ ID NO: 109347 - DNA, 30 bp, Artificial Sequence
  Synthetic oligonucleotide
agcccaatacatatattacgaagttcctaa

SEQ ID NO: 109348 - DNA, 30 bp, Artificial Sequence
  Synthetic oligonucleotide
aacgagaagggaggccgcctgggacgctaa

SEQ ID NO: 109349 - DNA, 30 bp, Artificial Sequence
  Synthetic oligonucleotide
taatcaagggtcatccgtcagttgcgctaa

SEQ ID NO: 109350 - DNA, 30 bp, Artificial Sequence
  Synthetic oligonucleotide
tggtagttctccaaatcgatgtcaggctaa

SEQ ID NO: 109351 - DNA, 30 bp, Artificial Sequence
  Synthetic oligonucleotide
aagtagcccaaacgcagagtcgccggctaa

SEQ ID NO: 109352 - DNA, 30 bp, Artificial Sequence
  Synthetic oligonucleotide
acaaacgaggcacgttaataggaatgctaa

SEQ ID NO: 109353 - DNA, 30 bp, Artificial Sequence
  Synthetic oligonucleotide
aggacgcgtatagtgtactgcttctgctaa

SEQ ID NO: 109354 - DNA, 30 bp, Artificial Sequence
  Synthetic oligonucleotide
gcataagagaatgtgtactcgtggtgctaa

SEQ ID NO: 109355 - DNA, 30 bp, Artificial Sequence
  Synthetic oligonucleotide
cagtgtggtatcgtattatgtgtgtgctaa

SEQ ID NO: 109356 - DNA, 30 bp, Artificial Sequence
  Synthetic oligonucleotide
ccatgggcgatacgggcaaacaggatctaa

SEQ ID NO: 109357 - DNA, 30 bp, Artificial Sequence
  Synthetic oligonucleotide
cgaggcttctatatgactaattcgctctaa

SEQ ID NO: 109358 - DNA, 30 bp, Artificial Sequence
  Synthetic oligonucleotide
tcgtagactctaaaggattgaagaaagtaa

SEQ ID NO: 109359 - DNA, 30 bp, Artificial Sequence
  Synthetic oligonucleotide
acagattttcgaggtaattagataaagtaa

SEQ ID NO: 109360 - DNA, 30 bp, Artificial Sequence
  Synthetic oligonucleotide
caagctgtatatatcggccaagtaaagtaa

SEQ ID NO: 109361 - DNA, 30 bp, Artificial Sequence
  Synthetic oligonucleotide
cagacggagagtgtatcaagtgtcaagtaa

SEQ ID NO: 109362 - DNA, 30 bp, Artificial Sequence
  Synthetic oligonucleotide
ctgactccagacagcaggatttggaagtaa

SEQ ID NO: 109363 - DNA, 30 bp, Artificial Sequence
  Synthetic oligonucleotide
gtgctgggtaacaagaaagctcttaagtaa

SEQ ID NO: 109364 - DNA, 30 bp, Artificial Sequence
  Synthetic oligonucleotide
tagccgagataaatctgctataaccagtaa

SEQ ID NO: 109365 - DNA, 30 bp, Artificial Sequence
  Synthetic oligonucleotide
ttatcggcggtgagtcttatgacccagtaa

SEQ ID NO: 109366 - DNA, 30 bp, Artificial Sequence
  Synthetic oligonucleotide
ctaatttaatggtaataagacggccagtaa

SEQ ID NO: 109367 - DNA, 30 bp, Artificial Sequence
  Synthetic oligonucleotide
agagtattgggtgagaagcccccgcagtaa

SEQ ID NO: 109368 - DNA, 30 bp, Artificial Sequence
  Synthetic oligonucleotide
gtaaggtgaattgtattcaagtgtcagtaa

SEQ ID NO: 109369 - DNA, 30 bp, Artificial Sequence
  Synthetic oligonucleotide
aagaaaagcagttcgtcactagatgagtaa

SEQ ID NO: 109370 - DNA, 30 bp, Artificial Sequence
  Synthetic oligonucleotide
tatgcgacggtacgatagaaacgtgagtaa

SEQ ID NO: 109371 - DNA, 30 bp, Artificial Sequence
  Synthetic oligonucleotide
acattatcctccgctggggaaagttagtaa

SEQ ID NO: 109372 - DNA, 30 bp, Artificial Sequence
  Synthetic oligonucleotide
taaatagatagccaactaatgagttagtaa

SEQ ID NO: 109373 - DNA, 30 bp, Artificial Sequence
  Synthetic oligonucleotide
aaggtaattgcaaaagaacatcgttagtaa

SEQ ID NO: 109374 - DNA, 30 bp, Artificial Sequence
  Synthetic oligonucleotide
ggtgctgtgtttataaggagaggttagtaa

SEQ ID NO: 109375 - DNA, 30 bp, Artificial Sequence
  Synthetic oligonucleotide
cgacatgttaatggccaatattaaacgtaa

SEQ ID NO: 109376 - DNA, 30 bp, Artificial Sequence
  Synthetic oligonucleotide
agccgtgccaaggcgctgagcgatacgtaa

SEQ ID NO: 109377 - DNA, 30 bp, Artificial Sequence
  Synthetic oligonucleotide
actcatcggtcccgggacaagggtacgtaa

SEQ ID NO: 109378 - DNA, 30 bp, Artificial Sequence
  Synthetic oligonucleotide
gatgcgctatctgccgtaacagcaccgtaa

SEQ ID NO: 109379 - DNA, 30 bp, Artificial Sequence
  Synthetic oligonucleotide
gtcctcaaacgtgagaaccggataccgtaa

SEQ ID NO: 109380 - DNA, 30 bp, Artificial Sequence
  Synthetic oligonucleotide
taacatttataatatttccccaagccgtaa

SEQ ID NO: 109381 - DNA, 30 bp, Artificial Sequence
  Synthetic oligonucleotide
cttagaggactcctcacgtgcaatccgtaa

SEQ ID NO: 109382 - DNA, 30 bp, Artificial Sequence
  Synthetic oligonucleotide
cactcggtaccgttcaagaagaccgcgtaa

SEQ ID NO: 109383 - DNA, 30 bp, Artificial Sequence
  Synthetic oligonucleotide
cgatttcgtgcaggcagaatgacggcgtaa

SEQ ID NO: 109384 - DNA, 30 bp, Artificial Sequence
  Synthetic oligonucleotide
cgttctaggtaggcgcgtgtacgggcgtaa

SEQ ID NO: 109385 - DNA, 30 bp, Artificial Sequence
  Synthetic oligonucleotide
ctctaaggtgtttaccaaggttgggcgtaa

SEQ ID NO: 109386 - DNA, 30 bp, Artificial Sequence
  Synthetic oligonucleotide
ggcagtacggatctgtgtcaatgatcgtaa

SEQ ID NO: 109387 - DNA, 30 bp, Artificial Sequence
  Synthetic oligonucleotide
ctcgttagagcagacgcgtattgatcgtaa

SEQ ID NO: 109388 - DNA, 30 bp, Artificial Sequence
  Synthetic oligonucleotide
agaccaaaatgtgtagccttctgctcgtaa

SEQ ID NO: 109389 - DNA, 30 bp, Artificial Sequence
  Synthetic oligonucleotide
atagtaaacattcaatgtaagatttcgtaa

SEQ ID NO: 109390 - DNA, 30 bp, Artificial Sequence
  Synthetic oligonucleotide
cacatctgagcagaagcgatagagaggtaa

SEQ ID NO: 109391 - DNA, 30 bp, Artificial Sequence
  Synthetic oligonucleotide
caatagcatatttgctaacaggagaggtaa

SEQ ID NO: 109392 - DNA, 30 bp, Artificial Sequence
  Synthetic oligonucleotide
gtatcctgctggctaaacgaggataggtaa

SEQ ID NO: 109393 - DNA, 30 bp, Artificial Sequence
  Synthetic oligonucleotide
tcgaccgccactgaggcgtaggaccggtaa

SEQ ID NO: 109394 - DNA, 30 bp, Artificial Sequence
  Synthetic oligonucleotide
gcctacaccccggacctacgtagagggtaa

SEQ ID NO: 109395 - DNA, 30 bp, Artificial Sequence
  Synthetic oligonucleotide
ggtggtatgctatggcgcttagtagggtaa

SEQ ID NO: 109396 - DNA, 30 bp, Artificial Sequence
  Synthetic oligonucleotide
tcgtggctggcgtatagagggaaggggtaa

SEQ ID NO: 109397 - DNA, 30 bp, Artificial Sequence
  Synthetic oligonucleotide
tcgttcctcctatgggaataggcggggtaa

SEQ ID NO: 109398 - DNA, 30 bp, Artificial Sequence
  Synthetic oligonucleotide
ccggggcaagggcaccacagcgatgggtaa

SEQ ID NO: 109399 - DNA, 30 bp, Artificial Sequence
  Synthetic oligonucleotide
aagacgtagtggcaagagggtaaatggtaa

SEQ ID NO: 109400 - DNA, 30 bp, Artificial Sequence
  Synthetic oligonucleotide
ggggtggatccgaatctttcagagtggtaa

SEQ ID NO: 109401 - DNA, 30 bp, Artificial Sequence
  Synthetic oligonucleotide
gtatacagttatgaaagcatcgtaatgtaa

SEQ ID NO: 109402 - DNA, 30 bp, Artificial Sequence
  Synthetic oligonucleotide
tagccgattgtaaggcgcaaggacatgtaa

SEQ ID NO: 109403 - DNA, 30 bp, Artificial Sequence
  Synthetic oligonucleotide
aacacaccacgtataggcaggcccatgtaa

SEQ ID NO: 109404 - DNA, 30 bp, Artificial Sequence
  Synthetic oligonucleotide
atgatcgctcgtggtacggttgcactgtaa

SEQ ID NO: 109405 - DNA, 30 bp, Artificial Sequence
  Synthetic oligonucleotide
atagcacattcgtctatccgctcactgtaa

SEQ ID NO: 109406 - DNA, 30 bp, Artificial Sequence
  Synthetic oligonucleotide
tgagcgcacccaagagaaaaagtcctgtaa

SEQ ID NO: 109407 - DNA, 30 bp, Artificial Sequence
  Synthetic oligonucleotide
gaactataatcaaaggccaccgcagtgtaa

SEQ ID NO: 109408 - DNA, 30 bp, Artificial Sequence
  Synthetic oligonucleotide
catcgtttctaggacagggtcgtagtgtaa

SEQ ID NO: 109409 - DNA, 30 bp, Artificial Sequence
  Synthetic oligonucleotide
ggtccggactactccgctaagcgcgtgtaa

SEQ ID NO: 109410 - DNA, 30 bp, Artificial Sequence
  Synthetic oligonucleotide
tgagatgattaggggggatcatctgtgtaa

SEQ ID NO: 109411 - DNA, 30 bp, Artificial Sequence
  Synthetic oligonucleotide
acttgttaacgtattagaagatgtgtgtaa

SEQ ID NO: 109412 - DNA, 30 bp, Artificial Sequence
  Synthetic oligonucleotide
cagagactgttgacagtgacgtgtgtgtaa

SEQ ID NO: 109413 - DNA, 30 bp, Artificial Sequence
  Synthetic oligonucleotide
agaacacaagccggtcgcgacacattgtaa

SEQ ID NO: 109414 - DNA, 30 bp, Artificial Sequence
  Synthetic oligonucleotide
gaagagtgagatgcggtgaaaatcttgtaa

SEQ ID NO: 109415 - DNA, 30 bp, Artificial Sequence
  Synthetic oligonucleotide
caaacatacgtagaagattgagctttgtaa

SEQ ID NO: 109416 - DNA, 30 bp, Artificial Sequence
  Synthetic oligonucleotide
tgctcaggacgtctaagggtaccaaattaa

SEQ ID NO: 109417 - DNA, 30 bp, Artificial Sequence
  Synthetic oligonucleotide
attaccgatagaagagcatcagcaaattaa

SEQ ID NO: 109418 - DNA, 30 bp, Artificial Sequence
  Synthetic oligonucleotide
agttgaccaagatctgcaataatgaattaa

SEQ ID NO: 109419 - DNA, 30 bp, Artificial Sequence
  Synthetic oligonucleotide
caaaacgcgcaacccacactaaagcattaa

SEQ ID NO: 109420 - DNA, 30 bp, Artificial Sequence
  Synthetic oligonucleotide
acgaacggccattacggaacttggcattaa

SEQ ID NO: 109421 - DNA, 30 bp, Artificial Sequence
  Synthetic oligonucleotide
ggtatcagaaacaagtatctttaggattaa

SEQ ID NO: 109422 - DNA, 30 bp, Artificial Sequence
  Synthetic oligonucleotide
atcgttgcgggaggtggtgctccctattaa

SEQ ID NO: 109423 - DNA, 30 bp, Artificial Sequence
  Synthetic oligonucleotide
ggtagagctgattgttgccactgctattaa

SEQ ID NO: 109424 - DNA, 30 bp, Artificial Sequence
  Synthetic oligonucleotide
ccacgatacaactgcatgaactcgtattaa

SEQ ID NO: 109425 - DNA, 30 bp, Artificial Sequence
  Synthetic oligonucleotide
cgtgaccggtgcgcgcgtgggactacttaa

SEQ ID NO: 109426 - DNA, 30 bp, Artificial Sequence
  Synthetic oligonucleotide
cggttaatcgagttaacggctgctacttaa

SEQ ID NO: 109427 - DNA, 30 bp, Artificial Sequence
  Synthetic oligonucleotide
accgtaagccaggtttaggattatgcttaa

SEQ ID NO: 109428 - DNA, 30 bp, Artificial Sequence
  Synthetic oligonucleotide
gcgaggcgtacctactacctacgctcttaa

SEQ ID NO: 109429 - DNA, 30 bp, Artificial Sequence
  Synthetic oligonucleotide
taggttaaacagaggaactcaaggtcttaa

SEQ ID NO: 109430 - DNA, 30 bp, Artificial Sequence
  Synthetic oligonucleotide
accgtgccagcacatcagagggattcttaa

SEQ ID NO: 109431 - DNA, 30 bp, Artificial Sequence
  Synthetic oligonucleotide
ttgcagaacaggcaaaaatcagcttcttaa

SEQ ID NO: 109432 - DNA, 30 bp, Artificial Sequence
  Synthetic oligonucleotide
cgtgtataaggcgatagcgcactaagttaa

SEQ ID NO: 109433 - DNA, 30 bp, Artificial Sequence
  Synthetic oligonucleotide
atacgagggcagtagaagacagacagttaa

SEQ ID NO: 109434 - DNA, 30 bp, Artificial Sequence
  Synthetic oligonucleotide
cagaggtaggccgcaaaaaattgcagttaa

SEQ ID NO: 109435 - DNA, 30 bp, Artificial Sequence
  Synthetic oligonucleotide
attacgcaggcaggtggcacaattagttaa

SEQ ID NO: 109436 - DNA, 30 bp, Artificial Sequence
  Synthetic oligonucleotide
acgatgtgcggtagaagagtcgggcgttaa

SEQ ID NO: 109437 - DNA, 30 bp, Artificial Sequence
  Synthetic oligonucleotide
ctggtaagtgaagttgcagggttcggttaa

SEQ ID NO: 109438 - DNA, 30 bp, Artificial Sequence
  Synthetic oligonucleotide
gctatgcaactaagtgcgactaagggttaa

SEQ ID NO: 109439 - DNA, 30 bp, Artificial Sequence
  Synthetic oligonucleotide
cgttaaggactactgcgccatattgtttaa

SEQ ID NO: 109440 - DNA, 30 bp, Artificial Sequence
  Synthetic oligonucleotide
acgtggaagaccggatgttcgcatttttaa

SEQ ID NO: 109441 - DNA, 30 bp, Artificial Sequence
  Synthetic oligonucleotide
ggagcgctggacgggaaaagtcgaaaaaca

SEQ ID NO: 109442 - DNA, 30 bp, Artificial Sequence
  Synthetic oligonucleotide
acaaattcggacatttcgagggtaaaaaca

SEQ ID NO: 109443 - DNA, 30 bp, Artificial Sequence
  Synthetic oligonucleotide
attatcagggctggtttaggatccaaaaca

SEQ ID NO: 109444 - DNA, 30 bp, Artificial Sequence
  Synthetic oligonucleotide
gatagaatcacgctggagacaggcaaaaca

SEQ ID NO: 109445 - DNA, 30 bp, Artificial Sequence
  Synthetic oligonucleotide
cgtaacagacgggtcatgaagctcaaaaca

SEQ ID NO: 109446 - DNA, 30 bp, Artificial Sequence
  Synthetic oligonucleotide
agtagagagaatttactagtcccgcaaaca

SEQ ID NO: 109447 - DNA, 30 bp, Artificial Sequence
  Synthetic oligonucleotide
ttggactcaaagacatgttgaagggaaaca

SEQ ID NO: 109448 - DNA, 30 bp, Artificial Sequence
  Synthetic oligonucleotide
tcatgatattcataggggggtcaataaaca

SEQ ID NO: 109449 - DNA, 30 bp, Artificial Sequence
  Synthetic oligonucleotide
aaagattccaataaaggtatctggtaaaca

SEQ ID NO: 109450 - DNA, 30 bp, Artificial Sequence
  Synthetic oligonucleotide
cactcttcgataagcccggattggtaaaca

SEQ ID NO: 109451 - DNA, 30 bp, Artificial Sequence
  Synthetic oligonucleotide
atacagcgacagaatttagggacgacaaca

SEQ ID NO: 109452 - DNA, 30 bp, Artificial Sequence
  Synthetic oligonucleotide
cgtggtaactaacggagtgaggttacaaca

SEQ ID NO: 109453 - DNA, 31 bp, Artificial Sequence
  Synthetic oligonucleotide
caggaccaatctacaaagcaacgtagcaaca

SEQ ID NO: 109454 - DNA, 30 bp, Artificial Sequence
  Synthetic oligonucleotide
ggaccaccaggtttacatttgcgggcaaca

SEQ ID NO: 109455 - DNA, 30 bp, Artificial Sequence
  Synthetic oligonucleotide
gggtggaaaggtgagagctgtgtatcaaca

SEQ ID NO: 109456 - DNA, 30 bp, Artificial Sequence
  Synthetic oligonucleotide
ctgaaaactagggttggatatttctcaaca

SEQ ID NO: 109457 - DNA, 30 bp, Artificial Sequence
  Synthetic oligonucleotide
tatggtgtacggtggtccagcaggtcaaca

SEQ ID NO: 109458 - DNA, 30 bp, Artificial Sequence
  Synthetic oligonucleotide
tgtaggcgtgcgtgagccatacgcagaaca

SEQ ID NO: 109459 - DNA, 30 bp, Artificial Sequence
  Synthetic oligonucleotide
taactacagcagaaaagactactcagaaca

SEQ ID NO: 109460 - DNA, 30 bp, Artificial Sequence
  Synthetic oligonucleotide
ccgggcatctatgtgacgtatgtgagaaca

SEQ ID NO: 109461 - DNA, 30 bp, Artificial Sequence
  Synthetic oligonucleotide
ggctagaggacttgcgccagttcaggaaca

SEQ ID NO: 109462 - DNA, 30 bp, Artificial Sequence
  Synthetic oligonucleotide
gatacactcaatacatgtgccctcggaaca

SEQ ID NO: 109463 - DNA, 30 bp, Artificial Sequence
  Synthetic oligonucleotide
cacctctaccctaataactccttcggaaca

SEQ ID NO: 109464 - DNA, 30 bp, Artificial Sequence
  Synthetic oligonucleotide
gcgcaatactgagagcgcgctattggaaca

SEQ ID NO: 109465 - DNA, 30 bp, Artificial Sequence
  Synthetic oligonucleotide
cctacgtccttgtccagctagcagataaca

SEQ ID NO: 109466 - DNA, 30 bp, Artificial Sequence
  Synthetic oligonucleotide
ggctcagcccacacgggcaccgaactaaca

SEQ ID NO: 109467 - DNA, 30 bp, Artificial Sequence
  Synthetic oligonucleotide
ccattacatggctacaattgcacactaaca

SEQ ID NO: 109468 - DNA, 30 bp, Artificial Sequence
  Synthetic oligonucleotide
gtaatgcaacgagcctcagtgtatctaaca

SEQ ID NO: 109469 - DNA, 30 bp, Artificial Sequence
  Synthetic oligonucleotide
tggcagcacagtatacagaagtgagtaaca

SEQ ID NO: 109470 - DNA, 30 bp, Artificial Sequence
  Synthetic oligonucleotide
cactttagtgtacacgaccagtttgtaaca

SEQ ID NO: 109471 - DNA, 30 bp, Artificial Sequence
  Synthetic oligonucleotide
ctggagaacggaggggcgcaatcattaaca

SEQ ID NO: 109472 - DNA, 30 bp, Artificial Sequence
  Synthetic oligonucleotide
gagggagtagtttcagcggtacagttaaca

SEQ ID NO: 109473 - DNA, 30 bp, Artificial Sequence
  Synthetic oligonucleotide
tcgcggtcatagcagagcatttaaaacaca

SEQ ID NO: 109474 - DNA, 30 bp, Artificial Sequence
  Synthetic oligonucleotide
acgagtttcggaagccgggataaacacaca

SEQ ID NO: 109475 - DNA, 30 bp, Artificial Sequence
  Synthetic oligonucleotide
tacacctctgaaccaatttcctaacacaca

SEQ ID NO: 109476 - DNA, 30 bp, Artificial Sequence
  Synthetic oligonucleotide
agatctgtcagcgccgagacatcacacaca

SEQ ID NO: 109477 - DNA, 30 bp, Artificial Sequence
  Synthetic oligonucleotide
gtccggagagtagtggcaccacaccacaca

SEQ ID NO: 109478 - DNA, 30 bp, Artificial Sequence
  Synthetic oligonucleotide
ctagcaccacctagggagggcgaccacaca

SEQ ID NO: 109479 - DNA, 30 bp, Artificial Sequence
  Synthetic oligonucleotide
cagctcccacgaaaaagatctagtcacaca

SEQ ID NO: 109480 - DNA, 30 bp, Artificial Sequence
  Synthetic oligonucleotide
cacctatagcatagtgggaaccaagacaca

SEQ ID NO: 109481 - DNA, 30 bp, Artificial Sequence
  Synthetic oligonucleotide
taagcttcacgaatttataaagcagacaca

SEQ ID NO: 109482 - DNA, 30 bp, Artificial Sequence
  Synthetic oligonucleotide
atatggaagataagggcgcgatgggacaca

SEQ ID NO: 109483 - DNA, 30 bp, Artificial Sequence
  Synthetic oligonucleotide
catattacagccatgtaggtccctgacaca

SEQ ID NO: 109484 - DNA, 30 bp, Artificial Sequence
  Synthetic oligonucleotide
tccactcatcaggaaccgcgtgaatacaca

SEQ ID NO: 109485 - DNA, 30 bp, Artificial Sequence
  Synthetic oligonucleotide
ggagtgcttcatcgctcgctaccctacaca

SEQ ID NO: 109486 - DNA, 30 bp, Artificial Sequence
  Synthetic oligonucleotide
ggggaatctcgcaaccacacactttacaca

SEQ ID NO: 109487 - DNA, 30 bp, Artificial Sequence
  Synthetic oligonucleotide
caacttacaacgaagatatgcaaaaccaca

SEQ ID NO: 109488 - DNA, 30 bp, Artificial Sequence
  Synthetic oligonucleotide
tcggcgttgcggaaagggatgataaccaca

SEQ ID NO: 109489 - DNA, 30 bp, Artificial Sequence
  Synthetic oligonucleotide
cctgtattatcaaactctactcggaccaca

SEQ ID NO: 109490 - DNA, 30 bp, Artificial Sequence
  Synthetic oligonucleotide
cggggagatggtagcattatcccccccaca

SEQ ID NO: 109491 - DNA, 30 bp, Artificial Sequence
  Synthetic oligonucleotide
ggcggtcatgcgtaaacagcgcatcccaca

SEQ ID NO: 109492 - DNA, 30 bp, Artificial Sequence
  Synthetic oligonucleotide
taccagagcgttagtacgagcttagccaca

SEQ ID NO: 109493 - DNA, 30 bp, Artificial Sequence
  Synthetic oligonucleotide
tatgacctcgtaagaacgggcagcgccaca

SEQ ID NO: 109494 - DNA, 30 bp, Artificial Sequence
  Synthetic oligonucleotide
tgcacgcgaggtgatcagccagaggccaca

SEQ ID NO: 109495 - DNA, 30 bp, Artificial Sequence
  Synthetic oligonucleotide
agttaaggggttaagtcggtaggggccaca

SEQ ID NO: 109496 - DNA, 30 bp, Artificial Sequence
  Synthetic oligonucleotide
taaacaagggggcgccagacacatgccaca

SEQ ID NO: 109497 - DNA, 30 bp, Artificial Sequence
  Synthetic oligonucleotide
agctgatctcatattacattggctgccaca

SEQ ID NO: 109498 - DNA, 30 bp, Artificial Sequence
  Synthetic oligonucleotide
cggtattagagatcacagtgcgagtccaca

SEQ ID NO: 109499 - DNA, 30 bp, Artificial Sequence
  Synthetic oligonucleotide
agagtgttcccgtaccatggatagtccaca

SEQ ID NO: 109500 - DNA, 30 bp, Artificial Sequence
  Synthetic oligonucleotide
tgattgaagggtaccaaggagggttccaca

SEQ ID NO: 109501 - DNA, 30 bp, Artificial Sequence
  Synthetic oligonucleotide
agcggtaaggaaaccgggggtgagagcaca

SEQ ID NO: 109502 - DNA, 30 bp, Artificial Sequence
  Synthetic oligonucleotide
gggctcatgcgctgggctcctgcgagcaca

SEQ ID NO: 109503 - DNA, 30 bp, Artificial Sequence
  Synthetic oligonucleotide
atgggctgttaaggtttactaccgcgcaca

SEQ ID NO: 109504 - DNA, 30 bp, Artificial Sequence
  Synthetic oligonucleotide
ctcgggcaccgcgatagagaaggaggcaca

SEQ ID NO: 109505 - DNA, 30 bp, Artificial Sequence
  Synthetic oligonucleotide
agtggacgatagtaataatattccggcaca

SEQ ID NO: 109506 - DNA, 30 bp, Artificial Sequence
  Synthetic oligonucleotide
actgactcttgggcaacaatcggcggcaca

SEQ ID NO: 109507 - DNA, 29 bp, Artificial Sequence
  Synthetic oligonucleotide
gaagcagacagtaggcaaggttcggcaca

SEQ ID NO: 109508 - DNA, 30 bp, Artificial Sequence
  Synthetic oligonucleotide
ggagggctaagaggccccacctagggcaca

SEQ ID NO: 109509 - DNA, 30 bp, Artificial Sequence
  Synthetic oligonucleotide
ggaaagccgtccttcgaagttgggggcaca

SEQ ID NO: 109510 - DNA, 30 bp, Artificial Sequence
  Synthetic oligonucleotide
gcgcccatcagcagctattcaaggtgcaca

SEQ ID NO: 109511 - DNA, 30 bp, Artificial Sequence
  Synthetic oligonucleotide
cgataaaagaaacttgaccgactaatcaca

SEQ ID NO: 109512 - DNA, 30 bp, Artificial Sequence
  Synthetic oligonucleotide
atatcgtcagtctactacctacccatcaca

SEQ ID NO: 109513 - DNA, 30 bp, Artificial Sequence
  Synthetic oligonucleotide
gaaaaggagcatcaatgagactggatcaca

SEQ ID NO: 109514 - DNA, 30 bp, Artificial Sequence
  Synthetic oligonucleotide
accttacatcggtcagcgagactgatcaca

SEQ ID NO: 109515 - DNA, 30 bp, Artificial Sequence
  Synthetic oligonucleotide
tctgaacatctaggtgccaaccatatcaca

SEQ ID NO: 109516 - DNA, 30 bp, Artificial Sequence
  Synthetic oligonucleotide
gattgtgggtgagaaggaggtgttatcaca

SEQ ID NO: 109517 - DNA, 31 bp, Artificial Sequence
  Synthetic oligonucleotide
tgtggacgtatccacacttggactgctcaca

SEQ ID NO: 109518 - DNA, 30 bp, Artificial Sequence
  Synthetic oligonucleotide
ttcgtgcgatgtgtatctctagttctcaca

SEQ ID NO: 109519 - DNA, 30 bp, Artificial Sequence
  Synthetic oligonucleotide
tacatagggcgcttcgaaacagccttcaca

SEQ ID NO: 109520 - DNA, 30 bp, Artificial Sequence
  Synthetic oligonucleotide
ccgcgtaaccggaagattaaaaccaagaca

SEQ ID NO: 109521 - DNA, 30 bp, Artificial Sequence
  Synthetic oligonucleotide
actcagaggataaagatggggttcaagaca

SEQ ID NO: 109522 - DNA, 30 bp, Artificial Sequence
  Synthetic oligonucleotide
tatctagaattaccagtctggcagaagaca

SEQ ID NO: 109523 - DNA, 30 bp, Artificial Sequence
  Synthetic oligonucleotide
caaagatcggaggcaaggtagccagagaca

SEQ ID NO: 109524 - DNA, 30 bp, Artificial Sequence
  Synthetic oligonucleotide
tagaacgtaaacacaattagaatcgagaca

SEQ ID NO: 109525 - DNA, 30 bp, Artificial Sequence
  Synthetic oligonucleotide
gaggtactccggtccggtcaataaacgaca

SEQ ID NO: 109526 - DNA, 30 bp, Artificial Sequence
  Synthetic oligonucleotide
tcctaccgcgcaaaatattagagaacgaca

SEQ ID NO: 109527 - DNA, 30 bp, Artificial Sequence
  Synthetic oligonucleotide
agcaatcgtttgaaacgattggtgacgaca

SEQ ID NO: 109528 - DNA, 30 bp, Artificial Sequence
  Synthetic oligonucleotide
cgctgagcttgcctgtagtatgtgccgaca

SEQ ID NO: 109529 - DNA, 30 bp, Artificial Sequence
  Synthetic oligonucleotide
ggaacgggggatttggacacccctccgaca

SEQ ID NO: 109530 - DNA, 30 bp, Artificial Sequence
  Synthetic oligonucleotide
cacttaggctagctctgaaacgctccgaca

SEQ ID NO: 109531 - DNA, 30 bp, Artificial Sequence
  Synthetic oligonucleotide
gcctgacatgggtactcacattcagcgaca

SEQ ID NO: 109532 - DNA, 30 bp, Artificial Sequence
  Synthetic oligonucleotide
caatcgcgtcccggaaaagaagacgcgaca

SEQ ID NO: 109533 - DNA, 30 bp, Artificial Sequence
  Synthetic oligonucleotide
gccatgaaaggaggggaaacgggcgcgaca

SEQ ID NO: 109534 - DNA, 30 bp, Artificial Sequence
  Synthetic oligonucleotide
cagacgaatgcccggtacctctaggcgaca

SEQ ID NO: 109535 - DNA, 30 bp, Artificial Sequence
  Synthetic oligonucleotide
ttaggcaccaaaccggggttgtcggcgaca

SEQ ID NO: 109536 - DNA, 30 bp, Artificial Sequence
  Synthetic oligonucleotide
gctccaccggagaatgcccgtctggcgaca

SEQ ID NO: 109537 - DNA, 30 bp, Artificial Sequence
  Synthetic oligonucleotide
cagccaccatcgtgactgggaagtgcgaca

SEQ ID NO: 109538 - DNA, 30 bp, Artificial Sequence
  Synthetic oligonucleotide
tcatcgcgattcagagcttacattgcgaca

SEQ ID NO: 109539 - DNA, 30 bp, Artificial Sequence
  Synthetic oligonucleotide
gtttacgtaggtacgagagctaagtcgaca

SEQ ID NO: 109540 - DNA, 30 bp, Artificial Sequence
  Synthetic oligonucleotide
atgatatcaagtcagatcaatccttcgaca

SEQ ID NO: 109541 - DNA, 30 bp, Artificial Sequence
  Synthetic oligonucleotide
caccgggaaacgtctgagtgttgttcgaca

SEQ ID NO: 109542 - DNA, 30 bp, Artificial Sequence
  Synthetic oligonucleotide
gtgtatcgatagcggtactaatcgaggaca

SEQ ID NO: 109543 - DNA, 30 bp, Artificial Sequence
  Synthetic oligonucleotide
aggttacgccttcagctcaactctaggaca

SEQ ID NO: 109544 - DNA, 30 bp, Artificial Sequence
  Synthetic oligonucleotide
gtagggcgtgcgaaagtggtgcgtaggaca

SEQ ID NO: 109545 - DNA, 30 bp, Artificial Sequence
  Synthetic oligonucleotide
acaacaggtgcgggtagccatcgacggaca

SEQ ID NO: 109546 - DNA, 30 bp, Artificial Sequence
  Synthetic oligonucleotide
tagccttggactaaaagaacacgccggaca

SEQ ID NO: 109547 - DNA, 30 bp, Artificial Sequence
  Synthetic oligonucleotide
aaccggtgggactgatcagtatctcggaca

SEQ ID NO: 109548 - DNA, 30 bp, Artificial Sequence
  Synthetic oligonucleotide
gtacttagcatcgcagttaaacacgggaca

SEQ ID NO: 109549 - DNA, 30 bp, Artificial Sequence
  Synthetic oligonucleotide
caaagcggctcgtagtgaacagtcgggaca

SEQ ID NO: 109550 - DNA, 30 bp, Artificial Sequence
  Synthetic oligonucleotide
gtgttaagagtatgtgattcagttgggaca

SEQ ID NO: 109551 - DNA, 30 bp, Artificial Sequence
  Synthetic oligonucleotide
gatcgatacttatataatcgcttatggaca

SEQ ID NO: 109552 - DNA, 30 bp, Artificial Sequence
  Synthetic oligonucleotide
acgaacgggttggtacgcaagcactggaca

SEQ ID NO: 109553 - DNA, 30 bp, Artificial Sequence
  Synthetic oligonucleotide
actcaggaaacaagggggggcataatgaca

SEQ ID NO: 109554 - DNA, 30 bp, Artificial Sequence
  Synthetic oligonucleotide
gtccgtataaagagtgcggatgttatgaca

SEQ ID NO: 109555 - DNA, 30 bp, Artificial Sequence
  Synthetic oligonucleotide
agctgacgcaaggaatgaaacgaggtgaca

SEQ ID NO: 109556 - DNA, 30 bp, Artificial Sequence
  Synthetic oligonucleotide
acggaatactaaggtgccgtcggcttgaca

SEQ ID NO: 109557 - DNA, 30 bp, Artificial Sequence
  Synthetic oligonucleotide
gctggaggaacaccacgcgattagttgaca

SEQ ID NO: 109558 - DNA, 30 bp, Artificial Sequence
  Synthetic oligonucleotide
cggctggttcaagaaacatggcggttgaca

SEQ ID NO: 109559 - DNA, 30 bp, Artificial Sequence
  Synthetic oligonucleotide
gcgttgtagtagaaagagagggtgttgaca

SEQ ID NO: 109560 - DNA, 30 bp, Artificial Sequence
  Synthetic oligonucleotide
aaggataggaggaaaccttcgaggaataca

SEQ ID NO: 109561 - DNA, 30 bp, Artificial Sequence
  Synthetic oligonucleotide
atccatagaaaagaatatgctctgaataca

SEQ ID NO: 109562 - DNA, 30 bp, Artificial Sequence
  Synthetic oligonucleotide
aaacacgcgtatcagagggacgataataca

SEQ ID NO: 109563 - DNA, 30 bp, Artificial Sequence
  Synthetic oligonucleotide
ccgttcgatcgtccacaacgacttaataca

SEQ ID NO: 109564 - DNA, 30 bp, Artificial Sequence
  Synthetic oligonucleotide
gcgtgtcacgaaatccttcgtcgccataca

SEQ ID NO: 109565 - DNA, 30 bp, Artificial Sequence
  Synthetic oligonucleotide
accacggcgcgcggaaagacctgtcataca

SEQ ID NO: 109566 - DNA, 30 bp, Artificial Sequence
  Synthetic oligonucleotide
ggaaaggcgcacacatgtgttcccgataca

SEQ ID NO: 109567 - DNA, 30 bp, Artificial Sequence
  Synthetic oligonucleotide
cggtacctgaagaagcggcctgatgataca

SEQ ID NO: 109568 - DNA, 30 bp, Artificial Sequence
  Synthetic oligonucleotide
acgatgattgaggggacatgtcactataca

SEQ ID NO: 109569 - DNA, 30 bp, Artificial Sequence
  Synthetic oligonucleotide
ggtactgaagccaagccatcgaagtataca

SEQ ID NO: 109570 - DNA, 30 bp, Artificial Sequence
  Synthetic oligonucleotide
actcaaacggggaatctctacatgtataca

SEQ ID NO: 109571 - DNA, 30 bp, Artificial Sequence
  Synthetic oligonucleotide
acgtgagacgttacgacaatgctaactaca

SEQ ID NO: 109572 - DNA, 30 bp, Artificial Sequence
  Synthetic oligonucleotide
cgtatgagagacgacgcaacgatacctaca

SEQ ID NO: 109573 - DNA, 30 bp, Artificial Sequence
  Synthetic oligonucleotide
caggcctaatgcttcaaaccagcccctaca

SEQ ID NO: 109574 - DNA, 30 bp, Artificial Sequence
  Synthetic oligonucleotide
tggcgactatcccacgataatgcagctaca

SEQ ID NO: 109575 - DNA, 30 bp, Artificial Sequence
  Synthetic oligonucleotide
cggttggcagttagagaagggggtgctaca

SEQ ID NO: 109576 - DNA, 30 bp, Artificial Sequence
  Synthetic oligonucleotide
acgcctgccgactgggccggacaatctaca

SEQ ID NO: 109577 - DNA, 30 bp, Artificial Sequence
  Synthetic oligonucleotide
gagtacttggtacggaaaagaactagtaca

SEQ ID NO: 109578 - DNA, 30 bp, Artificial Sequence
  Synthetic oligonucleotide
ctggagtgcgaaccggacaggagccgtaca

SEQ ID NO: 109579 - DNA, 30 bp, Artificial Sequence
  Synthetic oligonucleotide
cctgctcacaagtgcttgacagctcgtaca

SEQ ID NO: 109580 - DNA, 28 bp, Artificial Sequence
  Synthetic oligonucleotide
cgaagtccaatggtgaggtagaggtaca

SEQ ID NO: 109581 - DNA, 30 bp, Artificial Sequence
  Synthetic oligonucleotide
gctgtcttcggcgtcgtagtgatcggtaca

SEQ ID NO: 109582 - DNA, 30 bp, Artificial Sequence
  Synthetic oligonucleotide
ggccgacgtctatacaatacaatgggtaca

SEQ ID NO: 109583 - DNA, 30 bp, Artificial Sequence
  Synthetic oligonucleotide
gatggtgcgagtggatttatgtctggtaca

SEQ ID NO: 109584 - DNA, 30 bp, Artificial Sequence
  Synthetic oligonucleotide
ttgtttcctgcactacaagaggaatgtaca

SEQ ID NO: 109585 - DNA, 30 bp, Artificial Sequence
  Synthetic oligonucleotide
cgtgcactcaggtcggctatgctctgtaca

SEQ ID NO: 109586 - DNA, 30 bp, Artificial Sequence
  Synthetic oligonucleotide
tgaaccggactttttgaggcgaagtgtaca

SEQ ID NO: 109587 - DNA, 30 bp, Artificial Sequence
  Synthetic oligonucleotide
atacgtcaagctttatgcattaagtgtaca

SEQ ID NO: 109588 - DNA, 30 bp, Artificial Sequence
  Synthetic oligonucleotide
cgaatactcgtgtaaaacttgcgttgtaca

SEQ ID NO: 109589 - DNA, 30 bp, Artificial Sequence
  Synthetic oligonucleotide
acggaaggaaggccttgggttacaattaca

SEQ ID NO: 109590 - DNA, 30 bp, Artificial Sequence
  Synthetic oligonucleotide
acgacaggcattaatcggttttaagttaca

SEQ ID NO: 109591 - DNA, 30 bp, Artificial Sequence
  Synthetic oligonucleotide
aaccatccttaaatgtattagacagttaca

SEQ ID NO: 109592 - DNA, 30 bp, Artificial Sequence
  Synthetic oligonucleotide
cacaatccttagtcattgtcgactgttaca

SEQ ID NO: 109593 - DNA, 30 bp, Artificial Sequence
  Synthetic oligonucleotide
cgaacgtcatacaagtcggatgaatttaca

SEQ ID NO: 109594 - DNA, 30 bp, Artificial Sequence
  Synthetic oligonucleotide
atggtgagtaggtacaaggatgcgtttaca

SEQ ID NO: 109595 - DNA, 30 bp, Artificial Sequence
  Synthetic oligonucleotide
gccatgtcattgaaagaacataggtttaca

SEQ ID NO: 109596 - DNA, 30 bp, Artificial Sequence
  Synthetic oligonucleotide
gatagaccgaaccgacattaatcttttaca

SEQ ID NO: 109597 - DNA, 30 bp, Artificial Sequence
  Synthetic oligonucleotide
atgaggcttcttgagctacattggaaacca

SEQ ID NO: 109598 - DNA, 30 bp, Artificial Sequence
  Synthetic oligonucleotide
gatatgtaagcgtgtccagtagtgaaacca

SEQ ID NO: 109599 - DNA, 30 bp, Artificial Sequence
  Synthetic oligonucleotide
gtgctagcgggacaggcttattctaaacca

SEQ ID NO: 109600 - DNA, 30 bp, Artificial Sequence
  Synthetic oligonucleotide
gtcatgaacctggttgactttagtaaacca

SEQ ID NO: 109601 - DNA, 30 bp, Artificial Sequence
  Synthetic oligonucleotide
agcccaggttaagcgcgcaaatgtaaacca

SEQ ID NO: 109602 - DNA, 30 bp, Artificial Sequence
  Synthetic oligonucleotide
agaggggcgtcctcggaatttgtacaacca

SEQ ID NO: 109603 - DNA, 30 bp, Artificial Sequence
  Synthetic oligonucleotide
gtctaatcagcgagctatccgcgtcaacca

SEQ ID NO: 109604 - DNA, 30 bp, Artificial Sequence
  Synthetic oligonucleotide
atgacacgctcgtcccacaggtcagaacca

SEQ ID NO: 109605 - DNA, 30 bp, Artificial Sequence
  Synthetic oligonucleotide
tcgccaacgactatctgtttggtagaacca

SEQ ID NO: 109606 - DNA, 30 bp, Artificial Sequence
  Synthetic oligonucleotide
tcgggaaggacaactaacagtggcgaacca

SEQ ID NO: 109607 - DNA, 30 bp, Artificial Sequence
  Synthetic oligonucleotide
ctattcagagaataccgtctgtgcgaacca

SEQ ID NO: 109608 - DNA, 30 bp, Artificial Sequence
  Synthetic oligonucleotide
gttcaaccgtcccgacccgtcctcgaacca

SEQ ID NO: 109609 - DNA, 30 bp, Artificial Sequence
  Synthetic oligonucleotide
agcagaccaccgccacggcgaaagtaacca

SEQ ID NO: 109610 - DNA, 30 bp, Artificial Sequence
  Synthetic oligonucleotide
ctagatatccctggcggtggtcggtaacca

SEQ ID NO: 109611 - DNA, 30 bp, Artificial Sequence
  Synthetic oligonucleotide
tcgttatagagatcctgaagggatacacca

SEQ ID NO: 109612 - DNA, 30 bp, Artificial Sequence
  Synthetic oligonucleotide
ccgtacagtcataagccgctacgtacacca

SEQ ID NO: 109613 - DNA, 30 bp, Artificial Sequence
  Synthetic oligonucleotide
cacaggacgaaaattgttagtgttacacca

SEQ ID NO: 109614 - DNA, 30 bp, Artificial Sequence
  Synthetic oligonucleotide
acaatgggtacattttaaggattgccacca

SEQ ID NO: 109615 - DNA, 30 bp, Artificial Sequence
  Synthetic oligonucleotide
agaacataacttaagaccatacgtccacca

SEQ ID NO: 109616 - DNA, 30 bp, Artificial Sequence
  Synthetic oligonucleotide
caccgactgtcaaatgaccaaggagcacca

SEQ ID NO: 109617 - DNA, 30 bp, Artificial Sequence
  Synthetic oligonucleotide
aaccaggcaccgaggagtttcaacgcacca

SEQ ID NO: 109618 - DNA, 30 bp, Artificial Sequence
  Synthetic oligonucleotide
ggccaccctagctcatccaggtacgcacca

SEQ ID NO: 109619 - DNA, 30 bp, Artificial Sequence
  Synthetic oligonucleotide
ccgtgtaggttacaatttcgctgcgcacca

SEQ ID NO: 109620 - DNA, 30 bp, Artificial Sequence
  Synthetic oligonucleotide
gaataccagattaacctcaatggctcacca

SEQ ID NO: 109621 - DNA, 30 bp, Artificial Sequence
  Synthetic oligonucleotide
tgccatgtagaaacacgcgtcttcagacca

SEQ ID NO: 109622 - DNA, 30 bp, Artificial Sequence
  Synthetic oligonucleotide
atgtggcacggacattaacggtatagacca

SEQ ID NO: 109623 - DNA, 30 bp, Artificial Sequence
  Synthetic oligonucleotide
ctcaaatcatgtataggaaagaaccgacca

SEQ ID NO: 109624 - DNA, 30 bp, Artificial Sequence
  Synthetic oligonucleotide
tcaggaagcagattatctcgagtccgacca

SEQ ID NO: 109625 - DNA, 30 bp, Artificial Sequence
  Synthetic oligonucleotide
gttggaaaagcactcggtgccgcgcgacca

SEQ ID NO: 109626 - DNA, 30 bp, Artificial Sequence
  Synthetic oligonucleotide
gggactaagaggacaaggttcgggcgacca

SEQ ID NO: 109627 - DNA, 30 bp, Artificial Sequence
  Synthetic oligonucleotide
taggatacagccccgtagcgagctcgacca

SEQ ID NO: 109628 - DNA, 30 bp, Artificial Sequence
  Synthetic oligonucleotide
aacagggtgttagaagtagagagtcgacca

SEQ ID NO: 109629 - DNA, 30 bp, Artificial Sequence
  Synthetic oligonucleotide
gtgtcaacaatccgtgatgggactggacca

SEQ ID NO: 109630 - DNA, 30 bp, Artificial Sequence
  Synthetic oligonucleotide
agcctcggattggttggtagaatatgacca

SEQ ID NO: 109631 - DNA, 30 bp, Artificial Sequence
  Synthetic oligonucleotide
gaaggttacacacgtcatcctccctgacca

SEQ ID NO: 109632 - DNA, 30 bp, Artificial Sequence
  Synthetic oligonucleotide
ccactccagccaaagagtataagctgacca

SEQ ID NO: 109633 - DNA, 30 bp, Artificial Sequence
  Synthetic oligonucleotide
gtacaacgttcctatgtgataaagtgacca

SEQ ID NO: 109634 - DNA, 30 bp, Artificial Sequence
  Synthetic oligonucleotide
gtgcggcgcagtaatttagttgagtgacca

SEQ ID NO: 109635 - DNA, 30 bp, Artificial Sequence
  Synthetic oligonucleotide
gtacggtattgcaggattcgctagtgacca

SEQ ID NO: 109636 - DNA, 30 bp, Artificial Sequence
  Synthetic oligonucleotide
gcggaaggcccggaactttacgcgtgacca

SEQ ID NO: 109637 - DNA, 30 bp, Artificial Sequence
  Synthetic oligonucleotide
tatagcagcacaaagaggactcggtgacca

SEQ ID NO: 109638 - DNA, 30 bp, Artificial Sequence
  Synthetic oligonucleotide
tatcgcaaagggacaaaggttgggtgacca

SEQ ID NO: 109639 - DNA, 30 bp, Artificial Sequence
  Synthetic oligonucleotide
attgtaggaaaagagctggttcgcctacca

SEQ ID NO: 109640 - DNA, 30 bp, Artificial Sequence
  Synthetic oligonucleotide
aagacttctccagccgccctgctcgtacca

SEQ ID NO: 109641 - DNA, 30 bp, Artificial Sequence
  Synthetic oligonucleotide
cagaaaaatggaatctggcaataggtacca

SEQ ID NO: 109642 - DNA, 30 bp, Artificial Sequence
  Synthetic oligonucleotide
agtcaactaacgaccatcaaaggggtacca

SEQ ID NO: 109643 - DNA, 30 bp, Artificial Sequence
  Synthetic oligonucleotide
taggtgtgaaatgtagcgagaattgtacca

SEQ ID NO: 109644 - DNA, 30 bp, Artificial Sequence
  Synthetic oligonucleotide
tctgctcgtctaggcataagtattgtacca

SEQ ID NO: 109645 - DNA, 30 bp, Artificial Sequence
  Synthetic oligonucleotide
cagccggcaagcccgcccccctcgttacca

SEQ ID NO: 109646 - DNA, 30 bp, Artificial Sequence
  Synthetic oligonucleotide
taaacgctaatcactaaggcagacaaccca

SEQ ID NO: 109647 - DNA, 30 bp, Artificial Sequence
  Synthetic oligonucleotide
acctagttgatgattgccggtgaacaccca

SEQ ID NO: 109648 - DNA, 30 bp, Artificial Sequence
  Synthetic oligonucleotide
cagtgtacaattcacggtatagcacaccca

SEQ ID NO: 109649 - DNA, 30 bp, Artificial Sequence
  Synthetic oligonucleotide
atgggctcgatagtacagctaaccgaccca

SEQ ID NO: 109650 - DNA, 30 bp, Artificial Sequence
  Synthetic oligonucleotide
cacactatcagtattgttgttaactaccca

SEQ ID NO: 109651 - DNA, 30 bp, Artificial Sequence
  Synthetic oligonucleotide
tgggctcacgagaactctatcgtcacccca

SEQ ID NO: 109652 - DNA, 30 bp, Artificial Sequence
  Synthetic oligonucleotide
ctggtaccaagtagttacctaaagacccca

SEQ ID NO: 109653 - DNA, 30 bp, Artificial Sequence
  Synthetic oligonucleotide
aacggaggttaatctgggaaagcaccccca

SEQ ID NO: 109654 - DNA, 30 bp, Artificial Sequence
  Synthetic oligonucleotide
atgaaacacagtcgaaaagagattccccca

SEQ ID NO: 109655 - DNA, 30 bp, Artificial Sequence
  Synthetic oligonucleotide
ggttcaagagcactgggacgtcgatcccca

SEQ ID NO: 109656 - DNA, 30 bp, Artificial Sequence
  Synthetic oligonucleotide
catgcggagtgaagtattcgcacgagccca

SEQ ID NO: 109657 - DNA, 30 bp, Artificial Sequence
  Synthetic oligonucleotide
gcgcgcgtactagtggtgaaagttcgccca

SEQ ID NO: 109658 - DNA, 30 bp, Artificial Sequence
  Synthetic oligonucleotide
agtagcggggaataataagtctcatgccca

SEQ ID NO: 109659 - DNA, 30 bp, Artificial Sequence
  Synthetic oligonucleotide
ccaaacaattgggtatcctcgcattgccca

SEQ ID NO: 109660 - DNA, 30 bp, Artificial Sequence
  Synthetic oligonucleotide
ggtagaagggccatagcgttacaaatccca

SEQ ID NO: 109661 - DNA, 30 bp, Artificial Sequence
  Synthetic oligonucleotide
gtcaggaagctcgagtcctgtacaatccca

SEQ ID NO: 109662 - DNA, 30 bp, Artificial Sequence
  Synthetic oligonucleotide
aagatatggcaatcccggacctatatccca

SEQ ID NO: 109663 - DNA, 30 bp, Artificial Sequence
  Synthetic oligonucleotide
tcgtacgtggtgaaagagcaacttatccca

SEQ ID NO: 109664 - DNA, 30 bp, Artificial Sequence
  Synthetic oligonucleotide
caaccaggtaggaggcactactgtctccca

SEQ ID NO: 109665 - DNA, 30 bp, Artificial Sequence
  Synthetic oligonucleotide
gctgaatgggtgtaacgatgagaagtccca

SEQ ID NO: 109666 - DNA, 30 bp, Artificial Sequence
  Synthetic oligonucleotide
agcggaccatttcgctcataagcaaagcca

SEQ ID NO: 109667 - DNA, 30 bp, Artificial Sequence
  Synthetic oligonucleotide
ccaattgtgaggtcgggataaataaagcca

SEQ ID NO: 109668 - DNA, 30 bp, Artificial Sequence
  Synthetic oligonucleotide
tcggggttaatgcacatgattaggaagcca

SEQ ID NO: 109669 - DNA, 30 bp, Artificial Sequence
  Synthetic oligonucleotide
atacgcctaaaacgaatctcaactgagcca

SEQ ID NO: 109670 - DNA, 30 bp, Artificial Sequence
  Synthetic oligonucleotide
gtccataattacgtgttcccgtgtgagcca

SEQ ID NO: 109671 - DNA, 30 bp, Artificial Sequence
  Synthetic oligonucleotide
ggtgatgaatctaccggtatcggatagcca

SEQ ID NO: 109672 - DNA, 30 bp, Artificial Sequence
  Synthetic oligonucleotide
gggatcgttctgggtcatcctggttagcca

SEQ ID NO: 109673 - DNA, 31 bp, Artificial Sequence
  Synthetic oligonucleotide
cgggggaagttctgaatgtacatgttagcca

SEQ ID NO: 109674 - DNA, 30 bp, Artificial Sequence
  Synthetic oligonucleotide
ggcaaaaatctatcgtgaagtacaacgcca

SEQ ID NO: 109675 - DNA, 30 bp, Artificial Sequence
  Synthetic oligonucleotide
aaacggtaaacatggagtccttacacgcca

SEQ ID NO: 109676 - DNA, 30 bp, Artificial Sequence
  Synthetic oligonucleotide
agccataggccgagaaactgtagtacgcca

SEQ ID NO: 109677 - DNA, 30 bp, Artificial Sequence
  Synthetic oligonucleotide
ggagcgcgcaatgtgataaccgcaccgcca

SEQ ID NO: 109678 - DNA, 30 bp, Artificial Sequence
  Synthetic oligonucleotide
aatatgaccgaaaaatgcggaagaccgcca

SEQ ID NO: 109679 - DNA, 30 bp, Artificial Sequence
  Synthetic oligonucleotide
agacccgaacgcgcaattgctcgaccgcca

SEQ ID NO: 109680 - DNA, 30 bp, Artificial Sequence
  Synthetic oligonucleotide
atacatacacatagctgcaatgagccgcca

SEQ ID NO: 109681 - DNA, 30 bp, Artificial Sequence
  Synthetic oligonucleotide
tgcgaagatctgacaccgttagcgccgcca

SEQ ID NO: 109682 - DNA, 30 bp, Artificial Sequence
  Synthetic oligonucleotide
cgccacgtcgagtacttaggcaatccgcca

SEQ ID NO: 109683 - DNA, 30 bp, Artificial Sequence
  Synthetic oligonucleotide
tcacataggatacaccgggttcacgcgcca

SEQ ID NO: 109684 - DNA, 30 bp, Artificial Sequence
  Synthetic oligonucleotide
cctcctgtggattatactaacgtcgcgcca

SEQ ID NO: 109685 - DNA, 30 bp, Artificial Sequence
  Synthetic oligonucleotide
accttaagcttctagttgcgaagctcgcca

SEQ ID NO: 109686 - DNA, 30 bp, Artificial Sequence
  Synthetic oligonucleotide
tagatgtcacattttacacccgattcgcca

SEQ ID NO: 109687 - DNA, 30 bp, Artificial Sequence
  Synthetic oligonucleotide
gcatgggagcggagggcagaatagaggcca

SEQ ID NO: 109688 - DNA, 30 bp, Artificial Sequence
  Synthetic oligonucleotide
gagatctacacaccggacattcatcggcca

SEQ ID NO: 109689 - DNA, 30 bp, Artificial Sequence
  Synthetic oligonucleotide
tgggttcaaaacctcgagaatgcatggcca

SEQ ID NO: 109690 - DNA, 30 bp, Artificial Sequence
  Synthetic oligonucleotide
atccagggaacaatcgacctaggatggcca

SEQ ID NO: 109691 - DNA, 30 bp, Artificial Sequence
  Synthetic oligonucleotide
aacgaaagctacttaaatccataaatgcca

SEQ ID NO: 109692 - DNA, 30 bp, Artificial Sequence
  Synthetic oligonucleotide
cgtaacctagggttaaaaggcggcatgcca

SEQ ID NO: 109693 - DNA, 30 bp, Artificial Sequence
  Synthetic oligonucleotide
acgtagtcataagtatgcatctcgatgcca

SEQ ID NO: 109694 - DNA, 30 bp, Artificial Sequence
  Synthetic oligonucleotide
tgaaaaacgccacaacattagattatgcca

SEQ ID NO: 109695 - DNA, 30 bp, Artificial Sequence
  Synthetic oligonucleotide
catatatcgggaaaaatggggactctgcca

SEQ ID NO: 109696 - DNA, 30 bp, Artificial Sequence
  Synthetic oligonucleotide
gcgaataccacagctgaggaatcggtgcca

SEQ ID NO: 109697 - DNA, 30 bp, Artificial Sequence
  Synthetic oligonucleotide
cacaacttatcggtaattagcctggtgcca

SEQ ID NO: 109698 - DNA, 30 bp, Artificial Sequence
  Synthetic oligonucleotide
tgaactatgaaaaaaagtgaccccttgcca

SEQ ID NO: 109699 - DNA, 30 bp, Artificial Sequence
  Synthetic oligonucleotide
tcgtcgcaccgcaggcctatcgtcaatcca

SEQ ID NO: 109700 - DNA, 30 bp, Artificial Sequence
  Synthetic oligonucleotide
catggaatgtgatatggaaacctgaatcca

SEQ ID NO: 109701 - DNA, 30 bp, Artificial Sequence
  Synthetic oligonucleotide
aaaactccgggcaaaaaagcgactaatcca

SEQ ID NO: 109702 - DNA, 30 bp, Artificial Sequence
  Synthetic oligonucleotide
atcgcgggttaagtaagtgcctgtcatcca

SEQ ID NO: 109703 - DNA, 30 bp, Artificial Sequence
  Synthetic oligonucleotide
ctacggtccagtagtgccgatagcgatcca

SEQ ID NO: 109704 - DNA, 30 bp, Artificial Sequence
  Synthetic oligonucleotide
aataacgtggattgtacgtggtctgatcca

SEQ ID NO: 109705 - DNA, 30 bp, Artificial Sequence
  Synthetic oligonucleotide
cgggattctgacgatttgacaattgatcca

SEQ ID NO: 109706 - DNA, 30 bp, Artificial Sequence
  Synthetic oligonucleotide
gacttagccactgttaaaacattctatcca

SEQ ID NO: 109707 - DNA, 30 bp, Artificial Sequence
  Synthetic oligonucleotide
gcgcaacctaccggggtcggcatgactcca

SEQ ID NO: 109708 - DNA, 30 bp, Artificial Sequence
  Synthetic oligonucleotide
ggaccctcccactgctaaagtatccctcca

SEQ ID NO: 109709 - DNA, 30 bp, Artificial Sequence
  Synthetic oligonucleotide
agctaacgtaacggaaggtgactgcctcca

SEQ ID NO: 109710 - DNA, 30 bp, Artificial Sequence
  Synthetic oligonucleotide
gggagccaaggaacgcaccctgtggctcca

SEQ ID NO: 109711 - DNA, 30 bp, Artificial Sequence
  Synthetic oligonucleotide
tacgtattagctaaggaacgtcttgctcca

SEQ ID NO: 109712 - DNA, 30 bp, Artificial Sequence
  Synthetic oligonucleotide
acgaagaagggtctcttggggtgttctcca

SEQ ID NO: 109713 - DNA, 30 bp, Artificial Sequence
  Synthetic oligonucleotide
gtgcaccttcgacatcacctcaacagtcca

SEQ ID NO: 109714 - DNA, 30 bp, Artificial Sequence
  Synthetic oligonucleotide
aaaggatgaaaattcaaccaaatccgtcca

SEQ ID NO: 109715 - DNA, 30 bp, Artificial Sequence
  Synthetic oligonucleotide
tcaagagttgctaggtcgaggcgtcgtcca

SEQ ID NO: 109716 - DNA, 30 bp, Artificial Sequence
  Synthetic oligonucleotide
ggaaacaaggcactcagattagtaggtcca

SEQ ID NO: 109717 - DNA, 30 bp, Artificial Sequence
  Synthetic oligonucleotide
taaaccagagatttcatctggcccggtcca

SEQ ID NO: 109718 - DNA, 30 bp, Artificial Sequence
  Synthetic oligonucleotide
ttaaggtggacatatagggtaagcggtcca

SEQ ID NO: 109719 - DNA, 30 bp, Artificial Sequence
  Synthetic oligonucleotide
tgaacgatataattagcgcaacgcggtcca

SEQ ID NO: 109720 - DNA, 30 bp, Artificial Sequence
  Synthetic oligonucleotide
ccatattggcattgggtcgaagtcggtcca

SEQ ID NO: 109721 - DNA, 30 bp, Artificial Sequence
  Synthetic oligonucleotide
tagaccacctccgttgcagaaaagggtcca

SEQ ID NO: 109722 - DNA, 30 bp, Artificial Sequence
  Synthetic oligonucleotide
gagattctaaggtacatagcgtttggtcca

SEQ ID NO: 109723 - DNA, 30 bp, Artificial Sequence
  Synthetic oligonucleotide
acagagactgactcgtggtaaataattcca

SEQ ID NO: 109724 - DNA, 30 bp, Artificial Sequence
  Synthetic oligonucleotide
ggaacgaatcatcatattggacccattcca

SEQ ID NO: 109725 - DNA, 30 bp, Artificial Sequence
  Synthetic oligonucleotide
gtgggcaccatccaacgggagcctattcca

SEQ ID NO: 109726 - DNA, 30 bp, Artificial Sequence
  Synthetic oligonucleotide
ttgttgcggtgaaggctcgtcacgcttcca

SEQ ID NO: 109727 - DNA, 30 bp, Artificial Sequence
  Synthetic oligonucleotide
tctacaaattgttttgggccggaagttcca

SEQ ID NO: 109728 - DNA, 30 bp, Artificial Sequence
  Synthetic oligonucleotide
tcgagtaacacctggataataagagttcca

SEQ ID NO: 109729 - DNA, 30 bp, Artificial Sequence
  Synthetic oligonucleotide
gtggggctggcaggaacaattggaaaagca

SEQ ID NO: 109730 - DNA, 30 bp, Artificial Sequence
  Synthetic oligonucleotide
tgggggaggccatcagttcggggcaaagca

SEQ ID NO: 109731 - DNA, 30 bp, Artificial Sequence
  Synthetic oligonucleotide
gagctaggcaatttctttcatgtcaaagca

SEQ ID NO: 109732 - DNA, 30 bp, Artificial Sequence
  Synthetic oligonucleotide
agcctgaatgaaatacgttttaataaagca

SEQ ID NO: 109733 - DNA, 30 bp, Artificial Sequence
  Synthetic oligonucleotide
agcaatacctgggtcatccaaagtaaagca

SEQ ID NO: 109734 - DNA, 30 bp, Artificial Sequence
  Synthetic oligonucleotide
actaacgtccttcactttagggcacaagca

SEQ ID NO: 109735 - DNA, 30 bp, Artificial Sequence
  Synthetic oligonucleotide
aagcgagataggatttgggcaagtcaagca

SEQ ID NO: 109736 - DNA, 30 bp, Artificial Sequence
  Synthetic oligonucleotide
agcggcctgagttaaccaggtgcagaagca

SEQ ID NO: 109737 - DNA, 30 bp, Artificial Sequence
  Synthetic oligonucleotide
ggtaaaagaagagcttgcaatctagaagca

SEQ ID NO: 109738 - DNA, 30 bp, Artificial Sequence
  Synthetic oligonucleotide
agtgtaattagggccactacagttgaagca

SEQ ID NO: 109739 - DNA, 30 bp, Artificial Sequence
  Synthetic oligonucleotide
cagaggataggagtcgccagcagcacagca

SEQ ID NO: 109740 - DNA, 30 bp, Artificial Sequence
  Synthetic oligonucleotide
atagtgctattacttatcaacgggacagca

SEQ ID NO: 109741 - DNA, 30 bp, Artificial Sequence
  Synthetic oligonucleotide
tctagctctgaattaagagtcattccagca

SEQ ID NO: 109742 - DNA, 30 bp, Artificial Sequence
  Synthetic oligonucleotide
cactgtttgtctcaacagcctcatgcagca

SEQ ID NO: 109743 - DNA, 30 bp, Artificial Sequence
  Synthetic oligonucleotide
agttatcgccacatgagggcggggtcagca

SEQ ID NO: 109744 - DNA, 30 bp, Artificial Sequence
  Synthetic oligonucleotide
tactaagccagtgacagggatcgttcagca

SEQ ID NO: 109745 - DNA, 30 bp, Artificial Sequence
  Synthetic oligonucleotide
taagttgttgagctcgaaggcgagagagca

SEQ ID NO: 109746 - DNA, 30 bp, Artificial Sequence
  Synthetic oligonucleotide
aaaccagggagaccgtttggttggagagca

SEQ ID NO: 109747 - DNA, 30 bp, Artificial Sequence
  Synthetic oligonucleotide
tgtgcattgcttggatcagtaggtagagca

SEQ ID NO: 109748 - DNA, 30 bp, Artificial Sequence
  Synthetic oligonucleotide
atgagcgtgtggacggaaggaagccgagca

SEQ ID NO: 109749 - DNA, 30 bp, Artificial Sequence
  Synthetic oligonucleotide
agcatgataaaattctgaggcatccgagca

SEQ ID NO: 109750 - DNA, 30 bp, Artificial Sequence
  Synthetic oligonucleotide
tgacctgggaacgggtaattatcgcgagca

SEQ ID NO: 109751 - DNA, 30 bp, Artificial Sequence
  Synthetic oligonucleotide
ggaacgggacccactacgtgcaggcgagca

SEQ ID NO: 109752 - DNA, 30 bp, Artificial Sequence
  Synthetic oligonucleotide
ggctaacaaggtgagattgaaactcgagca

SEQ ID NO: 109753 - DNA, 30 bp, Artificial Sequence
  Synthetic oligonucleotide
tgaccgagtttgtggcggaccaagggagca

SEQ ID NO: 109754 - DNA, 30 bp, Artificial Sequence
  Synthetic oligonucleotide
cgccgagagacagtatattcgtcctgagca

SEQ ID NO: 109755 - DNA, 30 bp, Artificial Sequence
  Synthetic oligonucleotide
tctgaacctaaaattcgaggcaattgagca

SEQ ID NO: 109756 - DNA, 30 bp, Artificial Sequence
  Synthetic oligonucleotide
cgtatcaatggggacactccgagttgagca

SEQ ID NO: 109757 - DNA, 30 bp, Artificial Sequence
  Synthetic oligonucleotide
tactgatcatgaaatctgcgatgaatagca

SEQ ID NO: 109758 - DNA, 30 bp, Artificial Sequence
  Synthetic oligonucleotide
aaccattatcgaaagactaatgtaatagca

SEQ ID NO: 109759 - DNA, 30 bp, Artificial Sequence
  Synthetic oligonucleotide
tcgggaatatcgcaaaaagagatcatagca

SEQ ID NO: 109760 - DNA, 30 bp, Artificial Sequence
  Synthetic oligonucleotide
gttgacaggtacctcggagtgtggatagca

SEQ ID NO: 109761 - DNA, 29 bp, Artificial Sequence
  Synthetic oligonucleotide
ccatgcaggttaacgtctatccactagca

SEQ ID NO: 109762 - DNA, 30 bp, Artificial Sequence
  Synthetic oligonucleotide
gtaacgaaggcatctcaagtatgtctagca

SEQ ID NO: 109763 - DNA, 30 bp, Artificial Sequence
  Synthetic oligonucleotide
ctgtgatgctactatcgtgcgaatttagca

SEQ ID NO: 109764 - DNA, 30 bp, Artificial Sequence
  Synthetic oligonucleotide
actacaaaggtgtcggttgaccggaacgca

SEQ ID NO: 109765 - DNA, 30 bp, Artificial Sequence
  Synthetic oligonucleotide
cggagtgtgccagctgggcacacacacgca

SEQ ID NO: 109766 - DNA, 30 bp, Artificial Sequence
  Synthetic oligonucleotide
tcgagagggtctggcgccaaatttcacgca

SEQ ID NO: 109767 - DNA, 30 bp, Artificial Sequence
  Synthetic oligonucleotide
cacgccaggacgacaaagcaggtggacgca

SEQ ID NO: 109768 - DNA, 30 bp, Artificial Sequence
  Synthetic oligonucleotide
atagtaggcgaggacgatacgtactacgca

SEQ ID NO: 109769 - DNA, 30 bp, Artificial Sequence
  Synthetic oligonucleotide
tctgccccgcggcgagataaacggtacgca

SEQ ID NO: 109770 - DNA, 30 bp, Artificial Sequence
  Synthetic oligonucleotide
gcgttcatcgaactcaaatgaagttacgca

SEQ ID NO: 109771 - DNA, 30 bp, Artificial Sequence
  Synthetic oligonucleotide
agctgccgagaaaacacgcagaacaccgca

SEQ ID NO: 109772 - DNA, 30 bp, Artificial Sequence
  Synthetic oligonucleotide
ttacattgggcatatatggggcctaccgca

SEQ ID NO: 109773 - DNA, 30 bp, Artificial Sequence
  Synthetic oligonucleotide
aagctaacatattcaagtgactgacccgca

SEQ ID NO: 109774 - DNA, 30 bp, Artificial Sequence
  Synthetic oligonucleotide
catggcgcttggtaagatctagtccccgca

SEQ ID NO: 109775 - DNA, 30 bp, Artificial Sequence
  Synthetic oligonucleotide
catgcgtaagctctgtagatcagggccgca

SEQ ID NO: 109776 - DNA, 30 bp, Artificial Sequence
  Synthetic oligonucleotide
agggctttgtcaattaggtaatgtgccgca

SEQ ID NO: 109777 - DNA, 30 bp, Artificial Sequence
  Synthetic oligonucleotide
ctcatagccagtccatcgcttcaatccgca

SEQ ID NO: 109778 - DNA, 30 bp, Artificial Sequence
  Synthetic oligonucleotide
gtgaacgcgataactaccggacactccgca

SEQ ID NO: 109779 - DNA, 30 bp, Artificial Sequence
  Synthetic oligonucleotide
ggtagggaaccgctcataatagtcagcgca

SEQ ID NO: 109780 - DNA, 30 bp, Artificial Sequence
  Synthetic oligonucleotide
aggagttaccgatcgcccaagtcgagcgca

SEQ ID NO: 109781 - DNA, 30 bp, Artificial Sequence
  Synthetic oligonucleotide
gagatatgattgtcggcctcggagcgcgca

SEQ ID NO: 109782 - DNA, 30 bp, Artificial Sequence
  Synthetic oligonucleotide
ggcgtcgaatttgtgttgagcaatcgcgca

SEQ ID NO: 109783 - DNA, 30 bp, Artificial Sequence
  Synthetic oligonucleotide
ctgatatcattcgtccttcgcgagggcgca

SEQ ID NO: 109784 - DNA, 30 bp, Artificial Sequence
  Synthetic oligonucleotide
gctaggaagggttgctgaagtaaatgcgca

SEQ ID NO: 109785 - DNA, 30 bp, Artificial Sequence
  Synthetic oligonucleotide
cccccaagtcgccgactccatacatgcgca

SEQ ID NO: 109786 - DNA, 30 bp, Artificial Sequence
  Synthetic oligonucleotide
acaagacaaggcatacatttgcccatcgca

SEQ ID NO: 109787 - DNA, 30 bp, Artificial Sequence
  Synthetic oligonucleotide
caagtacggtaagtcggtggctcactcgca

SEQ ID NO: 109788 - DNA, 30 bp, Artificial Sequence
  Synthetic oligonucleotide
acgcgttcgttatgtcgtggcagagtcgca

SEQ ID NO: 109789 - DNA, 30 bp, Artificial Sequence
  Synthetic oligonucleotide
ggggagaagttcacgtccagggacttcgca

SEQ ID NO: 109790 - DNA, 30 bp, Artificial Sequence
  Synthetic oligonucleotide
aaggagttgaacccatatggcaggttcgca

SEQ ID NO: 109791 - DNA, 30 bp, Artificial Sequence
  Synthetic oligonucleotide
cgcctcctcaaaacgccggaggaaaaggca

SEQ ID NO: 109792 - DNA, 30 bp, Artificial Sequence
  Synthetic oligonucleotide
ttggaacaagccgtagcgatcggaaaggca

SEQ ID NO: 109793 - DNA, 30 bp, Artificial Sequence
  Synthetic oligonucleotide
tcagggcgggaagatgaaaatcccaaggca

SEQ ID NO: 109794 - DNA, 30 bp, Artificial Sequence
  Synthetic oligonucleotide
ggttattacgcatggactaatcggaaggca

SEQ ID NO: 109795 - DNA, 30 bp, Artificial Sequence
  Synthetic oligonucleotide
gagtcgattctcgttctatgtattaaggca

SEQ ID NO: 109796 - DNA, 30 bp, Artificial Sequence
  Synthetic oligonucleotide
gtcaagatagggcttatgcagtagcaggca

SEQ ID NO: 109797 - DNA, 30 bp, Artificial Sequence
  Synthetic oligonucleotide
tctcggcagtggtcacagtcgggtcaggca

SEQ ID NO: 109798 - DNA, 30 bp, Artificial Sequence
  Synthetic oligonucleotide
agcaagcgagggagatgtatcgtcgaggca

SEQ ID NO: 109799 - DNA, 30 bp, Artificial Sequence
  Synthetic oligonucleotide
tcccggtagctacgatccggcagggaggca

SEQ ID NO: 109800 - DNA, 30 bp, Artificial Sequence
  Synthetic oligonucleotide
aacggaatagtgctctcgcgcaatgaggca

SEQ ID NO: 109801 - DNA, 30 bp, Artificial Sequence
  Synthetic oligonucleotide
ttccattgaagcgaaagagtgtgtgaggca

SEQ ID NO: 109802 - DNA, 30 bp, Artificial Sequence
  Synthetic oligonucleotide
atgcgcatgagaaggttgagggcataggca

SEQ ID NO: 109803 - DNA, 30 bp, Artificial Sequence
  Synthetic oligonucleotide
ggtgcatcagcgggagactggtgctaggca

SEQ ID NO: 109804 - DNA, 30 bp, Artificial Sequence
  Synthetic oligonucleotide
ttgaaaccacacctggtcggccgaacggca

SEQ ID NO: 109805 - DNA, 30 bp, Artificial Sequence
  Synthetic oligonucleotide
actctgaaaccatatatcttggggacggca

SEQ ID NO: 109806 - DNA, 30 bp, Artificial Sequence
  Synthetic oligonucleotide
cttggccaacctggggccgaatctccggca

SEQ ID NO: 109807 - DNA, 30 bp, Artificial Sequence
  Synthetic oligonucleotide
ggtgatcgagtacgcacttcgttagcggca

SEQ ID NO: 109808 - DNA, 30 bp, Artificial Sequence
  Synthetic oligonucleotide
aagttagtggtatcctcaacttcggcggca

SEQ ID NO: 109809 - DNA, 30 bp, Artificial Sequence
  Synthetic oligonucleotide
aggtctgtgaccaccacagtaagggcggca

SEQ ID NO: 109810 - DNA, 30 bp, Artificial Sequence
  Synthetic oligonucleotide
gggtcgaccggacacatgttttctgcggca

SEQ ID NO: 109811 - DNA, 30 bp, Artificial Sequence
  Synthetic oligonucleotide
cgccatgagtcgggtcaccggcagtcggca

SEQ ID NO: 109812 - DNA, 30 bp, Artificial Sequence
  Synthetic oligonucleotide
cactgtaggttgtagacaaggtagtcggca

SEQ ID NO: 109813 - DNA, 30 bp, Artificial Sequence
  Synthetic oligonucleotide
tgtgttgcacacgggtccccagcaagggca

SEQ ID NO: 109814 - DNA, 30 bp, Artificial Sequence
  Synthetic oligonucleotide
cgttacgactaaatgcgacgtcgaagggca

SEQ ID NO: 109815 - DNA, 30 bp, Artificial Sequence
  Synthetic oligonucleotide
cgctgttagagtcatcacgggtgacgggca

SEQ ID NO: 109816 - DNA, 30 bp, Artificial Sequence
  Synthetic oligonucleotide
tggggcccgttaaatgcaggcagaggggca

SEQ ID NO: 109817 - DNA, 30 bp, Artificial Sequence
  Synthetic oligonucleotide
cgaataaatgtctagtcaataaacggggca

SEQ ID NO: 109818 - DNA, 30 bp, Artificial Sequence
  Synthetic oligonucleotide
gaaggatagaacctcgtttactgcggggca

SEQ ID NO: 109819 - DNA, 30 bp, Artificial Sequence
  Synthetic oligonucleotide
cggaggttacggccgtacgaccggggggca

SEQ ID NO: 109820 - DNA, 30 bp, Artificial Sequence
  Synthetic oligonucleotide
cgccattctagtgacgtaccgctgtgggca

SEQ ID NO: 109821 - DNA, 30 bp, Artificial Sequence
  Synthetic oligonucleotide
gctcagggacgtcctgtataagacatggca

SEQ ID NO: 109822 - DNA, 30 bp, Artificial Sequence
  Synthetic oligonucleotide
ccttgctcattaatacggaatatcatggca

SEQ ID NO: 109823 - DNA, 30 bp, Artificial Sequence
  Synthetic oligonucleotide
caaagctgtggaattgtcgttgggatggca

SEQ ID NO: 109824 - DNA, 30 bp, Artificial Sequence
  Synthetic oligonucleotide
aagaagagtcatccggtgtaagatatggca

SEQ ID NO: 109825 - DNA, 30 bp, Artificial Sequence
  Synthetic oligonucleotide
acgacatatttaagctcctgtcgtatggca

SEQ ID NO: 109826 - DNA, 30 bp, Artificial Sequence
  Synthetic oligonucleotide
caaaccggagtgaggtcacgcccactggca

SEQ ID NO: 109827 - DNA, 30 bp, Artificial Sequence
  Synthetic oligonucleotide
agtatccgatcaacaatccggcatctggca

SEQ ID NO: 109828 - DNA, 30 bp, Artificial Sequence
  Synthetic oligonucleotide
cggctatcacgagttttaaatcttctggca

SEQ ID NO: 109829 - DNA, 30 bp, Artificial Sequence
  Synthetic oligonucleotide
ggatacaatccggaatatggtaaagtggca

SEQ ID NO: 109830 - DNA, 30 bp, Artificial Sequence
  Synthetic oligonucleotide
tagcgaaggggagacaggttcaacgtggca

SEQ ID NO: 109831 - DNA, 30 bp, Artificial Sequence
  Synthetic oligonucleotide
agccgcgctaaaattccatagctcgtggca

SEQ ID NO: 109832 - DNA, 30 bp, Artificial Sequence
  Synthetic oligonucleotide
accgggcgtcattgtgcaacaagattggca

SEQ ID NO: 109833 - DNA, 30 bp, Artificial Sequence
  Synthetic oligonucleotide
accagtcgagaattctctgcggtattggca

SEQ ID NO: 109834 - DNA, 30 bp, Artificial Sequence
  Synthetic oligonucleotide
ctccgataggatcgtactgacgacttggca

SEQ ID NO: 109835 - DNA, 30 bp, Artificial Sequence
  Synthetic oligonucleotide
aagtataacacacagcggatgtgtttggca

SEQ ID NO: 109836 - DNA, 30 bp, Artificial Sequence
  Synthetic oligonucleotide
atcctaaaatgatacagatacaaaaatgca

SEQ ID NO: 109837 - DNA, 30 bp, Artificial Sequence
  Synthetic oligonucleotide
gctgatgctggtctataggccctcaatgca

SEQ ID NO: 109838 - DNA, 30 bp, Artificial Sequence
  Synthetic oligonucleotide
taggtttgaggcagtgacgagaataatgca

SEQ ID NO: 109839 - DNA, 30 bp, Artificial Sequence
  Synthetic oligonucleotide
acaaacatgatctctcaagtacataatgca

SEQ ID NO: 109840 - DNA, 30 bp, Artificial Sequence
  Synthetic oligonucleotide
atatctaagtaagtgtgaaggggtaatgca

SEQ ID NO: 109841 - DNA, 30 bp, Artificial Sequence
  Synthetic oligonucleotide
agccatagtgctgtacggaagtcacatgca

SEQ ID NO: 109842 - DNA, 30 bp, Artificial Sequence
  Synthetic oligonucleotide
aaccgctaatatcgcgtcattctacatgca

SEQ ID NO: 109843 - DNA, 30 bp, Artificial Sequence
  Synthetic oligonucleotide
tgctaaagaaaagccccaaaataagatgca

SEQ ID NO: 109844 - DNA, 30 bp, Artificial Sequence
  Synthetic oligonucleotide
caccattgcattgacaataaagtggatgca

SEQ ID NO: 109845 - DNA, 31 bp, Artificial Sequence
  Synthetic oligonucleotide
tccttcagggttcaacacgattttggatgca

SEQ ID NO: 109846 - DNA, 30 bp, Artificial Sequence
  Synthetic oligonucleotide
caagtcggttattacagaagaacgtatgca

SEQ ID NO: 109847 - DNA, 30 bp, Artificial Sequence
  Synthetic oligonucleotide
gaccggccaaagataggattaaggactgca

SEQ ID NO: 109848 - DNA, 30 bp, Artificial Sequence
  Synthetic oligonucleotide
aacagaagatcatccagttgagtgactgca

SEQ ID NO: 109849 - DNA, 30 bp, Artificial Sequence
  Synthetic oligonucleotide
atgattagtgagcctgaccagcgtactgca

SEQ ID NO: 109850 - DNA, 30 bp, Artificial Sequence
  Synthetic oligonucleotide
aagtcttacagccgacatctccagcctgca

SEQ ID NO: 109851 - DNA, 30 bp, Artificial Sequence
  Synthetic oligonucleotide
ttgacaacgggagcatctaacccgcctgca

SEQ ID NO: 109852 - DNA, 30 bp, Artificial Sequence
  Synthetic oligonucleotide
taccgtgacgggaccgttgctagtcctgca

SEQ ID NO: 109853 - DNA, 29 bp, Artificial Sequence
  Synthetic oligonucleotide
ctgcaccagtggagccaggacaagctgca

SEQ ID NO: 109854 - DNA, 30 bp, Artificial Sequence
  Synthetic oligonucleotide
ggtacaatgcaagcttcccatacagctgca

SEQ ID NO: 109855 - DNA, 30 bp, Artificial Sequence
  Synthetic oligonucleotide
agatcagtcccatcggtacggggcgctgca

SEQ ID NO: 109856 - DNA, 30 bp, Artificial Sequence
  Synthetic oligonucleotide
acccccatcgagaccgcgaacctatctgca

SEQ ID NO: 109857 - DNA, 30 bp, Artificial Sequence
  Synthetic oligonucleotide
tgaaaaaatacttacgaagaccggtctgca

SEQ ID NO: 109858 - DNA, 30 bp, Artificial Sequence
  Synthetic oligonucleotide
aggctttcctcggtgtcctggtgttctgca

SEQ ID NO: 109859 - DNA, 30 bp, Artificial Sequence
  Synthetic oligonucleotide
tcgaacgactgtcgtggtgcgtaaagtgca

SEQ ID NO: 109860 - DNA, 30 bp, Artificial Sequence
  Synthetic oligonucleotide
tccatgtatgtagcggtataggttagtgca

SEQ ID NO: 109861 - DNA, 30 bp, Artificial Sequence
  Synthetic oligonucleotide
atgcatcgcaggacttggtgacaccgtgca

SEQ ID NO: 109862 - DNA, 30 bp, Artificial Sequence
  Synthetic oligonucleotide
gtcgcctgtctcctttcctcgtcccgtgca

SEQ ID NO: 109863 - DNA, 30 bp, Artificial Sequence
  Synthetic oligonucleotide
ggagatgtgcccacctggtaatgcggtgca

SEQ ID NO: 109864 - DNA, 30 bp, Artificial Sequence
  Synthetic oligonucleotide
taacgcccaagtaaagcatgatcgggtgca

SEQ ID NO: 109865 - DNA, 30 bp, Artificial Sequence
  Synthetic oligonucleotide
ggcgagagctcaggctcgttgtttggtgca

SEQ ID NO: 109866 - DNA, 30 bp, Artificial Sequence
  Synthetic oligonucleotide
ggtaagtatctgcagagtttgtcatgtgca

SEQ ID NO: 109867 - DNA, 31 bp, Artificial Sequence
  Synthetic oligonucleotide
taataaagagtgccaagatgcactctgtgca

SEQ ID NO: 109868 - DNA, 30 bp, Artificial Sequence
  Synthetic oligonucleotide
tcgattcataccaggtattctgagtgtgca

SEQ ID NO: 109869 - DNA, 30 bp, Artificial Sequence
  Synthetic oligonucleotide
aaaataacaaggacgtatggtacgtgtgca

SEQ ID NO: 109870 - DNA, 30 bp, Artificial Sequence
  Synthetic oligonucleotide
acctctaaggcgttgcgtcaacgttgtgca

SEQ ID NO: 109871 - DNA, 30 bp, Artificial Sequence
  Synthetic oligonucleotide
aaggacttggtccagtggaccaggattgca

SEQ ID NO: 109872 - DNA, 30 bp, Artificial Sequence
  Synthetic oligonucleotide
tagcacatcaggtacagtaaaaggcttgca

SEQ ID NO: 109873 - DNA, 30 bp, Artificial Sequence
  Synthetic oligonucleotide
ggttagcgtacgtccatactgggagttgca

SEQ ID NO: 109874 - DNA, 30 bp, Artificial Sequence
  Synthetic oligonucleotide
cgtgttaacaacaaacgtggttacgttgca

SEQ ID NO: 109875 - DNA, 30 bp, Artificial Sequence
  Synthetic oligonucleotide
tggcgctcggacctctcgaaggatgttgca

SEQ ID NO: 109876 - DNA, 30 bp, Artificial Sequence
  Synthetic oligonucleotide
tctagcacatagaagttggggccaaaatca

SEQ ID NO: 109877 - DNA, 30 bp, Artificial Sequence
  Synthetic oligonucleotide
gttatgggacatcgattgcttctaaaatca

SEQ ID NO: 109878 - DNA, 30 bp, Artificial Sequence
  Synthetic oligonucleotide
ccccacgggtccgaataacacacgaaatca

SEQ ID NO: 109879 - DNA, 30 bp, Artificial Sequence
  Synthetic oligonucleotide
ggagcgccactacgctttatcatgaaatca

SEQ ID NO: 109880 - DNA, 30 bp, Artificial Sequence
  Synthetic oligonucleotide
tgcatagtttggatcgatgtgatgcaatca

SEQ ID NO: 109881 - DNA, 30 bp, Artificial Sequence
  Synthetic oligonucleotide
cctccgttcggtaagaaggtccgtcaatca

SEQ ID NO: 109882 - DNA, 30 bp, Artificial Sequence
  Synthetic oligonucleotide
ctgtcaattcagattttccaaaaagaatca

SEQ ID NO: 109883 - DNA, 30 bp, Artificial Sequence
  Synthetic oligonucleotide
tctgaatagcgtaaggggcacaccgaatca

SEQ ID NO: 109884 - DNA, 30 bp, Artificial Sequence
  Synthetic oligonucleotide
tcggacatgcagggagtccgcatcgaatca

SEQ ID NO: 109885 - DNA, 30 bp, Artificial Sequence
  Synthetic oligonucleotide
tataggcgacccgacgcgaaaggtgaatca

SEQ ID NO: 109886 - DNA, 30 bp, Artificial Sequence
  Synthetic oligonucleotide
taaagtactcagacttctacaagataatca

SEQ ID NO: 109887 - DNA, 30 bp, Artificial Sequence
  Synthetic oligonucleotide
ggaatccagtaagccgaaatctgataatca

SEQ ID NO: 109888 - DNA, 30 bp, Artificial Sequence
  Synthetic oligonucleotide
actactacgtgagtctaacagggaacatca

SEQ ID NO: 109889 - DNA, 30 bp, Artificial Sequence
  Synthetic oligonucleotide
ctaagcgaactgcagcgacccaacacatca

SEQ ID NO: 109890 - DNA, 30 bp, Artificial Sequence
  Synthetic oligonucleotide
cttgcttatcgtaaaagcggaagtacatca

SEQ ID NO: 109891 - DNA, 30 bp, Artificial Sequence
  Synthetic oligonucleotide
cgtatgtgaaccgcgttatacgaaccatca

SEQ ID NO: 109892 - DNA, 30 bp, Artificial Sequence
  Synthetic oligonucleotide
ccatagtgctacgacactcccggcgcatca

SEQ ID NO: 109893 - DNA, 30 bp, Artificial Sequence
  Synthetic oligonucleotide
gcagctggtacgcgtggcaacaaggcatca

SEQ ID NO: 109894 - DNA, 30 bp, Artificial Sequence
  Synthetic oligonucleotide
gttaacaaggtaccctgggaaggtgcatca

SEQ ID NO: 109895 - DNA, 30 bp, Artificial Sequence
  Synthetic oligonucleotide
tgggctcgagcggaattgtcgaagtcatca

SEQ ID NO: 109896 - DNA, 30 bp, Artificial Sequence
  Synthetic oligonucleotide
atgggcatgcctcacccccatgattcatca

SEQ ID NO: 109897 - DNA, 30 bp, Artificial Sequence
  Synthetic oligonucleotide
tcctaagacgaaccggaagaatcttcatca

SEQ ID NO: 109898 - DNA, 30 bp, Artificial Sequence
  Synthetic oligonucleotide
cgccttgacatggataggagcggttcatca

SEQ ID NO: 109899 - DNA, 30 bp, Artificial Sequence
  Synthetic oligonucleotide
gggtgagtccgctcgggtaccgtttcatca

SEQ ID NO: 109900 - DNA, 30 bp, Artificial Sequence
  Synthetic oligonucleotide
tccgagcggttgcgcagacacacaagatca

SEQ ID NO: 109901 - DNA, 30 bp, Artificial Sequence
  Synthetic oligonucleotide
accgggaccatggatacacggacaagatca

SEQ ID NO: 109902 - DNA, 30 bp, Artificial Sequence
  Synthetic oligonucleotide
aattaacaacccatagactatcgaagatca

SEQ ID NO: 109903 - DNA, 30 bp, Artificial Sequence
  Synthetic oligonucleotide
cacctttaagaaggaccgttacgtagatca

SEQ ID NO: 109904 - DNA, 30 bp, Artificial Sequence
  Synthetic oligonucleotide
ggtgagctctaatattaaaggtgacgatca

SEQ ID NO: 109905 - DNA, 30 bp, Artificial Sequence
  Synthetic oligonucleotide
atgcgaccattaatcctgcattcgggatca

SEQ ID NO: 109906 - DNA, 30 bp, Artificial Sequence
  Synthetic oligonucleotide
tgagacgaaggttcatcacgcgatggatca

SEQ ID NO: 109907 - DNA, 30 bp, Artificial Sequence
  Synthetic oligonucleotide
agcgaccgaccatccagcgggtatggatca

SEQ ID NO: 109908 - DNA, 30 bp, Artificial Sequence
  Synthetic oligonucleotide
tgaccgcaggaagtgcgaggggctggatca

SEQ ID NO: 109909 - DNA, 30 bp, Artificial Sequence
  Synthetic oligonucleotide
tctgggccattaaacattcgcccgtgatca

SEQ ID NO: 109910 - DNA, 30 bp, Artificial Sequence
  Synthetic oligonucleotide
cacaggcgacggtgtggtccgaattgatca

SEQ ID NO: 109911 - DNA, 30 bp, Artificial Sequence
  Synthetic oligonucleotide
tagatccaataggtcaagggggccatatca

SEQ ID NO: 109912 - DNA, 30 bp, Artificial Sequence
  Synthetic oligonucleotide
cgcatctcgcgtaatgggagtcatatatca

SEQ ID NO: 109913 - DNA, 30 bp, Artificial Sequence
  Synthetic oligonucleotide
tgccttattcgataatgggatcaagtatca

SEQ ID NO: 109914 - DNA, 30 bp, Artificial Sequence
  Synthetic oligonucleotide
gaacaagactggaaagtctagggagtatca

SEQ ID NO: 109915 - DNA, 30 bp, Artificial Sequence
  Synthetic oligonucleotide
cggccagctggccacgccttactagtatca

SEQ ID NO: 109916 - DNA, 30 bp, Artificial Sequence
  Synthetic oligonucleotide
acggcatagcatgtgacatctcaggtatca

SEQ ID NO: 109917 - DNA, 30 bp, Artificial Sequence
  Synthetic oligonucleotide
taggttatgggcactaagatcgcggtatca

SEQ ID NO: 109918 - DNA, 30 bp, Artificial Sequence
  Synthetic oligonucleotide
ccgtgaatgtcatgggggtaactgttatca

SEQ ID NO: 109919 - DNA, 30 bp, Artificial Sequence
  Synthetic oligonucleotide
gcaacgtaggggatggaccccactttatca

SEQ ID NO: 109920 - DNA, 30 bp, Artificial Sequence
  Synthetic oligonucleotide
aggttagcgcaccactagacacataactca

SEQ ID NO: 109921 - DNA, 30 bp, Artificial Sequence
  Synthetic oligonucleotide
ccggccctagtctgcgtagagccatactca

SEQ ID NO: 109922 - DNA, 30 bp, Artificial Sequence
  Synthetic oligonucleotide
ttggggtatcaaacgcatacttattactca

SEQ ID NO: 109923 - DNA, 30 bp, Artificial Sequence
  Synthetic oligonucleotide
ccacaagaaagtgttcggtattacacctca

SEQ ID NO: 109924 - DNA, 30 bp, Artificial Sequence
  Synthetic oligonucleotide
aatactagtccacgcgactccagagcctca

SEQ ID NO: 109925 - DNA, 30 bp, Artificial Sequence
  Synthetic oligonucleotide
ccatcctcctgggttctgggttaggcctca

SEQ ID NO: 109926 - DNA, 30 bp, Artificial Sequence
  Synthetic oligonucleotide
gcccaaaacagcctggcggtccaatcctca

SEQ ID NO: 109927 - DNA, 30 bp, Artificial Sequence
  Synthetic oligonucleotide
gggggactgaattcttaaaacccctcctca

SEQ ID NO: 109928 - DNA, 30 bp, Artificial Sequence
  Synthetic oligonucleotide
cactgtgctcaacttgaattggcaagctca

SEQ ID NO: 109929 - DNA, 30 bp, Artificial Sequence
  Synthetic oligonucleotide
catgcttgttctcactggtcaatgagctca

SEQ ID NO: 109930 - DNA, 30 bp, Artificial Sequence
  Synthetic oligonucleotide
tcttgaggatcgaagaaagataaacgctca

SEQ ID NO: 109931 - DNA, 30 bp, Artificial Sequence
  Synthetic oligonucleotide
cgcgggaccgcgatagactaagttcgctca

SEQ ID NO: 109932 - DNA, 30 bp, Artificial Sequence
  Synthetic oligonucleotide
ggacgggagatcagtttgagagacggctca

SEQ ID NO: 109933 - DNA, 30 bp, Artificial Sequence
  Synthetic oligonucleotide
taggaacacgctgttcacgcctccggctca

SEQ ID NO: 109934 - DNA, 30 bp, Artificial Sequence
  Synthetic oligonucleotide
gcctcactcaggcgggtgtcgagttgctca

SEQ ID NO: 109935 - DNA, 30 bp, Artificial Sequence
  Synthetic oligonucleotide
acggcgacattagaagctcaccctatctca

SEQ ID NO: 109936 - DNA, 30 bp, Artificial Sequence
  Synthetic oligonucleotide
caacacaagaacccgtcacccatactctca

SEQ ID NO: 109937 - DNA, 30 bp, Artificial Sequence
  Synthetic oligonucleotide
caatcgaatctcgttgtactaggaaagtca

SEQ ID NO: 109938 - DNA, 30 bp, Artificial Sequence
  Synthetic oligonucleotide
actttagtcccgaggtgaggtgttaagtca

SEQ ID NO: 109939 - DNA, 30 bp, Artificial Sequence
  Synthetic oligonucleotide
acagatgctcggccatctattgcacagtca

SEQ ID NO: 109940 - DNA, 30 bp, Artificial Sequence
  Synthetic oligonucleotide
aaggaatgactaacttagactacccagtca

SEQ ID NO: 109941 - DNA, 30 bp, Artificial Sequence
  Synthetic oligonucleotide
ggctagtcaagtgagagacgagtgcagtca

SEQ ID NO: 109942 - DNA, 30 bp, Artificial Sequence
  Synthetic oligonucleotide
cgatcccagacacgtgaaatagcagagtca

SEQ ID NO: 109943 - DNA, 30 bp, Artificial Sequence
  Synthetic oligonucleotide
taagcagtggagtaggcggggcgtgagtca

SEQ ID NO: 109944 - DNA, 30 bp, Artificial Sequence
  Synthetic oligonucleotide
taagtttgccgtgagagaccgctctagtca

SEQ ID NO: 109945 - DNA, 30 bp, Artificial Sequence
  Synthetic oligonucleotide
gggtccagaggagctgtataagggtagtca

SEQ ID NO: 109946 - DNA, 30 bp, Artificial Sequence
  Synthetic oligonucleotide
tctggccttggtatacgaaatctgtagtca

SEQ ID NO: 109947 - DNA, 30 bp, Artificial Sequence
  Synthetic oligonucleotide
ccgaaatgcaaactagggtcaatgacgtca

SEQ ID NO: 109948 - DNA, 31 bp, Artificial Sequence
  Synthetic oligonucleotide
cgatttaaacgaaattaaagaatgtacgtca

SEQ ID NO: 109949 - DNA, 30 bp, Artificial Sequence
  Synthetic oligonucleotide
tagcgctcggtcgcaaaaggaaacccgtca

SEQ ID NO: 109950 - DNA, 30 bp, Artificial Sequence
  Synthetic oligonucleotide
ctgcaaggatatgaaaggcgaaaggcgtca

SEQ ID NO: 109951 - DNA, 30 bp, Artificial Sequence
  Synthetic oligonucleotide
ctaaggatacggttcacatcgagggcgtca

SEQ ID NO: 109952 - DNA, 30 bp, Artificial Sequence
  Synthetic oligonucleotide
ctgccatgatcattggggagttcgtcgtca

SEQ ID NO: 109953 - DNA, 30 bp, Artificial Sequence
  Synthetic oligonucleotide
ccagtaagtaggatatgctgtggaaggtca

SEQ ID NO: 109954 - DNA, 30 bp, Artificial Sequence
  Synthetic oligonucleotide
tcccacaagtgtagacgatagcttaggtca

SEQ ID NO: 109955 - DNA, 30 bp, Artificial Sequence
  Synthetic oligonucleotide
tgtcaccgagtgggggcccggatgcggtca

SEQ ID NO: 109956 - DNA, 30 bp, Artificial Sequence
  Synthetic oligonucleotide
gcgcgtggaagcttactggtctttcggtca

SEQ ID NO: 109957 - DNA, 30 bp, Artificial Sequence
  Synthetic oligonucleotide
tcgcatggaatccggtcaaaatacgggtca

SEQ ID NO: 109958 - DNA, 30 bp, Artificial Sequence
  Synthetic oligonucleotide
agggaaagcgctgatattatcgcggggtca

SEQ ID NO: 109959 - DNA, 30 bp, Artificial Sequence
  Synthetic oligonucleotide
atcctgcagaggagtagccttgactggtca

SEQ ID NO: 109960 - DNA, 30 bp, Artificial Sequence
  Synthetic oligonucleotide
aacagtagccaccgcgcgataccgtggtca

SEQ ID NO: 109961 - DNA, 30 bp, Artificial Sequence
  Synthetic oligonucleotide
agagaggcgggcgtagctcctttgtggtca

SEQ ID NO: 109962 - DNA, 30 bp, Artificial Sequence
  Synthetic oligonucleotide
acgcattaggttggatcggtcgagctgtca

SEQ ID NO: 109963 - DNA, 30 bp, Artificial Sequence
  Synthetic oligonucleotide
catagccgtaggagttgcgcttgtctgtca

SEQ ID NO: 109964 - DNA, 30 bp, Artificial Sequence
  Synthetic oligonucleotide
caataatcactgtaagcctcgcgagtgtca

SEQ ID NO: 109965 - DNA, 30 bp, Artificial Sequence
  Synthetic oligonucleotide
gttgtgaaatagtttcgcatggcggtgtca

SEQ ID NO: 109966 - DNA, 30 bp, Artificial Sequence
  Synthetic oligonucleotide
cggccgccaattatgtgtgattgggtgtca

SEQ ID NO: 109967 - DNA, 30 bp, Artificial Sequence
  Synthetic oligonucleotide
cagaaggggatagttcagtcctctttgtca

SEQ ID NO: 109968 - DNA, 30 bp, Artificial Sequence
  Synthetic oligonucleotide
cagggctacgatgtgtgtttgggtttgtca

SEQ ID NO: 109969 - DNA, 30 bp, Artificial Sequence
  Synthetic oligonucleotide
gcgcatatcggtgcacgcggtataaattca

SEQ ID NO: 109970 - DNA, 30 bp, Artificial Sequence
  Synthetic oligonucleotide
gacagatgccggccctcacagtcgaattca

SEQ ID NO: 109971 - DNA, 30 bp, Artificial Sequence
  Synthetic oligonucleotide
agcaggtggtggggggtctaaatgaattca

SEQ ID NO: 109972 - DNA, 30 bp, Artificial Sequence
  Synthetic oligonucleotide
tcatcggtccggtgtaatctttacgattca

SEQ ID NO: 109973 - DNA, 30 bp, Artificial Sequence
  Synthetic oligonucleotide
acaacactatagtcaacacctacttattca

SEQ ID NO: 109974 - DNA, 30 bp, Artificial Sequence
  Synthetic oligonucleotide
gatggtcagcaatcatagcgttctacttca

SEQ ID NO: 109975 - DNA, 30 bp, Artificial Sequence
  Synthetic oligonucleotide
actatagataagaggtggccgcgtacttca

SEQ ID NO: 109976 - DNA, 30 bp, Artificial Sequence
  Synthetic oligonucleotide
aaaagagatcggcggccaattcggccttca

SEQ ID NO: 109977 - DNA, 30 bp, Artificial Sequence
  Synthetic oligonucleotide
agagaacgaacggcccgatgaagatcttca

SEQ ID NO: 109978 - DNA, 30 bp, Artificial Sequence
  Synthetic oligonucleotide
tggattcaatcaaagtaatgggtaagttca

SEQ ID NO: 109979 - DNA, 30 bp, Artificial Sequence
  Synthetic oligonucleotide
aggacctaattcaaaataggggtcagttca

SEQ ID NO: 109980 - DNA, 30 bp, Artificial Sequence
  Synthetic oligonucleotide
cactggtacggtgagcctctacagagttca

SEQ ID NO: 109981 - DNA, 30 bp, Artificial Sequence
  Synthetic oligonucleotide
tgcacgattaaaattggtgatgtgagttca

SEQ ID NO: 109982 - DNA, 30 bp, Artificial Sequence
  Synthetic oligonucleotide
aggatgagtaagttagtgctattgagttca

SEQ ID NO: 109983 - DNA, 30 bp, Artificial Sequence
  Synthetic oligonucleotide
cgctagcctttgtgggcactaagtagttca

SEQ ID NO: 109984 - DNA, 30 bp, Artificial Sequence
  Synthetic oligonucleotide
tgcgggcttgtcacagagagttcccgttca

SEQ ID NO: 109985 - DNA, 30 bp, Artificial Sequence
  Synthetic oligonucleotide
gctaggaaaagatgcaggtaggggcgttca

SEQ ID NO: 109986 - DNA, 30 bp, Artificial Sequence
  Synthetic oligonucleotide
tggccggtgtggatctaatgtagaggttca

SEQ ID NO: 109987 - DNA, 30 bp, Artificial Sequence
  Synthetic oligonucleotide
tgactcgataagttttgagtgcgtggttca

SEQ ID NO: 109988 - DNA, 30 bp, Artificial Sequence
  Synthetic oligonucleotide
tgggggagttatcttaattagctatgttca

SEQ ID NO: 109989 - DNA, 29 bp, Artificial Sequence
  Synthetic oligonucleotide
ggcaggaagcagatttgttgttaatttca

SEQ ID NO: 109990 - DNA, 30 bp, Artificial Sequence
  Synthetic oligonucleotide
ggcctcggaatattgcgtccagagatttca

SEQ ID NO: 109991 - DNA, 30 bp, Artificial Sequence
  Synthetic oligonucleotide
gtagatttcgaaaacgagccggctatttca

SEQ ID NO: 109992 - DNA, 30 bp, Artificial Sequence
  Synthetic oligonucleotide
gaatacaatcatggtaatctacagctttca

SEQ ID NO: 109993 - DNA, 30 bp, Artificial Sequence
  Synthetic oligonucleotide
tgcggcactggcaaatctcaaatgctttca

SEQ ID NO: 109994 - DNA, 30 bp, Artificial Sequence
  Synthetic oligonucleotide
gtcgcaatcaaggcctccaaagacttttca

SEQ ID NO: 109995 - DNA, 31 bp, Artificial Sequence
  Synthetic oligonucleotide
ctccgaggacagaatcataatcgagttttca

SEQ ID NO: 109996 - DNA, 30 bp, Artificial Sequence
  Synthetic oligonucleotide
gcggtgtacgttattaacgagagcaaaaga

SEQ ID NO: 109997 - DNA, 30 bp, Artificial Sequence
  Synthetic oligonucleotide
gaacctgccacctttaccaagcaccaaaga

SEQ ID NO: 109998 - DNA, 30 bp, Artificial Sequence
  Synthetic oligonucleotide
atggaccggctcgatgagatatgcgaaaga

SEQ ID NO: 109999 - DNA, 30 bp, Artificial Sequence
  Synthetic oligonucleotide
tatcggaggaagaatcgtcggttcgaaaga

SEQ ID NO: 110000 - DNA, 30 bp, Artificial Sequence
  Synthetic oligonucleotide
cgataatacacatattatcatacggaaaga

SEQ ID NO: 110001 - DNA, 30 bp, Artificial Sequence
  Synthetic oligonucleotide
acgtcacttaaatcaagtattctggaaaga

SEQ ID NO: 110002 - DNA, 30 bp, Artificial Sequence
  Synthetic oligonucleotide
tgactcacagtaggctatgcgtatgaaaga

SEQ ID NO: 110003 - DNA, 30 bp, Artificial Sequence
  Synthetic oligonucleotide
aataaccacccatgccagggaactgaaaga

SEQ ID NO: 110004 - DNA, 30 bp, Artificial Sequence
  Synthetic oligonucleotide
tcgcccacaatcaactcggcgagtgaaaga

SEQ ID NO: 110005 - DNA, 30 bp, Artificial Sequence
  Synthetic oligonucleotide
aaagctatgcaccgcaaacaagactaaaga

SEQ ID NO: 110006 - DNA, 30 bp, Artificial Sequence
  Synthetic oligonucleotide
cactagtaagaaaaagtttagatctaaaga

SEQ ID NO: 110007 - DNA, 30 bp, Artificial Sequence
  Synthetic oligonucleotide
gcaactaaataggaagcaacgagttaaaga

SEQ ID NO: 110008 - DNA, 30 bp, Artificial Sequence
  Synthetic oligonucleotide
cggttttgaggaagccctttaccgacaaga

SEQ ID NO: 110009 - DNA, 30 bp, Artificial Sequence
  Synthetic oligonucleotide
atcattgatcacccaccttaagttacaaga

SEQ ID NO: 110010 - DNA, 30 bp, Artificial Sequence
  Synthetic oligonucleotide
aatgagatgtatactcttatgacaccaaga

SEQ ID NO: 110011 - DNA, 30 bp, Artificial Sequence
  Synthetic oligonucleotide
actaatcggtattatcacccaggaccaaga

SEQ ID NO: 110012 - DNA, 30 bp, Artificial Sequence
  Synthetic oligonucleotide
gcgcgaatctaccacagtacaataccaaga

SEQ ID NO: 110013 - DNA, 30 bp, Artificial Sequence
  Synthetic oligonucleotide
aggtaccccattaaggtcatgggagcaaga

SEQ ID NO: 110014 - DNA, 30 bp, Artificial Sequence
  Synthetic oligonucleotide
tgatgacgtagaagatggcaatacgcaaga

SEQ ID NO: 110015 - DNA, 30 bp, Artificial Sequence
  Synthetic oligonucleotide
aacacgaacagacgggggtgcctcgcaaga

SEQ ID NO: 110016 - DNA, 30 bp, Artificial Sequence
  Synthetic oligonucleotide
gtcttagggcccgggaaaaattaggcaaga

SEQ ID NO: 110017 - DNA, 30 bp, Artificial Sequence
  Synthetic oligonucleotide
ggagcacggttcgcgctaagacatgcaaga

SEQ ID NO: 110018 - DNA, 30 bp, Artificial Sequence
  Synthetic oligonucleotide
ccacatgttgcgaaaagattttctgcaaga

SEQ ID NO: 110019 - DNA, 30 bp, Artificial Sequence
  Synthetic oligonucleotide
gtgctctccagggagacgacgaggtcaaga

SEQ ID NO: 110020 - DNA, 30 bp, Artificial Sequence
  Synthetic oligonucleotide
ttatcacagccacaatccacgaccagaaga

SEQ ID NO: 110021 - DNA, 30 bp, Artificial Sequence
  Synthetic oligonucleotide
atgtctaagtccacagatatgaagagaaga

SEQ ID NO: 110022 - DNA, 30 bp, Artificial Sequence
  Synthetic oligonucleotide
tgtattaggaccaggcgtcgtgggagaaga

SEQ ID NO: 110023 - DNA, 30 bp, Artificial Sequence
  Synthetic oligonucleotide
cctacgaccgcctgcagagttaatagaaga

SEQ ID NO: 110024 - DNA, 30 bp, Artificial Sequence
  Synthetic oligonucleotide
ggtcaagccgtatagttaagagacggaaga

SEQ ID NO: 110025 - DNA, 30 bp, Artificial Sequence
  Synthetic oligonucleotide
gacagtcttgattatgcgaactatggaaga

SEQ ID NO: 110026 - DNA, 30 bp, Artificial Sequence
  Synthetic oligonucleotide
tcggggaatgattaagcaggaatatgaaga

SEQ ID NO: 110027 - DNA, 29 bp, Artificial Sequence
  Synthetic oligonucleotide
aaagtgccaactgcaagggaacctgaaga

SEQ ID NO: 110028 - DNA, 30 bp, Artificial Sequence
  Synthetic oligonucleotide
cacggggtgtatacgcataaatagtgaaga

SEQ ID NO: 110029 - DNA, 30 bp, Artificial Sequence
  Synthetic oligonucleotide
tggagaagtgacggagtgccgaattgaaga

SEQ ID NO: 110030 - DNA, 30 bp, Artificial Sequence
  Synthetic oligonucleotide
caaaaatcacgttgggctcgtgatataaga

SEQ ID NO: 110031 - DNA, 30 bp, Artificial Sequence
  Synthetic oligonucleotide
gcccagagaggataccgcaagtaactaaga

SEQ ID NO: 110032 - DNA, 30 bp, Artificial Sequence
  Synthetic oligonucleotide
aacacacaaaataacgctgtcgcactaaga

SEQ ID NO: 110033 - DNA, 30 bp, Artificial Sequence
  Synthetic oligonucleotide
gcatgtaaaagtctcgcttgactactaaga

SEQ ID NO: 110034 - DNA, 30 bp, Artificial Sequence
  Synthetic oligonucleotide
aaaccgctctccagcaagtgtctactaaga

SEQ ID NO: 110035 - DNA, 30 bp, Artificial Sequence
  Synthetic oligonucleotide
caggggctgcttccgggtatacagctaaga

SEQ ID NO: 110036 - DNA, 30 bp, Artificial Sequence
  Synthetic oligonucleotide
cacacgttcgaatgggaggagtagctaaga

SEQ ID NO: 110037 - DNA, 31 bp, Artificial Sequence
  Synthetic oligonucleotide
cgttccagatgcgttaaatgtggcgctaaga

SEQ ID NO: 110038 - DNA, 30 bp, Artificial Sequence
  Synthetic oligonucleotide
atgtccggacatcaacgcggtacagtaaga

SEQ ID NO: 110039 - DNA, 30 bp, Artificial Sequence
  Synthetic oligonucleotide
attcgcgataccttagtgactgcagtaaga

SEQ ID NO: 110040 - DNA, 30 bp, Artificial Sequence
  Synthetic oligonucleotide
ctgaagagaattaactccccggacgtaaga

SEQ ID NO: 110041 - DNA, 30 bp, Artificial Sequence
  Synthetic oligonucleotide
accagttgcatcatcgccggagcggtaaga

SEQ ID NO: 110042 - DNA, 30 bp, Artificial Sequence
  Synthetic oligonucleotide
tcaagagaaagatttactgatagggtaaga

SEQ ID NO: 110043 - DNA, 30 bp, Artificial Sequence
  Synthetic oligonucleotide
gcgctggtgagctaagcgcctccattaaga

SEQ ID NO: 110044 - DNA, 30 bp, Artificial Sequence
  Synthetic oligonucleotide
gttgtacggtggatccaatagtgattaaga

SEQ ID NO: 110045 - DNA, 30 bp, Artificial Sequence
  Synthetic oligonucleotide
gtcgagagactgtcagggcaatatttaaga

SEQ ID NO: 110046 - DNA, 30 bp, Artificial Sequence
  Synthetic oligonucleotide
ccacgggctcatacaaataaaactttaaga

SEQ ID NO: 110047 - DNA, 30 bp, Artificial Sequence
  Synthetic oligonucleotide
ccacggcagcgctactacaaatctttaaga

SEQ ID NO: 110048 - DNA, 30 bp, Artificial Sequence
  Synthetic oligonucleotide
cagtagctgtaagaagtagcgttaaacaga

SEQ ID NO: 110049 - DNA, 30 bp, Artificial Sequence
  Synthetic oligonucleotide
cggcctatcgtcagtaggttagccaacaga

SEQ ID NO: 110050 - DNA, 30 bp, Artificial Sequence
  Synthetic oligonucleotide
tggtggcgggcaggttagcctgccaacaga

SEQ ID NO: 110051 - DNA, 30 bp, Artificial Sequence
  Synthetic oligonucleotide
tatcgggcttaagacttgtagtctaacaga

SEQ ID NO: 110052 - DNA, 30 bp, Artificial Sequence
  Synthetic oligonucleotide
agacggggtggcgtgagaaagtaacacaga

SEQ ID NO: 110053 - DNA, 30 bp, Artificial Sequence
  Synthetic oligonucleotide
ggaacccagtgatgtcccgtcatccacaga

SEQ ID NO: 110054 - DNA, 30 bp, Artificial Sequence
  Synthetic oligonucleotide
gtccccgatctcgattagcacaagcacaga

SEQ ID NO: 110055 - DNA, 30 bp, Artificial Sequence
  Synthetic oligonucleotide
ttggaagtgtttgaacgataagggcacaga

SEQ ID NO: 110056 - DNA, 29 bp, Artificial Sequence
  Synthetic oligonucleotide
gtcatgcatagttgttaagtctgcacaga

SEQ ID NO: 110057 - DNA, 30 bp, Artificial Sequence
  Synthetic oligonucleotide
tcggtaagtatgcgagctggatctcacaga

SEQ ID NO: 110058 - DNA, 30 bp, Artificial Sequence
  Synthetic oligonucleotide
acggaatagtactccgtaactgaatacaga

SEQ ID NO: 110059 - DNA, 30 bp, Artificial Sequence
  Synthetic oligonucleotide
aatatttacaagttgatgtgagagtacaga

SEQ ID NO: 110060 - DNA, 30 bp, Artificial Sequence
  Synthetic oligonucleotide
taacctgctccctagcttggagggtacaga

SEQ ID NO: 110061 - DNA, 30 bp, Artificial Sequence
  Synthetic oligonucleotide
aaccgatcaatacagcactgaagaaccaga

SEQ ID NO: 110062 - DNA, 30 bp, Artificial Sequence
  Synthetic oligonucleotide
gtggcatggcgcccgcagggacgaaccaga

SEQ ID NO: 110063 - DNA, 30 bp, Artificial Sequence
  Synthetic oligonucleotide
acccacgagcccatgcccgtaggtaccaga

SEQ ID NO: 110064 - DNA, 30 bp, Artificial Sequence
  Synthetic oligonucleotide
atcatagcccaaaaaacgcgcatgcccaga

SEQ ID NO: 110065 - DNA, 30 bp, Artificial Sequence
  Synthetic oligonucleotide
tcggggaataacatctgtattgttcccaga

SEQ ID NO: 110066 - DNA, 30 bp, Artificial Sequence
  Synthetic oligonucleotide
aatagattaccgatgcgttgagacgccaga

SEQ ID NO: 110067 - DNA, 30 bp, Artificial Sequence
  Synthetic oligonucleotide
ttgggatatgcacctccaagcgaggccaga

SEQ ID NO: 110068 - DNA, 30 bp, Artificial Sequence
  Synthetic oligonucleotide
tccatgagtagtaaaaattaaaggtccaga

SEQ ID NO: 110069 - DNA, 30 bp, Artificial Sequence
  Synthetic oligonucleotide
aagatgttaagacgcatggaacagagcaga

SEQ ID NO: 110070 - DNA, 30 bp, Artificial Sequence
  Synthetic oligonucleotide
ctataccacaagggacacatataaggcaga

SEQ ID NO: 110071 - DNA, 30 bp, Artificial Sequence
  Synthetic oligonucleotide
cgtgtgggtcgaaagggtggcgccggcaga

SEQ ID NO: 110072 - DNA, 30 bp, Artificial Sequence
  Synthetic oligonucleotide
cagaacgtggtctttcttgggatgggcaga

SEQ ID NO: 110073 - DNA, 30 bp, Artificial Sequence
  Synthetic oligonucleotide
tggagcgctgatagtaaagtcgatggcaga

SEQ ID NO: 110074 - DNA, 30 bp, Artificial Sequence
  Synthetic oligonucleotide
cgttcgatacccttcagttcgtttggcaga

SEQ ID NO: 110075 - DNA, 30 bp, Artificial Sequence
  Synthetic oligonucleotide
cgattgttaaaaacataatagatgtgcaga

SEQ ID NO: 110076 - DNA, 30 bp, Artificial Sequence
  Synthetic oligonucleotide
ttttgtcacaacacaaagtcaggttgcaga

SEQ ID NO: 110077 - DNA, 30 bp, Artificial Sequence
  Synthetic oligonucleotide
tctgtatggctcggtgatccgttaatcaga

SEQ ID NO: 110078 - DNA, 30 bp, Artificial Sequence
  Synthetic oligonucleotide
gtggtcttcacgagtctgctcagtatcaga

SEQ ID NO: 110079 - DNA, 30 bp, Artificial Sequence
  Synthetic oligonucleotide
cctggtgatcgggggattagatgtatcaga

SEQ ID NO: 110080 - DNA, 30 bp, Artificial Sequence
  Synthetic oligonucleotide
taacatgaaaccgaggacgttctcctcaga

SEQ ID NO: 110081 - DNA, 30 bp, Artificial Sequence
  Synthetic oligonucleotide
catgtgattattcattgtactacgctcaga

SEQ ID NO: 110082 - DNA, 30 bp, Artificial Sequence
  Synthetic oligonucleotide
ccaattgttgaagggatcaacgcgctcaga

SEQ ID NO: 110083 - DNA, 30 bp, Artificial Sequence
  Synthetic oligonucleotide
acgattacggaaggatgcccacatctcaga

SEQ ID NO: 110084 - DNA, 30 bp, Artificial Sequence
  Synthetic oligonucleotide
gcgtggagtcgaggttcttctcttctcaga

SEQ ID NO: 110085 - DNA, 30 bp, Artificial Sequence
  Synthetic oligonucleotide
cttgtcctacctagattataacgcgtcaga

SEQ ID NO: 110086 - DNA, 30 bp, Artificial Sequence
  Synthetic oligonucleotide
cgttgtacaaggtgaccttttggcgtcaga

SEQ ID NO: 110087 - DNA, 30 bp, Artificial Sequence
  Synthetic oligonucleotide
cactcctgaagggtgcgagctcatgtcaga

SEQ ID NO: 110088 - DNA, 30 bp, Artificial Sequence
  Synthetic oligonucleotide
agagctcgtggttagcttcgacaattcaga

SEQ ID NO: 110089 - DNA, 30 bp, Artificial Sequence
  Synthetic oligonucleotide
acggccccctggtcgcgggagtaattcaga

SEQ ID NO: 110090 - DNA, 30 bp, Artificial Sequence
  Synthetic oligonucleotide
acaaggtatgtgagcggaatcgcgttcaga

SEQ ID NO: 110091 - DNA, 30 bp, Artificial Sequence
  Synthetic oligonucleotide
acggtagatagttggtagttaatgttcaga

SEQ ID NO: 110092 - DNA, 30 bp, Artificial Sequence
  Synthetic oligonucleotide
cggcaaatcgggagatgctcgactttcaga

SEQ ID NO: 110093 - DNA, 30 bp, Artificial Sequence
  Synthetic oligonucleotide
cggggtttgacaccttggtgagcaaagaga

SEQ ID NO: 110094 - DNA, 30 bp, Artificial Sequence
  Synthetic oligonucleotide
cgtagaccatgtcgccgctggaacaagaga

SEQ ID NO: 110095 - DNA, 30 bp, Artificial Sequence
  Synthetic oligonucleotide
taaggactagaaggtgcgcagcccaagaga

SEQ ID NO: 110096 - DNA, 30 bp, Artificial Sequence
  Synthetic oligonucleotide
gtgatttagagctgcgtagctgggaagaga

SEQ ID NO: 110097 - DNA, 30 bp, Artificial Sequence
  Synthetic oligonucleotide
aatgcaaggcgttcgaggacgggtaagaga

SEQ ID NO: 110098 - DNA, 30 bp, Artificial Sequence
  Synthetic oligonucleotide
tgctggagtaacctcggagctgttaagaga

SEQ ID NO: 110099 - DNA, 30 bp, Artificial Sequence
  Synthetic oligonucleotide
ttaccggtaagagaaacgccacgacagaga

SEQ ID NO: 110100 - DNA, 30 bp, Artificial Sequence
  Synthetic oligonucleotide
gaaaaatttatctaaacccgttaccagaga

SEQ ID NO: 110101 - DNA, 30 bp, Artificial Sequence
  Synthetic oligonucleotide
tggtcgcaccacggaaacttgtcgcagaga

SEQ ID NO: 110102 - DNA, 30 bp, Artificial Sequence
  Synthetic oligonucleotide
aacagttcactatgtgggttgtaagagaga

SEQ ID NO: 110103 - DNA, 30 bp, Artificial Sequence
  Synthetic oligonucleotide
gccgatgaccagcggttctgcccagagaga

SEQ ID NO: 110104 - DNA, 30 bp, Artificial Sequence
  Synthetic oligonucleotide
ccgggaaataacctatggcgccgagagaga

SEQ ID NO: 110105 - DNA, 30 bp, Artificial Sequence
  Synthetic oligonucleotide
gggaccctgtggtcattaatacgcgagaga

SEQ ID NO: 110106 - DNA, 30 bp, Artificial Sequence
  Synthetic oligonucleotide
tccacggcttagattttctccctatagaga

SEQ ID NO: 110107 - DNA, 30 bp, Artificial Sequence
  Synthetic oligonucleotide
ctactcaatatcaggattcgtgactagaga

SEQ ID NO: 110108 - DNA, 30 bp, Artificial Sequence
  Synthetic oligonucleotide
gcgaagtctcggtaaaagagctattagaga

SEQ ID NO: 110109 - DNA, 30 bp, Artificial Sequence
  Synthetic oligonucleotide
agcggtgattcacgaggccctttttagaga

SEQ ID NO: 110110 - DNA, 30 bp, Artificial Sequence
  Synthetic oligonucleotide
ggcaatggtacactgcggataagaacgaga

SEQ ID NO: 110111 - DNA, 30 bp, Artificial Sequence
  Synthetic oligonucleotide
aggccagagatcgcggaacgggtaacgaga

SEQ ID NO: 110112 - DNA, 30 bp, Artificial Sequence
  Synthetic oligonucleotide
gagtcaccctcctcacctatatttacgaga

SEQ ID NO: 110113 - DNA, 30 bp, Artificial Sequence
  Synthetic oligonucleotide
taccacggagacgattacacagacccgaga

SEQ ID NO: 110114 - DNA, 30 bp, Artificial Sequence
  Synthetic oligonucleotide
atatagaaaatcagatactttaatccgaga

SEQ ID NO: 110115 - DNA, 29 bp, Artificial Sequence
  Synthetic oligonucleotide
cgaataggcgtacgttacaatatgcgaga

SEQ ID NO: 110116 - DNA, 30 bp, Artificial Sequence
  Synthetic oligonucleotide
atgcgggctcatgataaccaccgtgcgaga

SEQ ID NO: 110117 - DNA, 30 bp, Artificial Sequence
  Synthetic oligonucleotide
aagccttagctcgacgatcccaactcgaga

SEQ ID NO: 110118 - DNA, 30 bp, Artificial Sequence
  Synthetic oligonucleotide
gtgctgggttgaaactccaggaggaggaga

SEQ ID NO: 110119 - DNA, 30 bp, Artificial Sequence
  Synthetic oligonucleotide
ctagcccgggtgttcggaattaataggaga

SEQ ID NO: 110120 - DNA, 30 bp, Artificial Sequence
  Synthetic oligonucleotide
aggtgccgtccccacttcggtgataggaga

SEQ ID NO: 110121 - DNA, 30 bp, Artificial Sequence
  Synthetic oligonucleotide
ctcgtccatggcacagcctagattaggaga

SEQ ID NO: 110122 - DNA, 30 bp, Artificial Sequence
  Synthetic oligonucleotide
aatgctctgtccgacgaataactacggaga

SEQ ID NO: 110123 - DNA, 30 bp, Artificial Sequence
  Synthetic oligonucleotide
ctgctgagattttaaacttacgtacggaga

SEQ ID NO: 110124 - DNA, 30 bp, Artificial Sequence
  Synthetic oligonucleotide
catccaacgaaagccccatccaagcggaga

SEQ ID NO: 110125 - DNA, 30 bp, Artificial Sequence
  Synthetic oligonucleotide
tgaagcgcgaagagcgccttatatcggaga

SEQ ID NO: 110126 - DNA, 30 bp, Artificial Sequence
  Synthetic oligonucleotide
tcggcaacgattaggaggctaagtgggaga

SEQ ID NO: 110127 - DNA, 30 bp, Artificial Sequence
  Synthetic oligonucleotide
atgagagtcggttcggggggcattgggaga

SEQ ID NO: 110128 - DNA, 30 bp, Artificial Sequence
  Synthetic oligonucleotide
aaatcctggatgagtcacgcttgttggaga

SEQ ID NO: 110129 - DNA, 30 bp, Artificial Sequence
  Synthetic oligonucleotide
gtcgttcgcacagaaactttgaggatgaga

SEQ ID NO: 110130 - DNA, 30 bp, Artificial Sequence
  Synthetic oligonucleotide
taggggaccaacatgtcgactgttatgaga

SEQ ID NO: 110131 - DNA, 30 bp, Artificial Sequence
  Synthetic oligonucleotide
ttaactttaacgatgttaatggcgctgaga

SEQ ID NO: 110132 - DNA, 30 bp, Artificial Sequence
  Synthetic oligonucleotide
atcggcaagggaccgtctagcggggtgaga

SEQ ID NO: 110133 - DNA, 30 bp, Artificial Sequence
  Synthetic oligonucleotide
tggaagacgttcgacatggttggggtgaga

SEQ ID NO: 110134 - DNA, 30 bp, Artificial Sequence
  Synthetic oligonucleotide
acttaggcaagggtttctcgcggattgaga

SEQ ID NO: 110135 - DNA, 30 bp, Artificial Sequence
  Synthetic oligonucleotide
agacatatagtaaggcggctaggcaataga

SEQ ID NO: 110136 - DNA, 31 bp, Artificial Sequence
  Synthetic oligonucleotide
atcaacaagcaccccaatgtttgagaataga

SEQ ID NO: 110137 - DNA, 30 bp, Artificial Sequence
  Synthetic oligonucleotide
acagggggtgaaggcgcaatcaggaataga

SEQ ID NO: 110138 - DNA, 30 bp, Artificial Sequence
  Synthetic oligonucleotide
ggttaataagcattccatctcacacataga

SEQ ID NO: 110139 - DNA, 30 bp, Artificial Sequence
  Synthetic oligonucleotide
acccaacgacatacatggtaagcgcataga

SEQ ID NO: 110140 - DNA, 30 bp, Artificial Sequence
  Synthetic oligonucleotide
gtgtgggggagcgcattaacacggcataga

SEQ ID NO: 110141 - DNA, 30 bp, Artificial Sequence
  Synthetic oligonucleotide
aatagccagctgaagtgatcagctcataga

SEQ ID NO: 110142 - DNA, 30 bp, Artificial Sequence
  Synthetic oligonucleotide
gctagattccgcccgaaaattaactataga

SEQ ID NO: 110143 - DNA, 30 bp, Artificial Sequence
  Synthetic oligonucleotide
acaaccatccacccgaagctctctgctaga

SEQ ID NO: 110144 - DNA, 30 bp, Artificial Sequence
  Synthetic oligonucleotide
tcttgacaaagggcactattacaatctaga

SEQ ID NO: 110145 - DNA, 30 bp, Artificial Sequence
  Synthetic oligonucleotide
acgaagaaacttcagggtctcaactctaga

SEQ ID NO: 110146 - DNA, 30 bp, Artificial Sequence
  Synthetic oligonucleotide
cgggaaacctgatatcgggcaccctctaga

SEQ ID NO: 110147 - DNA, 30 bp, Artificial Sequence
  Synthetic oligonucleotide
ctaagggacaagtttagatggcaaagtaga

SEQ ID NO: 110148 - DNA, 30 bp, Artificial Sequence
  Synthetic oligonucleotide
ctctaggcgaaactgagattgccaagtaga

SEQ ID NO: 110149 - DNA, 30 bp, Artificial Sequence
  Synthetic oligonucleotide
aaggaaggagaacgggctagtcccagtaga

SEQ ID NO: 110150 - DNA, 30 bp, Artificial Sequence
  Synthetic oligonucleotide
gtagacggggatgtccgatgatcgagtaga

SEQ ID NO: 110151 - DNA, 30 bp, Artificial Sequence
  Synthetic oligonucleotide
caattctaaatgcgggaaagcgtaggtaga

SEQ ID NO: 110152 - DNA, 30 bp, Artificial Sequence
  Synthetic oligonucleotide
gaagtacagccgacggtttagtccggtaga

SEQ ID NO: 110153 - DNA, 30 bp, Artificial Sequence
  Synthetic oligonucleotide
aacaccgcgtagcctgggatgaatggtaga

SEQ ID NO: 110154 - DNA, 30 bp, Artificial Sequence
  Synthetic oligonucleotide
agaaccgataactatacctagactggtaga

SEQ ID NO: 110155 - DNA, 30 bp, Artificial Sequence
  Synthetic oligonucleotide
aagtggcaaagtactgttcgtcgtggtaga

SEQ ID NO: 110156 - DNA, 30 bp, Artificial Sequence
  Synthetic oligonucleotide
atgttagggggaacaaacagccaatgtaga

SEQ ID NO: 110157 - DNA, 30 bp, Artificial Sequence
  Synthetic oligonucleotide
ggtatccgcgtagaatatcggtgatgtaga

SEQ ID NO: 110158 - DNA, 30 bp, Artificial Sequence
  Synthetic oligonucleotide
gcagcgaaaatgtgtcttccgttatgtaga

SEQ ID NO: 110159 - DNA, 30 bp, Artificial Sequence
  Synthetic oligonucleotide
atgtgcaccggtatggcaagtagctgtaga

SEQ ID NO: 110160 - DNA, 30 bp, Artificial Sequence
  Synthetic oligonucleotide
cggacgtcggacttggcgacgacgtgtaga

SEQ ID NO: 110161 - DNA, 30 bp, Artificial Sequence
  Synthetic oligonucleotide
aagtgggagttaggggctcggtcgtgtaga

SEQ ID NO: 110162 - DNA, 30 bp, Artificial Sequence
  Synthetic oligonucleotide
atcgaaaatgagaatgctgatgtgcttaga

SEQ ID NO: 110163 - DNA, 30 bp, Artificial Sequence
  Synthetic oligonucleotide
ataggaagggaaatgcaaaagatagttaga

SEQ ID NO: 110164 - DNA, 30 bp, Artificial Sequence
  Synthetic oligonucleotide
gggctgttcgtgagcgccggatacgttaga

SEQ ID NO: 110165 - DNA, 30 bp, Artificial Sequence
  Synthetic oligonucleotide
agatggtattacaccagtgctaaggttaga

SEQ ID NO: 110166 - DNA, 30 bp, Artificial Sequence
  Synthetic oligonucleotide
tagacctagcgaatgcgtggaactgttaga

SEQ ID NO: 110167 - DNA, 30 bp, Artificial Sequence
  Synthetic oligonucleotide
gagatatacagactatacgaaatatttaga

SEQ ID NO: 110168 - DNA, 30 bp, Artificial Sequence
  Synthetic oligonucleotide
gagacggtgttcggctagggtctatttaga

SEQ ID NO: 110169 - DNA, 30 bp, Artificial Sequence
  Synthetic oligonucleotide
acagggaccgggaggaacatggtctttaga

SEQ ID NO: 110170 - DNA, 30 bp, Artificial Sequence
  Synthetic oligonucleotide
catataaaaggcacacgcgtgcgcaaacga

SEQ ID NO: 110171 - DNA, 30 bp, Artificial Sequence
  Synthetic oligonucleotide
caacagtagccggtggttggcacccaacga

SEQ ID NO: 110172 - DNA, 30 bp, Artificial Sequence
  Synthetic oligonucleotide
gggtcaacggttcactagtcaggccaacga

SEQ ID NO: 110173 - DNA, 30 bp, Artificial Sequence
  Synthetic oligonucleotide
agtaagctctcagtctggctgcctcaacga

SEQ ID NO: 110174 - DNA, 30 bp, Artificial Sequence
  Synthetic oligonucleotide
aggggcccgtcacacacagaaccagaacga

SEQ ID NO: 110175 - DNA, 30 bp, Artificial Sequence
  Synthetic oligonucleotide
atcagacggatcaatccgagtcgagaacga

SEQ ID NO: 110176 - DNA, 30 bp, Artificial Sequence
  Synthetic oligonucleotide
aagtgttaacagcaggttcagctcgaacga

SEQ ID NO: 110177 - DNA, 30 bp, Artificial Sequence
  Synthetic oligonucleotide
caagagcgaagcggcgttgctcgggaacga

SEQ ID NO: 110178 - DNA, 30 bp, Artificial Sequence
  Synthetic oligonucleotide
agggaaggagattgcacggatcgataacga

SEQ ID NO: 110179 - DNA, 30 bp, Artificial Sequence
  Synthetic oligonucleotide
tatccattcgctatgcgcaactactaacga

SEQ ID NO: 110180 - DNA, 30 bp, Artificial Sequence
  Synthetic oligonucleotide
aatacagaatggtgcagccaatgaacacga

SEQ ID NO: 110181 - DNA, 30 bp, Artificial Sequence
  Synthetic oligonucleotide
tcgagcatgtcgataatagtaaccccacga

SEQ ID NO: 110182 - DNA, 30 bp, Artificial Sequence
  Synthetic oligonucleotide
atgagcctggcctgactgagatagccacga

SEQ ID NO: 110183 - DNA, 30 bp, Artificial Sequence
  Synthetic oligonucleotide
cggtctatagggcgatttcactggccacga

SEQ ID NO: 110184 - DNA, 30 bp, Artificial Sequence
  Synthetic oligonucleotide
tacatgcgacccgctaaacaaactccacga

SEQ ID NO: 110185 - DNA, 30 bp, Artificial Sequence
  Synthetic oligonucleotide
tcaaacaattaccattggtcctcagcacga

SEQ ID NO: 110186 - DNA, 30 bp, Artificial Sequence
  Synthetic oligonucleotide
ctaaatgaattgaaccgggccaacgcacga

SEQ ID NO: 110187 - DNA, 30 bp, Artificial Sequence
  Synthetic oligonucleotide
gacgcccgtggaaacacatcgtgcgcacga

SEQ ID NO: 110188 - DNA, 30 bp, Artificial Sequence
  Synthetic oligonucleotide
tcacgagcttgggagggttcaaaggcacga

SEQ ID NO: 110189 - DNA, 30 bp, Artificial Sequence
  Synthetic oligonucleotide
tacgatctacacaacaggtttggctcacga

SEQ ID NO: 110190 - DNA, 30 bp, Artificial Sequence
  Synthetic oligonucleotide
aaccagcgaactgtaaggtactggtcacga

SEQ ID NO: 110191 - DNA, 30 bp, Artificial Sequence
  Synthetic oligonucleotide
cgtaatgggtttgaggttgaatgttcacga

SEQ ID NO: 110192 - DNA, 30 bp, Artificial Sequence
  Synthetic oligonucleotide
attgactcaatgactaactcagccagacga

SEQ ID NO: 110193 - DNA, 30 bp, Artificial Sequence
  Synthetic oligonucleotide
cagtacccggggtcacgcctagtacgacga

SEQ ID NO: 110194 - DNA, 30 bp, Artificial Sequence
  Synthetic oligonucleotide
agtatgggaggaagtactccctcaggacga

SEQ ID NO: 110195 - DNA, 30 bp, Artificial Sequence
  Synthetic oligonucleotide
gtcgttgtcggatgggagagccagggacga

SEQ ID NO: 110196 - DNA, 30 bp, Artificial Sequence
  Synthetic oligonucleotide
ggctatcaatggcttatcggggcaatacga

SEQ ID NO: 110197 - DNA, 30 bp, Artificial Sequence
  Synthetic oligonucleotide
cgtacagaagaagcacttcccatgatacga

SEQ ID NO: 110198 - DNA, 30 bp, Artificial Sequence
  Synthetic oligonucleotide
ccactacacggagagtagggcagtatacga

SEQ ID NO: 110199 - DNA, 30 bp, Artificial Sequence
  Synthetic oligonucleotide
tcaagcgaggagacgttaaaaccgctacga

SEQ ID NO: 110200 - DNA, 30 bp, Artificial Sequence
  Synthetic oligonucleotide
acgccgatgtaggaattacacttagtacga

SEQ ID NO: 110201 - DNA, 30 bp, Artificial Sequence
  Synthetic oligonucleotide
tcgggcaggatcttctccgattgcgtacga

SEQ ID NO: 110202 - DNA, 30 bp, Artificial Sequence
  Synthetic oligonucleotide
atcaccccatataatgcgtcggtcgtacga

SEQ ID NO: 110203 - DNA, 30 bp, Artificial Sequence
  Synthetic oligonucleotide
cggcaatactctgcgggaaagtgggtacga

SEQ ID NO: 110204 - DNA, 30 bp, Artificial Sequence
  Synthetic oligonucleotide
tgccgcgttggagggagaatttgtgtacga

SEQ ID NO: 110205 - DNA, 30 bp, Artificial Sequence
  Synthetic oligonucleotide
tagaggctatatttactaagggcattacga

SEQ ID NO: 110206 - DNA, 30 bp, Artificial Sequence
  Synthetic oligonucleotide
gataacaataacgtggggaccgagttacga

SEQ ID NO: 110207 - DNA, 30 bp, Artificial Sequence
  Synthetic oligonucleotide
ggcctgaaaggtgatccacgatttttacga

SEQ ID NO: 110208 - DNA, 30 bp, Artificial Sequence
  Synthetic oligonucleotide
tggcacatatttgtgtacttggtgaaccga

SEQ ID NO: 110209 - DNA, 30 bp, Artificial Sequence
  Synthetic oligonucleotide
caggacatgatttgggtagtgaataaccga

SEQ ID NO: 110210 - DNA, 30 bp, Artificial Sequence
  Synthetic oligonucleotide
ccggaagaatggaaaaagtccggccaccga

SEQ ID NO: 110211 - DNA, 30 bp, Artificial Sequence
  Synthetic oligonucleotide
tgaatagggaacttcatatgtattcaccga

SEQ ID NO: 110212 - DNA, 30 bp, Artificial Sequence
  Synthetic oligonucleotide
cgcagatgtgcagagaatgttccagaccga

SEQ ID NO: 110213 - DNA, 30 bp, Artificial Sequence
  Synthetic oligonucleotide
gttgcaatttagagtatgaggatagaccga

SEQ ID NO: 110214 - DNA, 30 bp, Artificial Sequence
  Synthetic oligonucleotide
ttgtgggttttcataacgtcgactgaccga

SEQ ID NO: 110215 - DNA, 30 bp, Artificial Sequence
  Synthetic oligonucleotide
ggagatagactcaagggtgaccggacccga

SEQ ID NO: 110216 - DNA, 30 bp, Artificial Sequence
  Synthetic oligonucleotide
tcaacgtggacatttatcctcgtgacccga

SEQ ID NO: 110217 - DNA, 30 bp, Artificial Sequence
  Synthetic oligonucleotide
ttgtgcaggaatcatggatccctaccccga

SEQ ID NO: 110218 - DNA, 30 bp, Artificial Sequence
  Synthetic oligonucleotide
gtgaccagtgggcacgcatcgccgccccga

SEQ ID NO: 110219 - DNA, 30 bp, Artificial Sequence
  Synthetic oligonucleotide
acttcaccacgccacgggcgagatccccga

SEQ ID NO: 110220 - DNA, 30 bp, Artificial Sequence
  Synthetic oligonucleotide
cagtggggcgatataatatcttaagcccga

SEQ ID NO: 110221 - DNA, 30 bp, Artificial Sequence
  Synthetic oligonucleotide
gcgaaggggcctacgtcgtctcccgcccga

SEQ ID NO: 110222 - DNA, 30 bp, Artificial Sequence
  Synthetic oligonucleotide
cgacctggtagtcattcaaggtgctcccga

SEQ ID NO: 110223 - DNA, 30 bp, Artificial Sequence
  Synthetic oligonucleotide
atagagagagccgatatgccattttcccga

SEQ ID NO: 110224 - DNA, 30 bp, Artificial Sequence
  Synthetic oligonucleotide
gctcagtctagggctccataacaaagccga

SEQ ID NO: 110225 - DNA, 30 bp, Artificial Sequence
  Synthetic oligonucleotide
cccaagcactattccacgcgcgaacgccga

SEQ ID NO: 110226 - DNA, 30 bp, Artificial Sequence
  Synthetic oligonucleotide
tacttcgagtggacggaaggccttcgccga

SEQ ID NO: 110227 - DNA, 30 bp, Artificial Sequence
  Synthetic oligonucleotide
tgtcaatcctccacagcgccgccaggccga

SEQ ID NO: 110228 - DNA, 30 bp, Artificial Sequence
  Synthetic oligonucleotide
tcgaattagcaagtacgttgacagggccga

SEQ ID NO: 110229 - DNA, 30 bp, Artificial Sequence
  Synthetic oligonucleotide
agtgcagtactttatgcatgcgatggccga

SEQ ID NO: 110230 - DNA, 30 bp, Artificial Sequence
  Synthetic oligonucleotide
ttgtgccaaaacgcaggctcaattggccga

SEQ ID NO: 110231 - DNA, 30 bp, Artificial Sequence
  Synthetic oligonucleotide
acaaccatggaggcgtgacagaattgccga

SEQ ID NO: 110232 - DNA, 29 bp, Artificial Sequence
  Synthetic oligonucleotide
actgtgaggagaccaaacctgattgccga

SEQ ID NO: 110233 - DNA, 30 bp, Artificial Sequence
  Synthetic oligonucleotide
acatgcttacgcctccgccccgagatccga

SEQ ID NO: 110234 - DNA, 30 bp, Artificial Sequence
  Synthetic oligonucleotide
aggggaacgagttctgattgatggatccga

SEQ ID NO: 110235 - DNA, 30 bp, Artificial Sequence
  Synthetic oligonucleotide
cggttatcaggattacaacctgtgatccga

SEQ ID NO: 110236 - DNA, 30 bp, Artificial Sequence
  Synthetic oligonucleotide
gacaaacatggcaaaacattgcttatccga

SEQ ID NO: 110237 - DNA, 30 bp, Artificial Sequence
  Synthetic oligonucleotide
cggcacttcagtgggtactcgaaactccga

SEQ ID NO: 110238 - DNA, 30 bp, Artificial Sequence
  Synthetic oligonucleotide
attgtaactaaaacaaacttgcagctccga

SEQ ID NO: 110239 - DNA, 30 bp, Artificial Sequence
  Synthetic oligonucleotide
ccacggttctattcgcttaaagtcgtccga

SEQ ID NO: 110240 - DNA, 30 bp, Artificial Sequence
  Synthetic oligonucleotide
acggggcatagtaaatttatgactgtccga

SEQ ID NO: 110241 - DNA, 30 bp, Artificial Sequence
  Synthetic oligonucleotide
gatagcttaattatcaataaatgtttccga

SEQ ID NO: 110242 - DNA, 30 bp, Artificial Sequence
  Synthetic oligonucleotide
aagtttggctcgccaacaagatgtttccga

SEQ ID NO: 110243 - DNA, 30 bp, Artificial Sequence
  Synthetic oligonucleotide
caaatcggtggagaaggtctcgaaaagcga

SEQ ID NO: 110244 - DNA, 30 bp, Artificial Sequence
  Synthetic oligonucleotide
acagtcgcctaagggtaaccaccaaagcga

SEQ ID NO: 110245 - DNA, 30 bp, Artificial Sequence
  Synthetic oligonucleotide
cgatcgcaattacgttttataggaaagcga

SEQ ID NO: 110246 - DNA, 30 bp, Artificial Sequence
  Synthetic oligonucleotide
tgacacaaatgccggttggtttgcaagcga

SEQ ID NO: 110247 - DNA, 30 bp, Artificial Sequence
  Synthetic oligonucleotide
tgacggagtccaaaatgctgaactaagcga

SEQ ID NO: 110248 - DNA, 30 bp, Artificial Sequence
  Synthetic oligonucleotide
cactcgaattagcctattaggagacagcga

SEQ ID NO: 110249 - DNA, 30 bp, Artificial Sequence
  Synthetic oligonucleotide
accgctgccgttagaagaaggctacagcga

SEQ ID NO: 110250 - DNA, 30 bp, Artificial Sequence
  Synthetic oligonucleotide
ggctaaaggaggcttaagagatcgcagcga

SEQ ID NO: 110251 - DNA, 30 bp, Artificial Sequence
  Synthetic oligonucleotide
tacccctcaatgtttcccttagttcagcga

SEQ ID NO: 110252 - DNA, 30 bp, Artificial Sequence
  Synthetic oligonucleotide
tgtaatcgtgcactccgggccctcgagcga

SEQ ID NO: 110253 - DNA, 30 bp, Artificial Sequence
  Synthetic oligonucleotide
agagtcaaaattcgccaacgcctcgagcga

SEQ ID NO: 110254 - DNA, 30 bp, Artificial Sequence
  Synthetic oligonucleotide
atggtcatccagcgtcctagctactagcga

SEQ ID NO: 110255 - DNA, 30 bp, Artificial Sequence
  Synthetic oligonucleotide
tagtctaggagtcatgaactaagctagcga

SEQ ID NO: 110256 - DNA, 30 bp, Artificial Sequence
  Synthetic oligonucleotide
cgaaggacgaactttgccgtccaaacgcga

SEQ ID NO: 110257 - DNA, 30 bp, Artificial Sequence
  Synthetic oligonucleotide
ctaacccgggatcgcaaaagagagacgcga

SEQ ID NO: 110258 - DNA, 30 bp, Artificial Sequence
  Synthetic oligonucleotide
ccgatattagaatcagagacctacccgcga

SEQ ID NO: 110259 - DNA, 30 bp, Artificial Sequence
  Synthetic oligonucleotide
gtcagcataaatcaccgatacgtcccgcga

SEQ ID NO: 110260 - DNA, 30 bp, Artificial Sequence
  Synthetic oligonucleotide
ggagggtaataccggtggttacaagcgcga

SEQ ID NO: 110261 - DNA, 30 bp, Artificial Sequence
  Synthetic oligonucleotide
gattggtaagctaagaagatcaatgcgcga

SEQ ID NO: 110262 - DNA, 30 bp, Artificial Sequence
  Synthetic oligonucleotide
ggcaagatagcattgtgtgaatctgcgcga

SEQ ID NO: 110263 - DNA, 30 bp, Artificial Sequence
  Synthetic oligonucleotide
tgagtaggatactagggtgcgactaggcga

SEQ ID NO: 110264 - DNA, 30 bp, Artificial Sequence
  Synthetic oligonucleotide
actacgaacgtatcagagctatctaggcga

SEQ ID NO: 110265 - DNA, 30 bp, Artificial Sequence
  Synthetic oligonucleotide
gtcgagttcatatcggggtcgagccggcga

SEQ ID NO: 110266 - DNA, 30 bp, Artificial Sequence
  Synthetic oligonucleotide
ggttgcttcccaaagctcgcgcctcggcga

SEQ ID NO: 110267 - DNA, 30 bp, Artificial Sequence
  Synthetic oligonucleotide
gagtgcgggaaatataagtaatgtcggcga

SEQ ID NO: 110268 - DNA, 30 bp, Artificial Sequence
  Synthetic oligonucleotide
agttgtacgactgtcttctgagttcggcga

SEQ ID NO: 110269 - DNA, 30 bp, Artificial Sequence
  Synthetic oligonucleotide
tgaatcttcaaagtggacaagcaagggcga

SEQ ID NO: 110270 - DNA, 30 bp, Artificial Sequence
  Synthetic oligonucleotide
ttgctggaatcacacgttattttcgggcga

SEQ ID NO: 110271 - DNA, 30 bp, Artificial Sequence
  Synthetic oligonucleotide
agggggggcgtagttgtttaggtggggcga

SEQ ID NO: 110272 - DNA, 31 bp, Artificial Sequence
  Synthetic oligonucleotide
aaaagggagggatcttcctgtcgcatggcga

SEQ ID NO: 110273 - DNA, 30 bp, Artificial Sequence
  Synthetic oligonucleotide
tagggcatcagaggcgattagggatggcga

SEQ ID NO: 110274 - DNA, 30 bp, Artificial Sequence
  Synthetic oligonucleotide
gtacacaccgatgcagtaccattgtggcga

SEQ ID NO: 110275 - DNA, 30 bp, Artificial Sequence
  Synthetic oligonucleotide
gattagcgaacattaagaacgtgaatgcga

SEQ ID NO: 110276 - DNA, 30 bp, Artificial Sequence
  Synthetic oligonucleotide
tgtcgccgaatctccgtatacagcatgcga

SEQ ID NO: 110277 - DNA, 30 bp, Artificial Sequence
  Synthetic oligonucleotide
ttactactgtggtacataaaggagatgcga

SEQ ID NO: 110278 - DNA, 30 bp, Artificial Sequence
  Synthetic oligonucleotide
ccgttgcattatgtgctagttgcgctgcga

SEQ ID NO: 110279 - DNA, 30 bp, Artificial Sequence
  Synthetic oligonucleotide
gtaggcttagtgtgatacctaactctgcga

SEQ ID NO: 110280 - DNA, 30 bp, Artificial Sequence
  Synthetic oligonucleotide
tgaccttcccgatgcaataatgacgtgcga

SEQ ID NO: 110281 - DNA, 30 bp, Artificial Sequence
  Synthetic oligonucleotide
ggctgctgaccggttgctaagcatgtgcga

SEQ ID NO: 110282 - DNA, 30 bp, Artificial Sequence
  Synthetic oligonucleotide
agcttgagcggggtgtgtccggctttgcga

SEQ ID NO: 110283 - DNA, 30 bp, Artificial Sequence
  Synthetic oligonucleotide
gaaaagaaggtcacagcactagagaatcga

SEQ ID NO: 110284 - DNA, 30 bp, Artificial Sequence
  Synthetic oligonucleotide
gatgatccactccgataaatgtaccatcga

SEQ ID NO: 110285 - DNA, 30 bp, Artificial Sequence
  Synthetic oligonucleotide
agatgaacacggccagtcttgtacgatcga

SEQ ID NO: 110286 - DNA, 30 bp, Artificial Sequence
  Synthetic oligonucleotide
ggttcaagcaaactccatggccactatcga

SEQ ID NO: 110287 - DNA, 30 bp, Artificial Sequence
  Synthetic oligonucleotide
aagagggtgtagtattcaagtcactatcga

SEQ ID NO: 110288 - DNA, 30 bp, Artificial Sequence
  Synthetic oligonucleotide
tggcgagttaatatcaggcgatggtatcga

SEQ ID NO: 110289 - DNA, 30 bp, Artificial Sequence
  Synthetic oligonucleotide
cggtatcacaatagatacatcatgtatcga

SEQ ID NO: 110290 - DNA, 30 bp, Artificial Sequence
  Synthetic oligonucleotide
ctaaacgggtctgaacttggcaacactcga

SEQ ID NO: 110291 - DNA, 30 bp, Artificial Sequence
  Synthetic oligonucleotide
ggctgacaacttttccgaaggatccctcga

SEQ ID NO: 110292 - DNA, 30 bp, Artificial Sequence
  Synthetic oligonucleotide
tcaaagacctaaacacgttagcggcctcga

SEQ ID NO: 110293 - DNA, 30 bp, Artificial Sequence
  Synthetic oligonucleotide
tcttactgcatattggcaaatactcctcga

SEQ ID NO: 110294 - DNA, 30 bp, Artificial Sequence
  Synthetic oligonucleotide
gtgtcagatacgggctaatgtcatgctcga

SEQ ID NO: 110295 - DNA, 30 bp, Artificial Sequence
  Synthetic oligonucleotide
gacaaccgatacttcactaaatatgctcga

SEQ ID NO: 110296 - DNA, 30 bp, Artificial Sequence
  Synthetic oligonucleotide
cgcggggaatgtacctaggtgagtgctcga

SEQ ID NO: 110297 - DNA, 30 bp, Artificial Sequence
  Synthetic oligonucleotide
gaggcataggtctctagctatgattctcga

SEQ ID NO: 110298 - DNA, 30 bp, Artificial Sequence
  Synthetic oligonucleotide
tcagtggtggcgatgctccacctttctcga

SEQ ID NO: 110299 - DNA, 30 bp, Artificial Sequence
  Synthetic oligonucleotide
tctacgtccacaattgtaagttaaagtcga

SEQ ID NO: 110300 - DNA, 30 bp, Artificial Sequence
  Synthetic oligonucleotide
aataccttatcgcaactaggaagaagtcga

SEQ ID NO: 110301 - DNA, 30 bp, Artificial Sequence
  Synthetic oligonucleotide
tgggttgaaagggtgaattatataagtcga

SEQ ID NO: 110302 - DNA, 30 bp, Artificial Sequence
  Synthetic oligonucleotide
aaagggccgattgtgatagagatgagtcga

SEQ ID NO: 110303 - DNA, 30 bp, Artificial Sequence
  Synthetic oligonucleotide
caaccccattcaaattcttaaagtagtcga

SEQ ID NO: 110304 - DNA, 30 bp, Artificial Sequence
  Synthetic oligonucleotide
cttactaagctgataacctatagtagtcga

SEQ ID NO: 110305 - DNA, 30 bp, Artificial Sequence
  Synthetic oligonucleotide
aatatagaatattctaatccaaaccgtcga

SEQ ID NO: 110306 - DNA, 30 bp, Artificial Sequence
  Synthetic oligonucleotide
gctcaataagaatcgagcaactgaggtcga

SEQ ID NO: 110307 - DNA, 30 bp, Artificial Sequence
  Synthetic oligonucleotide
ggtacatcccgaggtccgcgctcgattcga

SEQ ID NO: 110308 - DNA, 30 bp, Artificial Sequence
  Synthetic oligonucleotide
agtgcgctcttgggatgtatgaaccttcga

SEQ ID NO: 110309 - DNA, 30 bp, Artificial Sequence
  Synthetic oligonucleotide
gcattgagcacgttaggaatgttgcttcga

SEQ ID NO: 110310 - DNA, 30 bp, Artificial Sequence
  Synthetic oligonucleotide
caggtcgtgcgacgattcaggattcttcga

SEQ ID NO: 110311 - DNA, 30 bp, Artificial Sequence
  Synthetic oligonucleotide
caaaggtaaaggtatagcttctaagttcga

SEQ ID NO: 110312 - DNA, 30 bp, Artificial Sequence
  Synthetic oligonucleotide
taatacaaaatgcctaggaattcggttcga

SEQ ID NO: 110313 - DNA, 30 bp, Artificial Sequence
  Synthetic oligonucleotide
cctgaaagtagatcacgtatcatggttcga

SEQ ID NO: 110314 - DNA, 30 bp, Artificial Sequence
  Synthetic oligonucleotide
gtgggtaaacctgacctgcacaaatttcga

SEQ ID NO: 110315 - DNA, 30 bp, Artificial Sequence
  Synthetic oligonucleotide
taggcgtagggggaaaccacatgatttcga

SEQ ID NO: 110316 - DNA, 30 bp, Artificial Sequence
  Synthetic oligonucleotide
tggcacgaagcctgttgcacctcctttcga

SEQ ID NO: 110317 - DNA, 30 bp, Artificial Sequence
  Synthetic oligonucleotide
aggttgactgagtgtaagacaccgtttcga

SEQ ID NO: 110318 - DNA, 30 bp, Artificial Sequence
  Synthetic oligonucleotide
aggccataacgttaggaaacgataaaagga

SEQ ID NO: 110319 - DNA, 30 bp, Artificial Sequence
  Synthetic oligonucleotide
atataggtgtgcggactatggcacaaagga

SEQ ID NO: 110320 - DNA, 30 bp, Artificial Sequence
  Synthetic oligonucleotide
gcgtaacgaaccacgcacgtacgcaaagga

SEQ ID NO: 110321 - DNA, 30 bp, Artificial Sequence
  Synthetic oligonucleotide
ggcctaagcggagtagttaactagaaagga

SEQ ID NO: 110322 - DNA, 30 bp, Artificial Sequence
  Synthetic oligonucleotide
ctgactcctggtcgggctcattcgaaagga

SEQ ID NO: 110323 - DNA, 30 bp, Artificial Sequence
  Synthetic oligonucleotide
gctgagaatactggcctataacctaaagga

SEQ ID NO: 110324 - DNA, 30 bp, Artificial Sequence
  Synthetic oligonucleotide
ttgcgtgttcggcgtgtccggcctaaagga

SEQ ID NO: 110325 - DNA, 30 bp, Artificial Sequence
  Synthetic oligonucleotide
acgcaaggagtaggagcgcatcctaaagga

SEQ ID NO: 110326 - DNA, 30 bp, Artificial Sequence
  Synthetic oligonucleotide
gttaaacgagactcaggagtttaacaagga

SEQ ID NO: 110327 - DNA, 30 bp, Artificial Sequence
  Synthetic oligonucleotide
cagggatgcgagcctagacggcggcaagga

SEQ ID NO: 110328 - DNA, 30 bp, Artificial Sequence
  Synthetic oligonucleotide
tcttgcgctccgaagacggaagtagaagga

SEQ ID NO: 110329 - DNA, 30 bp, Artificial Sequence
  Synthetic oligonucleotide
gctcgccggtcacgttatgggtacgaagga

SEQ ID NO: 110330 - DNA, 30 bp, Artificial Sequence
  Synthetic oligonucleotide
caatgttactgtataccaatttgcgaagga

SEQ ID NO: 110331 - DNA, 30 bp, Artificial Sequence
  Synthetic oligonucleotide
cttggcttggggtggtgcactttggaagga

SEQ ID NO: 110332 - DNA, 30 bp, Artificial Sequence
  Synthetic oligonucleotide
aggtgcaacggtgcagttgagatctaagga

SEQ ID NO: 110333 - DNA, 30 bp, Artificial Sequence
  Synthetic oligonucleotide
agcaaacgtcctatcaggtgtgcgtaagga

SEQ ID NO: 110334 - DNA, 30 bp, Artificial Sequence
  Synthetic oligonucleotide
tgaggaatgcaggaacacctatcgtaagga

SEQ ID NO: 110335 - DNA, 30 bp, Artificial Sequence
  Synthetic oligonucleotide
atcgtataacgagagatagcccattaagga

SEQ ID NO: 110336 - DNA, 30 bp, Artificial Sequence
  Synthetic oligonucleotide
tttcaaaaccaacgtcgtataaagacagga

SEQ ID NO: 110337 - DNA, 30 bp, Artificial Sequence
  Synthetic oligonucleotide
ggctgaggcaccgcccaaagatcaccagga

SEQ ID NO: 110338 - DNA, 30 bp, Artificial Sequence
  Synthetic oligonucleotide
gaacccgtatacgtgatagagcagccagga

SEQ ID NO: 110339 - DNA, 30 bp, Artificial Sequence
  Synthetic oligonucleotide
agcaacggatcgaactagcgggttccagga

SEQ ID NO: 110340 - DNA, 30 bp, Artificial Sequence
  Synthetic oligonucleotide
tcagcgaagcaatattcctgtaaggcagga

SEQ ID NO: 110341 - DNA, 30 bp, Artificial Sequence
  Synthetic oligonucleotide
cgtcggagggggggcatttatacggcagga

SEQ ID NO: 110342 - DNA, 30 bp, Artificial Sequence
  Synthetic oligonucleotide
tataacaacatcccctaatagccggcagga

SEQ ID NO: 110343 - DNA, 30 bp, Artificial Sequence
  Synthetic oligonucleotide
agtacattacgtgccgtcctcggggcagga

SEQ ID NO: 110344 - DNA, 30 bp, Artificial Sequence
  Synthetic oligonucleotide
ataatgcgagttggtacactgcgtgcagga

SEQ ID NO: 110345 - DNA, 30 bp, Artificial Sequence
  Synthetic oligonucleotide
ctgcgctaccagatcgttgaggaatcagga

SEQ ID NO: 110346 - DNA, 30 bp, Artificial Sequence
  Synthetic oligonucleotide
gcgttacccgatggccagattgcatcagga

SEQ ID NO: 110347 - DNA, 30 bp, Artificial Sequence
  Synthetic oligonucleotide
ggggccttgtataggggtcatcgatcagga

SEQ ID NO: 110348 - DNA, 30 bp, Artificial Sequence
  Synthetic oligonucleotide
gaagtgagagcaatatccttcgactcagga

SEQ ID NO: 110349 - DNA, 30 bp, Artificial Sequence
  Synthetic oligonucleotide
ggggggtgacgataccacctggtgtcagga

SEQ ID NO: 110350 - DNA, 30 bp, Artificial Sequence
  Synthetic oligonucleotide
caaagatactcgccatcggaatcttcagga

SEQ ID NO: 110351 - DNA, 30 bp, Artificial Sequence
  Synthetic oligonucleotide
taaccagagcccagcacccagttttcagga

SEQ ID NO: 110352 - DNA, 30 bp, Artificial Sequence
  Synthetic oligonucleotide
gggggtcttggaggacactataaaagagga

SEQ ID NO: 110353 - DNA, 30 bp, Artificial Sequence
  Synthetic oligonucleotide
gtggtttagaaggcagtcaacttaagagga

SEQ ID NO: 110354 - DNA, 30 bp, Artificial Sequence
  Synthetic oligonucleotide
catcatagcatcagcatagtgtccagagga

SEQ ID NO: 110355 - DNA, 30 bp, Artificial Sequence
  Synthetic oligonucleotide
gtaccgtgtacaaagctaactcgtagagga

SEQ ID NO: 110356 - DNA, 30 bp, Artificial Sequence
  Synthetic oligonucleotide
gcgatcccttaccgcaaatttgaacgagga

SEQ ID NO: 110357 - DNA, 30 bp, Artificial Sequence
  Synthetic oligonucleotide
atagcagcaccgtcatacgctcatcgagga

SEQ ID NO: 110358 - DNA, 31 bp, Artificial Sequence
  Synthetic oligonucleotide
atgcaataaattgggacaaagcgttcgagga

SEQ ID NO: 110359 - DNA, 30 bp, Artificial Sequence
  Synthetic oligonucleotide
acgacatgatctctgatcaccgacggagga

SEQ ID NO: 110360 - DNA, 30 bp, Artificial Sequence
  Synthetic oligonucleotide
acgtggcgcactggactcgcgaagtgagga

SEQ ID NO: 110361 - DNA, 30 bp, Artificial Sequence
  Synthetic oligonucleotide
ggtgccgagatccatcacgataaaatagga

SEQ ID NO: 110362 - DNA, 30 bp, Artificial Sequence
  Synthetic oligonucleotide
agcgaacgtagcgggtatagtgaaatagga

SEQ ID NO: 110363 - DNA, 30 bp, Artificial Sequence
  Synthetic oligonucleotide
cgaaggattggaggcccgtgtctcatagga

SEQ ID NO: 110364 - DNA, 30 bp, Artificial Sequence
  Synthetic oligonucleotide
tggttctacactgtcctctctcggatagga

SEQ ID NO: 110365 - DNA, 30 bp, Artificial Sequence
  Synthetic oligonucleotide
ccctgccagtatagtgcgccgcgtatagga

SEQ ID NO: 110366 - DNA, 31 bp, Artificial Sequence
  Synthetic oligonucleotide
aggatgccgaggtcccccgttggaactagga

SEQ ID NO: 110367 - DNA, 30 bp, Artificial Sequence
  Synthetic oligonucleotide
aatgactatacatcggcaattagactagga

SEQ ID NO: 110368 - DNA, 30 bp, Artificial Sequence
  Synthetic oligonucleotide
aatgtcatgttcgggatagctggactagga

SEQ ID NO: 110369 - DNA, 30 bp, Artificial Sequence
  Synthetic oligonucleotide
caccgtacggttatcgttgtcagggtagga

SEQ ID NO: 110370 - DNA, 30 bp, Artificial Sequence
  Synthetic oligonucleotide
aagcacattcaagtgctgatgtctgtagga

SEQ ID NO: 110371 - DNA, 30 bp, Artificial Sequence
  Synthetic oligonucleotide
gttgaatagtgaacaggtagagtattagga

SEQ ID NO: 110372 - DNA, 30 bp, Artificial Sequence
  Synthetic oligonucleotide
agtgtgtacgtgactctacatctcttagga

SEQ ID NO: 110373 - DNA, 30 bp, Artificial Sequence
  Synthetic oligonucleotide
tctgaagcgtattttccagggcaaaacgga

SEQ ID NO: 110374 - DNA, 30 bp, Artificial Sequence
  Synthetic oligonucleotide
cggagggtggcctgtatcagttaaaacgga

SEQ ID NO: 110375 - DNA, 30 bp, Artificial Sequence
  Synthetic oligonucleotide
acgaggcgaagactcgtgcgtgagaacgga

SEQ ID NO: 110376 - DNA, 30 bp, Artificial Sequence
  Synthetic oligonucleotide
ataaacaggctcccactacgggcgaacgga

SEQ ID NO: 110377 - DNA, 30 bp, Artificial Sequence
  Synthetic oligonucleotide
cgactggtgaatgcaggttaccttaacgga

SEQ ID NO: 110378 - DNA, 30 bp, Artificial Sequence
  Synthetic oligonucleotide
aagtgaataagagggagaagtaatgacgga

SEQ ID NO: 110379 - DNA, 30 bp, Artificial Sequence
  Synthetic oligonucleotide
tacattacgccagtgactctctgatacgga

SEQ ID NO: 110380 - DNA, 30 bp, Artificial Sequence
  Synthetic oligonucleotide
gaagtagacacaggcggaacaaactacgga

SEQ ID NO: 110381 - DNA, 30 bp, Artificial Sequence
  Synthetic oligonucleotide
cagggtgacgtttttagaccctaccccgga

SEQ ID NO: 110382 - DNA, 30 bp, Artificial Sequence
  Synthetic oligonucleotide
ggtcgtacttacaaatatttgttccccgga

SEQ ID NO: 110383 - DNA, 30 bp, Artificial Sequence
  Synthetic oligonucleotide
aggccctggcatgagctgcccatcgccgga

SEQ ID NO: 110384 - DNA, 30 bp, Artificial Sequence
  Synthetic oligonucleotide
aacaaaggtgcgaaatgaagttgggccgga

SEQ ID NO: 110385 - DNA, 30 bp, Artificial Sequence
  Synthetic oligonucleotide
actagagcgtaaattcttggcactgccgga

SEQ ID NO: 110386 - DNA, 30 bp, Artificial Sequence
  Synthetic oligonucleotide
cgcatagacggatatgtagagcttgccgga

SEQ ID NO: 110387 - DNA, 29 bp, Artificial Sequence
  Synthetic oligonucleotide
aatctagcaccacgaagagatattccgga

SEQ ID NO: 110388 - DNA, 30 bp, Artificial Sequence
  Synthetic oligonucleotide
gaaaagtcgaagctcgggacacctagcgga

SEQ ID NO: 110389 - DNA, 30 bp, Artificial Sequence
  Synthetic oligonucleotide
tatacagtcagaattcgggggggtagcgga

SEQ ID NO: 110390 - DNA, 30 bp, Artificial Sequence
  Synthetic oligonucleotide
agagctcagtaaaaacactaagggcgcgga

SEQ ID NO: 110391 - DNA, 30 bp, Artificial Sequence
  Synthetic oligonucleotide
tgggttggtgggtcgtagggtccgggcgga

SEQ ID NO: 110392 - DNA, 30 bp, Artificial Sequence
  Synthetic oligonucleotide
tgaacgaaccgcccgatttgggtgggcgga

SEQ ID NO: 110393 - DNA, 30 bp, Artificial Sequence
  Synthetic oligonucleotide
agcgcaccagacgttggattaaaatgcgga

SEQ ID NO: 110394 - DNA, 30 bp, Artificial Sequence
  Synthetic oligonucleotide
taattgttgacggaacgatagtagtgcgga

SEQ ID NO: 110395 - DNA, 30 bp, Artificial Sequence
  Synthetic oligonucleotide
aggtgttggagtgaaggaacgccgatcgga

SEQ ID NO: 110396 - DNA, 30 bp, Artificial Sequence
  Synthetic oligonucleotide
caaccccgcccacaatcgcgtccgatcgga

SEQ ID NO: 110397 - DNA, 31 bp, Artificial Sequence
  Synthetic oligonucleotide
tgcaacggggacgaaagtcccagggatcgga

SEQ ID NO: 110398 - DNA, 30 bp, Artificial Sequence
  Synthetic oligonucleotide
ttcatgtagaaatggcccagatgtatcgga

SEQ ID NO: 110399 - DNA, 30 bp, Artificial Sequence
  Synthetic oligonucleotide
cgtttccagaaagagtcggcctacctcgga

SEQ ID NO: 110400 - DNA, 30 bp, Artificial Sequence
  Synthetic oligonucleotide
agaaaaaaagttgtagcagtgtttctcgga

SEQ ID NO: 110401 - DNA, 30 bp, Artificial Sequence
  Synthetic oligonucleotide
ggggcactgcggagattgatcggtgtcgga

SEQ ID NO: 110402 - DNA, 30 bp, Artificial Sequence
  Synthetic oligonucleotide
atatccagggagttcgtaaccggcttcgga

SEQ ID NO: 110403 - DNA, 30 bp, Artificial Sequence
  Synthetic oligonucleotide
ggatgcacccaataacgggaattaaaggga

SEQ ID NO: 110404 - DNA, 30 bp, Artificial Sequence
  Synthetic oligonucleotide
tgcaagaggagtattacgtactccaaggga

SEQ ID NO: 110405 - DNA, 30 bp, Artificial Sequence
  Synthetic oligonucleotide
gaaattggtgcaccttaaaatgcgaaggga

SEQ ID NO: 110406 - DNA, 30 bp, Artificial Sequence
  Synthetic oligonucleotide
gccccggaaagaaatgaaacgactaaggga

SEQ ID NO: 110407 - DNA, 29 bp, Artificial Sequence
  Synthetic oligonucleotide
cgacctagatggcatttcactgtaaggga

SEQ ID NO: 110408 - DNA, 30 bp, Artificial Sequence
  Synthetic oligonucleotide
gcggaagtttcctggtgtcggggacaggga

SEQ ID NO: 110409 - DNA, 30 bp, Artificial Sequence
  Synthetic oligonucleotide
atggggcgttaaaggtgcagataccaggga

SEQ ID NO: 110410 - DNA, 30 bp, Artificial Sequence
  Synthetic oligonucleotide
cgaatctaggttatgtatacatctcaggga

SEQ ID NO: 110411 - DNA, 30 bp, Artificial Sequence
  Synthetic oligonucleotide
ccggaaagattatgggaattcggagaggga

SEQ ID NO: 110412 - DNA, 30 bp, Artificial Sequence
  Synthetic oligonucleotide
tagaatacacgctccaggcatctagaggga

SEQ ID NO: 110413 - DNA, 30 bp, Artificial Sequence
  Synthetic oligonucleotide
gaaataagaccgcgtcaatcatctgaggga

SEQ ID NO: 110414 - DNA, 30 bp, Artificial Sequence
  Synthetic oligonucleotide
gtcctagcggggcgatctggtagtgaggga

SEQ ID NO: 110415 - DNA, 29 bp, Artificial Sequence
  Synthetic oligonucleotide
gtctcaaacgcgcatgcgaatgtgaggga

SEQ ID NO: 110416 - DNA, 30 bp, Artificial Sequence
  Synthetic oligonucleotide
ttaagacgcgtgccgaatcgataataggga

SEQ ID NO: 110417 - DNA, 30 bp, Artificial Sequence
  Synthetic oligonucleotide
tcgagaaatctcgtaagctggtggtaggga

SEQ ID NO: 110418 - DNA, 30 bp, Artificial Sequence
  Synthetic oligonucleotide
tagagcaatggacataggagatattaggga

SEQ ID NO: 110419 - DNA, 30 bp, Artificial Sequence
  Synthetic oligonucleotide
gaaaagagcagactgagggagaaaacggga

SEQ ID NO: 110420 - DNA, 30 bp, Artificial Sequence
  Synthetic oligonucleotide
caggtaaaagggcaacaagaggtaacggga

SEQ ID NO: 110421 - DNA, 30 bp, Artificial Sequence
  Synthetic oligonucleotide
cacagcgtttggaacgtagaccacacggga

SEQ ID NO: 110422 - DNA, 30 bp, Artificial Sequence
  Synthetic oligonucleotide
taatctcacgaccacgaccaatcaccggga

SEQ ID NO: 110423 - DNA, 30 bp, Artificial Sequence
  Synthetic oligonucleotide
gtgtcgactgagtatagagtacacccggga

SEQ ID NO: 110424 - DNA, 31 bp, Artificial Sequence
  Synthetic oligonucleotide
atgtagtcgagccgatggagaatgcccggga

SEQ ID NO: 110425 - DNA, 30 bp, Artificial Sequence
  Synthetic oligonucleotide
cacatattggtacgggtaggcgggccggga

SEQ ID NO: 110426 - DNA, 30 bp, Artificial Sequence
  Synthetic oligonucleotide
aaagcggtaggatattgtcaaactccggga

SEQ ID NO: 110427 - DNA, 30 bp, Artificial Sequence
  Synthetic oligonucleotide
actgagatttagtaccatagcgttccggga

SEQ ID NO: 110428 - DNA, 30 bp, Artificial Sequence
  Synthetic oligonucleotide
gacttgatgaaacggagggttcgagcggga

SEQ ID NO: 110429 - DNA, 30 bp, Artificial Sequence
  Synthetic oligonucleotide
cgtcacgtggactaatctttctgagcggga

SEQ ID NO: 110430 - DNA, 30 bp, Artificial Sequence
  Synthetic oligonucleotide
ggaatagaacaaggtacaactcaggcggga

SEQ ID NO: 110431 - DNA, 30 bp, Artificial Sequence
  Synthetic oligonucleotide
tggaactgagttcactggctccatgcggga

SEQ ID NO: 110432 - DNA, 30 bp, Artificial Sequence
  Synthetic oligonucleotide
ccactcatcctatgcacttttgaacgggga

SEQ ID NO: 110433 - DNA, 30 bp, Artificial Sequence
  Synthetic oligonucleotide
tagagcagctttatgcacgtactccgggga

SEQ ID NO: 110434 - DNA, 30 bp, Artificial Sequence
  Synthetic oligonucleotide
gtgtcgttaccgtacactccaaagcgggga

SEQ ID NO: 110435 - DNA, 30 bp, Artificial Sequence
  Synthetic oligonucleotide
catacgtattaggccagtaaagagcgggga

SEQ ID NO: 110436 - DNA, 30 bp, Artificial Sequence
  Synthetic oligonucleotide
catagcagatagacggtcacctcgcgggga

SEQ ID NO: 110437 - DNA, 30 bp, Artificial Sequence
  Synthetic oligonucleotide
ggatacaattttgcagggtgagggcgggga

SEQ ID NO: 110438 - DNA, 30 bp, Artificial Sequence
  Synthetic oligonucleotide
cgtgtgcgactattacatcgcaaaggggga

SEQ ID NO: 110439 - DNA, 30 bp, Artificial Sequence
  Synthetic oligonucleotide
acgggcaaagctattggctttaaaggggga

SEQ ID NO: 110440 - DNA, 30 bp, Artificial Sequence
  Synthetic oligonucleotide
aggaaatggtcaaagaaggaggaaggggga

SEQ ID NO: 110441 - DNA, 30 bp, Artificial Sequence
  Synthetic oligonucleotide
gctcttgatacgaggcgaaaggcaggggga

SEQ ID NO: 110442 - DNA, 40 bp, Artificial Sequence
  Synthetic oligonucleotide
aaaataatacattcatggtatggtcggggatcggggggga

SEQ ID NO: 110443 - DNA, 30 bp, Artificial Sequence
  Synthetic oligonucleotide
aactcggcagtacaagaggaccatggggga

SEQ ID NO: 110444 - DNA, 30 bp, Artificial Sequence
  Synthetic oligonucleotide
tcgataactaccaacgcctacactggggga

SEQ ID NO: 110445 - DNA, 30 bp, Artificial Sequence
  Synthetic oligonucleotide
ggaatctggaatgtacaggctgcctgggga

SEQ ID NO: 110446 - DNA, 30 bp, Artificial Sequence
  Synthetic oligonucleotide
agggatagctcgaccgaggtattctgggga

SEQ ID NO: 110447 - DNA, 30 bp, Artificial Sequence
  Synthetic oligonucleotide
gggcatgtcgtgaacaacgcacagtgggga

SEQ ID NO: 110448 - DNA, 30 bp, Artificial Sequence
  Synthetic oligonucleotide
aatgtccgtcgtgtcacgcatacgtgggga

SEQ ID NO: 110449 - DNA, 30 bp, Artificial Sequence
  Synthetic oligonucleotide
ggatactaactagcagtctataattgggga

SEQ ID NO: 110450 - DNA, 30 bp, Artificial Sequence
  Synthetic oligonucleotide
aggggaggttacgtaggctcgttttgggga

SEQ ID NO: 110451 - DNA, 30 bp, Artificial Sequence
  Synthetic oligonucleotide
tggtggtggagacggaatatcgcaatggga

SEQ ID NO: 110452 - DNA, 30 bp, Artificial Sequence
  Synthetic oligonucleotide
tagacgggatggcgcgagaaaatcctggga

SEQ ID NO: 110453 - DNA, 30 bp, Artificial Sequence
  Synthetic oligonucleotide
ggtcaagtgtaaaataaagtgccgctggga

SEQ ID NO: 110454 - DNA, 30 bp, Artificial Sequence
  Synthetic oligonucleotide
aaggtatcctatttggcgaaaactctggga

SEQ ID NO: 110455 - DNA, 30 bp, Artificial Sequence
  Synthetic oligonucleotide
gtttactggtttcgcgcccagcgagtggga

SEQ ID NO: 110456 - DNA, 30 bp, Artificial Sequence
  Synthetic oligonucleotide
tgggaacgataggactctcacgccgtggga

SEQ ID NO: 110457 - DNA, 30 bp, Artificial Sequence
  Synthetic oligonucleotide
tcagcacgccactaatgacaccgggtggga

SEQ ID NO: 110458 - DNA, 30 bp, Artificial Sequence
  Synthetic oligonucleotide
cagagaaaggagggtgattaacgtgtggga

SEQ ID NO: 110459 - DNA, 30 bp, Artificial Sequence
  Synthetic oligonucleotide
tagacttaggtgaatgttatatgtgtggga

SEQ ID NO: 110460 - DNA, 30 bp, Artificial Sequence
  Synthetic oligonucleotide
ggtcgtaacacgcgacgatatggcttggga

SEQ ID NO: 110461 - DNA, 30 bp, Artificial Sequence
  Synthetic oligonucleotide
ggttacccatactgcgagggcgagttggga

SEQ ID NO: 110462 - DNA, 30 bp, Artificial Sequence
  Synthetic oligonucleotide
cagtaagatacagagaccggttcaaatgga

SEQ ID NO: 110463 - DNA, 30 bp, Artificial Sequence
  Synthetic oligonucleotide
aatatctagtcgaggaaagaaggaaatgga

SEQ ID NO: 110464 - DNA, 30 bp, Artificial Sequence
  Synthetic oligonucleotide
gacgattttctaagatggcttcacaatgga

SEQ ID NO: 110465 - DNA, 30 bp, Artificial Sequence
  Synthetic oligonucleotide
gagttcacgtccggaatagcccagaatgga

SEQ ID NO: 110466 - DNA, 30 bp, Artificial Sequence
  Synthetic oligonucleotide
accggtcattgttccctcaccgagaatgga

SEQ ID NO: 110467 - DNA, 30 bp, Artificial Sequence
  Synthetic oligonucleotide
ttcggccgaaaagtgccactgacgaatgga

SEQ ID NO: 110468 - DNA, 30 bp, Artificial Sequence
  Synthetic oligonucleotide
acacagcgaataatctgtacggcgaatgga

SEQ ID NO: 110469 - DNA, 30 bp, Artificial Sequence
  Synthetic oligonucleotide
tccttcaaatggacctatcacttgcatgga

SEQ ID NO: 110470 - DNA, 30 bp, Artificial Sequence
  Synthetic oligonucleotide
ccgggagcgtactagaaggctactgatgga

SEQ ID NO: 110471 - DNA, 30 bp, Artificial Sequence
  Synthetic oligonucleotide
gcagtcgcgctttaagaccagggtgatgga

SEQ ID NO: 110472 - DNA, 30 bp, Artificial Sequence
  Synthetic oligonucleotide
ttcaccgccgatcagggcgcattatatgga

SEQ ID NO: 110473 - DNA, 30 bp, Artificial Sequence
  Synthetic oligonucleotide
gaagagcaaaaattttttcaccgctatgga

SEQ ID NO: 110474 - DNA, 30 bp, Artificial Sequence
  Synthetic oligonucleotide
cttagcagtaaagcgatttagctgtatgga

SEQ ID NO: 110475 - DNA, 30 bp, Artificial Sequence
  Synthetic oligonucleotide
gcagcctcggggtacgtatgggtgactgga

SEQ ID NO: 110476 - DNA, 30 bp, Artificial Sequence
  Synthetic oligonucleotide
gctaaatgactagcgcatacctatactgga

SEQ ID NO: 110477 - DNA, 30 bp, Artificial Sequence
  Synthetic oligonucleotide
gacagagcctaccgtgccgtgggacctgga

SEQ ID NO: 110478 - DNA, 30 bp, Artificial Sequence
  Synthetic oligonucleotide
cagacaccaagagagcagctgtcctctgga

SEQ ID NO: 110479 - DNA, 30 bp, Artificial Sequence
  Synthetic oligonucleotide
gtgtagaagtgccctagccaccatagtgga

SEQ ID NO: 110480 - DNA, 30 bp, Artificial Sequence
  Synthetic oligonucleotide
gttaacggacaagcttcagggcaccgtgga

SEQ ID NO: 110481 - DNA, 30 bp, Artificial Sequence
  Synthetic oligonucleotide
cctgcctagcaaatgtttactacaggtgga

SEQ ID NO: 110482 - DNA, 30 bp, Artificial Sequence
  Synthetic oligonucleotide
agagttatcggataaacgtgtcgcggtgga

SEQ ID NO: 110483 - DNA, 30 bp, Artificial Sequence
  Synthetic oligonucleotide
cgcattggacgtaggggcctatgcggtgga

SEQ ID NO: 110484 - DNA, 30 bp, Artificial Sequence
  Synthetic oligonucleotide
gtgttagcgactctggcggatcagggtgga

SEQ ID NO: 110485 - DNA, 30 bp, Artificial Sequence
  Synthetic oligonucleotide
caatttggttgaagagcctaaaggggtgga

SEQ ID NO: 110486 - DNA, 30 bp, Artificial Sequence
  Synthetic oligonucleotide
cggacacagagaatccctggcaatggtgga

SEQ ID NO: 110487 - DNA, 30 bp, Artificial Sequence
  Synthetic oligonucleotide
tgactcctcggaggaggttgctaatgtgga

SEQ ID NO: 110488 - DNA, 30 bp, Artificial Sequence
  Synthetic oligonucleotide
ctgacactagtcgtcgttacattatgtgga

SEQ ID NO: 110489 - DNA, 30 bp, Artificial Sequence
  Synthetic oligonucleotide
aagtcgcgtcaagcagtcggcttatgtgga

SEQ ID NO: 110490 - DNA, 30 bp, Artificial Sequence
  Synthetic oligonucleotide
cgagtcgtgggaatctgtcccaggtgtgga

SEQ ID NO: 110491 - DNA, 30 bp, Artificial Sequence
  Synthetic oligonucleotide
cacaataaaaggcatataggtctttgtgga

SEQ ID NO: 110492 - DNA, 30 bp, Artificial Sequence
  Synthetic oligonucleotide
tgttctaagtcacagttcgatgtttgtgga

SEQ ID NO: 110493 - DNA, 30 bp, Artificial Sequence
  Synthetic oligonucleotide
acgttctcccttagaccacattttattgga

SEQ ID NO: 110494 - DNA, 30 bp, Artificial Sequence
  Synthetic oligonucleotide
ggagaagtgtaaagactcactagggttgga

SEQ ID NO: 110495 - DNA, 30 bp, Artificial Sequence
  Synthetic oligonucleotide
cgctaagtcactttcaaattacgatttgga

SEQ ID NO: 110496 - DNA, 30 bp, Artificial Sequence
  Synthetic oligonucleotide
tagagaaagtagtcgacgttttccaaatga

SEQ ID NO: 110497 - DNA, 30 bp, Artificial Sequence
  Synthetic oligonucleotide
cgtccgcaatcacatatggtattgaaatga

SEQ ID NO: 110498 - DNA, 30 bp, Artificial Sequence
  Synthetic oligonucleotide
accacgatctcagcagggcaacataaatga

SEQ ID NO: 110499 - DNA, 30 bp, Artificial Sequence
  Synthetic oligonucleotide
tggccacaggtcttcagtatataacaatga

SEQ ID NO: 110500 - DNA, 30 bp, Artificial Sequence
  Synthetic oligonucleotide
tcaaatgtgctgtgtcgaaagatacaatga

SEQ ID NO: 110501 - DNA, 30 bp, Artificial Sequence
  Synthetic oligonucleotide
atgtcgtacagcggagacacctgtcaatga

SEQ ID NO: 110502 - DNA, 30 bp, Artificial Sequence
  Synthetic oligonucleotide
tacggtacaatagctgtgctcgacgaatga

SEQ ID NO: 110503 - DNA, 30 bp, Artificial Sequence
  Synthetic oligonucleotide
agtggcggtggaagccagattggcgaatga

SEQ ID NO: 110504 - DNA, 30 bp, Artificial Sequence
  Synthetic oligonucleotide
cttaatccagcaggatgagggcgggaatga

SEQ ID NO: 110505 - DNA, 30 bp, Artificial Sequence
  Synthetic oligonucleotide
ggccactcgccgtgggcaattatggaatga

SEQ ID NO: 110506 - DNA, 30 bp, Artificial Sequence
  Synthetic oligonucleotide
gtgataagtaagtccggtgtcaggtaatga

SEQ ID NO: 110507 - DNA, 30 bp, Artificial Sequence
  Synthetic oligonucleotide
caatgacgacgtcggatgtacgtgtaatga

SEQ ID NO: 110508 - DNA, 30 bp, Artificial Sequence
  Synthetic oligonucleotide
tcgaggcccatataatcgttttgcacatga

SEQ ID NO: 110509 - DNA, 30 bp, Artificial Sequence
  Synthetic oligonucleotide
actatgtggatcctactgcggaagacatga

SEQ ID NO: 110510 - DNA, 30 bp, Artificial Sequence
  Synthetic oligonucleotide
gttagcacgaatagcaggattgatacatga

SEQ ID NO: 110511 - DNA, 30 bp, Artificial Sequence
  Synthetic oligonucleotide
gtgctatggcgggtaccgcgatacccatga

SEQ ID NO: 110512 - DNA, 30 bp, Artificial Sequence
  Synthetic oligonucleotide
cgaagatatgtgggacggtgacacgcatga

SEQ ID NO: 110513 - DNA, 30 bp, Artificial Sequence
  Synthetic oligonucleotide
gatgtaaacctggtcagccgtgaatcatga

SEQ ID NO: 110514 - DNA, 30 bp, Artificial Sequence
  Synthetic oligonucleotide
ctcagatatcgcactagcacagcatcatga

SEQ ID NO: 110515 - DNA, 30 bp, Artificial Sequence
  Synthetic oligonucleotide
ccggcggtaccagacgaagtacacagatga

SEQ ID NO: 110516 - DNA, 30 bp, Artificial Sequence
  Synthetic oligonucleotide
tggtgttgcgtaaaggagctagacagatga

SEQ ID NO: 110517 - DNA, 30 bp, Artificial Sequence
  Synthetic oligonucleotide
gcaaacgtatagatgcaatacgtgagatga

SEQ ID NO: 110518 - DNA, 30 bp, Artificial Sequence
  Synthetic oligonucleotide
aactgaggagacgtgttttctagttgatga

SEQ ID NO: 110519 - DNA, 30 bp, Artificial Sequence
  Synthetic oligonucleotide
ggtgatgttagacctccatcgaacctatga

SEQ ID NO: 110520 - DNA, 30 bp, Artificial Sequence
  Synthetic oligonucleotide
aataggagtaacaagctaaggcctctatga

SEQ ID NO: 110521 - DNA, 30 bp, Artificial Sequence
  Synthetic oligonucleotide
acgaaaaaggcactttcgtatcgagtatga

SEQ ID NO: 110522 - DNA, 30 bp, Artificial Sequence
  Synthetic oligonucleotide
atccagggggatacgaggctataggtatga

SEQ ID NO: 110523 - DNA, 30 bp, Artificial Sequence
  Synthetic oligonucleotide
tcctaaggcgtgagtgaatactcggtatga

SEQ ID NO: 110524 - DNA, 30 bp, Artificial Sequence
  Synthetic oligonucleotide
agggagtgaggtaactagaagggggtatga

SEQ ID NO: 110525 - DNA, 30 bp, Artificial Sequence
  Synthetic oligonucleotide
catcagtatccaccgtgggagagtgtatga

SEQ ID NO: 110526 - DNA, 30 bp, Artificial Sequence
  Synthetic oligonucleotide
tgatcgagatgggcccacatttcattatga

SEQ ID NO: 110527 - DNA, 30 bp, Artificial Sequence
  Synthetic oligonucleotide
tgctcgtaagcacgatactatatattatga

SEQ ID NO: 110528 - DNA, 30 bp, Artificial Sequence
  Synthetic oligonucleotide
ctcaacaagctcatgggtgcgtgcttatga

SEQ ID NO: 110529 - DNA, 30 bp, Artificial Sequence
  Synthetic oligonucleotide
ccgtcaaaaaggggagagtttcgtttatga

SEQ ID NO: 110530 - DNA, 30 bp, Artificial Sequence
  Synthetic oligonucleotide
tacgggccaccacctgttagccacaactga

SEQ ID NO: 110531 - DNA, 30 bp, Artificial Sequence
  Synthetic oligonucleotide
aaacgaaagaaccagcacccttcagactga

SEQ ID NO: 110532 - DNA, 30 bp, Artificial Sequence
  Synthetic oligonucleotide
gctagctatgagaacgttacccgcgactga

SEQ ID NO: 110533 - DNA, 30 bp, Artificial Sequence
  Synthetic oligonucleotide
ccggtgcactgatcatgttgcatctactga

SEQ ID NO: 110534 - DNA, 30 bp, Artificial Sequence
  Synthetic oligonucleotide
atgtggttcgcatggggcaggccgtactga

SEQ ID NO: 110535 - DNA, 30 bp, Artificial Sequence
  Synthetic oligonucleotide
gcaacgataggtgattgatatccgtactga

SEQ ID NO: 110536 - DNA, 30 bp, Artificial Sequence
  Synthetic oligonucleotide
cagacgaaaaccattcttatacggtactga

SEQ ID NO: 110537 - DNA, 29 bp, Artificial Sequence
  Synthetic oligonucleotide
aacgattacttcgcggaaacccgacctga

SEQ ID NO: 110538 - DNA, 30 bp, Artificial Sequence
  Synthetic oligonucleotide
caaatcggtcagatgccccaatcgccctga

SEQ ID NO: 110539 - DNA, 30 bp, Artificial Sequence
  Synthetic oligonucleotide
agggatatagtaagtataaccattccctga

SEQ ID NO: 110540 - DNA, 30 bp, Artificial Sequence
  Synthetic oligonucleotide
aggacgacactatgcgttcaaagcgcctga

SEQ ID NO: 110541 - DNA, 30 bp, Artificial Sequence
  Synthetic oligonucleotide
aaagaggataggtgagttaagtcctcctga

SEQ ID NO: 110542 - DNA, 30 bp, Artificial Sequence
  Synthetic oligonucleotide
ggcggctagtaactgatattttgctcctga

SEQ ID NO: 110543 - DNA, 30 bp, Artificial Sequence
  Synthetic oligonucleotide
tattaacacgtggtgttaagatctagctga

SEQ ID NO: 110544 - DNA, 30 bp, Artificial Sequence
  Synthetic oligonucleotide
tcgttgacttaacattgtctgagtagctga

SEQ ID NO: 110545 - DNA, 30 bp, Artificial Sequence
  Synthetic oligonucleotide
gcagcgagtaagcagcgcaagctacgctga

SEQ ID NO: 110546 - DNA, 30 bp, Artificial Sequence
  Synthetic oligonucleotide
agaattgaggtgaacatcgacaggcgctga

SEQ ID NO: 110547 - DNA, 30 bp, Artificial Sequence
  Synthetic oligonucleotide
taagaggcttagaggacgttcagtcgctga

SEQ ID NO: 110548 - DNA, 30 bp, Artificial Sequence
  Synthetic oligonucleotide
catgaagggagttagcccagagccggctga

SEQ ID NO: 110549 - DNA, 29 bp, Artificial Sequence
  Synthetic oligonucleotide
aacaccacgtgttgttacctcttggctga

SEQ ID NO: 110550 - DNA, 30 bp, Artificial Sequence
  Synthetic oligonucleotide
gtcatgcattcgggcttgtacctatgctga

SEQ ID NO: 110551 - DNA, 30 bp, Artificial Sequence
  Synthetic oligonucleotide
tacattgattcgaacacgtctctctgctga

SEQ ID NO: 110552 - DNA, 30 bp, Artificial Sequence
  Synthetic oligonucleotide
gctgcgttgcaagaggagtcggattgctga

SEQ ID NO: 110553 - DNA, 30 bp, Artificial Sequence
  Synthetic oligonucleotide
tagagatgagctgggcgcatggacatctga

SEQ ID NO: 110554 - DNA, 30 bp, Artificial Sequence
  Synthetic oligonucleotide
aagttcgggcaaggcattatcgctctctga

SEQ ID NO: 110555 - DNA, 30 bp, Artificial Sequence
  Synthetic oligonucleotide
gagctaggagcgaggtattaactagtctga

SEQ ID NO: 110556 - DNA, 30 bp, Artificial Sequence
  Synthetic oligonucleotide
cccagacgcgagcgtgtagtggccgtctga

SEQ ID NO: 110557 - DNA, 30 bp, Artificial Sequence
  Synthetic oligonucleotide
tgagaatgactcatgggatatgccgtctga

SEQ ID NO: 110558 - DNA, 30 bp, Artificial Sequence
  Synthetic oligonucleotide
tattaggcctgaaggctggagttcgtctga

SEQ ID NO: 110559 - DNA, 30 bp, Artificial Sequence
  Synthetic oligonucleotide
tctgtagcgataagatatgctcaggtctga

SEQ ID NO: 110560 - DNA, 30 bp, Artificial Sequence
  Synthetic oligonucleotide
gggccagcgctctctagatgtcaaaagtga

SEQ ID NO: 110561 - DNA, 30 bp, Artificial Sequence
  Synthetic oligonucleotide
gaggtcggaaacaattaccgaggcaagtga

SEQ ID NO: 110562 - DNA, 30 bp, Artificial Sequence
  Synthetic oligonucleotide
cattgttactaccacgattggggcaagtga

SEQ ID NO: 110563 - DNA, 30 bp, Artificial Sequence
  Synthetic oligonucleotide
actcgcgtgctactatgttgggataagtga

SEQ ID NO: 110564 - DNA, 30 bp, Artificial Sequence
  Synthetic oligonucleotide
cctttaagggtgcagggccccagacagtga

SEQ ID NO: 110565 - DNA, 31 bp, Artificial Sequence
  Synthetic oligonucleotide
tgtacgttgggtaacggggttgcgacagtga

SEQ ID NO: 110566 - DNA, 30 bp, Artificial Sequence
  Synthetic oligonucleotide
tagtgggtatcggctcctatcaagcagtga

SEQ ID NO: 110567 - DNA, 30 bp, Artificial Sequence
  Synthetic oligonucleotide
ttgtgtattcagcttaaagcactagagtga

SEQ ID NO: 110568 - DNA, 30 bp, Artificial Sequence
  Synthetic oligonucleotide
cagtcctctagattcgtcatactagagtga

SEQ ID NO: 110569 - DNA, 30 bp, Artificial Sequence
  Synthetic oligonucleotide
gcggatcataacattggtgagtcatagtga

SEQ ID NO: 110570 - DNA, 30 bp, Artificial Sequence
  Synthetic oligonucleotide
gccgagatctatcatgggcaaatttagtga

SEQ ID NO: 110571 - DNA, 30 bp, Artificial Sequence
  Synthetic oligonucleotide
cctccggaccacaacgacaccttcacgtga

SEQ ID NO: 110572 - DNA, 30 bp, Artificial Sequence
  Synthetic oligonucleotide
gcgttgatttggcaaggtctgatgacgtga

SEQ ID NO: 110573 - DNA, 30 bp, Artificial Sequence
  Synthetic oligonucleotide
gatcacgataatactctaacaagagcgtga

SEQ ID NO: 110574 - DNA, 30 bp, Artificial Sequence
  Synthetic oligonucleotide
ggctggaaagaatttgagtcgtgtgcgtga

SEQ ID NO: 110575 - DNA, 30 bp, Artificial Sequence
  Synthetic oligonucleotide
tcacggctaaatcccaggattagttcgtga

SEQ ID NO: 110576 - DNA, 30 bp, Artificial Sequence
  Synthetic oligonucleotide
ctgtgtagctaataagaacacaaaaggtga

SEQ ID NO: 110577 - DNA, 30 bp, Artificial Sequence
  Synthetic oligonucleotide
cgtagttttattcatcgaacccaaaggtga

SEQ ID NO: 110578 - DNA, 30 bp, Artificial Sequence
  Synthetic oligonucleotide
ggtccccaacttggcccgcgaagaaggtga

SEQ ID NO: 110579 - DNA, 30 bp, Artificial Sequence
  Synthetic oligonucleotide
gtgttacgcgggtatacgagaagcaggtga

SEQ ID NO: 110580 - DNA, 30 bp, Artificial Sequence
  Synthetic oligonucleotide
gtgcaatgggcggtccacaggctgaggtga

SEQ ID NO: 110581 - DNA, 30 bp, Artificial Sequence
  Synthetic oligonucleotide
acgatccggatacgacatgcagggcggtga

SEQ ID NO: 110582 - DNA, 30 bp, Artificial Sequence
  Synthetic oligonucleotide
ggaccttggctaacgtgacaggctcggtga

SEQ ID NO: 110583 - DNA, 30 bp, Artificial Sequence
  Synthetic oligonucleotide
tgtgcaggtaaggcctgagtataagggtga

SEQ ID NO: 110584 - DNA, 30 bp, Artificial Sequence
  Synthetic oligonucleotide
acgaaacaattcgacgcgaggcgatggtga

SEQ ID NO: 110585 - DNA, 30 bp, Artificial Sequence
  Synthetic oligonucleotide
ggcgggccacccgtgtcaacaagctggtga

SEQ ID NO: 110586 - DNA, 30 bp, Artificial Sequence
  Synthetic oligonucleotide
aatcgaagttaatcgcgaacagggtggtga

SEQ ID NO: 110587 - DNA, 30 bp, Artificial Sequence
  Synthetic oligonucleotide
gtctacaaaatcagattacaggattggtga

SEQ ID NO: 110588 - DNA, 30 bp, Artificial Sequence
  Synthetic oligonucleotide
atccaaaaaacggggacaaaaagttggtga

SEQ ID NO: 110589 - DNA, 30 bp, Artificial Sequence
  Synthetic oligonucleotide
agtggtcatagggatttgcatgcaatgtga

SEQ ID NO: 110590 - DNA, 30 bp, Artificial Sequence
  Synthetic oligonucleotide
aggaactgcactcataacgcgctaatgtga

SEQ ID NO: 110591 - DNA, 30 bp, Artificial Sequence
  Synthetic oligonucleotide
gaaaaagagccagattcgagcaagatgtga

SEQ ID NO: 110592 - DNA, 30 bp, Artificial Sequence
  Synthetic oligonucleotide
ccagtgtttcccggttcgactagactgtga

SEQ ID NO: 110593 - DNA, 30 bp, Artificial Sequence
  Synthetic oligonucleotide
ttatcaggagtatggtgtggcgacctgtga

SEQ ID NO: 110594 - DNA, 30 bp, Artificial Sequence
  Synthetic oligonucleotide
gggatagagctacctacgactgcagtgtga

SEQ ID NO: 110595 - DNA, 30 bp, Artificial Sequence
  Synthetic oligonucleotide
cctttggggatagatatgtgggtagtgtga

SEQ ID NO: 110596 - DNA, 30 bp, Artificial Sequence
  Synthetic oligonucleotide
taagttcgctcccattgttactaggtgtga

SEQ ID NO: 110597 - DNA, 30 bp, Artificial Sequence
  Synthetic oligonucleotide
ataagtaacaatttaagacccgttgtgtga

SEQ ID NO: 110598 - DNA, 30 bp, Artificial Sequence
  Synthetic oligonucleotide
caagaggcgtcatgatagtcatttgtgtga

SEQ ID NO: 110599 - DNA, 30 bp, Artificial Sequence
  Synthetic oligonucleotide
tcagcgcattggaggcatggacaattgtga

SEQ ID NO: 110600 - DNA, 30 bp, Artificial Sequence
  Synthetic oligonucleotide
caatggtacggggtcaagttttaattgtga

SEQ ID NO: 110601 - DNA, 30 bp, Artificial Sequence
  Synthetic oligonucleotide
tagtctataacggggtgaattacgttgtga

SEQ ID NO: 110602 - DNA, 30 bp, Artificial Sequence
  Synthetic oligonucleotide
agggttggtcgggtaagaaagcctttgtga

SEQ ID NO: 110603 - DNA, 30 bp, Artificial Sequence
  Synthetic oligonucleotide
aggatgtgtgtgccttctgcttaaaattga

SEQ ID NO: 110604 - DNA, 30 bp, Artificial Sequence
  Synthetic oligonucleotide
agtaacccggtactaagtaggataaattga

SEQ ID NO: 110605 - DNA, 30 bp, Artificial Sequence
  Synthetic oligonucleotide
cacggagagtcgtaagaaactgtcaattga

SEQ ID NO: 110606 - DNA, 30 bp, Artificial Sequence
  Synthetic oligonucleotide
aggcgtatggcgatcgggccggagaattga

SEQ ID NO: 110607 - DNA, 30 bp, Artificial Sequence
  Synthetic oligonucleotide
ggcagagcacgaaggaacactggacattga

SEQ ID NO: 110608 - DNA, 30 bp, Artificial Sequence
  Synthetic oligonucleotide
agggggcttggtgcgtcggtcactcattga

SEQ ID NO: 110609 - DNA, 30 bp, Artificial Sequence
  Synthetic oligonucleotide
gggaaggtctaccatgcatgcttcgattga

SEQ ID NO: 110610 - DNA, 30 bp, Artificial Sequence
  Synthetic oligonucleotide
tcagtaaacacggatccaaatgtggattga

SEQ ID NO: 110611 - DNA, 30 bp, Artificial Sequence
  Synthetic oligonucleotide
taacacttagaagatcaatagcatgattga

SEQ ID NO: 110612 - DNA, 30 bp, Artificial Sequence
  Synthetic oligonucleotide
gacggggggatagtcacaagcttatattga

SEQ ID NO: 110613 - DNA, 30 bp, Artificial Sequence
  Synthetic oligonucleotide
gccagacctcaactaggtctcaaaacttga

SEQ ID NO: 110614 - DNA, 30 bp, Artificial Sequence
  Synthetic oligonucleotide
ttaaatgatcaactgcagcgataaacttga

SEQ ID NO: 110615 - DNA, 30 bp, Artificial Sequence
  Synthetic oligonucleotide
ttaaaactacatggaaaaacgggaacttga

SEQ ID NO: 110616 - DNA, 30 bp, Artificial Sequence
  Synthetic oligonucleotide
tctcggtccaagtaactgatagcgacttga

SEQ ID NO: 110617 - DNA, 30 bp, Artificial Sequence
  Synthetic oligonucleotide
agataggggataggctaccaacggacttga

SEQ ID NO: 110618 - DNA, 30 bp, Artificial Sequence
  Synthetic oligonucleotide
gcaacactaatcgaggaactacgatcttga

SEQ ID NO: 110619 - DNA, 30 bp, Artificial Sequence
  Synthetic oligonucleotide
ccgtattcaagaagcgcgaccacaagttga

SEQ ID NO: 110620 - DNA, 30 bp, Artificial Sequence
  Synthetic oligonucleotide
gcaaagatcagtctgagcgtcgcgagttga

SEQ ID NO: 110621 - DNA, 30 bp, Artificial Sequence
  Synthetic oligonucleotide
ctcctgagacgtccaccggcgaagcgttga

SEQ ID NO: 110622 - DNA, 30 bp, Artificial Sequence
  Synthetic oligonucleotide
cttccagacagagtcagtaataaaggttga

SEQ ID NO: 110623 - DNA, 30 bp, Artificial Sequence
  Synthetic oligonucleotide
caaccgcgagcaggtgttaattgaggttga

SEQ ID NO: 110624 - DNA, 30 bp, Artificial Sequence
  Synthetic oligonucleotide
attgtcacagagagtgaagtctatggttga

SEQ ID NO: 110625 - DNA, 30 bp, Artificial Sequence
  Synthetic oligonucleotide
tcgccttaaggcggaatccagaggatttga

SEQ ID NO: 110626 - DNA, 30 bp, Artificial Sequence
  Synthetic oligonucleotide
aagggagccacggctccgacttgtatttga

SEQ ID NO: 110627 - DNA, 30 bp, Artificial Sequence
  Synthetic oligonucleotide
gacccttaagacatgatcccctagctttga

SEQ ID NO: 110628 - DNA, 30 bp, Artificial Sequence
  Synthetic oligonucleotide
tagtcaactggtatgtatcgtgtgctttga

SEQ ID NO: 110629 - DNA, 30 bp, Artificial Sequence
  Synthetic oligonucleotide
ggtgtaagaagcaaaactcacacggtttga

SEQ ID NO: 110630 - DNA, 30 bp, Artificial Sequence
  Synthetic oligonucleotide
atggtcgcgtatgaaatgagtactgtttga

SEQ ID NO: 110631 - DNA, 30 bp, Artificial Sequence
  Synthetic oligonucleotide
agaataatagggtaaagaggtagaaaaata

SEQ ID NO: 110632 - DNA, 30 bp, Artificial Sequence
  Synthetic oligonucleotide
tgaagggtgttcacgtcggtgacgaaaata

SEQ ID NO: 110633 - DNA, 30 bp, Artificial Sequence
  Synthetic oligonucleotide
tctaacacagtcggctgatcgtataaaata

SEQ ID NO: 110634 - DNA, 31 bp, Artificial Sequence
  Synthetic oligonucleotide
gcaatcgccagcagctaacgcgttacaaata

SEQ ID NO: 110635 - DNA, 30 bp, Artificial Sequence
  Synthetic oligonucleotide
ccacaagaggtgttgaggctacatcaaata

SEQ ID NO: 110636 - DNA, 30 bp, Artificial Sequence
  Synthetic oligonucleotide
acggaaaccggttcctcggggcacgaaata

SEQ ID NO: 110637 - DNA, 30 bp, Artificial Sequence
  Synthetic oligonucleotide
ttcaaacaatggattgcgggtcgcgaaata

SEQ ID NO: 110638 - DNA, 29 bp, Artificial Sequence
  Synthetic oligonucleotide
cgtaacgcatctgggcaacaaaggaaata

SEQ ID NO: 110639 - DNA, 30 bp, Artificial Sequence
  Synthetic oligonucleotide
gagcatctgacaaagcccgtacgtgaaata

SEQ ID NO: 110640 - DNA, 30 bp, Artificial Sequence
  Synthetic oligonucleotide
gagttaggaaaatctgagagtcttgaaata

SEQ ID NO: 110641 - DNA, 30 bp, Artificial Sequence
  Synthetic oligonucleotide
atcgacgtggctacaccatgagcataaata

SEQ ID NO: 110642 - DNA, 30 bp, Artificial Sequence
  Synthetic oligonucleotide
cttacccctaagtcatcagtcagttaaata

SEQ ID NO: 110643 - DNA, 30 bp, Artificial Sequence
  Synthetic oligonucleotide
tttcgcactgaagccgaagaagcaacaata

SEQ ID NO: 110644 - DNA, 30 bp, Artificial Sequence
  Synthetic oligonucleotide
ccggaagcccgaccgtctgcagccacaata

SEQ ID NO: 110645 - DNA, 30 bp, Artificial Sequence
  Synthetic oligonucleotide
agtgcccagtgaccgaccgaatgtacaata

SEQ ID NO: 110646 - DNA, 30 bp, Artificial Sequence
  Synthetic oligonucleotide
taagttagacagacagaataaattacaata

SEQ ID NO: 110647 - DNA, 30 bp, Artificial Sequence
  Synthetic oligonucleotide
agtgagccaacttagcttcgagagccaata

SEQ ID NO: 110648 - DNA, 30 bp, Artificial Sequence
  Synthetic oligonucleotide
cacggttcgggattaaagtcggcgccaata

SEQ ID NO: 110649 - DNA, 31 bp, Artificial Sequence
  Synthetic oligonucleotide
ataaagtgtatgagaacatggacctccaata

SEQ ID NO: 110650 - DNA, 30 bp, Artificial Sequence
  Synthetic oligonucleotide
gaactgagcataacgcagggtagagcaata

SEQ ID NO: 110651 - DNA, 30 bp, Artificial Sequence
  Synthetic oligonucleotide
ccattcgataggtagctacacggcgcaata

SEQ ID NO: 110652 - DNA, 30 bp, Artificial Sequence
  Synthetic oligonucleotide
atcggcatcgaaaaccgtggctgcgcaata

SEQ ID NO: 110653 - DNA, 30 bp, Artificial Sequence
  Synthetic oligonucleotide
ggcgtacatctcgaggatgaattcgcaata

SEQ ID NO: 110654 - DNA, 30 bp, Artificial Sequence
  Synthetic oligonucleotide
ggctaggtacatgcactagggagggcaata

SEQ ID NO: 110655 - DNA, 30 bp, Artificial Sequence
  Synthetic oligonucleotide
gtagacccgacatttcggtgcgctgcaata

SEQ ID NO: 110656 - DNA, 30 bp, Artificial Sequence
  Synthetic oligonucleotide
gaagtgaggcaccagtgatactctgcaata

SEQ ID NO: 110657 - DNA, 30 bp, Artificial Sequence
  Synthetic oligonucleotide
tgccccgactctaatacaaagaactcaata

SEQ ID NO: 110658 - DNA, 30 bp, Artificial Sequence
  Synthetic oligonucleotide
cgaggcacttccatgggtacgacctcaata

SEQ ID NO: 110659 - DNA, 30 bp, Artificial Sequence
  Synthetic oligonucleotide
agctaagtataggtagggtaccagtcaata

SEQ ID NO: 110660 - DNA, 30 bp, Artificial Sequence
  Synthetic oligonucleotide
ttgaacaagtgaagggtaagccacagaata

SEQ ID NO: 110661 - DNA, 30 bp, Artificial Sequence
  Synthetic oligonucleotide
tgcaaggatagaagagcaaccgacagaata

SEQ ID NO: 110662 - DNA, 30 bp, Artificial Sequence
  Synthetic oligonucleotide
gcctcaactgaagagtggcccgtcagaata

SEQ ID NO: 110663 - DNA, 30 bp, Artificial Sequence
  Synthetic oligonucleotide
acaacgaacggtcgcgctctaaggagaata

SEQ ID NO: 110664 - DNA, 30 bp, Artificial Sequence
  Synthetic oligonucleotide
aagacggaacacaggctgagtttgagaata

SEQ ID NO: 110665 - DNA, 30 bp, Artificial Sequence
  Synthetic oligonucleotide
ggatctagaggatcacccccggcacgaata

SEQ ID NO: 110666 - DNA, 30 bp, Artificial Sequence
  Synthetic oligonucleotide
agcaatcgagcatggtgtaagattcgaata

SEQ ID NO: 110667 - DNA, 30 bp, Artificial Sequence
  Synthetic oligonucleotide
gtaggcgcgtagcctctgtccggatgaata

SEQ ID NO: 110668 - DNA, 30 bp, Artificial Sequence
  Synthetic oligonucleotide
ctccgcgtgcgaaccgtgctctgaataata

SEQ ID NO: 110669 - DNA, 30 bp, Artificial Sequence
  Synthetic oligonucleotide
cgaattcggtaaaccccagccaggataata

SEQ ID NO: 110670 - DNA, 30 bp, Artificial Sequence
  Synthetic oligonucleotide
acatcataaaaggtgtacccacatataata

SEQ ID NO: 110671 - DNA, 27 bp, Artificial Sequence
  Synthetic oligonucleotide
ggaaacctactagaccgaggtataata

SEQ ID NO: 110672 - DNA, 30 bp, Artificial Sequence
  Synthetic oligonucleotide
caagggaagacatctcatgtgatgctaata

SEQ ID NO: 110673 - DNA, 30 bp, Artificial Sequence
  Synthetic oligonucleotide
gcgggcatggaggcctcctcaaaagtaata

SEQ ID NO: 110674 - DNA, 30 bp, Artificial Sequence
  Synthetic oligonucleotide
acagacccacatcctcttaggtgagtaata

SEQ ID NO: 110675 - DNA, 30 bp, Artificial Sequence
  Synthetic oligonucleotide
ccggggaaaattacagtcagcagcgtaata

SEQ ID NO: 110676 - DNA, 30 bp, Artificial Sequence
  Synthetic oligonucleotide
atagatgggggctgtccagcaaaggtaata

SEQ ID NO: 110677 - DNA, 30 bp, Artificial Sequence
  Synthetic oligonucleotide
caggacgtgttacacctcatctccttaata

SEQ ID NO: 110678 - DNA, 30 bp, Artificial Sequence
  Synthetic oligonucleotide
acgttgcttctctcgtagaacaccaacata

SEQ ID NO: 110679 - DNA, 30 bp, Artificial Sequence
  Synthetic oligonucleotide
gggcatctacccaatccattaattaacata

SEQ ID NO: 110680 - DNA, 30 bp, Artificial Sequence
  Synthetic oligonucleotide
gtcaaaaagatttggttaagccttaacata

SEQ ID NO: 110681 - DNA, 30 bp, Artificial Sequence
  Synthetic oligonucleotide
gaggagagtgatttccacagataccacata

SEQ ID NO: 110682 - DNA, 30 bp, Artificial Sequence
  Synthetic oligonucleotide
caatagggcgacatgggtatcttccacata

SEQ ID NO: 110683 - DNA, 30 bp, Artificial Sequence
  Synthetic oligonucleotide
cccacagactcccgagcgtaccggcacata

SEQ ID NO: 110684 - DNA, 30 bp, Artificial Sequence
  Synthetic oligonucleotide
gcctaccagtgatgggaaatcaaagacata

SEQ ID NO: 110685 - DNA, 30 bp, Artificial Sequence
  Synthetic oligonucleotide
gtgtagcagggcatagcgtacaccgacata

SEQ ID NO: 110686 - DNA, 30 bp, Artificial Sequence
  Synthetic oligonucleotide
accttataacatcccgacactagtgacata

SEQ ID NO: 110687 - DNA, 30 bp, Artificial Sequence
  Synthetic oligonucleotide
ctctagcgagaggcgacataggcatacata

SEQ ID NO: 110688 - DNA, 30 bp, Artificial Sequence
  Synthetic oligonucleotide
cctgccgactagagttaagatagatacata

SEQ ID NO: 110689 - DNA, 30 bp, Artificial Sequence
  Synthetic oligonucleotide
gcctagtgaggaccgatttgtgtgtacata

SEQ ID NO: 110690 - DNA, 30 bp, Artificial Sequence
  Synthetic oligonucleotide
aaagtgttgtaaacaccaagatggcccata

SEQ ID NO: 110691 - DNA, 30 bp, Artificial Sequence
  Synthetic oligonucleotide
gttgttgggtaaagagggccaatgcccata

SEQ ID NO: 110692 - DNA, 30 bp, Artificial Sequence
  Synthetic oligonucleotide
aggttctgaccagaagaacatcaggccata

SEQ ID NO: 110693 - DNA, 30 bp, Artificial Sequence
  Synthetic oligonucleotide
ccttaataaaagtgatagcactgggccata

SEQ ID NO: 110694 - DNA, 30 bp, Artificial Sequence
  Synthetic oligonucleotide
aggtattgctaactggcaagtatctccata

SEQ ID NO: 110695 - DNA, 30 bp, Artificial Sequence
  Synthetic oligonucleotide
cgacgagaggtggggaggacgcggtccata

SEQ ID NO: 110696 - DNA, 30 bp, Artificial Sequence
  Synthetic oligonucleotide
gtcggagtaggggtcaggttagaaagcata

SEQ ID NO: 110697 - DNA, 30 bp, Artificial Sequence
  Synthetic oligonucleotide
cgtcttgcgttgcgtcacgaggtaagcata

SEQ ID NO: 110698 - DNA, 30 bp, Artificial Sequence
  Synthetic oligonucleotide
gggtaggtatgcattgcgctgaatagcata

SEQ ID NO: 110699 - DNA, 30 bp, Artificial Sequence
  Synthetic oligonucleotide
tgtcgtacaatagaagtttaaacgcgcata

SEQ ID NO: 110700 - DNA, 30 bp, Artificial Sequence
  Synthetic oligonucleotide
gggttcagcttccgtacaaaacggcgcata

SEQ ID NO: 110701 - DNA, 31 bp, Artificial Sequence
  Synthetic oligonucleotide
ggaccagagtaattgcgtgacgtcaggcata

SEQ ID NO: 110702 - DNA, 30 bp, Artificial Sequence
  Synthetic oligonucleotide
cttgtatgaacacgtataattataggcata

SEQ ID NO: 110703 - DNA, 30 bp, Artificial Sequence
  Synthetic oligonucleotide
catggtgttgaacgccgaggatacggcata

SEQ ID NO: 110704 - DNA, 30 bp, Artificial Sequence
  Synthetic oligonucleotide
ccacgctatgtaggtgatgtaagcggcata

SEQ ID NO: 110705 - DNA, 30 bp, Artificial Sequence
  Synthetic oligonucleotide
cactcataaggggccaactcaggtggcata

SEQ ID NO: 110706 - DNA, 30 bp, Artificial Sequence
  Synthetic oligonucleotide
tcgctctctgtactaaataccgaatgcata

SEQ ID NO: 110707 - DNA, 30 bp, Artificial Sequence
  Synthetic oligonucleotide
aaatcaatggatggtacttatcagtgcata

SEQ ID NO: 110708 - DNA, 30 bp, Artificial Sequence
  Synthetic oligonucleotide
cacgcatcgccggaggggttaagaatcata

SEQ ID NO: 110709 - DNA, 30 bp, Artificial Sequence
  Synthetic oligonucleotide
ccggaatgccacggccaggagcacatcata

SEQ ID NO: 110710 - DNA, 30 bp, Artificial Sequence
  Synthetic oligonucleotide
tggtaggtgagcgaaaggatactcatcata

SEQ ID NO: 110711 - DNA, 30 bp, Artificial Sequence
  Synthetic oligonucleotide
tcggagggaagaatatccccctcgatcata

SEQ ID NO: 110712 - DNA, 30 bp, Artificial Sequence
  Synthetic oligonucleotide
tggaccggtattgaaaaggaacgtctcata

SEQ ID NO: 110713 - DNA, 30 bp, Artificial Sequence
  Synthetic oligonucleotide
aaacaggactcgcgacaggctatagtcata

SEQ ID NO: 110714 - DNA, 30 bp, Artificial Sequence
  Synthetic oligonucleotide
ggggacgatcccttcattgagagggtcata

SEQ ID NO: 110715 - DNA, 30 bp, Artificial Sequence
  Synthetic oligonucleotide
ccgtctccaagtggttctactgtggtcata

SEQ ID NO: 110716 - DNA, 30 bp, Artificial Sequence
  Synthetic oligonucleotide
ggaagtaagcgtcgatactttgttgtcata

SEQ ID NO: 110717 - DNA, 30 bp, Artificial Sequence
  Synthetic oligonucleotide
aaccgttcgcaatctgggccatccttcata

SEQ ID NO: 110718 - DNA, 30 bp, Artificial Sequence
  Synthetic oligonucleotide
aaggaaggtctaactaggtcatgcttcata

SEQ ID NO: 110719 - DNA, 30 bp, Artificial Sequence
  Synthetic oligonucleotide
ctaacttacaacaagatgctaccgttcata

SEQ ID NO: 110720 - DNA, 30 bp, Artificial Sequence
  Synthetic oligonucleotide
gactataagggcgctagacctgcgttcata

SEQ ID NO: 110721 - DNA, 30 bp, Artificial Sequence
  Synthetic oligonucleotide
cgactgcgtggatcgctaacggggttcata

SEQ ID NO: 110722 - DNA, 30 bp, Artificial Sequence
  Synthetic oligonucleotide
ggaggcctacttcataagtctcaaaagata

SEQ ID NO: 110723 - DNA, 30 bp, Artificial Sequence
  Synthetic oligonucleotide
ttaagaggtaacgtaccaggtataaagata

SEQ ID NO: 110724 - DNA, 31 bp, Artificial Sequence
  Synthetic oligonucleotide
ggtggtaataaggctgctttgaatcaagata

SEQ ID NO: 110725 - DNA, 30 bp, Artificial Sequence
  Synthetic oligonucleotide
caaatgaagtaggagaaatgtgctaagata

SEQ ID NO: 110726 - DNA, 30 bp, Artificial Sequence
  Synthetic oligonucleotide
agaatgtgagcgttacgcggtatccagata

SEQ ID NO: 110727 - DNA, 30 bp, Artificial Sequence
  Synthetic oligonucleotide
tggtcacagttggctagggccaagcagata

SEQ ID NO: 110728 - DNA, 30 bp, Artificial Sequence
  Synthetic oligonucleotide
gctcgcgatgacttaaataatggtcagata

SEQ ID NO: 110729 - DNA, 30 bp, Artificial Sequence
  Synthetic oligonucleotide
acgtagttgaagtgtatgcagccagagata

SEQ ID NO: 110730 - DNA, 30 bp, Artificial Sequence
  Synthetic oligonucleotide
aattgagaacaaaatcaacgaaccgagata

SEQ ID NO: 110731 - DNA, 30 bp, Artificial Sequence
  Synthetic oligonucleotide
agccggtattgagtgatgtaaaaggagata

SEQ ID NO: 110732 - DNA, 30 bp, Artificial Sequence
  Synthetic oligonucleotide
tgaaagctggacaggagcggatcggagata

SEQ ID NO: 110733 - DNA, 30 bp, Artificial Sequence
  Synthetic oligonucleotide
ttgccaagtgcgtcaatcaatgcatagata

SEQ ID NO: 110734 - DNA, 30 bp, Artificial Sequence
  Synthetic oligonucleotide
acgcaccacgacgtcccatggaactagata

SEQ ID NO: 110735 - DNA, 30 bp, Artificial Sequence
  Synthetic oligonucleotide
gtgcgtagtttactgggagcaatgtagata

SEQ ID NO: 110736 - DNA, 30 bp, Artificial Sequence
  Synthetic oligonucleotide
gcgcaacggtgaggataaaaatgaacgata

SEQ ID NO: 110737 - DNA, 30 bp, Artificial Sequence
  Synthetic oligonucleotide
actcaagaaaattacgggctgaccacgata

SEQ ID NO: 110738 - DNA, 30 bp, Artificial Sequence
  Synthetic oligonucleotide
gacattatggagcgaaagcgcgttacgata

SEQ ID NO: 110739 - DNA, 30 bp, Artificial Sequence
  Synthetic oligonucleotide
ctaggctaggtaagattgtaatgaccgata

SEQ ID NO: 110740 - DNA, 30 bp, Artificial Sequence
  Synthetic oligonucleotide
gaataccgatgaacggtagacgtgccgata

SEQ ID NO: 110741 - DNA, 30 bp, Artificial Sequence
  Synthetic oligonucleotide
cacgaccggctatagtaagccctggcgata

SEQ ID NO: 110742 - DNA, 30 bp, Artificial Sequence
  Synthetic oligonucleotide
agatcatagatttgttgttagggtgcgata

SEQ ID NO: 110743 - DNA, 30 bp, Artificial Sequence
  Synthetic oligonucleotide
cccgggtggatcacacgccccgaatcgata

SEQ ID NO: 110744 - DNA, 30 bp, Artificial Sequence
  Synthetic oligonucleotide
atactgaagtccgatgggtttgacaggata

SEQ ID NO: 110745 - DNA, 30 bp, Artificial Sequence
  Synthetic oligonucleotide
catcagagggaggcaggcgatctgaggata

SEQ ID NO: 110746 - DNA, 30 bp, Artificial Sequence
  Synthetic oligonucleotide
actggactcacaacggaacgagaagggata

SEQ ID NO: 110747 - DNA, 30 bp, Artificial Sequence
  Synthetic oligonucleotide
actgttaagcacggaatcggttacgggata

SEQ ID NO: 110748 - DNA, 30 bp, Artificial Sequence
  Synthetic oligonucleotide
aaagcgttacgtagcccgaatggcgggata

SEQ ID NO: 110749 - DNA, 30 bp, Artificial Sequence
  Synthetic oligonucleotide
cggatgcattacggcgtcagagcatggata

SEQ ID NO: 110750 - DNA, 30 bp, Artificial Sequence
  Synthetic oligonucleotide
catgcataaaagcatgtgacgatctggata

SEQ ID NO: 110751 - DNA, 30 bp, Artificial Sequence
  Synthetic oligonucleotide
cgagtaaagtgcgagggatccccgtggata

SEQ ID NO: 110752 - DNA, 30 bp, Artificial Sequence
  Synthetic oligonucleotide
tcgacgatccatatggacattcgtctgata

SEQ ID NO: 110753 - DNA, 30 bp, Artificial Sequence
  Synthetic oligonucleotide
gggagtgtggtatttcgatttgaagtgata

SEQ ID NO: 110754 - DNA, 30 bp, Artificial Sequence
  Synthetic oligonucleotide
tctacgactgcgtgaatgaccaacgtgata

SEQ ID NO: 110755 - DNA, 30 bp, Artificial Sequence
  Synthetic oligonucleotide
gtgcagggcggacaaaaaccattggtgata

SEQ ID NO: 110756 - DNA, 30 bp, Artificial Sequence
  Synthetic oligonucleotide
attgctgaatactacgacatgctcttgata

SEQ ID NO: 110757 - DNA, 30 bp, Artificial Sequence
  Synthetic oligonucleotide
catttgaataggaaacaggttaccaatata

SEQ ID NO: 110758 - DNA, 30 bp, Artificial Sequence
  Synthetic oligonucleotide
caacataagtcgaatgtccccttcaatata

SEQ ID NO: 110759 - DNA, 30 bp, Artificial Sequence
  Synthetic oligonucleotide
ctcggaggacacttctaggaatcgcatata

SEQ ID NO: 110760 - DNA, 30 bp, Artificial Sequence
  Synthetic oligonucleotide
accttaaagtcgtggcaagggcggcatata

SEQ ID NO: 110761 - DNA, 30 bp, Artificial Sequence
  Synthetic oligonucleotide
aggtcgccggagaccaccccggctcatata

SEQ ID NO: 110762 - DNA, 30 bp, Artificial Sequence
  Synthetic oligonucleotide
caggtcggctatcttcacgcgggagatata

SEQ ID NO: 110763 - DNA, 30 bp, Artificial Sequence
  Synthetic oligonucleotide
ggagctggacctagtaggacgtttgatata

SEQ ID NO: 110764 - DNA, 30 bp, Artificial Sequence
  Synthetic oligonucleotide
cagaccaggaggcagatcatcgagtatata

SEQ ID NO: 110765 - DNA, 30 bp, Artificial Sequence
  Synthetic oligonucleotide
ataacatcgactggtggcatatagtatata

SEQ ID NO: 110766 - DNA, 31 bp, Artificial Sequence
  Synthetic oligonucleotide
ccgcgtagaaacacgtgagcgaaattatata

SEQ ID NO: 110767 - DNA, 30 bp, Artificial Sequence
  Synthetic oligonucleotide
accggagcggccgtacctgggagaactata

SEQ ID NO: 110768 - DNA, 30 bp, Artificial Sequence
  Synthetic oligonucleotide
cgtaggcctatattaaccctacacactata

SEQ ID NO: 110769 - DNA, 30 bp, Artificial Sequence
  Synthetic oligonucleotide
gctacacaagaatcaatgttagtcactata

SEQ ID NO: 110770 - DNA, 30 bp, Artificial Sequence
  Synthetic oligonucleotide
caagactctgatcaataaagtgcgcctata

SEQ ID NO: 110771 - DNA, 30 bp, Artificial Sequence
  Synthetic oligonucleotide
aacggcggttttaagtagagtaccgctata

SEQ ID NO: 110772 - DNA, 30 bp, Artificial Sequence
  Synthetic oligonucleotide
ggctcttgaaacacagtagtgactgctata

SEQ ID NO: 110773 - DNA, 30 bp, Artificial Sequence
  Synthetic oligonucleotide
ctgcaccggtagagctaaacggctgctata

SEQ ID NO: 110774 - DNA, 30 bp, Artificial Sequence
  Synthetic oligonucleotide
gtgcttgaaaaaccgcgtgaccgtgctata

SEQ ID NO: 110775 - DNA, 30 bp, Artificial Sequence
  Synthetic oligonucleotide
tgaggacacgcgaatcacgatttttctata

SEQ ID NO: 110776 - DNA, 30 bp, Artificial Sequence
  Synthetic oligonucleotide
aggtcaatgcgacgtcgtccggaaagtata

SEQ ID NO: 110777 - DNA, 30 bp, Artificial Sequence
  Synthetic oligonucleotide
gatgtaggttagggccaaaaccgaagtata

SEQ ID NO: 110778 - DNA, 30 bp, Artificial Sequence
  Synthetic oligonucleotide
cagaactcatcattctcagccctcagtata

SEQ ID NO: 110779 - DNA, 30 bp, Artificial Sequence
  Synthetic oligonucleotide
gctcggcataagaatgtgcgagttagtata

SEQ ID NO: 110780 - DNA, 30 bp, Artificial Sequence
  Synthetic oligonucleotide
tacaatcgcacccgttaactaccccgtata

SEQ ID NO: 110781 - DNA, 30 bp, Artificial Sequence
  Synthetic oligonucleotide
cacgaggtgtcatcgggtgcaaagtgtata

SEQ ID NO: 110782 - DNA, 30 bp, Artificial Sequence
  Synthetic oligonucleotide
accgcgcgaccagacgagagcgagattata

SEQ ID NO: 110783 - DNA, 30 bp, Artificial Sequence
  Synthetic oligonucleotide
cattgaaccattcggacggaatggattata

SEQ ID NO: 110784 - DNA, 30 bp, Artificial Sequence
  Synthetic oligonucleotide
cggccctgcatggcatgaatgtggattata

SEQ ID NO: 110785 - DNA, 30 bp, Artificial Sequence
  Synthetic oligonucleotide
agagtggcctatgtccaatccagtattata

SEQ ID NO: 110786 - DNA, 30 bp, Artificial Sequence
  Synthetic oligonucleotide
aaacgactagttaacagggtatgtattata

SEQ ID NO: 110787 - DNA, 30 bp, Artificial Sequence
  Synthetic oligonucleotide
ccatgcaatcaaagtaggcactgacttata

SEQ ID NO: 110788 - DNA, 30 bp, Artificial Sequence
  Synthetic oligonucleotide
acggagggtttgtgaactaccttagttata

SEQ ID NO: 110789 - DNA, 30 bp, Artificial Sequence
  Synthetic oligonucleotide
tacaggtccagcatgaatatcatggttata

SEQ ID NO: 110790 - DNA, 30 bp, Artificial Sequence
  Synthetic oligonucleotide
gcagggaccgttccttacagactctttata

SEQ ID NO: 110791 - DNA, 30 bp, Artificial Sequence
  Synthetic oligonucleotide
gcgatgtggggacggcggccaaagaaacta

SEQ ID NO: 110792 - DNA, 30 bp, Artificial Sequence
  Synthetic oligonucleotide
ccagatctcgtggccatttttaggaaacta

SEQ ID NO: 110793 - DNA, 30 bp, Artificial Sequence
  Synthetic oligonucleotide
ggatagagccttctgacagtctggaaacta

SEQ ID NO: 110794 - DNA, 30 bp, Artificial Sequence
  Synthetic oligonucleotide
cgctggcgcttacgtcactggaaacaacta

SEQ ID NO: 110795 - DNA, 30 bp, Artificial Sequence
  Synthetic oligonucleotide
gatgtaggaacggtcgagtgaaggcaacta

SEQ ID NO: 110796 - DNA, 30 bp, Artificial Sequence
  Synthetic oligonucleotide
aggggagaatattatgactatcaggaacta

SEQ ID NO: 110797 - DNA, 30 bp, Artificial Sequence
  Synthetic oligonucleotide
cgctatcatttgggtgacccaactgaacta

SEQ ID NO: 110798 - DNA, 30 bp, Artificial Sequence
  Synthetic oligonucleotide
agctcagatattaagatgttccttgaacta

SEQ ID NO: 110799 - DNA, 30 bp, Artificial Sequence
  Synthetic oligonucleotide
ctaatgagatttggtacatcatttgaacta

SEQ ID NO: 110800 - DNA, 30 bp, Artificial Sequence
  Synthetic oligonucleotide
gcgatcgaggattcttttgcacctgcacta

SEQ ID NO: 110801 - DNA, 30 bp, Artificial Sequence
  Synthetic oligonucleotide
taggacattctcgaaatgagttaatcacta

SEQ ID NO: 110802 - DNA, 30 bp, Artificial Sequence
  Synthetic oligonucleotide
acatcttgagtcagcgaacttggctcacta

SEQ ID NO: 110803 - DNA, 30 bp, Artificial Sequence
  Synthetic oligonucleotide
ctaagagaggtgtgcgtttcgttttcacta

SEQ ID NO: 110804 - DNA, 30 bp, Artificial Sequence
  Synthetic oligonucleotide
gatgcctcagaaagtaccatgataagacta

SEQ ID NO: 110805 - DNA, 30 bp, Artificial Sequence
  Synthetic oligonucleotide
acccgataatagcagataacggacagacta

SEQ ID NO: 110806 - DNA, 30 bp, Artificial Sequence
  Synthetic oligonucleotide
aagtaatcctggatcgcggtgggacgacta

SEQ ID NO: 110807 - DNA, 30 bp, Artificial Sequence
  Synthetic oligonucleotide
ttggacacgatacggcgacaaggaggacta

SEQ ID NO: 110808 - DNA, 30 bp, Artificial Sequence
  Synthetic oligonucleotide
tcaaacaggctttccaaactatgaggacta

SEQ ID NO: 110809 - DNA, 29 bp, Artificial Sequence
  Synthetic oligonucleotide
cgcttatgaccgtagagaaggtaggacta

SEQ ID NO: 110810 - DNA, 30 bp, Artificial Sequence
  Synthetic oligonucleotide
ggggaactgctactagtttaaaatggacta

SEQ ID NO: 110811 - DNA, 30 bp, Artificial Sequence
  Synthetic oligonucleotide
aaggttggcgattctaggacccatggacta

SEQ ID NO: 110812 - DNA, 30 bp, Artificial Sequence
  Synthetic oligonucleotide
acgtggtcgtgtaccagcctaactggacta

SEQ ID NO: 110813 - DNA, 30 bp, Artificial Sequence
  Synthetic oligonucleotide
aacggatggtcgaactgttttccgtgacta

SEQ ID NO: 110814 - DNA, 30 bp, Artificial Sequence
  Synthetic oligonucleotide
tcccaagagtcatgggtgtattcaatacta

SEQ ID NO: 110815 - DNA, 30 bp, Artificial Sequence
  Synthetic oligonucleotide
ccattttttgggggttacgggaagatacta

SEQ ID NO: 110816 - DNA, 30 bp, Artificial Sequence
  Synthetic oligonucleotide
caaggataactaatggtgttggaactacta

SEQ ID NO: 110817 - DNA, 30 bp, Artificial Sequence
  Synthetic oligonucleotide
atcaaagagcagtgagaacggagactacta

SEQ ID NO: 110818 - DNA, 30 bp, Artificial Sequence
  Synthetic oligonucleotide
cccaagcgaataacgtattgccatctacta

SEQ ID NO: 110819 - DNA, 30 bp, Artificial Sequence
  Synthetic oligonucleotide
ctatcaaagaagtgtgctggataattacta

SEQ ID NO: 110820 - DNA, 30 bp, Artificial Sequence
  Synthetic oligonucleotide
ttggcgtacatttcagagaaaaccaaccta

SEQ ID NO: 110821 - DNA, 30 bp, Artificial Sequence
  Synthetic oligonucleotide
tcctcgaaacaacgaggtcgaacgaaccta

SEQ ID NO: 110822 - DNA, 30 bp, Artificial Sequence
  Synthetic oligonucleotide
catgcaattggagatacacgaattcaccta

SEQ ID NO: 110823 - DNA, 30 bp, Artificial Sequence
  Synthetic oligonucleotide
agctccgatcagtacaggtggatataccta

SEQ ID NO: 110824 - DNA, 30 bp, Artificial Sequence
  Synthetic oligonucleotide
tgctacatggatgcgggactggtataccta

SEQ ID NO: 110825 - DNA, 30 bp, Artificial Sequence
  Synthetic oligonucleotide
atcacgggcgagccataaccgcactaccta

SEQ ID NO: 110826 - DNA, 30 bp, Artificial Sequence
  Synthetic oligonucleotide
tacggataaactgcgttatgttactaccta

SEQ ID NO: 110827 - DNA, 30 bp, Artificial Sequence
  Synthetic oligonucleotide
gcaggacggcatcactgaagagacacccta

SEQ ID NO: 110828 - DNA, 30 bp, Artificial Sequence
  Synthetic oligonucleotide
tgcaaccaacgtcctagagggaatacccta

SEQ ID NO: 110829 - DNA, 30 bp, Artificial Sequence
  Synthetic oligonucleotide
gcatgtcggagtctcaactggaaaccccta

SEQ ID NO: 110830 - DNA, 30 bp, Artificial Sequence
  Synthetic oligonucleotide
aagcgggaagtggcatgtgtatgcgcccta

SEQ ID NO: 110831 - DNA, 30 bp, Artificial Sequence
  Synthetic oligonucleotide
gaccacgagatgaccgctaaaaccagccta

SEQ ID NO: 110832 - DNA, 30 bp, Artificial Sequence
  Synthetic oligonucleotide
tgccacattattgatgagctgggcagccta

SEQ ID NO: 110833 - DNA, 30 bp, Artificial Sequence
  Synthetic oligonucleotide
aaagtaagtgtaaatgccttagtgagccta

SEQ ID NO: 110834 - DNA, 30 bp, Artificial Sequence
  Synthetic oligonucleotide
gtcacatgggtcgagttactagatcgccta

SEQ ID NO: 110835 - DNA, 30 bp, Artificial Sequence
  Synthetic oligonucleotide
aacggctaaaatttgagcaatagtggccta

SEQ ID NO: 110836 - DNA, 30 bp, Artificial Sequence
  Synthetic oligonucleotide
cgttttaactggtctagtaatctatgccta

SEQ ID NO: 110837 - DNA, 25 bp, Artificial Sequence
  Synthetic oligonucleotide
cgttcagttgaaagcggtatgccta

SEQ ID NO: 110838 - DNA, 30 bp, Artificial Sequence
  Synthetic oligonucleotide
aagaacgaactcccgcgacccttctgccta

SEQ ID NO: 110839 - DNA, 30 bp, Artificial Sequence
  Synthetic oligonucleotide
agtgccgtcttatctcggaacaggtgccta

SEQ ID NO: 110840 - DNA, 30 bp, Artificial Sequence
  Synthetic oligonucleotide
agagcacttcctgacgttcagagaatccta

SEQ ID NO: 110841 - DNA, 30 bp, Artificial Sequence
  Synthetic oligonucleotide
tccaaggcgtacgccgggtctggtatccta

SEQ ID NO: 110842 - DNA, 30 bp, Artificial Sequence
  Synthetic oligonucleotide
tggccgggactgcaggttaacatactccta

SEQ ID NO: 110843 - DNA, 30 bp, Artificial Sequence
  Synthetic oligonucleotide
ctgccggcggacgagggagcgtacctccta

SEQ ID NO: 110844 - DNA, 30 bp, Artificial Sequence
  Synthetic oligonucleotide
atatcaagctgaaactaggtatctctccta

SEQ ID NO: 110845 - DNA, 30 bp, Artificial Sequence
  Synthetic oligonucleotide
acactcaagatctcggaagtatcagtccta

SEQ ID NO: 110846 - DNA, 30 bp, Artificial Sequence
  Synthetic oligonucleotide
ccgcggttgagaatcaatccaggggtccta

SEQ ID NO: 110847 - DNA, 30 bp, Artificial Sequence
  Synthetic oligonucleotide
ttcgaagtgttgtcggggtggatggtccta

SEQ ID NO: 110848 - DNA, 30 bp, Artificial Sequence
  Synthetic oligonucleotide
tcatgaatatggactggcagggttgtccta

SEQ ID NO: 110849 - DNA, 30 bp, Artificial Sequence
  Synthetic oligonucleotide
ccgccatggcggacgggcaacgacaagcta

SEQ ID NO: 110850 - DNA, 30 bp, Artificial Sequence
  Synthetic oligonucleotide
gaacagtatgagggtgtcgcaccacagcta

SEQ ID NO: 110851 - DNA, 30 bp, Artificial Sequence
  Synthetic oligonucleotide
ggcgaggtctgtcgttgattggtggagcta

SEQ ID NO: 110852 - DNA, 30 bp, Artificial Sequence
  Synthetic oligonucleotide
accgtggtaacaacatttttaaatgagcta

SEQ ID NO: 110853 - DNA, 30 bp, Artificial Sequence
  Synthetic oligonucleotide
agggccgagactgaatgtgatgctgagcta

SEQ ID NO: 110854 - DNA, 30 bp, Artificial Sequence
  Synthetic oligonucleotide
gatggtggccttagaggacgggactagcta

SEQ ID NO: 110855 - DNA, 30 bp, Artificial Sequence
  Synthetic oligonucleotide
agaaaaccggggtgggaagataggtagcta

SEQ ID NO: 110856 - DNA, 30 bp, Artificial Sequence
  Synthetic oligonucleotide
gggatggaagacgaaaaaatagtttagcta

SEQ ID NO: 110857 - DNA, 30 bp, Artificial Sequence
  Synthetic oligonucleotide
cccgtgagaacggcttagcattgcacgcta

SEQ ID NO: 110858 - DNA, 30 bp, Artificial Sequence
  Synthetic oligonucleotide
acaatgccgtaaaaggaacgaaggacgcta

SEQ ID NO: 110859 - DNA, 30 bp, Artificial Sequence
  Synthetic oligonucleotide
tacggggcccgaacaaccactcaaccgcta

SEQ ID NO: 110860 - DNA, 30 bp, Artificial Sequence
  Synthetic oligonucleotide
ctgtggcgcggaggatcatcagtaccgcta

SEQ ID NO: 110861 - DNA, 30 bp, Artificial Sequence
  Synthetic oligonucleotide
cctacaggatagaggctccctgacccgcta

SEQ ID NO: 110862 - DNA, 30 bp, Artificial Sequence
  Synthetic oligonucleotide
aggatatagctaattggttcgtgcccgcta

SEQ ID NO: 110863 - DNA, 30 bp, Artificial Sequence
  Synthetic oligonucleotide
caggtgtgcccgcacgaacgtcagccgcta

SEQ ID NO: 110864 - DNA, 30 bp, Artificial Sequence
  Synthetic oligonucleotide
aggggcgtggctcggtcgaggtatgcgcta

SEQ ID NO: 110865 - DNA, 30 bp, Artificial Sequence
  Synthetic oligonucleotide
cccacttggaagggaaatttcaactcgcta

SEQ ID NO: 110866 - DNA, 30 bp, Artificial Sequence
  Synthetic oligonucleotide
tgtactgcgacaacaaggcgttaaaggcta

SEQ ID NO: 110867 - DNA, 30 bp, Artificial Sequence
  Synthetic oligonucleotide
tgatacagagtcaaggaagttgtgaggcta

SEQ ID NO: 110868 - DNA, 30 bp, Artificial Sequence
  Synthetic oligonucleotide
agatatctaggtctatgataagcagggcta

SEQ ID NO: 110869 - DNA, 31 bp, Artificial Sequence
  Synthetic oligonucleotide
tgagcctgacgagctgtcatgttgggggcta

SEQ ID NO: 110870 - DNA, 30 bp, Artificial Sequence
  Synthetic oligonucleotide
cctctataccctgtgctaatacatgggcta

SEQ ID NO: 110871 - DNA, 30 bp, Artificial Sequence
  Synthetic oligonucleotide
agcgctggcttaaatcaggaagttgggcta

SEQ ID NO: 110872 - DNA, 30 bp, Artificial Sequence
  Synthetic oligonucleotide
caacgggaacagcgaagacctagatggcta

SEQ ID NO: 110873 - DNA, 30 bp, Artificial Sequence
  Synthetic oligonucleotide
gggtgatggtcagcacatttcctctggcta

SEQ ID NO: 110874 - DNA, 30 bp, Artificial Sequence
  Synthetic oligonucleotide
tggggtgagagagctatgtggcggtggcta

SEQ ID NO: 110875 - DNA, 30 bp, Artificial Sequence
  Synthetic oligonucleotide
gcctacctggacatgcaaactaggatgcta

SEQ ID NO: 110876 - DNA, 30 bp, Artificial Sequence
  Synthetic oligonucleotide
tacgatcaagtgcgggttcagcgcctgcta

SEQ ID NO: 110877 - DNA, 30 bp, Artificial Sequence
  Synthetic oligonucleotide
gtccaagggcgactagtgattttgctgcta

SEQ ID NO: 110878 - DNA, 30 bp, Artificial Sequence
  Synthetic oligonucleotide
cataatcgtgtacgaacgacaaccgtgcta

SEQ ID NO: 110879 - DNA, 30 bp, Artificial Sequence
  Synthetic oligonucleotide
cgatctaagcacgacttcgctatgttgcta

SEQ ID NO: 110880 - DNA, 30 bp, Artificial Sequence
  Synthetic oligonucleotide
atggctgatacctcaaagctgaaccatcta

SEQ ID NO: 110881 - DNA, 30 bp, Artificial Sequence
  Synthetic oligonucleotide
acgcagtaagagcacagtgagctatatcta

SEQ ID NO: 110882 - DNA, 30 bp, Artificial Sequence
  Synthetic oligonucleotide
gcggaagaacgcgcacatctcaattatcta

SEQ ID NO: 110883 - DNA, 30 bp, Artificial Sequence
  Synthetic oligonucleotide
actaggatactatgcaatttagagactcta

SEQ ID NO: 110884 - DNA, 30 bp, Artificial Sequence
  Synthetic oligonucleotide
gatgtaatcgctgatgggtggaggactcta

SEQ ID NO: 110885 - DNA, 30 bp, Artificial Sequence
  Synthetic oligonucleotide
ggcttccagatgccgtcctaatgtcctcta

SEQ ID NO: 110886 - DNA, 30 bp, Artificial Sequence
  Synthetic oligonucleotide
cacatgtggtatgccaattcggcagctcta

SEQ ID NO: 110887 - DNA, 30 bp, Artificial Sequence
  Synthetic oligonucleotide
ttgatagcaatcgtgaaaaggattgctcta

SEQ ID NO: 110888 - DNA, 30 bp, Artificial Sequence
  Synthetic oligonucleotide
tgcactgagaggcgacccgactagtctcta

SEQ ID NO: 110889 - DNA, 30 bp, Artificial Sequence
  Synthetic oligonucleotide
gctagacgatgtacgatcatattaagtcta

SEQ ID NO: 110890 - DNA, 30 bp, Artificial Sequence
  Synthetic oligonucleotide
ccttgaaaatacattctaaaggctagtcta

SEQ ID NO: 110891 - DNA, 30 bp, Artificial Sequence
  Synthetic oligonucleotide
tcggatagggtgctttatagagggcgtcta

SEQ ID NO: 110892 - DNA, 30 bp, Artificial Sequence
  Synthetic oligonucleotide
ggtgagtccgtaatgcggttgcacggtcta

SEQ ID NO: 110893 - DNA, 30 bp, Artificial Sequence
  Synthetic oligonucleotide
cgggagtgctggatcaaatttctatgtcta

SEQ ID NO: 110894 - DNA, 30 bp, Artificial Sequence
  Synthetic oligonucleotide
gacgaccgtaatggatgatcttactgtcta

SEQ ID NO: 110895 - DNA, 30 bp, Artificial Sequence
  Synthetic oligonucleotide
gggccaacaagcagtccacacggctgtcta

SEQ ID NO: 110896 - DNA, 30 bp, Artificial Sequence
  Synthetic oligonucleotide
atggatgcgtcaataccggtctcgattcta

SEQ ID NO: 110897 - DNA, 30 bp, Artificial Sequence
  Synthetic oligonucleotide
acattggtaagcatacaccgggcagttcta

SEQ ID NO: 110898 - DNA, 30 bp, Artificial Sequence
  Synthetic oligonucleotide
tcacgttattccaatcttatacacgttcta

SEQ ID NO: 110899 - DNA, 30 bp, Artificial Sequence
  Synthetic oligonucleotide
aaggtaagtctagtcacatacggctttcta

SEQ ID NO: 110900 - DNA, 30 bp, Artificial Sequence
  Synthetic oligonucleotide
ttcgaaacagcgaaagaagtggtaaaagta

SEQ ID NO: 110901 - DNA, 30 bp, Artificial Sequence
  Synthetic oligonucleotide
gatagaccctggaattaactcaccaaagta

SEQ ID NO: 110902 - DNA, 30 bp, Artificial Sequence
  Synthetic oligonucleotide
tagtactgaagctccgtggaacatcaagta

SEQ ID NO: 110903 - DNA, 30 bp, Artificial Sequence
  Synthetic oligonucleotide
cgtccgtgaccccctctgaggcctcaagta

SEQ ID NO: 110904 - DNA, 30 bp, Artificial Sequence
  Synthetic oligonucleotide
gcctctagagatatgccagaacaagaagta

SEQ ID NO: 110905 - DNA, 30 bp, Artificial Sequence
  Synthetic oligonucleotide
ggtagagtgtgggagttacagcgcgaagta

SEQ ID NO: 110906 - DNA, 30 bp, Artificial Sequence
  Synthetic oligonucleotide
acggcatggcaccgttctgctgaggaagta

SEQ ID NO: 110907 - DNA, 30 bp, Artificial Sequence
  Synthetic oligonucleotide
gatcgtccccggttaatagagtaggaagta

SEQ ID NO: 110908 - DNA, 30 bp, Artificial Sequence
  Synthetic oligonucleotide
ttgctttgaaagtgccccaaaattgaagta

SEQ ID NO: 110909 - DNA, 30 bp, Artificial Sequence
  Synthetic oligonucleotide
atatgtgaaaactaggggtgatactaagta

SEQ ID NO: 110910 - DNA, 30 bp, Artificial Sequence
  Synthetic oligonucleotide
actttcgagatcaacctggcgcattaagta

SEQ ID NO: 110911 - DNA, 30 bp, Artificial Sequence
  Synthetic oligonucleotide
cgccacggccatagcggtcaagtttaagta

SEQ ID NO: 110912 - DNA, 30 bp, Artificial Sequence
  Synthetic oligonucleotide
aaccgactataagatccccattgaacagta

SEQ ID NO: 110913 - DNA, 30 bp, Artificial Sequence
  Synthetic oligonucleotide
actgtgctaagaatggtatctctaacagta

SEQ ID NO: 110914 - DNA, 30 bp, Artificial Sequence
  Synthetic oligonucleotide
aaaacacaaggaaaacctaaacggacagta

SEQ ID NO: 110915 - DNA, 30 bp, Artificial Sequence
  Synthetic oligonucleotide
tcagattcgtgaggaaatgacgaaccagta

SEQ ID NO: 110916 - DNA, 30 bp, Artificial Sequence
  Synthetic oligonucleotide
gtgctcccgcgaatatcgtgaagcccagta

SEQ ID NO: 110917 - DNA, 30 bp, Artificial Sequence
  Synthetic oligonucleotide
gctagcgcgcaaccacaagattcagcagta

SEQ ID NO: 110918 - DNA, 30 bp, Artificial Sequence
  Synthetic oligonucleotide
cagttggagaataccgtgcgtctagcagta

SEQ ID NO: 110919 - DNA, 30 bp, Artificial Sequence
  Synthetic oligonucleotide
ggctcgcccctaaaggtagagggatcagta

SEQ ID NO: 110920 - DNA, 30 bp, Artificial Sequence
  Synthetic oligonucleotide
ccgacatttcagaggtggatttgatcagta

SEQ ID NO: 110921 - DNA, 30 bp, Artificial Sequence
  Synthetic oligonucleotide
gctgataggggaccaaaaacttactcagta

SEQ ID NO: 110922 - DNA, 30 bp, Artificial Sequence
  Synthetic oligonucleotide
caatagcagcctgagagttataagtcagta

SEQ ID NO: 110923 - DNA, 30 bp, Artificial Sequence
  Synthetic oligonucleotide
gtggagcttggcgattcgtgtggaagagta

SEQ ID NO: 110924 - DNA, 30 bp, Artificial Sequence
  Synthetic oligonucleotide
gtacgttacgcttgttatgtcataagagta

SEQ ID NO: 110925 - DNA, 30 bp, Artificial Sequence
  Synthetic oligonucleotide
tcgtaagtaaagcggggcatccggagagta

SEQ ID NO: 110926 - DNA, 30 bp, Artificial Sequence
  Synthetic oligonucleotide
agtcgaaaattctggatactacatagagta

SEQ ID NO: 110927 - DNA, 30 bp, Artificial Sequence
  Synthetic oligonucleotide
ggaaggtagaataagagtacttatagagta

SEQ ID NO: 110928 - DNA, 30 bp, Artificial Sequence
  Synthetic oligonucleotide
tggaatccaagtactgcaaagttacgagta

SEQ ID NO: 110929 - DNA, 30 bp, Artificial Sequence
  Synthetic oligonucleotide
gaacttgtcgtgagacaggagatccgagta

SEQ ID NO: 110930 - DNA, 30 bp, Artificial Sequence
  Synthetic oligonucleotide
gattggtaattgaattggacctgtcgagta

SEQ ID NO: 110931 - DNA, 30 bp, Artificial Sequence
  Synthetic oligonucleotide
taaaccaccatctgccattggagaggagta

SEQ ID NO: 110932 - DNA, 30 bp, Artificial Sequence
  Synthetic oligonucleotide
ttcatctggcacacgctgaacaccggagta

SEQ ID NO: 110933 - DNA, 30 bp, Artificial Sequence
  Synthetic oligonucleotide
tgcaaagccggacccttttcgcgatgagta

SEQ ID NO: 110934 - DNA, 29 bp, Artificial Sequence
  Synthetic oligonucleotide
gttggtcgtctggggtgtacgtctgagta

SEQ ID NO: 110935 - DNA, 30 bp, Artificial Sequence
  Synthetic oligonucleotide
ctcatgcaactgtcgtcgtattcgtgagta

SEQ ID NO: 110936 - DNA, 30 bp, Artificial Sequence
  Synthetic oligonucleotide
gggtttaagtacatcaaattgatgtgagta

SEQ ID NO: 110937 - DNA, 30 bp, Artificial Sequence
  Synthetic oligonucleotide
gcggtaacggtgtattcccacctttgagta

SEQ ID NO: 110938 - DNA, 30 bp, Artificial Sequence
  Synthetic oligonucleotide
acagttcccagagaaagctctctttgagta

SEQ ID NO: 110939 - DNA, 30 bp, Artificial Sequence
  Synthetic oligonucleotide
caacgcttcctagctgggagaaaaatagta

SEQ ID NO: 110940 - DNA, 30 bp, Artificial Sequence
  Synthetic oligonucleotide
ctaacagcaggtctcctgatactaatagta

SEQ ID NO: 110941 - DNA, 30 bp, Artificial Sequence
  Synthetic oligonucleotide
cgatagctttgcattacaaactacatagta

SEQ ID NO: 110942 - DNA, 30 bp, Artificial Sequence
  Synthetic oligonucleotide
tacgcataaggatcccggacctgactagta

SEQ ID NO: 110943 - DNA, 30 bp, Artificial Sequence
  Synthetic oligonucleotide
gtggaaatggtcttgatcagcgctctagta

SEQ ID NO: 110944 - DNA, 31 bp, Artificial Sequence
  Synthetic oligonucleotide
tcgtaccaggtgttttaggcattctctagta

SEQ ID NO: 110945 - DNA, 30 bp, Artificial Sequence
  Synthetic oligonucleotide
ggtaaagcggacacgtgcggaattctagta

SEQ ID NO: 110946 - DNA, 30 bp, Artificial Sequence
  Synthetic oligonucleotide
actgtagtagggtagggttgtgcagtagta

SEQ ID NO: 110947 - DNA, 30 bp, Artificial Sequence
  Synthetic oligonucleotide
ccttgcaccacaacttatagggtcgtagta

SEQ ID NO: 110948 - DNA, 30 bp, Artificial Sequence
  Synthetic oligonucleotide
atggtgtgtcgctggatcgctccggtagta

SEQ ID NO: 110949 - DNA, 31 bp, Artificial Sequence
  Synthetic oligonucleotide
atgcggggcaaccggatccgcttaattagta

SEQ ID NO: 110950 - DNA, 30 bp, Artificial Sequence
  Synthetic oligonucleotide
cagagctttcccaacgaaaggtgattagta

SEQ ID NO: 110951 - DNA, 30 bp, Artificial Sequence
  Synthetic oligonucleotide
gcgcgagatccggtcctatgagtattagta

SEQ ID NO: 110952 - DNA, 30 bp, Artificial Sequence
  Synthetic oligonucleotide
gacaatcattttcgggtgcaaaggttagta

SEQ ID NO: 110953 - DNA, 30 bp, Artificial Sequence
  Synthetic oligonucleotide
acctgtggaagggctgtccaaaaaaacgta

SEQ ID NO: 110954 - DNA, 30 bp, Artificial Sequence
  Synthetic oligonucleotide
gaactgttcaaggaacccgagctaaacgta

SEQ ID NO: 110955 - DNA, 30 bp, Artificial Sequence
  Synthetic oligonucleotide
cagcggccgagtcacgcgcgacacaacgta

SEQ ID NO: 110956 - DNA, 30 bp, Artificial Sequence
  Synthetic oligonucleotide
atagagtccaaggccataaagactcacgta

SEQ ID NO: 110957 - DNA, 30 bp, Artificial Sequence
  Synthetic oligonucleotide
acggggtaggtagacgtgctaaaagacgta

SEQ ID NO: 110958 - DNA, 31 bp, Artificial Sequence
  Synthetic oligonucleotide
gatggaaaacaagtacgataggtaagacgta

SEQ ID NO: 110959 - DNA, 30 bp, Artificial Sequence
  Synthetic oligonucleotide
cgacttggctattagccattaagtgacgta

SEQ ID NO: 110960 - DNA, 30 bp, Artificial Sequence
  Synthetic oligonucleotide
gtgcaagttgggtggaattaaagttacgta

SEQ ID NO: 110961 - DNA, 30 bp, Artificial Sequence
  Synthetic oligonucleotide
acgggtatacatgacctgcaagaaaccgta

SEQ ID NO: 110962 - DNA, 30 bp, Artificial Sequence
  Synthetic oligonucleotide
atgcgagacccgtaggtctgcgggaccgta

SEQ ID NO: 110963 - DNA, 30 bp, Artificial Sequence
  Synthetic oligonucleotide
cactgtctcgtggaccagctgatccccgta

SEQ ID NO: 110964 - DNA, 30 bp, Artificial Sequence
  Synthetic oligonucleotide
ggaggcggatagtctctgaacgtgcccgta

SEQ ID NO: 110965 - DNA, 30 bp, Artificial Sequence
  Synthetic oligonucleotide
tcgcatgagggccagcagaggaacgccgta

SEQ ID NO: 110966 - DNA, 30 bp, Artificial Sequence
  Synthetic oligonucleotide
gttacagtggtacacagttcttgggccgta

SEQ ID NO: 110967 - DNA, 30 bp, Artificial Sequence
  Synthetic oligonucleotide
ctcatgcaaaggtagaggtttatggccgta

SEQ ID NO: 110968 - DNA, 30 bp, Artificial Sequence
  Synthetic oligonucleotide
tgagccagtagcaccgcctggtgatccgta

SEQ ID NO: 110969 - DNA, 30 bp, Artificial Sequence
  Synthetic oligonucleotide
gagactgcctaaaaacagtggacctccgta

SEQ ID NO: 110970 - DNA, 30 bp, Artificial Sequence
  Synthetic oligonucleotide
cttaggaggattgggcagacaacgtccgta

SEQ ID NO: 110971 - DNA, 30 bp, Artificial Sequence
  Synthetic oligonucleotide
gcgactcagtgaaggagcccaaggtccgta

SEQ ID NO: 110972 - DNA, 30 bp, Artificial Sequence
  Synthetic oligonucleotide
tctacgctccagtgaatagtatcaagcgta

SEQ ID NO: 110973 - DNA, 30 bp, Artificial Sequence
  Synthetic oligonucleotide
gcgagcctagggagtgtttgctgaagcgta

SEQ ID NO: 110974 - DNA, 30 bp, Artificial Sequence
  Synthetic oligonucleotide
agtctggggaggagatggtactgcagcgta

SEQ ID NO: 110975 - DNA, 30 bp, Artificial Sequence
  Synthetic oligonucleotide
atagctagctgtgtgatggcgggtagcgta

SEQ ID NO: 110976 - DNA, 30 bp, Artificial Sequence
  Synthetic oligonucleotide
ttaggttatggccgagccttgacccgcgta

SEQ ID NO: 110977 - DNA, 30 bp, Artificial Sequence
  Synthetic oligonucleotide
gttggatcaggaaacgataagtcccgcgta

SEQ ID NO: 110978 - DNA, 30 bp, Artificial Sequence
  Synthetic oligonucleotide
caggctgcgtgggctgtaggtaagcgcgta

SEQ ID NO: 110979 - DNA, 30 bp, Artificial Sequence
  Synthetic oligonucleotide
ggatggggtcaatagtcaatttcgcgcgta

SEQ ID NO: 110980 - DNA, 30 bp, Artificial Sequence
  Synthetic oligonucleotide
cgatgaatcatgtgacccttttggcgcgta

SEQ ID NO: 110981 - DNA, 30 bp, Artificial Sequence
  Synthetic oligonucleotide
ggaatggtaacagaccggatatcaggcgta

SEQ ID NO: 110982 - DNA, 30 bp, Artificial Sequence
  Synthetic oligonucleotide
caccaggggtagcgagttacttgtggcgta

SEQ ID NO: 110983 - DNA, 30 bp, Artificial Sequence
  Synthetic oligonucleotide
caacgttcaagaggtaggaggggttgcgta

SEQ ID NO: 110984 - DNA, 30 bp, Artificial Sequence
  Synthetic oligonucleotide
ccgtcctgcagtccgaagtagttgctcgta

SEQ ID NO: 110985 - DNA, 30 bp, Artificial Sequence
  Synthetic oligonucleotide
cgatctgtcggtctagagggaccagtcgta

SEQ ID NO: 110986 - DNA, 30 bp, Artificial Sequence
  Synthetic oligonucleotide
gtcagatgttgggtaggtgtagacgtcgta

SEQ ID NO: 110987 - DNA, 30 bp, Artificial Sequence
  Synthetic oligonucleotide
cgatggcaaccaatggataggctcaaggta

SEQ ID NO: 110988 - DNA, 30 bp, Artificial Sequence
  Synthetic oligonucleotide
ttagtgggggggacggtatacattaaggta

SEQ ID NO: 110989 - DNA, 30 bp, Artificial Sequence
  Synthetic oligonucleotide
atgaggaaaccggtctctcgtccccaggta

SEQ ID NO: 110990 - DNA, 30 bp, Artificial Sequence
  Synthetic oligonucleotide
agacaaaccagcccttgtcaacgccaggta

SEQ ID NO: 110991 - DNA, 30 bp, Artificial Sequence
  Synthetic oligonucleotide
ccgcaaatttgcgtctgctggatccaggta

SEQ ID NO: 110992 - DNA, 30 bp, Artificial Sequence
  Synthetic oligonucleotide
tggtacaggcttcagagcggaaatcaggta

SEQ ID NO: 110993 - DNA, 30 bp, Artificial Sequence
  Synthetic oligonucleotide
agtcatgcgacctagtgaggaagtcaggta

SEQ ID NO: 110994 - DNA, 30 bp, Artificial Sequence
  Synthetic oligonucleotide
gcatggggactggaagtacgacgtcaggta

SEQ ID NO: 110995 - DNA, 30 bp, Artificial Sequence
  Synthetic oligonucleotide
agggggcatagattcatatgcacagaggta

SEQ ID NO: 110996 - DNA, 30 bp, Artificial Sequence
  Synthetic oligonucleotide
cgctttgaacaggatgggatttcagaggta

SEQ ID NO: 110997 - DNA, 30 bp, Artificial Sequence
  Synthetic oligonucleotide
atcggaaccctgaggcgtatacgagaggta

SEQ ID NO: 110998 - DNA, 30 bp, Artificial Sequence
  Synthetic oligonucleotide
ttagagactcatctagactgatgggaggta

SEQ ID NO: 110999 - DNA, 30 bp, Artificial Sequence
  Synthetic oligonucleotide
gacgtcacgagagtcatcgcataataggta

SEQ ID NO: 111000 - DNA, 30 bp, Artificial Sequence
  Synthetic oligonucleotide
tagagaccaggcaaatacaaccattaggta

SEQ ID NO: 111001 - DNA, 30 bp, Artificial Sequence
  Synthetic oligonucleotide
atcgctagttgagtcgaagtcagaccggta

SEQ ID NO: 111002 - DNA, 30 bp, Artificial Sequence
  Synthetic oligonucleotide
aagaaagtgatcgctcgctagaaatcggta

SEQ ID NO: 111003 - DNA, 30 bp, Artificial Sequence
  Synthetic oligonucleotide
atctcggtaacgaggcaaagtgcatcggta

SEQ ID NO: 111004 - DNA, 30 bp, Artificial Sequence
  Synthetic oligonucleotide
ctaacaatgagctgtgcgtggtcctcggta

SEQ ID NO: 111005 - DNA, 30 bp, Artificial Sequence
  Synthetic oligonucleotide
tccgaatgctactatggctaaaagtcggta

SEQ ID NO: 111006 - DNA, 30 bp, Artificial Sequence
  Synthetic oligonucleotide
accgtgatgagaaaatcattaccgtcggta

SEQ ID NO: 111007 - DNA, 30 bp, Artificial Sequence
  Synthetic oligonucleotide
aaaattggagaacgatcttaagcaagggta

SEQ ID NO: 111008 - DNA, 30 bp, Artificial Sequence
  Synthetic oligonucleotide
gcggaggaaatatattgcgaatggagggta

SEQ ID NO: 111009 - DNA, 30 bp, Artificial Sequence
  Synthetic oligonucleotide
ttactaggttagcaaagtgatgatagggta

SEQ ID NO: 111010 - DNA, 30 bp, Artificial Sequence
  Synthetic oligonucleotide
ggggtagcactgcacaaatacccgcgggta

SEQ ID NO: 111011 - DNA, 30 bp, Artificial Sequence
  Synthetic oligonucleotide
aaccaaacgaccttacgtgccccgcgggta

SEQ ID NO: 111012 - DNA, 30 bp, Artificial Sequence
  Synthetic oligonucleotide
actttgtattacgataacgggagcggggta

SEQ ID NO: 111013 - DNA, 31 bp, Artificial Sequence
  Synthetic oligonucleotide
gttacggtggggagttcagggactgggggta

SEQ ID NO: 111014 - DNA, 30 bp, Artificial Sequence
  Synthetic oligonucleotide
agaaggccaaggcgctgcacgtcatgggta

SEQ ID NO: 111015 - DNA, 30 bp, Artificial Sequence
  Synthetic oligonucleotide
taacaatgatgaggagcaggtatctgggta

SEQ ID NO: 111016 - DNA, 30 bp, Artificial Sequence
  Synthetic oligonucleotide
ggcgccgatacgatagtctaaacgtgggta

SEQ ID NO: 111017 - DNA, 30 bp, Artificial Sequence
  Synthetic oligonucleotide
caagggatcaaaccagatagctcgtgggta

SEQ ID NO: 111018 - DNA, 30 bp, Artificial Sequence
  Synthetic oligonucleotide
tgccaaacgggggtacccggagtgtgggta

SEQ ID NO: 111019 - DNA, 30 bp, Artificial Sequence
  Synthetic oligonucleotide
gggggcgcactgtccgaaatgcattgggta

SEQ ID NO: 111020 - DNA, 30 bp, Artificial Sequence
  Synthetic oligonucleotide
gtacaaggttactgagctagataaatggta

SEQ ID NO: 111021 - DNA, 30 bp, Artificial Sequence
  Synthetic oligonucleotide
aagtgacaggcgcccgaagttcgaatggta

SEQ ID NO: 111022 - DNA, 30 bp, Artificial Sequence
  Synthetic oligonucleotide
gacgtcctgtttagtccagaccaactggta

SEQ ID NO: 111023 - DNA, 30 bp, Artificial Sequence
  Synthetic oligonucleotide
ctgaactaagaacttctgtgcgaactggta

SEQ ID NO: 111024 - DNA, 30 bp, Artificial Sequence
  Synthetic oligonucleotide
ccccaaaacacgtcaggaacacacctggta

SEQ ID NO: 111025 - DNA, 30 bp, Artificial Sequence
  Synthetic oligonucleotide
accatgggaaaaatagggcggtgcctggta

SEQ ID NO: 111026 - DNA, 30 bp, Artificial Sequence
  Synthetic oligonucleotide
gggaacgaggatagagtcaatactgtggta

SEQ ID NO: 111027 - DNA, 30 bp, Artificial Sequence
  Synthetic oligonucleotide
gtagggagagcagtacgaagaccattggta

SEQ ID NO: 111028 - DNA, 31 bp, Artificial Sequence
  Synthetic oligonucleotide
gcttccaataataacggatagaagtttggta

SEQ ID NO: 111029 - DNA, 30 bp, Artificial Sequence
  Synthetic oligonucleotide
gccaaatgtgacggccatggatgaaatgta

SEQ ID NO: 111030 - DNA, 30 bp, Artificial Sequence
  Synthetic oligonucleotide
ttgggatagcaatcatttatagcgaatgta

SEQ ID NO: 111031 - DNA, 30 bp, Artificial Sequence
  Synthetic oligonucleotide
aacagaggcacatgggttgagtataatgta

SEQ ID NO: 111032 - DNA, 30 bp, Artificial Sequence
  Synthetic oligonucleotide
gttcgtccatcgtgcgaatagagtaatgta

SEQ ID NO: 111033 - DNA, 30 bp, Artificial Sequence
  Synthetic oligonucleotide
cgtaaacatagtgtaattttgcttaatgta

SEQ ID NO: 111034 - DNA, 30 bp, Artificial Sequence
  Synthetic oligonucleotide
gtcgataaaactgcatgccggccacatgta

SEQ ID NO: 111035 - DNA, 30 bp, Artificial Sequence
  Synthetic oligonucleotide
cctgtaggcgagtccaagcgccacgatgta

SEQ ID NO: 111036 - DNA, 30 bp, Artificial Sequence
  Synthetic oligonucleotide
ctggcgtgctggcaaggtccgtgggatgta

SEQ ID NO: 111037 - DNA, 30 bp, Artificial Sequence
  Synthetic oligonucleotide
atcgaaaagaatgttggtagccatgatgta

SEQ ID NO: 111038 - DNA, 30 bp, Artificial Sequence
  Synthetic oligonucleotide
ggacattgttacactctccaccttgatgta

SEQ ID NO: 111039 - DNA, 31 bp, Artificial Sequence
  Synthetic oligonucleotide
tctaggaaatgatggataggattaatatgta

SEQ ID NO: 111040 - DNA, 30 bp, Artificial Sequence
  Synthetic oligonucleotide
ccaataagggactggaaacagggctatgta

SEQ ID NO: 111041 - DNA, 30 bp, Artificial Sequence
  Synthetic oligonucleotide
taagcggacaactgcaacgttaggtatgta

SEQ ID NO: 111042 - DNA, 30 bp, Artificial Sequence
  Synthetic oligonucleotide
cacgtacagcgtgtgatctgcaattatgta

SEQ ID NO: 111043 - DNA, 30 bp, Artificial Sequence
  Synthetic oligonucleotide
gataactaggtaggcatgtaagtcactgta

SEQ ID NO: 111044 - DNA, 30 bp, Artificial Sequence
  Synthetic oligonucleotide
gacgtggctcagatagaactgcttactgta

SEQ ID NO: 111045 - DNA, 30 bp, Artificial Sequence
  Synthetic oligonucleotide
catccacccgtagaagaaaaagaaagtgta

SEQ ID NO: 111046 - DNA, 30 bp, Artificial Sequence
  Synthetic oligonucleotide
gcatttagaacgggcggccaagcaagtgta

SEQ ID NO: 111047 - DNA, 30 bp, Artificial Sequence
  Synthetic oligonucleotide
ggcgaaatacggagcgaggattcgagtgta

SEQ ID NO: 111048 - DNA, 30 bp, Artificial Sequence
  Synthetic oligonucleotide
ggtcacctgggatccgttcggggtagtgta

SEQ ID NO: 111049 - DNA, 30 bp, Artificial Sequence
  Synthetic oligonucleotide
accggaacggggtagcagtctaggcgtgta

SEQ ID NO: 111050 - DNA, 30 bp, Artificial Sequence
  Synthetic oligonucleotide
gctttcgaaagcccgggagaaaaaggtgta

SEQ ID NO: 111051 - DNA, 30 bp, Artificial Sequence
  Synthetic oligonucleotide
cctggaatatgtgggtaagagagatgtgta

SEQ ID NO: 111052 - DNA, 30 bp, Artificial Sequence
  Synthetic oligonucleotide
ggaagtcacgacggaatgcaggggtgtgta

SEQ ID NO: 111053 - DNA, 30 bp, Artificial Sequence
  Synthetic oligonucleotide
tcctgggcaggtgctgtatttgtttgtgta

SEQ ID NO: 111054 - DNA, 30 bp, Artificial Sequence
  Synthetic oligonucleotide
tcacgctcatcccccataacagcaattgta

SEQ ID NO: 111055 - DNA, 30 bp, Artificial Sequence
  Synthetic oligonucleotide
gtttcgcataacgaccggtctcaacttgta

SEQ ID NO: 111056 - DNA, 30 bp, Artificial Sequence
  Synthetic oligonucleotide
ccctgcaataagtaaaccgcgaatcttgta

SEQ ID NO: 111057 - DNA, 30 bp, Artificial Sequence
  Synthetic oligonucleotide
caaagaattacgacaccaggccaagttgta

SEQ ID NO: 111058 - DNA, 30 bp, Artificial Sequence
  Synthetic oligonucleotide
acgtcaaattattcgaactgcgcagttgta

SEQ ID NO: 111059 - DNA, 30 bp, Artificial Sequence
  Synthetic oligonucleotide
caagatggaaatcatgacttagcatttgta

SEQ ID NO: 111060 - DNA, 30 bp, Artificial Sequence
  Synthetic oligonucleotide
ggactagaggttagcgtaggtgtcaaatta

SEQ ID NO: 111061 - DNA, 30 bp, Artificial Sequence
  Synthetic oligonucleotide
cacacgcagagttagagcatgcggcaatta

SEQ ID NO: 111062 - DNA, 30 bp, Artificial Sequence
  Synthetic oligonucleotide
gaccaacgcgagcacaaggatgatcaatta

SEQ ID NO: 111063 - DNA, 30 bp, Artificial Sequence
  Synthetic oligonucleotide
agaatgagggacgaaggcgttaaggaatta

SEQ ID NO: 111064 - DNA, 30 bp, Artificial Sequence
  Synthetic oligonucleotide
ggctggagggtgccgggtcatgcataatta

SEQ ID NO: 111065 - DNA, 30 bp, Artificial Sequence
  Synthetic oligonucleotide
acacgtattgtgccaaatcccatataatta

SEQ ID NO: 111066 - DNA, 30 bp, Artificial Sequence
  Synthetic oligonucleotide
tcgatggtaggactttcagtcgcctaatta

SEQ ID NO: 111067 - DNA, 30 bp, Artificial Sequence
  Synthetic oligonucleotide
atcgatgaagggctattagttatgacatta

SEQ ID NO: 111068 - DNA, 30 bp, Artificial Sequence
  Synthetic oligonucleotide
aggcttgacatagtcatcggtcacccatta

SEQ ID NO: 111069 - DNA, 30 bp, Artificial Sequence
  Synthetic oligonucleotide
taacgtaaggattggagtcgttgtccatta

SEQ ID NO: 111070 - DNA, 30 bp, Artificial Sequence
  Synthetic oligonucleotide
cacatggctcagaatagcccccaatcatta

SEQ ID NO: 111071 - DNA, 30 bp, Artificial Sequence
  Synthetic oligonucleotide
cgactgtcagcagctagatcggcctcatta

SEQ ID NO: 111072 - DNA, 30 bp, Artificial Sequence
  Synthetic oligonucleotide
cacggggacgttatgtaatgccacagatta

SEQ ID NO: 111073 - DNA, 30 bp, Artificial Sequence
  Synthetic oligonucleotide
atggcgcgggaggccgagcccgggagatta

SEQ ID NO: 111074 - DNA, 30 bp, Artificial Sequence
  Synthetic oligonucleotide
gcgtatacttaaagaatcaattaaggatta

SEQ ID NO: 111075 - DNA, 30 bp, Artificial Sequence
  Synthetic oligonucleotide
gggggggacggaggatgcttgaacggatta

SEQ ID NO: 111076 - DNA, 30 bp, Artificial Sequence
  Synthetic oligonucleotide
tgacaaaaggacgatgcaaatagtggatta

SEQ ID NO: 111077 - DNA, 30 bp, Artificial Sequence
  Synthetic oligonucleotide
gggaagactcggctactagcagggtgatta

SEQ ID NO: 111078 - DNA, 30 bp, Artificial Sequence
  Synthetic oligonucleotide
aggtaatccgtgacaggggtgtccatatta

SEQ ID NO: 111079 - DNA, 31 bp, Artificial Sequence
  Synthetic oligonucleotide
gggctttagcgacaggcgagtgaaactatta

SEQ ID NO: 111080 - DNA, 30 bp, Artificial Sequence
  Synthetic oligonucleotide
cgggtgatgtatgggaatatctgagtatta

SEQ ID NO: 111081 - DNA, 30 bp, Artificial Sequence
  Synthetic oligonucleotide
gtgcaactagggcaacttcgaataaactta

SEQ ID NO: 111082 - DNA, 30 bp, Artificial Sequence
  Synthetic oligonucleotide
tgaaagggtacgtccgtatagatgaactta

SEQ ID NO: 111083 - DNA, 30 bp, Artificial Sequence
  Synthetic oligonucleotide
ctcgttgcgacaaattatatgctgaactta

SEQ ID NO: 111084 - DNA, 30 bp, Artificial Sequence
  Synthetic oligonucleotide
gcgtgcagattgcaacgtgcaagtaactta

SEQ ID NO: 111085 - DNA, 30 bp, Artificial Sequence
  Synthetic oligonucleotide
gaagggatagtgactggacacctacactta

SEQ ID NO: 111086 - DNA, 30 bp, Artificial Sequence
  Synthetic oligonucleotide
tacggtttcgaacggcgatcgtaccactta

SEQ ID NO: 111087 - DNA, 30 bp, Artificial Sequence
  Synthetic oligonucleotide
aggccgcgagctaccaaaatggtccactta

SEQ ID NO: 111088 - DNA, 30 bp, Artificial Sequence
  Synthetic oligonucleotide
catcgtccaatggtatgaattcatcactta

SEQ ID NO: 111089 - DNA, 30 bp, Artificial Sequence
  Synthetic oligonucleotide
ggactgattgggcaacgaccgacggactta

SEQ ID NO: 111090 - DNA, 30 bp, Artificial Sequence
  Synthetic oligonucleotide
gccaaatgatctatacgagttactgactta

SEQ ID NO: 111091 - DNA, 30 bp, Artificial Sequence
  Synthetic oligonucleotide
gacgtttgttgagggacgtaggactactta

SEQ ID NO: 111092 - DNA, 30 bp, Artificial Sequence
  Synthetic oligonucleotide
cgcgtctaaaacagaatacgcatttactta

SEQ ID NO: 111093 - DNA, 30 bp, Artificial Sequence
  Synthetic oligonucleotide
tcgaaaaacagtgtgtttcgataatcctta

SEQ ID NO: 111094 - DNA, 30 bp, Artificial Sequence
  Synthetic oligonucleotide
agaggtgatagatccagtggacactcctta

SEQ ID NO: 111095 - DNA, 30 bp, Artificial Sequence
  Synthetic oligonucleotide
ggtcggttgttgacagtggaagaaagctta

SEQ ID NO: 111096 - DNA, 30 bp, Artificial Sequence
  Synthetic oligonucleotide
tgaaaagggcgggtcactatgcatagctta

SEQ ID NO: 111097 - DNA, 30 bp, Artificial Sequence
  Synthetic oligonucleotide
cagtatctatacacctacccctctcgctta

SEQ ID NO: 111098 - DNA, 30 bp, Artificial Sequence
  Synthetic oligonucleotide
acacggacgtccggtaaaacgactggctta

SEQ ID NO: 111099 - DNA, 30 bp, Artificial Sequence
  Synthetic oligonucleotide
cgtgcacaggagttggtggaagttggctta

SEQ ID NO: 111100 - DNA, 30 bp, Artificial Sequence
  Synthetic oligonucleotide
caagccatatacttcagagaaacctgctta

SEQ ID NO: 111101 - DNA, 30 bp, Artificial Sequence
  Synthetic oligonucleotide
cgcgagaggcattagggttcctgttgctta

SEQ ID NO: 111102 - DNA, 30 bp, Artificial Sequence
  Synthetic oligonucleotide
gatggcggatcggtcggggtgtggatctta

SEQ ID NO: 111103 - DNA, 30 bp, Artificial Sequence
  Synthetic oligonucleotide
aaggtcctacactagatgtgatatatctta

SEQ ID NO: 111104 - DNA, 30 bp, Artificial Sequence
  Synthetic oligonucleotide
agcatccgaaacactggggacagtatctta

SEQ ID NO: 111105 - DNA, 30 bp, Artificial Sequence
  Synthetic oligonucleotide
tacggtgataattctcaataaatactctta

SEQ ID NO: 111106 - DNA, 30 bp, Artificial Sequence
  Synthetic oligonucleotide
aggcgttttgcatgaataaaccccctctta

SEQ ID NO: 111107 - DNA, 30 bp, Artificial Sequence
  Synthetic oligonucleotide
catgcggcctcgtgttagtctagtctctta

SEQ ID NO: 111108 - DNA, 30 bp, Artificial Sequence
  Synthetic oligonucleotide
tcatccatgttgacgggagacaaggtctta

SEQ ID NO: 111109 - DNA, 30 bp, Artificial Sequence
  Synthetic oligonucleotide
tgtcactcgcccagtgtacaccgaaagtta

SEQ ID NO: 111110 - DNA, 30 bp, Artificial Sequence
  Synthetic oligonucleotide
caggcacaaacctgacgtagggacaagtta

SEQ ID NO: 111111 - DNA, 30 bp, Artificial Sequence
  Synthetic oligonucleotide
cccttgatgtgttgcgaggtggtgaagtta

SEQ ID NO: 111112 - DNA, 30 bp, Artificial Sequence
  Synthetic oligonucleotide
gtttaaaaaccgtcaaaaagacataagtta

SEQ ID NO: 111113 - DNA, 30 bp, Artificial Sequence
  Synthetic oligonucleotide
aactgacaaccataagatactcgtaagtta

SEQ ID NO: 111114 - DNA, 30 bp, Artificial Sequence
  Synthetic oligonucleotide
cgggggggccgcttagcgaaccgtcagtta

SEQ ID NO: 111115 - DNA, 30 bp, Artificial Sequence
  Synthetic oligonucleotide
ctacgcgggtgttattgcgcgaaagagtta

SEQ ID NO: 111116 - DNA, 30 bp, Artificial Sequence
  Synthetic oligonucleotide
tgcgatgggaaggtgatttatactgagtta

SEQ ID NO: 111117 - DNA, 30 bp, Artificial Sequence
  Synthetic oligonucleotide
ggtatcgcaccgggagatcaccctgagtta

SEQ ID NO: 111118 - DNA, 30 bp, Artificial Sequence
  Synthetic oligonucleotide
cagaagactgcatcgcgcaggggatagtta

SEQ ID NO: 111119 - DNA, 30 bp, Artificial Sequence
  Synthetic oligonucleotide
gcacatctcgagatcccaacgtactagtta

SEQ ID NO: 111120 - DNA, 30 bp, Artificial Sequence
  Synthetic oligonucleotide
cgacagtgtagaaaagataacaagtagtta

SEQ ID NO: 111121 - DNA, 30 bp, Artificial Sequence
  Synthetic oligonucleotide
gatctgcgaaaggccatcgatcggtagtta

SEQ ID NO: 111122 - DNA, 30 bp, Artificial Sequence
  Synthetic oligonucleotide
gactcatcaatacaccgtaaagacacgtta

SEQ ID NO: 111123 - DNA, 30 bp, Artificial Sequence
  Synthetic oligonucleotide
agtggctcatacgatgtgaaaatgacgtta

SEQ ID NO: 111124 - DNA, 30 bp, Artificial Sequence
  Synthetic oligonucleotide
gagaacagtgagaggtcatcaccagcgtta

SEQ ID NO: 111125 - DNA, 30 bp, Artificial Sequence
  Synthetic oligonucleotide
ggcacccagtacttgcatcacgaggcgtta

SEQ ID NO: 111126 - DNA, 30 bp, Artificial Sequence
  Synthetic oligonucleotide
ccatgtcaacggggtacgacgaacaggtta

SEQ ID NO: 111127 - DNA, 30 bp, Artificial Sequence
  Synthetic oligonucleotide
aggatgcctaaggtggtatctaataggtta

SEQ ID NO: 111128 - DNA, 30 bp, Artificial Sequence
  Synthetic oligonucleotide
agtggcaaaacagtatcgttgtatgggtta

SEQ ID NO: 111129 - DNA, 30 bp, Artificial Sequence
  Synthetic oligonucleotide
acgtcggagtccccttacgtgaaatggtta

SEQ ID NO: 111130 - DNA, 30 bp, Artificial Sequence
  Synthetic oligonucleotide
acgtatttctgaattcgacttcccatgtta

SEQ ID NO: 111131 - DNA, 30 bp, Artificial Sequence
  Synthetic oligonucleotide
aatagaagaataaggcggtgaatgatgtta

SEQ ID NO: 111132 - DNA, 30 bp, Artificial Sequence
  Synthetic oligonucleotide
ggccaagcactgatttcggctcttatgtta

SEQ ID NO: 111133 - DNA, 29 bp, Artificial Sequence
  Synthetic oligonucleotide
gcctaaacaacgacacacgttgcctgtta

SEQ ID NO: 111134 - DNA, 30 bp, Artificial Sequence
  Synthetic oligonucleotide
gtacgcgttagcgcgactggagatctgtta

SEQ ID NO: 111135 - DNA, 30 bp, Artificial Sequence
  Synthetic oligonucleotide
ataaatagcggcttggcagtagcagtgtta

SEQ ID NO: 111136 - DNA, 30 bp, Artificial Sequence
  Synthetic oligonucleotide
cagggctgaggaggcatattgacggtgtta

SEQ ID NO: 111137 - DNA, 30 bp, Artificial Sequence
  Synthetic oligonucleotide
tgatgaaaaaggccgagggttcagttgtta

SEQ ID NO: 111138 - DNA, 30 bp, Artificial Sequence
  Synthetic oligonucleotide
tatggcgagtggcggttgtgaaatttgtta

SEQ ID NO: 111139 - DNA, 30 bp, Artificial Sequence
  Synthetic oligonucleotide
gtcacggggcacactcactagcgcaattta

SEQ ID NO: 111140 - DNA, 30 bp, Artificial Sequence
  Synthetic oligonucleotide
cataaagtgagtaattaattaggcaattta

SEQ ID NO: 111141 - DNA, 30 bp, Artificial Sequence
  Synthetic oligonucleotide
ctcaagtcgaacgaaactggcggacattta

SEQ ID NO: 111142 - DNA, 30 bp, Artificial Sequence
  Synthetic oligonucleotide
ccgagattgaagattctagggtgtgattta

SEQ ID NO: 111143 - DNA, 30 bp, Artificial Sequence
  Synthetic oligonucleotide
atagtagccatgacagtacgaaaatattta

SEQ ID NO: 111144 - DNA, 29 bp, Artificial Sequence
  Synthetic oligonucleotide
aaggcgctttgcgacaaaacatgacttta

SEQ ID NO: 111145 - DNA, 30 bp, Artificial Sequence
  Synthetic oligonucleotide
aagaggcgatagggttgctcgaccgcttta

SEQ ID NO: 111146 - DNA, 30 bp, Artificial Sequence
  Synthetic oligonucleotide
ggtccaggaaatgagaggctaacggcttta

SEQ ID NO: 111147 - DNA, 30 bp, Artificial Sequence
  Synthetic oligonucleotide
ctatatgagtgcggcggatgggagagttta

SEQ ID NO: 111148 - DNA, 30 bp, Artificial Sequence
  Synthetic oligonucleotide
cgctgtgaggtactgagttgatatcgttta

SEQ ID NO: 111149 - DNA, 30 bp, Artificial Sequence
  Synthetic oligonucleotide
agagtctgtagaaacaaacagaatggttta

SEQ ID NO: 111150 - DNA, 30 bp, Artificial Sequence
  Synthetic oligonucleotide
gcttaatggtagggatatgatagtggttta

SEQ ID NO: 111151 - DNA, 30 bp, Artificial Sequence
  Synthetic oligonucleotide
cgtctgaggaatcgtgcactagtggtttta

SEQ ID NO: 111152 - DNA, 30 bp, Artificial Sequence
  Synthetic oligonucleotide
atgggccgcccaaaacaaggcaacaaaaac

SEQ ID NO: 111153 - DNA, 30 bp, Artificial Sequence
  Synthetic oligonucleotide
ggtaaaggtgctcaccggctgtacaaaaac

SEQ ID NO: 111154 - DNA, 30 bp, Artificial Sequence
  Synthetic oligonucleotide
ggcaccacactataagtcggggcgaaaaac

SEQ ID NO: 111155 - DNA, 30 bp, Artificial Sequence
  Synthetic oligonucleotide
acctgtagcggttagagacttctgaaaaac

SEQ ID NO: 111156 - DNA, 30 bp, Artificial Sequence
  Synthetic oligonucleotide
cggtctcggtagcgcgatcaaagccaaaac

SEQ ID NO: 111157 - DNA, 30 bp, Artificial Sequence
  Synthetic oligonucleotide
tattgaaccattgcgcaccaaagtcaaaac

SEQ ID NO: 111158 - DNA, 30 bp, Artificial Sequence
  Synthetic oligonucleotide
tccttagagtaaattttactaagtcaaaac

SEQ ID NO: 111159 - DNA, 30 bp, Artificial Sequence
  Synthetic oligonucleotide
cattgcctaattaggaaagctcgtcaaaac

SEQ ID NO: 111160 - DNA, 30 bp, Artificial Sequence
  Synthetic oligonucleotide
gttaaatttgggacaacccgcctagaaaac

SEQ ID NO: 111161 - DNA, 30 bp, Artificial Sequence
  Synthetic oligonucleotide
aggatgttgttagctcataagtctgaaaac

SEQ ID NO: 111162 - DNA, 30 bp, Artificial Sequence
  Synthetic oligonucleotide
gatcggcgagataagttaacataataaaac

SEQ ID NO: 111163 - DNA, 30 bp, Artificial Sequence
  Synthetic oligonucleotide
cactgctttaacaaaagatatacgtaaaac

SEQ ID NO: 111164 - DNA, 30 bp, Artificial Sequence
  Synthetic oligonucleotide
agcacatctatacgtggacatgcaacaaac

SEQ ID NO: 111165 - DNA, 30 bp, Artificial Sequence
  Synthetic oligonucleotide
ctaatgagatggaaattgttggagacaaac

SEQ ID NO: 111166 - DNA, 30 bp, Artificial Sequence
  Synthetic oligonucleotide
gaaacagaccatcaggtggatgcgacaaac

SEQ ID NO: 111167 - DNA, 30 bp, Artificial Sequence
  Synthetic oligonucleotide
gagaacttgcacaacgaggtgcaaccaaac

SEQ ID NO: 111168 - DNA, 30 bp, Artificial Sequence
  Synthetic oligonucleotide
cgcttctactcgcgagcggagtgaccaaac

SEQ ID NO: 111169 - DNA, 30 bp, Artificial Sequence
  Synthetic oligonucleotide
acgcgaatcgcgagaggggggagcccaaac

SEQ ID NO: 111170 - DNA, 30 bp, Artificial Sequence
  Synthetic oligonucleotide
cgactgaccatactgcgtccattcccaaac

SEQ ID NO: 111171 - DNA, 30 bp, Artificial Sequence
  Synthetic oligonucleotide
cgggtaccactcactacgggtttgccaaac

SEQ ID NO: 111172 - DNA, 30 bp, Artificial Sequence
  Synthetic oligonucleotide
acgagtttacgactagggctgcgatcaaac

SEQ ID NO: 111173 - DNA, 30 bp, Artificial Sequence
  Synthetic oligonucleotide
aatacgtaacgacggtgcgagctatcaaac

SEQ ID NO: 111174 - DNA, 30 bp, Artificial Sequence
  Synthetic oligonucleotide
ggaggtgacggatttaggccctagtcaaac

SEQ ID NO: 111175 - DNA, 30 bp, Artificial Sequence
  Synthetic oligonucleotide
gatgctaagaaaaggagctgcctttcaaac

SEQ ID NO: 111176 - DNA, 30 bp, Artificial Sequence
  Synthetic oligonucleotide
ggctgaagcattgtattattacaccgaaac

SEQ ID NO: 111177 - DNA, 30 bp, Artificial Sequence
  Synthetic oligonucleotide
cgttactgcggcttatgcttccggcgaaac

SEQ ID NO: 111178 - DNA, 30 bp, Artificial Sequence
  Synthetic oligonucleotide
ttaggaaacttgtaataacagggtcgaaac

SEQ ID NO: 111179 - DNA, 30 bp, Artificial Sequence
  Synthetic oligonucleotide
gtgatacgactcattaggccataaggaaac

SEQ ID NO: 111180 - DNA, 30 bp, Artificial Sequence
  Synthetic oligonucleotide
tcaatcgaagaccaccttacgacaggaaac

SEQ ID NO: 111181 - DNA, 30 bp, Artificial Sequence
  Synthetic oligonucleotide
gagatctgtcactcaattagaagaggaaac

SEQ ID NO: 111182 - DNA, 30 bp, Artificial Sequence
  Synthetic oligonucleotide
ggaggcgtgtcgcagtctactctcggaaac

SEQ ID NO: 111183 - DNA, 30 bp, Artificial Sequence
  Synthetic oligonucleotide
gtatgggggtggatcgcacatgtcggaaac

SEQ ID NO: 111184 - DNA, 30 bp, Artificial Sequence
  Synthetic oligonucleotide
catgatgaacatgaatgatccggtggaaac

SEQ ID NO: 111185 - DNA, 30 bp, Artificial Sequence
  Synthetic oligonucleotide
gggaaaggcctaaaatataagggtggaaac

SEQ ID NO: 111186 - DNA, 30 bp, Artificial Sequence
  Synthetic oligonucleotide
caaggatccgagatatcctaggttggaaac

SEQ ID NO: 111187 - DNA, 30 bp, Artificial Sequence
  Synthetic oligonucleotide
tccactccgcttagtacggccaaatgaaac

SEQ ID NO: 111188 - DNA, 30 bp, Artificial Sequence
  Synthetic oligonucleotide
aactggggtaagttaaataaacagtgaaac

SEQ ID NO: 111189 - DNA, 30 bp, Artificial Sequence
  Synthetic oligonucleotide
gcggttgtggaacgcctgactgggtgaaac

SEQ ID NO: 111190 - DNA, 30 bp, Artificial Sequence
  Synthetic oligonucleotide
agattgggcctggtagcgaagtggtgaaac

SEQ ID NO: 111191 - DNA, 30 bp, Artificial Sequence
  Synthetic oligonucleotide
atgataccattgagcgactggccaataaac

SEQ ID NO: 111192 - DNA, 30 bp, Artificial Sequence
  Synthetic oligonucleotide
cctacatgggaatttcattgccgcataaac

SEQ ID NO: 111193 - DNA, 30 bp, Artificial Sequence
  Synthetic oligonucleotide
cgaagcgcggcctttcgaggaaggataaac

SEQ ID NO: 111194 - DNA, 30 bp, Artificial Sequence
  Synthetic oligonucleotide
ggtaggcgcagtctgcaacactaactaaac

SEQ ID NO: 111195 - DNA, 30 bp, Artificial Sequence
  Synthetic oligonucleotide
gatactttcggaaacgggtccggactaaac

SEQ ID NO: 111196 - DNA, 30 bp, Artificial Sequence
  Synthetic oligonucleotide
cgaagcggcgcgccaaaccatagcctaaac

SEQ ID NO: 111197 - DNA, 30 bp, Artificial Sequence
  Synthetic oligonucleotide
tgatctaccgtatggacatcgttcgtaaac

SEQ ID NO: 111198 - DNA, 30 bp, Artificial Sequence
  Synthetic oligonucleotide
taaggcctgagtgggaagatatcggtaaac

SEQ ID NO: 111199 - DNA, 30 bp, Artificial Sequence
  Synthetic oligonucleotide
tacgggggtgttaaccgatttatcttaaac

SEQ ID NO: 111200 - DNA, 30 bp, Artificial Sequence
  Synthetic oligonucleotide
cagaggcctcacctggtggtagctaacaac

SEQ ID NO: 111201 - DNA, 30 bp, Artificial Sequence
  Synthetic oligonucleotide
ctgagggcgaaggttgccggacgtaacaac

SEQ ID NO: 111202 - DNA, 30 bp, Artificial Sequence
  Synthetic oligonucleotide
acgtatcctgctagtgacacgatacacaac

SEQ ID NO: 111203 - DNA, 30 bp, Artificial Sequence
  Synthetic oligonucleotide
caacagtgcaccgaaagtcactttcacaac

SEQ ID NO: 111204 - DNA, 30 bp, Artificial Sequence
  Synthetic oligonucleotide
caaaacgagtaagcactggatcacgacaac

SEQ ID NO: 111205 - DNA, 30 bp, Artificial Sequence
  Synthetic oligonucleotide
tggtatgagtactagcgattgaccgacaac

SEQ ID NO: 111206 - DNA, 30 bp, Artificial Sequence
  Synthetic oligonucleotide
aaggagacaatcgccagtgtacccgacaac

SEQ ID NO: 111207 - DNA, 30 bp, Artificial Sequence
  Synthetic oligonucleotide
acagggatcactgcaatgggcagggacaac

SEQ ID NO: 111208 - DNA, 30 bp, Artificial Sequence
  Synthetic oligonucleotide
catcaacaaggccacgaaggttcctacaac

SEQ ID NO: 111209 - DNA, 30 bp, Artificial Sequence
  Synthetic oligonucleotide
aaaacatggtcgatatcagctagcgccaac

SEQ ID NO: 111210 - DNA, 30 bp, Artificial Sequence
  Synthetic oligonucleotide
ctgggtgaatggaacaaaagctgggccaac

SEQ ID NO: 111211 - DNA, 26 bp, Artificial Sequence
  Synthetic oligonucleotide
caggggaaaatagtaatgcatccaac

SEQ ID NO: 111212 - DNA, 30 bp, Artificial Sequence
  Synthetic oligonucleotide
agcaggatccatgcgtaggagctgtccaac

SEQ ID NO: 111213 - DNA, 30 bp, Artificial Sequence
  Synthetic oligonucleotide
cactagtgggccttgtacccgataagcaac

SEQ ID NO: 111214 - DNA, 30 bp, Artificial Sequence
  Synthetic oligonucleotide
tcacaagggtaggttagaaaactaagcaac

SEQ ID NO: 111215 - DNA, 30 bp, Artificial Sequence
  Synthetic oligonucleotide
aagagaagttacctgggatacgtccgcaac

SEQ ID NO: 111216 - DNA, 30 bp, Artificial Sequence
  Synthetic oligonucleotide
tccatgcccctgagtcaagatctgcgcaac

SEQ ID NO: 111217 - DNA, 30 bp, Artificial Sequence
  Synthetic oligonucleotide
agggtttggttcataatcaaagtgcgcaac

SEQ ID NO: 111218 - DNA, 30 bp, Artificial Sequence
  Synthetic oligonucleotide
gtgagtgggaggtacgtccaaaatcgcaac

SEQ ID NO: 111219 - DNA, 30 bp, Artificial Sequence
  Synthetic oligonucleotide
caagtccttacggtatcaacgggcggcaac

SEQ ID NO: 111220 - DNA, 30 bp, Artificial Sequence
  Synthetic oligonucleotide
tgtgttaaaaccctaagggatcaatgcaac

SEQ ID NO: 111221 - DNA, 30 bp, Artificial Sequence
  Synthetic oligonucleotide
cactacttggtgtgaaatctgtaatgcaac

SEQ ID NO: 111222 - DNA, 30 bp, Artificial Sequence
  Synthetic oligonucleotide
gacagctcccaggatggaatagtatgcaac

SEQ ID NO: 111223 - DNA, 30 bp, Artificial Sequence
  Synthetic oligonucleotide
aagtcgctcataaacctaaatcgctgcaac

SEQ ID NO: 111224 - DNA, 30 bp, Artificial Sequence
  Synthetic oligonucleotide
acggttagtagaaacccggaacggtgcaac

SEQ ID NO: 111225 - DNA, 30 bp, Artificial Sequence
  Synthetic oligonucleotide
tgcaacgcttgaaccccgcaaatgtgcaac

SEQ ID NO: 111226 - DNA, 30 bp, Artificial Sequence
  Synthetic oligonucleotide
gtaaaactgtgctcgagagcagcttgcaac

SEQ ID NO: 111227 - DNA, 30 bp, Artificial Sequence
  Synthetic oligonucleotide
cccggaactgagcgcagtaccaaaatcaac

SEQ ID NO: 111228 - DNA, 30 bp, Artificial Sequence
  Synthetic oligonucleotide
atacaggtaggggtagtatcttcaatcaac

SEQ ID NO: 111229 - DNA, 30 bp, Artificial Sequence
  Synthetic oligonucleotide
gaccgaacaatcagagagtgagccatcaac

SEQ ID NO: 111230 - DNA, 30 bp, Artificial Sequence
  Synthetic oligonucleotide
gttgcgccaaatgtggccgggagcatcaac

SEQ ID NO: 111231 - DNA, 30 bp, Artificial Sequence
  Synthetic oligonucleotide
gcatcatgggctataccaccgcgcatcaac

SEQ ID NO: 111232 - DNA, 30 bp, Artificial Sequence
  Synthetic oligonucleotide
gacgggtaataatttggtggcggtatcaac

SEQ ID NO: 111233 - DNA, 30 bp, Artificial Sequence
  Synthetic oligonucleotide
agattaagcgataaccatatactactcaac

SEQ ID NO: 111234 - DNA, 30 bp, Artificial Sequence
  Synthetic oligonucleotide
tggcgtctaccgtcgaggcgctagctcaac

SEQ ID NO: 111235 - DNA, 30 bp, Artificial Sequence
  Synthetic oligonucleotide
cacaaagatgtctagtttaggatagtcaac

SEQ ID NO: 111236 - DNA, 30 bp, Artificial Sequence
  Synthetic oligonucleotide
taagtgctgcaaggagtagggtagttcaac

SEQ ID NO: 111237 - DNA, 30 bp, Artificial Sequence
  Synthetic oligonucleotide
agggagtgatcccggatgtttaggttcaac

SEQ ID NO: 111238 - DNA, 30 bp, Artificial Sequence
  Synthetic oligonucleotide
gcggtaaaagagtgtcgtatatttttcaac

SEQ ID NO: 111239 - DNA, 30 bp, Artificial Sequence
  Synthetic oligonucleotide
ataagacaacttaatgtggccggaaagaac

SEQ ID NO: 111240 - DNA, 30 bp, Artificial Sequence
  Synthetic oligonucleotide
caggtgagttgttacgatctgggaaagaac

SEQ ID NO: 111241 - DNA, 30 bp, Artificial Sequence
  Synthetic oligonucleotide
gggatcctaactcgagactgatgaaagaac

SEQ ID NO: 111242 - DNA, 30 bp, Artificial Sequence
  Synthetic oligonucleotide
agaataagtaagtaccgggttctcaagaac

SEQ ID NO: 111243 - DNA, 30 bp, Artificial Sequence
  Synthetic oligonucleotide
gtactagatccccgtaaatcagttaagaac

SEQ ID NO: 111244 - DNA, 30 bp, Artificial Sequence
  Synthetic oligonucleotide
aggagctaagggtaactgatgccacagaac

SEQ ID NO: 111245 - DNA, 30 bp, Artificial Sequence
  Synthetic oligonucleotide
cgatgcacataagtttagtgaagacagaac

SEQ ID NO: 111246 - DNA, 30 bp, Artificial Sequence
  Synthetic oligonucleotide
tcgaacaaactaggcgctttctagcagaac

SEQ ID NO: 111247 - DNA, 30 bp, Artificial Sequence
  Synthetic oligonucleotide
tagaacagtgttacaagatcaatgcagaac

SEQ ID NO: 111248 - DNA, 30 bp, Artificial Sequence
  Synthetic oligonucleotide
ctggtgaaaagagtggataagatagagaac

SEQ ID NO: 111249 - DNA, 30 bp, Artificial Sequence
  Synthetic oligonucleotide
gcaacaccaaggttatccaaaggggagaac

SEQ ID NO: 111250 - DNA, 30 bp, Artificial Sequence
  Synthetic oligonucleotide
gatcgtcggtgtagaaacgtattatagaac

SEQ ID NO: 111251 - DNA, 30 bp, Artificial Sequence
  Synthetic oligonucleotide
attgggtttataaagacatccagaacgaac

SEQ ID NO: 111252 - DNA, 30 bp, Artificial Sequence
  Synthetic oligonucleotide
cgctccgacaccctacagtgtttaacgaac

SEQ ID NO: 111253 - DNA, 30 bp, Artificial Sequence
  Synthetic oligonucleotide
ctaaccgtacacatctggaggatcacgaac

SEQ ID NO: 111254 - DNA, 30 bp, Artificial Sequence
  Synthetic oligonucleotide
ttcgcggaacagggcgtaggcatcccgaac

SEQ ID NO: 111255 - DNA, 30 bp, Artificial Sequence
  Synthetic oligonucleotide
ataccgtagtgcctaattcaactagcgaac

SEQ ID NO: 111256 - DNA, 30 bp, Artificial Sequence
  Synthetic oligonucleotide
gatggtgaaaataactgtttggggtcgaac

SEQ ID NO: 111257 - DNA, 30 bp, Artificial Sequence
  Synthetic oligonucleotide
ggcattggtaccggcaaatcaaaaaggaac

SEQ ID NO: 111258 - DNA, 30 bp, Artificial Sequence
  Synthetic oligonucleotide
gcagagcggagtcactcaagataaaggaac

SEQ ID NO: 111259 - DNA, 30 bp, Artificial Sequence
  Synthetic oligonucleotide
aggcccaagggttatgttggtctaaggaac

SEQ ID NO: 111260 - DNA, 30 bp, Artificial Sequence
  Synthetic oligonucleotide
ctatctaaattaggcggatagcgcaggaac

SEQ ID NO: 111261 - DNA, 30 bp, Artificial Sequence
  Synthetic oligonucleotide
cttaaataaatgagaaatgaatcgaggaac

SEQ ID NO: 111262 - DNA, 30 bp, Artificial Sequence
  Synthetic oligonucleotide
acgcaaatcaagtgttcatagtggaggaac

SEQ ID NO: 111263 - DNA, 30 bp, Artificial Sequence
  Synthetic oligonucleotide
gagggataatatattcagtcagtgaggaac

SEQ ID NO: 111264 - DNA, 30 bp, Artificial Sequence
  Synthetic oligonucleotide
tctgcagggtaaacacggctggagcggaac

SEQ ID NO: 111265 - DNA, 30 bp, Artificial Sequence
  Synthetic oligonucleotide
acatagaggacggagtccgagacgcggaac

SEQ ID NO: 111266 - DNA, 30 bp, Artificial Sequence
  Synthetic oligonucleotide
atggttgtatgtcaggaataatatcggaac

SEQ ID NO: 111267 - DNA, 30 bp, Artificial Sequence
  Synthetic oligonucleotide
ctctcttgaaataggggctaaaaggggaac

SEQ ID NO: 111268 - DNA, 30 bp, Artificial Sequence
  Synthetic oligonucleotide
accgaaacattcctggaggagcaggggaac

SEQ ID NO: 111269 - DNA, 30 bp, Artificial Sequence
  Synthetic oligonucleotide
aaaactcgcggaaagagatacacggggaac

SEQ ID NO: 111270 - DNA, 30 bp, Artificial Sequence
  Synthetic oligonucleotide
tgaaggatgcgtgatttactgatatggaac

SEQ ID NO: 111271 - DNA, 30 bp, Artificial Sequence
  Synthetic oligonucleotide
ttcattggaagttcaatagctgcctggaac

SEQ ID NO: 111272 - DNA, 30 bp, Artificial Sequence
  Synthetic oligonucleotide
ggcctaagacaagcaaacgagctcatgaac

SEQ ID NO: 111273 - DNA, 30 bp, Artificial Sequence
  Synthetic oligonucleotide
gtcgaactaggggcacctttacaactgaac

SEQ ID NO: 111274 - DNA, 30 bp, Artificial Sequence
  Synthetic oligonucleotide
atgccagcacctgcgagatggcctctgaac

SEQ ID NO: 111275 - DNA, 30 bp, Artificial Sequence
  Synthetic oligonucleotide
gaggccccgtaatgggcatggcgggtgaac

SEQ ID NO: 111276 - DNA, 30 bp, Artificial Sequence
  Synthetic oligonucleotide
ggggtggtctcgtataccgtggctgtgaac

SEQ ID NO: 111277 - DNA, 30 bp, Artificial Sequence
  Synthetic oligonucleotide
cacaggaaaactgaagaacgggaattgaac

SEQ ID NO: 111278 - DNA, 30 bp, Artificial Sequence
  Synthetic oligonucleotide
acgtgggattcgtctctcggatggttgaac

SEQ ID NO: 111279 - DNA, 30 bp, Artificial Sequence
  Synthetic oligonucleotide
ctagtgtatagctatgttggcgacaataac

SEQ ID NO: 111280 - DNA, 30 bp, Artificial Sequence
  Synthetic oligonucleotide
aaagacaggaacagccacctcttcaataac

SEQ ID NO: 111281 - DNA, 30 bp, Artificial Sequence
  Synthetic oligonucleotide
ctagacactagtgaataggggtaccataac

SEQ ID NO: 111282 - DNA, 30 bp, Artificial Sequence
  Synthetic oligonucleotide
gtaattgactcacaacccgcgcaggataac

SEQ ID NO: 111283 - DNA, 30 bp, Artificial Sequence
  Synthetic oligonucleotide
cctcgagcgaatcttaccacgagttataac

SEQ ID NO: 111284 - DNA, 30 bp, Artificial Sequence
  Synthetic oligonucleotide
ttactacgtaaatagaaaaaatgcactaac

SEQ ID NO: 111285 - DNA, 30 bp, Artificial Sequence
  Synthetic oligonucleotide
cgtcgcgtgacggtttattttagtactaac

SEQ ID NO: 111286 - DNA, 30 bp, Artificial Sequence
  Synthetic oligonucleotide
ccgaggcctcacatactaaggggtgctaac

SEQ ID NO: 111287 - DNA, 30 bp, Artificial Sequence
  Synthetic oligonucleotide
ggtaggatcggatgccatagacaatctaac

SEQ ID NO: 111288 - DNA, 30 bp, Artificial Sequence
  Synthetic oligonucleotide
agcaagcgacgcacatactgaaggtctaac

SEQ ID NO: 111289 - DNA, 30 bp, Artificial Sequence
  Synthetic oligonucleotide
actgccatgaatcgcgttcaaaaaagtaac

SEQ ID NO: 111290 - DNA, 30 bp, Artificial Sequence
  Synthetic oligonucleotide
gtcattccaacgttggtacttccaagtaac

SEQ ID NO: 111291 - DNA, 30 bp, Artificial Sequence
  Synthetic oligonucleotide
cgtgcggagctactacaagaagccagtaac

SEQ ID NO: 111292 - DNA, 30 bp, Artificial Sequence
  Synthetic oligonucleotide
tgattagagtgatctacgagagcccgtaac

SEQ ID NO: 111293 - DNA, 30 bp, Artificial Sequence
  Synthetic oligonucleotide
aggactcttgcctttcacacgtcccgtaac

SEQ ID NO: 111294 - DNA, 30 bp, Artificial Sequence
  Synthetic oligonucleotide
caatgggagcagaggattcccagccgtaac

SEQ ID NO: 111295 - DNA, 30 bp, Artificial Sequence
  Synthetic oligonucleotide
cggtcagttaaaactaacacaggccgtaac

SEQ ID NO: 111296 - DNA, 30 bp, Artificial Sequence
  Synthetic oligonucleotide
ttgacctgcaaggatgccatgaggcgtaac

SEQ ID NO: 111297 - DNA, 30 bp, Artificial Sequence
  Synthetic oligonucleotide
gcgtagaatgtgcaaacacggtatcgtaac

SEQ ID NO: 111298 - DNA, 31 bp, Artificial Sequence
  Synthetic oligonucleotide
atggcggcaagcacacttgtatggtcgtaac

SEQ ID NO: 111299 - DNA, 30 bp, Artificial Sequence
  Synthetic oligonucleotide
cactcgcacctagcggaagcactgggtaac

SEQ ID NO: 111300 - DNA, 30 bp, Artificial Sequence
  Synthetic oligonucleotide
ctacgacgacagtggctctggctatgtaac

SEQ ID NO: 111301 - DNA, 30 bp, Artificial Sequence
  Synthetic oligonucleotide
gaggtaagttgcacgtaatggtcctgtaac

SEQ ID NO: 111302 - DNA, 30 bp, Artificial Sequence
  Synthetic oligonucleotide
gggccgaaaagtacgggaagactaattaac

SEQ ID NO: 111303 - DNA, 30 bp, Artificial Sequence
  Synthetic oligonucleotide
aggcgcacccgtacctcggtatagattaac

SEQ ID NO: 111304 - DNA, 30 bp, Artificial Sequence
  Synthetic oligonucleotide
ggggtgcttgagctgggagcatgtattaac

SEQ ID NO: 111305 - DNA, 30 bp, Artificial Sequence
  Synthetic oligonucleotide
gtaggaaatggtatacgctaattgcttaac

SEQ ID NO: 111306 - DNA, 30 bp, Artificial Sequence
  Synthetic oligonucleotide
gaggtaggtattacggctaaaagagttaac

SEQ ID NO: 111307 - DNA, 30 bp, Artificial Sequence
  Synthetic oligonucleotide
taggattagtgagtgctggcgtcatttaac

SEQ ID NO: 111308 - DNA, 30 bp, Artificial Sequence
  Synthetic oligonucleotide
gagagcgagagggtggtcaaacggtttaac

SEQ ID NO: 111309 - DNA, 30 bp, Artificial Sequence
  Synthetic oligonucleotide
acggacttcgggtatcgcgaccgtaaacac

SEQ ID NO: 111310 - DNA, 30 bp, Artificial Sequence
  Synthetic oligonucleotide
taagatgctctctatgatgggggccaacac

SEQ ID NO: 111311 - DNA, 30 bp, Artificial Sequence
  Synthetic oligonucleotide
acatcgggaatctgtaaaacgctgcaacac

SEQ ID NO: 111312 - DNA, 30 bp, Artificial Sequence
  Synthetic oligonucleotide
cggtatggatacagatctttccgtgaacac

SEQ ID NO: 111313 - DNA, 31 bp, Artificial Sequence
  Synthetic oligonucleotide
caggcaacagcggatatcgggataataacac

SEQ ID NO: 111314 - DNA, 30 bp, Artificial Sequence
  Synthetic oligonucleotide
tagaaggttttgtcaaagatctcgtaacac

SEQ ID NO: 111315 - DNA, 30 bp, Artificial Sequence
  Synthetic oligonucleotide
gacgtcgcggagagcgagcgttgttaacac

SEQ ID NO: 111316 - DNA, 30 bp, Artificial Sequence
  Synthetic oligonucleotide
caactgaaatttgaaccggtaagaacacac

SEQ ID NO: 111317 - DNA, 30 bp, Artificial Sequence
  Synthetic oligonucleotide
agcagttttagaggagacgggacgacacac

SEQ ID NO: 111318 - DNA, 30 bp, Artificial Sequence
  Synthetic oligonucleotide
taacgatatacgatgcctgagttgacacac

SEQ ID NO: 111319 - DNA, 30 bp, Artificial Sequence
  Synthetic oligonucleotide
aggtcactgttaacatgccgccaaccacac

SEQ ID NO: 111320 - DNA, 30 bp, Artificial Sequence
  Synthetic oligonucleotide
aacgggatttacatagccggattctcacac

SEQ ID NO: 111321 - DNA, 30 bp, Artificial Sequence
  Synthetic oligonucleotide
gtatggacaacagcaaacggatattcacac

SEQ ID NO: 111322 - DNA, 30 bp, Artificial Sequence
  Synthetic oligonucleotide
tagtcaacgtgctatatcaaatgacgacac

SEQ ID NO: 111323 - DNA, 30 bp, Artificial Sequence
  Synthetic oligonucleotide
gaggaatccacttgacgtatgtgacgacac

SEQ ID NO: 111324 - DNA, 30 bp, Artificial Sequence
  Synthetic oligonucleotide
gaccggcaagcataatgcgttaaccgacac

SEQ ID NO: 111325 - DNA, 30 bp, Artificial Sequence
  Synthetic oligonucleotide
tcacataacgtccacttaagtaagggacac

SEQ ID NO: 111326 - DNA, 30 bp, Artificial Sequence
  Synthetic oligonucleotide
tagaaaatctccaggtaattaagtggacac

SEQ ID NO: 111327 - DNA, 30 bp, Artificial Sequence
  Synthetic oligonucleotide
ccatggggccgacaaagagatcccatacac

SEQ ID NO: 111328 - DNA, 30 bp, Artificial Sequence
  Synthetic oligonucleotide
atacaccttttgtgaaatacagagatacac

SEQ ID NO: 111329 - DNA, 30 bp, Artificial Sequence
  Synthetic oligonucleotide
taacactatatccttcaaatgcggctacac

SEQ ID NO: 111330 - DNA, 30 bp, Artificial Sequence
  Synthetic oligonucleotide
gacggatgtctgactctttcgatgctacac

SEQ ID NO: 111331 - DNA, 30 bp, Artificial Sequence
  Synthetic oligonucleotide
cgacgactacaggttgtcgacagtctacac

SEQ ID NO: 111332 - DNA, 30 bp, Artificial Sequence
  Synthetic oligonucleotide
agcgagcacgggacggtgagtggagtacac

SEQ ID NO: 111333 - DNA, 30 bp, Artificial Sequence
  Synthetic oligonucleotide
gttctgtgaagagctaatggacatcaccac

SEQ ID NO: 111334 - DNA, 30 bp, Artificial Sequence
  Synthetic oligonucleotide
aataaaaaagcattgtggatgggtgaccac

SEQ ID NO: 111335 - DNA, 30 bp, Artificial Sequence
  Synthetic oligonucleotide
gcctgaatatttagcggtaacgtgtaccac

SEQ ID NO: 111336 - DNA, 30 bp, Artificial Sequence
  Synthetic oligonucleotide
ctgggacgttccatgcgaacaacaacccac

SEQ ID NO: 111337 - DNA, 30 bp, Artificial Sequence
  Synthetic oligonucleotide
cacgtccaaggtgtgacggcagtcacccac

SEQ ID NO: 111338 - DNA, 30 bp, Artificial Sequence
  Synthetic oligonucleotide
cggcgttccaatatcatacctaaaccccac

SEQ ID NO: 111339 - DNA, 30 bp, Artificial Sequence
  Synthetic oligonucleotide
ggctcgaatatgtgtagtataacgccccac

SEQ ID NO: 111340 - DNA, 30 bp, Artificial Sequence
  Synthetic oligonucleotide
tcgccccgaccaggtggaaagcttccccac

SEQ ID NO: 111341 - DNA, 30 bp, Artificial Sequence
  Synthetic oligonucleotide
acagggcgaacactcgccgtgggagcccac

SEQ ID NO: 111342 - DNA, 30 bp, Artificial Sequence
  Synthetic oligonucleotide
aaagtatccctcatagtgcaagccgcccac

SEQ ID NO: 111343 - DNA, 30 bp, Artificial Sequence
  Synthetic oligonucleotide
gaacggaacagaccatcacatgatgcccac

SEQ ID NO: 111344 - DNA, 30 bp, Artificial Sequence
  Synthetic oligonucleotide
accagtgaattcccaaagaatgttgcccac

SEQ ID NO: 111345 - DNA, 30 bp, Artificial Sequence
  Synthetic oligonucleotide
cggatttcaatatatcaccgtgcatcccac

SEQ ID NO: 111346 - DNA, 30 bp, Artificial Sequence
  Synthetic oligonucleotide
cggtcaaagtgcaccagcggacggtcccac

SEQ ID NO: 111347 - DNA, 30 bp, Artificial Sequence
  Synthetic oligonucleotide
tattcgactagtgattactacgtgcgccac

SEQ ID NO: 111348 - DNA, 30 bp, Artificial Sequence
  Synthetic oligonucleotide
gcaagttgaagggatacgttcacgtgccac

SEQ ID NO: 111349 - DNA, 30 bp, Artificial Sequence
  Synthetic oligonucleotide
gtacaaggaatgaccacgcgggccatccac

SEQ ID NO: 111350 - DNA, 30 bp, Artificial Sequence
  Synthetic oligonucleotide
gaaaagggttccggggcgagcgcactccac

SEQ ID NO: 111351 - DNA, 30 bp, Artificial Sequence
  Synthetic oligonucleotide
ctataatgcgtcggaaggtgatagctccac

SEQ ID NO: 111352 - DNA, 30 bp, Artificial Sequence
  Synthetic oligonucleotide
ccgggaaaagggccggatagcgacgtccac

SEQ ID NO: 111353 - DNA, 30 bp, Artificial Sequence
  Synthetic oligonucleotide
acggccgcaaacacctaacattatttccac

SEQ ID NO: 111354 - DNA, 30 bp, Artificial Sequence
  Synthetic oligonucleotide
gcctcgtaataatcaacgtgcaagaagcac

SEQ ID NO: 111355 - DNA, 30 bp, Artificial Sequence
  Synthetic oligonucleotide
gtgaactgccagaaatgactcactaagcac

SEQ ID NO: 111356 - DNA, 30 bp, Artificial Sequence
  Synthetic oligonucleotide
aaatggcattctgacatacggattcagcac

SEQ ID NO: 111357 - DNA, 30 bp, Artificial Sequence
  Synthetic oligonucleotide
accgggtgctacaggaacgtctgagagcac

SEQ ID NO: 111358 - DNA, 30 bp, Artificial Sequence
  Synthetic oligonucleotide
gggtataccatggtcagaggatgcgagcac

SEQ ID NO: 111359 - DNA, 30 bp, Artificial Sequence
  Synthetic oligonucleotide
aagagttagagattattcgggggtgagcac

SEQ ID NO: 111360 - DNA, 30 bp, Artificial Sequence
  Synthetic oligonucleotide
ctgagactcgaacgtaatttacttgagcac

SEQ ID NO: 111361 - DNA, 30 bp, Artificial Sequence
  Synthetic oligonucleotide
gttccggagtgtattggatgtggatagcac

SEQ ID NO: 111362 - DNA, 30 bp, Artificial Sequence
  Synthetic oligonucleotide
agcggggttgaacttactcgtcgctagcac

SEQ ID NO: 111363 - DNA, 30 bp, Artificial Sequence
  Synthetic oligonucleotide
gggcctgtgatgagttgtctcacttagcac

SEQ ID NO: 111364 - DNA, 30 bp, Artificial Sequence
  Synthetic oligonucleotide
gaacctgtgacgggaccgaggtaaacgcac

SEQ ID NO: 111365 - DNA, 30 bp, Artificial Sequence
  Synthetic oligonucleotide
tattgatagcgacgagcatccaccacgcac

SEQ ID NO: 111366 - DNA, 30 bp, Artificial Sequence
  Synthetic oligonucleotide
gcatgaaggatatctttccaattcacgcac

SEQ ID NO: 111367 - DNA, 30 bp, Artificial Sequence
  Synthetic oligonucleotide
ccgcactatatgacgactaaaacgccgcac

SEQ ID NO: 111368 - DNA, 30 bp, Artificial Sequence
  Synthetic oligonucleotide
tatataaacggagtataatcccgcaggcac

SEQ ID NO: 111369 - DNA, 30 bp, Artificial Sequence
  Synthetic oligonucleotide
ggtcgtggtataaatcagtcaacacggcac

SEQ ID NO: 111370 - DNA, 38 bp, Artificial Sequence
  Synthetic oligonucleotide
attaaacctgctcaaaccatcccaattcaaaccggcac

SEQ ID NO: 111371 - DNA, 30 bp, Artificial Sequence
  Synthetic oligonucleotide
gagggaaaataatagatacgaaatcggcac

SEQ ID NO: 111372 - DNA, 30 bp, Artificial Sequence
  Synthetic oligonucleotide
cggcgtcaacgtggcatacaggcagggcac

SEQ ID NO: 111373 - DNA, 30 bp, Artificial Sequence
  Synthetic oligonucleotide
tccctataagactcgttagtagtcgggcac

SEQ ID NO: 111374 - DNA, 30 bp, Artificial Sequence
  Synthetic oligonucleotide
tcgcattctgcgaataatgtttctgggcac

SEQ ID NO: 111375 - DNA, 30 bp, Artificial Sequence
  Synthetic oligonucleotide
catcgcgcggcgatggcccctgatatgcac

SEQ ID NO: 111376 - DNA, 30 bp, Artificial Sequence
  Synthetic oligonucleotide
ggcaacaagcacaaactcaccatcctgcac

SEQ ID NO: 111377 - DNA, 30 bp, Artificial Sequence
  Synthetic oligonucleotide
acttccagaaaaattaacatctggctgcac

SEQ ID NO: 111378 - DNA, 30 bp, Artificial Sequence
  Synthetic oligonucleotide
cctgggtgttctagtgtctcaagtctgcac

SEQ ID NO: 111379 - DNA, 30 bp, Artificial Sequence
  Synthetic oligonucleotide
gtactgtgcaagttccggctgagagtgcac

SEQ ID NO: 111380 - DNA, 30 bp, Artificial Sequence
  Synthetic oligonucleotide
accagaataccgcagatatactctgtgcac

SEQ ID NO: 111381 - DNA, 30 bp, Artificial Sequence
  Synthetic oligonucleotide
aacgcgggccgcgagaaccaggacttgcac

SEQ ID NO: 111382 - DNA, 30 bp, Artificial Sequence
  Synthetic oligonucleotide
gtaattgggccagtacttaactaccatcac

SEQ ID NO: 111383 - DNA, 30 bp, Artificial Sequence
  Synthetic oligonucleotide
tctctggcgacccgcgaggggcacgatcac

SEQ ID NO: 111384 - DNA, 31 bp, Artificial Sequence
  Synthetic oligonucleotide
gagaatggcgggaaagcaccgcggtgatcac

SEQ ID NO: 111385 - DNA, 30 bp, Artificial Sequence
  Synthetic oligonucleotide
agcaaggctgccccgctcccggaatatcac

SEQ ID NO: 111386 - DNA, 30 bp, Artificial Sequence
  Synthetic oligonucleotide
tccagacttggagagggcaagaagactcac

SEQ ID NO: 111387 - DNA, 30 bp, Artificial Sequence
  Synthetic oligonucleotide
cgagtcagctagctaaaaaagtttactcac

SEQ ID NO: 111388 - DNA, 30 bp, Artificial Sequence
  Synthetic oligonucleotide
ggcaaggcatggggaaccatacaagctcac

SEQ ID NO: 111389 - DNA, 30 bp, Artificial Sequence
  Synthetic oligonucleotide
tgaagggcaaggtcgagccaaatggctcac

SEQ ID NO: 111390 - DNA, 30 bp, Artificial Sequence
  Synthetic oligonucleotide
cagggagcccctaacgagataaccagtcac

SEQ ID NO: 111391 - DNA, 30 bp, Artificial Sequence
  Synthetic oligonucleotide
caaaaacacaaacgctcaatcattagtcac

SEQ ID NO: 111392 - DNA, 30 bp, Artificial Sequence
  Synthetic oligonucleotide
taaatttcggggaacaggtgaaaaggtcac

SEQ ID NO: 111393 - DNA, 30 bp, Artificial Sequence
  Synthetic oligonucleotide
caacggacaggaaacatcccctttggtcac

SEQ ID NO: 111394 - DNA, 30 bp, Artificial Sequence
  Synthetic oligonucleotide
atggagagagcctatattatgacctgtcac

SEQ ID NO: 111395 - DNA, 30 bp, Artificial Sequence
  Synthetic oligonucleotide
gtcggaaaacggtgacattccaggtgtcac

SEQ ID NO: 111396 - DNA, 30 bp, Artificial Sequence
  Synthetic oligonucleotide
gttggtgagggggtaggccaagattgtcac

SEQ ID NO: 111397 - DNA, 30 bp, Artificial Sequence
  Synthetic oligonucleotide
gaaggctcggggtctatatcgataattcac

SEQ ID NO: 111398 - DNA, 30 bp, Artificial Sequence
  Synthetic oligonucleotide
tggcgtgtctcccaatcggaagggcttcac

SEQ ID NO: 111399 - DNA, 30 bp, Artificial Sequence
  Synthetic oligonucleotide
cggggaaacaccccgagatatagggttcac

SEQ ID NO: 111400 - DNA, 30 bp, Artificial Sequence
  Synthetic oligonucleotide
cgtgaatggtgacaagaaatgtcatttcac

SEQ ID NO: 111401 - DNA, 30 bp, Artificial Sequence
  Synthetic oligonucleotide
aggcgataggggttagttatcctttttcac

SEQ ID NO: 111402 - DNA, 33 bp, Artificial Sequence
  Synthetic oligonucleotide
gtactagaccaccacgtgtccatcagaaaagac

SEQ ID NO: 111403 - DNA, 34 bp, Artificial Sequence
  Synthetic oligonucleotide
gatactagaccatcacgtgtccatcagaaaagac

SEQ ID NO: 111404 - DNA, 34 bp, Artificial Sequence
  Synthetic oligonucleotide
catactagaccaccacgggtccatgagaaaagac

SEQ ID NO: 111405 - DNA, 34 bp, Artificial Sequence
  Synthetic oligonucleotide
gatactagaccaccacgtgtccatgcgaaaagac

SEQ ID NO: 111406 - DNA, 34 bp, Artificial Sequence
  Synthetic oligonucleotide
gatactagaccaccacgtgtccatcataaaagac

SEQ ID NO: 111407 - DNA, 30 bp, Artificial Sequence
  Synthetic oligonucleotide
cgggtgaggccgagactctagttaaaagac

SEQ ID NO: 111408 - DNA, 30 bp, Artificial Sequence
  Synthetic oligonucleotide
gccagggtagatcgagggaatattaaagac

SEQ ID NO: 111409 - DNA, 30 bp, Artificial Sequence
  Synthetic oligonucleotide
tatcgagaggaacatccttagaaccaagac

SEQ ID NO: 111410 - DNA, 30 bp, Artificial Sequence
  Synthetic oligonucleotide
tgcttttaagtagaaaactttgttcaagac

SEQ ID NO: 111411 - DNA, 30 bp, Artificial Sequence
  Synthetic oligonucleotide
ccgtctagtggaaatgggtatgaataagac

SEQ ID NO: 111412 - DNA, 30 bp, Artificial Sequence
  Synthetic oligonucleotide
tgatgtggaaaacctaggtcacgctaagac

SEQ ID NO: 111413 - DNA, 30 bp, Artificial Sequence
  Synthetic oligonucleotide
ccaacatggttgcgtacgatgagcacagac

SEQ ID NO: 111414 - DNA, 30 bp, Artificial Sequence
  Synthetic oligonucleotide
acaaacagtgtggggaaaactgtcacagac

SEQ ID NO: 111415 - DNA, 30 bp, Artificial Sequence
  Synthetic oligonucleotide
tctggcaaaatcatcgcgacacctacagac

SEQ ID NO: 111416 - DNA, 30 bp, Artificial Sequence
  Synthetic oligonucleotide
gccacgagtgtcgaattgccgggaccagac

SEQ ID NO: 111417 - DNA, 30 bp, Artificial Sequence
  Synthetic oligonucleotide
atagcagggctcagccggcaatcgccagac

SEQ ID NO: 111418 - DNA, 30 bp, Artificial Sequence
  Synthetic oligonucleotide
atcatagtcgtaagtagcttatggccagac

SEQ ID NO: 111419 - DNA, 30 bp, Artificial Sequence
  Synthetic oligonucleotide
acggttgtgtaccgaggagcgcttccagac

SEQ ID NO: 111420 - DNA, 30 bp, Artificial Sequence
  Synthetic oligonucleotide
tcacgatacggtgggtcaaagacggcagac

SEQ ID NO: 111421 - DNA, 30 bp, Artificial Sequence
  Synthetic oligonucleotide
agaagctaccttgccccgagtcctgcagac

SEQ ID NO: 111422 - DNA, 30 bp, Artificial Sequence
  Synthetic oligonucleotide
taatcgtcaagggacaccttttctgcagac

SEQ ID NO: 111423 - DNA, 30 bp, Artificial Sequence
  Synthetic oligonucleotide
agtcgacaagagccggttgtagtgtcagac

SEQ ID NO: 111424 - DNA, 30 bp, Artificial Sequence
  Synthetic oligonucleotide
gtgcgaatgtatatagtatcgacttcagac

SEQ ID NO: 111425 - DNA, 30 bp, Artificial Sequence
  Synthetic oligonucleotide
gttggccgagctaggtggaatttttcagac

SEQ ID NO: 111426 - DNA, 30 bp, Artificial Sequence
  Synthetic oligonucleotide
tggataagctcgaaagacggggtgagagac

SEQ ID NO: 111427 - DNA, 30 bp, Artificial Sequence
  Synthetic oligonucleotide
caaggtcgcgtggctggatttggtagagac

SEQ ID NO: 111428 - DNA, 30 bp, Artificial Sequence
  Synthetic oligonucleotide
caacaatctaaaactagacgtattagagac

SEQ ID NO: 111429 - DNA, 30 bp, Artificial Sequence
  Synthetic oligonucleotide
gtctgtaacgagataggtcggctacgagac

SEQ ID NO: 111430 - DNA, 30 bp, Artificial Sequence
  Synthetic oligonucleotide
ggaagatgactgatggtccatttccgagac

SEQ ID NO: 111431 - DNA, 30 bp, Artificial Sequence
  Synthetic oligonucleotide
acatttcgcgtttgatgtgcgaagcgagac

SEQ ID NO: 111432 - DNA, 30 bp, Artificial Sequence
  Synthetic oligonucleotide
aaggggacacgggatactaatcttcgagac

SEQ ID NO: 111433 - DNA, 30 bp, Artificial Sequence
  Synthetic oligonucleotide
cacaacgacacgtgccgctatgaatgagac

SEQ ID NO: 111434 - DNA, 30 bp, Artificial Sequence
  Synthetic oligonucleotide
attcaggcgtaactgattagcgtatgagac

SEQ ID NO: 111435 - DNA, 30 bp, Artificial Sequence
  Synthetic oligonucleotide
cagagtcagtgagacgtggagccctgagac

SEQ ID NO: 111436 - DNA, 30 bp, Artificial Sequence
  Synthetic oligonucleotide
aaaaggcgcgtcgccgacgaaagaatagac

SEQ ID NO: 111437 - DNA, 30 bp, Artificial Sequence
  Synthetic oligonucleotide
cagggagattgaccaattgtctacatagac

SEQ ID NO: 111438 - DNA, 30 bp, Artificial Sequence
  Synthetic oligonucleotide
tgaaagcgatagttttgcactaggctagac

SEQ ID NO: 111439 - DNA, 30 bp, Artificial Sequence
  Synthetic oligonucleotide
caggtactagaaatacagcccactctagac

SEQ ID NO: 111440 - DNA, 30 bp, Artificial Sequence
  Synthetic oligonucleotide
agcgacgaaaattgtatcatctgggtagac

SEQ ID NO: 111441 - DNA, 30 bp, Artificial Sequence
  Synthetic oligonucleotide
agcgtaatcttaaggatagtgcatgtagac

SEQ ID NO: 111442 - DNA, 30 bp, Artificial Sequence
  Synthetic oligonucleotide
gaaaggaaggcatcttgggagaaattagac

SEQ ID NO: 111443 - DNA, 30 bp, Artificial Sequence
  Synthetic oligonucleotide
ttggacagtcgtaaagcgcagaccttagac

SEQ ID NO: 111444 - DNA, 30 bp, Artificial Sequence
  Synthetic oligonucleotide
gaaggcaatcttccgtgacatgttttagac

SEQ ID NO: 111445 - DNA, 30 bp, Artificial Sequence
  Synthetic oligonucleotide
gtccccgtaaggaaagcactaataaacgac

SEQ ID NO: 111446 - DNA, 30 bp, Artificial Sequence
  Synthetic oligonucleotide
agggtttgggagctcaggagcaacaacgac

SEQ ID NO: 111447 - DNA, 30 bp, Artificial Sequence
  Synthetic oligonucleotide
agcgagggcatcaatcttcaagtcaacgac

SEQ ID NO: 111448 - DNA, 30 bp, Artificial Sequence
  Synthetic oligonucleotide
cgttacaagtgggacgttttgacgtacgac

SEQ ID NO: 111449 - DNA, 30 bp, Artificial Sequence
  Synthetic oligonucleotide
atgttaagacatgcaacattcccttacgac

SEQ ID NO: 111450 - DNA, 30 bp, Artificial Sequence
  Synthetic oligonucleotide
ccgcaagaaagaggggtgcagttaaccgac

SEQ ID NO: 111451 - DNA, 30 bp, Artificial Sequence
  Synthetic oligonucleotide
ctaaccccggacttacatcaattcaccgac

SEQ ID NO: 111452 - DNA, 30 bp, Artificial Sequence
  Synthetic oligonucleotide
ctatggggtaggggtaggcgttctaccgac

SEQ ID NO: 111453 - DNA, 30 bp, Artificial Sequence
  Synthetic oligonucleotide
atagtggaagttcattcagggcttaccgac

SEQ ID NO: 111454 - DNA, 30 bp, Artificial Sequence
  Synthetic oligonucleotide
gtttagatgctataggaaagaacacccgac

SEQ ID NO: 111455 - DNA, 30 bp, Artificial Sequence
  Synthetic oligonucleotide
agcctagcatcgcactagcctaagcccgac

SEQ ID NO: 111456 - DNA, 30 bp, Artificial Sequence
  Synthetic oligonucleotide
cggtgatgtacgtaatgacattcggccgac

SEQ ID NO: 111457 - DNA, 30 bp, Artificial Sequence
  Synthetic oligonucleotide
acagagcaagtattaggtggcgaatccgac

SEQ ID NO: 111458 - DNA, 30 bp, Artificial Sequence
  Synthetic oligonucleotide
attcagatgccagcgagcgcggagtccgac

SEQ ID NO: 111459 - DNA, 30 bp, Artificial Sequence
  Synthetic oligonucleotide
ccagtacagaattgaaaccctaatagcgac

SEQ ID NO: 111460 - DNA, 30 bp, Artificial Sequence
  Synthetic oligonucleotide
cgctactgggatccttgaatctggcgcgac

SEQ ID NO: 111461 - DNA, 30 bp, Artificial Sequence
  Synthetic oligonucleotide
tgcgttgcgcggggcggccagtattgcgac

SEQ ID NO: 111462 - DNA, 30 bp, Artificial Sequence
  Synthetic oligonucleotide
gccctggctggcgtgttgtgaccaatcgac

SEQ ID NO: 111463 - DNA, 30 bp, Artificial Sequence
  Synthetic oligonucleotide
ggagcttccaatcggatcgtaatcatcgac

SEQ ID NO: 111464 - DNA, 30 bp, Artificial Sequence
  Synthetic oligonucleotide
cgctgcgattgcacatacaaggggatcgac

SEQ ID NO: 111465 - DNA, 30 bp, Artificial Sequence
  Synthetic oligonucleotide
ggcatgaattacagcagttattggctcgac

SEQ ID NO: 111466 - DNA, 30 bp, Artificial Sequence
  Synthetic oligonucleotide
tcgctaatggagagatcgttaactctcgac

SEQ ID NO: 111467 - DNA, 30 bp, Artificial Sequence
  Synthetic oligonucleotide
ctggggccgcctatggtgtaagcagtcgac

SEQ ID NO: 111468 - DNA, 30 bp, Artificial Sequence
  Synthetic oligonucleotide
cggagtgtggaatggaatttgcacgtcgac

SEQ ID NO: 111469 - DNA, 30 bp, Artificial Sequence
  Synthetic oligonucleotide
ataaggatagacttagttgcatacgtcgac

SEQ ID NO: 111470 - DNA, 30 bp, Artificial Sequence
  Synthetic oligonucleotide
gagacagtttcacaggtaagttccgtcgac

SEQ ID NO: 111471 - DNA, 30 bp, Artificial Sequence
  Synthetic oligonucleotide
tctcggagcagaagcctagtgtgcgtcgac

SEQ ID NO: 111472 - DNA, 30 bp, Artificial Sequence
  Synthetic oligonucleotide
cctgacagtgcacgttcaccaaatgtcgac

SEQ ID NO: 111473 - DNA, 30 bp, Artificial Sequence
  Synthetic oligonucleotide
aaacgactgaccatagaagagagattcgac

SEQ ID NO: 111474 - DNA, 30 bp, Artificial Sequence
  Synthetic oligonucleotide
cagttcttagccataatcagtagcttcgac

SEQ ID NO: 111475 - DNA, 30 bp, Artificial Sequence
  Synthetic oligonucleotide
tcgagggaaaacaggtcccatgcaaaggac

SEQ ID NO: 111476 - DNA, 30 bp, Artificial Sequence
  Synthetic oligonucleotide
cgcctaggggttccagcacagcccaaggac

SEQ ID NO: 111477 - DNA, 30 bp, Artificial Sequence
  Synthetic oligonucleotide
agcactctcccgagagaatactaccaggac

SEQ ID NO: 111478 - DNA, 30 bp, Artificial Sequence
  Synthetic oligonucleotide
gcggtaacattggtgaaggagagtcaggac

SEQ ID NO: 111479 - DNA, 30 bp, Artificial Sequence
  Synthetic oligonucleotide
aataactattgccctgctgttgaagaggac

SEQ ID NO: 111480 - DNA, 30 bp, Artificial Sequence
  Synthetic oligonucleotide
gttagacacggactacttggatttgaggac

SEQ ID NO: 111481 - DNA, 30 bp, Artificial Sequence
  Synthetic oligonucleotide
acaccagatcggagtgggagttaataggac

SEQ ID NO: 111482 - DNA, 30 bp, Artificial Sequence
  Synthetic oligonucleotide
gtgacacaagactacgcctgccactaggac

SEQ ID NO: 111483 - DNA, 30 bp, Artificial Sequence
  Synthetic oligonucleotide
taagaacacacagtgccgggacattaggac

SEQ ID NO: 111484 - DNA, 30 bp, Artificial Sequence
  Synthetic oligonucleotide
caggtgagcccaaccagtatgtgttaggac

SEQ ID NO: 111485 - DNA, 30 bp, Artificial Sequence
  Synthetic oligonucleotide
ttgatgggcggggtagaagggaagacggac

SEQ ID NO: 111486 - DNA, 30 bp, Artificial Sequence
  Synthetic oligonucleotide
aaggaagtgctcagatctgttgcgacggac

SEQ ID NO: 111487 - DNA, 30 bp, Artificial Sequence
  Synthetic oligonucleotide
gtccatacggtcgtgtacgagaggacggac

SEQ ID NO: 111488 - DNA, 30 bp, Artificial Sequence
  Synthetic oligonucleotide
atgtggtagattaggtaaaacaaaccggac

SEQ ID NO: 111489 - DNA, 30 bp, Artificial Sequence
  Synthetic oligonucleotide
ttcgtggtgaagctgataggaacaccggac

SEQ ID NO: 111490 - DNA, 30 bp, Artificial Sequence
  Synthetic oligonucleotide
actgagaatttaggaaactaaggaccggac

SEQ ID NO: 111491 - DNA, 30 bp, Artificial Sequence
  Synthetic oligonucleotide
cggcgaaatcttattcgctcagtgccggac

SEQ ID NO: 111492 - DNA, 30 bp, Artificial Sequence
  Synthetic oligonucleotide
cagctacaaatatggcccaagttgccggac

SEQ ID NO: 111493 - DNA, 31 bp, Artificial Sequence
  Synthetic oligonucleotide
tgctgcccaagttagctcaaggtgtccggac

SEQ ID NO: 111494 - DNA, 30 bp, Artificial Sequence
  Synthetic oligonucleotide
ttggcggcgtctggtaaagtacgcgcggac

SEQ ID NO: 111495 - DNA, 30 bp, Artificial Sequence
  Synthetic oligonucleotide
ggggtctaacgcgacatttgcaaggcggac

SEQ ID NO: 111496 - DNA, 30 bp, Artificial Sequence
  Synthetic oligonucleotide
ctgatggttagccttgtggaatcggcggac

SEQ ID NO: 111497 - DNA, 30 bp, Artificial Sequence
  Synthetic oligonucleotide
ttgaccttgagcaacaatagaagggcggac

SEQ ID NO: 111498 - DNA, 30 bp, Artificial Sequence
  Synthetic oligonucleotide
gggatagactgggaatatggatcatcggac

SEQ ID NO: 111499 - DNA, 30 bp, Artificial Sequence
  Synthetic oligonucleotide
agagaagccgggatcccatcacattcggac

SEQ ID NO: 111500 - DNA, 30 bp, Artificial Sequence
  Synthetic oligonucleotide
taaaacgcatgcatacggtattgcagggac

SEQ ID NO: 111501 - DNA, 30 bp, Artificial Sequence
  Synthetic oligonucleotide
ctggcagatccagtaagcaacgtaggggac

SEQ ID NO: 111502 - DNA, 30 bp, Artificial Sequence
  Synthetic oligonucleotide
aaacccaagagaaatgtcgtagatggggac

SEQ ID NO: 111503 - DNA, 30 bp, Artificial Sequence
  Synthetic oligonucleotide
atgatcatctggtggtcgaccgcatgggac

SEQ ID NO: 111504 - DNA, 30 bp, Artificial Sequence
  Synthetic oligonucleotide
tggctgctaggccacaaattgaactgggac

SEQ ID NO: 111505 - DNA, 30 bp, Artificial Sequence
  Synthetic oligonucleotide
cacgggcccgtactcaataacatctgggac

SEQ ID NO: 111506 - DNA, 30 bp, Artificial Sequence
  Synthetic oligonucleotide
acgtgtgtactactcgttaacttgtgggac

SEQ ID NO: 111507 - DNA, 30 bp, Artificial Sequence
  Synthetic oligonucleotide
tgagcatcgacggtgtgcaacgtttgggac

SEQ ID NO: 111508 - DNA, 30 bp, Artificial Sequence
  Synthetic oligonucleotide
actgctactgacaaggagtgggtcatggac

SEQ ID NO: 111509 - DNA, 30 bp, Artificial Sequence
  Synthetic oligonucleotide
gcagtgtaggggtggcgccgaactatggac

SEQ ID NO: 111510 - DNA, 30 bp, Artificial Sequence
  Synthetic oligonucleotide
gttacgggcaacgccgtgaaatctgtggac

SEQ ID NO: 111511 - DNA, 30 bp, Artificial Sequence
  Synthetic oligonucleotide
caagcgtaggccggatgcggagcgcatgac

SEQ ID NO: 111512 - DNA, 30 bp, Artificial Sequence
  Synthetic oligonucleotide
tagggctattagcgcaaggcaggtcatgac

SEQ ID NO: 111513 - DNA, 30 bp, Artificial Sequence
  Synthetic oligonucleotide
gcatagtcgtgagcgcacgttgtagatgac

SEQ ID NO: 111514 - DNA, 30 bp, Artificial Sequence
  Synthetic oligonucleotide
gataagctttcctactcccagagcgatgac

SEQ ID NO: 111515 - DNA, 30 bp, Artificial Sequence
  Synthetic oligonucleotide
gttggcccacaaccagatatcacgtatgac

SEQ ID NO: 111516 - DNA, 30 bp, Artificial Sequence
  Synthetic oligonucleotide
ctcgtaaagagcgtgataggaaaacctgac

SEQ ID NO: 111517 - DNA, 30 bp, Artificial Sequence
  Synthetic oligonucleotide
cagtgtcataggtagacttgtaggtctgac

SEQ ID NO: 111518 - DNA, 30 bp, Artificial Sequence
  Synthetic oligonucleotide
agcggtcgtgcattcaacagcagcagtgac

SEQ ID NO: 111519 - DNA, 30 bp, Artificial Sequence
  Synthetic oligonucleotide
tgcatagaggtaatgagttggtggagtgac

SEQ ID NO: 111520 - DNA, 30 bp, Artificial Sequence
  Synthetic oligonucleotide
tggcgtcataggtatatctattgtagtgac

SEQ ID NO: 111521 - DNA, 30 bp, Artificial Sequence
  Synthetic oligonucleotide
aaaacaacacgagtaacttaggagcgtgac

SEQ ID NO: 111522 - DNA, 30 bp, Artificial Sequence
  Synthetic oligonucleotide
tccgtaacatggagtcgtcaatcgcgtgac

SEQ ID NO: 111523 - DNA, 30 bp, Artificial Sequence
  Synthetic oligonucleotide
tcttgccttagaagtattagaggaggtgac

SEQ ID NO: 111524 - DNA, 30 bp, Artificial Sequence
  Synthetic oligonucleotide
tcctcggatgcatagactaaaggcggtgac

SEQ ID NO: 111525 - DNA, 30 bp, Artificial Sequence
  Synthetic oligonucleotide
atgggactgcgctagagagacccgggtgac

SEQ ID NO: 111526 - DNA, 30 bp, Artificial Sequence
  Synthetic oligonucleotide
cggagatatcatgaggctcagtggggtgac

SEQ ID NO: 111527 - DNA, 30 bp, Artificial Sequence
  Synthetic oligonucleotide
gcatgaggtgccgggagcatgtggggtgac

SEQ ID NO: 111528 - DNA, 30 bp, Artificial Sequence
  Synthetic oligonucleotide
ctattagtggggtgagggaattaatgtgac

SEQ ID NO: 111529 - DNA, 30 bp, Artificial Sequence
  Synthetic oligonucleotide
gctcatgatggaactatagtaaggtgtgac

SEQ ID NO: 111530 - DNA, 31 bp, Artificial Sequence
  Synthetic oligonucleotide
gtaggtcaaccggttaaacgacatgtgtgac

SEQ ID NO: 111531 - DNA, 30 bp, Artificial Sequence
  Synthetic oligonucleotide
ggagtggtggtactatggaatctttgtgac

SEQ ID NO: 111532 - DNA, 30 bp, Artificial Sequence
  Synthetic oligonucleotide
acggatcgagcctcacaaggacacattgac

SEQ ID NO: 111533 - DNA, 30 bp, Artificial Sequence
  Synthetic oligonucleotide
aggtcatgaccagggaatagttaacttgac

SEQ ID NO: 111534 - DNA, 30 bp, Artificial Sequence
  Synthetic oligonucleotide
ggacaccaaagcacgctaaaggtccttgac

SEQ ID NO: 111535 - DNA, 30 bp, Artificial Sequence
  Synthetic oligonucleotide
aaagtcaaccgaggatgaaagtcgcttgac

SEQ ID NO: 111536 - DNA, 30 bp, Artificial Sequence
  Synthetic oligonucleotide
aagattccgtagacgatccgacggcttgac

SEQ ID NO: 111537 - DNA, 30 bp, Artificial Sequence
  Synthetic oligonucleotide
ggatcgaacgagaggagcactatggttgac

SEQ ID NO: 111538 - DNA, 30 bp, Artificial Sequence
  Synthetic oligonucleotide
acggttattccgagcccaagtgttgttgac

SEQ ID NO: 111539 - DNA, 30 bp, Artificial Sequence
  Synthetic oligonucleotide
taacgcgggtttaactcgtgtaagtttgac

SEQ ID NO: 111540 - DNA, 30 bp, Artificial Sequence
  Synthetic oligonucleotide
ccaagggatgcgcacaacaacgcaaaatac

SEQ ID NO: 111541 - DNA, 30 bp, Artificial Sequence
  Synthetic oligonucleotide
agagtgatgtgactcctaagctacaaatac

SEQ ID NO: 111542 - DNA, 30 bp, Artificial Sequence
  Synthetic oligonucleotide
tggaggacacatcgaggatatccgaaatac

SEQ ID NO: 111543 - DNA, 30 bp, Artificial Sequence
  Synthetic oligonucleotide
gtcgcgctgcaatgggagagtaagcaatac

SEQ ID NO: 111544 - DNA, 31 bp, Artificial Sequence
  Synthetic oligonucleotide
ggggtgcttcatcaaaagtgtcccgcaatac

SEQ ID NO: 111545 - DNA, 30 bp, Artificial Sequence
  Synthetic oligonucleotide
aaatgagctaatccagtccttgggcaatac

SEQ ID NO: 111546 - DNA, 30 bp, Artificial Sequence
  Synthetic oligonucleotide
tagacacatggaaccaccatcactcaatac

SEQ ID NO: 111547 - DNA, 30 bp, Artificial Sequence
  Synthetic oligonucleotide
ggagggtacgaacgttctcattgagaatac

SEQ ID NO: 111548 - DNA, 30 bp, Artificial Sequence
  Synthetic oligonucleotide
aggatacgtctccctggaacacacgaatac

SEQ ID NO: 111549 - DNA, 30 bp, Artificial Sequence
  Synthetic oligonucleotide
taagatcgcgttattagacgttaggaatac

SEQ ID NO: 111550 - DNA, 30 bp, Artificial Sequence
  Synthetic oligonucleotide
tcaatcagaagggctagtcttcttgaatac

SEQ ID NO: 111551 - DNA, 30 bp, Artificial Sequence
  Synthetic oligonucleotide
gggaattacaagaattagagaccaacatac

SEQ ID NO: 111552 - DNA, 30 bp, Artificial Sequence
  Synthetic oligonucleotide
ggagaatacaaacgtgatctttcaacatac

SEQ ID NO: 111553 - DNA, 30 bp, Artificial Sequence
  Synthetic oligonucleotide
cgaataggcatccttaaggaagtgccatac

SEQ ID NO: 111554 - DNA, 31 bp, Artificial Sequence
  Synthetic oligonucleotide
cgacactgagtagaaattgttgtaagcatac

SEQ ID NO: 111555 - DNA, 30 bp, Artificial Sequence
  Synthetic oligonucleotide
tcaccctacgaaagaggccatttagcatac

SEQ ID NO: 111556 - DNA, 30 bp, Artificial Sequence
  Synthetic oligonucleotide
agaatggtctcatgtaagagatcggcatac

SEQ ID NO: 111557 - DNA, 30 bp, Artificial Sequence
  Synthetic oligonucleotide
tggtcaagccggtcaaaatatgcatcatac

SEQ ID NO: 111558 - DNA, 30 bp, Artificial Sequence
  Synthetic oligonucleotide
acgataagtggtcacgactaccatagatac

SEQ ID NO: 111559 - DNA, 30 bp, Artificial Sequence
  Synthetic oligonucleotide
agtacggttgataacgctcaggtgcgatac

SEQ ID NO: 111560 - DNA, 30 bp, Artificial Sequence
  Synthetic oligonucleotide
gccacaacagtatgaagttcaaaaggatac

SEQ ID NO: 111561 - DNA, 30 bp, Artificial Sequence
  Synthetic oligonucleotide
caaccgagaggccccccatcaagaggatac

SEQ ID NO: 111562 - DNA, 30 bp, Artificial Sequence
  Synthetic oligonucleotide
tagggcttacaggttaaataaagcggatac

SEQ ID NO: 111563 - DNA, 30 bp, Artificial Sequence
  Synthetic oligonucleotide
atgccgagccagggaaaaattggtggatac

SEQ ID NO: 111564 - DNA, 30 bp, Artificial Sequence
  Synthetic oligonucleotide
tgaacaataggaaaggcttgagcgtgatac

SEQ ID NO: 111565 - DNA, 30 bp, Artificial Sequence
  Synthetic oligonucleotide
gtgagggcctacatagcccggtacgtatac

SEQ ID NO: 111566 - DNA, 30 bp, Artificial Sequence
  Synthetic oligonucleotide
aggatggggcacgattgaccccaggtatac

SEQ ID NO: 111567 - DNA, 30 bp, Artificial Sequence
  Synthetic oligonucleotide
cgtggattagttgggaagcatcaggtatac

SEQ ID NO: 111568 - DNA, 30 bp, Artificial Sequence
  Synthetic oligonucleotide
catgaatggtgagcgaggtacaaattatac

SEQ ID NO: 111569 - DNA, 30 bp, Artificial Sequence
  Synthetic oligonucleotide
tgggcgggaatggtggcccacgaattatac

SEQ ID NO: 111570 - DNA, 30 bp, Artificial Sequence
  Synthetic oligonucleotide
cgttaacttcagcaagtaaatgcgaactac

SEQ ID NO: 111571 - DNA, 30 bp, Artificial Sequence
  Synthetic oligonucleotide
ctcgagggatgtcattggctcggtaactac

SEQ ID NO: 111572 - DNA, 30 bp, Artificial Sequence
  Synthetic oligonucleotide
gatcgtgcggtcactttaaagttacactac

SEQ ID NO: 111573 - DNA, 30 bp, Artificial Sequence
  Synthetic oligonucleotide
tgctctgctgtcccaagggtcgaggactac

SEQ ID NO: 111574 - DNA, 30 bp, Artificial Sequence
  Synthetic oligonucleotide
gcacactggtcgtagggaagaccatactac

SEQ ID NO: 111575 - DNA, 30 bp, Artificial Sequence
  Synthetic oligonucleotide
atgaagatggtcacctggtaagtaacctac

SEQ ID NO: 111576 - DNA, 30 bp, Artificial Sequence
  Synthetic oligonucleotide
tgggcgggagcatatgaaacgaatacctac

SEQ ID NO: 111577 - DNA, 30 bp, Artificial Sequence
  Synthetic oligonucleotide
ggggatcggctagacacgtaggatccctac

SEQ ID NO: 111578 - DNA, 30 bp, Artificial Sequence
  Synthetic oligonucleotide
aggtgtcgtctacgttcaatcaatgcctac

SEQ ID NO: 111579 - DNA, 30 bp, Artificial Sequence
  Synthetic oligonucleotide
ggaagtgctgtaacaataatagatgcctac

SEQ ID NO: 111580 - DNA, 30 bp, Artificial Sequence
  Synthetic oligonucleotide
ggcactggactgcttgtagaaaggtcctac

SEQ ID NO: 111581 - DNA, 30 bp, Artificial Sequence
  Synthetic oligonucleotide
taggggctgtcataactagatgcgcgctac

SEQ ID NO: 111582 - DNA, 30 bp, Artificial Sequence
  Synthetic oligonucleotide
caaaccggtagaagaagaaaccgtggctac

SEQ ID NO: 111583 - DNA, 30 bp, Artificial Sequence
  Synthetic oligonucleotide
tagaatataggaagcaatgtaattggctac

SEQ ID NO: 111584 - DNA, 30 bp, Artificial Sequence
  Synthetic oligonucleotide
cggtacgcggggttctttaatcattgctac

SEQ ID NO: 111585 - DNA, 30 bp, Artificial Sequence
  Synthetic oligonucleotide
gaacaaggcacgcactactcctaaatctac

SEQ ID NO: 111586 - DNA, 30 bp, Artificial Sequence
  Synthetic oligonucleotide
tgaggtggagtcggtgacatagcaatctac

SEQ ID NO: 111587 - DNA, 30 bp, Artificial Sequence
  Synthetic oligonucleotide
agacgaaggaacgtgtttggcaaactctac

SEQ ID NO: 111588 - DNA, 30 bp, Artificial Sequence
  Synthetic oligonucleotide
ggggggggaggaacgtgcggatagctctac

SEQ ID NO: 111589 - DNA, 30 bp, Artificial Sequence
  Synthetic oligonucleotide
cgtgcaacttattcgcaacgacggctctac

SEQ ID NO: 111590 - DNA, 30 bp, Artificial Sequence
  Synthetic oligonucleotide
gacaatgtcaacgaataatcgcgtgtctac

SEQ ID NO: 111591 - DNA, 30 bp, Artificial Sequence
  Synthetic oligonucleotide
agaggatcttcgaacatagcagtcttctac

SEQ ID NO: 111592 - DNA, 30 bp, Artificial Sequence
  Synthetic oligonucleotide
tcggaagcgcgtttcaccatgaatttctac

SEQ ID NO: 111593 - DNA, 31 bp, Artificial Sequence
  Synthetic oligonucleotide
ttgcgtgccatggaacgaagtttaacagtac

SEQ ID NO: 111594 - DNA, 30 bp, Artificial Sequence
  Synthetic oligonucleotide
agcgctaggctgactgaagaagaccagtac

SEQ ID NO: 111595 - DNA, 30 bp, Artificial Sequence
  Synthetic oligonucleotide
cgaatgcgcccaggatcagtgtgtcagtac

SEQ ID NO: 111596 - DNA, 30 bp, Artificial Sequence
  Synthetic oligonucleotide
agggcgtcagcacgagggtaaagagagtac

SEQ ID NO: 111597 - DNA, 30 bp, Artificial Sequence
  Synthetic oligonucleotide
gggaattgtgaaaatacactccattagtac

SEQ ID NO: 111598 - DNA, 30 bp, Artificial Sequence
  Synthetic oligonucleotide
attgaagtttacaatcaggtcgccccgtac

SEQ ID NO: 111599 - DNA, 30 bp, Artificial Sequence
  Synthetic oligonucleotide
acaatgaccacaccgctgtgtctgccgtac

SEQ ID NO: 111600 - DNA, 30 bp, Artificial Sequence
  Synthetic oligonucleotide
caccatgcgactcccgcatggactccgtac

SEQ ID NO: 111601 - DNA, 30 bp, Artificial Sequence
  Synthetic oligonucleotide
ggcgggacgggatcaggttacgttccgtac

SEQ ID NO: 111602 - DNA, 30 bp, Artificial Sequence
  Synthetic oligonucleotide
gcggtattataacgatcgacatcggcgtac

SEQ ID NO: 111603 - DNA, 30 bp, Artificial Sequence
  Synthetic oligonucleotide
aggcttacgtggagttcagttatggcgtac

SEQ ID NO: 111604 - DNA, 30 bp, Artificial Sequence
  Synthetic oligonucleotide
acaagagggaccccggactacgtggcgtac

SEQ ID NO: 111605 - DNA, 30 bp, Artificial Sequence
  Synthetic oligonucleotide
gcaataaaaggacgtctggtaggctcgtac

SEQ ID NO: 111606 - DNA, 30 bp, Artificial Sequence
  Synthetic oligonucleotide
cctcagcactcatcggacgaatcaaggtac

SEQ ID NO: 111607 - DNA, 30 bp, Artificial Sequence
  Synthetic oligonucleotide
aagatgaaataacgtgtttgctacaggtac

SEQ ID NO: 111608 - DNA, 30 bp, Artificial Sequence
  Synthetic oligonucleotide
ccgaaaggttccgaccatcagaagcggtac

SEQ ID NO: 111609 - DNA, 30 bp, Artificial Sequence
  Synthetic oligonucleotide
ttggatgggacttctagaaataaagggtac

SEQ ID NO: 111610 - DNA, 30 bp, Artificial Sequence
  Synthetic oligonucleotide
tgaggggggcttaaacttcgtttcgggtac

SEQ ID NO: 111611 - DNA, 30 bp, Artificial Sequence
  Synthetic oligonucleotide
gacccacgggggcatcgtcagagggggtac

SEQ ID NO: 111612 - DNA, 30 bp, Artificial Sequence
  Synthetic oligonucleotide
aggagcagacttgaaggcccatttgggtac

SEQ ID NO: 111613 - DNA, 30 bp, Artificial Sequence
  Synthetic oligonucleotide
taagtagcaggcaatggctacactatgtac

SEQ ID NO: 111614 - DNA, 30 bp, Artificial Sequence
  Synthetic oligonucleotide
gacgaggcggttagtgactgctaactgtac

SEQ ID NO: 111615 - DNA, 30 bp, Artificial Sequence
  Synthetic oligonucleotide
cggtatggcgactgatattgaagcctgtac

SEQ ID NO: 111616 - DNA, 30 bp, Artificial Sequence
  Synthetic oligonucleotide
gaagaggggattacgctctctggcgtgtac

SEQ ID NO: 111617 - DNA, 30 bp, Artificial Sequence
  Synthetic oligonucleotide
ttcacaagagcgaattgttaatatgtgtac

SEQ ID NO: 111618 - DNA, 30 bp, Artificial Sequence
  Synthetic oligonucleotide
cacttagggggctaggccaaggcattgtac

SEQ ID NO: 111619 - DNA, 30 bp, Artificial Sequence
  Synthetic oligonucleotide
agtaggccataggaaaagagttgaaattac

SEQ ID NO: 111620 - DNA, 30 bp, Artificial Sequence
  Synthetic oligonucleotide
ctccatcgacggattcgactccaacattac

SEQ ID NO: 111621 - DNA, 30 bp, Artificial Sequence
  Synthetic oligonucleotide
cgcgccgcatcgagtgggccgttccattac

SEQ ID NO: 111622 - DNA, 31 bp, Artificial Sequence
  Synthetic oligonucleotide
agctagataccatggagagacgtcaacttac

SEQ ID NO: 111623 - DNA, 30 bp, Artificial Sequence
  Synthetic oligonucleotide
gtaacaatccgatatcacaaagccccttac

SEQ ID NO: 111624 - DNA, 30 bp, Artificial Sequence
  Synthetic oligonucleotide
tgctgatgtgccaaccgtatggacagttac

SEQ ID NO: 111625 - DNA, 30 bp, Artificial Sequence
  Synthetic oligonucleotide
cagatatctgactagtctagccgacgttac

SEQ ID NO: 111626 - DNA, 30 bp, Artificial Sequence
  Synthetic oligonucleotide
tcactaggggaaaagtagttccgtcgttac

SEQ ID NO: 111627 - DNA, 30 bp, Artificial Sequence
  Synthetic oligonucleotide
gccggatatctacgagatgggggaggttac

SEQ ID NO: 111628 - DNA, 30 bp, Artificial Sequence
  Synthetic oligonucleotide
agatgtacatttaatgggtcaaagtgttac

SEQ ID NO: 111629 - DNA, 30 bp, Artificial Sequence
  Synthetic oligonucleotide
tcgaatggccaaacgatatggcagtgttac

SEQ ID NO: 111630 - DNA, 30 bp, Artificial Sequence
  Synthetic oligonucleotide
gaacaagagggcgtgaagatcttttgttac

SEQ ID NO: 111631 - DNA, 30 bp, Artificial Sequence
  Synthetic oligonucleotide
tgcgtaattagtggacaacgagtaatttac

SEQ ID NO: 111632 - DNA, 30 bp, Artificial Sequence
  Synthetic oligonucleotide
acaatcaactcgaggggggtggccatttac

SEQ ID NO: 111633 - DNA, 30 bp, Artificial Sequence
  Synthetic oligonucleotide
accgagcaaagactctccgtacggatttac

SEQ ID NO: 111634 - DNA, 30 bp, Artificial Sequence
  Synthetic oligonucleotide
tacacaacaagagcggtagcgtagctttac

SEQ ID NO: 111635 - DNA, 30 bp, Artificial Sequence
  Synthetic oligonucleotide
cacacccgctatcagattaaccggctttac

SEQ ID NO: 111636 - DNA, 30 bp, Artificial Sequence
  Synthetic oligonucleotide
cataacacccaccacatggcgagcaaaacc

SEQ ID NO: 111637 - DNA, 30 bp, Artificial Sequence
  Synthetic oligonucleotide
tgcggaaagagtacgtggggtgaacaaacc

SEQ ID NO: 111638 - DNA, 30 bp, Artificial Sequence
  Synthetic oligonucleotide
acatgagtacgaggactgagctagcaaacc

SEQ ID NO: 111639 - DNA, 30 bp, Artificial Sequence
  Synthetic oligonucleotide
ctagatatgggaaggctcggggcgcaaacc

SEQ ID NO: 111640 - DNA, 30 bp, Artificial Sequence
  Synthetic oligonucleotide
agagacataacataagcgcgccaggaaacc

SEQ ID NO: 111641 - DNA, 30 bp, Artificial Sequence
  Synthetic oligonucleotide
aagcttgaaaattggatcggtgaggaaacc

SEQ ID NO: 111642 - DNA, 30 bp, Artificial Sequence
  Synthetic oligonucleotide
agccgatttgggggggagtttgaggaaacc

SEQ ID NO: 111643 - DNA, 30 bp, Artificial Sequence
  Synthetic oligonucleotide
cctagggagttatcaaacagtaatgaaacc

SEQ ID NO: 111644 - DNA, 30 bp, Artificial Sequence
  Synthetic oligonucleotide
gacctaggtagttacaatccaaaataaacc

SEQ ID NO: 111645 - DNA, 30 bp, Artificial Sequence
  Synthetic oligonucleotide
tctgaaggagtcaacccagcggactaaacc

SEQ ID NO: 111646 - DNA, 30 bp, Artificial Sequence
  Synthetic oligonucleotide
tgaacaaatgactccacccgacgctaaacc

SEQ ID NO: 111647 - DNA, 30 bp, Artificial Sequence
  Synthetic oligonucleotide
gtggatgagtataactgtgatacgtaaacc

SEQ ID NO: 111648 - DNA, 30 bp, Artificial Sequence
  Synthetic oligonucleotide
ctggaaagtaatgcacaacacaccacaacc

SEQ ID NO: 111649 - DNA, 30 bp, Artificial Sequence
  Synthetic oligonucleotide
aggtggtttccgtcgactgtctctccaacc

SEQ ID NO: 111650 - DNA, 30 bp, Artificial Sequence
  Synthetic oligonucleotide
ggaggccacagagtttgtccggaagcaacc

SEQ ID NO: 111651 - DNA, 30 bp, Artificial Sequence
  Synthetic oligonucleotide
gacagacatggggtgcggctaacagcaacc

SEQ ID NO: 111652 - DNA, 30 bp, Artificial Sequence
  Synthetic oligonucleotide
agaattagggaggtctctcctggcgcaacc

SEQ ID NO: 111653 - DNA, 30 bp, Artificial Sequence
  Synthetic oligonucleotide
cagcaagagaataagcgctttaaggcaacc

SEQ ID NO: 111654 - DNA, 30 bp, Artificial Sequence
  Synthetic oligonucleotide
gtaagctagcaggacgagatagcggcaacc

SEQ ID NO: 111655 - DNA, 30 bp, Artificial Sequence
  Synthetic oligonucleotide
tgcgatagcttatcccagaacgttgcaacc

SEQ ID NO: 111656 - DNA, 30 bp, Artificial Sequence
  Synthetic oligonucleotide
gcggccgtaaacattctgcgagccagaacc

SEQ ID NO: 111657 - DNA, 30 bp, Artificial Sequence
  Synthetic oligonucleotide
gccaagtacctccatataagcgggcgaacc

SEQ ID NO: 111658 - DNA, 30 bp, Artificial Sequence
  Synthetic oligonucleotide
ctgaagggatagaagggattggtctgaacc

SEQ ID NO: 111659 - DNA, 30 bp, Artificial Sequence
  Synthetic oligonucleotide
gggcggatgtgtaagcttgctcattgaacc

SEQ ID NO: 111660 - DNA, 30 bp, Artificial Sequence
  Synthetic oligonucleotide
cacatcccaagtcgtaaagtcacaataacc

SEQ ID NO: 111661 - DNA, 30 bp, Artificial Sequence
  Synthetic oligonucleotide
ggtgtgctacgaacttcgattgtcataacc

SEQ ID NO: 111662 - DNA, 30 bp, Artificial Sequence
  Synthetic oligonucleotide
ggaccccagtgctgcaatactaagataacc

SEQ ID NO: 111663 - DNA, 30 bp, Artificial Sequence
  Synthetic oligonucleotide
agaggaaggagcctgataactcacctaacc

SEQ ID NO: 111664 - DNA, 29 bp, Artificial Sequence
  Synthetic oligonucleotide
gcggcggagggtgcatcgcgggtgtaacc

SEQ ID NO: 111665 - DNA, 30 bp, Artificial Sequence
  Synthetic oligonucleotide
taaccaggcagagtaacaagcaaattaacc

SEQ ID NO: 111666 - DNA, 30 bp, Artificial Sequence
  Synthetic oligonucleotide
acgttactacggacccagtgaaacttaacc

SEQ ID NO: 111667 - DNA, 30 bp, Artificial Sequence
  Synthetic oligonucleotide
cgttggaggcccctgaaccgtgatttaacc

SEQ ID NO: 111668 - DNA, 30 bp, Artificial Sequence
  Synthetic oligonucleotide
cgagagaaggagtaacgtggatacaacacc

SEQ ID NO: 111669 - DNA, 30 bp, Artificial Sequence
  Synthetic oligonucleotide
cttgaggaccgtgacgtggcgtgccacacc

SEQ ID NO: 111670 - DNA, 30 bp, Artificial Sequence
  Synthetic oligonucleotide
ccgaagccaccgggactgccagcgcacacc

SEQ ID NO: 111671 - DNA, 30 bp, Artificial Sequence
  Synthetic oligonucleotide
cagatcccgtcggaaacgagagtagacacc

SEQ ID NO: 111672 - DNA, 30 bp, Artificial Sequence
  Synthetic oligonucleotide
gttaacacggacccagggcctgcttacacc

SEQ ID NO: 111673 - DNA, 30 bp, Artificial Sequence
  Synthetic oligonucleotide
acttggtagagtagtggtatgaggaccacc

SEQ ID NO: 111674 - DNA, 30 bp, Artificial Sequence
  Synthetic oligonucleotide
agtattcggcaggctagactatttaccacc

SEQ ID NO: 111675 - DNA, 30 bp, Artificial Sequence
  Synthetic oligonucleotide
ggcagaccaggacattacagagtacccacc

SEQ ID NO: 111676 - DNA, 30 bp, Artificial Sequence
  Synthetic oligonucleotide
agcgacacaaacaaaaagaggttacccacc

SEQ ID NO: 111677 - DNA, 30 bp, Artificial Sequence
  Synthetic oligonucleotide
gacccgataactaggatacgcgtgcccacc

SEQ ID NO: 111678 - DNA, 30 bp, Artificial Sequence
  Synthetic oligonucleotide
gagagtacaccagagggaggagctgccacc

SEQ ID NO: 111679 - DNA, 30 bp, Artificial Sequence
  Synthetic oligonucleotide
caaggcggcttgcaacggttggccagcacc

SEQ ID NO: 111680 - DNA, 30 bp, Artificial Sequence
  Synthetic oligonucleotide
atggtgaaacccataacaaagtgtagcacc

SEQ ID NO: 111681 - DNA, 30 bp, Artificial Sequence
  Synthetic oligonucleotide
tgaatggaagcgagcggggttccgcgcacc

SEQ ID NO: 111682 - DNA, 30 bp, Artificial Sequence
  Synthetic oligonucleotide
cccgaaaaagatgcggtaacgtctcgcacc

SEQ ID NO: 111683 - DNA, 30 bp, Artificial Sequence
  Synthetic oligonucleotide
gtggaatggttggtttttagagaaggcacc

SEQ ID NO: 111684 - DNA, 30 bp, Artificial Sequence
  Synthetic oligonucleotide
tcttacggtaactctgaatcgtcgggcacc

SEQ ID NO: 111685 - DNA, 30 bp, Artificial Sequence
  Synthetic oligonucleotide
cttcgcaacctcggatgggtaagaatcacc

SEQ ID NO: 111686 - DNA, 30 bp, Artificial Sequence
  Synthetic oligonucleotide
gaacagaaagcgttcagttcaatgctcacc

SEQ ID NO: 111687 - DNA, 30 bp, Artificial Sequence
  Synthetic oligonucleotide
caaagaatctcggcggcatctgaagtcacc

SEQ ID NO: 111688 - DNA, 30 bp, Artificial Sequence
  Synthetic oligonucleotide
aggaagtgggtatggatgaaatgagtcacc

SEQ ID NO: 111689 - DNA, 30 bp, Artificial Sequence
  Synthetic oligonucleotide
gtgtgggttaacacattctcatctgtcacc

SEQ ID NO: 111690 - DNA, 30 bp, Artificial Sequence
  Synthetic oligonucleotide
tcattacttagagcgcattacggcaagacc

SEQ ID NO: 111691 - DNA, 30 bp, Artificial Sequence
  Synthetic oligonucleotide
ggatgcaaagcgggcactgaccagaagacc

SEQ ID NO: 111692 - DNA, 30 bp, Artificial Sequence
  Synthetic oligonucleotide
ttgccgggcaaagggtacgattgcacgacc

SEQ ID NO: 111693 - DNA, 30 bp, Artificial Sequence
  Synthetic oligonucleotide
tggagcaagcctaggcacccgggatcgacc

SEQ ID NO: 111694 - DNA, 30 bp, Artificial Sequence
  Synthetic oligonucleotide
tggtgtcctaaaccgcagcaaagaaggacc

SEQ ID NO: 111695 - DNA, 30 bp, Artificial Sequence
  Synthetic oligonucleotide
gtttacgtatagggagggaagagaaggacc

SEQ ID NO: 111696 - DNA, 30 bp, Artificial Sequence
  Synthetic oligonucleotide
tatataaaaaggagatgagaagctaggacc

SEQ ID NO: 111697 - DNA, 30 bp, Artificial Sequence
  Synthetic oligonucleotide
agtcaagactaggggtagaagggacggacc

SEQ ID NO: 111698 - DNA, 30 bp, Artificial Sequence
  Synthetic oligonucleotide
atcgagtaaatttattcccgtgtgcggacc

SEQ ID NO: 111699 - DNA, 30 bp, Artificial Sequence
  Synthetic oligonucleotide
agacaacgaattagcaatgtggactggacc

SEQ ID NO: 111700 - DNA, 29 bp, Artificial Sequence
  Synthetic oligonucleotide
atgaggccgaaggtttggagcagatgacc

SEQ ID NO: 111701 - DNA, 30 bp, Artificial Sequence
  Synthetic oligonucleotide
atgtagtgcccacgctgtgcgccgatgacc

SEQ ID NO: 111702 - DNA, 30 bp, Artificial Sequence
  Synthetic oligonucleotide
atacaagctctagcttataaagtgatgacc

SEQ ID NO: 111703 - DNA, 30 bp, Artificial Sequence
  Synthetic oligonucleotide
actacccggtaacaagaaaaattactgacc

SEQ ID NO: 111704 - DNA, 30 bp, Artificial Sequence
  Synthetic oligonucleotide
taactattccagaggtgtgcacacctgacc

SEQ ID NO: 111705 - DNA, 30 bp, Artificial Sequence
  Synthetic oligonucleotide
caagacttctgtgccatcagatagctgacc

SEQ ID NO: 111706 - DNA, 30 bp, Artificial Sequence
  Synthetic oligonucleotide
gaccggagatacgacgaataatatctgacc

SEQ ID NO: 111707 - DNA, 30 bp, Artificial Sequence
  Synthetic oligonucleotide
acagccgcatatggaagcacgaaagtgacc

SEQ ID NO: 111708 - DNA, 30 bp, Artificial Sequence
  Synthetic oligonucleotide
gcgtagtaggccagggctgagctagtgacc

SEQ ID NO: 111709 - DNA, 30 bp, Artificial Sequence
  Synthetic oligonucleotide
cttaaagaagtcgataaagacagcaatacc

SEQ ID NO: 111710 - DNA, 30 bp, Artificial Sequence
  Synthetic oligonucleotide
tctccggcctgaaacaatccacagaatacc

SEQ ID NO: 111711 - DNA, 30 bp, Artificial Sequence
  Synthetic oligonucleotide
atgaatggggagcgcgagataaataatacc

SEQ ID NO: 111712 - DNA, 30 bp, Artificial Sequence
  Synthetic oligonucleotide
atcaaacagggagcttaactttgcgatacc

SEQ ID NO: 111713 - DNA, 30 bp, Artificial Sequence
  Synthetic oligonucleotide
gcatgctccgacaccccacgtaatgatacc

SEQ ID NO: 111714 - DNA, 30 bp, Artificial Sequence
  Synthetic oligonucleotide
gaacgtcacgttaatggtcatattactacc

SEQ ID NO: 111715 - DNA, 30 bp, Artificial Sequence
  Synthetic oligonucleotide
caaatggaagcaataattacacagcctacc

SEQ ID NO: 111716 - DNA, 30 bp, Artificial Sequence
  Synthetic oligonucleotide
ggcgatgtagctgctagatggtgggctacc

SEQ ID NO: 111717 - DNA, 30 bp, Artificial Sequence
  Synthetic oligonucleotide
cgaataactgaaagagactctggctctacc

SEQ ID NO: 111718 - DNA, 30 bp, Artificial Sequence
  Synthetic oligonucleotide
caagcaaaactgtttaggtagtggagtacc

SEQ ID NO: 111719 - DNA, 30 bp, Artificial Sequence
  Synthetic oligonucleotide
aggcggtaagtacagtgggccgttagtacc

SEQ ID NO: 111720 - DNA, 30 bp, Artificial Sequence
  Synthetic oligonucleotide
acaaccacacaatccagaacttatcgtacc

SEQ ID NO: 111721 - DNA, 30 bp, Artificial Sequence
  Synthetic oligonucleotide
tgagttagggaacgtgtctaaagtcgtacc

SEQ ID NO: 111722 - DNA, 30 bp, Artificial Sequence
  Synthetic oligonucleotide
ttcagagaggaaccctgggagcaaggtacc

SEQ ID NO: 111723 - DNA, 30 bp, Artificial Sequence
  Synthetic oligonucleotide
gggccaggtagaatgtgacacgatggtacc

SEQ ID NO: 111724 - DNA, 30 bp, Artificial Sequence
  Synthetic oligonucleotide
tgccgtattcatcgtgaactttatggtacc

SEQ ID NO: 111725 - DNA, 30 bp, Artificial Sequence
  Synthetic oligonucleotide
tcaagtgtaaaaaaaggactgcactgtacc

SEQ ID NO: 111726 - DNA, 30 bp, Artificial Sequence
  Synthetic oligonucleotide
tgagtcgctggcaactgtgagatctgtacc

SEQ ID NO: 111727 - DNA, 30 bp, Artificial Sequence
  Synthetic oligonucleotide
ttccatcgccgaagaattaacagcattacc

SEQ ID NO: 111728 - DNA, 30 bp, Artificial Sequence
  Synthetic oligonucleotide
caagcgcaaaaaaatcagatttcgcttacc

SEQ ID NO: 111729 - DNA, 30 bp, Artificial Sequence
  Synthetic oligonucleotide
ggattggatgtgataatataaggagttacc

SEQ ID NO: 111730 - DNA, 30 bp, Artificial Sequence
  Synthetic oligonucleotide
gatgggtgttgccaagaaggaccgtttacc

SEQ ID NO: 111731 - DNA, 30 bp, Artificial Sequence
  Synthetic oligonucleotide
ctgtgacggccaactccgactcccaaaccc

SEQ ID NO: 111732 - DNA, 30 bp, Artificial Sequence
  Synthetic oligonucleotide
agggtcgaagccgagtctcagccacaaccc

SEQ ID NO: 111733 - DNA, 30 bp, Artificial Sequence
  Synthetic oligonucleotide
agctttgttttagtaaagaagtagcaaccc

SEQ ID NO: 111734 - DNA, 30 bp, Artificial Sequence
  Synthetic oligonucleotide
gaaggcaacctaaaaagaagatgataaccc

SEQ ID NO: 111735 - DNA, 30 bp, Artificial Sequence
  Synthetic oligonucleotide
tacaaaggttcggataggtgaatataaccc

SEQ ID NO: 111736 - DNA, 31 bp, Artificial Sequence
  Synthetic oligonucleotide
cccgcgagctccataggagtgatcgtaaccc

SEQ ID NO: 111737 - DNA, 30 bp, Artificial Sequence
  Synthetic oligonucleotide
agtgccggcaaggccttatataggtaaccc

SEQ ID NO: 111738 - DNA, 30 bp, Artificial Sequence
  Synthetic oligonucleotide
tctcgatgtatcgtagtgcgcgattaaccc

SEQ ID NO: 111739 - DNA, 30 bp, Artificial Sequence
  Synthetic oligonucleotide
gcccattgtgaatcacttagagctacaccc

SEQ ID NO: 111740 - DNA, 30 bp, Artificial Sequence
  Synthetic oligonucleotide
caagataagccccgagatacatcagcaccc

SEQ ID NO: 111741 - DNA, 30 bp, Artificial Sequence
  Synthetic oligonucleotide
tagctagggaatgaggaataaaaatcaccc

SEQ ID NO: 111742 - DNA, 30 bp, Artificial Sequence
  Synthetic oligonucleotide
acgacgggcctcgggtagctgatttcaccc

SEQ ID NO: 111743 - DNA, 30 bp, Artificial Sequence
  Synthetic oligonucleotide
ctggtatacgggatgtgcttgaaaagaccc

SEQ ID NO: 111744 - DNA, 30 bp, Artificial Sequence
  Synthetic oligonucleotide
accgtcatctcaggcaaaaaaggtagaccc

SEQ ID NO: 111745 - DNA, 30 bp, Artificial Sequence
  Synthetic oligonucleotide
cgcctcccggtgacgtttggaaggggaccc

SEQ ID NO: 111746 - DNA, 30 bp, Artificial Sequence
  Synthetic oligonucleotide
ttaccaaaccacgatagcgtcatgggaccc

SEQ ID NO: 111747 - DNA, 30 bp, Artificial Sequence
  Synthetic oligonucleotide
aatctaatggatgacgacacatagtgaccc

SEQ ID NO: 111748 - DNA, 30 bp, Artificial Sequence
  Synthetic oligonucleotide
gtgccgccatcccccgcaaatccaataccc

SEQ ID NO: 111749 - DNA, 31 bp, Artificial Sequence
  Synthetic oligonucleotide
gacccgcgcggctgaaacggcaggaataccc

SEQ ID NO: 111750 - DNA, 30 bp, Artificial Sequence
  Synthetic oligonucleotide
aggcatataacgtttctcttgagcataccc

SEQ ID NO: 111751 - DNA, 30 bp, Artificial Sequence
  Synthetic oligonucleotide
cgtattaatctgcctccggtcatcataccc

SEQ ID NO: 111752 - DNA, 30 bp, Artificial Sequence
  Synthetic oligonucleotide
aaaacagagtcgaagtggtagaatataccc

SEQ ID NO: 111753 - DNA, 30 bp, Artificial Sequence
  Synthetic oligonucleotide
ttggcgctaagcatacatacacaagtaccc

SEQ ID NO: 111754 - DNA, 30 bp, Artificial Sequence
  Synthetic oligonucleotide
acgagccagctccgttgtgggatattaccc

SEQ ID NO: 111755 - DNA, 30 bp, Artificial Sequence
  Synthetic oligonucleotide
cacggaataccgatgacgatcattcacccc

SEQ ID NO: 111756 - DNA, 30 bp, Artificial Sequence
  Synthetic oligonucleotide
taacagctttactaggggagggtggacccc

SEQ ID NO: 111757 - DNA, 30 bp, Artificial Sequence
  Synthetic oligonucleotide
gataagtcctagataaagggcgagtacccc

SEQ ID NO: 111758 - DNA, 30 bp, Artificial Sequence
  Synthetic oligonucleotide
cgcacatcaaaaacgctcatgtacaccccc

SEQ ID NO: 111759 - DNA, 30 bp, Artificial Sequence
  Synthetic oligonucleotide
ggaaatgcgaaattagtgggtagcaccccc

SEQ ID NO: 111760 - DNA, 30 bp, Artificial Sequence
  Synthetic oligonucleotide
acaaaaatgcaggttgctcaaggtcccccc

SEQ ID NO: 111761 - DNA, 30 bp, Artificial Sequence
  Synthetic oligonucleotide
agaggtgttgcttagtacgcttgagccccc

SEQ ID NO: 111762 - DNA, 30 bp, Artificial Sequence
  Synthetic oligonucleotide
cacaatgccgaacctgtattcgcttccccc

SEQ ID NO: 111763 - DNA, 30 bp, Artificial Sequence
  Synthetic oligonucleotide
aagcctatctgactcagaacaagccgcccc

SEQ ID NO: 111764 - DNA, 30 bp, Artificial Sequence
  Synthetic oligonucleotide
tcgccatattcacgtacgaaattaggcccc

SEQ ID NO: 111765 - DNA, 30 bp, Artificial Sequence
  Synthetic oligonucleotide
aggaagcatagagatacaggtccgggcccc

SEQ ID NO: 111766 - DNA, 31 bp, Artificial Sequence
  Synthetic oligonucleotide
acaggtgtgaccaacatagctatctggcccc

SEQ ID NO: 111767 - DNA, 30 bp, Artificial Sequence
  Synthetic oligonucleotide
caagaatcatctctattgttccactgcccc

SEQ ID NO: 111768 - DNA, 30 bp, Artificial Sequence
  Synthetic oligonucleotide
gacagaactcatacacatcggccttgcccc

SEQ ID NO: 111769 - DNA, 30 bp, Artificial Sequence
  Synthetic oligonucleotide
tggtgccgtaccgcacatgtgggtctcccc

SEQ ID NO: 111770 - DNA, 30 bp, Artificial Sequence
  Synthetic oligonucleotide
aacaggaccactgatctcgatcttctcccc

SEQ ID NO: 111771 - DNA, 30 bp, Artificial Sequence
  Synthetic oligonucleotide
acacgtggaagctctgacactttagtcccc

SEQ ID NO: 111772 - DNA, 30 bp, Artificial Sequence
  Synthetic oligonucleotide
tccgagacaggcctaggctagaatttcccc

SEQ ID NO: 111773 - DNA, 30 bp, Artificial Sequence
  Synthetic oligonucleotide
acagtacgggaggctttcaaagacaagccc

SEQ ID NO: 111774 - DNA, 30 bp, Artificial Sequence
  Synthetic oligonucleotide
ggtctgacaatctacactgccgataagccc

SEQ ID NO: 111775 - DNA, 30 bp, Artificial Sequence
  Synthetic oligonucleotide
gcgcctctgtaataagcagttgaacagccc

SEQ ID NO: 111776 - DNA, 30 bp, Artificial Sequence
  Synthetic oligonucleotide
acaaggcggtaaggcgactccaaagagccc

SEQ ID NO: 111777 - DNA, 30 bp, Artificial Sequence
  Synthetic oligonucleotide
acaacagaactactgcagatgtaggagccc

SEQ ID NO: 111778 - DNA, 30 bp, Artificial Sequence
  Synthetic oligonucleotide
gactggcggatcatgtcaaaggcaacgccc

SEQ ID NO: 111779 - DNA, 30 bp, Artificial Sequence
  Synthetic oligonucleotide
cattactacgagccactatcacttccgccc

SEQ ID NO: 111780 - DNA, 30 bp, Artificial Sequence
  Synthetic oligonucleotide
tgcgagacttcctcacatgttaggtcgccc

SEQ ID NO: 111781 - DNA, 30 bp, Artificial Sequence
  Synthetic oligonucleotide
agtccatcatacatcaaggaaccagggccc

SEQ ID NO: 111782 - DNA, 30 bp, Artificial Sequence
  Synthetic oligonucleotide
acgatgctgcttgaacaactttcagggccc

SEQ ID NO: 111783 - DNA, 30 bp, Artificial Sequence
  Synthetic oligonucleotide
gtagcggaggggcgatctagtgacgggccc

SEQ ID NO: 111784 - DNA, 30 bp, Artificial Sequence
  Synthetic oligonucleotide
acagacatgactggtcgacatcagtggccc

SEQ ID NO: 111785 - DNA, 30 bp, Artificial Sequence
  Synthetic oligonucleotide
tccagacagcgactagaagcatagtggccc

SEQ ID NO: 111786 - DNA, 30 bp, Artificial Sequence
  Synthetic oligonucleotide
cgcatgggaaatgcgatggaagcaatgccc

SEQ ID NO: 111787 - DNA, 30 bp, Artificial Sequence
  Synthetic oligonucleotide
tcaagagttatttcggaaggggcaatgccc

SEQ ID NO: 111788 - DNA, 30 bp, Artificial Sequence
  Synthetic oligonucleotide
acgattcgtctaacccgatctacactgccc

SEQ ID NO: 111789 - DNA, 30 bp, Artificial Sequence
  Synthetic oligonucleotide
attactgaggagggacgatggagcctgccc

SEQ ID NO: 111790 - DNA, 30 bp, Artificial Sequence
  Synthetic oligonucleotide
cacgtttacggacacatgtaagcgctgccc

SEQ ID NO: 111791 - DNA, 30 bp, Artificial Sequence
  Synthetic oligonucleotide
taccaagcagagtgtcatgtaagagtgccc

SEQ ID NO: 111792 - DNA, 30 bp, Artificial Sequence
  Synthetic oligonucleotide
ctgtggcggtcaaataagcggaaattgccc

SEQ ID NO: 111793 - DNA, 30 bp, Artificial Sequence
  Synthetic oligonucleotide
agggccccgagcaccaatacccgtttgccc

SEQ ID NO: 111794 - DNA, 30 bp, Artificial Sequence
  Synthetic oligonucleotide
tggcaccgcctaataattgatgaaaatccc

SEQ ID NO: 111795 - DNA, 30 bp, Artificial Sequence
  Synthetic oligonucleotide
gactagcggactgagacgatgccacatccc

SEQ ID NO: 111796 - DNA, 30 bp, Artificial Sequence
  Synthetic oligonucleotide
gtcgagactggacagtacctaccagatccc

SEQ ID NO: 111797 - DNA, 30 bp, Artificial Sequence
  Synthetic oligonucleotide
ccaaagggaaactgggttcaccctactccc

SEQ ID NO: 111798 - DNA, 30 bp, Artificial Sequence
  Synthetic oligonucleotide
gatcgggcaaaaatatgctgttgtgctccc

SEQ ID NO: 111799 - DNA, 30 bp, Artificial Sequence
  Synthetic oligonucleotide
tagcgcgtgaaccgatgtgtttccagtccc

SEQ ID NO: 111800 - DNA, 30 bp, Artificial Sequence
  Synthetic oligonucleotide
catcagacattccgtgtgcatctcagtccc

SEQ ID NO: 111801 - DNA, 30 bp, Artificial Sequence
  Synthetic oligonucleotide
gaacgccggtgatccaagaatcgacgtccc

SEQ ID NO: 111802 - DNA, 30 bp, Artificial Sequence
  Synthetic oligonucleotide
cttgcatatagaaacatttaattccgtccc

SEQ ID NO: 111803 - DNA, 30 bp, Artificial Sequence
  Synthetic oligonucleotide
aacattgaggtaatttacggcgctcgtccc

SEQ ID NO: 111804 - DNA, 30 bp, Artificial Sequence
  Synthetic oligonucleotide
caacagggttcactgaaatgagcgggtccc

SEQ ID NO: 111805 - DNA, 30 bp, Artificial Sequence
  Synthetic oligonucleotide
agactaacaagcaaatattatgtgattccc

SEQ ID NO: 111806 - DNA, 30 bp, Artificial Sequence
  Synthetic oligonucleotide
atggtgcactatcagcgtgaacaacttccc

SEQ ID NO: 111807 - DNA, 30 bp, Artificial Sequence
  Synthetic oligonucleotide
ctgtaggctaactaaagcagtcgagttccc

SEQ ID NO: 111808 - DNA, 30 bp, Artificial Sequence
  Synthetic oligonucleotide
gatagtttacctcagtcaacggtgaaagcc

SEQ ID NO: 111809 - DNA, 30 bp, Artificial Sequence
  Synthetic oligonucleotide
tcaagaggctcgcggtcgcttcaacaagcc

SEQ ID NO: 111810 - DNA, 30 bp, Artificial Sequence
  Synthetic oligonucleotide
atgccgaactctaggtggcacctccaagcc

SEQ ID NO: 111811 - DNA, 30 bp, Artificial Sequence
  Synthetic oligonucleotide
aaattattaagagtgatccagagtcaagcc

SEQ ID NO: 111812 - DNA, 30 bp, Artificial Sequence
  Synthetic oligonucleotide
gacgtgaccaaacgtccataattggaagcc

SEQ ID NO: 111813 - DNA, 30 bp, Artificial Sequence
  Synthetic oligonucleotide
gcagctcgaagaacttcaaaaaattaagcc

SEQ ID NO: 111814 - DNA, 30 bp, Artificial Sequence
  Synthetic oligonucleotide
actgcacggataaacgcctgattaccagcc

SEQ ID NO: 111815 - DNA, 30 bp, Artificial Sequence
  Synthetic oligonucleotide
tacgagtcgaggtgcggttttgtcccagcc

SEQ ID NO: 111816 - DNA, 30 bp, Artificial Sequence
  Synthetic oligonucleotide
gccagaaatgggtgtattctatgggcagcc

SEQ ID NO: 111817 - DNA, 30 bp, Artificial Sequence
  Synthetic oligonucleotide
atcctcagataccgattagtagcatcagcc

SEQ ID NO: 111818 - DNA, 30 bp, Artificial Sequence
  Synthetic oligonucleotide
tacagagaaggcgacggtaatcgttcagcc

SEQ ID NO: 111819 - DNA, 30 bp, Artificial Sequence
  Synthetic oligonucleotide
gtcaaatatggacatccggcacatagagcc

SEQ ID NO: 111820 - DNA, 30 bp, Artificial Sequence
  Synthetic oligonucleotide
ccaataaacatcgccgtcatcccgcgagcc

SEQ ID NO: 111821 - DNA, 30 bp, Artificial Sequence
  Synthetic oligonucleotide
taacaactcgcccagcgaggcgcgcgagcc

SEQ ID NO: 111822 - DNA, 30 bp, Artificial Sequence
  Synthetic oligonucleotide
ctcaccaatcgtctcagcagcgtgcgagcc

SEQ ID NO: 111823 - DNA, 30 bp, Artificial Sequence
  Synthetic oligonucleotide
taataaaagcgatatcggaagctgggagcc

SEQ ID NO: 111824 - DNA, 30 bp, Artificial Sequence
  Synthetic oligonucleotide
tcgtggccatcactcatctaggagtgagcc

SEQ ID NO: 111825 - DNA, 30 bp, Artificial Sequence
  Synthetic oligonucleotide
ctgttaagctggtaacaaccaggcatagcc

SEQ ID NO: 111826 - DNA, 30 bp, Artificial Sequence
  Synthetic oligonucleotide
acacgggcctgagggcgcaatttgatagcc

SEQ ID NO: 111827 - DNA, 30 bp, Artificial Sequence
  Synthetic oligonucleotide
ccagagcgcctgaaggtgttcaatgtagcc

SEQ ID NO: 111828 - DNA, 30 bp, Artificial Sequence
  Synthetic oligonucleotide
cataggtaacccgagagaaggcaattagcc

SEQ ID NO: 111829 - DNA, 30 bp, Artificial Sequence
  Synthetic oligonucleotide
cgagacgaggacactgggtcaggaaacgcc

SEQ ID NO: 111830 - DNA, 30 bp, Artificial Sequence
  Synthetic oligonucleotide
ttctgaagaggcaccaacgagcagaacgcc

SEQ ID NO: 111831 - DNA, 30 bp, Artificial Sequence
  Synthetic oligonucleotide
accgccaggttggttagactaaggtacgcc

SEQ ID NO: 111832 - DNA, 30 bp, Artificial Sequence
  Synthetic oligonucleotide
actgctgtgattcttagcggcacgcccgcc

SEQ ID NO: 111833 - DNA, 30 bp, Artificial Sequence
  Synthetic oligonucleotide
tgtactagtacccagactcccaatcccgcc

SEQ ID NO: 111834 - DNA, 30 bp, Artificial Sequence
  Synthetic oligonucleotide
tcgcataatcgcgtgatctcccccgccgcc

SEQ ID NO: 111835 - DNA, 30 bp, Artificial Sequence
  Synthetic oligonucleotide
cttggggaactcagaactcgaaagtccgcc

SEQ ID NO: 111836 - DNA, 30 bp, Artificial Sequence
  Synthetic oligonucleotide
tcaatgggttcaccgactcgaacaagcgcc

SEQ ID NO: 111837 - DNA, 30 bp, Artificial Sequence
  Synthetic oligonucleotide
caagtcaaggggcaccacaggtagagcgcc

SEQ ID NO: 111838 - DNA, 30 bp, Artificial Sequence
  Synthetic oligonucleotide
tgataatacacaaaatagaagagtagcgcc

SEQ ID NO: 111839 - DNA, 30 bp, Artificial Sequence
  Synthetic oligonucleotide
cagatagagttctgattaacgtggcgcgcc

SEQ ID NO: 111840 - DNA, 30 bp, Artificial Sequence
  Synthetic oligonucleotide
gaatataaccaaaagcgcgaggcaggcgcc

SEQ ID NO: 111841 - DNA, 30 bp, Artificial Sequence
  Synthetic oligonucleotide
aatgcatcaataatgcgcttcagcggcgcc

SEQ ID NO: 111842 - DNA, 30 bp, Artificial Sequence
  Synthetic oligonucleotide
gacaaataatccgagcggttgctcatcgcc

SEQ ID NO: 111843 - DNA, 30 bp, Artificial Sequence
  Synthetic oligonucleotide
acaatccgtaacacgttcgtcgagatcgcc

SEQ ID NO: 111844 - DNA, 30 bp, Artificial Sequence
  Synthetic oligonucleotide
cttgtaataaatcgtgaatcgttgctcgcc

SEQ ID NO: 111845 - DNA, 30 bp, Artificial Sequence
  Synthetic oligonucleotide
gggggtaagttcactgccccagtcgtcgcc

SEQ ID NO: 111846 - DNA, 30 bp, Artificial Sequence
  Synthetic oligonucleotide
gtcgtcaattagaccagtgcccagaaggcc

SEQ ID NO: 111847 - DNA, 30 bp, Artificial Sequence
  Synthetic oligonucleotide
actaacgatgacatcgtcaggaaacaggcc

SEQ ID NO: 111848 - DNA, 30 bp, Artificial Sequence
  Synthetic oligonucleotide
ctccaaagaaaggttaggcaacaacaggcc

SEQ ID NO: 111849 - DNA, 30 bp, Artificial Sequence
  Synthetic oligonucleotide
agcttgcaggaaatgcgtcttctacaggcc

SEQ ID NO: 111850 - DNA, 30 bp, Artificial Sequence
  Synthetic oligonucleotide
cacacgaggatgccctaagttttacaggcc

SEQ ID NO: 111851 - DNA, 30 bp, Artificial Sequence
  Synthetic oligonucleotide
agggggccgtggcaatagggtgagcaggcc

SEQ ID NO: 111852 - DNA, 30 bp, Artificial Sequence
  Synthetic oligonucleotide
aaaggtgttacggggatatgttagcaggcc

SEQ ID NO: 111853 - DNA, 30 bp, Artificial Sequence
  Synthetic oligonucleotide
caactgggattaaacttaatagacgaggcc

SEQ ID NO: 111854 - DNA, 30 bp, Artificial Sequence
  Synthetic oligonucleotide
gacaaaaaatgtaatttcccaagggaggcc

SEQ ID NO: 111855 - DNA, 30 bp, Artificial Sequence
  Synthetic oligonucleotide
tgagtcaatcattcaacaattgatgaggcc

SEQ ID NO: 111856 - DNA, 30 bp, Artificial Sequence
  Synthetic oligonucleotide
cgacggattgcacactgattgtcataggcc

SEQ ID NO: 111857 - DNA, 30 bp, Artificial Sequence
  Synthetic oligonucleotide
aatggacgaccggcgattatctagacggcc

SEQ ID NO: 111858 - DNA, 30 bp, Artificial Sequence
  Synthetic oligonucleotide
gttgcacgtaccaccgaaagtcctacggcc

SEQ ID NO: 111859 - DNA, 30 bp, Artificial Sequence
  Synthetic oligonucleotide
ggtgtgttatggacatctcgattaccggcc

SEQ ID NO: 111860 - DNA, 30 bp, Artificial Sequence
  Synthetic oligonucleotide
cgccattaggcgaatccaaaggcagcggcc

SEQ ID NO: 111861 - DNA, 30 bp, Artificial Sequence
  Synthetic oligonucleotide
tcacgatttggcgctcaggtaaaggcggcc

SEQ ID NO: 111862 - DNA, 30 bp, Artificial Sequence
  Synthetic oligonucleotide
tcgtcaacagcagctaattcccactcggcc

SEQ ID NO: 111863 - DNA, 30 bp, Artificial Sequence
  Synthetic oligonucleotide
tgagtcgagcaaacaggactagcgtcggcc

SEQ ID NO: 111864 - DNA, 30 bp, Artificial Sequence
  Synthetic oligonucleotide
tgagaaagaatgacatattacatttcggcc

SEQ ID NO: 111865 - DNA, 30 bp, Artificial Sequence
  Synthetic oligonucleotide
gtcgaggccataatccgaaacaagagggcc

SEQ ID NO: 111866 - DNA, 30 bp, Artificial Sequence
  Synthetic oligonucleotide
aacaacgaaacgacgagtagggcgagggcc

SEQ ID NO: 111867 - DNA, 30 bp, Artificial Sequence
  Synthetic oligonucleotide
cactgccttttgaacaccacaaggagggcc

SEQ ID NO: 111868 - DNA, 30 bp, Artificial Sequence
  Synthetic oligonucleotide
tcgggatcgtaagtataagtgagtagggcc

SEQ ID NO: 111869 - DNA, 30 bp, Artificial Sequence
  Synthetic oligonucleotide
cgaaagatctcaagtctacggttacgggcc

SEQ ID NO: 111870 - DNA, 30 bp, Artificial Sequence
  Synthetic oligonucleotide
caaagtcctaaagacgtccaagacggggcc

SEQ ID NO: 111871 - DNA, 30 bp, Artificial Sequence
  Synthetic oligonucleotide
ggcatacctagagtccagcgctacggggcc

SEQ ID NO: 111872 - DNA, 30 bp, Artificial Sequence
  Synthetic oligonucleotide
acgatactcgttaccagagtacctggggcc

SEQ ID NO: 111873 - DNA, 30 bp, Artificial Sequence
  Synthetic oligonucleotide
gggttgtgcgattattcagaataatgggcc

SEQ ID NO: 111874 - DNA, 30 bp, Artificial Sequence
  Synthetic oligonucleotide
cacggttattactaaaggtgacactgggcc

SEQ ID NO: 111875 - DNA, 30 bp, Artificial Sequence
  Synthetic oligonucleotide
gtcaggtaagccttagttacaggctgggcc

SEQ ID NO: 111876 - DNA, 30 bp, Artificial Sequence
  Synthetic oligonucleotide
aaggaggagcctcagtccgcttcaatggcc

SEQ ID NO: 111877 - DNA, 30 bp, Artificial Sequence
  Synthetic oligonucleotide
tacttaaataggcagtgtataggaatggcc

SEQ ID NO: 111878 - DNA, 30 bp, Artificial Sequence
  Synthetic oligonucleotide
gcgcgatcggatacatcgggaggtatggcc

SEQ ID NO: 111879 - DNA, 30 bp, Artificial Sequence
  Synthetic oligonucleotide
cataaatggtgtgaatctagcggtatggcc

SEQ ID NO: 111880 - DNA, 30 bp, Artificial Sequence
  Synthetic oligonucleotide
tgggccgattgtccaggatgtcctgtggcc

SEQ ID NO: 111881 - DNA, 30 bp, Artificial Sequence
  Synthetic oligonucleotide
aaacggtaggcaacaggaggctaacatgcc

SEQ ID NO: 111882 - DNA, 30 bp, Artificial Sequence
  Synthetic oligonucleotide
cacgatttttgacagtgcgttagtgatgcc

SEQ ID NO: 111883 - DNA, 30 bp, Artificial Sequence
  Synthetic oligonucleotide
gcgagatccagaccgcataggtcatatgcc

SEQ ID NO: 111884 - DNA, 30 bp, Artificial Sequence
  Synthetic oligonucleotide
ggtaccacaatcaattattgcatttatgcc

SEQ ID NO: 111885 - DNA, 30 bp, Artificial Sequence
  Synthetic oligonucleotide
acgacttaatattgaggctcgtggactgcc

SEQ ID NO: 111886 - DNA, 30 bp, Artificial Sequence
  Synthetic oligonucleotide
gccgcctactgagagtacatagtggctgcc

SEQ ID NO: 111887 - DNA, 30 bp, Artificial Sequence
  Synthetic oligonucleotide
ccatggcccatgaatgatcataaatctgcc

SEQ ID NO: 111888 - DNA, 30 bp, Artificial Sequence
  Synthetic oligonucleotide
aaggtggtctcccagtacccaaactctgcc

SEQ ID NO: 111889 - DNA, 30 bp, Artificial Sequence
  Synthetic oligonucleotide
gtacataatgcaaaagataggttcagtgcc

SEQ ID NO: 111890 - DNA, 30 bp, Artificial Sequence
  Synthetic oligonucleotide
cgacgctgggtgaccgaacagcctagtgcc

SEQ ID NO: 111891 - DNA, 30 bp, Artificial Sequence
  Synthetic oligonucleotide
cgtgagctgcggccgtttactcatggtgcc

SEQ ID NO: 111892 - DNA, 30 bp, Artificial Sequence
  Synthetic oligonucleotide
ccatgctggattaagaaagcgggccttgcc

SEQ ID NO: 111893 - DNA, 30 bp, Artificial Sequence
  Synthetic oligonucleotide
cgaacgcgtgaatgttaagcatcgcttgcc

SEQ ID NO: 111894 - DNA, 30 bp, Artificial Sequence
  Synthetic oligonucleotide
cagtaactcgagggatatctctctcttgcc

SEQ ID NO: 111895 - DNA, 30 bp, Artificial Sequence
  Synthetic oligonucleotide
cgcatacaaaaacatcgcaacattcttgcc

SEQ ID NO: 111896 - DNA, 30 bp, Artificial Sequence
  Synthetic oligonucleotide
tagcctgcagaacgtagtggtttgtttgcc

SEQ ID NO: 111897 - DNA, 30 bp, Artificial Sequence
  Synthetic oligonucleotide
tttatggcccacgctaactggcgaaaatcc

SEQ ID NO: 111898 - DNA, 30 bp, Artificial Sequence
  Synthetic oligonucleotide
tcgcggtactctgaactagtgaggaaatcc

SEQ ID NO: 111899 - DNA, 30 bp, Artificial Sequence
  Synthetic oligonucleotide
catgacacctggtccgctacaccacaatcc

SEQ ID NO: 111900 - DNA, 30 bp, Artificial Sequence
  Synthetic oligonucleotide
actgagacaattttacgtagaggccaatcc

SEQ ID NO: 111901 - DNA, 31 bp, Artificial Sequence
  Synthetic oligonucleotide
cagggagagagtgccgtagaggtatcaatcc

SEQ ID NO: 111902 - DNA, 30 bp, Artificial Sequence
  Synthetic oligonucleotide
atgtacatatcaatggcgcatcacgaatcc

SEQ ID NO: 111903 - DNA, 30 bp, Artificial Sequence
  Synthetic oligonucleotide
gaacggcacgtggatgcgcacatttaatcc

SEQ ID NO: 111904 - DNA, 31 bp, Artificial Sequence
  Synthetic oligonucleotide
gacctagctttgctgggatatcaatccatcc

SEQ ID NO: 111905 - DNA, 30 bp, Artificial Sequence
  Synthetic oligonucleotide
ggggaggttacgccagactgagaagcatcc

SEQ ID NO: 111906 - DNA, 30 bp, Artificial Sequence
  Synthetic oligonucleotide
agtcgatcatacatgagatcaacggcatcc

SEQ ID NO: 111907 - DNA, 30 bp, Artificial Sequence
  Synthetic oligonucleotide
ggttagaaaatgcgataaacccattcatcc

SEQ ID NO: 111908 - DNA, 30 bp, Artificial Sequence
  Synthetic oligonucleotide
atagcgtgggggccgagcacctgaagatcc

SEQ ID NO: 111909 - DNA, 30 bp, Artificial Sequence
  Synthetic oligonucleotide
gggaaaatgggtgggaaaatcacgagatcc

SEQ ID NO: 111910 - DNA, 30 bp, Artificial Sequence
  Synthetic oligonucleotide
agatttgcgcctggggaagtcacacgatcc

SEQ ID NO: 111911 - DNA, 30 bp, Artificial Sequence
  Synthetic oligonucleotide
taggaggagagctcccgacggcggggatcc

SEQ ID NO: 111912 - DNA, 30 bp, Artificial Sequence
  Synthetic oligonucleotide
aggtaccgtaacagaggagcgatatgatcc

SEQ ID NO: 111913 - DNA, 30 bp, Artificial Sequence
  Synthetic oligonucleotide
ttagaggggaaaatacttgaaacaatatcc

SEQ ID NO: 111914 - DNA, 30 bp, Artificial Sequence
  Synthetic oligonucleotide
gcgcgccttacctcccaagagagcatatcc

SEQ ID NO: 111915 - DNA, 30 bp, Artificial Sequence
  Synthetic oligonucleotide
ttccaaactgtagattcatgtgagctatcc

SEQ ID NO: 111916 - DNA, 30 bp, Artificial Sequence
  Synthetic oligonucleotide
gtgcaattaatgaaacggttgtgattatcc

SEQ ID NO: 111917 - DNA, 31 bp, Artificial Sequence
  Synthetic oligonucleotide
aagacccgactcaatacgcgacaatacctcc

SEQ ID NO: 111918 - DNA, 30 bp, Artificial Sequence
  Synthetic oligonucleotide
ccatatgcggtcagcaagtcccaagcctcc

SEQ ID NO: 111919 - DNA, 30 bp, Artificial Sequence
  Synthetic oligonucleotide
taggtaaaagccactaatgcgtcgtcctcc

SEQ ID NO: 111920 - DNA, 30 bp, Artificial Sequence
  Synthetic oligonucleotide
tggcgctaggcaaataataatttcagctcc

SEQ ID NO: 111921 - DNA, 30 bp, Artificial Sequence
  Synthetic oligonucleotide
caggtaagtaggcattaacaaagccgctcc

SEQ ID NO: 111922 - DNA, 30 bp, Artificial Sequence
  Synthetic oligonucleotide
gactagttaaattgggtagccctgcgctcc

SEQ ID NO: 111923 - DNA, 30 bp, Artificial Sequence
  Synthetic oligonucleotide
tatccaacgggaactaggggaagaggctcc

SEQ ID NO: 111924 - DNA, 30 bp, Artificial Sequence
  Synthetic oligonucleotide
tagaaggtcgtgataaccatcggtggctcc

SEQ ID NO: 111925 - DNA, 30 bp, Artificial Sequence
  Synthetic oligonucleotide
gtacactaaccatacggcctcaaatgctcc

SEQ ID NO: 111926 - DNA, 30 bp, Artificial Sequence
  Synthetic oligonucleotide
tactatgtaacggataagcaaatatgctcc

SEQ ID NO: 111927 - DNA, 30 bp, Artificial Sequence
  Synthetic oligonucleotide
tgagacagagcaagtttaatgttgatctcc

SEQ ID NO: 111928 - DNA, 30 bp, Artificial Sequence
  Synthetic oligonucleotide
ggtggaacccgagtccggatgtaactctcc

SEQ ID NO: 111929 - DNA, 30 bp, Artificial Sequence
  Synthetic oligonucleotide
agctcgcaggccagcgtgaaccgactctcc

SEQ ID NO: 111930 - DNA, 30 bp, Artificial Sequence
  Synthetic oligonucleotide
gggagggcccccatctccacactgttctcc

SEQ ID NO: 111931 - DNA, 30 bp, Artificial Sequence
  Synthetic oligonucleotide
tgggggggcaggagagaataagcgaagtcc

SEQ ID NO: 111932 - DNA, 30 bp, Artificial Sequence
  Synthetic oligonucleotide
tacctaataatggcggaaagtggccagtcc

SEQ ID NO: 111933 - DNA, 30 bp, Artificial Sequence
  Synthetic oligonucleotide
accgggattgatttcaggcaaccagagtcc

SEQ ID NO: 111934 - DNA, 30 bp, Artificial Sequence
  Synthetic oligonucleotide
agtaccccattcacgaagagtactgagtcc

SEQ ID NO: 111935 - DNA, 30 bp, Artificial Sequence
  Synthetic oligonucleotide
aggccgttaaagcagttttgagtatagtcc

SEQ ID NO: 111936 - DNA, 30 bp, Artificial Sequence
  Synthetic oligonucleotide
tgaaaccgccttatagctaagcactagtcc

SEQ ID NO: 111937 - DNA, 30 bp, Artificial Sequence
  Synthetic oligonucleotide
tgcgtggaatgctagtggacaaagtagtcc

SEQ ID NO: 111938 - DNA, 30 bp, Artificial Sequence
  Synthetic oligonucleotide
aaccgtttagagaggtcatatgtgacgtcc

SEQ ID NO: 111939 - DNA, 30 bp, Artificial Sequence
  Synthetic oligonucleotide
cgtctcacgagttggatgatagcaccgtcc

SEQ ID NO: 111940 - DNA, 30 bp, Artificial Sequence
  Synthetic oligonucleotide
gatccgcaatgtggagtatcgagcgcgtcc

SEQ ID NO: 111941 - DNA, 30 bp, Artificial Sequence
  Synthetic oligonucleotide
tgattcgcctctaaccaaaatcctgcgtcc

SEQ ID NO: 111942 - DNA, 30 bp, Artificial Sequence
  Synthetic oligonucleotide
tccacgtaacgctcatctgtttggtcgtcc

SEQ ID NO: 111943 - DNA, 30 bp, Artificial Sequence
  Synthetic oligonucleotide
gcggactggtctcacaaaggtggttcgtcc

SEQ ID NO: 111944 - DNA, 30 bp, Artificial Sequence
  Synthetic oligonucleotide
tcaattggatatgtcgcttggtgacggtcc

SEQ ID NO: 111945 - DNA, 31 bp, Artificial Sequence
  Synthetic oligonucleotide
atttgatcattcttgcgggacggcctggtcc

SEQ ID NO: 111946 - DNA, 30 bp, Artificial Sequence
  Synthetic oligonucleotide
tggtgacccatcgttcggtccattctgtcc

SEQ ID NO: 111947 - DNA, 30 bp, Artificial Sequence
  Synthetic oligonucleotide
ccacctcgaataagtgccacggacgtgtcc

SEQ ID NO: 111948 - DNA, 30 bp, Artificial Sequence
  Synthetic oligonucleotide
ctagtcggggtgtaggcttggattttgtcc

SEQ ID NO: 111949 - DNA, 30 bp, Artificial Sequence
  Synthetic oligonucleotide
gcactcgacaaaattggacgaatgaattcc

SEQ ID NO: 111950 - DNA, 30 bp, Artificial Sequence
  Synthetic oligonucleotide
gcttggctgcgtagtagagactaccattcc

SEQ ID NO: 111951 - DNA, 30 bp, Artificial Sequence
  Synthetic oligonucleotide
aaaggtctaagagtgaactcatttcattcc

SEQ ID NO: 111952 - DNA, 30 bp, Artificial Sequence
  Synthetic oligonucleotide
tcgaatagaatggttggcactgcggattcc

SEQ ID NO: 111953 - DNA, 30 bp, Artificial Sequence
  Synthetic oligonucleotide
agagattaacactatctaggaactgattcc

SEQ ID NO: 111954 - DNA, 30 bp, Artificial Sequence
  Synthetic oligonucleotide
gccataacggaggtagcggctgaaacttcc

SEQ ID NO: 111955 - DNA, 30 bp, Artificial Sequence
  Synthetic oligonucleotide
acggcaacgtccaggtcactagtgtcttcc

SEQ ID NO: 111956 - DNA, 30 bp, Artificial Sequence
  Synthetic oligonucleotide
gtactaccgtaagaccaggtgtcacgttcc

SEQ ID NO: 111957 - DNA, 30 bp, Artificial Sequence
  Synthetic oligonucleotide
tcttcgactcactaggagtaacgtcgttcc

SEQ ID NO: 111958 - DNA, 30 bp, Artificial Sequence
  Synthetic oligonucleotide
gtggtacaacgaccataaagccaaggttcc

SEQ ID NO: 111959 - DNA, 30 bp, Artificial Sequence
  Synthetic oligonucleotide
gtcatgatcgatgaagaaacggcgggttcc

SEQ ID NO: 111960 - DNA, 30 bp, Artificial Sequence
  Synthetic oligonucleotide
gtaagagccacctgggatgctacaatttcc

SEQ ID NO: 111961 - DNA, 30 bp, Artificial Sequence
  Synthetic oligonucleotide
cggtccagctgctaggtgatcctcatttcc

SEQ ID NO: 111962 - DNA, 30 bp, Artificial Sequence
  Synthetic oligonucleotide
tcgattcgttacgtatcattgaggatttcc

SEQ ID NO: 111963 - DNA, 30 bp, Artificial Sequence
  Synthetic oligonucleotide
caacaggtcccgattataggtaaaaaaagc

SEQ ID NO: 111964 - DNA, 30 bp, Artificial Sequence
  Synthetic oligonucleotide
atgtctcaaacacaaatcggcagaaaaagc

SEQ ID NO: 111965 - DNA, 30 bp, Artificial Sequence
  Synthetic oligonucleotide
agctgaggttaaatggttttaataaaaagc

SEQ ID NO: 111966 - DNA, 30 bp, Artificial Sequence
  Synthetic oligonucleotide
caaataggacattccggttgatccaaaagc

SEQ ID NO: 111967 - DNA, 30 bp, Artificial Sequence
  Synthetic oligonucleotide
tgttacaaaaatcgtaaggcggctaaaagc

SEQ ID NO: 111968 - DNA, 30 bp, Artificial Sequence
  Synthetic oligonucleotide
taagtgtaactgctaacgcgtaggcaaagc

SEQ ID NO: 111969 - DNA, 30 bp, Artificial Sequence
  Synthetic oligonucleotide
ggccacctgatgtctgtctactttcaaagc

SEQ ID NO: 111970 - DNA, 30 bp, Artificial Sequence
  Synthetic oligonucleotide
ggaagcatcaatcgtgaactcccagaaagc

SEQ ID NO: 111971 - DNA, 30 bp, Artificial Sequence
  Synthetic oligonucleotide
ggtggccgaagcgtgttctagcacgaaagc

SEQ ID NO: 111972 - DNA, 30 bp, Artificial Sequence
  Synthetic oligonucleotide
tcctgggccgctcctcatatagccgaaagc

SEQ ID NO: 111973 - DNA, 30 bp, Artificial Sequence
  Synthetic oligonucleotide
gatgcctagaggcaaagtatttgcgaaagc

SEQ ID NO: 111974 - DNA, 30 bp, Artificial Sequence
  Synthetic oligonucleotide
gaggcccagtcgttagtcgtcgaggaaagc

SEQ ID NO: 111975 - DNA, 30 bp, Artificial Sequence
  Synthetic oligonucleotide
ttagacgcgtcactccagtgggtctaaagc

SEQ ID NO: 111976 - DNA, 30 bp, Artificial Sequence
  Synthetic oligonucleotide
aagcaagcagagggacactcgaggtaaagc

SEQ ID NO: 111977 - DNA, 30 bp, Artificial Sequence
  Synthetic oligonucleotide
attcgtctacgagttggactagtgtaaagc

SEQ ID NO: 111978 - DNA, 30 bp, Artificial Sequence
  Synthetic oligonucleotide
tactggatgtactaccgagtcccaccaagc

SEQ ID NO: 111979 - DNA, 30 bp, Artificial Sequence
  Synthetic oligonucleotide
gcaaagatgtacgatcggagacacccaagc

SEQ ID NO: 111980 - DNA, 30 bp, Artificial Sequence
  Synthetic oligonucleotide
agcaatcggatggaaggtattactccaagc

SEQ ID NO: 111981 - DNA, 30 bp, Artificial Sequence
  Synthetic oligonucleotide
cacaatcccaggcctggcgattaagcaagc

SEQ ID NO: 111982 - DNA, 30 bp, Artificial Sequence
  Synthetic oligonucleotide
aatgacattgggatctgaagcctggcaagc

SEQ ID NO: 111983 - DNA, 30 bp, Artificial Sequence
  Synthetic oligonucleotide
cgcaactcagcgaaggcgatacttgcaagc

SEQ ID NO: 111984 - DNA, 30 bp, Artificial Sequence
  Synthetic oligonucleotide
acaagtcacgttcaaatcttggtgtcaagc

SEQ ID NO: 111985 - DNA, 30 bp, Artificial Sequence
  Synthetic oligonucleotide
ttcgagcgagccttcaggtagccaagaagc

SEQ ID NO: 111986 - DNA, 30 bp, Artificial Sequence
  Synthetic oligonucleotide
aagtacaaaaacccagggtatagaagaagc

SEQ ID NO: 111987 - DNA, 30 bp, Artificial Sequence
  Synthetic oligonucleotide
gagcatgacaataggcgggatgtcagaagc

SEQ ID NO: 111988 - DNA, 30 bp, Artificial Sequence
  Synthetic oligonucleotide
acacaagtcgcactttctgcgagacgaagc

SEQ ID NO: 111989 - DNA, 30 bp, Artificial Sequence
  Synthetic oligonucleotide
gcaaacagtcgggcaacgcatgggggaagc

SEQ ID NO: 111990 - DNA, 30 bp, Artificial Sequence
  Synthetic oligonucleotide
ctgacaatcctcctggacatcattggaagc

SEQ ID NO: 111991 - DNA, 30 bp, Artificial Sequence
  Synthetic oligonucleotide
ggagaccgtgttctcagatcgatatgaagc

SEQ ID NO: 111992 - DNA, 30 bp, Artificial Sequence
  Synthetic oligonucleotide
agtaaggtgactacacgggtgcactgaagc

SEQ ID NO: 111993 - DNA, 30 bp, Artificial Sequence
  Synthetic oligonucleotide
cgggggcagaaattctggtagtattgaagc

SEQ ID NO: 111994 - DNA, 30 bp, Artificial Sequence
  Synthetic oligonucleotide
ggatcacacactaactaagtcgccataagc

SEQ ID NO: 111995 - DNA, 30 bp, Artificial Sequence
  Synthetic oligonucleotide
ttaagaagggtgactgtttatggtataagc

SEQ ID NO: 111996 - DNA, 30 bp, Artificial Sequence
  Synthetic oligonucleotide
tccgccctaacaaggcgaactggtctaagc

SEQ ID NO: 111997 - DNA, 30 bp, Artificial Sequence
  Synthetic oligonucleotide
atgaccagacgaagaaattgaaaggtaagc

SEQ ID NO: 111998 - DNA, 30 bp, Artificial Sequence
  Synthetic oligonucleotide
cccgaactgggagctgttatgatggtaagc

SEQ ID NO: 111999 - DNA, 30 bp, Artificial Sequence
  Synthetic oligonucleotide
tagaacatagataccgatggccatgtaagc

SEQ ID NO: 112000 - DNA, 30 bp, Artificial Sequence
  Synthetic oligonucleotide
ccgcgccagggacacgtgaagccaaacagc

SEQ ID NO: 112001 - DNA, 30 bp, Artificial Sequence
  Synthetic oligonucleotide
acgataattgtacaccatgggggaaacagc

SEQ ID NO: 112002 - DNA, 30 bp, Artificial Sequence
  Synthetic oligonucleotide
agccttatacctctggcagacccgaacagc

SEQ ID NO: 112003 - DNA, 30 bp, Artificial Sequence
  Synthetic oligonucleotide
atgctgggcaagtacgcgaacatgcacagc

SEQ ID NO: 112004 - DNA, 30 bp, Artificial Sequence
  Synthetic oligonucleotide
cgaagcaccggcgcaaatggaacagacagc

SEQ ID NO: 112005 - DNA, 30 bp, Artificial Sequence
  Synthetic oligonucleotide
caaggcttggtaatcttgcctgcagacagc

SEQ ID NO: 112006 - DNA, 30 bp, Artificial Sequence
  Synthetic oligonucleotide
ctaactcaggcaaaacctgcggatgacagc

SEQ ID NO: 112007 - DNA, 30 bp, Artificial Sequence
  Synthetic oligonucleotide
agcgtccaaatgtgtgtacgtagcaccagc

SEQ ID NO: 112008 - DNA, 30 bp, Artificial Sequence
  Synthetic oligonucleotide
tcggttgcgtagaacacatgcaaacccagc

SEQ ID NO: 112009 - DNA, 30 bp, Artificial Sequence
  Synthetic oligonucleotide
ctcaaccagtatcctggcccaaatcccagc

SEQ ID NO: 112010 - DNA, 30 bp, Artificial Sequence
  Synthetic oligonucleotide
cggcccacgagtcattacgacagtcccagc

SEQ ID NO: 112011 - DNA, 30 bp, Artificial Sequence
  Synthetic oligonucleotide
acgaacaaatccccgccgtccaaggccagc

SEQ ID NO: 112012 - DNA, 30 bp, Artificial Sequence
  Synthetic oligonucleotide
cttaagagcaaagcaacttgtcaatccagc

SEQ ID NO: 112013 - DNA, 30 bp, Artificial Sequence
  Synthetic oligonucleotide
tgcttcctaactcagatgaaaggatccagc

SEQ ID NO: 112014 - DNA, 30 bp, Artificial Sequence
  Synthetic oligonucleotide
acaactccaataactattttggactccagc

SEQ ID NO: 112015 - DNA, 30 bp, Artificial Sequence
  Synthetic oligonucleotide
gggggttcacaggaaaggcgaaaaagcagc

SEQ ID NO: 112016 - DNA, 30 bp, Artificial Sequence
  Synthetic oligonucleotide
cacccctacgagcgtatagaccaaagcagc

SEQ ID NO: 112017 - DNA, 30 bp, Artificial Sequence
  Synthetic oligonucleotide
aaggaatgcgccaatgtaggactgcgcagc

SEQ ID NO: 112018 - DNA, 30 bp, Artificial Sequence
  Synthetic oligonucleotide
gtgaggtggggtcaccggacgtatggcagc

SEQ ID NO: 112019 - DNA, 30 bp, Artificial Sequence
  Synthetic oligonucleotide
attatcagggggaaggaactgggatgcagc

SEQ ID NO: 112020 - DNA, 30 bp, Artificial Sequence
  Synthetic oligonucleotide
gacgtcgtggcgtagggggcggactgcagc

SEQ ID NO: 112021 - DNA, 30 bp, Artificial Sequence
  Synthetic oligonucleotide
accgacttcaaggctgttaactcaatcagc

SEQ ID NO: 112022 - DNA, 30 bp, Artificial Sequence
  Synthetic oligonucleotide
actcgccggtgaacataaaaaaacatcagc

SEQ ID NO: 112023 - DNA, 30 bp, Artificial Sequence
  Synthetic oligonucleotide
tcgggctagatcagatgacatgccatcagc

SEQ ID NO: 112024 - DNA, 30 bp, Artificial Sequence
  Synthetic oligonucleotide
catagcaggcaatctaggaacacgatcagc

SEQ ID NO: 112025 - DNA, 30 bp, Artificial Sequence
  Synthetic oligonucleotide
cgggtaataaaacgttatcttcggctcagc

SEQ ID NO: 112026 - DNA, 30 bp, Artificial Sequence
  Synthetic oligonucleotide
gaatgccaggcataagggccacctgtcagc

SEQ ID NO: 112027 - DNA, 30 bp, Artificial Sequence
  Synthetic oligonucleotide
caggcgtcaccgcaatccttttaattcagc

SEQ ID NO: 112028 - DNA, 30 bp, Artificial Sequence
  Synthetic oligonucleotide
ccatagcgatcgcattctacgatcttcagc

SEQ ID NO: 112029 - DNA, 30 bp, Artificial Sequence
  Synthetic oligonucleotide
gagactggttgggggcgcgggacgttcagc

SEQ ID NO: 112030 - DNA, 30 bp, Artificial Sequence
  Synthetic oligonucleotide
cgcaaaaaaccaggcgacggctacaagagc

SEQ ID NO: 112031 - DNA, 30 bp, Artificial Sequence
  Synthetic oligonucleotide
cttgcatgaccgtgatctatccaccagagc

SEQ ID NO: 112032 - DNA, 30 bp, Artificial Sequence
  Synthetic oligonucleotide
atgttgggttctaacggtatgcaccagagc

SEQ ID NO: 112033 - DNA, 30 bp, Artificial Sequence
  Synthetic oligonucleotide
aatggattttcggatatagaacatcagagc

SEQ ID NO: 112034 - DNA, 30 bp, Artificial Sequence
  Synthetic oligonucleotide
ttatggactaacgtcctaacaagggagagc

SEQ ID NO: 112035 - DNA, 31 bp, Artificial Sequence
  Synthetic oligonucleotide
ccaagccagggcccacggggctaccacgagc

SEQ ID NO: 112036 - DNA, 30 bp, Artificial Sequence
  Synthetic oligonucleotide
ctatcggaatggcgtccatgcacaccgagc

SEQ ID NO: 112037 - DNA, 30 bp, Artificial Sequence
  Synthetic oligonucleotide
ccaatatccttctctagttgtttcccgagc

SEQ ID NO: 112038 - DNA, 30 bp, Artificial Sequence
  Synthetic oligonucleotide
tttgtcagattcgattagagagaggcgagc

SEQ ID NO: 112039 - DNA, 30 bp, Artificial Sequence
  Synthetic oligonucleotide
acgaaacgtttcaagcttccctgaaggagc

SEQ ID NO: 112040 - DNA, 30 bp, Artificial Sequence
  Synthetic oligonucleotide
ctcaaatttgggaggacgccgtgaaggagc

SEQ ID NO: 112041 - DNA, 30 bp, Artificial Sequence
  Synthetic oligonucleotide
tttcgtagtcgcgggtgcgtgaagaggagc

SEQ ID NO: 112042 - DNA, 30 bp, Artificial Sequence
  Synthetic oligonucleotide
tgaaagaatttactaacagatcggaggagc

SEQ ID NO: 112043 - DNA, 30 bp, Artificial Sequence
  Synthetic oligonucleotide
agcatatcggtgtcgggcatccgtcggagc

SEQ ID NO: 112044 - DNA, 30 bp, Artificial Sequence
  Synthetic oligonucleotide
tagatccaggtccagtgcggctcagggagc

SEQ ID NO: 112045 - DNA, 30 bp, Artificial Sequence
  Synthetic oligonucleotide
aacgggtccacgagaacacctgtagggagc

SEQ ID NO: 112046 - DNA, 30 bp, Artificial Sequence
  Synthetic oligonucleotide
tcgtggcttgttgcggcgaaacgggggagc

SEQ ID NO: 112047 - DNA, 30 bp, Artificial Sequence
  Synthetic oligonucleotide
tagtaaagctatgaagggcttctatggagc

SEQ ID NO: 112048 - DNA, 31 bp, Artificial Sequence
  Synthetic oligonucleotide
gctatcaggtgcggaggcataggattggagc

SEQ ID NO: 112049 - DNA, 30 bp, Artificial Sequence
  Synthetic oligonucleotide
gtcgcgccaatggcgaactcaatttggagc

SEQ ID NO: 112050 - DNA, 30 bp, Artificial Sequence
  Synthetic oligonucleotide
gggacggataggaggtcgagcattatgagc

SEQ ID NO: 112051 - DNA, 30 bp, Artificial Sequence
  Synthetic oligonucleotide
ttgaattcgagtatagccgggtgagtgagc

SEQ ID NO: 112052 - DNA, 30 bp, Artificial Sequence
  Synthetic oligonucleotide
atcatggttcaacgttcaacaatggtgagc

SEQ ID NO: 112053 - DNA, 30 bp, Artificial Sequence
  Synthetic oligonucleotide
aggtatagaattccaggtgcaacgaatagc

SEQ ID NO: 112054 - DNA, 30 bp, Artificial Sequence
  Synthetic oligonucleotide
atgacccgcgggaaaccagtacaccatagc

SEQ ID NO: 112055 - DNA, 30 bp, Artificial Sequence
  Synthetic oligonucleotide
aatgcggatctcaaacgacagggccatagc

SEQ ID NO: 112056 - DNA, 29 bp, Artificial Sequence
  Synthetic oligonucleotide
actcagtaaaggatgaccaccagcatagc

SEQ ID NO: 112057 - DNA, 30 bp, Artificial Sequence
  Synthetic oligonucleotide
tccatataggcaactgaaccaggggatagc

SEQ ID NO: 112058 - DNA, 30 bp, Artificial Sequence
  Synthetic oligonucleotide
tcttcgcacggtaaccgatggctggatagc

SEQ ID NO: 112059 - DNA, 30 bp, Artificial Sequence
  Synthetic oligonucleotide
ctacggtatgcgtagccctagttggatagc

SEQ ID NO: 112060 - DNA, 30 bp, Artificial Sequence
  Synthetic oligonucleotide
ttaggcgaaaatatcgagttttcaactagc

SEQ ID NO: 112061 - DNA, 30 bp, Artificial Sequence
  Synthetic oligonucleotide
aagtaggggggaactgggtaaaccactagc

SEQ ID NO: 112062 - DNA, 30 bp, Artificial Sequence
  Synthetic oligonucleotide
gaaactcgcagagagtgctcgcctactagc

SEQ ID NO: 112063 - DNA, 30 bp, Artificial Sequence
  Synthetic oligonucleotide
ttcacatcaccgtccctgcccggtactagc

SEQ ID NO: 112064 - DNA, 30 bp, Artificial Sequence
  Synthetic oligonucleotide
gcgagcggggaatggcagcccaaatctagc

SEQ ID NO: 112065 - DNA, 30 bp, Artificial Sequence
  Synthetic oligonucleotide
ttagccgtggttgtgcaatcgtcatctagc

SEQ ID NO: 112066 - DNA, 30 bp, Artificial Sequence
  Synthetic oligonucleotide
acagaaggtgaaagatctatttcaagtagc

SEQ ID NO: 112067 - DNA, 30 bp, Artificial Sequence
  Synthetic oligonucleotide
tgcgccgtcgccaaaccagaaagtagtagc

SEQ ID NO: 112068 - DNA, 30 bp, Artificial Sequence
  Synthetic oligonucleotide
agtagtgtagctagtgtatctgccggtagc

SEQ ID NO: 112069 - DNA, 30 bp, Artificial Sequence
  Synthetic oligonucleotide
tcagagagcagggtactaatagggggtagc

SEQ ID NO: 112070 - DNA, 30 bp, Artificial Sequence
  Synthetic oligonucleotide
ctgaggtctgcgcctgtgtcgacatgtagc

SEQ ID NO: 112071 - DNA, 30 bp, Artificial Sequence
  Synthetic oligonucleotide
cgggagcacgccaagccgacaaggtgtagc

SEQ ID NO: 112072 - DNA, 30 bp, Artificial Sequence
  Synthetic oligonucleotide
agagagcttgccactgagtcctggtgtagc

SEQ ID NO: 112073 - DNA, 30 bp, Artificial Sequence
  Synthetic oligonucleotide
tcccaatgccttactggaactacttgtagc

SEQ ID NO: 112074 - DNA, 30 bp, Artificial Sequence
  Synthetic oligonucleotide
ctctgcatagggagggtacagtacattagc

SEQ ID NO: 112075 - DNA, 30 bp, Artificial Sequence
  Synthetic oligonucleotide
tgatctgcggactatgctgttgggattagc

SEQ ID NO: 112076 - DNA, 30 bp, Artificial Sequence
  Synthetic oligonucleotide
cagtctaggaaaagaacactaggcgttagc

SEQ ID NO: 112077 - DNA, 30 bp, Artificial Sequence
  Synthetic oligonucleotide
atcgaactggtacgcgtaccaggtgttagc

SEQ ID NO: 112078 - DNA, 30 bp, Artificial Sequence
  Synthetic oligonucleotide
gtctgtacaattcacagggaagataaacgc

SEQ ID NO: 112079 - DNA, 30 bp, Artificial Sequence
  Synthetic oligonucleotide
acggatgacttcgctgatagccgtaaacgc

SEQ ID NO: 112080 - DNA, 30 bp, Artificial Sequence
  Synthetic oligonucleotide
aaagcccacacgctctagtgtactcaacgc

SEQ ID NO: 112081 - DNA, 30 bp, Artificial Sequence
  Synthetic oligonucleotide
accaaaagaagtattacgacgttggaacgc

SEQ ID NO: 112082 - DNA, 30 bp, Artificial Sequence
  Synthetic oligonucleotide
cggcacacatggggaatctcggggtaacgc

SEQ ID NO: 112083 - DNA, 30 bp, Artificial Sequence
  Synthetic oligonucleotide
taacactcaggcaaatgacagaacacacgc

SEQ ID NO: 112084 - DNA, 30 bp, Artificial Sequence
  Synthetic oligonucleotide
cttatggctcatcaccgcatgaaaccacgc

SEQ ID NO: 112085 - DNA, 30 bp, Artificial Sequence
  Synthetic oligonucleotide
tacaaacatgggaagagcaaaacagcacgc

SEQ ID NO: 112086 - DNA, 30 bp, Artificial Sequence
  Synthetic oligonucleotide
tctcgcccaaatcgtgagtatgcagcacgc

SEQ ID NO: 112087 - DNA, 30 bp, Artificial Sequence
  Synthetic oligonucleotide
gcgacctggccgttgccatgaaaaatacgc

SEQ ID NO: 112088 - DNA, 30 bp, Artificial Sequence
  Synthetic oligonucleotide
gcaagcgaataacgaatagccaaaatacgc

SEQ ID NO: 112089 - DNA, 30 bp, Artificial Sequence
  Synthetic oligonucleotide
acgctcttacaacaagactccgtcatacgc

SEQ ID NO: 112090 - DNA, 30 bp, Artificial Sequence
  Synthetic oligonucleotide
tatcgtttgtagatccggggatgagtacgc

SEQ ID NO: 112091 - DNA, 30 bp, Artificial Sequence
  Synthetic oligonucleotide
ctcgcagaggtaagggatccatcggtacgc

SEQ ID NO: 112092 - DNA, 30 bp, Artificial Sequence
  Synthetic oligonucleotide
cggcgagattcaacgaccggatacttacgc

SEQ ID NO: 112093 - DNA, 30 bp, Artificial Sequence
  Synthetic oligonucleotide
atcgatcagactgctagtcaggatttacgc

SEQ ID NO: 112094 - DNA, 30 bp, Artificial Sequence
  Synthetic oligonucleotide
cgtgcagattagacaaggttagtaaaccgc

SEQ ID NO: 112095 - DNA, 30 bp, Artificial Sequence
  Synthetic oligonucleotide
gcccggagggtagaggttaggccgaaccgc

SEQ ID NO: 112096 - DNA, 30 bp, Artificial Sequence
  Synthetic oligonucleotide
gctatctcatctaaagagcagccggaccgc

SEQ ID NO: 112097 - DNA, 30 bp, Artificial Sequence
  Synthetic oligonucleotide
cacggctattcacgtgagggaggcacccgc

SEQ ID NO: 112098 - DNA, 30 bp, Artificial Sequence
  Synthetic oligonucleotide
atcggtcgaaccgcacgatgccttacccgc

SEQ ID NO: 112099 - DNA, 30 bp, Artificial Sequence
  Synthetic oligonucleotide
aaggaatagtttccaagagtgagcccccgc

SEQ ID NO: 112100 - DNA, 30 bp, Artificial Sequence
  Synthetic oligonucleotide
tcagagtcgccaggggaagtaaaagcccgc

SEQ ID NO: 112101 - DNA, 30 bp, Artificial Sequence
  Synthetic oligonucleotide
aaggtcacgttaggccgctagtttgcccgc

SEQ ID NO: 112102 - DNA, 30 bp, Artificial Sequence
  Synthetic oligonucleotide
gaataggcactagagtaagagtattcccgc

SEQ ID NO: 112103 - DNA, 30 bp, Artificial Sequence
  Synthetic oligonucleotide
gctgggtagtgggcgttgtgtgccagccgc

SEQ ID NO: 112104 - DNA, 30 bp, Artificial Sequence
  Synthetic oligonucleotide
tcgattctagactaattcaaggttcgccgc

SEQ ID NO: 112105 - DNA, 30 bp, Artificial Sequence
  Synthetic oligonucleotide
gctctagctgagacagtcgaattaggccgc

SEQ ID NO: 112106 - DNA, 30 bp, Artificial Sequence
  Synthetic oligonucleotide
agaaatgccagatacagggacgacggccgc

SEQ ID NO: 112107 - DNA, 30 bp, Artificial Sequence
  Synthetic oligonucleotide
gcatctacaaatcagaagggcgcgggccgc

SEQ ID NO: 112108 - DNA, 30 bp, Artificial Sequence
  Synthetic oligonucleotide
tactagccaaaacgagtgaatacgtgccgc

SEQ ID NO: 112109 - DNA, 30 bp, Artificial Sequence
  Synthetic oligonucleotide
atagagggtgacggaggtaaaaaaatccgc

SEQ ID NO: 112110 - DNA, 30 bp, Artificial Sequence
  Synthetic oligonucleotide
aggaactccacatactagcatcctatccgc

SEQ ID NO: 112111 - DNA, 30 bp, Artificial Sequence
  Synthetic oligonucleotide
tgttgggagaggaggttttgacaggtccgc

SEQ ID NO: 112112 - DNA, 30 bp, Artificial Sequence
  Synthetic oligonucleotide
catggcccagcaactccatagtcggtccgc

SEQ ID NO: 112113 - DNA, 30 bp, Artificial Sequence
  Synthetic oligonucleotide
taagctgtgactacaaattgaagtgtccgc

SEQ ID NO: 112114 - DNA, 30 bp, Artificial Sequence
  Synthetic oligonucleotide
cctacattcaagcgactcgaaattgtccgc

SEQ ID NO: 112115 - DNA, 30 bp, Artificial Sequence
  Synthetic oligonucleotide
tagcgcctaagcctaaccatcacgaagcgc

SEQ ID NO: 112116 - DNA, 30 bp, Artificial Sequence
  Synthetic oligonucleotide
caattagcctattatacgacaagccagcgc

SEQ ID NO: 112117 - DNA, 30 bp, Artificial Sequence
  Synthetic oligonucleotide
gtgttaaagagacatatcgaaaaagagcgc

SEQ ID NO: 112118 - DNA, 30 bp, Artificial Sequence
  Synthetic oligonucleotide
gcgatgaacagtacttaatcaaaagagcgc

SEQ ID NO: 112119 - DNA, 30 bp, Artificial Sequence
  Synthetic oligonucleotide
tcggatgtatctggacttatgcgggagcgc

SEQ ID NO: 112120 - DNA, 30 bp, Artificial Sequence
  Synthetic oligonucleotide
caaataaaaacgccaattagacttgagcgc

SEQ ID NO: 112121 - DNA, 30 bp, Artificial Sequence
  Synthetic oligonucleotide
tgaagaccgagccgcacctaaggctagcgc

SEQ ID NO: 112122 - DNA, 30 bp, Artificial Sequence
  Synthetic oligonucleotide
gtccaatcagccgacacaaaccggtagcgc

SEQ ID NO: 112123 - DNA, 30 bp, Artificial Sequence
  Synthetic oligonucleotide
catcaagtacagaagataaattgttagcgc

SEQ ID NO: 112124 - DNA, 30 bp, Artificial Sequence
  Synthetic oligonucleotide
accaagtacaagcaatccaggaaaacgcgc

SEQ ID NO: 112125 - DNA, 30 bp, Artificial Sequence
  Synthetic oligonucleotide
cgtaacactattggtctactttccgcgcgc

SEQ ID NO: 112126 - DNA, 30 bp, Artificial Sequence
  Synthetic oligonucleotide
cattacgaaatgggtcgaccttgcgcgcgc

SEQ ID NO: 112127 - DNA, 30 bp, Artificial Sequence
  Synthetic oligonucleotide
ggatcgaattttacaggagtcacctcgcgc

SEQ ID NO: 112128 - DNA, 30 bp, Artificial Sequence
  Synthetic oligonucleotide
cggggaacgagtttttgtgaaggtgggcgc

SEQ ID NO: 112129 - DNA, 30 bp, Artificial Sequence
  Synthetic oligonucleotide
cggactggcacagaagtggtaatctggcgc

SEQ ID NO: 112130 - DNA, 30 bp, Artificial Sequence
  Synthetic oligonucleotide
gggttgagcagaatacaagcacgttggcgc

SEQ ID NO: 112131 - DNA, 30 bp, Artificial Sequence
  Synthetic oligonucleotide
aatggctactattatcaatgcgagatgcgc

SEQ ID NO: 112132 - DNA, 30 bp, Artificial Sequence
  Synthetic oligonucleotide
gtgcgaagactcgtaacttgttctatgcgc

SEQ ID NO: 112133 - DNA, 30 bp, Artificial Sequence
  Synthetic oligonucleotide
gtgcaactttgttttagaaataaactgcgc

SEQ ID NO: 112134 - DNA, 30 bp, Artificial Sequence
  Synthetic oligonucleotide
agaagatcgagatatgggaaacgtctgcgc

SEQ ID NO: 112135 - DNA, 30 bp, Artificial Sequence
  Synthetic oligonucleotide
gcacgtgggttttagaatgctcccgtgcgc

SEQ ID NO: 112136 - DNA, 30 bp, Artificial Sequence
  Synthetic oligonucleotide
tatgggtgatgatcagcaaatcgggtgcgc

SEQ ID NO: 112137 - DNA, 30 bp, Artificial Sequence
  Synthetic oligonucleotide
tatcgaccaaggacccctgttatcttgcgc

SEQ ID NO: 112138 - DNA, 30 bp, Artificial Sequence
  Synthetic oligonucleotide
taagaaaaaagtcactctagtgagttgcgc

SEQ ID NO: 112139 - DNA, 30 bp, Artificial Sequence
  Synthetic oligonucleotide
aaagaggaagttcggtgttcgggaaatcgc

SEQ ID NO: 112140 - DNA, 30 bp, Artificial Sequence
  Synthetic oligonucleotide
ggttatggcgggccacacgcctcgaatcgc

SEQ ID NO: 112141 - DNA, 30 bp, Artificial Sequence
  Synthetic oligonucleotide
tgatgaatgggtgaattagagttgcatcgc

SEQ ID NO: 112142 - DNA, 30 bp, Artificial Sequence
  Synthetic oligonucleotide
ggtcggggctcccttccggcagaagatcgc

SEQ ID NO: 112143 - DNA, 30 bp, Artificial Sequence
  Synthetic oligonucleotide
actaatggaggtaggttgggtttagatcgc

SEQ ID NO: 112144 - DNA, 30 bp, Artificial Sequence
  Synthetic oligonucleotide
aagacaggaacaccgtgattggaggatcgc

SEQ ID NO: 112145 - DNA, 30 bp, Artificial Sequence
  Synthetic oligonucleotide
agtggatttggtcctagttcatcgtatcgc

SEQ ID NO: 112146 - DNA, 30 bp, Artificial Sequence
  Synthetic oligonucleotide
aggtatattcgatggtcagtgccgcctcgc

SEQ ID NO: 112147 - DNA, 30 bp, Artificial Sequence
  Synthetic oligonucleotide
tcgaccctatcggattggcgaaactctcgc

SEQ ID NO: 112148 - DNA, 30 bp, Artificial Sequence
  Synthetic oligonucleotide
cacggtcggtatgaccggagcatctctcgc

SEQ ID NO: 112149 - DNA, 30 bp, Artificial Sequence
  Synthetic oligonucleotide
ttatctggatcctggaactgtcagagtcgc

SEQ ID NO: 112150 - DNA, 30 bp, Artificial Sequence
  Synthetic oligonucleotide
gaccgtctgcaagttgtagataaaggtcgc

SEQ ID NO: 112151 - DNA, 30 bp, Artificial Sequence
  Synthetic oligonucleotide
cgtcagaccacacaggcggaaaaatgtcgc

SEQ ID NO: 112152 - DNA, 30 bp, Artificial Sequence
  Synthetic oligonucleotide
cccaactcgctgtacatagccgactgtcgc

SEQ ID NO: 112153 - DNA, 30 bp, Artificial Sequence
  Synthetic oligonucleotide
cctacaatttgaggaaagtacttgtgtcgc

SEQ ID NO: 112154 - DNA, 30 bp, Artificial Sequence
  Synthetic oligonucleotide
agccagccgtcagtttaaagcacgattcgc

SEQ ID NO: 112155 - DNA, 30 bp, Artificial Sequence
  Synthetic oligonucleotide
cactcacttgggcgacaagaagtgattcgc

SEQ ID NO: 112156 - DNA, 30 bp, Artificial Sequence
  Synthetic oligonucleotide
tgttaatgagggttaagcactcaacttcgc

SEQ ID NO: 112157 - DNA, 30 bp, Artificial Sequence
  Synthetic oligonucleotide
ctgtgcgttcgggggcatcactggcttcgc

SEQ ID NO: 112158 - DNA, 30 bp, Artificial Sequence
  Synthetic oligonucleotide
gggcaccgtggcgagccggttaaatttcgc

SEQ ID NO: 112159 - DNA, 30 bp, Artificial Sequence
  Synthetic oligonucleotide
tcgggccaaactacgttaggcgagtttcgc

SEQ ID NO: 112160 - DNA, 30 bp, Artificial Sequence
  Synthetic oligonucleotide
ggcgcccggtcgtctaataagctaaaaggc

SEQ ID NO: 112161 - DNA, 30 bp, Artificial Sequence
  Synthetic oligonucleotide
acttagaacacaggggagtacgtcaaaggc

SEQ ID NO: 112162 - DNA, 30 bp, Artificial Sequence
  Synthetic oligonucleotide
agtgtatgatgactcaaccgtgataaaggc

SEQ ID NO: 112163 - DNA, 30 bp, Artificial Sequence
  Synthetic oligonucleotide
gagcatgttagatttaaatgcgtgcaaggc

SEQ ID NO: 112164 - DNA, 30 bp, Artificial Sequence
  Synthetic oligonucleotide
aggaagacgtggtagaagtaaggtcaaggc

SEQ ID NO: 112165 - DNA, 30 bp, Artificial Sequence
  Synthetic oligonucleotide
gttatcatgggaatacagcaacccgaaggc

SEQ ID NO: 112166 - DNA, 30 bp, Artificial Sequence
  Synthetic oligonucleotide
ggcgtgacctcccgaccaacgcccgaaggc

SEQ ID NO: 112167 - DNA, 30 bp, Artificial Sequence
  Synthetic oligonucleotide
atccgcaaccactagctgataccctaaggc

SEQ ID NO: 112168 - DNA, 30 bp, Artificial Sequence
  Synthetic oligonucleotide
gtaggtggagttacctgtacgagttaaggc

SEQ ID NO: 112169 - DNA, 30 bp, Artificial Sequence
  Synthetic oligonucleotide
tctcgctacgcatttatgaacgaaacaggc

SEQ ID NO: 112170 - DNA, 30 bp, Artificial Sequence
  Synthetic oligonucleotide
ggttcagcacgcaaaacactttaaacaggc

SEQ ID NO: 112171 - DNA, 30 bp, Artificial Sequence
  Synthetic oligonucleotide
gagccgaatccattaatcagtttcacaggc

SEQ ID NO: 112172 - DNA, 30 bp, Artificial Sequence
  Synthetic oligonucleotide
cctaaaggtggttcgaggcatgctccaggc

SEQ ID NO: 112173 - DNA, 30 bp, Artificial Sequence
  Synthetic oligonucleotide
gtgtgaggcaatgtggcgtccggagcaggc

SEQ ID NO: 112174 - DNA, 30 bp, Artificial Sequence
  Synthetic oligonucleotide
tgactatcatggccgtgtagagaggcaggc

SEQ ID NO: 112175 - DNA, 30 bp, Artificial Sequence
  Synthetic oligonucleotide
agaactgataccctattctatatggcaggc

SEQ ID NO: 112176 - DNA, 29 bp, Artificial Sequence
  Synthetic oligonucleotide
agagttaggcttcaacgatcagtgcaggc

SEQ ID NO: 112177 - DNA, 30 bp, Artificial Sequence
  Synthetic oligonucleotide
gcctaacccgtggaaacgtcgatatcaggc

SEQ ID NO: 112178 - DNA, 30 bp, Artificial Sequence
  Synthetic oligonucleotide
accgcgggtcccgtgtcatagtggagaggc

SEQ ID NO: 112179 - DNA, 30 bp, Artificial Sequence
  Synthetic oligonucleotide
ataggtatgtgaaaatcaagcgtgagaggc

SEQ ID NO: 112180 - DNA, 30 bp, Artificial Sequence
  Synthetic oligonucleotide
aggagactatctcaaaacaagccgcgaggc

SEQ ID NO: 112181 - DNA, 30 bp, Artificial Sequence
  Synthetic oligonucleotide
tggcggggggcggtatcaggagtcggaggc

SEQ ID NO: 112182 - DNA, 30 bp, Artificial Sequence
  Synthetic oligonucleotide
gtggacagtaggcatgatagaacgggaggc

SEQ ID NO: 112183 - DNA, 30 bp, Artificial Sequence
  Synthetic oligonucleotide
gtgtggctactggtgctgtcataatgaggc

SEQ ID NO: 112184 - DNA, 30 bp, Artificial Sequence
  Synthetic oligonucleotide
aacgatactgcgtagtactataccataggc

SEQ ID NO: 112185 - DNA, 30 bp, Artificial Sequence
  Synthetic oligonucleotide
cgagggtaacatagcaagttctagataggc

SEQ ID NO: 112186 - DNA, 30 bp, Artificial Sequence
  Synthetic oligonucleotide
tgcaaaatgtgtaagggcaatcgactaggc

SEQ ID NO: 112187 - DNA, 31 bp, Artificial Sequence
  Synthetic oligonucleotide
tcaagagctctctggaaacaaagatctaggc

SEQ ID NO: 112188 - DNA, 30 bp, Artificial Sequence
  Synthetic oligonucleotide
ccagtaccggtatagcatacgtgtctaggc

SEQ ID NO: 112189 - DNA, 30 bp, Artificial Sequence
  Synthetic oligonucleotide
caagggtctggagctggacgttgagtaggc

SEQ ID NO: 112190 - DNA, 30 bp, Artificial Sequence
  Synthetic oligonucleotide
ggaagctcattccgaactctcatcgtaggc

SEQ ID NO: 112191 - DNA, 30 bp, Artificial Sequence
  Synthetic oligonucleotide
cacaagagggaccccacggggcaattaggc

SEQ ID NO: 112192 - DNA, 30 bp, Artificial Sequence
  Synthetic oligonucleotide
tctaaaccaagctgcggtatggtattaggc

SEQ ID NO: 112193 - DNA, 30 bp, Artificial Sequence
  Synthetic oligonucleotide
tcgtctcgctaataagttccaggcttaggc

SEQ ID NO: 112194 - DNA, 30 bp, Artificial Sequence
  Synthetic oligonucleotide
cgtcgggtaaagaaaggagtattcttaggc

SEQ ID NO: 112195 - DNA, 30 bp, Artificial Sequence
  Synthetic oligonucleotide
tggcgcacgggaaggtgagtggtaaacggc

SEQ ID NO: 112196 - DNA, 30 bp, Artificial Sequence
  Synthetic oligonucleotide
ccgaagcccctcctgacaataattaacggc

SEQ ID NO: 112197 - DNA, 30 bp, Artificial Sequence
  Synthetic oligonucleotide
tggactagatacgcgatgggtggcaccggc

SEQ ID NO: 112198 - DNA, 30 bp, Artificial Sequence
  Synthetic oligonucleotide
ccaacgcacttctcgcggacataacccggc

SEQ ID NO: 112199 - DNA, 31 bp, Artificial Sequence
  Synthetic oligonucleotide
cggagggaatcatgtcatccggtatcccggc

SEQ ID NO: 112200 - DNA, 30 bp, Artificial Sequence
  Synthetic oligonucleotide
attcaaaataaacggtagggacttgccggc

SEQ ID NO: 112201 - DNA, 30 bp, Artificial Sequence
  Synthetic oligonucleotide
aataagaaacaaaaaatacagtgatccggc

SEQ ID NO: 112202 - DNA, 30 bp, Artificial Sequence
  Synthetic oligonucleotide
gatcaatacaacgagggttgcgcttccggc

SEQ ID NO: 112203 - DNA, 30 bp, Artificial Sequence
  Synthetic oligonucleotide
cactcagcattctgatgctcgggaagcggc

SEQ ID NO: 112204 - DNA, 30 bp, Artificial Sequence
  Synthetic oligonucleotide
cctttgtgccatacgtattgatatagcggc

SEQ ID NO: 112205 - DNA, 30 bp, Artificial Sequence
  Synthetic oligonucleotide
agaactaggctttcggtgggagtgggcggc

SEQ ID NO: 112206 - DNA, 30 bp, Artificial Sequence
  Synthetic oligonucleotide
ggagttcgggatacatcgtaaaccatcggc

SEQ ID NO: 112207 - DNA, 30 bp, Artificial Sequence
  Synthetic oligonucleotide
agtccgaagtttcaggtcgaatcgctcggc

SEQ ID NO: 112208 - DNA, 30 bp, Artificial Sequence
  Synthetic oligonucleotide
aggtcggttgcacggcgtgcatttctcggc

SEQ ID NO: 112209 - DNA, 30 bp, Artificial Sequence
  Synthetic oligonucleotide
cgttgatcaccggcggcaggtatgttcggc

SEQ ID NO: 112210 - DNA, 30 bp, Artificial Sequence
  Synthetic oligonucleotide
cgttcctagtcggaagcaagtaatttcggc

SEQ ID NO: 112211 - DNA, 30 bp, Artificial Sequence
  Synthetic oligonucleotide
atgcgttatgacctggggatgagtaagggc

SEQ ID NO: 112212 - DNA, 30 bp, Artificial Sequence
  Synthetic oligonucleotide
gcggacaagaggaacttagtgtaacagggc

SEQ ID NO: 112213 - DNA, 30 bp, Artificial Sequence
  Synthetic oligonucleotide
gcgcttcgtcggatcgtaaaggatgagggc

SEQ ID NO: 112214 - DNA, 30 bp, Artificial Sequence
  Synthetic oligonucleotide
ataaagatcgactcttcccttacatagggc

SEQ ID NO: 112215 - DNA, 30 bp, Artificial Sequence
  Synthetic oligonucleotide
agaaggcgacttgttaatatgtagtagggc

SEQ ID NO: 112216 - DNA, 30 bp, Artificial Sequence
  Synthetic oligonucleotide
ccgtgattcagaggtggaagcgcgtagggc

SEQ ID NO: 112217 - DNA, 30 bp, Artificial Sequence
  Synthetic oligonucleotide
ttatcctggcacagacccgtcgggtagggc

SEQ ID NO: 112218 - DNA, 30 bp, Artificial Sequence
  Synthetic oligonucleotide
gggcgacattgtgtatcggtagaaacgggc

SEQ ID NO: 112219 - DNA, 30 bp, Artificial Sequence
  Synthetic oligonucleotide
catcgaaaaatatttaggacggtaacgggc

SEQ ID NO: 112220 - DNA, 30 bp, Artificial Sequence
  Synthetic oligonucleotide
ggctgcatgagtaagcagaaatccacgggc

SEQ ID NO: 112221 - DNA, 30 bp, Artificial Sequence
  Synthetic oligonucleotide
aggacataaagctgaggtgtctgcacgggc

SEQ ID NO: 112222 - DNA, 30 bp, Artificial Sequence
  Synthetic oligonucleotide
gatccggacgaacggtcgacaattacgggc

SEQ ID NO: 112223 - DNA, 30 bp, Artificial Sequence
  Synthetic oligonucleotide
agtatacgcttcgaatgcgcaggaccgggc

SEQ ID NO: 112224 - DNA, 30 bp, Artificial Sequence
  Synthetic oligonucleotide
ccgggtctcacagatagcagattagcgggc

SEQ ID NO: 112225 - DNA, 30 bp, Artificial Sequence
  Synthetic oligonucleotide
ataatattcacgcacgctgagtaggcgggc

SEQ ID NO: 112226 - DNA, 30 bp, Artificial Sequence
  Synthetic oligonucleotide
cgccgtaattaactaaatattctgtcgggc

SEQ ID NO: 112227 - DNA, 30 bp, Artificial Sequence
  Synthetic oligonucleotide
cgagaaaggacgcgctggaaaggcaggggc

SEQ ID NO: 112228 - DNA, 30 bp, Artificial Sequence
  Synthetic oligonucleotide
tacaaagatcatacgactgacctcaggggc

SEQ ID NO: 112229 - DNA, 30 bp, Artificial Sequence
  Synthetic oligonucleotide
aaggttcatagcggggtgcgataagggggc

SEQ ID NO: 112230 - DNA, 30 bp, Artificial Sequence
  Synthetic oligonucleotide
gataaggccttcgaactctaggtagggggc

SEQ ID NO: 112231 - DNA, 30 bp, Artificial Sequence
  Synthetic oligonucleotide
agggatcgttagcaagactgagacgggggc

SEQ ID NO: 112232 - DNA, 30 bp, Artificial Sequence
  Synthetic oligonucleotide
aagtgggcaagtacctaggctacggggggc

SEQ ID NO: 112233 - DNA, 30 bp, Artificial Sequence
  Synthetic oligonucleotide
ggcttgctagttccgctaagtgttgggggc

SEQ ID NO: 112234 - DNA, 30 bp, Artificial Sequence
  Synthetic oligonucleotide
ccatgacaggggaacgctattttatggggc

SEQ ID NO: 112235 - DNA, 30 bp, Artificial Sequence
  Synthetic oligonucleotide
tacaggccggtcaacacaggttgaatgggc

SEQ ID NO: 112236 - DNA, 30 bp, Artificial Sequence
  Synthetic oligonucleotide
acaggattcatggaataaccttcgatgggc

SEQ ID NO: 112237 - DNA, 30 bp, Artificial Sequence
  Synthetic oligonucleotide
agtctagggcggccgtcagagaatatgggc

SEQ ID NO: 112238 - DNA, 30 bp, Artificial Sequence
  Synthetic oligonucleotide
agtgaggaggaagccttcaaatgtatgggc

SEQ ID NO: 112239 - DNA, 30 bp, Artificial Sequence
  Synthetic oligonucleotide
ttgtggattgttcccggaagttgattgggc

SEQ ID NO: 112240 - DNA, 30 bp, Artificial Sequence
  Synthetic oligonucleotide
agagcgctacttaggggcctccttttgggc

SEQ ID NO: 112241 - DNA, 30 bp, Artificial Sequence
  Synthetic oligonucleotide
ccaagttcggggcaagagtacataaatggc

SEQ ID NO: 112242 - DNA, 30 bp, Artificial Sequence
  Synthetic oligonucleotide
tagggtgccaaaatttgaacccgccatggc

SEQ ID NO: 112243 - DNA, 30 bp, Artificial Sequence
  Synthetic oligonucleotide
ggaggcgaccaagaccagtacaaatatggc

SEQ ID NO: 112244 - DNA, 30 bp, Artificial Sequence
  Synthetic oligonucleotide
atgatacagtcacatttggaaaagtatggc

SEQ ID NO: 112245 - DNA, 30 bp, Artificial Sequence
  Synthetic oligonucleotide
atggaccccgcccccgaatgaacacctggc

SEQ ID NO: 112246 - DNA, 30 bp, Artificial Sequence
  Synthetic oligonucleotide
aggctgaggatgtatcatccgaaggctggc

SEQ ID NO: 112247 - DNA, 30 bp, Artificial Sequence
  Synthetic oligonucleotide
tgccaacagtgacggagacggaaggctggc

SEQ ID NO: 112248 - DNA, 30 bp, Artificial Sequence
  Synthetic oligonucleotide
atcacgggggtatcgggacgtcatgctggc

SEQ ID NO: 112249 - DNA, 30 bp, Artificial Sequence
  Synthetic oligonucleotide
caatggagactatcaatctgcgattctggc

SEQ ID NO: 112250 - DNA, 30 bp, Artificial Sequence
  Synthetic oligonucleotide
catgactgcgcgggacgggctattagtggc

SEQ ID NO: 112251 - DNA, 30 bp, Artificial Sequence
  Synthetic oligonucleotide
acacaagcatggtccgagcagctacgtggc

SEQ ID NO: 112252 - DNA, 30 bp, Artificial Sequence
  Synthetic oligonucleotide
tacggtatcttggtccagggaatgggtggc

SEQ ID NO: 112253 - DNA, 30 bp, Artificial Sequence
  Synthetic oligonucleotide
acgcccgaggatctccaaaaaatatgtggc

SEQ ID NO: 112254 - DNA, 30 bp, Artificial Sequence
  Synthetic oligonucleotide
atggataccttccgacccccagtttgtggc

SEQ ID NO: 112255 - DNA, 30 bp, Artificial Sequence
  Synthetic oligonucleotide
ggaatcgaagagacgtccaagcgaattggc

SEQ ID NO: 112256 - DNA, 30 bp, Artificial Sequence
  Synthetic oligonucleotide
ggcataacaagcatctccatcagtattggc

SEQ ID NO: 112257 - DNA, 30 bp, Artificial Sequence
  Synthetic oligonucleotide
cgggtagcgttacacttcaatctagttggc

SEQ ID NO: 112258 - DNA, 30 bp, Artificial Sequence
  Synthetic oligonucleotide
tcgagcaatagcaagacgacttaaaaatgc

SEQ ID NO: 112259 - DNA, 30 bp, Artificial Sequence
  Synthetic oligonucleotide
agaggtcggtggtggaatcaatagcaatgc

SEQ ID NO: 112260 - DNA, 30 bp, Artificial Sequence
  Synthetic oligonucleotide
tgggtagcacacccaactaaactgcaatgc

SEQ ID NO: 112261 - DNA, 31 bp, Artificial Sequence
  Synthetic oligonucleotide
aatctactatagacctaaagtgcgcgaatgc

SEQ ID NO: 112262 - DNA, 30 bp, Artificial Sequence
  Synthetic oligonucleotide
gccccacggatcaactgtgttatcgaatgc

SEQ ID NO: 112263 - DNA, 30 bp, Artificial Sequence
  Synthetic oligonucleotide
agtgtaatgcgtcagcggtattgataatgc

SEQ ID NO: 112264 - DNA, 30 bp, Artificial Sequence
  Synthetic oligonucleotide
taaacatataactacaactacatataatgc

SEQ ID NO: 112265 - DNA, 30 bp, Artificial Sequence
  Synthetic oligonucleotide
ggaaagagaagacttaaataattataatgc

SEQ ID NO: 112266 - DNA, 30 bp, Artificial Sequence
  Synthetic oligonucleotide
ctccgggacaaacaacaaacattctaatgc

SEQ ID NO: 112267 - DNA, 30 bp, Artificial Sequence
  Synthetic oligonucleotide
gccgcgccccaagcacaaggcggttaatgc

SEQ ID NO: 112268 - DNA, 30 bp, Artificial Sequence
  Synthetic oligonucleotide
caatgcggaccaaacacctatcacacatgc

SEQ ID NO: 112269 - DNA, 30 bp, Artificial Sequence
  Synthetic oligonucleotide
ggataccaatacctgatttcatacacatgc

SEQ ID NO: 112270 - DNA, 30 bp, Artificial Sequence
  Synthetic oligonucleotide
ctacgtgacggcaatctctagtgcacatgc

SEQ ID NO: 112271 - DNA, 30 bp, Artificial Sequence
  Synthetic oligonucleotide
gtcgaagacgcggggatggagtgaccatgc

SEQ ID NO: 112272 - DNA, 30 bp, Artificial Sequence
  Synthetic oligonucleotide
cacagattggaggactcggccagcccatgc

SEQ ID NO: 112273 - DNA, 30 bp, Artificial Sequence
  Synthetic oligonucleotide
agacacgacaccaccggcaaaaatgcatgc

SEQ ID NO: 112274 - DNA, 30 bp, Artificial Sequence
  Synthetic oligonucleotide
agcgatgtgacagtctgcgagtatgcatgc

SEQ ID NO: 112275 - DNA, 30 bp, Artificial Sequence
  Synthetic oligonucleotide
gggcgaggcccatttctcgcaactgcatgc

SEQ ID NO: 112276 - DNA, 30 bp, Artificial Sequence
  Synthetic oligonucleotide
gttgtagatcacgacacgattgtctcatgc

SEQ ID NO: 112277 - DNA, 29 bp, Artificial Sequence
  Synthetic oligonucleotide
cgccattcaggagtgagggtaccagatgc

SEQ ID NO: 112278 - DNA, 30 bp, Artificial Sequence
  Synthetic oligonucleotide
gctaagtatcttcatgacaatgggagatgc

SEQ ID NO: 112279 - DNA, 30 bp, Artificial Sequence
  Synthetic oligonucleotide
aagtggaaacatcacacactcgcacgatgc

SEQ ID NO: 112280 - DNA, 30 bp, Artificial Sequence
  Synthetic oligonucleotide
aatcgcaacttctagagcgaagaaggatgc

SEQ ID NO: 112281 - DNA, 30 bp, Artificial Sequence
  Synthetic oligonucleotide
caatgtgagcgcaaaggttgccggggatgc

SEQ ID NO: 112282 - DNA, 30 bp, Artificial Sequence
  Synthetic oligonucleotide
ggaaagtcgaatccaagtaagaaaatatgc

SEQ ID NO: 112283 - DNA, 30 bp, Artificial Sequence
  Synthetic oligonucleotide
gcatacgtgaagcaaaacagatacatatgc

SEQ ID NO: 112284 - DNA, 30 bp, Artificial Sequence
  Synthetic oligonucleotide
ggataattgtacactaagattatcctatgc

SEQ ID NO: 112285 - DNA, 30 bp, Artificial Sequence
  Synthetic oligonucleotide
gacattcacactcccaaagctcgggtatgc

SEQ ID NO: 112286 - DNA, 30 bp, Artificial Sequence
  Synthetic oligonucleotide
cgggagaagcgagaggggccgatgttatgc

SEQ ID NO: 112287 - DNA, 30 bp, Artificial Sequence
  Synthetic oligonucleotide
acggggtacgacagaaacagcagcaactgc

SEQ ID NO: 112288 - DNA, 30 bp, Artificial Sequence
  Synthetic oligonucleotide
tcaccagggcttatctcacaaattgactgc

SEQ ID NO: 112289 - DNA, 30 bp, Artificial Sequence
  Synthetic oligonucleotide
aagaccaacgggaggaccccccactactgc

SEQ ID NO: 112290 - DNA, 30 bp, Artificial Sequence
  Synthetic oligonucleotide
gtagataccaataccccaatgcactactgc

SEQ ID NO: 112291 - DNA, 30 bp, Artificial Sequence
  Synthetic oligonucleotide
tggttcggaattcttatcagtacctactgc

SEQ ID NO: 112292 - DNA, 30 bp, Artificial Sequence
  Synthetic oligonucleotide
aagtcgcacggtcaatctctcaagtactgc

SEQ ID NO: 112293 - DNA, 30 bp, Artificial Sequence
  Synthetic oligonucleotide
cggatcactgggtaacggcgttagtactgc

SEQ ID NO: 112294 - DNA, 30 bp, Artificial Sequence
  Synthetic oligonucleotide
tgcaacgtggcgggacagtggcacccctgc

SEQ ID NO: 112295 - DNA, 30 bp, Artificial Sequence
  Synthetic oligonucleotide
ggtcgtcgttgtagggaaaggtacgcctgc

SEQ ID NO: 112296 - DNA, 30 bp, Artificial Sequence
  Synthetic oligonucleotide
taccgggaaagcatacaccgcttggcctgc

SEQ ID NO: 112297 - DNA, 30 bp, Artificial Sequence
  Synthetic oligonucleotide
aggatgccccgtggatggtacctcagctgc

SEQ ID NO: 112298 - DNA, 30 bp, Artificial Sequence
  Synthetic oligonucleotide
cgtggcaatctcaagtatagaccgggctgc

SEQ ID NO: 112299 - DNA, 30 bp, Artificial Sequence
  Synthetic oligonucleotide
tacaaccaaacggacctagaatacatctgc

SEQ ID NO: 112300 - DNA, 30 bp, Artificial Sequence
  Synthetic oligonucleotide
tctcagccatagtgtttaagatcgatctgc

SEQ ID NO: 112301 - DNA, 30 bp, Artificial Sequence
  Synthetic oligonucleotide
atgtgattacgacccctatcgaatatctgc

SEQ ID NO: 112302 - DNA, 30 bp, Artificial Sequence
  Synthetic oligonucleotide
cgactagtggtatattcttgatccgtctgc

SEQ ID NO: 112303 - DNA, 30 bp, Artificial Sequence
  Synthetic oligonucleotide
gccgtgacgtcatatgcaagagaggtctgc

SEQ ID NO: 112304 - DNA, 30 bp, Artificial Sequence
  Synthetic oligonucleotide
taatgagacatgagggcctgttcggtctgc

SEQ ID NO: 112305 - DNA, 30 bp, Artificial Sequence
  Synthetic oligonucleotide
gctgtggggctaagttatgaacgggtctgc

SEQ ID NO: 112306 - DNA, 30 bp, Artificial Sequence
  Synthetic oligonucleotide
gcaatcaggggtgataacacgcgcaagtgc

SEQ ID NO: 112307 - DNA, 30 bp, Artificial Sequence
  Synthetic oligonucleotide
gcgaacctataactttgaacggttaagtgc

SEQ ID NO: 112308 - DNA, 30 bp, Artificial Sequence
  Synthetic oligonucleotide
tgtgtcgcaggaacaagatcttcccagtgc

SEQ ID NO: 112309 - DNA, 30 bp, Artificial Sequence
  Synthetic oligonucleotide
ccgtataactttttgtaaaagatccagtgc

SEQ ID NO: 112310 - DNA, 30 bp, Artificial Sequence
  Synthetic oligonucleotide
cttagaaggacagactcacaaatgcagtgc

SEQ ID NO: 112311 - DNA, 30 bp, Artificial Sequence
  Synthetic oligonucleotide
cggagcgttcataagtaaactgaagagtgc

SEQ ID NO: 112312 - DNA, 30 bp, Artificial Sequence
  Synthetic oligonucleotide
aggtaatagccacatattgcagacgagtgc

SEQ ID NO: 112313 - DNA, 30 bp, Artificial Sequence
  Synthetic oligonucleotide
ggggtaggaagaaaaatgaactcatagtgc

SEQ ID NO: 112314 - DNA, 30 bp, Artificial Sequence
  Synthetic oligonucleotide
tacggttgtctccaaagtatcaaaacgtgc

SEQ ID NO: 112315 - DNA, 30 bp, Artificial Sequence
  Synthetic oligonucleotide
ccctctaaacggtgtcgtaatcttacgtgc

SEQ ID NO: 112316 - DNA, 30 bp, Artificial Sequence
  Synthetic oligonucleotide
agagttcaagagcgatagttttgcccgtgc

SEQ ID NO: 112317 - DNA, 30 bp, Artificial Sequence
  Synthetic oligonucleotide
cacagtgaggctatgaaactcacagcgtgc

SEQ ID NO: 112318 - DNA, 30 bp, Artificial Sequence
  Synthetic oligonucleotide
ggtcactcgcaccgtttgttcctagcgtgc

SEQ ID NO: 112319 - DNA, 30 bp, Artificial Sequence
  Synthetic oligonucleotide
gggtagcttaacatggtcattgatgcgtgc

SEQ ID NO: 112320 - DNA, 30 bp, Artificial Sequence
  Synthetic oligonucleotide
ttcagggaaagttagtggttgggtgcgtgc

SEQ ID NO: 112321 - DNA, 30 bp, Artificial Sequence
  Synthetic oligonucleotide
cgcgatgctctgggacagatgctatcgtgc

SEQ ID NO: 112322 - DNA, 30 bp, Artificial Sequence
  Synthetic oligonucleotide
gtcgattgtcaatgcaacgtggcctcgtgc

SEQ ID NO: 112323 - DNA, 30 bp, Artificial Sequence
  Synthetic oligonucleotide
agctctggcggttgtggcgacatctcgtgc

SEQ ID NO: 112324 - DNA, 30 bp, Artificial Sequence
  Synthetic oligonucleotide
ccggatggtttggtatcggatgtgtcgtgc

SEQ ID NO: 112325 - DNA, 30 bp, Artificial Sequence
  Synthetic oligonucleotide
ggttacagtaacttaatgacactaaggtgc

SEQ ID NO: 112326 - DNA, 30 bp, Artificial Sequence
  Synthetic oligonucleotide
caataagcagtggattgggcggacaggtgc

SEQ ID NO: 112327 - DNA, 30 bp, Artificial Sequence
  Synthetic oligonucleotide
cgtagtcttgggccggggaacacgaggtgc

SEQ ID NO: 112328 - DNA, 30 bp, Artificial Sequence
  Synthetic oligonucleotide
taagaaagtgatgatcaacgggtgaggtgc

SEQ ID NO: 112329 - DNA, 30 bp, Artificial Sequence
  Synthetic oligonucleotide
gcattcaaggcgtgcggatgtcgacggtgc

SEQ ID NO: 112330 - DNA, 30 bp, Artificial Sequence
  Synthetic oligonucleotide
aagtgagtctattctatttcatgccggtgc

SEQ ID NO: 112331 - DNA, 30 bp, Artificial Sequence
  Synthetic oligonucleotide
ggatgcaacttgccatgagacgggcggtgc

SEQ ID NO: 112332 - DNA, 30 bp, Artificial Sequence
  Synthetic oligonucleotide
caagatcagggcattacacatcaagggtgc

SEQ ID NO: 112333 - DNA, 30 bp, Artificial Sequence
  Synthetic oligonucleotide
ggtgagctgtaagtcaacgccgcagggtgc

SEQ ID NO: 112334 - DNA, 30 bp, Artificial Sequence
  Synthetic oligonucleotide
aaaagtatagcatgagatagaccggggtgc

SEQ ID NO: 112335 - DNA, 30 bp, Artificial Sequence
  Synthetic oligonucleotide
ggagtgactcgcgaacagatgagatggtgc

SEQ ID NO: 112336 - DNA, 30 bp, Artificial Sequence
  Synthetic oligonucleotide
caggcccgcggagaagtgagggggtggtgc

SEQ ID NO: 112337 - DNA, 30 bp, Artificial Sequence
  Synthetic oligonucleotide
acgacttcgtcatagcatgcgtaaatgtgc

SEQ ID NO: 112338 - DNA, 30 bp, Artificial Sequence
  Synthetic oligonucleotide
gcagtgccatttaagattaatgtgatgtgc

SEQ ID NO: 112339 - DNA, 30 bp, Artificial Sequence
  Synthetic oligonucleotide
aacccaacggtaccgatcgctaagctgtgc

SEQ ID NO: 112340 - DNA, 30 bp, Artificial Sequence
  Synthetic oligonucleotide
tcgggaacaagtatttaaaggtgagtgtgc

SEQ ID NO: 112341 - DNA, 30 bp, Artificial Sequence
  Synthetic oligonucleotide
ccggcggaagggtggagctagcacgtgtgc

SEQ ID NO: 112342 - DNA, 30 bp, Artificial Sequence
  Synthetic oligonucleotide
gccagtagtccataatccaagtccgtgtgc

SEQ ID NO: 112343 - DNA, 30 bp, Artificial Sequence
  Synthetic oligonucleotide
tggagccagtcaggcagggggttaaattgc

SEQ ID NO: 112344 - DNA, 30 bp, Artificial Sequence
  Synthetic oligonucleotide
atcgccctaggaaaagcacttccacattgc

SEQ ID NO: 112345 - DNA, 30 bp, Artificial Sequence
  Synthetic oligonucleotide
cctgacaactcggcccgacttccacattgc

SEQ ID NO: 112346 - DNA, 30 bp, Artificial Sequence
  Synthetic oligonucleotide
aagcgagggcacaggaaaaggcccgattgc

SEQ ID NO: 112347 - DNA, 30 bp, Artificial Sequence
  Synthetic oligonucleotide
aacagtcggtgagatactttaccaacttgc

SEQ ID NO: 112348 - DNA, 30 bp, Artificial Sequence
  Synthetic oligonucleotide
aggatcggctcacagattccaaacacttgc

SEQ ID NO: 112349 - DNA, 30 bp, Artificial Sequence
  Synthetic oligonucleotide
gtcaaggtgttactctcgccaagtacttgc

SEQ ID NO: 112350 - DNA, 30 bp, Artificial Sequence
  Synthetic oligonucleotide
caaaggacgagggggtcgttgaagccttgc

SEQ ID NO: 112351 - DNA, 30 bp, Artificial Sequence
  Synthetic oligonucleotide
acgacactacaaggtttgcgccggccttgc

SEQ ID NO: 112352 - DNA, 30 bp, Artificial Sequence
  Synthetic oligonucleotide
gcgatagagagctcgaaattcaaatcttgc

SEQ ID NO: 112353 - DNA, 30 bp, Artificial Sequence
  Synthetic oligonucleotide
ccggggctaggaaaagatgatccttcttgc

SEQ ID NO: 112354 - DNA, 30 bp, Artificial Sequence
  Synthetic oligonucleotide
cttctggggaagaatagaggtaaaagttgc

SEQ ID NO: 112355 - DNA, 30 bp, Artificial Sequence
  Synthetic oligonucleotide
gttcgcaatggatgaaggtccaatagttgc

SEQ ID NO: 112356 - DNA, 30 bp, Artificial Sequence
  Synthetic oligonucleotide
agctatggcggagaccgtcataatggttgc

SEQ ID NO: 112357 - DNA, 30 bp, Artificial Sequence
  Synthetic oligonucleotide
tgattctgaatgtaaagggcagcttgttgc

SEQ ID NO: 112358 - DNA, 30 bp, Artificial Sequence
  Synthetic oligonucleotide
gacccgactcgatataacggctcgctttgc

SEQ ID NO: 112359 - DNA, 30 bp, Artificial Sequence
  Synthetic oligonucleotide
tggagctcggctacaactatataagtttgc

SEQ ID NO: 112360 - DNA, 30 bp, Artificial Sequence
  Synthetic oligonucleotide
ccagcgggaggaaggcgctgatgccaaatc

SEQ ID NO: 112361 - DNA, 30 bp, Artificial Sequence
  Synthetic oligonucleotide
ctagagctgacaaacggaacttatgaaatc

SEQ ID NO: 112362 - DNA, 30 bp, Artificial Sequence
  Synthetic oligonucleotide
gaatggtggtatgaaaagactgactaaatc

SEQ ID NO: 112363 - DNA, 30 bp, Artificial Sequence
  Synthetic oligonucleotide
catgaggtctaagtatccaggaattaaatc

SEQ ID NO: 112364 - DNA, 30 bp, Artificial Sequence
  Synthetic oligonucleotide
ggccgtgcatagcatgcgaagaacacaatc

SEQ ID NO: 112365 - DNA, 30 bp, Artificial Sequence
  Synthetic oligonucleotide
aaaaagatgtgcgaaccactgcccacaatc

SEQ ID NO: 112366 - DNA, 30 bp, Artificial Sequence
  Synthetic oligonucleotide
ccaccgtttaggatggacaggcgagcaatc

SEQ ID NO: 112367 - DNA, 30 bp, Artificial Sequence
  Synthetic oligonucleotide
cagtggtacgggaggatattcaacgcaatc

SEQ ID NO: 112368 - DNA, 30 bp, Artificial Sequence
  Synthetic oligonucleotide
atagatggaccatcccgccatccgtcaatc

SEQ ID NO: 112369 - DNA, 30 bp, Artificial Sequence
  Synthetic oligonucleotide
agcggatgcaggacaatgagccggtcaatc

SEQ ID NO: 112370 - DNA, 30 bp, Artificial Sequence
  Synthetic oligonucleotide
gggaccatttattgtgaaatccagagaatc

SEQ ID NO: 112371 - DNA, 30 bp, Artificial Sequence
  Synthetic oligonucleotide
ataactaatcatacgtgagtggctagaatc

SEQ ID NO: 112372 - DNA, 30 bp, Artificial Sequence
  Synthetic oligonucleotide
gcaggagcaactcgcttgctgggtagaatc

SEQ ID NO: 112373 - DNA, 30 bp, Artificial Sequence
  Synthetic oligonucleotide
cttaccatcagaataatctaaacacgaatc

SEQ ID NO: 112374 - DNA, 30 bp, Artificial Sequence
  Synthetic oligonucleotide
agatgccaagaaacagagcctggccgaatc

SEQ ID NO: 112375 - DNA, 30 bp, Artificial Sequence
  Synthetic oligonucleotide
agccaagataccctacgaataatgcgaatc

SEQ ID NO: 112376 - DNA, 30 bp, Artificial Sequence
  Synthetic oligonucleotide
attcagtgggagtagtggagcaaaggaatc

SEQ ID NO: 112377 - DNA, 30 bp, Artificial Sequence
  Synthetic oligonucleotide
cagcactagaagtctctcgaagccggaatc

SEQ ID NO: 112378 - DNA, 30 bp, Artificial Sequence
  Synthetic oligonucleotide
ctagccaactaatctacactcatgggaatc

SEQ ID NO: 112379 - DNA, 30 bp, Artificial Sequence
  Synthetic oligonucleotide
gtaacattttcacgaggggatgtgggaatc

SEQ ID NO: 112380 - DNA, 30 bp, Artificial Sequence
  Synthetic oligonucleotide
aggggtcactgcccggaacgttgatgaatc

SEQ ID NO: 112381 - DNA, 30 bp, Artificial Sequence
  Synthetic oligonucleotide
tttggaatatccaaagaatgctactgaatc

SEQ ID NO: 112382 - DNA, 30 bp, Artificial Sequence
  Synthetic oligonucleotide
gtgaacggagtacgtcataccacctgaatc

SEQ ID NO: 112383 - DNA, 30 bp, Artificial Sequence
  Synthetic oligonucleotide
gcgctgtgtgtcgttcacggggcctgaatc

SEQ ID NO: 112384 - DNA, 30 bp, Artificial Sequence
  Synthetic oligonucleotide
tccagagatagtgcatcgtaaggctgaatc

SEQ ID NO: 112385 - DNA, 30 bp, Artificial Sequence
  Synthetic oligonucleotide
aaacaaagatttggtagtaagttctgaatc

SEQ ID NO: 112386 - DNA, 30 bp, Artificial Sequence
  Synthetic oligonucleotide
tactaacagggatgccagacagcgtgaatc

SEQ ID NO: 112387 - DNA, 30 bp, Artificial Sequence
  Synthetic oligonucleotide
tggtcgcgcgcgaaggtatccgtttgaatc

SEQ ID NO: 112388 - DNA, 30 bp, Artificial Sequence
  Synthetic oligonucleotide
aacacgcaaactcctggctcccggataatc

SEQ ID NO: 112389 - DNA, 31 bp, Artificial Sequence
  Synthetic oligonucleotide
tcttagttgcggagtctgtctagacctaatc

SEQ ID NO: 112390 - DNA, 30 bp, Artificial Sequence
  Synthetic oligonucleotide
tcactcccaacagttggtgtcaagctaatc

SEQ ID NO: 112391 - DNA, 30 bp, Artificial Sequence
  Synthetic oligonucleotide
catctatccatgaacttaacagctctaatc

SEQ ID NO: 112392 - DNA, 30 bp, Artificial Sequence
  Synthetic oligonucleotide
cgaatcgaggttgtagaatgtggtctaatc

SEQ ID NO: 112393 - DNA, 30 bp, Artificial Sequence
  Synthetic oligonucleotide
aaacgtggccaaagaggttggtggttaatc

SEQ ID NO: 112394 - DNA, 30 bp, Artificial Sequence
  Synthetic oligonucleotide
ggagtacggtaacacgccgacggaaacatc

SEQ ID NO: 112395 - DNA, 30 bp, Artificial Sequence
  Synthetic oligonucleotide
ggccagacaaagtgactatgtttgcacatc

SEQ ID NO: 112396 - DNA, 30 bp, Artificial Sequence
  Synthetic oligonucleotide
cgaaaagctgtggacgctcacgtagacatc

SEQ ID NO: 112397 - DNA, 30 bp, Artificial Sequence
  Synthetic oligonucleotide
ctacgattcacctttaacgaggacgacatc

SEQ ID NO: 112398 - DNA, 30 bp, Artificial Sequence
  Synthetic oligonucleotide
atgaacagtccattgatagaaggcgacatc

SEQ ID NO: 112399 - DNA, 30 bp, Artificial Sequence
  Synthetic oligonucleotide
tacttgaaaatagcccaggcgtcatacatc

SEQ ID NO: 112400 - DNA, 30 bp, Artificial Sequence
  Synthetic oligonucleotide
gtatacagcgcatgaaaccaccgatacatc

SEQ ID NO: 112401 - DNA, 30 bp, Artificial Sequence
  Synthetic oligonucleotide
ctgggtcagagcgaagccttagtatacatc

SEQ ID NO: 112402 - DNA, 30 bp, Artificial Sequence
  Synthetic oligonucleotide
cggaacgtacttattaaccggtattacatc

SEQ ID NO: 112403 - DNA, 30 bp, Artificial Sequence
  Synthetic oligonucleotide
gggtcgcaaagtatcgcttaatacaccatc

SEQ ID NO: 112404 - DNA, 30 bp, Artificial Sequence
  Synthetic oligonucleotide
ccgcacgacctagcagaataagcacccatc

SEQ ID NO: 112405 - DNA, 30 bp, Artificial Sequence
  Synthetic oligonucleotide
cgcacttaaggggcataagaacagcccatc

SEQ ID NO: 112406 - DNA, 30 bp, Artificial Sequence
  Synthetic oligonucleotide
acggtctcagcaagtaaagaagctcccatc

SEQ ID NO: 112407 - DNA, 30 bp, Artificial Sequence
  Synthetic oligonucleotide
tggccagagcgatcgagaatggacgccatc

SEQ ID NO: 112408 - DNA, 30 bp, Artificial Sequence
  Synthetic oligonucleotide
tatacctgcagcatacaaacgagtgccatc

SEQ ID NO: 112409 - DNA, 30 bp, Artificial Sequence
  Synthetic oligonucleotide
ttgtcacaccgcacaatccgtgcctccatc

SEQ ID NO: 112410 - DNA, 30 bp, Artificial Sequence
  Synthetic oligonucleotide
tggcgaaactggttcagcttttgaagcatc

SEQ ID NO: 112411 - DNA, 30 bp, Artificial Sequence
  Synthetic oligonucleotide
tgggtagggccaggttaaatagaacgcatc

SEQ ID NO: 112412 - DNA, 30 bp, Artificial Sequence
  Synthetic oligonucleotide
aatcgacgtgcgcgagtgagtgtacgcatc

SEQ ID NO: 112413 - DNA, 30 bp, Artificial Sequence
  Synthetic oligonucleotide
cgagtcaaacactgaacaagatgtggcatc

SEQ ID NO: 112414 - DNA, 30 bp, Artificial Sequence
  Synthetic oligonucleotide
tgtcaggtgtaccctgaacaaatttgcatc

SEQ ID NO: 112415 - DNA, 30 bp, Artificial Sequence
  Synthetic oligonucleotide
cggtgaacccatggtgggtctgtcatcatc

SEQ ID NO: 112416 - DNA, 30 bp, Artificial Sequence
  Synthetic oligonucleotide
cacctgcacaaacccacaccctcagtcatc

SEQ ID NO: 112417 - DNA, 30 bp, Artificial Sequence
  Synthetic oligonucleotide
cagcaataatgttagtgacactagttcatc

SEQ ID NO: 112418 - DNA, 30 bp, Artificial Sequence
  Synthetic oligonucleotide
cgggcactaacttcccagtatgaaaagatc

SEQ ID NO: 112419 - DNA, 30 bp, Artificial Sequence
  Synthetic oligonucleotide
cctagggatatgtactggaatggaaagatc

SEQ ID NO: 112420 - DNA, 30 bp, Artificial Sequence
  Synthetic oligonucleotide
gaataacaacagtatacttccgtaaagatc

SEQ ID NO: 112421 - DNA, 30 bp, Artificial Sequence
  Synthetic oligonucleotide
gaattggcaacgagaactaacgccaagatc

SEQ ID NO: 112422 - DNA, 30 bp, Artificial Sequence
  Synthetic oligonucleotide
gaacaaaaaagtgagagtgtggccaagatc

SEQ ID NO: 112423 - DNA, 30 bp, Artificial Sequence
  Synthetic oligonucleotide
gagatcggtctacgactcacactgaagatc

SEQ ID NO: 112424 - DNA, 30 bp, Artificial Sequence
  Synthetic oligonucleotide
gctaagaacaacaggctgccgtctaagatc

SEQ ID NO: 112425 - DNA, 30 bp, Artificial Sequence
  Synthetic oligonucleotide
atgttactagatttgtcacaatagcagatc

SEQ ID NO: 112426 - DNA, 30 bp, Artificial Sequence
  Synthetic oligonucleotide
tagaaactcacgaatcgcaagacagagatc

SEQ ID NO: 112427 - DNA, 30 bp, Artificial Sequence
  Synthetic oligonucleotide
tagggcttaatgcttcggatggattagatc

SEQ ID NO: 112428 - DNA, 30 bp, Artificial Sequence
  Synthetic oligonucleotide
tcagatagtgaactacgtaagaacccgatc

SEQ ID NO: 112429 - DNA, 30 bp, Artificial Sequence
  Synthetic oligonucleotide
tcggtgtcccgattagcacaaacagcgatc

SEQ ID NO: 112430 - DNA, 30 bp, Artificial Sequence
  Synthetic oligonucleotide
aacgaaggtaatcagtgctctatggcgatc

SEQ ID NO: 112431 - DNA, 30 bp, Artificial Sequence
  Synthetic oligonucleotide
ggaagcatggctcagaggattgtgtcgatc

SEQ ID NO: 112432 - DNA, 30 bp, Artificial Sequence
  Synthetic oligonucleotide
ggacgtatatgaaggcattgtaaacggatc

SEQ ID NO: 112433 - DNA, 30 bp, Artificial Sequence
  Synthetic oligonucleotide
tcccggtgtaatatataaggagaacggatc

SEQ ID NO: 112434 - DNA, 30 bp, Artificial Sequence
  Synthetic oligonucleotide
tgtgcaaccaacagagccggggaacggatc

SEQ ID NO: 112435 - DNA, 30 bp, Artificial Sequence
  Synthetic oligonucleotide
ggcgggaaatggggccgaaaaagccggatc

SEQ ID NO: 112436 - DNA, 30 bp, Artificial Sequence
  Synthetic oligonucleotide
aggtcggacgtgacaagttcgacgcggatc

SEQ ID NO: 112437 - DNA, 30 bp, Artificial Sequence
  Synthetic oligonucleotide
atggacaacacgatcccctacatgcggatc

SEQ ID NO: 112438 - DNA, 30 bp, Artificial Sequence
  Synthetic oligonucleotide
agaaggaaaccagcgttctcgttgcggatc

SEQ ID NO: 112439 - DNA, 30 bp, Artificial Sequence
  Synthetic oligonucleotide
ggaagggaggatcaactttcgcaagggatc

SEQ ID NO: 112440 - DNA, 30 bp, Artificial Sequence
  Synthetic oligonucleotide
ggattaaccgcctcacctaagccagggatc

SEQ ID NO: 112441 - DNA, 30 bp, Artificial Sequence
  Synthetic oligonucleotide
agctagctgcggggaacaagcacggggatc

SEQ ID NO: 112442 - DNA, 30 bp, Artificial Sequence
  Synthetic oligonucleotide
catgatacgtcattctgaataaagtggatc

SEQ ID NO: 112443 - DNA, 30 bp, Artificial Sequence
  Synthetic oligonucleotide
tacggcagtcaatttggccaccagtggatc

SEQ ID NO: 112444 - DNA, 30 bp, Artificial Sequence
  Synthetic oligonucleotide
aagatggagtccgtggacggaccgctgatc

SEQ ID NO: 112445 - DNA, 30 bp, Artificial Sequence
  Synthetic oligonucleotide
tgacactgcatatagtatttccggctgatc

SEQ ID NO: 112446 - DNA, 30 bp, Artificial Sequence
  Synthetic oligonucleotide
cagacgaaatggttcgggaagcaagtgatc

SEQ ID NO: 112447 - DNA, 30 bp, Artificial Sequence
  Synthetic oligonucleotide
atatgcgttgtatgcctctagtcagtgatc

SEQ ID NO: 112448 - DNA, 30 bp, Artificial Sequence
  Synthetic oligonucleotide
gtcgggatcccctcagtaattctagtgatc

SEQ ID NO: 112449 - DNA, 30 bp, Artificial Sequence
  Synthetic oligonucleotide
cgctacgtgactagggggataaacaatatc

SEQ ID NO: 112450 - DNA, 30 bp, Artificial Sequence
  Synthetic oligonucleotide
gcgatagggatagagtaaagaggacatatc

SEQ ID NO: 112451 - DNA, 30 bp, Artificial Sequence
  Synthetic oligonucleotide
tgccaacaattaaagtgccatccagatatc

SEQ ID NO: 112452 - DNA, 30 bp, Artificial Sequence
  Synthetic oligonucleotide
gcgaatatcaaacaccgtacattcgatatc

SEQ ID NO: 112453 - DNA, 30 bp, Artificial Sequence
  Synthetic oligonucleotide
tcggcaacggtatcattgacgattgatatc

SEQ ID NO: 112454 - DNA, 31 bp, Artificial Sequence
  Synthetic oligonucleotide
ataacactggttgggtagctacaaatatatc

SEQ ID NO: 112455 - DNA, 30 bp, Artificial Sequence
  Synthetic oligonucleotide
accattctagaccaaataactgcaactatc

SEQ ID NO: 112456 - DNA, 30 bp, Artificial Sequence
  Synthetic oligonucleotide
aggctgcttatccgtcatacaacgactatc

SEQ ID NO: 112457 - DNA, 30 bp, Artificial Sequence
  Synthetic oligonucleotide
taatgaacactatttccacttcctactatc

SEQ ID NO: 112458 - DNA, 30 bp, Artificial Sequence
  Synthetic oligonucleotide
ggcgaccttcgtcctgtaactccacctatc

SEQ ID NO: 112459 - DNA, 30 bp, Artificial Sequence
  Synthetic oligonucleotide
tcataatgtgaggccctaaaaactgctatc

SEQ ID NO: 112460 - DNA, 29 bp, Artificial Sequence
  Synthetic oligonucleotide
gacatggggacgctattgcgggtgctatc

SEQ ID NO: 112461 - DNA, 30 bp, Artificial Sequence
  Synthetic oligonucleotide
gtcactgactctcctactggatcgtctatc

SEQ ID NO: 112462 - DNA, 30 bp, Artificial Sequence
  Synthetic oligonucleotide
agcggacggagtacggctcatcgaagtatc

SEQ ID NO: 112463 - DNA, 30 bp, Artificial Sequence
  Synthetic oligonucleotide
caggagtccattaaattgaagctacgtatc

SEQ ID NO: 112464 - DNA, 30 bp, Artificial Sequence
  Synthetic oligonucleotide
gatcgtggaagagggtgcacctccggtatc

SEQ ID NO: 112465 - DNA, 30 bp, Artificial Sequence
  Synthetic oligonucleotide
gtcgagataaccacagccgcctgatgtatc

SEQ ID NO: 112466 - DNA, 30 bp, Artificial Sequence
  Synthetic oligonucleotide
tagggacggtgaaattgtagaacgtgtatc

SEQ ID NO: 112467 - DNA, 30 bp, Artificial Sequence
  Synthetic oligonucleotide
tgggtatcgaacacaatggccaattgtatc

SEQ ID NO: 112468 - DNA, 30 bp, Artificial Sequence
  Synthetic oligonucleotide
agcttcactaacggtcccagactgattatc

SEQ ID NO: 112469 - DNA, 30 bp, Artificial Sequence
  Synthetic oligonucleotide
ctagcccataactatcgtacaccgcttatc

SEQ ID NO: 112470 - DNA, 30 bp, Artificial Sequence
  Synthetic oligonucleotide
ccgtgagactcattgcgcaaaggcgttatc

SEQ ID NO: 112471 - DNA, 30 bp, Artificial Sequence
  Synthetic oligonucleotide
ccataagtcgatgtgggatggtgcgttatc

SEQ ID NO: 112472 - DNA, 30 bp, Artificial Sequence
  Synthetic oligonucleotide
ggagtagtgtaagcatactcgcaatttatc

SEQ ID NO: 112473 - DNA, 30 bp, Artificial Sequence
  Synthetic oligonucleotide
gcacacgtgaacgctagctcttaagaactc

SEQ ID NO: 112474 - DNA, 30 bp, Artificial Sequence
  Synthetic oligonucleotide
ccagaacggcgtatacggaatgaggaactc

SEQ ID NO: 112475 - DNA, 30 bp, Artificial Sequence
  Synthetic oligonucleotide
atgtgaattccacactgcgtcttaacactc

SEQ ID NO: 112476 - DNA, 30 bp, Artificial Sequence
  Synthetic oligonucleotide
ttgccgcacacgggcgggaatcatacactc

SEQ ID NO: 112477 - DNA, 30 bp, Artificial Sequence
  Synthetic oligonucleotide
cgttatgaggcaagggtctaatatacactc

SEQ ID NO: 112478 - DNA, 29 bp, Artificial Sequence
  Synthetic oligonucleotide
ggggcacagaaatcaaggctactccactc

SEQ ID NO: 112479 - DNA, 30 bp, Artificial Sequence
  Synthetic oligonucleotide
atgtctaatgcggtctcgaggattccactc

SEQ ID NO: 112480 - DNA, 30 bp, Artificial Sequence
  Synthetic oligonucleotide
acagacctatccgtcaacaaatggtcactc

SEQ ID NO: 112481 - DNA, 30 bp, Artificial Sequence
  Synthetic oligonucleotide
acgtgagttcaataaagtgagggttcactc

SEQ ID NO: 112482 - DNA, 30 bp, Artificial Sequence
  Synthetic oligonucleotide
tctaagattaaaggtgtgacagagggactc

SEQ ID NO: 112483 - DNA, 30 bp, Artificial Sequence
  Synthetic oligonucleotide
tgtctggaaaaggaggtcggagagggactc

SEQ ID NO: 112484 - DNA, 30 bp, Artificial Sequence
  Synthetic oligonucleotide
gcaggtagacactagtacagtacatgactc

SEQ ID NO: 112485 - DNA, 30 bp, Artificial Sequence
  Synthetic oligonucleotide
agcaagcgcaatatatgatgccactgactc

SEQ ID NO: 112486 - DNA, 30 bp, Artificial Sequence
  Synthetic oligonucleotide
ctgagaccatcggcgtggagtgagtgactc

SEQ ID NO: 112487 - DNA, 30 bp, Artificial Sequence
  Synthetic oligonucleotide
acggggaatatcagggggacgcattgactc

SEQ ID NO: 112488 - DNA, 30 bp, Artificial Sequence
  Synthetic oligonucleotide
gcgagcttaccgtatctatctcgttgactc

SEQ ID NO: 112489 - DNA, 30 bp, Artificial Sequence
  Synthetic oligonucleotide
ttagacaatgagtcccctctgaacatactc

SEQ ID NO: 112490 - DNA, 30 bp, Artificial Sequence
  Synthetic oligonucleotide
acggccggtgtgggggccaaaatcatactc

SEQ ID NO: 112491 - DNA, 30 bp, Artificial Sequence
  Synthetic oligonucleotide
ggctcatgccattcagttaacaaactactc

SEQ ID NO: 112492 - DNA, 30 bp, Artificial Sequence
  Synthetic oligonucleotide
gcgcgacatagtcataaaagcaatctactc

SEQ ID NO: 112493 - DNA, 30 bp, Artificial Sequence
  Synthetic oligonucleotide
gcgtagtaagcgtagcgtcacagattactc

SEQ ID NO: 112494 - DNA, 30 bp, Artificial Sequence
  Synthetic oligonucleotide
tcgcgatcaacgccgtacgtcggcttactc

SEQ ID NO: 112495 - DNA, 30 bp, Artificial Sequence
  Synthetic oligonucleotide
cagaaatcgaattagacgaaccctttactc

SEQ ID NO: 112496 - DNA, 30 bp, Artificial Sequence
  Synthetic oligonucleotide
agtacgaagccagtcaagatgggcaacctc

SEQ ID NO: 112497 - DNA, 30 bp, Artificial Sequence
  Synthetic oligonucleotide
aaacaactcttaaagtagggaggtaacctc

SEQ ID NO: 112498 - DNA, 30 bp, Artificial Sequence
  Synthetic oligonucleotide
aaatggagtctacgagaggcctaagacctc

SEQ ID NO: 112499 - DNA, 30 bp, Artificial Sequence
  Synthetic oligonucleotide
gctaaaaggttgtgacagtctgattacctc

SEQ ID NO: 112500 - DNA, 30 bp, Artificial Sequence
  Synthetic oligonucleotide
cacatgacttaaccagttcaatgcaccctc

SEQ ID NO: 112501 - DNA, 30 bp, Artificial Sequence
  Synthetic oligonucleotide
tgtggagtgatcgtctgagtgcaagccctc

SEQ ID NO: 112502 - DNA, 30 bp, Artificial Sequence
  Synthetic oligonucleotide
cgactatggggatgctaccatatcgccctc

SEQ ID NO: 112503 - DNA, 30 bp, Artificial Sequence
  Synthetic oligonucleotide
ccagggctcaaagtatgttttctatccctc

SEQ ID NO: 112504 - DNA, 30 bp, Artificial Sequence
  Synthetic oligonucleotide
tattaagccggtctatagaaagccagcctc

SEQ ID NO: 112505 - DNA, 30 bp, Artificial Sequence
  Synthetic oligonucleotide
acgtccatataagaggcgctcgtatgcctc

SEQ ID NO: 112506 - DNA, 30 bp, Artificial Sequence
  Synthetic oligonucleotide
aatcacaaggtccaattcataatctgcctc

SEQ ID NO: 112507 - DNA, 30 bp, Artificial Sequence
  Synthetic oligonucleotide
cggcagggtggcacttgttcatcaatcctc

SEQ ID NO: 112508 - DNA, 30 bp, Artificial Sequence
  Synthetic oligonucleotide
ccatacatggttggcgagcgatatatcctc

SEQ ID NO: 112509 - DNA, 30 bp, Artificial Sequence
  Synthetic oligonucleotide
catcagcccataaaggagtatgaattcctc

SEQ ID NO: 112510 - DNA, 30 bp, Artificial Sequence
  Synthetic oligonucleotide
atgctagcacgagctatggcctagttcctc

SEQ ID NO: 112511 - DNA, 30 bp, Artificial Sequence
  Synthetic oligonucleotide
tcaatgtcgcacggttctcaatgcaagctc

SEQ ID NO: 112512 - DNA, 30 bp, Artificial Sequence
  Synthetic oligonucleotide
ctccagtagagagttagggtagcacagctc

SEQ ID NO: 112513 - DNA, 30 bp, Artificial Sequence
  Synthetic oligonucleotide
ccggaagatgaaatttcccccgtacagctc

SEQ ID NO: 112514 - DNA, 30 bp, Artificial Sequence
  Synthetic oligonucleotide
cgacgtccagatagtaggggtgtacagctc

SEQ ID NO: 112515 - DNA, 30 bp, Artificial Sequence
  Synthetic oligonucleotide
aaggaggaaggttattgctaggaccagctc

SEQ ID NO: 112516 - DNA, 30 bp, Artificial Sequence
  Synthetic oligonucleotide
ttaaaggggctagtcaagacccggcagctc

SEQ ID NO: 112517 - DNA, 30 bp, Artificial Sequence
  Synthetic oligonucleotide
cgaaggactacaagaagatcttgggagctc

SEQ ID NO: 112518 - DNA, 30 bp, Artificial Sequence
  Synthetic oligonucleotide
tacatatcagctattcaacacacatagctc

SEQ ID NO: 112519 - DNA, 30 bp, Artificial Sequence
  Synthetic oligonucleotide
gtgctccggggcatgtaagttccctagctc

SEQ ID NO: 112520 - DNA, 30 bp, Artificial Sequence
  Synthetic oligonucleotide
gggcaggcgagcccccactgtagctagctc

SEQ ID NO: 112521 - DNA, 30 bp, Artificial Sequence
  Synthetic oligonucleotide
ggatgatagagttagaacatcctctagctc

SEQ ID NO: 112522 - DNA, 30 bp, Artificial Sequence
  Synthetic oligonucleotide
gtaggtgcatgggccccggaacagtagctc

SEQ ID NO: 112523 - DNA, 30 bp, Artificial Sequence
  Synthetic oligonucleotide
taatgaaagggagcctaaataagaacgctc

SEQ ID NO: 112524 - DNA, 30 bp, Artificial Sequence
  Synthetic oligonucleotide
ggagattgaccccggacggccataacgctc

SEQ ID NO: 112525 - DNA, 30 bp, Artificial Sequence
  Synthetic oligonucleotide
gactgacctgcggtataccagtcgccgctc

SEQ ID NO: 112526 - DNA, 30 bp, Artificial Sequence
  Synthetic oligonucleotide
tgcgaacacccgcttttggaccatccgctc

SEQ ID NO: 112527 - DNA, 30 bp, Artificial Sequence
  Synthetic oligonucleotide
acaaggtttggtcagaagtatcacgcgctc

SEQ ID NO: 112528 - DNA, 30 bp, Artificial Sequence
  Synthetic oligonucleotide
cagtggtggcttgtgagccgaatcgcgctc

SEQ ID NO: 112529 - DNA, 30 bp, Artificial Sequence
  Synthetic oligonucleotide
caatgtacgctttcgacccgctcctcgctc

SEQ ID NO: 112530 - DNA, 30 bp, Artificial Sequence
  Synthetic oligonucleotide
tccgtggtcacctattgcgtatttcggctc

SEQ ID NO: 112531 - DNA, 30 bp, Artificial Sequence
  Synthetic oligonucleotide
ggaggtcgagatgccgaacaaagagggctc

SEQ ID NO: 112532 - DNA, 30 bp, Artificial Sequence
  Synthetic oligonucleotide
tggctaggtaaggttaacatacgatggctc

SEQ ID NO: 112533 - DNA, 30 bp, Artificial Sequence
  Synthetic oligonucleotide
ggagaagctatctcttacttaagcctgctc

SEQ ID NO: 112534 - DNA, 30 bp, Artificial Sequence
  Synthetic oligonucleotide
ctagcatcaatgccggggttcaacgtgctc

SEQ ID NO: 112535 - DNA, 30 bp, Artificial Sequence
  Synthetic oligonucleotide
ggatagaacgaccgcggggcgtccgtgctc

SEQ ID NO: 112536 - DNA, 30 bp, Artificial Sequence
  Synthetic oligonucleotide
acgaggatgccgaacgtcggagaacatctc

SEQ ID NO: 112537 - DNA, 30 bp, Artificial Sequence
  Synthetic oligonucleotide
aagtgtgccttggttctacgaggacatctc

SEQ ID NO: 112538 - DNA, 30 bp, Artificial Sequence
  Synthetic oligonucleotide
cagtgtcggaaacgtcccgatcctcatctc

SEQ ID NO: 112539 - DNA, 30 bp, Artificial Sequence
  Synthetic oligonucleotide
caagtattaaacgagtggacacaagatctc

SEQ ID NO: 112540 - DNA, 30 bp, Artificial Sequence
  Synthetic oligonucleotide
cacatggaatttgaatgatctcgagatctc

SEQ ID NO: 112541 - DNA, 30 bp, Artificial Sequence
  Synthetic oligonucleotide
tgccacccgcgtgggtggagagcatatctc

SEQ ID NO: 112542 - DNA, 30 bp, Artificial Sequence
  Synthetic oligonucleotide
tgagaaaggaacgagcatagcagttatctc

SEQ ID NO: 112543 - DNA, 30 bp, Artificial Sequence
  Synthetic oligonucleotide
gaacgggaagcggacgagtcaagcactctc

SEQ ID NO: 112544 - DNA, 30 bp, Artificial Sequence
  Synthetic oligonucleotide
aggaaataatgagtgagcgtttcagctctc

SEQ ID NO: 112545 - DNA, 30 bp, Artificial Sequence
  Synthetic oligonucleotide
agagccggctcttgctaatcgagaagtctc

SEQ ID NO: 112546 - DNA, 30 bp, Artificial Sequence
  Synthetic oligonucleotide
gggttgcttcgaaacggtaatagtagtctc

SEQ ID NO: 112547 - DNA, 30 bp, Artificial Sequence
  Synthetic oligonucleotide
acggaaaggggtaggcagacagtccgtctc

SEQ ID NO: 112548 - DNA, 30 bp, Artificial Sequence
  Synthetic oligonucleotide
aaccaggtccgaaattgaataagtcgtctc

SEQ ID NO: 112549 - DNA, 30 bp, Artificial Sequence
  Synthetic oligonucleotide
caacaggaggtatcattaagcagatgtctc

SEQ ID NO: 112550 - DNA, 30 bp, Artificial Sequence
  Synthetic oligonucleotide
ggagagaggaaaaacgcacagcgttgtctc

SEQ ID NO: 112551 - DNA, 30 bp, Artificial Sequence
  Synthetic oligonucleotide
gcctcggagaggtcaatgtatagccttctc

SEQ ID NO: 112552 - DNA, 30 bp, Artificial Sequence
  Synthetic oligonucleotide
ctgaggaggatacgtggcttgactcttctc

SEQ ID NO: 112553 - DNA, 30 bp, Artificial Sequence
  Synthetic oligonucleotide
cggacagcgcacagcaaggttggcgttctc

SEQ ID NO: 112554 - DNA, 30 bp, Artificial Sequence
  Synthetic oligonucleotide
acgtcagccacgagcaacaggtgggttctc

SEQ ID NO: 112555 - DNA, 30 bp, Artificial Sequence
  Synthetic oligonucleotide
ggcaacaaggactgacatcgacaacaagtc

SEQ ID NO: 112556 - DNA, 30 bp, Artificial Sequence
  Synthetic oligonucleotide
catagccctagcaaggtgagacgccaagtc

SEQ ID NO: 112557 - DNA, 30 bp, Artificial Sequence
  Synthetic oligonucleotide
taggtaaagtgcatgggaggccatcaagtc

SEQ ID NO: 112558 - DNA, 30 bp, Artificial Sequence
  Synthetic oligonucleotide
tggacttaggatcctaacggacgtcaagtc

SEQ ID NO: 112559 - DNA, 30 bp, Artificial Sequence
  Synthetic oligonucleotide
gtctcgttctaagagccctgatttcaagtc

SEQ ID NO: 112560 - DNA, 30 bp, Artificial Sequence
  Synthetic oligonucleotide
ggcatatagggccctgagcgtttagaagtc

SEQ ID NO: 112561 - DNA, 30 bp, Artificial Sequence
  Synthetic oligonucleotide
agaatgctaggtgagttaaccgtcgaagtc

SEQ ID NO: 112562 - DNA, 30 bp, Artificial Sequence
  Synthetic oligonucleotide
aaaagcgcaaaagacagcagccggtaagtc

SEQ ID NO: 112563 - DNA, 30 bp, Artificial Sequence
  Synthetic oligonucleotide
tgggtgtaaaggcaaacgtaaatgtaagtc

SEQ ID NO: 112564 - DNA, 30 bp, Artificial Sequence
  Synthetic oligonucleotide
tttgaatttaaaacagatggaatgacagtc

SEQ ID NO: 112565 - DNA, 30 bp, Artificial Sequence
  Synthetic oligonucleotide
atgtaaggacaatatggataagcaccagtc

SEQ ID NO: 112566 - DNA, 30 bp, Artificial Sequence
  Synthetic oligonucleotide
ggagaagttcgcataaatgttaagccagtc

SEQ ID NO: 112567 - DNA, 30 bp, Artificial Sequence
  Synthetic oligonucleotide
tcaagatcagttggtattgctcggccagtc

SEQ ID NO: 112568 - DNA, 30 bp, Artificial Sequence
  Synthetic oligonucleotide
gctgccacaaaccaggtaaaagctccagtc

SEQ ID NO: 112569 - DNA, 30 bp, Artificial Sequence
  Synthetic oligonucleotide
tcacggagtatgtctagctgcacttcagtc

SEQ ID NO: 112570 - DNA, 30 bp, Artificial Sequence
  Synthetic oligonucleotide
cccagggtgttgtgttctctcgtttcagtc

SEQ ID NO: 112571 - DNA, 30 bp, Artificial Sequence
  Synthetic oligonucleotide
gttaatgcgcaatagcgagcccaaagagtc

SEQ ID NO: 112572 - DNA, 30 bp, Artificial Sequence
  Synthetic oligonucleotide
tgccaaaaaacttaccatgggaacagagtc

SEQ ID NO: 112573 - DNA, 30 bp, Artificial Sequence
  Synthetic oligonucleotide
tccaagaatctggatagagatatgagagtc

SEQ ID NO: 112574 - DNA, 30 bp, Artificial Sequence
  Synthetic oligonucleotide
gggattcaattccgggcgagacatagagtc

SEQ ID NO: 112575 - DNA, 30 bp, Artificial Sequence
  Synthetic oligonucleotide
cgctcttaagaaggaaagaacgatagagtc

SEQ ID NO: 112576 - DNA, 30 bp, Artificial Sequence
  Synthetic oligonucleotide
catggctcgagtagcaatcataagcgagtc

SEQ ID NO: 112577 - DNA, 30 bp, Artificial Sequence
  Synthetic oligonucleotide
agacgcaatacctgccaactatttcgagtc

SEQ ID NO: 112578 - DNA, 30 bp, Artificial Sequence
  Synthetic oligonucleotide
acggggctgcggacactgtgaggaggagtc

SEQ ID NO: 112579 - DNA, 30 bp, Artificial Sequence
  Synthetic oligonucleotide
ttaccgagacatgcgtttgccccgggagtc

SEQ ID NO: 112580 - DNA, 30 bp, Artificial Sequence
  Synthetic oligonucleotide
gatagccgaaacagtttagcggatggagtc

SEQ ID NO: 112581 - DNA, 30 bp, Artificial Sequence
  Synthetic oligonucleotide
ggccgttcagagaatggaagcatatgagtc

SEQ ID NO: 112582 - DNA, 30 bp, Artificial Sequence
  Synthetic oligonucleotide
tagcatgggtcagacagcagaaaaatagtc

SEQ ID NO: 112583 - DNA, 30 bp, Artificial Sequence
  Synthetic oligonucleotide
cgacgggagcactagagctctggaatagtc

SEQ ID NO: 112584 - DNA, 30 bp, Artificial Sequence
  Synthetic oligonucleotide
taatgatgtgggaacatgtgtggcatagtc

SEQ ID NO: 112585 - DNA, 30 bp, Artificial Sequence
  Synthetic oligonucleotide
ggttcacaagcaggagacgtcttagtagtc

SEQ ID NO: 112586 - DNA, 30 bp, Artificial Sequence
  Synthetic oligonucleotide
gtgtcccatcaaaaaggtcaggcattagtc

SEQ ID NO: 112587 - DNA, 30 bp, Artificial Sequence
  Synthetic oligonucleotide
agagctctggtcgggaagagactgttagtc

SEQ ID NO: 112588 - DNA, 30 bp, Artificial Sequence
  Synthetic oligonucleotide
cgataacccgttaacaaactggtgttagtc

SEQ ID NO: 112589 - DNA, 30 bp, Artificial Sequence
  Synthetic oligonucleotide
aacgagccaggtttgagatggtgaaacgtc

SEQ ID NO: 112590 - DNA, 30 bp, Artificial Sequence
  Synthetic oligonucleotide
gtcgaaaggcaatacagtggtaggaacgtc

SEQ ID NO: 112591 - DNA, 30 bp, Artificial Sequence
  Synthetic oligonucleotide
ggccgttcgtcgagtttgaaagcagacgtc

SEQ ID NO: 112592 - DNA, 30 bp, Artificial Sequence
  Synthetic oligonucleotide
ccgccctctgtggagatccacgtcgacgtc

SEQ ID NO: 112593 - DNA, 30 bp, Artificial Sequence
  Synthetic oligonucleotide
ctagaagcaattgagactaaccgggacgtc

SEQ ID NO: 112594 - DNA, 30 bp, Artificial Sequence
  Synthetic oligonucleotide
gaggtcaggtgtttttaggatgcatacgtc

SEQ ID NO: 112595 - DNA, 30 bp, Artificial Sequence
  Synthetic oligonucleotide
cctgctaagtgggtagatcaaacctacgtc

SEQ ID NO: 112596 - DNA, 30 bp, Artificial Sequence
  Synthetic oligonucleotide
acagactaaggggaatttaagttgtacgtc

SEQ ID NO: 112597 - DNA, 30 bp, Artificial Sequence
  Synthetic oligonucleotide
tgagtctcgtaatgtgatcgactgaccgtc

SEQ ID NO: 112598 - DNA, 30 bp, Artificial Sequence
  Synthetic oligonucleotide
gtgagcattccgtcagccagccataccgtc

SEQ ID NO: 112599 - DNA, 30 bp, Artificial Sequence
  Synthetic oligonucleotide
ctcccagggcacagtaagagaacacccgtc

SEQ ID NO: 112600 - DNA, 30 bp, Artificial Sequence
  Synthetic oligonucleotide
aagatagtaaaatgttcaccggggcccgtc

SEQ ID NO: 112601 - DNA, 30 bp, Artificial Sequence
  Synthetic oligonucleotide
gggccacatagccacatactggtgcccgtc

SEQ ID NO: 112602 - DNA, 30 bp, Artificial Sequence
  Synthetic oligonucleotide
caggtaggcgtattgtctgtacaggccgtc

SEQ ID NO: 112603 - DNA, 30 bp, Artificial Sequence
  Synthetic oligonucleotide
ggaagggctatccgcgatcggctctccgtc

SEQ ID NO: 112604 - DNA, 30 bp, Artificial Sequence
  Synthetic oligonucleotide
acggccaaccccagataggtccagtccgtc

SEQ ID NO: 112605 - DNA, 30 bp, Artificial Sequence
  Synthetic oligonucleotide
aatggacgacctggatgaccgaattccgtc

SEQ ID NO: 112606 - DNA, 30 bp, Artificial Sequence
  Synthetic oligonucleotide
gtgaagcaatgaacagggccctaaagcgtc

SEQ ID NO: 112607 - DNA, 30 bp, Artificial Sequence
  Synthetic oligonucleotide
gcggcaagctccctccctaaattgagcgtc

SEQ ID NO: 112608 - DNA, 30 bp, Artificial Sequence
  Synthetic oligonucleotide
tacatcgtaagggtctgcttgagccgcgtc

SEQ ID NO: 112609 - DNA, 30 bp, Artificial Sequence
  Synthetic oligonucleotide
cacatgacctgtccgcataggttgcgcgtc

SEQ ID NO: 112610 - DNA, 30 bp, Artificial Sequence
  Synthetic oligonucleotide
cttctgagcaaagtcccgccccaaggcgtc

SEQ ID NO: 112611 - DNA, 30 bp, Artificial Sequence
  Synthetic oligonucleotide
agagcaatagaaaatcaatcacaatgcgtc

SEQ ID NO: 112612 - DNA, 30 bp, Artificial Sequence
  Synthetic oligonucleotide
gaggtagggtctcgaaaggacatctgcgtc

SEQ ID NO: 112613 - DNA, 30 bp, Artificial Sequence
  Synthetic oligonucleotide
tccacacactccgtaaagggaccaatcgtc

SEQ ID NO: 112614 - DNA, 30 bp, Artificial Sequence
  Synthetic oligonucleotide
aatagagctttggcctccccgatcatcgtc

SEQ ID NO: 112615 - DNA, 30 bp, Artificial Sequence
  Synthetic oligonucleotide
ccggccaggcggtctcatgggtcgatcgtc

SEQ ID NO: 112616 - DNA, 30 bp, Artificial Sequence
  Synthetic oligonucleotide
atgcatccgattagggtagtcagtatcgtc

SEQ ID NO: 112617 - DNA, 30 bp, Artificial Sequence
  Synthetic oligonucleotide
ggatgtatgtagattctcttagttatcgtc

SEQ ID NO: 112618 - DNA, 30 bp, Artificial Sequence
  Synthetic oligonucleotide
tcgaagctgatctgcggtatactactcgtc

SEQ ID NO: 112619 - DNA, 30 bp, Artificial Sequence
  Synthetic oligonucleotide
cgcgtcccgaccaccgggatcccagtcgtc

SEQ ID NO: 112620 - DNA, 30 bp, Artificial Sequence
  Synthetic oligonucleotide
aatggaatgtgaggggcggtcgccgtcgtc

SEQ ID NO: 112621 - DNA, 30 bp, Artificial Sequence
  Synthetic oligonucleotide
tcctgagcgcatattatataaacattcgtc

SEQ ID NO: 112622 - DNA, 30 bp, Artificial Sequence
  Synthetic oligonucleotide
tacactagtaatgtcttctttgggttcgtc

SEQ ID NO: 112623 - DNA, 30 bp, Artificial Sequence
  Synthetic oligonucleotide
gtaagaattcagtctagcacggaaaaggtc

SEQ ID NO: 112624 - DNA, 30 bp, Artificial Sequence
  Synthetic oligonucleotide
gtagccaccaggtactacgtatcgaaggtc

SEQ ID NO: 112625 - DNA, 30 bp, Artificial Sequence
  Synthetic oligonucleotide
ctcgtgaggactgatcaatacaataaggtc

SEQ ID NO: 112626 - DNA, 30 bp, Artificial Sequence
  Synthetic oligonucleotide
gaggggactcgtgcataaaaggataaggtc

SEQ ID NO: 112627 - DNA, 30 bp, Artificial Sequence
  Synthetic oligonucleotide
aagtacaggtagtggcgtactgataaggtc

SEQ ID NO: 112628 - DNA, 30 bp, Artificial Sequence
  Synthetic oligonucleotide
gggacggcggttcagatatgtcccgaggtc

SEQ ID NO: 112629 - DNA, 30 bp, Artificial Sequence
  Synthetic oligonucleotide
ggataatatcaacgcggcatcgaggaggtc

SEQ ID NO: 112630 - DNA, 30 bp, Artificial Sequence
  Synthetic oligonucleotide
ccatggcaggtgtacgatgtatgcacggtc

SEQ ID NO: 112631 - DNA, 30 bp, Artificial Sequence
  Synthetic oligonucleotide
tcgggtgagaatcctcgcacatgtacggtc

SEQ ID NO: 112632 - DNA, 30 bp, Artificial Sequence
  Synthetic oligonucleotide
tttaggggaacaagggtaatacgcccggtc

SEQ ID NO: 112633 - DNA, 30 bp, Artificial Sequence
  Synthetic oligonucleotide
agtgagtgcgcactgcaacgcgtcccggtc

SEQ ID NO: 112634 - DNA, 30 bp, Artificial Sequence
  Synthetic oligonucleotide
aacaccaaggcggaacaaacagttccggtc

SEQ ID NO: 112635 - DNA, 30 bp, Artificial Sequence
  Synthetic oligonucleotide
gacaaccagcccatgattgcctaagcggtc

SEQ ID NO: 112636 - DNA, 30 bp, Artificial Sequence
  Synthetic oligonucleotide
acgatgtcggacgggccaagcaccgcggtc

SEQ ID NO: 112637 - DNA, 30 bp, Artificial Sequence
  Synthetic oligonucleotide
catgggacctgcccgaaactcgctgcggtc

SEQ ID NO: 112638 - DNA, 30 bp, Artificial Sequence
  Synthetic oligonucleotide
aagttggtgaaacttattagaccaagggtc

SEQ ID NO: 112639 - DNA, 30 bp, Artificial Sequence
  Synthetic oligonucleotide
gtgtgcacgtcacagaatcacaccagggtc

SEQ ID NO: 112640 - DNA, 30 bp, Artificial Sequence
  Synthetic oligonucleotide
tcatggaggtcccggttgtatgcgagggtc

SEQ ID NO: 112641 - DNA, 30 bp, Artificial Sequence
  Synthetic oligonucleotide
ggaacatggtgggatcctataagtagggtc

SEQ ID NO: 112642 - DNA, 30 bp, Artificial Sequence
  Synthetic oligonucleotide
tcggctctgtcttgttgggaaattagggtc

SEQ ID NO: 112643 - DNA, 30 bp, Artificial Sequence
  Synthetic oligonucleotide
ggggggaatatcacacatctgagccgggtc

SEQ ID NO: 112644 - DNA, 30 bp, Artificial Sequence
  Synthetic oligonucleotide
ataatcagtatatcacagttcacgcgggtc

SEQ ID NO: 112645 - DNA, 30 bp, Artificial Sequence
  Synthetic oligonucleotide
ggcatcgtttatccctgccttgttcgggtc

SEQ ID NO: 112646 - DNA, 30 bp, Artificial Sequence
  Synthetic oligonucleotide
gcggataactcccacaagtaaaagggggtc

SEQ ID NO: 112647 - DNA, 30 bp, Artificial Sequence
  Synthetic oligonucleotide
actgattactacttctcaaggaaatgggtc

SEQ ID NO: 112648 - DNA, 30 bp, Artificial Sequence
  Synthetic oligonucleotide
tgcatccaatgattactactcagaatggtc

SEQ ID NO: 112649 - DNA, 30 bp, Artificial Sequence
  Synthetic oligonucleotide
tcgaaaaagggtaacccgcgacttatggtc

SEQ ID NO: 112650 - DNA, 30 bp, Artificial Sequence
  Synthetic oligonucleotide
atgggaccgtcggatctaatcgcagtggtc

SEQ ID NO: 112651 - DNA, 30 bp, Artificial Sequence
  Synthetic oligonucleotide
ctacgtcagatgtcatatttgggcgtggtc

SEQ ID NO: 112652 - DNA, 30 bp, Artificial Sequence
  Synthetic oligonucleotide
gtaatttacgtagctgtgggagcggtggtc

SEQ ID NO: 112653 - DNA, 30 bp, Artificial Sequence
  Synthetic oligonucleotide
taaaccgtaaaaatgacatttcccttggtc

SEQ ID NO: 112654 - DNA, 30 bp, Artificial Sequence
  Synthetic oligonucleotide
ccacactaccggaaacagtacaggttggtc

SEQ ID NO: 112655 - DNA, 30 bp, Artificial Sequence
  Synthetic oligonucleotide
tttcggaaggactgtggaatgcccaatgtc

SEQ ID NO: 112656 - DNA, 30 bp, Artificial Sequence
  Synthetic oligonucleotide
atgggaagtctcattaggactaggaatgtc

SEQ ID NO: 112657 - DNA, 30 bp, Artificial Sequence
  Synthetic oligonucleotide
tctttgaagttgggagtggctacgcatgtc

SEQ ID NO: 112658 - DNA, 30 bp, Artificial Sequence
  Synthetic oligonucleotide
gtatcaaagctgactgtcactgcgcatgtc

SEQ ID NO: 112659 - DNA, 30 bp, Artificial Sequence
  Synthetic oligonucleotide
cgaggttgggtgctagaggtagtgcatgtc

SEQ ID NO: 112660 - DNA, 30 bp, Artificial Sequence
  Synthetic oligonucleotide
tgttacgtcaaccaggtcaatcactatgtc

SEQ ID NO: 112661 - DNA, 30 bp, Artificial Sequence
  Synthetic oligonucleotide
gagccagcagcgaaactgaaatggtatgtc

SEQ ID NO: 112662 - DNA, 30 bp, Artificial Sequence
  Synthetic oligonucleotide
cgtgggcccgatctttgctatgattatgtc

SEQ ID NO: 112663 - DNA, 30 bp, Artificial Sequence
  Synthetic oligonucleotide
gcaccgctacagtcctgcataataactgtc

SEQ ID NO: 112664 - DNA, 30 bp, Artificial Sequence
  Synthetic oligonucleotide
cggatactaaaacgccgaagttgtgctgtc

SEQ ID NO: 112665 - DNA, 30 bp, Artificial Sequence
  Synthetic oligonucleotide
gaacatcgctaaagagatcgcggatctgtc

SEQ ID NO: 112666 - DNA, 30 bp, Artificial Sequence
  Synthetic oligonucleotide
gttcataggataagagattaagcaagtgtc

SEQ ID NO: 112667 - DNA, 30 bp, Artificial Sequence
  Synthetic oligonucleotide
tcggggcccgataggaaaagtatgcgtgtc

SEQ ID NO: 112668 - DNA, 30 bp, Artificial Sequence
  Synthetic oligonucleotide
ggcataattgcctctcgtagctaaggtgtc

SEQ ID NO: 112669 - DNA, 30 bp, Artificial Sequence
  Synthetic oligonucleotide
tatcagagaacccaacgaaaagcaggtgtc

SEQ ID NO: 112670 - DNA, 30 bp, Artificial Sequence
  Synthetic oligonucleotide
gccagaaataatatatgacagtgaggtgtc

SEQ ID NO: 112671 - DNA, 30 bp, Artificial Sequence
  Synthetic oligonucleotide
agcaactaagagagtacacacttatgtgtc

SEQ ID NO: 112672 - DNA, 30 bp, Artificial Sequence
  Synthetic oligonucleotide
cgattatggacgaaattggtctagtgtgtc

SEQ ID NO: 112673 - DNA, 30 bp, Artificial Sequence
  Synthetic oligonucleotide
cacgtacccaacgacccgtcgtacattgtc

SEQ ID NO: 112674 - DNA, 30 bp, Artificial Sequence
  Synthetic oligonucleotide
ggataaatacaaggctatagcgccattgtc

SEQ ID NO: 112675 - DNA, 30 bp, Artificial Sequence
  Synthetic oligonucleotide
tgctccaactgatggcataaatccattgtc

SEQ ID NO: 112676 - DNA, 30 bp, Artificial Sequence
  Synthetic oligonucleotide
tcgaccatgaaaaatggtggtggcattgtc

SEQ ID NO: 112677 - DNA, 30 bp, Artificial Sequence
  Synthetic oligonucleotide
ggcctaatggaagaggggcgaaggcttgtc

SEQ ID NO: 112678 - DNA, 30 bp, Artificial Sequence
  Synthetic oligonucleotide
aggagtacttgagccgtagtaaaatttgtc

SEQ ID NO: 112679 - DNA, 30 bp, Artificial Sequence
  Synthetic oligonucleotide
caggaccgccagagcgcggacagctttgtc

SEQ ID NO: 112680 - DNA, 30 bp, Artificial Sequence
  Synthetic oligonucleotide
cgccggttggtagatgttgttatgtttgtc

SEQ ID NO: 112681 - DNA, 30 bp, Artificial Sequence
  Synthetic oligonucleotide
tcacggagggcaagtgactagagttttgtc

SEQ ID NO: 112682 - DNA, 30 bp, Artificial Sequence
  Synthetic oligonucleotide
caatagaaacacatacgtcatggaaaattc

SEQ ID NO: 112683 - DNA, 30 bp, Artificial Sequence
  Synthetic oligonucleotide
acagacaagaaagtacgtgagttgaaattc

SEQ ID NO: 112684 - DNA, 30 bp, Artificial Sequence
  Synthetic oligonucleotide
cggacattatagataaagtgaaatcaattc

SEQ ID NO: 112685 - DNA, 30 bp, Artificial Sequence
  Synthetic oligonucleotide
tcctacacgcgggccaggaccagtcaattc

SEQ ID NO: 112686 - DNA, 30 bp, Artificial Sequence
  Synthetic oligonucleotide
ccaagacacagtctaattatgtcagaattc

SEQ ID NO: 112687 - DNA, 30 bp, Artificial Sequence
  Synthetic oligonucleotide
cgtgcttattaaaacttggtcgaggaattc

SEQ ID NO: 112688 - DNA, 30 bp, Artificial Sequence
  Synthetic oligonucleotide
agccccgacacgagcataaatgagacattc

SEQ ID NO: 112689 - DNA, 30 bp, Artificial Sequence
  Synthetic oligonucleotide
aggcaaaacgcacggtcccgggttacattc

SEQ ID NO: 112690 - DNA, 31 bp, Artificial Sequence
  Synthetic oligonucleotide
ggccttagtgaggcgtagatagcggccattc

SEQ ID NO: 112691 - DNA, 30 bp, Artificial Sequence
  Synthetic oligonucleotide
tacaagacagtgtacggacctcacgcattc

SEQ ID NO: 112692 - DNA, 30 bp, Artificial Sequence
  Synthetic oligonucleotide
tcatgaccaaggcgcgggggttacgcattc

SEQ ID NO: 112693 - DNA, 30 bp, Artificial Sequence
  Synthetic oligonucleotide
accgtatctagtcgaggaaaaatttcattc

SEQ ID NO: 112694 - DNA, 30 bp, Artificial Sequence
  Synthetic oligonucleotide
gaggacggtttgagggctccacacagattc

SEQ ID NO: 112695 - DNA, 30 bp, Artificial Sequence
  Synthetic oligonucleotide
atagaacaatctcaaccatgtcacagattc

SEQ ID NO: 112696 - DNA, 30 bp, Artificial Sequence
  Synthetic oligonucleotide
tgcaaagttggactggtgatgttcagattc

SEQ ID NO: 112697 - DNA, 30 bp, Artificial Sequence
  Synthetic oligonucleotide
cttatgtgatgaggggcgtacagccgattc

SEQ ID NO: 112698 - DNA, 30 bp, Artificial Sequence
  Synthetic oligonucleotide
ggggctattgagatacaagtagcctgattc

SEQ ID NO: 112699 - DNA, 30 bp, Artificial Sequence
  Synthetic oligonucleotide
aacggagcactatgtaagattcagtgattc

SEQ ID NO: 112700 - DNA, 30 bp, Artificial Sequence
  Synthetic oligonucleotide
aacgccgtccgtaggttcatgtcgatattc

SEQ ID NO: 112701 - DNA, 30 bp, Artificial Sequence
  Synthetic oligonucleotide
gaaaaagtgtaagcatccgaacccctattc

SEQ ID NO: 112702 - DNA, 30 bp, Artificial Sequence
  Synthetic oligonucleotide
agggatagcgggtgtatcaccgctctattc

SEQ ID NO: 112703 - DNA, 30 bp, Artificial Sequence
  Synthetic oligonucleotide
ggaggaagttgatgtagcacgacagtattc

SEQ ID NO: 112704 - DNA, 30 bp, Artificial Sequence
  Synthetic oligonucleotide
agcgtaacacaagcagaggaaatagtattc

SEQ ID NO: 112705 - DNA, 30 bp, Artificial Sequence
  Synthetic oligonucleotide
agttggaaaggtatacgcaagatcgtattc

SEQ ID NO: 112706 - DNA, 30 bp, Artificial Sequence
  Synthetic oligonucleotide
aggacgatttactcaccgcggcatgacttc

SEQ ID NO: 112707 - DNA, 30 bp, Artificial Sequence
  Synthetic oligonucleotide
ccggaggcaacgatcatccttccacccttc

SEQ ID NO: 112708 - DNA, 30 bp, Artificial Sequence
  Synthetic oligonucleotide
cgaaatgcaggcatggttgacgatcccttc

SEQ ID NO: 112709 - DNA, 30 bp, Artificial Sequence
  Synthetic oligonucleotide
tcgtgaaaaagatcgtgtgatggtcccttc

SEQ ID NO: 112710 - DNA, 30 bp, Artificial Sequence
  Synthetic oligonucleotide
gggcttagatatcgaaacaaacaatccttc

SEQ ID NO: 112711 - DNA, 30 bp, Artificial Sequence
  Synthetic oligonucleotide
tcgggatcattagtcaaaggcgtatccttc

SEQ ID NO: 112712 - DNA, 30 bp, Artificial Sequence
  Synthetic oligonucleotide
ggcacgtgataagttacttaggaaagcttc

SEQ ID NO: 112713 - DNA, 30 bp, Artificial Sequence
  Synthetic oligonucleotide
aggcttgatttaaggcttagggtgcgcttc

SEQ ID NO: 112714 - DNA, 31 bp, Artificial Sequence
  Synthetic oligonucleotide
gctatcgaaacatgacatagcaggtggcttc

SEQ ID NO: 112715 - DNA, 30 bp, Artificial Sequence
  Synthetic oligonucleotide
tctcagcggtacatgctgatataatgcttc

SEQ ID NO: 112716 - DNA, 30 bp, Artificial Sequence
  Synthetic oligonucleotide
gaacgcgtcttcaccaggaagggatgcttc

SEQ ID NO: 112717 - DNA, 30 bp, Artificial Sequence
  Synthetic oligonucleotide
cgacgttgcctatgcggtggaatgctcttc

SEQ ID NO: 112718 - DNA, 30 bp, Artificial Sequence
  Synthetic oligonucleotide
tcattgagtgtgcacgaagcttgtctcttc

SEQ ID NO: 112719 - DNA, 30 bp, Artificial Sequence
  Synthetic oligonucleotide
gggttgctgcgtatacacattccaaagttc

SEQ ID NO: 112720 - DNA, 30 bp, Artificial Sequence
  Synthetic oligonucleotide
tcacgcctggaccttgagttgaggaagttc

SEQ ID NO: 112721 - DNA, 30 bp, Artificial Sequence
  Synthetic oligonucleotide
agcctcgcttgagaacaggcagggaagttc

SEQ ID NO: 112722 - DNA, 30 bp, Artificial Sequence
  Synthetic oligonucleotide
cgacaataatgtcgagcacgtatccagttc

SEQ ID NO: 112723 - DNA, 30 bp, Artificial Sequence
  Synthetic oligonucleotide
cttatagggagtcagtcaaatggggagttc

SEQ ID NO: 112724 - DNA, 30 bp, Artificial Sequence
  Synthetic oligonucleotide
gggatggcacaatttcgtatggttgagttc

SEQ ID NO: 112725 - DNA, 30 bp, Artificial Sequence
  Synthetic oligonucleotide
acaattcgcagggggaatgaatacacgttc

SEQ ID NO: 112726 - DNA, 30 bp, Artificial Sequence
  Synthetic oligonucleotide
ctgttactcatcgtgactgaagatacgttc

SEQ ID NO: 112727 - DNA, 30 bp, Artificial Sequence
  Synthetic oligonucleotide
tcaaagagaaccagttcggtgggtacgttc

SEQ ID NO: 112728 - DNA, 30 bp, Artificial Sequence
  Synthetic oligonucleotide
cgcggatgtgtacatagtgctttaccgttc

SEQ ID NO: 112729 - DNA, 30 bp, Artificial Sequence
  Synthetic oligonucleotide
gcactcgcggaaaggtagtccgatccgttc

SEQ ID NO: 112730 - DNA, 30 bp, Artificial Sequence
  Synthetic oligonucleotide
acagtctcgtttgtggaaagcatagcgttc

SEQ ID NO: 112731 - DNA, 30 bp, Artificial Sequence
  Synthetic oligonucleotide
ctgataataggatgtgggtggttcgcgttc

SEQ ID NO: 112732 - DNA, 30 bp, Artificial Sequence
  Synthetic oligonucleotide
tcgcgtgaactggcaaggtcgagggcgttc

SEQ ID NO: 112733 - DNA, 30 bp, Artificial Sequence
  Synthetic oligonucleotide
atgggataatgggacgttgtatcatcgttc

SEQ ID NO: 112734 - DNA, 30 bp, Artificial Sequence
  Synthetic oligonucleotide
tcacgttcactggtaaacaaggactcgttc

SEQ ID NO: 112735 - DNA, 30 bp, Artificial Sequence
  Synthetic oligonucleotide
aacacttagatcatcttgctaataaggttc

SEQ ID NO: 112736 - DNA, 30 bp, Artificial Sequence
  Synthetic oligonucleotide
gggtgaagacgagagcacttctagaggttc

SEQ ID NO: 112737 - DNA, 29 bp, Artificial Sequence
  Synthetic oligonucleotide
cgccagagactaaacggcatatgaggttc

SEQ ID NO: 112738 - DNA, 30 bp, Artificial Sequence
  Synthetic oligonucleotide
tgaggacacttgagctaacgcgagcggttc

SEQ ID NO: 112739 - DNA, 30 bp, Artificial Sequence
  Synthetic oligonucleotide
cagagaaaagcccatcgcctccgcgggttc

SEQ ID NO: 112740 - DNA, 30 bp, Artificial Sequence
  Synthetic oligonucleotide
acgactgaacgttcaagacggtgcgggttc

SEQ ID NO: 112741 - DNA, 30 bp, Artificial Sequence
  Synthetic oligonucleotide
aagagtcaaacttatggtgtgcacgtgttc

SEQ ID NO: 112742 - DNA, 30 bp, Artificial Sequence
  Synthetic oligonucleotide
acaacgcgggggattcagtgacacgatttc

SEQ ID NO: 112743 - DNA, 30 bp, Artificial Sequence
  Synthetic oligonucleotide
gcagaggtaggcctagcaggtcgcgatttc

SEQ ID NO: 112744 - DNA, 30 bp, Artificial Sequence
  Synthetic oligonucleotide
gtgtcgggaacgagccatcggatatatttc

SEQ ID NO: 112745 - DNA, 30 bp, Artificial Sequence
  Synthetic oligonucleotide
ggtagaggagaggagtgaatttcaactttc

SEQ ID NO: 112746 - DNA, 30 bp, Artificial Sequence
  Synthetic oligonucleotide
tatgaacacgacatgaacaccagacctttc

SEQ ID NO: 112747 - DNA, 30 bp, Artificial Sequence
  Synthetic oligonucleotide
agtttaacaacacttcgaacgggagctttc

SEQ ID NO: 112748 - DNA, 30 bp, Artificial Sequence
  Synthetic oligonucleotide
taatcgaaaacccagatttggtaatctttc

SEQ ID NO: 112749 - DNA, 30 bp, Artificial Sequence
  Synthetic oligonucleotide
cgagttgtggtacgtgacgattgctctttc

SEQ ID NO: 112750 - DNA, 30 bp, Artificial Sequence
  Synthetic oligonucleotide
tcgacaggtttgatagcgtcatggagtttc

SEQ ID NO: 112751 - DNA, 30 bp, Artificial Sequence
  Synthetic oligonucleotide
agtacggagtactagtaaggcgtgggtttc

SEQ ID NO: 112752 - DNA, 30 bp, Artificial Sequence
  Synthetic oligonucleotide
tggtcgtcgattacgaaggccaaatgtttc

SEQ ID NO: 112753 - DNA, 30 bp, Artificial Sequence
  Synthetic oligonucleotide
acagacatcttaatgccaattccatgtttc

SEQ ID NO: 112754 - DNA, 30 bp, Artificial Sequence
  Synthetic oligonucleotide
ggaccacggagttatgatagaataattttc

SEQ ID NO: 112755 - DNA, 30 bp, Artificial Sequence
  Synthetic oligonucleotide
ccgatgcgtccgagaaaataccatcttttc

SEQ ID NO: 112756 - DNA, 30 bp, Artificial Sequence
  Synthetic oligonucleotide
atcgacagtcgtactggacgatgtcttttc

SEQ ID NO: 112757 - DNA, 30 bp, Artificial Sequence
  Synthetic oligonucleotide
atcttcgaaatatctggcatgaaagttttc

SEQ ID NO: 112758 - DNA, 30 bp, Artificial Sequence
  Synthetic oligonucleotide
acgtgcgcgaagatacgtaggcacgttttc

SEQ ID NO: 112759 - DNA, 30 bp, Artificial Sequence
  Synthetic oligonucleotide
gtgaacccagggcttcaggagccaaaaaag

SEQ ID NO: 112760 - DNA, 30 bp, Artificial Sequence
  Synthetic oligonucleotide
tcgagccgattggcggttcgactcaaaaag

SEQ ID NO: 112761 - DNA, 30 bp, Artificial Sequence
  Synthetic oligonucleotide
aaaacagcacttcgaaagaatctcaaaaag

SEQ ID NO: 112762 - DNA, 30 bp, Artificial Sequence
  Synthetic oligonucleotide
ttgcaatataggcgttcagccccgaaaaag

SEQ ID NO: 112763 - DNA, 30 bp, Artificial Sequence
  Synthetic oligonucleotide
catcaccgtaggtagcgtcactctaaaaag

SEQ ID NO: 112764 - DNA, 30 bp, Artificial Sequence
  Synthetic oligonucleotide
ttggttagggccaaaatgcttagacaaaag

SEQ ID NO: 112765 - DNA, 30 bp, Artificial Sequence
  Synthetic oligonucleotide
aacctggtccgtcatacgtgtatccaaaag

SEQ ID NO: 112766 - DNA, 30 bp, Artificial Sequence
  Synthetic oligonucleotide
cgccgtgcccatactgccggtttgcaaaag

SEQ ID NO: 112767 - DNA, 30 bp, Artificial Sequence
  Synthetic oligonucleotide
aacataaagccatattccgcacgtcaaaag

SEQ ID NO: 112768 - DNA, 30 bp, Artificial Sequence
  Synthetic oligonucleotide
atacagccgcagaaatcatcgcgtgaaaag

SEQ ID NO: 112769 - DNA, 29 bp, Artificial Sequence
  Synthetic oligonucleotide
gcgaaactgactgcattttttgtgaaaag

SEQ ID NO: 112770 - DNA, 30 bp, Artificial Sequence
  Synthetic oligonucleotide
agtagtctcttagacgtctatccaacaaag

SEQ ID NO: 112771 - DNA, 30 bp, Artificial Sequence
  Synthetic oligonucleotide
taacactggacaaggatcagcttcacaaag

SEQ ID NO: 112772 - DNA, 30 bp, Artificial Sequence
  Synthetic oligonucleotide
caagccaaacgtagcactaggatgacaaag

SEQ ID NO: 112773 - DNA, 30 bp, Artificial Sequence
  Synthetic oligonucleotide
aggcgggctttcagccatcgcttgacaaag

SEQ ID NO: 112774 - DNA, 30 bp, Artificial Sequence
  Synthetic oligonucleotide
tagactgcccaggaaaggggggatacaaag

SEQ ID NO: 112775 - DNA, 30 bp, Artificial Sequence
  Synthetic oligonucleotide
cgggagctatcttcaaactcttgtacaaag

SEQ ID NO: 112776 - DNA, 30 bp, Artificial Sequence
  Synthetic oligonucleotide
ctaggcgaggcagatttgattagaccaaag

SEQ ID NO: 112777 - DNA, 30 bp, Artificial Sequence
  Synthetic oligonucleotide
gccaccacggatcgaattcaatgaccaaag

SEQ ID NO: 112778 - DNA, 30 bp, Artificial Sequence
  Synthetic oligonucleotide
atgttatccggatgtcctgcctcgccaaag

SEQ ID NO: 112779 - DNA, 30 bp, Artificial Sequence
  Synthetic oligonucleotide
tcaagggcggtctaaaggggatggccaaag

SEQ ID NO: 112780 - DNA, 30 bp, Artificial Sequence
  Synthetic oligonucleotide
caatgatggtattctaagactggtccaaag

SEQ ID NO: 112781 - DNA, 30 bp, Artificial Sequence
  Synthetic oligonucleotide
acccgtatgagcataactatcaacgcaaag

SEQ ID NO: 112782 - DNA, 30 bp, Artificial Sequence
  Synthetic oligonucleotide
atcacttaagaattggcccgtgaggcaaag

SEQ ID NO: 112783 - DNA, 30 bp, Artificial Sequence
  Synthetic oligonucleotide
gaatggcttccatgcaaccgatcggcaaag

SEQ ID NO: 112784 - DNA, 30 bp, Artificial Sequence
  Synthetic oligonucleotide
cgtaccgaagtgctcttgttacgggcaaag

SEQ ID NO: 112785 - DNA, 30 bp, Artificial Sequence
  Synthetic oligonucleotide
agtatacattagttcttagccagatcaaag

SEQ ID NO: 112786 - DNA, 30 bp, Artificial Sequence
  Synthetic oligonucleotide
cataatgctacagtgcccaaagtatcaaag

SEQ ID NO: 112787 - DNA, 30 bp, Artificial Sequence
  Synthetic oligonucleotide
caactctattatctaaagtttggctcaaag

SEQ ID NO: 112788 - DNA, 30 bp, Artificial Sequence
  Synthetic oligonucleotide
tcgtgctaggaccgtgctatagagtcaaag

SEQ ID NO: 112789 - DNA, 29 bp, Artificial Sequence
  Synthetic oligonucleotide
gggaacgccccaaaagcttcccgtcaaag

SEQ ID NO: 112790 - DNA, 30 bp, Artificial Sequence
  Synthetic oligonucleotide
aaaaacgggccaatcaaggtccacagaaag

SEQ ID NO: 112791 - DNA, 30 bp, Artificial Sequence
  Synthetic oligonucleotide
ctgggccactaagcagaatcgtacagaaag

SEQ ID NO: 112792 - DNA, 30 bp, Artificial Sequence
  Synthetic oligonucleotide
tgtataaggcagtaccgcgtccctagaaag

SEQ ID NO: 112793 - DNA, 30 bp, Artificial Sequence
  Synthetic oligonucleotide
taataaggaaatcgtacataagaacgaaag

SEQ ID NO: 112794 - DNA, 30 bp, Artificial Sequence
  Synthetic oligonucleotide
tcggggattatttatcgcaccgtccgaaag

SEQ ID NO: 112795 - DNA, 30 bp, Artificial Sequence
  Synthetic oligonucleotide
aatcgagagagacggtacaatagtcgaaag

SEQ ID NO: 112796 - DNA, 30 bp, Artificial Sequence
  Synthetic oligonucleotide
catacagggttaagcggcctcaggggaaag

SEQ ID NO: 112797 - DNA, 30 bp, Artificial Sequence
  Synthetic oligonucleotide
atctacgggccggataaagtatgtggaaag

SEQ ID NO: 112798 - DNA, 30 bp, Artificial Sequence
  Synthetic oligonucleotide
ctaaggacacgtagcagttgctgatgaaag

SEQ ID NO: 112799 - DNA, 30 bp, Artificial Sequence
  Synthetic oligonucleotide
tgctagtatgatttaaaagtggtatgaaag

SEQ ID NO: 112800 - DNA, 30 bp, Artificial Sequence
  Synthetic oligonucleotide
gtcgggatgcgatctgccagcagttgaaag

SEQ ID NO: 112801 - DNA, 30 bp, Artificial Sequence
  Synthetic oligonucleotide
cgaacttagggtgagtatcaacgttgaaag

SEQ ID NO: 112802 - DNA, 30 bp, Artificial Sequence
  Synthetic oligonucleotide
acgtatttgtggggtagataaggttgaaag

SEQ ID NO: 112803 - DNA, 30 bp, Artificial Sequence
  Synthetic oligonucleotide
ggactttaacagtctacataacctataaag

SEQ ID NO: 112804 - DNA, 29 bp, Artificial Sequence
  Synthetic oligonucleotide
tgaagagacaactacaggatcgactaaag

SEQ ID NO: 112805 - DNA, 30 bp, Artificial Sequence
  Synthetic oligonucleotide
cccattgcagagttaagaaacaacctaaag

SEQ ID NO: 112806 - DNA, 30 bp, Artificial Sequence
  Synthetic oligonucleotide
cagaccaagtgtttagtggccgggctaaag

SEQ ID NO: 112807 - DNA, 30 bp, Artificial Sequence
  Synthetic oligonucleotide
gggagccctacatggagcgtcgatctaaag

SEQ ID NO: 112808 - DNA, 30 bp, Artificial Sequence
  Synthetic oligonucleotide
aaatggtctatggcaataggcactctaaag

SEQ ID NO: 112809 - DNA, 30 bp, Artificial Sequence
  Synthetic oligonucleotide
ttagccctctaacccgctacaagagtaaag

SEQ ID NO: 112810 - DNA, 30 bp, Artificial Sequence
  Synthetic oligonucleotide
gggtagagtagcgccagattctccgtaaag

SEQ ID NO: 112811 - DNA, 30 bp, Artificial Sequence
  Synthetic oligonucleotide
atacagcatcattaagcgtaaagcgtaaag

SEQ ID NO: 112812 - DNA, 30 bp, Artificial Sequence
  Synthetic oligonucleotide
cagtacggcagaaatacgcgtgggttaaag

SEQ ID NO: 112813 - DNA, 30 bp, Artificial Sequence
  Synthetic oligonucleotide
ttgacaggtccgattcgtgtgcgaaacaag

SEQ ID NO: 112814 - DNA, 30 bp, Artificial Sequence
  Synthetic oligonucleotide
tgcatcttaggcagagcaatacagaacaag

SEQ ID NO: 112815 - DNA, 30 bp, Artificial Sequence
  Synthetic oligonucleotide
cattcggacagtttctctcaacggaacaag

SEQ ID NO: 112816 - DNA, 30 bp, Artificial Sequence
  Synthetic oligonucleotide
gaggtgtagtcataacattgataacacaag

SEQ ID NO: 112817 - DNA, 30 bp, Artificial Sequence
  Synthetic oligonucleotide
tcgggggaagggctcgttattctgcacaag

SEQ ID NO: 112818 - DNA, 30 bp, Artificial Sequence
  Synthetic oligonucleotide
aaatcgaagcgcacaggggcttaagacaag

SEQ ID NO: 112819 - DNA, 30 bp, Artificial Sequence
  Synthetic oligonucleotide
tgggatagggatccacgcctaccagacaag

SEQ ID NO: 112820 - DNA, 30 bp, Artificial Sequence
  Synthetic oligonucleotide
cggggggggtttgaccagctgtcagacaag

SEQ ID NO: 112821 - DNA, 30 bp, Artificial Sequence
  Synthetic oligonucleotide
cgatctggagcctcggtgacgagcgacaag

SEQ ID NO: 112822 - DNA, 30 bp, Artificial Sequence
  Synthetic oligonucleotide
ttccgtagcccggaagtgccacaggacaag

SEQ ID NO: 112823 - DNA, 30 bp, Artificial Sequence
  Synthetic oligonucleotide
gatacatagcgcgccaaaaccccggacaag

SEQ ID NO: 112824 - DNA, 30 bp, Artificial Sequence
  Synthetic oligonucleotide
ccgctcaacgaaacagtcctgctggacaag

SEQ ID NO: 112825 - DNA, 30 bp, Artificial Sequence
  Synthetic oligonucleotide
aattgcgctaaaagagagtctatctacaag

SEQ ID NO: 112826 - DNA, 30 bp, Artificial Sequence
  Synthetic oligonucleotide
aacgacattgcatcaagtggctcgtacaag

SEQ ID NO: 112827 - DNA, 30 bp, Artificial Sequence
  Synthetic oligonucleotide
aataaagtgtcgccacagtgaaggaccaag

SEQ ID NO: 112828 - DNA, 30 bp, Artificial Sequence
  Synthetic oligonucleotide
gcgtcctgcgggtcaggggcacggaccaag

SEQ ID NO: 112829 - DNA, 30 bp, Artificial Sequence
  Synthetic oligonucleotide
tcgagcttcgagttcttcacaacacccaag

SEQ ID NO: 112830 - DNA, 30 bp, Artificial Sequence
  Synthetic oligonucleotide
caatacagaacgcgatacaggtcacccaag

SEQ ID NO: 112831 - DNA, 30 bp, Artificial Sequence
  Synthetic oligonucleotide
gcagtagaggcgtattaatgtgtgcccaag

SEQ ID NO: 112832 - DNA, 30 bp, Artificial Sequence
  Synthetic oligonucleotide
gcggtgctaacatatgccggcaaagccaag

SEQ ID NO: 112833 - DNA, 30 bp, Artificial Sequence
  Synthetic oligonucleotide
agtggtgcggttccagcaataggagccaag

SEQ ID NO: 112834 - DNA, 30 bp, Artificial Sequence
  Synthetic oligonucleotide
agtgttcccaaatgttggcagcgggccaag

SEQ ID NO: 112835 - DNA, 30 bp, Artificial Sequence
  Synthetic oligonucleotide
aaacggagatacatatgccaagcgtccaag

SEQ ID NO: 112836 - DNA, 30 bp, Artificial Sequence
  Synthetic oligonucleotide
tcaagaggtaaacaactactgaattccaag

SEQ ID NO: 112837 - DNA, 30 bp, Artificial Sequence
  Synthetic oligonucleotide
taggagatgtgcggcgccactgattccaag

SEQ ID NO: 112838 - DNA, 30 bp, Artificial Sequence
  Synthetic oligonucleotide
aaaagcagaaagctgtctaatttaagcaag

SEQ ID NO: 112839 - DNA, 30 bp, Artificial Sequence
  Synthetic oligonucleotide
gtagcggtaaccatcccgcagagcagcaag

SEQ ID NO: 112840 - DNA, 30 bp, Artificial Sequence
  Synthetic oligonucleotide
tgccaggggggcgggcgcgaagcgagcaag

SEQ ID NO: 112841 - DNA, 30 bp, Artificial Sequence
  Synthetic oligonucleotide
ttgaagaaaccctatagaggtaatcgcaag

SEQ ID NO: 112842 - DNA, 30 bp, Artificial Sequence
  Synthetic oligonucleotide
gtaaaaaaagtctgccacactgggggcaag

SEQ ID NO: 112843 - DNA, 30 bp, Artificial Sequence
  Synthetic oligonucleotide
gataaccaatgtatatttgcgttgggcaag

SEQ ID NO: 112844 - DNA, 30 bp, Artificial Sequence
  Synthetic oligonucleotide
agttcgtaacttggtcaagcggactgcaag

SEQ ID NO: 112845 - DNA, 30 bp, Artificial Sequence
  Synthetic oligonucleotide
ccctaagctagaagaagctggttctgcaag

SEQ ID NO: 112846 - DNA, 30 bp, Artificial Sequence
  Synthetic oligonucleotide
gaacgaagtcatgtacgagcgatgtgcaag

SEQ ID NO: 112847 - DNA, 30 bp, Artificial Sequence
  Synthetic oligonucleotide
tggggatcctgctttctcgtcaattgcaag

SEQ ID NO: 112848 - DNA, 30 bp, Artificial Sequence
  Synthetic oligonucleotide
tccgcttgcggatactaacaggattgcaag

SEQ ID NO: 112849 - DNA, 30 bp, Artificial Sequence
  Synthetic oligonucleotide
gaagcagggtgacccgtgtaatattgcaag

SEQ ID NO: 112850 - DNA, 30 bp, Artificial Sequence
  Synthetic oligonucleotide
aagtggctgagcaccgtaagataaatcaag

SEQ ID NO: 112851 - DNA, 30 bp, Artificial Sequence
  Synthetic oligonucleotide
caaaggggcggcctggcaaatctaatcaag

SEQ ID NO: 112852 - DNA, 30 bp, Artificial Sequence
  Synthetic oligonucleotide
gtgctatcgtaaggagaagttctaatcaag

SEQ ID NO: 112853 - DNA, 30 bp, Artificial Sequence
  Synthetic oligonucleotide
tgaacgtaccatatcaagtgcatgatcaag

SEQ ID NO: 112854 - DNA, 30 bp, Artificial Sequence
  Synthetic oligonucleotide
tgcactacgaattctgaaaactctatcaag

SEQ ID NO: 112855 - DNA, 30 bp, Artificial Sequence
  Synthetic oligonucleotide
aggaatgtggcacaagagttgatgctcaag

SEQ ID NO: 112856 - DNA, 30 bp, Artificial Sequence
  Synthetic oligonucleotide
tgagaaactatccgagcctgccatctcaag

SEQ ID NO: 112857 - DNA, 30 bp, Artificial Sequence
  Synthetic oligonucleotide
tggatgcacgaggtggttaatattctcaag

SEQ ID NO: 112858 - DNA, 30 bp, Artificial Sequence
  Synthetic oligonucleotide
catatgcattgtgggtcaaattttctcaag

SEQ ID NO: 112859 - DNA, 30 bp, Artificial Sequence
  Synthetic oligonucleotide
gttccttctaagtgaatagtgctagtcaag

SEQ ID NO: 112860 - DNA, 30 bp, Artificial Sequence
  Synthetic oligonucleotide
ttccgataacgtatctttagcaccgtcaag

SEQ ID NO: 112861 - DNA, 30 bp, Artificial Sequence
  Synthetic oligonucleotide
tatcactgggtgtataaggctaaggtcaag

SEQ ID NO: 112862 - DNA, 30 bp, Artificial Sequence
  Synthetic oligonucleotide
cccgcacaccgaaaagtatctgctgtcaag

SEQ ID NO: 112863 - DNA, 30 bp, Artificial Sequence
  Synthetic oligonucleotide
tagaactccgcgccgcgcctaattgtcaag

SEQ ID NO: 112864 - DNA, 30 bp, Artificial Sequence
  Synthetic oligonucleotide
acctactgtaacagccgtcggcgattcaag

SEQ ID NO: 112865 - DNA, 30 bp, Artificial Sequence
  Synthetic oligonucleotide
aggggtaaacgcaatgggtggtgattcaag

SEQ ID NO: 112866 - DNA, 30 bp, Artificial Sequence
  Synthetic oligonucleotide
aaatcggtctagggctcaatagtattcaag

SEQ ID NO: 112867 - DNA, 30 bp, Artificial Sequence
  Synthetic oligonucleotide
cacggccaaagtctgcattgcagcttcaag

SEQ ID NO: 112868 - DNA, 30 bp, Artificial Sequence
  Synthetic oligonucleotide
agtcttcgagatgttgaagctaagttcaag

SEQ ID NO: 112869 - DNA, 30 bp, Artificial Sequence
  Synthetic oligonucleotide
cgtggacgttttattgaatcggagttcaag

SEQ ID NO: 112870 - DNA, 30 bp, Artificial Sequence
  Synthetic oligonucleotide
gagcgagggcctccgcggtgcctgttcaag

SEQ ID NO: 112871 - DNA, 30 bp, Artificial Sequence
  Synthetic oligonucleotide
caggacagatggaggcgctccctaaagaag

SEQ ID NO: 112872 - DNA, 30 bp, Artificial Sequence
  Synthetic oligonucleotide
aagaaccttgatacgcgtatagtaaagaag

SEQ ID NO: 112873 - DNA, 30 bp, Artificial Sequence
  Synthetic oligonucleotide
ctcaatgactgaggcagaggatctaagaag

SEQ ID NO: 112874 - DNA, 30 bp, Artificial Sequence
  Synthetic oligonucleotide
agtttgccgcgcatagacgccaaccagaag

SEQ ID NO: 112875 - DNA, 30 bp, Artificial Sequence
  Synthetic oligonucleotide
aagtccccttacagaactgtcgggcagaag

SEQ ID NO: 112876 - DNA, 30 bp, Artificial Sequence
  Synthetic oligonucleotide
atcgctccgattcttaacacttttcagaag

SEQ ID NO: 112877 - DNA, 30 bp, Artificial Sequence
  Synthetic oligonucleotide
caccgtaattaaagcggactatccgagaag

SEQ ID NO: 112878 - DNA, 30 bp, Artificial Sequence
  Synthetic oligonucleotide
gggctcgtgcgttattaacggggcgagaag

SEQ ID NO: 112879 - DNA, 30 bp, Artificial Sequence
  Synthetic oligonucleotide
tcagttcgggggaacaagtaaaatgagaag

SEQ ID NO: 112880 - DNA, 30 bp, Artificial Sequence
  Synthetic oligonucleotide
ttttcagggacgcggacaacatactagaag

SEQ ID NO: 112881 - DNA, 31 bp, Artificial Sequence
  Synthetic oligonucleotide
taaaagaccgcgtatagtcgcgaggtagaag

SEQ ID NO: 112882 - DNA, 30 bp, Artificial Sequence
  Synthetic oligonucleotide
ggttcaaacgctaagtcgtaacggtagaag

SEQ ID NO: 112883 - DNA, 30 bp, Artificial Sequence
  Synthetic oligonucleotide
ccgatgattgattagtcaaaagggtagaag

SEQ ID NO: 112884 - DNA, 30 bp, Artificial Sequence
  Synthetic oligonucleotide
acgggttccaaattcgtaggtatcacgaag

SEQ ID NO: 112885 - DNA, 30 bp, Artificial Sequence
  Synthetic oligonucleotide
gacaacgacttgcattgtctgaagacgaag

SEQ ID NO: 112886 - DNA, 30 bp, Artificial Sequence
  Synthetic oligonucleotide
ctcgtgaataaaccggattcgagtacgaag

SEQ ID NO: 112887 - DNA, 30 bp, Artificial Sequence
  Synthetic oligonucleotide
caattaggcgtcaaaaaggatagtacgaag

SEQ ID NO: 112888 - DNA, 30 bp, Artificial Sequence
  Synthetic oligonucleotide
tccgtgtctggccagctccagcgtacgaag

SEQ ID NO: 112889 - DNA, 30 bp, Artificial Sequence
  Synthetic oligonucleotide
acatttaatcttgttattgatagaccgaag

SEQ ID NO: 112890 - DNA, 30 bp, Artificial Sequence
  Synthetic oligonucleotide
gggtgatagcgcaagaaagacaagccgaag

SEQ ID NO: 112891 - DNA, 30 bp, Artificial Sequence
  Synthetic oligonucleotide
tacgcgctctaaagcaaatcgatagcgaag

SEQ ID NO: 112892 - DNA, 30 bp, Artificial Sequence
  Synthetic oligonucleotide
aatgggtgcaaggggttacgacacgcgaag

SEQ ID NO: 112893 - DNA, 30 bp, Artificial Sequence
  Synthetic oligonucleotide
ggtattgggtccgtcagaacctaggcgaag

SEQ ID NO: 112894 - DNA, 30 bp, Artificial Sequence
  Synthetic oligonucleotide
atgtgcctccgtggggcgggcgtttcgaag

SEQ ID NO: 112895 - DNA, 30 bp, Artificial Sequence
  Synthetic oligonucleotide
accaaaatatcggactctccaacaaggaag

SEQ ID NO: 112896 - DNA, 30 bp, Artificial Sequence
  Synthetic oligonucleotide
attatctccgatgacaaacgctgaaggaag

SEQ ID NO: 112897 - DNA, 30 bp, Artificial Sequence
  Synthetic oligonucleotide
gaccgtaaagagggtgttatcggcaggaag

SEQ ID NO: 112898 - DNA, 30 bp, Artificial Sequence
  Synthetic oligonucleotide
agaggataggccggcggataggagaggaag

SEQ ID NO: 112899 - DNA, 30 bp, Artificial Sequence
  Synthetic oligonucleotide
ggcgtaagttttagccccccgtagaggaag

SEQ ID NO: 112900 - DNA, 30 bp, Artificial Sequence
  Synthetic oligonucleotide
gtgcaccacacgaattgaccatggaggaag

SEQ ID NO: 112901 - DNA, 30 bp, Artificial Sequence
  Synthetic oligonucleotide
tatcagtgagtgcaacaagtgttgaggaag

SEQ ID NO: 112902 - DNA, 30 bp, Artificial Sequence
  Synthetic oligonucleotide
ccataacatctctaacatgcttataggaag

SEQ ID NO: 112903 - DNA, 30 bp, Artificial Sequence
  Synthetic oligonucleotide
ggtttcaacgataggaggattcgtaggaag

SEQ ID NO: 112904 - DNA, 30 bp, Artificial Sequence
  Synthetic oligonucleotide
cataaatgctgaagcattataacacggaag

SEQ ID NO: 112905 - DNA, 30 bp, Artificial Sequence
  Synthetic oligonucleotide
ttaccagtataatagtgcgtgccgcggaag

SEQ ID NO: 112906 - DNA, 30 bp, Artificial Sequence
  Synthetic oligonucleotide
tagtggagtcctgctccctagcgggggaag

SEQ ID NO: 112907 - DNA, 30 bp, Artificial Sequence
  Synthetic oligonucleotide
atgccagtcatttggtcatagcaatggaag

SEQ ID NO: 112908 - DNA, 30 bp, Artificial Sequence
  Synthetic oligonucleotide
tcatctacttacagcatcggctaatggaag

SEQ ID NO: 112909 - DNA, 30 bp, Artificial Sequence
  Synthetic oligonucleotide
ggataagggaaacgatccgtttaatggaag

SEQ ID NO: 112910 - DNA, 30 bp, Artificial Sequence
  Synthetic oligonucleotide
tgactctcatagggggcgagcggttggaag

SEQ ID NO: 112911 - DNA, 30 bp, Artificial Sequence
  Synthetic oligonucleotide
ggggactagttgaggcgagcgggaatgaag

SEQ ID NO: 112912 - DNA, 30 bp, Artificial Sequence
  Synthetic oligonucleotide
ctgatcggctgtttcaaaccccccatgaag

SEQ ID NO: 112913 - DNA, 30 bp, Artificial Sequence
  Synthetic oligonucleotide
caacattatgcctcgtcaacctgcatgaag

SEQ ID NO: 112914 - DNA, 30 bp, Artificial Sequence
  Synthetic oligonucleotide
ataaaccaagattaaggatgaaggatgaag

SEQ ID NO: 112915 - DNA, 30 bp, Artificial Sequence
  Synthetic oligonucleotide
tagacagatacccttccacagggtatgaag

SEQ ID NO: 112916 - DNA, 30 bp, Artificial Sequence
  Synthetic oligonucleotide
atgcggataattcgcgggtacccactgaag

SEQ ID NO: 112917 - DNA, 30 bp, Artificial Sequence
  Synthetic oligonucleotide
gcgccaagttggtcaacgggaatactgaag

SEQ ID NO: 112918 - DNA, 30 bp, Artificial Sequence
  Synthetic oligonucleotide
gtgtaaagagttcgccggcgagtactgaag

SEQ ID NO: 112919 - DNA, 30 bp, Artificial Sequence
  Synthetic oligonucleotide
gaagaaagagtagaagagcacggcctgaag

SEQ ID NO: 112920 - DNA, 30 bp, Artificial Sequence
  Synthetic oligonucleotide
gtggagagtactcgtcttaagggcctgaag

SEQ ID NO: 112921 - DNA, 29 bp, Artificial Sequence
  Synthetic oligonucleotide
gataggtccagcgtaggagaattctgaag

SEQ ID NO: 112922 - DNA, 30 bp, Artificial Sequence
  Synthetic oligonucleotide
tatgaagatgtgcgcaacttttttctgaag

SEQ ID NO: 112923 - DNA, 30 bp, Artificial Sequence
  Synthetic oligonucleotide
ctgcagagattattccggcggaatgtgaag

SEQ ID NO: 112924 - DNA, 30 bp, Artificial Sequence
  Synthetic oligonucleotide
aggcccgtaagaatccgtaagtatgtgaag

SEQ ID NO: 112925 - DNA, 30 bp, Artificial Sequence
  Synthetic oligonucleotide
cgctaacgaattccatccgtgactgtgaag

SEQ ID NO: 112926 - DNA, 30 bp, Artificial Sequence
  Synthetic oligonucleotide
tatctccaccagaattcaagaagattgaag

SEQ ID NO: 112927 - DNA, 30 bp, Artificial Sequence
  Synthetic oligonucleotide
ggctcccccttgagtgttcttggaaataag

SEQ ID NO: 112928 - DNA, 30 bp, Artificial Sequence
  Synthetic oligonucleotide
tagtacgctcctcgcatgggccccaataag

SEQ ID NO: 112929 - DNA, 30 bp, Artificial Sequence
  Synthetic oligonucleotide
ggctatgcgattataagacagaggaataag

SEQ ID NO: 112930 - DNA, 30 bp, Artificial Sequence
  Synthetic oligonucleotide
gtgagaatctgatggaacgagaggaataag

SEQ ID NO: 112931 - DNA, 30 bp, Artificial Sequence
  Synthetic oligonucleotide
ggaattgccgtatcagcctaacgacataag

SEQ ID NO: 112932 - DNA, 31 bp, Artificial Sequence
  Synthetic oligonucleotide
gtacgcttcgtgcgggaatcattaccataag

SEQ ID NO: 112933 - DNA, 30 bp, Artificial Sequence
  Synthetic oligonucleotide
gactgctaatgcaacaagagcgtgcataag

SEQ ID NO: 112934 - DNA, 30 bp, Artificial Sequence
  Synthetic oligonucleotide
agcgcgaggtgacggaggaggttcgataag

SEQ ID NO: 112935 - DNA, 30 bp, Artificial Sequence
  Synthetic oligonucleotide
ccccgaactcaaagtcgagggttcgataag

SEQ ID NO: 112936 - DNA, 30 bp, Artificial Sequence
  Synthetic oligonucleotide
tctacgaattgccggtctgtaaaatataag

SEQ ID NO: 112937 - DNA, 30 bp, Artificial Sequence
  Synthetic oligonucleotide
acaagtaagataggcaagggtggctataag

SEQ ID NO: 112938 - DNA, 30 bp, Artificial Sequence
  Synthetic oligonucleotide
ttcattggcaagggtgtcagtgcgtataag

SEQ ID NO: 112939 - DNA, 30 bp, Artificial Sequence
  Synthetic oligonucleotide
tctgcacatgggtgattaagaaagactaag

SEQ ID NO: 112940 - DNA, 30 bp, Artificial Sequence
  Synthetic oligonucleotide
gaagccgaaacctcggaagcacagactaag

SEQ ID NO: 112941 - DNA, 30 bp, Artificial Sequence
  Synthetic oligonucleotide
gagaagcagatcatactcatagatcctaag

SEQ ID NO: 112942 - DNA, 30 bp, Artificial Sequence
  Synthetic oligonucleotide
ctaattaaatcctgggccagccaagctaag

SEQ ID NO: 112943 - DNA, 30 bp, Artificial Sequence
  Synthetic oligonucleotide
cagggcggcacgggggtcatactagctaag

SEQ ID NO: 112944 - DNA, 30 bp, Artificial Sequence
  Synthetic oligonucleotide
ccaccggactgaacatcgcgtgacgctaag

SEQ ID NO: 112945 - DNA, 30 bp, Artificial Sequence
  Synthetic oligonucleotide
atggtgccacacatgtaccttagcgctaag

SEQ ID NO: 112946 - DNA, 30 bp, Artificial Sequence
  Synthetic oligonucleotide
gtctgataggggtctgactgtggggctaag

SEQ ID NO: 112947 - DNA, 30 bp, Artificial Sequence
  Synthetic oligonucleotide
caattgcggcggcagtatcggaattctaag

SEQ ID NO: 112948 - DNA, 30 bp, Artificial Sequence
  Synthetic oligonucleotide
cacagggtaggtaatagctgcgcaagtaag

SEQ ID NO: 112949 - DNA, 30 bp, Artificial Sequence
  Synthetic oligonucleotide
ctccgagtatcttggggtgatagcagtaag

SEQ ID NO: 112950 - DNA, 30 bp, Artificial Sequence
  Synthetic oligonucleotide
agcccgtagggcctactacatatcagtaag

SEQ ID NO: 112951 - DNA, 30 bp, Artificial Sequence
  Synthetic oligonucleotide
cggtgatgtagggtcatggaaccgagtaag

SEQ ID NO: 112952 - DNA, 29 bp, Artificial Sequence
  Synthetic oligonucleotide
gatatagaaagagacaccgtaatcgtaag

SEQ ID NO: 112953 - DNA, 30 bp, Artificial Sequence
  Synthetic oligonucleotide
cctggcagggcgcgatttgtctcaggtaag

SEQ ID NO: 112954 - DNA, 30 bp, Artificial Sequence
  Synthetic oligonucleotide
gtaccctactagtggaaccttcacggtaag

SEQ ID NO: 112955 - DNA, 30 bp, Artificial Sequence
  Synthetic oligonucleotide
aggactgcgaggttcacccgatgtggtaag

SEQ ID NO: 112956 - DNA, 31 bp, Artificial Sequence
  Synthetic oligonucleotide
tcagggttagaaatccgacaatttttgtaag

SEQ ID NO: 112957 - DNA, 30 bp, Artificial Sequence
  Synthetic oligonucleotide
cgttggagccagaatacttggggaattaag

SEQ ID NO: 112958 - DNA, 30 bp, Artificial Sequence
  Synthetic oligonucleotide
tggccggcagaactgatctaagttattaag

SEQ ID NO: 112959 - DNA, 30 bp, Artificial Sequence
  Synthetic oligonucleotide
aacaggtgggaaggaggatgggcacttaag

SEQ ID NO: 112960 - DNA, 30 bp, Artificial Sequence
  Synthetic oligonucleotide
cctgagaacttaccctcagcaagacttaag

SEQ ID NO: 112961 - DNA, 30 bp, Artificial Sequence
  Synthetic oligonucleotide
gaggatagggctttttgatccaagcttaag

SEQ ID NO: 112962 - DNA, 30 bp, Artificial Sequence
  Synthetic oligonucleotide
tgctcgtcatgaaggagtgcatccgttaag

SEQ ID NO: 112963 - DNA, 30 bp, Artificial Sequence
  Synthetic oligonucleotide
acgatacacggtacaacaactaaggttaag

SEQ ID NO: 112964 - DNA, 30 bp, Artificial Sequence
  Synthetic oligonucleotide
caggccggtagttaatctcctaaggttaag

SEQ ID NO: 112965 - DNA, 30 bp, Artificial Sequence
  Synthetic oligonucleotide
cccttagtcacacgtcgatcagtggttaag

SEQ ID NO: 112966 - DNA, 30 bp, Artificial Sequence
  Synthetic oligonucleotide
ctagtggtaaggaagaacgggtgtgttaag

SEQ ID NO: 112967 - DNA, 30 bp, Artificial Sequence
  Synthetic oligonucleotide
cgacaccaaaagcttggtagcagatttaag

SEQ ID NO: 112968 - DNA, 30 bp, Artificial Sequence
  Synthetic oligonucleotide
gcttaccagctgcctaatcgcctatttaag

SEQ ID NO: 112969 - DNA, 30 bp, Artificial Sequence
  Synthetic oligonucleotide
tagacatattacccaccgacaatgcaacag

SEQ ID NO: 112970 - DNA, 30 bp, Artificial Sequence
  Synthetic oligonucleotide
cggtaagaaccggcgcctgcaccagaacag

SEQ ID NO: 112971 - DNA, 30 bp, Artificial Sequence
  Synthetic oligonucleotide
tttaggcccgcgaaggtcacggcagaacag

SEQ ID NO: 112972 - DNA, 30 bp, Artificial Sequence
  Synthetic oligonucleotide
tccgaaaggggatcttggtctggagaacag

SEQ ID NO: 112973 - DNA, 30 bp, Artificial Sequence
  Synthetic oligonucleotide
aggtttgatcggtttcgggagcatgaacag

SEQ ID NO: 112974 - DNA, 30 bp, Artificial Sequence
  Synthetic oligonucleotide
cgctaacctctatcctcggtggagtaacag

SEQ ID NO: 112975 - DNA, 30 bp, Artificial Sequence
  Synthetic oligonucleotide
ataatacatcgacatcggggagacacacag

SEQ ID NO: 112976 - DNA, 30 bp, Artificial Sequence
  Synthetic oligonucleotide
taagaatatccggtatgtggctccacacag

SEQ ID NO: 112977 - DNA, 30 bp, Artificial Sequence
  Synthetic oligonucleotide
ttgcgctaggcaaaaaagtaaccaccacag

SEQ ID NO: 112978 - DNA, 30 bp, Artificial Sequence
  Synthetic oligonucleotide
ggagtaatatggttgcgaatcaccccacag

SEQ ID NO: 112979 - DNA, 30 bp, Artificial Sequence
  Synthetic oligonucleotide
ttcaggggagttatacagaagagcccacag

SEQ ID NO: 112980 - DNA, 30 bp, Artificial Sequence
  Synthetic oligonucleotide
agccatattgtgtacaaacgttaagcacag

SEQ ID NO: 112981 - DNA, 30 bp, Artificial Sequence
  Synthetic oligonucleotide
gaggtaaccattcctaagaatcttgcacag

SEQ ID NO: 112982 - DNA, 30 bp, Artificial Sequence
  Synthetic oligonucleotide
cggcgtggaagaatgggagaccgttcacag

SEQ ID NO: 112983 - DNA, 30 bp, Artificial Sequence
  Synthetic oligonucleotide
gataagtcgatcgtcacattaaacagacag

SEQ ID NO: 112984 - DNA, 30 bp, Artificial Sequence
  Synthetic oligonucleotide
aagatcgagactcatagagtattcagacag

SEQ ID NO: 112985 - DNA, 30 bp, Artificial Sequence
  Synthetic oligonucleotide
atttaggcggaaacaccgacacatagacag

SEQ ID NO: 112986 - DNA, 30 bp, Artificial Sequence
  Synthetic oligonucleotide
gagatcgtagtccaatcttcaggtagacag

SEQ ID NO: 112987 - DNA, 30 bp, Artificial Sequence
  Synthetic oligonucleotide
gctggacaggcacctattatagtatgacag

SEQ ID NO: 112988 - DNA, 30 bp, Artificial Sequence
  Synthetic oligonucleotide
tctgcgatcagtggaaaggcatagtgacag

SEQ ID NO: 112989 - DNA, 30 bp, Artificial Sequence
  Synthetic oligonucleotide
gtgtatatcgtgacagatgggtcgtgacag

SEQ ID NO: 112990 - DNA, 30 bp, Artificial Sequence
  Synthetic oligonucleotide
ctcaagccacaaggaagtcacagaatacag

SEQ ID NO: 112991 - DNA, 30 bp, Artificial Sequence
  Synthetic oligonucleotide
aaatatgggcaaaaggaggctataatacag

SEQ ID NO: 112992 - DNA, 30 bp, Artificial Sequence
  Synthetic oligonucleotide
accatggtgcatgatagggactcgatacag

SEQ ID NO: 112993 - DNA, 30 bp, Artificial Sequence
  Synthetic oligonucleotide
agtcgcgatagtgtctaatcctatatacag

SEQ ID NO: 112994 - DNA, 30 bp, Artificial Sequence
  Synthetic oligonucleotide
ttgcgatgggtcgaaatcaaccccgtacag

SEQ ID NO: 112995 - DNA, 30 bp, Artificial Sequence
  Synthetic oligonucleotide
gccttcgtgatgaacaaccttctcgtacag

SEQ ID NO: 112996 - DNA, 30 bp, Artificial Sequence
  Synthetic oligonucleotide
gcccgctaagacagaagtgtcagtgtacag

SEQ ID NO: 112997 - DNA, 30 bp, Artificial Sequence
  Synthetic oligonucleotide
ctaaacactcggacattgaaatttgtacag

SEQ ID NO: 112998 - DNA, 30 bp, Artificial Sequence
  Synthetic oligonucleotide
ccaatactaacagagctaggaaacttacag

SEQ ID NO: 112999 - DNA, 30 bp, Artificial Sequence
  Synthetic oligonucleotide
actaagtgtttaatttgcatggccttacag

SEQ ID NO: 113000 - DNA, 30 bp, Artificial Sequence
  Synthetic oligonucleotide
caacgacagcccattaggatgagaaaccag

SEQ ID NO: 113001 - DNA, 30 bp, Artificial Sequence
  Synthetic oligonucleotide
cagccaggaaggtataacttcaacaaccag

SEQ ID NO: 113002 - DNA, 30 bp, Artificial Sequence
  Synthetic oligonucleotide
tacctccaggaaacgtagctggaccaccag

SEQ ID NO: 113003 - DNA, 30 bp, Artificial Sequence
  Synthetic oligonucleotide
ccggctctaccgaattccaacagagaccag

SEQ ID NO: 113004 - DNA, 30 bp, Artificial Sequence
  Synthetic oligonucleotide
atgacgtgtacgacatatcatgccgaccag

SEQ ID NO: 113005 - DNA, 30 bp, Artificial Sequence
  Synthetic oligonucleotide
aacagtgaagtttttttggcatgcgaccag

SEQ ID NO: 113006 - DNA, 30 bp, Artificial Sequence
  Synthetic oligonucleotide
aaaggtaagtatcagcggatgaatgaccag

SEQ ID NO: 113007 - DNA, 30 bp, Artificial Sequence
  Synthetic oligonucleotide
ccgttcgtgggttacgcacgttatgaccag

SEQ ID NO: 113008 - DNA, 30 bp, Artificial Sequence
  Synthetic oligonucleotide
tgtttatcatcggaataggcgtctgaccag

SEQ ID NO: 113009 - DNA, 30 bp, Artificial Sequence
  Synthetic oligonucleotide
tatgaacacacaccccatcggagtgaccag

SEQ ID NO: 113010 - DNA, 30 bp, Artificial Sequence
  Synthetic oligonucleotide
tcagattgtcagtgtatttccattgaccag

SEQ ID NO: 113011 - DNA, 30 bp, Artificial Sequence
  Synthetic oligonucleotide
cggcaggacaattcagtccgtcaataccag

SEQ ID NO: 113012 - DNA, 31 bp, Artificial Sequence
  Synthetic oligonucleotide
caacagcagtggagactaccgttcataccag

SEQ ID NO: 113013 - DNA, 30 bp, Artificial Sequence
  Synthetic oligonucleotide
aaagatttaaagcctcagaaactataccag

SEQ ID NO: 113014 - DNA, 30 bp, Artificial Sequence
  Synthetic oligonucleotide
ccgcgatcgacggcatgtggtgccacccag

SEQ ID NO: 113015 - DNA, 30 bp, Artificial Sequence
  Synthetic oligonucleotide
gcatacgcgcaggactccgcaagcacccag

SEQ ID NO: 113016 - DNA, 30 bp, Artificial Sequence
  Synthetic oligonucleotide
gctcgtgacgccaggacattcgtgacccag

SEQ ID NO: 113017 - DNA, 30 bp, Artificial Sequence
  Synthetic oligonucleotide
ctcacggtcgatcgccaaggccttacccag

SEQ ID NO: 113018 - DNA, 30 bp, Artificial Sequence
  Synthetic oligonucleotide
cgtgggaataaaatgaggtgtgccccccag

SEQ ID NO: 113019 - DNA, 30 bp, Artificial Sequence
  Synthetic oligonucleotide
gcatacccagcgtccgcagttaaagcccag

SEQ ID NO: 113020 - DNA, 30 bp, Artificial Sequence
  Synthetic oligonucleotide
gtcattgtaggagggctagtatcagcccag

SEQ ID NO: 113021 - DNA, 30 bp, Artificial Sequence
  Synthetic oligonucleotide
agcggcataaaggcatccctacagtcccag

SEQ ID NO: 113022 - DNA, 30 bp, Artificial Sequence
  Synthetic oligonucleotide
tgcagacggcgggagtcgcgcatttcccag

SEQ ID NO: 113023 - DNA, 30 bp, Artificial Sequence
  Synthetic oligonucleotide
cggcgaagctcgacggatgctagaagccag

SEQ ID NO: 113024 - DNA, 30 bp, Artificial Sequence
  Synthetic oligonucleotide
attaatctaggatctgagccgataagccag

SEQ ID NO: 113025 - DNA, 30 bp, Artificial Sequence
  Synthetic oligonucleotide
acggcgttgaatctaacgagtcggagccag

SEQ ID NO: 113026 - DNA, 30 bp, Artificial Sequence
  Synthetic oligonucleotide
tcaggtggcaggcgctgcaaataccgccag

SEQ ID NO: 113027 - DNA, 30 bp, Artificial Sequence
  Synthetic oligonucleotide
agacaagcatcggctcattatatccgccag

SEQ ID NO: 113028 - DNA, 30 bp, Artificial Sequence
  Synthetic oligonucleotide
cgtgaagtagtttattcggtactccgccag

SEQ ID NO: 113029 - DNA, 30 bp, Artificial Sequence
  Synthetic oligonucleotide
tatgtatgggaacaaagcaggataggccag

SEQ ID NO: 113030 - DNA, 30 bp, Artificial Sequence
  Synthetic oligonucleotide
tccccgctaacacagcagacaaccggccag

SEQ ID NO: 113031 - DNA, 30 bp, Artificial Sequence
  Synthetic oligonucleotide
tcgcggggtgtactaccagtgaaatgccag

SEQ ID NO: 113032 - DNA, 30 bp, Artificial Sequence
  Synthetic oligonucleotide
gcagggtcgcaaagaggatatcattgccag

SEQ ID NO: 113033 - DNA, 30 bp, Artificial Sequence
  Synthetic oligonucleotide
gcatttcggatatcacaaactggaatccag

SEQ ID NO: 113034 - DNA, 30 bp, Artificial Sequence
  Synthetic oligonucleotide
gcctcggtaaccccgtaacgggacatccag

SEQ ID NO: 113035 - DNA, 30 bp, Artificial Sequence
  Synthetic oligonucleotide
cagctttcaacaggcataccctgcatccag

SEQ ID NO: 113036 - DNA, 30 bp, Artificial Sequence
  Synthetic oligonucleotide
tcatggagccctatttcggtattcatccag

SEQ ID NO: 113037 - DNA, 30 bp, Artificial Sequence
  Synthetic oligonucleotide
tggacagattgttcccgtacggatatccag

SEQ ID NO: 113038 - DNA, 30 bp, Artificial Sequence
  Synthetic oligonucleotide
taaaaaggaacagggattgcagaactccag

SEQ ID NO: 113039 - DNA, 30 bp, Artificial Sequence
  Synthetic oligonucleotide
tccgctatatacaggttaacttaactccag

SEQ ID NO: 113040 - DNA, 30 bp, Artificial Sequence
  Synthetic oligonucleotide
acaggaaatgatgatctctctttcctccag

SEQ ID NO: 113041 - DNA, 30 bp, Artificial Sequence
  Synthetic oligonucleotide
ccaaatggcacctcggaaggctcagtccag

SEQ ID NO: 113042 - DNA, 30 bp, Artificial Sequence
  Synthetic oligonucleotide
ctgtaagtcatgtgcgacaaagacgtccag

SEQ ID NO: 113043 - DNA, 31 bp, Artificial Sequence
  Synthetic oligonucleotide
gattgtatggcgtactccgtgcgcattccag

SEQ ID NO: 113044 - DNA, 30 bp, Artificial Sequence
  Synthetic oligonucleotide
gaatgggtcgcaaatcgaacccgcttccag

SEQ ID NO: 113045 - DNA, 30 bp, Artificial Sequence
  Synthetic oligonucleotide
tgagcaattttggggccgacagtgttccag

SEQ ID NO: 113046 - DNA, 30 bp, Artificial Sequence
  Synthetic oligonucleotide
gaggatgtgtaattgaacgttcctttccag

SEQ ID NO: 113047 - DNA, 30 bp, Artificial Sequence
  Synthetic oligonucleotide
aaaattgaataccagtcgaatcaaaagcag

SEQ ID NO: 113048 - DNA, 30 bp, Artificial Sequence
  Synthetic oligonucleotide
acagtgctggtattagtagccgccaagcag

SEQ ID NO: 113049 - DNA, 30 bp, Artificial Sequence
  Synthetic oligonucleotide
ctcggccacagtgagtgggacatgaagcag

SEQ ID NO: 113050 - DNA, 30 bp, Artificial Sequence
  Synthetic oligonucleotide
cggccgttcagggacctgaacgataagcag

SEQ ID NO: 113051 - DNA, 30 bp, Artificial Sequence
  Synthetic oligonucleotide
ggggataagcaaccgctacctaaacagcag

SEQ ID NO: 113052 - DNA, 30 bp, Artificial Sequence
  Synthetic oligonucleotide
taccaacgcattccgggataccagcagcag

SEQ ID NO: 113053 - DNA, 30 bp, Artificial Sequence
  Synthetic oligonucleotide
aaattgtgcgtcgagatctaacgtcagcag

SEQ ID NO: 113054 - DNA, 30 bp, Artificial Sequence
  Synthetic oligonucleotide
tatgttaatatggtctctaggtgtgagcag

SEQ ID NO: 113055 - DNA, 30 bp, Artificial Sequence
  Synthetic oligonucleotide
cgaccagtcattggtccagacccatagcag

SEQ ID NO: 113056 - DNA, 30 bp, Artificial Sequence
  Synthetic oligonucleotide
agtggataaggaatgatcttgcactagcag

SEQ ID NO: 113057 - DNA, 30 bp, Artificial Sequence
  Synthetic oligonucleotide
ccatgctatgacatgattcacccctagcag

SEQ ID NO: 113058 - DNA, 30 bp, Artificial Sequence
  Synthetic oligonucleotide
gtgtgttggtacgtttacagaatctagcag

SEQ ID NO: 113059 - DNA, 30 bp, Artificial Sequence
  Synthetic oligonucleotide
acgggctcgcccggaaggacggagtagcag

SEQ ID NO: 113060 - DNA, 30 bp, Artificial Sequence
  Synthetic oligonucleotide
aaccctattagggtgggaaaacgaccgcag

SEQ ID NO: 113061 - DNA, 30 bp, Artificial Sequence
  Synthetic oligonucleotide
cccagaacaacctgcccgaagtgcccgcag

SEQ ID NO: 113062 - DNA, 30 bp, Artificial Sequence
  Synthetic oligonucleotide
catggtttaaacggttagtcatccgcgcag

SEQ ID NO: 113063 - DNA, 30 bp, Artificial Sequence
  Synthetic oligonucleotide
tgggcctacatgagggggatataggcgcag

SEQ ID NO: 113064 - DNA, 30 bp, Artificial Sequence
  Synthetic oligonucleotide
cttactacatgccccagcatacgggcgcag

SEQ ID NO: 113065 - DNA, 30 bp, Artificial Sequence
  Synthetic oligonucleotide
ttcgtcatgctagaaattagtggctcgcag

SEQ ID NO: 113066 - DNA, 30 bp, Artificial Sequence
  Synthetic oligonucleotide
aagttggtagggatcgatacccgttcgcag

SEQ ID NO: 113067 - DNA, 30 bp, Artificial Sequence
  Synthetic oligonucleotide
ttataaactaagtaaccgctggaaaggcag

SEQ ID NO: 113068 - DNA, 30 bp, Artificial Sequence
  Synthetic oligonucleotide
aatgctactaactgaaagtttgaaaggcag

SEQ ID NO: 113069 - DNA, 30 bp, Artificial Sequence
  Synthetic oligonucleotide
tacgtctgataatcgtccggaatcaggcag

SEQ ID NO: 113070 - DNA, 30 bp, Artificial Sequence
  Synthetic oligonucleotide
acacgcagaagcatacggtttaggaggcag

SEQ ID NO: 113071 - DNA, 30 bp, Artificial Sequence
  Synthetic oligonucleotide
ctgacaagggctttcaaatacccccggcag

SEQ ID NO: 113072 - DNA, 30 bp, Artificial Sequence
  Synthetic oligonucleotide
tgcacgaaggaggttgccatactgcggcag

SEQ ID NO: 113073 - DNA, 30 bp, Artificial Sequence
  Synthetic oligonucleotide
cgataccgccctacaacgtgaagtcggcag

SEQ ID NO: 113074 - DNA, 30 bp, Artificial Sequence
  Synthetic oligonucleotide
agcgacaccacttcgacgtaccacgggcag

SEQ ID NO: 113075 - DNA, 30 bp, Artificial Sequence
  Synthetic oligonucleotide
tgggggtttctgtgttacaattacgggcag

SEQ ID NO: 113076 - DNA, 30 bp, Artificial Sequence
  Synthetic oligonucleotide
gaaggcgcagtatgtaaaaaaatcgggcag

SEQ ID NO: 113077 - DNA, 30 bp, Artificial Sequence
  Synthetic oligonucleotide
ccaacgggagaacgtatataaagggggcag

SEQ ID NO: 113078 - DNA, 30 bp, Artificial Sequence
  Synthetic oligonucleotide
gtagaaacacccaatgttcacctctggcag

SEQ ID NO: 113079 - DNA, 30 bp, Artificial Sequence
  Synthetic oligonucleotide
tcatgtttaacgtttactatgtagtggcag

SEQ ID NO: 113080 - DNA, 30 bp, Artificial Sequence
  Synthetic oligonucleotide
ctcgaaaacgactcggttgccctgatgcag

SEQ ID NO: 113081 - DNA, 29 bp, Artificial Sequence
  Synthetic oligonucleotide
cgttagacctggcggttaacactatgcag

SEQ ID NO: 113082 - DNA, 30 bp, Artificial Sequence
  Synthetic oligonucleotide
cattaccctgttctatcagctagtctgcag

SEQ ID NO: 113083 - DNA, 30 bp, Artificial Sequence
  Synthetic oligonucleotide
aatagtcaagaagagacacgcggagtgcag

SEQ ID NO: 113084 - DNA, 30 bp, Artificial Sequence
  Synthetic oligonucleotide
gaccaacagggatacctggatgtcgtgcag

SEQ ID NO: 113085 - DNA, 30 bp, Artificial Sequence
  Synthetic oligonucleotide
agagccacagaggtcattatgggggtgcag

SEQ ID NO: 113086 - DNA, 30 bp, Artificial Sequence
  Synthetic oligonucleotide
cagcgtatttgttccgaaaattgattgcag

SEQ ID NO: 113087 - DNA, 30 bp, Artificial Sequence
  Synthetic oligonucleotide
gtacgatcggtatgaacgagaagcttgcag

SEQ ID NO: 113088 - DNA, 30 bp, Artificial Sequence
  Synthetic oligonucleotide
ttaaaggacatcggagctaggctcttgcag

SEQ ID NO: 113089 - DNA, 30 bp, Artificial Sequence
  Synthetic oligonucleotide
catcagttcattgttcaaaaagatttgcag

SEQ ID NO: 113090 - DNA, 30 bp, Artificial Sequence
  Synthetic oligonucleotide
atagctgcatcggtgcctaggaacaatcag

SEQ ID NO: 113091 - DNA, 30 bp, Artificial Sequence
  Synthetic oligonucleotide
cctaatcagaactctgcacatcgacatcag

SEQ ID NO: 113092 - DNA, 30 bp, Artificial Sequence
  Synthetic oligonucleotide
gggggtgatacaccagcttggatacatcag

SEQ ID NO: 113093 - DNA, 30 bp, Artificial Sequence
  Synthetic oligonucleotide
acgctttaacgcgagtcacgtgcccatcag

SEQ ID NO: 113094 - DNA, 30 bp, Artificial Sequence
  Synthetic oligonucleotide
ccgtagtgtattaggacataaattcatcag

SEQ ID NO: 113095 - DNA, 30 bp, Artificial Sequence
  Synthetic oligonucleotide
ccagggaagcggcggcgggttaacgatcag

SEQ ID NO: 113096 - DNA, 30 bp, Artificial Sequence
  Synthetic oligonucleotide
gatgcaatagacattggctggtacgatcag

SEQ ID NO: 113097 - DNA, 30 bp, Artificial Sequence
  Synthetic oligonucleotide
tcggaaatgtatatctagaatagatatcag

SEQ ID NO: 113098 - DNA, 30 bp, Artificial Sequence
  Synthetic oligonucleotide
acgcccctaccgacagactacaactatcag

SEQ ID NO: 113099 - DNA, 30 bp, Artificial Sequence
  Synthetic oligonucleotide
tcgactcccgcctgtcgtgacttgtatcag

SEQ ID NO: 113100 - DNA, 30 bp, Artificial Sequence
  Synthetic oligonucleotide
gttataagagggagataatacagttatcag

SEQ ID NO: 113101 - DNA, 30 bp, Artificial Sequence
  Synthetic oligonucleotide
tagtgcacggggcgcaagcaattacctcag

SEQ ID NO: 113102 - DNA, 30 bp, Artificial Sequence
  Synthetic oligonucleotide
agtcgattccaaagactcgggatgcctcag

SEQ ID NO: 113103 - DNA, 30 bp, Artificial Sequence
  Synthetic oligonucleotide
aaaggttgtcctgttagaacagaggctcag

SEQ ID NO: 113104 - DNA, 30 bp, Artificial Sequence
  Synthetic oligonucleotide
acctcatgaagacagaccgatttctctcag

SEQ ID NO: 113105 - DNA, 30 bp, Artificial Sequence
  Synthetic oligonucleotide
tcaattggccatcggcatggggattctcag

SEQ ID NO: 113106 - DNA, 30 bp, Artificial Sequence
  Synthetic oligonucleotide
atcactgctaaagtaccgttgtattctcag

SEQ ID NO: 113107 - DNA, 30 bp, Artificial Sequence
  Synthetic oligonucleotide
gctcggcaattataacccccttattctcag

SEQ ID NO: 113108 - DNA, 30 bp, Artificial Sequence
  Synthetic oligonucleotide
gggcaccgctatgtctgtgcactttctcag

SEQ ID NO: 113109 - DNA, 30 bp, Artificial Sequence
  Synthetic oligonucleotide
aggtgccgatgattttgattggtaagtcag

SEQ ID NO: 113110 - DNA, 30 bp, Artificial Sequence
  Synthetic oligonucleotide
gagcatgggacagcaatgaggaggagtcag

SEQ ID NO: 113111 - DNA, 30 bp, Artificial Sequence
  Synthetic oligonucleotide
agaggatgcagatgccgggcggctagtcag

SEQ ID NO: 113112 - DNA, 30 bp, Artificial Sequence
  Synthetic oligonucleotide
ctagactgtgtataaccgcacggacgtcag

SEQ ID NO: 113113 - DNA, 30 bp, Artificial Sequence
  Synthetic oligonucleotide
cagtcccaaattggaggaagtcgccgtcag

SEQ ID NO: 113114 - DNA, 30 bp, Artificial Sequence
  Synthetic oligonucleotide
cacagcgatacgagttactgggttcgtcag

SEQ ID NO: 113115 - DNA, 30 bp, Artificial Sequence
  Synthetic oligonucleotide
acagtctcttgcgaatgacaattcggtcag

SEQ ID NO: 113116 - DNA, 30 bp, Artificial Sequence
  Synthetic oligonucleotide
agctacattcttccggaagagtggggtcag

SEQ ID NO: 113117 - DNA, 30 bp, Artificial Sequence
  Synthetic oligonucleotide
agccacactgtttcaggctgtggatgtcag

SEQ ID NO: 113118 - DNA, 30 bp, Artificial Sequence
  Synthetic oligonucleotide
aggtagctaagcgcataccaggtatgtcag

SEQ ID NO: 113119 - DNA, 30 bp, Artificial Sequence
  Synthetic oligonucleotide
tacacaggcacatcttaaagcctctgtcag

SEQ ID NO: 113120 - DNA, 30 bp, Artificial Sequence
  Synthetic oligonucleotide
gcataaccgaaaacaggcataacaattcag

SEQ ID NO: 113121 - DNA, 30 bp, Artificial Sequence
  Synthetic oligonucleotide
tactattcaacagatcgcgtgaacattcag

SEQ ID NO: 113122 - DNA, 30 bp, Artificial Sequence
  Synthetic oligonucleotide
gtttaaggcactcgggggtacaccattcag

SEQ ID NO: 113123 - DNA, 30 bp, Artificial Sequence
  Synthetic oligonucleotide
gcttgtcaccagtcggttacaaggattcag

SEQ ID NO: 113124 - DNA, 31 bp, Artificial Sequence
  Synthetic oligonucleotide
tggatccggtggactcgtatcgaaccttcag

SEQ ID NO: 113125 - DNA, 30 bp, Artificial Sequence
  Synthetic oligonucleotide
tctgtaaggctacagacctgatggcttcag

SEQ ID NO: 113126 - DNA, 30 bp, Artificial Sequence
  Synthetic oligonucleotide
tcggcactaataaacctaaacaaggttcag

SEQ ID NO: 113127 - DNA, 30 bp, Artificial Sequence
  Synthetic oligonucleotide
tccatgagcctttgaaagacacctgttcag

SEQ ID NO: 113128 - DNA, 30 bp, Artificial Sequence
  Synthetic oligonucleotide
tgttccacgtggcaccgcgtactgtttcag

SEQ ID NO: 113129 - DNA, 30 bp, Artificial Sequence
  Synthetic oligonucleotide
cccacatcatgcagccatcagtaaaaagag

SEQ ID NO: 113130 - DNA, 30 bp, Artificial Sequence
  Synthetic oligonucleotide
ggtaggtggtagtgcagggaatggaaagag

SEQ ID NO: 113131 - DNA, 30 bp, Artificial Sequence
  Synthetic oligonucleotide
ttaaactactatcgtgagaaccgtaaagag

SEQ ID NO: 113132 - DNA, 30 bp, Artificial Sequence
  Synthetic oligonucleotide
acgggtgttacgagtaaatcaacacaagag

SEQ ID NO: 113133 - DNA, 30 bp, Artificial Sequence
  Synthetic oligonucleotide
cctcaaccgtacgtcctctgattacaagag

SEQ ID NO: 113134 - DNA, 30 bp, Artificial Sequence
  Synthetic oligonucleotide
gcgtgtagtcgagctgacaggccccaagag

SEQ ID NO: 113135 - DNA, 30 bp, Artificial Sequence
  Synthetic oligonucleotide
acaaagagggttccggagattaaagaagag

SEQ ID NO: 113136 - DNA, 30 bp, Artificial Sequence
  Synthetic oligonucleotide
tgtagtgtgcgccagttaagctgagaagag

SEQ ID NO: 113137 - DNA, 30 bp, Artificial Sequence
  Synthetic oligonucleotide
tatgttttgggctataggcgagccgaagag

SEQ ID NO: 113138 - DNA, 30 bp, Artificial Sequence
  Synthetic oligonucleotide
cgttatactaccgcgaagttccaggaagag

SEQ ID NO: 113139 - DNA, 30 bp, Artificial Sequence
  Synthetic oligonucleotide
agtgtctccgatatgttggtcttggaagag

SEQ ID NO: 113140 - DNA, 30 bp, Artificial Sequence
  Synthetic oligonucleotide
gtaggcgaagcgaccgcactccatgaagag

SEQ ID NO: 113141 - DNA, 30 bp, Artificial Sequence
  Synthetic oligonucleotide
ataagtgcaataggtgcgggcactgaagag

SEQ ID NO: 113142 - DNA, 30 bp, Artificial Sequence
  Synthetic oligonucleotide
cacatttattgactgggtaaatttgaagag

SEQ ID NO: 113143 - DNA, 30 bp, Artificial Sequence
  Synthetic oligonucleotide
gttcgcaaggacgtagtttagctataagag

SEQ ID NO: 113144 - DNA, 30 bp, Artificial Sequence
  Synthetic oligonucleotide
taagcagacaccaatgctgcatactaagag

SEQ ID NO: 113145 - DNA, 30 bp, Artificial Sequence
  Synthetic oligonucleotide
gatactagtccgcacatctagctctaagag

SEQ ID NO: 113146 - DNA, 30 bp, Artificial Sequence
  Synthetic oligonucleotide
tccctctccggcaagggttcgttgtaagag

SEQ ID NO: 113147 - DNA, 30 bp, Artificial Sequence
  Synthetic oligonucleotide
cacgtgcgtcacaggcttgcgctaacagag

SEQ ID NO: 113148 - DNA, 30 bp, Artificial Sequence
  Synthetic oligonucleotide
tcgaacttcggatctgataccgtgacagag

SEQ ID NO: 113149 - DNA, 30 bp, Artificial Sequence
  Synthetic oligonucleotide
gccggaggtgggagactgcgtatagcagag

SEQ ID NO: 113150 - DNA, 30 bp, Artificial Sequence
  Synthetic oligonucleotide
gtaccaggggcgtagaatgcgttcgcagag

SEQ ID NO: 113151 - DNA, 30 bp, Artificial Sequence
  Synthetic oligonucleotide
atacgtgtggggcccaggtctggatcagag

SEQ ID NO: 113152 - DNA, 30 bp, Artificial Sequence
  Synthetic oligonucleotide
atgtagtacacaagtccgtgtcactcagag

SEQ ID NO: 113153 - DNA, 30 bp, Artificial Sequence
  Synthetic oligonucleotide
aaggaccaagagggtcaatttcactcagag

SEQ ID NO: 113154 - DNA, 30 bp, Artificial Sequence
  Synthetic oligonucleotide
tcttgtttttctatccatgatggctcagag

SEQ ID NO: 113155 - DNA, 30 bp, Artificial Sequence
  Synthetic oligonucleotide
agtgtccgagaccaaagtttagcgtcagag

SEQ ID NO: 113156 - DNA, 30 bp, Artificial Sequence
  Synthetic oligonucleotide
caaaacgcacattgtaacagtccttcagag

SEQ ID NO: 113157 - DNA, 31 bp, Artificial Sequence
  Synthetic oligonucleotide
actagaccacacgatctcgcgcatttcagag

SEQ ID NO: 113158 - DNA, 30 bp, Artificial Sequence
  Synthetic oligonucleotide
ggtaacaaggtcgcatgggaacacagagag

SEQ ID NO: 113159 - DNA, 30 bp, Artificial Sequence
  Synthetic oligonucleotide
catagtctcgccgattttctatgcagagag

SEQ ID NO: 113160 - DNA, 30 bp, Artificial Sequence
  Synthetic oligonucleotide
cttggctggttgtccccaccctagagagag

SEQ ID NO: 113161 - DNA, 30 bp, Artificial Sequence
  Synthetic oligonucleotide
acgtagttctttaacccagtcggccgagag

SEQ ID NO: 113162 - DNA, 30 bp, Artificial Sequence
  Synthetic oligonucleotide
attcctggttctgcgacaacccagcgagag

SEQ ID NO: 113163 - DNA, 30 bp, Artificial Sequence
  Synthetic oligonucleotide
agacatagctgtggggcgttcccgggagag

SEQ ID NO: 113164 - DNA, 30 bp, Artificial Sequence
  Synthetic oligonucleotide
acatacctattcctctagctgtggggagag

SEQ ID NO: 113165 - DNA, 30 bp, Artificial Sequence
  Synthetic oligonucleotide
gcaaacgcttacggcactccttcctgagag

SEQ ID NO: 113166 - DNA, 30 bp, Artificial Sequence
  Synthetic oligonucleotide
acggtactcggggataggtgaaaaatagag

SEQ ID NO: 113167 - DNA, 30 bp, Artificial Sequence
  Synthetic oligonucleotide
tgccggtgttgcacgacaggcggaatagag

SEQ ID NO: 113168 - DNA, 30 bp, Artificial Sequence
  Synthetic oligonucleotide
gctcagtatagagcttggcccgacatagag

SEQ ID NO: 113169 - DNA, 30 bp, Artificial Sequence
  Synthetic oligonucleotide
ataagcctcgtgggaaggtatggcatagag

SEQ ID NO: 113170 - DNA, 30 bp, Artificial Sequence
  Synthetic oligonucleotide
tacaaagggaggcaagcctcatgcatagag

SEQ ID NO: 113171 - DNA, 30 bp, Artificial Sequence
  Synthetic oligonucleotide
catgaattaccggtcccaggtaagatagag

SEQ ID NO: 113172 - DNA, 30 bp, Artificial Sequence
  Synthetic oligonucleotide
tggcggtagcgttgaggcgcgacactagag

SEQ ID NO: 113173 - DNA, 30 bp, Artificial Sequence
  Synthetic oligonucleotide
ccgtcaactgctaagcgatagtcactagag

SEQ ID NO: 113174 - DNA, 30 bp, Artificial Sequence
  Synthetic oligonucleotide
gttcggccgctggacaaatcgaacctagag

SEQ ID NO: 113175 - DNA, 30 bp, Artificial Sequence
  Synthetic oligonucleotide
tggtaaatgtaatagcttaggcggctagag

SEQ ID NO: 113176 - DNA, 30 bp, Artificial Sequence
  Synthetic oligonucleotide
tctaaaatctaagagtagcagctagtagag

SEQ ID NO: 113177 - DNA, 30 bp, Artificial Sequence
  Synthetic oligonucleotide
tgacaattgtgattcagtgcacgcgtagag

SEQ ID NO: 113178 - DNA, 31 bp, Artificial Sequence
  Synthetic oligonucleotide
agagcggcccacattaatgagcgtcgtagag

SEQ ID NO: 113179 - DNA, 30 bp, Artificial Sequence
  Synthetic oligonucleotide
cggttagtaggcagtactataaaggtagag

SEQ ID NO: 113180 - DNA, 30 bp, Artificial Sequence
  Synthetic oligonucleotide
gacgaggcatgttcccatgaaccggtagag

SEQ ID NO: 113181 - DNA, 30 bp, Artificial Sequence
  Synthetic oligonucleotide
aggtgtcggatgaggtatctcgcattagag

SEQ ID NO: 113182 - DNA, 30 bp, Artificial Sequence
  Synthetic oligonucleotide
actacagcgatacttctgtagaaaaacgag

SEQ ID NO: 113183 - DNA, 30 bp, Artificial Sequence
  Synthetic oligonucleotide
tcaacctagtggagaccctttagaaacgag

SEQ ID NO: 113184 - DNA, 30 bp, Artificial Sequence
  Synthetic oligonucleotide
tgccgacagacggacggtaaaccgcacgag

SEQ ID NO: 113185 - DNA, 30 bp, Artificial Sequence
  Synthetic oligonucleotide
acattacgagtcacgtggtctagtcacgag

SEQ ID NO: 113186 - DNA, 30 bp, Artificial Sequence
  Synthetic oligonucleotide
aacctcgagacagcaagtgtctttcacgag

SEQ ID NO: 113187 - DNA, 30 bp, Artificial Sequence
  Synthetic oligonucleotide
atccgctattgtccatggggattagacgag

SEQ ID NO: 113188 - DNA, 30 bp, Artificial Sequence
  Synthetic oligonucleotide
ggcacagaagcactccgcgggtacgacgag

SEQ ID NO: 113189 - DNA, 30 bp, Artificial Sequence
  Synthetic oligonucleotide
agtcggagtcgtgaacctacgcccgacgag

SEQ ID NO: 113190 - DNA, 30 bp, Artificial Sequence
  Synthetic oligonucleotide
ctcgcaaaagaagagtgagcacgggacgag

SEQ ID NO: 113191 - DNA, 30 bp, Artificial Sequence
  Synthetic oligonucleotide
atagcccagtctcaggtgcccctgtacgag

SEQ ID NO: 113192 - DNA, 30 bp, Artificial Sequence
  Synthetic oligonucleotide
acagagctctcttgtgagcttaaaaccgag

SEQ ID NO: 113193 - DNA, 30 bp, Artificial Sequence
  Synthetic oligonucleotide
ttgcggggagtgccaccgtccggaaccgag

SEQ ID NO: 113194 - DNA, 30 bp, Artificial Sequence
  Synthetic oligonucleotide
taccagattgaatactcagtcgacaccgag

SEQ ID NO: 113195 - DNA, 30 bp, Artificial Sequence
  Synthetic oligonucleotide
cgcaactttcttcacgagaatttgaccgag

SEQ ID NO: 113196 - DNA, 30 bp, Artificial Sequence
  Synthetic oligonucleotide
ccggatcgtacccttataataaaacccgag

SEQ ID NO: 113197 - DNA, 30 bp, Artificial Sequence
  Synthetic oligonucleotide
cggagcgttacggagaacctgggagccgag

SEQ ID NO: 113198 - DNA, 30 bp, Artificial Sequence
  Synthetic oligonucleotide
atcaactggtgcccacagaccctggccgag

SEQ ID NO: 113199 - DNA, 30 bp, Artificial Sequence
  Synthetic oligonucleotide
gcttagtcgcgtgtgagaaaagttgccgag

SEQ ID NO: 113200 - DNA, 30 bp, Artificial Sequence
  Synthetic oligonucleotide
agtcctgtgttaatctcaggcccttccgag

SEQ ID NO: 113201 - DNA, 30 bp, Artificial Sequence
  Synthetic oligonucleotide
cgagccttaccgtcttcgctgcgttccgag

SEQ ID NO: 113202 - DNA, 30 bp, Artificial Sequence
  Synthetic oligonucleotide
acggtcagttaatatgtttcggcaagcgag

SEQ ID NO: 113203 - DNA, 30 bp, Artificial Sequence
  Synthetic oligonucleotide
taagttttcagggatgggccttggagcgag

SEQ ID NO: 113204 - DNA, 30 bp, Artificial Sequence
  Synthetic oligonucleotide
aactgagggacggagtgcaattcacgcgag

SEQ ID NO: 113205 - DNA, 30 bp, Artificial Sequence
  Synthetic oligonucleotide
gattgtggaaagacctgttgggcccgcgag

SEQ ID NO: 113206 - DNA, 30 bp, Artificial Sequence
  Synthetic oligonucleotide
gcgccacaatggaggcggtaacggcgcgag

SEQ ID NO: 113207 - DNA, 30 bp, Artificial Sequence
  Synthetic oligonucleotide
tgaaagcaaccacagggtgggttgcgcgag

SEQ ID NO: 113208 - DNA, 30 bp, Artificial Sequence
  Synthetic oligonucleotide
caggaacactgcggggaccaagcaggcgag

SEQ ID NO: 113209 - DNA, 30 bp, Artificial Sequence
  Synthetic oligonucleotide
gttctgattgtcgggtaacccatgggcgag

SEQ ID NO: 113210 - DNA, 30 bp, Artificial Sequence
  Synthetic oligonucleotide
acttcaacttcggcaacacggattggcgag

SEQ ID NO: 113211 - DNA, 30 bp, Artificial Sequence
  Synthetic oligonucleotide
gtcgtaactccggtggtaaaaaccatcgag

SEQ ID NO: 113212 - DNA, 30 bp, Artificial Sequence
  Synthetic oligonucleotide
tagggtagcaaagataatccaaccatcgag

SEQ ID NO: 113213 - DNA, 30 bp, Artificial Sequence
  Synthetic oligonucleotide
gttggtagtcttagtgctataggcatcgag

SEQ ID NO: 113214 - DNA, 30 bp, Artificial Sequence
  Synthetic oligonucleotide
gaagttcgagctaatgaaagaacgatcgag

SEQ ID NO: 113215 - DNA, 30 bp, Artificial Sequence
  Synthetic oligonucleotide
gctttacacagggcaaccggcaaactcgag

SEQ ID NO: 113216 - DNA, 30 bp, Artificial Sequence
  Synthetic oligonucleotide
tcaaccaatacgtaagcttctgtactcgag

SEQ ID NO: 113217 - DNA, 30 bp, Artificial Sequence
  Synthetic oligonucleotide
gtaatcaactgcagccggaatatcctcgag

SEQ ID NO: 113218 - DNA, 30 bp, Artificial Sequence
  Synthetic oligonucleotide
gacgaagagaatgaatcctcatagctcgag

SEQ ID NO: 113219 - DNA, 30 bp, Artificial Sequence
  Synthetic oligonucleotide
aaggttcggaaagggcagaggccgctcgag

SEQ ID NO: 113220 - DNA, 30 bp, Artificial Sequence
  Synthetic oligonucleotide
ataagagcggctactatctttgcgctcgag

SEQ ID NO: 113221 - DNA, 30 bp, Artificial Sequence
  Synthetic oligonucleotide
gtaggtgaggattttcctcgatcgctcgag

SEQ ID NO: 113222 - DNA, 30 bp, Artificial Sequence
  Synthetic oligonucleotide
gcacgtccccttgtgcgattaaggctcgag

SEQ ID NO: 113223 - DNA, 30 bp, Artificial Sequence
  Synthetic oligonucleotide
gaaagccatccaaggaatgtgggagtcgag

SEQ ID NO: 113224 - DNA, 30 bp, Artificial Sequence
  Synthetic oligonucleotide
gcacggagacctcagtagctgggattcgag

SEQ ID NO: 113225 - DNA, 30 bp, Artificial Sequence
  Synthetic oligonucleotide
gatggcggcgcctaacaatagatcttcgag

SEQ ID NO: 113226 - DNA, 30 bp, Artificial Sequence
  Synthetic oligonucleotide
ggtctccggctctgctgcaagtggttcgag

SEQ ID NO: 113227 - DNA, 30 bp, Artificial Sequence
  Synthetic oligonucleotide
gaaccaagtcaaatttgccggactaaggag

SEQ ID NO: 113228 - DNA, 30 bp, Artificial Sequence
  Synthetic oligonucleotide
ggtccgcccaattcgtcggctcaacaggag

SEQ ID NO: 113229 - DNA, 30 bp, Artificial Sequence
  Synthetic oligonucleotide
aacttggggggctgggtcagccgacaggag

SEQ ID NO: 113230 - DNA, 30 bp, Artificial Sequence
  Synthetic oligonucleotide
caaagaaaagcgtacttttctttacaggag

SEQ ID NO: 113231 - DNA, 30 bp, Artificial Sequence
  Synthetic oligonucleotide
cgcgctggttgcaggtctcgtgcccaggag

SEQ ID NO: 113232 - DNA, 30 bp, Artificial Sequence
  Synthetic oligonucleotide
cgcactagcgcattcaccatatgccaggag

SEQ ID NO: 113233 - DNA, 30 bp, Artificial Sequence
  Synthetic oligonucleotide
tgaaagcgaagaacttgattcacagaggag

SEQ ID NO: 113234 - DNA, 30 bp, Artificial Sequence
  Synthetic oligonucleotide
aagctggacagggctcctaaaaaggaggag

SEQ ID NO: 113235 - DNA, 30 bp, Artificial Sequence
  Synthetic oligonucleotide
tcagtgggttatattgggatagtataggag

SEQ ID NO: 113236 - DNA, 30 bp, Artificial Sequence
  Synthetic oligonucleotide
ccgaccgagtgacatctgatgttataggag

SEQ ID NO: 113237 - DNA, 30 bp, Artificial Sequence
  Synthetic oligonucleotide
cgccttgggctaccattccagatgtaggag

SEQ ID NO: 113238 - DNA, 30 bp, Artificial Sequence
  Synthetic oligonucleotide
gatcgccggcaggagggatgctattaggag

SEQ ID NO: 113239 - DNA, 30 bp, Artificial Sequence
  Synthetic oligonucleotide
gtgaatcttgaaatacgacctagaacggag

SEQ ID NO: 113240 - DNA, 30 bp, Artificial Sequence
  Synthetic oligonucleotide
tagttctgatagcacgagagatacacggag

SEQ ID NO: 113241 - DNA, 30 bp, Artificial Sequence
  Synthetic oligonucleotide
atcaccaaatgccgcattccggccacggag

SEQ ID NO: 113242 - DNA, 30 bp, Artificial Sequence
  Synthetic oligonucleotide
atattctggagaacaattgatttcacggag

SEQ ID NO: 113243 - DNA, 30 bp, Artificial Sequence
  Synthetic oligonucleotide
gttagaacactctttctccaagcgacggag

SEQ ID NO: 113244 - DNA, 30 bp, Artificial Sequence
  Synthetic oligonucleotide
atatgagcccggagaggcttgtcgacggag

SEQ ID NO: 113245 - DNA, 31 bp, Artificial Sequence
  Synthetic oligonucleotide
tcccgaatccgagcatggactcgctacggag

SEQ ID NO: 113246 - DNA, 30 bp, Artificial Sequence
  Synthetic oligonucleotide
cggggagttgttggaaggtcgtctacggag

SEQ ID NO: 113247 - DNA, 30 bp, Artificial Sequence
  Synthetic oligonucleotide
cggatacagatacacagttggtgtacggag

SEQ ID NO: 113248 - DNA, 30 bp, Artificial Sequence
  Synthetic oligonucleotide
atgaagaggcgctcagaatgatttacggag

SEQ ID NO: 113249 - DNA, 30 bp, Artificial Sequence
  Synthetic oligonucleotide
gcgaagccgtctaggacgtttgaaccggag

SEQ ID NO: 113250 - DNA, 30 bp, Artificial Sequence
  Synthetic oligonucleotide
ccacgatccaagcgtgctagaaacccggag

SEQ ID NO: 113251 - DNA, 30 bp, Artificial Sequence
  Synthetic oligonucleotide
aggcgcgctttagtctactgacgtccggag

SEQ ID NO: 113252 - DNA, 30 bp, Artificial Sequence
  Synthetic oligonucleotide
gacgtgtgcgtagctcacacgcccgcggag

SEQ ID NO: 113253 - DNA, 30 bp, Artificial Sequence
  Synthetic oligonucleotide
tggggcctttgcagtcaaacgtccgcggag

SEQ ID NO: 113254 - DNA, 30 bp, Artificial Sequence
  Synthetic oligonucleotide
atatggtcacgcgtcgtaggcaaatcggag

SEQ ID NO: 113255 - DNA, 30 bp, Artificial Sequence
  Synthetic oligonucleotide
gcggtcaatgttcgtactacacaaagggag

SEQ ID NO: 113256 - DNA, 30 bp, Artificial Sequence
  Synthetic oligonucleotide
gcaccagcaatacatgaatgttaacgggag

SEQ ID NO: 113257 - DNA, 30 bp, Artificial Sequence
  Synthetic oligonucleotide
aaatgtaacctagcacttaagcagcgggag

SEQ ID NO: 113258 - DNA, 30 bp, Artificial Sequence
  Synthetic oligonucleotide
acaagacattaagcggcccttcagcgggag

SEQ ID NO: 113259 - DNA, 30 bp, Artificial Sequence
  Synthetic oligonucleotide
caagaccgtcggcaagacctgggaggggag

SEQ ID NO: 113260 - DNA, 30 bp, Artificial Sequence
  Synthetic oligonucleotide
cttttcgcccaccaggaagagtccggggag

SEQ ID NO: 113261 - DNA, 30 bp, Artificial Sequence
  Synthetic oligonucleotide
attggagatgtagcctggtggtccggggag

SEQ ID NO: 113262 - DNA, 30 bp, Artificial Sequence
  Synthetic oligonucleotide
gggccggggttactcccatagttcggggag

SEQ ID NO: 113263 - DNA, 30 bp, Artificial Sequence
  Synthetic oligonucleotide
catggcatcagacctgtcccctcgggggag

SEQ ID NO: 113264 - DNA, 30 bp, Artificial Sequence
  Synthetic oligonucleotide
tgatataattcgcggtggtgccatggggag

SEQ ID NO: 113265 - DNA, 30 bp, Artificial Sequence
  Synthetic oligonucleotide
taccgtgtaccttcatagaaccctggggag

SEQ ID NO: 113266 - DNA, 30 bp, Artificial Sequence
  Synthetic oligonucleotide
aggtgcggagcaacgtggacacactgggag

SEQ ID NO: 113267 - DNA, 30 bp, Artificial Sequence
  Synthetic oligonucleotide
aagcggccaagtggagaatgtaggtgggag

SEQ ID NO: 113268 - DNA, 30 bp, Artificial Sequence
  Synthetic oligonucleotide
gactggatagcgggcatgaatgggtgggag

SEQ ID NO: 113269 - DNA, 30 bp, Artificial Sequence
  Synthetic oligonucleotide
tcgcgttggcagggctagagggtaatggag

SEQ ID NO: 113270 - DNA, 30 bp, Artificial Sequence
  Synthetic oligonucleotide
actcgctagcacggaggaaaacccatggag

SEQ ID NO: 113271 - DNA, 30 bp, Artificial Sequence
  Synthetic oligonucleotide
catgctatcgggccacggactgctatggag

SEQ ID NO: 113272 - DNA, 30 bp, Artificial Sequence
  Synthetic oligonucleotide
tgcggacccgttcccgcaaaaacactggag

SEQ ID NO: 113273 - DNA, 30 bp, Artificial Sequence
  Synthetic oligonucleotide
cgacacaaggtttgtaagagcgtgctggag

SEQ ID NO: 113274 - DNA, 30 bp, Artificial Sequence
  Synthetic oligonucleotide
cgggctgtccggtcgccgcattctctggag

SEQ ID NO: 113275 - DNA, 30 bp, Artificial Sequence
  Synthetic oligonucleotide
cgagaggggaaagagatgtggggtctggag

SEQ ID NO: 113276 - DNA, 30 bp, Artificial Sequence
  Synthetic oligonucleotide
tgtacggactacaggcatcctttggtggag

SEQ ID NO: 113277 - DNA, 30 bp, Artificial Sequence
  Synthetic oligonucleotide
gcagcgcgtcaggcttgtccataattggag

SEQ ID NO: 113278 - DNA, 30 bp, Artificial Sequence
  Synthetic oligonucleotide
agcaagtctatgattggcaggggcttggag

SEQ ID NO: 113279 - DNA, 30 bp, Artificial Sequence
  Synthetic oligonucleotide
aaattaaatacatatggtctcggcaatgag

SEQ ID NO: 113280 - DNA, 30 bp, Artificial Sequence
  Synthetic oligonucleotide
gccccggttaggccagcagggttgaatgag

SEQ ID NO: 113281 - DNA, 30 bp, Artificial Sequence
  Synthetic oligonucleotide
acatagcagtgacgttggtataataatgag

SEQ ID NO: 113282 - DNA, 30 bp, Artificial Sequence
  Synthetic oligonucleotide
ttctgaccgctcgttttcggcattaatgag

SEQ ID NO: 113283 - DNA, 30 bp, Artificial Sequence
  Synthetic oligonucleotide
tcacataccgtgatgacgggtacacatgag

SEQ ID NO: 113284 - DNA, 30 bp, Artificial Sequence
  Synthetic oligonucleotide
caaacgaggcgttgggtaaatgcccatgag

SEQ ID NO: 113285 - DNA, 30 bp, Artificial Sequence
  Synthetic oligonucleotide
taccggctgcgacaacaatttatccatgag

SEQ ID NO: 113286 - DNA, 30 bp, Artificial Sequence
  Synthetic oligonucleotide
taggactcgcggttgtgagccgagcatgag

SEQ ID NO: 113287 - DNA, 30 bp, Artificial Sequence
  Synthetic oligonucleotide
gttcgggggtcggcttttcaattgcatgag

SEQ ID NO: 113288 - DNA, 30 bp, Artificial Sequence
  Synthetic oligonucleotide
ggttaacttgtcaataaaccattgcatgag

SEQ ID NO: 113289 - DNA, 30 bp, Artificial Sequence
  Synthetic oligonucleotide
ggctgtaacaccgtacagtgatttcatgag

SEQ ID NO: 113290 - DNA, 30 bp, Artificial Sequence
  Synthetic oligonucleotide
ctaccgatgagacgtcaagtcaccgatgag

SEQ ID NO: 113291 - DNA, 30 bp, Artificial Sequence
  Synthetic oligonucleotide
gtacagtcgctcacgtgacgtcatgatgag

SEQ ID NO: 113292 - DNA, 30 bp, Artificial Sequence
  Synthetic oligonucleotide
cgcggggctatttgctgtttatgtgatgag

SEQ ID NO: 113293 - DNA, 30 bp, Artificial Sequence
  Synthetic oligonucleotide
ggagacacttggttatcagggtgtgatgag

SEQ ID NO: 113294 - DNA, 31 bp, Artificial Sequence
  Synthetic oligonucleotide
agcatggtttgcctaccatagccgctatgag

SEQ ID NO: 113295 - DNA, 30 bp, Artificial Sequence
  Synthetic oligonucleotide
ggtgttcagaatctccaaccctggtatgag

SEQ ID NO: 113296 - DNA, 30 bp, Artificial Sequence
  Synthetic oligonucleotide
acttaccctggaatgtgggcatcttatgag

SEQ ID NO: 113297 - DNA, 30 bp, Artificial Sequence
  Synthetic oligonucleotide
tgatcttaaaaagcaccaacgatttatgag

SEQ ID NO: 113298 - DNA, 30 bp, Artificial Sequence
  Synthetic oligonucleotide
taggtacgggtgaaatggggcccacctgag

SEQ ID NO: 113299 - DNA, 31 bp, Artificial Sequence
  Synthetic oligonucleotide
tctgcttgttatagggcatcgggctcctgag

SEQ ID NO: 113300 - DNA, 30 bp, Artificial Sequence
  Synthetic oligonucleotide
ccgtttggcaactcactgcagtgtcctgag

SEQ ID NO: 113301 - DNA, 30 bp, Artificial Sequence
  Synthetic oligonucleotide
cgtcgagtcgggttccgtcgtccagctgag

SEQ ID NO: 113302 - DNA, 30 bp, Artificial Sequence
  Synthetic oligonucleotide
ttgtggaaaagatattcgtgtccagctgag

SEQ ID NO: 113303 - DNA, 30 bp, Artificial Sequence
  Synthetic oligonucleotide
tctaggaaaaccgcttaagggatggctgag

SEQ ID NO: 113304 - DNA, 30 bp, Artificial Sequence
  Synthetic oligonucleotide
taacgaggggctcgctccacacctgctgag

SEQ ID NO: 113305 - DNA, 30 bp, Artificial Sequence
  Synthetic oligonucleotide
tagacatattgccgtcaaggaacaagtgag

SEQ ID NO: 113306 - DNA, 30 bp, Artificial Sequence
  Synthetic oligonucleotide
cgcactgactccagaaccaggcttagtgag

SEQ ID NO: 113307 - DNA, 30 bp, Artificial Sequence
  Synthetic oligonucleotide
gctagtcatgggcagtcgaacgaacgtgag

SEQ ID NO: 113308 - DNA, 30 bp, Artificial Sequence
  Synthetic oligonucleotide
tgttacattaagaagagcgcgtaacgtgag

SEQ ID NO: 113309 - DNA, 30 bp, Artificial Sequence
  Synthetic oligonucleotide
ctgttaccggggtccggatggggacgtgag

SEQ ID NO: 113310 - DNA, 30 bp, Artificial Sequence
  Synthetic oligonucleotide
tgtcatggcacaaccgtcatctgacgtgag

SEQ ID NO: 113311 - DNA, 30 bp, Artificial Sequence
  Synthetic oligonucleotide
ggatatttgtgcacagatcttcgccgtgag

SEQ ID NO: 113312 - DNA, 30 bp, Artificial Sequence
  Synthetic oligonucleotide
gatgcgaattgcgtcagtgtggtccgtgag

SEQ ID NO: 113313 - DNA, 30 bp, Artificial Sequence
  Synthetic oligonucleotide
ctaaggggacgttggcatagagtaggtgag

SEQ ID NO: 113314 - DNA, 30 bp, Artificial Sequence
  Synthetic oligonucleotide
tgcacagcggggagaaacccaaacggtgag

SEQ ID NO: 113315 - DNA, 30 bp, Artificial Sequence
  Synthetic oligonucleotide
ttgtttcccgaagcaaaacggcacggtgag

SEQ ID NO: 113316 - DNA, 30 bp, Artificial Sequence
  Synthetic oligonucleotide
taacctccataatatccgaatcagggtgag

SEQ ID NO: 113317 - DNA, 30 bp, Artificial Sequence
  Synthetic oligonucleotide
caaatcaattcaaatccattggttggtgag

SEQ ID NO: 113318 - DNA, 30 bp, Artificial Sequence
  Synthetic oligonucleotide
tgcaaaggtacctcgcgttctgactgtgag

SEQ ID NO: 113319 - DNA, 30 bp, Artificial Sequence
  Synthetic oligonucleotide
ttaggagcaaaaccgagggtactcattgag

SEQ ID NO: 113320 - DNA, 30 bp, Artificial Sequence
  Synthetic oligonucleotide
agaccactacgcgcggtctgtgtccttgag

SEQ ID NO: 113321 - DNA, 30 bp, Artificial Sequence
  Synthetic oligonucleotide
cgggatgtaaagccgcaagtaaagcttgag

SEQ ID NO: 113322 - DNA, 30 bp, Artificial Sequence
  Synthetic oligonucleotide
ggaacgtgacacactaagaagtggcttgag

SEQ ID NO: 113323 - DNA, 30 bp, Artificial Sequence
  Synthetic oligonucleotide
ctaaaaggctgggcgactactgctcttgag

SEQ ID NO: 113324 - DNA, 30 bp, Artificial Sequence
  Synthetic oligonucleotide
acttggtctctgtatattaactacgttgag

SEQ ID NO: 113325 - DNA, 30 bp, Artificial Sequence
  Synthetic oligonucleotide
cgactaaggctgcagccgcagttcgttgag

SEQ ID NO: 113326 - DNA, 30 bp, Artificial Sequence
  Synthetic oligonucleotide
ttgggcgggcgatgcatggtgtaggttgag

SEQ ID NO: 113327 - DNA, 30 bp, Artificial Sequence
  Synthetic oligonucleotide
ctagtcgccttagcaacgtgatctgttgag

SEQ ID NO: 113328 - DNA, 30 bp, Artificial Sequence
  Synthetic oligonucleotide
tacaccttcaggcttgcgcgtaaatttgag

SEQ ID NO: 113329 - DNA, 30 bp, Artificial Sequence
  Synthetic oligonucleotide
cgcgtactcgcgggttgtgccaactttgag

SEQ ID NO: 113330 - DNA, 30 bp, Artificial Sequence
  Synthetic oligonucleotide
cggatgcaaggattctgtaaagattttgag

SEQ ID NO: 113331 - DNA, 30 bp, Artificial Sequence
  Synthetic oligonucleotide
gctggacaaaaaagtaccttgctaaaatag

SEQ ID NO: 113332 - DNA, 30 bp, Artificial Sequence
  Synthetic oligonucleotide
ggttgtgaaccgtggcatctcgacaaatag

SEQ ID NO: 113333 - DNA, 30 bp, Artificial Sequence
  Synthetic oligonucleotide
acagggtttactcgtctcatcgagaaatag

SEQ ID NO: 113334 - DNA, 30 bp, Artificial Sequence
  Synthetic oligonucleotide
tacgtctatccatgagagacaggtaaatag

SEQ ID NO: 113335 - DNA, 30 bp, Artificial Sequence
  Synthetic oligonucleotide
atcggcggatgggaattcagccggcaatag

SEQ ID NO: 113336 - DNA, 30 bp, Artificial Sequence
  Synthetic oligonucleotide
caacaccacggacgacaaaagactgaatag

SEQ ID NO: 113337 - DNA, 30 bp, Artificial Sequence
  Synthetic oligonucleotide
tggatgagagttctggccgttcgaacatag

SEQ ID NO: 113338 - DNA, 30 bp, Artificial Sequence
  Synthetic oligonucleotide
ccactcagtggcgtcaacaggttaacatag

SEQ ID NO: 113339 - DNA, 30 bp, Artificial Sequence
  Synthetic oligonucleotide
actcaattccggtgtagaaatagcacatag

SEQ ID NO: 113340 - DNA, 30 bp, Artificial Sequence
  Synthetic oligonucleotide
atgttcggccctattgcccggctcacatag

SEQ ID NO: 113341 - DNA, 30 bp, Artificial Sequence
  Synthetic oligonucleotide
ttgtcctgtgtagtgtgaggaaaaccatag

SEQ ID NO: 113342 - DNA, 30 bp, Artificial Sequence
  Synthetic oligonucleotide
tgttaggggaaacatgcaaaaaggccatag

SEQ ID NO: 113343 - DNA, 30 bp, Artificial Sequence
  Synthetic oligonucleotide
aacgattaacattcataggacgtgccatag

SEQ ID NO: 113344 - DNA, 30 bp, Artificial Sequence
  Synthetic oligonucleotide
tcgatgaaaggagtcaagctcctagcatag

SEQ ID NO: 113345 - DNA, 30 bp, Artificial Sequence
  Synthetic oligonucleotide
atgaagataaggtaggaccattcggcatag

SEQ ID NO: 113346 - DNA, 30 bp, Artificial Sequence
  Synthetic oligonucleotide
atgaaccagaaattgtatcaattggcatag

SEQ ID NO: 113347 - DNA, 30 bp, Artificial Sequence
  Synthetic oligonucleotide
caacgcctgttagcacttgttgcctcatag

SEQ ID NO: 113348 - DNA, 30 bp, Artificial Sequence
  Synthetic oligonucleotide
acgcattgaggataataaattggctcatag

SEQ ID NO: 113349 - DNA, 30 bp, Artificial Sequence
  Synthetic oligonucleotide
ggataaatacctgcccttcttctctcatag

SEQ ID NO: 113350 - DNA, 30 bp, Artificial Sequence
  Synthetic oligonucleotide
tccaaaatttactagacctcctggtcatag

SEQ ID NO: 113351 - DNA, 30 bp, Artificial Sequence
  Synthetic oligonucleotide
tacttacaccttcctggttggcacagatag

SEQ ID NO: 113352 - DNA, 30 bp, Artificial Sequence
  Synthetic oligonucleotide
gagtcatcgccaagaacattaggcagatag

SEQ ID NO: 113353 - DNA, 30 bp, Artificial Sequence
  Synthetic oligonucleotide
cctccagaatgaaaacataattagagatag

SEQ ID NO: 113354 - DNA, 30 bp, Artificial Sequence
  Synthetic oligonucleotide
ggctcatgtattactgaaccgcatagatag

SEQ ID NO: 113355 - DNA, 30 bp, Artificial Sequence
  Synthetic oligonucleotide
cagggtgggcgcgcgcttacagtccgatag

SEQ ID NO: 113356 - DNA, 30 bp, Artificial Sequence
  Synthetic oligonucleotide
aagtatatcccatgtgaggtgtagcgatag

SEQ ID NO: 113357 - DNA, 30 bp, Artificial Sequence
  Synthetic oligonucleotide
agtggagtcacttttgctgcactgcgatag

SEQ ID NO: 113358 - DNA, 30 bp, Artificial Sequence
  Synthetic oligonucleotide
ctctcgaggcttgcgcatggtttaggatag

SEQ ID NO: 113359 - DNA, 30 bp, Artificial Sequence
  Synthetic oligonucleotide
cggcatgtggttcgcggcaaggcgggatag

SEQ ID NO: 113360 - DNA, 30 bp, Artificial Sequence
  Synthetic oligonucleotide
aaggaggaaccgcggaagtattatggatag

SEQ ID NO: 113361 - DNA, 30 bp, Artificial Sequence
  Synthetic oligonucleotide
gcatgcgtcgggaatagggccactggatag

SEQ ID NO: 113362 - DNA, 30 bp, Artificial Sequence
  Synthetic oligonucleotide
gttgaaagggaccgaatggacatatgatag

SEQ ID NO: 113363 - DNA, 30 bp, Artificial Sequence
  Synthetic oligonucleotide
aaaaggaggtgtgagttttgggattgatag

SEQ ID NO: 113364 - DNA, 30 bp, Artificial Sequence
  Synthetic oligonucleotide
gtccaagtaggacgaaccaataaaatatag

SEQ ID NO: 113365 - DNA, 30 bp, Artificial Sequence
  Synthetic oligonucleotide
tggcgcgtacgccggggttcttcaatatag

SEQ ID NO: 113366 - DNA, 30 bp, Artificial Sequence
  Synthetic oligonucleotide
cgtctccatagccccagccaacacatatag

SEQ ID NO: 113367 - DNA, 30 bp, Artificial Sequence
  Synthetic oligonucleotide
ctgctgagacggtacgggcgcgacatatag

SEQ ID NO: 113368 - DNA, 30 bp, Artificial Sequence
  Synthetic oligonucleotide
gcgttgccaacggaggaatcgaccatatag

SEQ ID NO: 113369 - DNA, 30 bp, Artificial Sequence
  Synthetic oligonucleotide
agggcgcgacatctacgattggccatatag

SEQ ID NO: 113370 - DNA, 30 bp, Artificial Sequence
  Synthetic oligonucleotide
gtctgggagattcgatgtgctcgcatatag

SEQ ID NO: 113371 - DNA, 30 bp, Artificial Sequence
  Synthetic oligonucleotide
actgaacacgatatttagggcttcatatag

SEQ ID NO: 113372 - DNA, 30 bp, Artificial Sequence
  Synthetic oligonucleotide
atccgatcacattgtgatgacgagatatag

SEQ ID NO: 113373 - DNA, 30 bp, Artificial Sequence
  Synthetic oligonucleotide
tatgacatcgaggaagtgatcggtatatag

SEQ ID NO: 113374 - DNA, 30 bp, Artificial Sequence
  Synthetic oligonucleotide
tctcgggcagaatattcatggggtatatag

SEQ ID NO: 113375 - DNA, 30 bp, Artificial Sequence
  Synthetic oligonucleotide
cgggactaaggatgcagaacaggactatag

SEQ ID NO: 113376 - DNA, 30 bp, Artificial Sequence
  Synthetic oligonucleotide
gcaaaagcgtagaattttgttcacctatag

SEQ ID NO: 113377 - DNA, 30 bp, Artificial Sequence
  Synthetic oligonucleotide
ctgtaatgggctcattgactatacctatag

SEQ ID NO: 113378 - DNA, 30 bp, Artificial Sequence
  Synthetic oligonucleotide
agagcactgggttctcatttttcgctatag

SEQ ID NO: 113379 - DNA, 30 bp, Artificial Sequence
  Synthetic oligonucleotide
agccaaagtattggcatggcagaggtatag

SEQ ID NO: 113380 - DNA, 30 bp, Artificial Sequence
  Synthetic oligonucleotide
ggtccctcatgctgcctaaggccggtatag

SEQ ID NO: 113381 - DNA, 30 bp, Artificial Sequence
  Synthetic oligonucleotide
gggtcttgtctgagctcatggcatgtatag

SEQ ID NO: 113382 - DNA, 30 bp, Artificial Sequence
  Synthetic oligonucleotide
ggcacagtccatgagaataaatatgtatag

SEQ ID NO: 113383 - DNA, 30 bp, Artificial Sequence
  Synthetic oligonucleotide
aggcatcataaatttgcgaaaattgtatag

SEQ ID NO: 113384 - DNA, 30 bp, Artificial Sequence
  Synthetic oligonucleotide
gcaccatcatgaaatagaggttatttatag

SEQ ID NO: 113385 - DNA, 30 bp, Artificial Sequence
  Synthetic oligonucleotide
actagatggatcgctttgtaacaaaactag

SEQ ID NO: 113386 - DNA, 30 bp, Artificial Sequence
  Synthetic oligonucleotide
caaggtattggacaaaatatgacaaactag

SEQ ID NO: 113387 - DNA, 30 bp, Artificial Sequence
  Synthetic oligonucleotide
gtgcaatcgattctcggatgaggaaactag

SEQ ID NO: 113388 - DNA, 30 bp, Artificial Sequence
  Synthetic oligonucleotide
ctgggggatggctgtcctgataagcactag

SEQ ID NO: 113389 - DNA, 30 bp, Artificial Sequence
  Synthetic oligonucleotide
ggccgacgctgtaagtaaagcatgcactag

SEQ ID NO: 113390 - DNA, 30 bp, Artificial Sequence
  Synthetic oligonucleotide
aagaagcgggaccgataccatagtcactag

SEQ ID NO: 113391 - DNA, 30 bp, Artificial Sequence
  Synthetic oligonucleotide
tgcagagacacttgagtcgacagatactag

SEQ ID NO: 113392 - DNA, 30 bp, Artificial Sequence
  Synthetic oligonucleotide
gcacgacgaaaacgtactgcgggatactag

SEQ ID NO: 113393 - DNA, 30 bp, Artificial Sequence
  Synthetic oligonucleotide
gcccggagggggcttacgaggaccacctag

SEQ ID NO: 113394 - DNA, 30 bp, Artificial Sequence
  Synthetic oligonucleotide
agtgcctagtgcgtgcgcatcagcacctag

SEQ ID NO: 113395 - DNA, 30 bp, Artificial Sequence
  Synthetic oligonucleotide
tctcgtacggacaagttacagacgacctag

SEQ ID NO: 113396 - DNA, 30 bp, Artificial Sequence
  Synthetic oligonucleotide
taaccgatgttacacaacatagtgacctag

SEQ ID NO: 113397 - DNA, 30 bp, Artificial Sequence
  Synthetic oligonucleotide
gggctcagctgcgagctaacccgaccctag

SEQ ID NO: 113398 - DNA, 30 bp, Artificial Sequence
  Synthetic oligonucleotide
actaaatgccacgttatttaccagccctag

SEQ ID NO: 113399 - DNA, 30 bp, Artificial Sequence
  Synthetic oligonucleotide
tagctgcccacatgatatcggcttccctag

SEQ ID NO: 113400 - DNA, 30 bp, Artificial Sequence
  Synthetic oligonucleotide
ccgccgaccccaggcgtaccgtgatcctag

SEQ ID NO: 113401 - DNA, 30 bp, Artificial Sequence
  Synthetic oligonucleotide
tgcgcggggtaacgtgtcagcgtatcctag

SEQ ID NO: 113402 - DNA, 30 bp, Artificial Sequence
  Synthetic oligonucleotide
ggggagtctggaagactgtgtgcgagctag

SEQ ID NO: 113403 - DNA, 30 bp, Artificial Sequence
  Synthetic oligonucleotide
agcagttgttgtttgacaaggcccggctag

SEQ ID NO: 113404 - DNA, 30 bp, Artificial Sequence
  Synthetic oligonucleotide
gctggaacgcgaaccccaagcctgggctag

SEQ ID NO: 113405 - DNA, 30 bp, Artificial Sequence
  Synthetic oligonucleotide
tcgcacaacgatcgcaattggaatggctag

SEQ ID NO: 113406 - DNA, 30 bp, Artificial Sequence
  Synthetic oligonucleotide
tatacgcaagattggaaatcattatgctag

SEQ ID NO: 113407 - DNA, 30 bp, Artificial Sequence
  Synthetic oligonucleotide
ggggattcacgtgttttaacggcgtgctag

SEQ ID NO: 113408 - DNA, 30 bp, Artificial Sequence
  Synthetic oligonucleotide
aagtgacatgcttcaagagccgcaatctag

SEQ ID NO: 113409 - DNA, 30 bp, Artificial Sequence
  Synthetic oligonucleotide
ggcctgggtgaggaagctagatacatctag

SEQ ID NO: 113410 - DNA, 30 bp, Artificial Sequence
  Synthetic oligonucleotide
acctagtgagacaactatgaacgcatctag

SEQ ID NO: 113411 - DNA, 30 bp, Artificial Sequence
  Synthetic oligonucleotide
gtagatccagtatgcctaaatcagatctag

SEQ ID NO: 113412 - DNA, 30 bp, Artificial Sequence
  Synthetic oligonucleotide
catgggggaacgcggtggtccatactctag

SEQ ID NO: 113413 - DNA, 30 bp, Artificial Sequence
  Synthetic oligonucleotide
atgtaattaacacgtgtactgtatctctag

SEQ ID NO: 113414 - DNA, 30 bp, Artificial Sequence
  Synthetic oligonucleotide
tcattgatcacaaaacgtgacacagtctag

SEQ ID NO: 113415 - DNA, 30 bp, Artificial Sequence
  Synthetic oligonucleotide
tggagtctgattaggatggaagagttctag

SEQ ID NO: 113416 - DNA, 30 bp, Artificial Sequence
  Synthetic oligonucleotide
gatgtatgctatatcggaatcgctttctag

SEQ ID NO: 113417 - DNA, 30 bp, Artificial Sequence
  Synthetic oligonucleotide
aagctccgcgaggacggagtagcaaagtag

SEQ ID NO: 113418 - DNA, 30 bp, Artificial Sequence
  Synthetic oligonucleotide
cgatgcttacactcttctccgtcacagtag

SEQ ID NO: 113419 - DNA, 30 bp, Artificial Sequence
  Synthetic oligonucleotide
tcgttcccccgcctggtgcgtcaccagtag

SEQ ID NO: 113420 - DNA, 30 bp, Artificial Sequence
  Synthetic oligonucleotide
cacaggacttatgaaaaggtcttccagtag

SEQ ID NO: 113421 - DNA, 30 bp, Artificial Sequence
  Synthetic oligonucleotide
gatacagatatggagatgacaatagagtag

SEQ ID NO: 113422 - DNA, 30 bp, Artificial Sequence
  Synthetic oligonucleotide
gagagaaagatgtagaagggactagagtag

SEQ ID NO: 113423 - DNA, 30 bp, Artificial Sequence
  Synthetic oligonucleotide
atcgcgggagtttcgctgagccaggagtag

SEQ ID NO: 113424 - DNA, 30 bp, Artificial Sequence
  Synthetic oligonucleotide
tggggggagggttttcacgctacggagtag

SEQ ID NO: 113425 - DNA, 30 bp, Artificial Sequence
  Synthetic oligonucleotide
tggaggtagcgttataaaaggccggagtag

SEQ ID NO: 113426 - DNA, 30 bp, Artificial Sequence
  Synthetic oligonucleotide
gattaaagaacggatgatggtcgatagtag

SEQ ID NO: 113427 - DNA, 30 bp, Artificial Sequence
  Synthetic oligonucleotide
atgagcggcccaggccccacggattagtag

SEQ ID NO: 113428 - DNA, 30 bp, Artificial Sequence
  Synthetic oligonucleotide
cactccaaactaatgaacgccctaacgtag

SEQ ID NO: 113429 - DNA, 30 bp, Artificial Sequence
  Synthetic oligonucleotide
cataaacccagttaccttcttcacacgtag

SEQ ID NO: 113430 - DNA, 30 bp, Artificial Sequence
  Synthetic oligonucleotide
cacattcacctccggagttatggcacgtag

SEQ ID NO: 113431 - DNA, 30 bp, Artificial Sequence
  Synthetic oligonucleotide
aagccaagatttttgataaactgcacgtag

SEQ ID NO: 113432 - DNA, 30 bp, Artificial Sequence
  Synthetic oligonucleotide
tgaagcatgggcagcatggataaaccgtag

SEQ ID NO: 113433 - DNA, 30 bp, Artificial Sequence
  Synthetic oligonucleotide
cggtgaggcctggaattgagtcaaccgtag

SEQ ID NO: 113434 - DNA, 30 bp, Artificial Sequence
  Synthetic oligonucleotide
tgagcgagagggcttgggttgagcccgtag

SEQ ID NO: 113435 - DNA, 30 bp, Artificial Sequence
  Synthetic oligonucleotide
ggtcccccatgagactcgcaagttccgtag

SEQ ID NO: 113436 - DNA, 30 bp, Artificial Sequence
  Synthetic oligonucleotide
cactaggggctatgatcaggagttccgtag

SEQ ID NO: 113437 - DNA, 30 bp, Artificial Sequence
  Synthetic oligonucleotide
tttgtgcgccgacatcactttcgggcgtag

SEQ ID NO: 113438 - DNA, 30 bp, Artificial Sequence
  Synthetic oligonucleotide
cagcggatgctggcacatcttatggcgtag

SEQ ID NO: 113439 - DNA, 30 bp, Artificial Sequence
  Synthetic oligonucleotide
caggaatgttggaggtgacactctgcgtag

SEQ ID NO: 113440 - DNA, 30 bp, Artificial Sequence
  Synthetic oligonucleotide
acggttatccggtaggcagttgactcgtag

SEQ ID NO: 113441 - DNA, 30 bp, Artificial Sequence
  Synthetic oligonucleotide
gggattaagcaggagctcatacgctcgtag

SEQ ID NO: 113442 - DNA, 30 bp, Artificial Sequence
  Synthetic oligonucleotide
tctcgcaggagagcgttacgatagtcgtag

SEQ ID NO: 113443 - DNA, 30 bp, Artificial Sequence
  Synthetic oligonucleotide
cctgaggatcttaccgcgtctcattcgtag

SEQ ID NO: 113444 - DNA, 30 bp, Artificial Sequence
  Synthetic oligonucleotide
cgtcttggccatagcatgaatagttcgtag

SEQ ID NO: 113445 - DNA, 30 bp, Artificial Sequence
  Synthetic oligonucleotide
tgtatactagtgaagtgtgtcggttcgtag

SEQ ID NO: 113446 - DNA, 30 bp, Artificial Sequence
  Synthetic oligonucleotide
gcgcggcctggccgactggcgtgttcgtag

SEQ ID NO: 113447 - DNA, 30 bp, Artificial Sequence
  Synthetic oligonucleotide
ataacatacctcccgtaagttgcaaggtag

SEQ ID NO: 113448 - DNA, 30 bp, Artificial Sequence
  Synthetic oligonucleotide
atttaaggctttagaagcgctcgaaggtag

SEQ ID NO: 113449 - DNA, 30 bp, Artificial Sequence
  Synthetic oligonucleotide
agaattggggcatcatccttcccgaggtag

SEQ ID NO: 113450 - DNA, 30 bp, Artificial Sequence
  Synthetic oligonucleotide
taggacggtaaggtgaaacacgggaggtag

SEQ ID NO: 113451 - DNA, 30 bp, Artificial Sequence
  Synthetic oligonucleotide
ttaaccgataggatttggccaaataggtag

SEQ ID NO: 113452 - DNA, 30 bp, Artificial Sequence
  Synthetic oligonucleotide
caagaaacgactcgctccggaggacggtag

SEQ ID NO: 113453 - DNA, 30 bp, Artificial Sequence
  Synthetic oligonucleotide
gacttagtagcagattagctgaagcggtag

SEQ ID NO: 113454 - DNA, 30 bp, Artificial Sequence
  Synthetic oligonucleotide
aaaggtgacttatccccgaaccggcggtag

SEQ ID NO: 113455 - DNA, 30 bp, Artificial Sequence
  Synthetic oligonucleotide
atagaataaatcatattgctcgtgcggtag

SEQ ID NO: 113456 - DNA, 30 bp, Artificial Sequence
  Synthetic oligonucleotide
ctcaagaaaaaaaacggtcagtgcgggtag

SEQ ID NO: 113457 - DNA, 30 bp, Artificial Sequence
  Synthetic oligonucleotide
aaaggtactacacgtaccattcgggggtag

SEQ ID NO: 113458 - DNA, 30 bp, Artificial Sequence
  Synthetic oligonucleotide
ccacgatcccgcaccgaacatgcatggtag

SEQ ID NO: 113459 - DNA, 30 bp, Artificial Sequence
  Synthetic oligonucleotide
agagtgagatagcagtaactagattggtag

SEQ ID NO: 113460 - DNA, 30 bp, Artificial Sequence
  Synthetic oligonucleotide
tactgagcccgtggaatataaggttggtag

SEQ ID NO: 113461 - DNA, 30 bp, Artificial Sequence
  Synthetic oligonucleotide
gcggtagacggggattcaggtcacatgtag

SEQ ID NO: 113462 - DNA, 30 bp, Artificial Sequence
  Synthetic oligonucleotide
agcaggacgagcaaggccagcagactgtag

SEQ ID NO: 113463 - DNA, 30 bp, Artificial Sequence
  Synthetic oligonucleotide
catcctgtgattctaggcttgaggctgtag

SEQ ID NO: 113464 - DNA, 30 bp, Artificial Sequence
  Synthetic oligonucleotide
agtggtggatacatctcgcttgttctgtag

SEQ ID NO: 113465 - DNA, 30 bp, Artificial Sequence
  Synthetic oligonucleotide
tggtaggctcagtattatctccaggtgtag

SEQ ID NO: 113466 - DNA, 30 bp, Artificial Sequence
  Synthetic oligonucleotide
aaacagctgcaatatggctgttcggtgtag

SEQ ID NO: 113467 - DNA, 30 bp, Artificial Sequence
  Synthetic oligonucleotide
tcgtagtcgatgaagtcagagaccttgtag

SEQ ID NO: 113468 - DNA, 30 bp, Artificial Sequence
  Synthetic oligonucleotide
gtaatattcgcgttatttcgagagttgtag

SEQ ID NO: 113469 - DNA, 30 bp, Artificial Sequence
  Synthetic oligonucleotide
agttatgaacgttgctggtgcgtgttgtag

SEQ ID NO: 113470 - DNA, 30 bp, Artificial Sequence
  Synthetic oligonucleotide
tgatggatgacaggggccttacttaattag

SEQ ID NO: 113471 - DNA, 30 bp, Artificial Sequence
  Synthetic oligonucleotide
ttagtgcctagaagttagctccaacattag

SEQ ID NO: 113472 - DNA, 30 bp, Artificial Sequence
  Synthetic oligonucleotide
aacctcgtcgtgggcaacaccttgcattag

SEQ ID NO: 113473 - DNA, 30 bp, Artificial Sequence
  Synthetic oligonucleotide
agataccgacagaggttaaagaatgattag

SEQ ID NO: 113474 - DNA, 30 bp, Artificial Sequence
  Synthetic oligonucleotide
gcacctaggtgtcttatgccgattgattag

SEQ ID NO: 113475 - DNA, 30 bp, Artificial Sequence
  Synthetic oligonucleotide
accgacattcgggagctgtctagatattag

SEQ ID NO: 113476 - DNA, 30 bp, Artificial Sequence
  Synthetic oligonucleotide
gcgatgaggatgagtgaaggcaagtattag

SEQ ID NO: 113477 - DNA, 30 bp, Artificial Sequence
  Synthetic oligonucleotide
gcataacagggggttaaacatttgtattag

SEQ ID NO: 113478 - DNA, 30 bp, Artificial Sequence
  Synthetic oligonucleotide
tccgtcaaagagatgcgcatggtttattag

SEQ ID NO: 113479 - DNA, 31 bp, Artificial Sequence
  Synthetic oligonucleotide
gcgttaagtggatgaacgggagaaaacttag

SEQ ID NO: 113480 - DNA, 30 bp, Artificial Sequence
  Synthetic oligonucleotide
ataaggaaggatgaagccattcgaacttag

SEQ ID NO: 113481 - DNA, 30 bp, Artificial Sequence
  Synthetic oligonucleotide
ctagagggagtcgggggcgtttacacttag

SEQ ID NO: 113482 - DNA, 30 bp, Artificial Sequence
  Synthetic oligonucleotide
ttaaaaacgaaagacgcccagattacttag

SEQ ID NO: 113483 - DNA, 30 bp, Artificial Sequence
  Synthetic oligonucleotide
atcgcgcacgtcccgctgatatgaccttag

SEQ ID NO: 113484 - DNA, 30 bp, Artificial Sequence
  Synthetic oligonucleotide
tctaataaacgtgaacagtcgcacccttag

SEQ ID NO: 113485 - DNA, 30 bp, Artificial Sequence
  Synthetic oligonucleotide
aggcatgtcaaaaacgatataggtccttag

SEQ ID NO: 113486 - DNA, 30 bp, Artificial Sequence
  Synthetic oligonucleotide
ttctcactggtccggtaacgagctagttag

SEQ ID NO: 113487 - DNA, 30 bp, Artificial Sequence
  Synthetic oligonucleotide
ccgactgcgattattagttatacccgttag

SEQ ID NO: 113488 - DNA, 30 bp, Artificial Sequence
  Synthetic oligonucleotide
tctcaagcctcgacacagaaagcccgttag

SEQ ID NO: 113489 - DNA, 30 bp, Artificial Sequence
  Synthetic oligonucleotide
ttcaaagaggaaagaaccaggcctcgttag

SEQ ID NO: 113490 - DNA, 30 bp, Artificial Sequence
  Synthetic oligonucleotide
taggagcttcccccaatccaaaagggttag

SEQ ID NO: 113491 - DNA, 30 bp, Artificial Sequence
  Synthetic oligonucleotide
tttgcgagtcaggtattgaagcctggttag

SEQ ID NO: 113492 - DNA, 30 bp, Artificial Sequence
  Synthetic oligonucleotide
aagttagcaatgaacggtggttgtggttag

SEQ ID NO: 113493 - DNA, 30 bp, Artificial Sequence
  Synthetic oligonucleotide
cctaagctttataattgagtccactgttag

SEQ ID NO: 113494 - DNA, 30 bp, Artificial Sequence
  Synthetic oligonucleotide
tgtgaggccctatacaatgtacagtgttag

SEQ ID NO: 113495 - DNA, 30 bp, Artificial Sequence
  Synthetic oligonucleotide
gaagagacagttcgatagcgttatatttag

SEQ ID NO: 113496 - DNA, 30 bp, Artificial Sequence
  Synthetic oligonucleotide
gtaattgtgggaccgaggatggctatttag

SEQ ID NO: 113497 - DNA, 30 bp, Artificial Sequence
  Synthetic oligonucleotide
tagcgttatagaggtggacagacgctttag

SEQ ID NO: 113498 - DNA, 30 bp, Artificial Sequence
  Synthetic oligonucleotide
ctatgtttcacgtcacccgatcgcgtttag

SEQ ID NO: 113499 - DNA, 30 bp, Artificial Sequence
  Synthetic oligonucleotide
agggcgggtcatagtgttgcgttcttttag

SEQ ID NO: 113500 - DNA, 30 bp, Artificial Sequence
  Synthetic oligonucleotide
caactaagggtcagagtcgtcctgttttag

SEQ ID NO: 113501 - DNA, 30 bp, Artificial Sequence
  Synthetic oligonucleotide
gcaaaatggttacgtcttacaccaaaaacg

SEQ ID NO: 113502 - DNA, 30 bp, Artificial Sequence
  Synthetic oligonucleotide
aacaagccggttagaacgagtcaacaaacg

SEQ ID NO: 113503 - DNA, 30 bp, Artificial Sequence
  Synthetic oligonucleotide
gggaataccagcacgaggggtatagaaacg

SEQ ID NO: 113504 - DNA, 30 bp, Artificial Sequence
  Synthetic oligonucleotide
gccagcaggtgtgaataaacttgtgaaacg

SEQ ID NO: 113505 - DNA, 30 bp, Artificial Sequence
  Synthetic oligonucleotide
agcttcaggaccaggaacaagatataaacg

SEQ ID NO: 113506 - DNA, 30 bp, Artificial Sequence
  Synthetic oligonucleotide
aggccattagtgggtcgatattggtaaacg

SEQ ID NO: 113507 - DNA, 30 bp, Artificial Sequence
  Synthetic oligonucleotide
gggaaaccctaggtatatgaggcttaaacg

SEQ ID NO: 113508 - DNA, 30 bp, Artificial Sequence
  Synthetic oligonucleotide
gagcgccaacgtctaacgaggagcacaacg

SEQ ID NO: 113509 - DNA, 30 bp, Artificial Sequence
  Synthetic oligonucleotide
cccggcaaagcaagtcgtcccggcacaacg

SEQ ID NO: 113510 - DNA, 30 bp, Artificial Sequence
  Synthetic oligonucleotide
cgctcaatcggtacgggggatcgtacaacg

SEQ ID NO: 113511 - DNA, 30 bp, Artificial Sequence
  Synthetic oligonucleotide
tgggaacgagtcctagtacagagtccaacg

SEQ ID NO: 113512 - DNA, 30 bp, Artificial Sequence
  Synthetic oligonucleotide
actgtggcaccaaagacttggtgagcaacg

SEQ ID NO: 113513 - DNA, 30 bp, Artificial Sequence
  Synthetic oligonucleotide
tatgaaggtaatgcctacaagaggagaacg

SEQ ID NO: 113514 - DNA, 30 bp, Artificial Sequence
  Synthetic oligonucleotide
ccacgtagtattgggaaagagtcacgaacg

SEQ ID NO: 113515 - DNA, 30 bp, Artificial Sequence
  Synthetic oligonucleotide
aactccgtgtacgagcaatgggtgcgaacg

SEQ ID NO: 113516 - DNA, 30 bp, Artificial Sequence
  Synthetic oligonucleotide
tcaccgagtactaatactcccgacggaacg

SEQ ID NO: 113517 - DNA, 30 bp, Artificial Sequence
  Synthetic oligonucleotide
tatcgggatcaagttcccggatcatgaacg

SEQ ID NO: 113518 - DNA, 30 bp, Artificial Sequence
  Synthetic oligonucleotide
gataggaggtgtccgccattatcatgaacg

SEQ ID NO: 113519 - DNA, 30 bp, Artificial Sequence
  Synthetic oligonucleotide
acttaccacacacgaatacggcactgaacg

SEQ ID NO: 113520 - DNA, 30 bp, Artificial Sequence
  Synthetic oligonucleotide
aggatatttcctagaactccgacctgaacg

SEQ ID NO: 113521 - DNA, 30 bp, Artificial Sequence
  Synthetic oligonucleotide
atatgtggggagaaaatacttcgttgaacg

SEQ ID NO: 113522 - DNA, 30 bp, Artificial Sequence
  Synthetic oligonucleotide
aaccgtcaagtagtagagagctaaataacg

SEQ ID NO: 113523 - DNA, 30 bp, Artificial Sequence
  Synthetic oligonucleotide
acccgtgccaaggcacggagaccgataacg

SEQ ID NO: 113524 - DNA, 30 bp, Artificial Sequence
  Synthetic oligonucleotide
atggtatgaaactaattcgtgctgataacg

SEQ ID NO: 113525 - DNA, 30 bp, Artificial Sequence
  Synthetic oligonucleotide
tagcgtgccaatggcttttgtctgataacg

SEQ ID NO: 113526 - DNA, 30 bp, Artificial Sequence
  Synthetic oligonucleotide
ctaccttaaacgtgtaagtgcttcctaacg

SEQ ID NO: 113527 - DNA, 30 bp, Artificial Sequence
  Synthetic oligonucleotide
ctcgtgcagagattataatcgactctaacg

SEQ ID NO: 113528 - DNA, 30 bp, Artificial Sequence
  Synthetic oligonucleotide
aaaaacagtaactgaaggccgtgtctaacg

SEQ ID NO: 113529 - DNA, 30 bp, Artificial Sequence
  Synthetic oligonucleotide
catggaagagttacgctgtgtcttctaacg

SEQ ID NO: 113530 - DNA, 30 bp, Artificial Sequence
  Synthetic oligonucleotide
ttgacagccggtgaagaggcgtccgtaacg

SEQ ID NO: 113531 - DNA, 30 bp, Artificial Sequence
  Synthetic oligonucleotide
ggaaatccgtgtgaggcagagctcgtaacg

SEQ ID NO: 113532 - DNA, 30 bp, Artificial Sequence
  Synthetic oligonucleotide
cacgggtgaaatcagacctcaatattaacg

SEQ ID NO: 113533 - DNA, 30 bp, Artificial Sequence
  Synthetic oligonucleotide
ctgaagatatcagacaaaacaaggttaacg

SEQ ID NO: 113534 - DNA, 30 bp, Artificial Sequence
  Synthetic oligonucleotide
tatatcagtgtacgtgaggccaggttaacg

SEQ ID NO: 113535 - DNA, 30 bp, Artificial Sequence
  Synthetic oligonucleotide
cgtgctggtctattattaagttctttaacg

SEQ ID NO: 113536 - DNA, 30 bp, Artificial Sequence
  Synthetic oligonucleotide
aatcgcgggagttggcgggaatagaacacg

SEQ ID NO: 113537 - DNA, 30 bp, Artificial Sequence
  Synthetic oligonucleotide
tggaataatactggtactagttctaacacg

SEQ ID NO: 113538 - DNA, 30 bp, Artificial Sequence
  Synthetic oligonucleotide
gttattgacatcggtagcgatcttcacacg

SEQ ID NO: 113539 - DNA, 30 bp, Artificial Sequence
  Synthetic oligonucleotide
cgtaaaaaatgctcgccgataggagacacg

SEQ ID NO: 113540 - DNA, 30 bp, Artificial Sequence
  Synthetic oligonucleotide
gggatagacagacctgcatgcctcgacacg

SEQ ID NO: 113541 - DNA, 30 bp, Artificial Sequence
  Synthetic oligonucleotide
aataggtaacgtgcaatacagccgtacacg

SEQ ID NO: 113542 - DNA, 30 bp, Artificial Sequence
  Synthetic oligonucleotide
gcgtagagttggctttgtcggccgaccacg

SEQ ID NO: 113543 - DNA, 30 bp, Artificial Sequence
  Synthetic oligonucleotide
agtaaagtctctctactccgtgggaccacg

SEQ ID NO: 113544 - DNA, 30 bp, Artificial Sequence
  Synthetic oligonucleotide
tgatcgcggtcgaaggggcgccttcccacg

SEQ ID NO: 113545 - DNA, 30 bp, Artificial Sequence
  Synthetic oligonucleotide
gtattcataagtgatagcgcgagggccacg

SEQ ID NO: 113546 - DNA, 30 bp, Artificial Sequence
  Synthetic oligonucleotide
gggcggactagtagccgttagtggtccacg

SEQ ID NO: 113547 - DNA, 30 bp, Artificial Sequence
  Synthetic oligonucleotide
gttgtcaattggcaatatagtagttccacg

SEQ ID NO: 113548 - DNA, 30 bp, Artificial Sequence
  Synthetic oligonucleotide
gcacaattggtacaagagttgaaaagcacg

SEQ ID NO: 113549 - DNA, 30 bp, Artificial Sequence
  Synthetic oligonucleotide
taccccgctctgagagtccaggcgagcacg

SEQ ID NO: 113550 - DNA, 30 bp, Artificial Sequence
  Synthetic oligonucleotide
tcgcagaggtttcactcttactatagcacg

SEQ ID NO: 113551 - DNA, 30 bp, Artificial Sequence
  Synthetic oligonucleotide
attcttgataagtgggaccaagtgcgcacg

SEQ ID NO: 113552 - DNA, 30 bp, Artificial Sequence
  Synthetic oligonucleotide
gatgtagggcatgattagctaattcgcacg

SEQ ID NO: 113553 - DNA, 30 bp, Artificial Sequence
  Synthetic oligonucleotide
acgagccaaaccatcatcttaattcgcacg

SEQ ID NO: 113554 - DNA, 30 bp, Artificial Sequence
  Synthetic oligonucleotide
ggtacgatagtgccacagcgagaaggcacg

SEQ ID NO: 113555 - DNA, 30 bp, Artificial Sequence
  Synthetic oligonucleotide
ggaaggttagggacgattgtactaggcacg

SEQ ID NO: 113556 - DNA, 30 bp, Artificial Sequence
  Synthetic oligonucleotide
gaagaggtacatcgcatggatggatgcacg

SEQ ID NO: 113557 - DNA, 30 bp, Artificial Sequence
  Synthetic oligonucleotide
aaaaggctaacatcgggtgagcaaatcacg

SEQ ID NO: 113558 - DNA, 30 bp, Artificial Sequence
  Synthetic oligonucleotide
tatcttcagcttaagttaaacaacatcacg

SEQ ID NO: 113559 - DNA, 30 bp, Artificial Sequence
  Synthetic oligonucleotide
gcgataagcgatactagtgtccccatcacg

SEQ ID NO: 113560 - DNA, 30 bp, Artificial Sequence
  Synthetic oligonucleotide
ctccgggctatgagcatccgtcagatcacg

SEQ ID NO: 113561 - DNA, 30 bp, Artificial Sequence
  Synthetic oligonucleotide
cactcggtaagatatcatgattagatcacg

SEQ ID NO: 113562 - DNA, 30 bp, Artificial Sequence
  Synthetic oligonucleotide
gcggcctcttattcgaagatttcgatcacg

SEQ ID NO: 113563 - DNA, 30 bp, Artificial Sequence
  Synthetic oligonucleotide
ccaggtcacatctaggtttcagctatcacg

SEQ ID NO: 113564 - DNA, 30 bp, Artificial Sequence
  Synthetic oligonucleotide
tacagagccatgtaaggagctttgctcacg

SEQ ID NO: 113565 - DNA, 29 bp, Artificial Sequence
  Synthetic oligonucleotide
ataaggcaaaagcaaggtgatgcgtcacg

SEQ ID NO: 113566 - DNA, 30 bp, Artificial Sequence
  Synthetic oligonucleotide
tggagggtcgctagttcatggcatgtcacg

SEQ ID NO: 113567 - DNA, 30 bp, Artificial Sequence
  Synthetic oligonucleotide
tgctctagtagcaataaacgcgacttcacg

SEQ ID NO: 113568 - DNA, 30 bp, Artificial Sequence
  Synthetic oligonucleotide
cgacaatcggatttatggaagtgtttcacg

SEQ ID NO: 113569 - DNA, 30 bp, Artificial Sequence
  Synthetic oligonucleotide
tattagcataaaattattgaagtaaagacg

SEQ ID NO: 113570 - DNA, 30 bp, Artificial Sequence
  Synthetic oligonucleotide
atacttgatgggactgggtctagcaagacg

SEQ ID NO: 113571 - DNA, 30 bp, Artificial Sequence
  Synthetic oligonucleotide
tcatagatccacctgtattgcatacagacg

SEQ ID NO: 113572 - DNA, 30 bp, Artificial Sequence
  Synthetic oligonucleotide
ctgcaccacgcaaggataaggggccagacg

SEQ ID NO: 113573 - DNA, 30 bp, Artificial Sequence
  Synthetic oligonucleotide
tgactgatcacacgaccctacgcgcagacg

SEQ ID NO: 113574 - DNA, 30 bp, Artificial Sequence
  Synthetic oligonucleotide
acagtatgatgcgacactcgccaagagacg

SEQ ID NO: 113575 - DNA, 30 bp, Artificial Sequence
  Synthetic oligonucleotide
ccaactggctgctccctgcttccagagacg

SEQ ID NO: 113576 - DNA, 30 bp, Artificial Sequence
  Synthetic oligonucleotide
aaaacggcacgagtgcagttgtacgagacg

SEQ ID NO: 113577 - DNA, 30 bp, Artificial Sequence
  Synthetic oligonucleotide
gcgagaaaagcccggccacaagcggagacg

SEQ ID NO: 113578 - DNA, 30 bp, Artificial Sequence
  Synthetic oligonucleotide
caccgtagaacgcgatcataggcggagacg

SEQ ID NO: 113579 - DNA, 30 bp, Artificial Sequence
  Synthetic oligonucleotide
ccagctaattgaagccagaagccatagacg

SEQ ID NO: 113580 - DNA, 30 bp, Artificial Sequence
  Synthetic oligonucleotide
tgggacaactatgacagcttttagtagacg

SEQ ID NO: 113581 - DNA, 30 bp, Artificial Sequence
  Synthetic oligonucleotide
gacaccaaaatatgaaattgcgggacgacg

SEQ ID NO: 113582 - DNA, 30 bp, Artificial Sequence
  Synthetic oligonucleotide
ccctatcaggtcaacaacgactatccgacg

SEQ ID NO: 113583 - DNA, 30 bp, Artificial Sequence
  Synthetic oligonucleotide
cctacgccgaactaaggtctacaagcgacg

SEQ ID NO: 113584 - DNA, 30 bp, Artificial Sequence
  Synthetic oligonucleotide
tcattcacaccaggccggaacggggcgacg

SEQ ID NO: 113585 - DNA, 30 bp, Artificial Sequence
  Synthetic oligonucleotide
gatcgatatggaaagatgaagattgcgacg

SEQ ID NO: 113586 - DNA, 30 bp, Artificial Sequence
  Synthetic oligonucleotide
tctaggaagaggtgtttacgccgttcgacg

SEQ ID NO: 113587 - DNA, 30 bp, Artificial Sequence
  Synthetic oligonucleotide
tggaagcatacgataggtcggtgaaggacg

SEQ ID NO: 113588 - DNA, 30 bp, Artificial Sequence
  Synthetic oligonucleotide
tactcgactaggccgccaccccagaggacg

SEQ ID NO: 113589 - DNA, 30 bp, Artificial Sequence
  Synthetic oligonucleotide
tgttgtgacccaggaccaacgaggaggacg

SEQ ID NO: 113590 - DNA, 30 bp, Artificial Sequence
  Synthetic oligonucleotide
gtagggacgagggaccttactttccggacg

SEQ ID NO: 113591 - DNA, 30 bp, Artificial Sequence
  Synthetic oligonucleotide
aagacggcatcactgttagtcctagggacg

SEQ ID NO: 113592 - DNA, 30 bp, Artificial Sequence
  Synthetic oligonucleotide
agggtcaaaccggggtgcataaacgggacg

SEQ ID NO: 113593 - DNA, 30 bp, Artificial Sequence
  Synthetic oligonucleotide
cacaaacagatctagtggcacaccgggacg

SEQ ID NO: 113594 - DNA, 30 bp, Artificial Sequence
  Synthetic oligonucleotide
tcggtcacggaacgaaatatcctcgggacg

SEQ ID NO: 113595 - DNA, 30 bp, Artificial Sequence
  Synthetic oligonucleotide
cgcacagtctgggtgacatatgcggggacg

SEQ ID NO: 113596 - DNA, 30 bp, Artificial Sequence
  Synthetic oligonucleotide
cggggcactaccagtgagtaccgggggacg

SEQ ID NO: 113597 - DNA, 30 bp, Artificial Sequence
  Synthetic oligonucleotide
gcgccgcatgtaaacgatgaggctgggacg

SEQ ID NO: 113598 - DNA, 30 bp, Artificial Sequence
  Synthetic oligonucleotide
gtgatgtctcacccattagtgtaatggacg

SEQ ID NO: 113599 - DNA, 30 bp, Artificial Sequence
  Synthetic oligonucleotide
tgaggagcgctgtcaagcaccgtatggacg

SEQ ID NO: 113600 - DNA, 30 bp, Artificial Sequence
  Synthetic oligonucleotide
tgagcatccgggctctgagccggctggacg

SEQ ID NO: 113601 - DNA, 30 bp, Artificial Sequence
  Synthetic oligonucleotide
gggaggccagggccggaaacgcgaatgacg

SEQ ID NO: 113602 - DNA, 30 bp, Artificial Sequence
  Synthetic oligonucleotide
aactgataatggtggcaactagacgtgacg

SEQ ID NO: 113603 - DNA, 30 bp, Artificial Sequence
  Synthetic oligonucleotide
gaaggtcagagatcaatatagcgcgtgacg

SEQ ID NO: 113604 - DNA, 31 bp, Artificial Sequence
  Synthetic oligonucleotide
acacaacgatagtcagtttgatacggtgacg

SEQ ID NO: 113605 - DNA, 30 bp, Artificial Sequence
  Synthetic oligonucleotide
atacgtgaaggaaagaatggaccggtgacg

SEQ ID NO: 113606 - DNA, 30 bp, Artificial Sequence
  Synthetic oligonucleotide
catatatacaaaaaggctacatcgttgacg

SEQ ID NO: 113607 - DNA, 30 bp, Artificial Sequence
  Synthetic oligonucleotide
cgttggggaagttgttttaagaggttgacg

SEQ ID NO: 113608 - DNA, 30 bp, Artificial Sequence
  Synthetic oligonucleotide
acgggtttcttagcgaagtgtacccatacg

SEQ ID NO: 113609 - DNA, 30 bp, Artificial Sequence
  Synthetic oligonucleotide
tcgccaggcgaatatgcatagtctgatacg

SEQ ID NO: 113610 - DNA, 30 bp, Artificial Sequence
  Synthetic oligonucleotide
agttgggggtgggggtcgtacatcactacg

SEQ ID NO: 113611 - DNA, 30 bp, Artificial Sequence
  Synthetic oligonucleotide
agttgtcacggaggagattagcagtctacg

SEQ ID NO: 113612 - DNA, 30 bp, Artificial Sequence
  Synthetic oligonucleotide
agagggaagtaaagcggggtacttagtacg

SEQ ID NO: 113613 - DNA, 30 bp, Artificial Sequence
  Synthetic oligonucleotide
atagaagttgatagcaatatgagacgtacg

SEQ ID NO: 113614 - DNA, 30 bp, Artificial Sequence
  Synthetic oligonucleotide
acaaagcttgcctggtagaacaaccgtacg

SEQ ID NO: 113615 - DNA, 30 bp, Artificial Sequence
  Synthetic oligonucleotide
agcgtaggcaggtcctgacatatccgtacg

SEQ ID NO: 113616 - DNA, 30 bp, Artificial Sequence
  Synthetic oligonucleotide
acggcttctagagaagacttacgtcgtacg

SEQ ID NO: 113617 - DNA, 30 bp, Artificial Sequence
  Synthetic oligonucleotide
gccaaggctctatacactacagcgtgtacg

SEQ ID NO: 113618 - DNA, 30 bp, Artificial Sequence
  Synthetic oligonucleotide
cattcaagtacgtataaacatttttgtacg

SEQ ID NO: 113619 - DNA, 30 bp, Artificial Sequence
  Synthetic oligonucleotide
gttggtacgagagcgacttaattcattacg

SEQ ID NO: 113620 - DNA, 30 bp, Artificial Sequence
  Synthetic oligonucleotide
agcagtagaagtattaaccgtgcgattacg

SEQ ID NO: 113621 - DNA, 30 bp, Artificial Sequence
  Synthetic oligonucleotide
tctgtacaacaatgattattagtgattacg

SEQ ID NO: 113622 - DNA, 30 bp, Artificial Sequence
  Synthetic oligonucleotide
cgcagagcccctgctcagataaaagttacg

SEQ ID NO: 113623 - DNA, 30 bp, Artificial Sequence
  Synthetic oligonucleotide
cactatacggttattagatcaggagttacg

SEQ ID NO: 113624 - DNA, 30 bp, Artificial Sequence
  Synthetic oligonucleotide
atgctaaactttcagaggttggaggttacg

SEQ ID NO: 113625 - DNA, 30 bp, Artificial Sequence
  Synthetic oligonucleotide
agtcggtgtaacactccatgtcggtttacg

SEQ ID NO: 113626 - DNA, 30 bp, Artificial Sequence
  Synthetic oligonucleotide
ctaaccagggcacgacattcaatttttacg

SEQ ID NO: 113627 - DNA, 30 bp, Artificial Sequence
  Synthetic oligonucleotide
tggagaccttgggtgcaaagacaaaaaccg

SEQ ID NO: 113628 - DNA, 30 bp, Artificial Sequence
  Synthetic oligonucleotide
gcttgtcgtttaaagtaaaaagataaaccg

SEQ ID NO: 113629 - DNA, 30 bp, Artificial Sequence
  Synthetic oligonucleotide
agggcggtcagtgtagatcctcgacaaccg

SEQ ID NO: 113630 - DNA, 30 bp, Artificial Sequence
  Synthetic oligonucleotide
ttcgagataaggcggattgcttaccaaccg

SEQ ID NO: 113631 - DNA, 30 bp, Artificial Sequence
  Synthetic oligonucleotide
gtgtcattgcgcagcaatgtcagtcaaccg

SEQ ID NO: 113632 - DNA, 30 bp, Artificial Sequence
  Synthetic oligonucleotide
tacaggtcagcgatacgtttaccagaaccg

SEQ ID NO: 113633 - DNA, 30 bp, Artificial Sequence
  Synthetic oligonucleotide
agggtagaatactggtcggcgtgcgaaccg

SEQ ID NO: 113634 - DNA, 30 bp, Artificial Sequence
  Synthetic oligonucleotide
aatgcaattgagggataagttcgggaaccg

SEQ ID NO: 113635 - DNA, 30 bp, Artificial Sequence
  Synthetic oligonucleotide
taatgcggaccgggtgggaggccataaccg

SEQ ID NO: 113636 - DNA, 30 bp, Artificial Sequence
  Synthetic oligonucleotide
gtcggcctgtcaattttcgcctcgtaaccg

SEQ ID NO: 113637 - DNA, 30 bp, Artificial Sequence
  Synthetic oligonucleotide
atgccgggttagaggagtgtaggcacaccg

SEQ ID NO: 113638 - DNA, 30 bp, Artificial Sequence
  Synthetic oligonucleotide
agagttaggttgggcaatctgtcgacaccg

SEQ ID NO: 113639 - DNA, 30 bp, Artificial Sequence
  Synthetic oligonucleotide
aacgtgtggtcggttaagtatgagccaccg

SEQ ID NO: 113640 - DNA, 30 bp, Artificial Sequence
  Synthetic oligonucleotide
gcaaagtgactgaaggacgtatacgcaccg

SEQ ID NO: 113641 - DNA, 30 bp, Artificial Sequence
  Synthetic oligonucleotide
gatgtatgtgtgaccttggctaatgcaccg

SEQ ID NO: 113642 - DNA, 30 bp, Artificial Sequence
  Synthetic oligonucleotide
gttagtggctcgactctggcatccagaccg

SEQ ID NO: 113643 - DNA, 30 bp, Artificial Sequence
  Synthetic oligonucleotide
gaggacatcgtttgcaaatggcaccgaccg

SEQ ID NO: 113644 - DNA, 30 bp, Artificial Sequence
  Synthetic oligonucleotide
agcatcatgtacgctaatgtggctcgaccg

SEQ ID NO: 113645 - DNA, 30 bp, Artificial Sequence
  Synthetic oligonucleotide
cagcccccactacgaagccatatcggaccg

SEQ ID NO: 113646 - DNA, 30 bp, Artificial Sequence
  Synthetic oligonucleotide
gaaacctctggcacaacgcccgtcggaccg

SEQ ID NO: 113647 - DNA, 30 bp, Artificial Sequence
  Synthetic oligonucleotide
cccagacaactagctatccatgtcggaccg

SEQ ID NO: 113648 - DNA, 30 bp, Artificial Sequence
  Synthetic oligonucleotide
ggcgggaggttttttaccattcgtggaccg

SEQ ID NO: 113649 - DNA, 30 bp, Artificial Sequence
  Synthetic oligonucleotide
ttggtttttgggatgggcaagtcgataccg

SEQ ID NO: 113650 - DNA, 30 bp, Artificial Sequence
  Synthetic oligonucleotide
aagggggctcgcaccgttctccatataccg

SEQ ID NO: 113651 - DNA, 30 bp, Artificial Sequence
  Synthetic oligonucleotide
ttggactcctgtagcgccaactatataccg

SEQ ID NO: 113652 - DNA, 30 bp, Artificial Sequence
  Synthetic oligonucleotide
caaggatccggagcatagataattctaccg

SEQ ID NO: 113653 - DNA, 30 bp, Artificial Sequence
  Synthetic oligonucleotide
tctggataggttaattcagttgtcgtaccg

SEQ ID NO: 113654 - DNA, 30 bp, Artificial Sequence
  Synthetic oligonucleotide
aggcaactctcgcatagtattactgtaccg

SEQ ID NO: 113655 - DNA, 30 bp, Artificial Sequence
  Synthetic oligonucleotide
gtcggcaacacctaccgggtaaggttaccg

SEQ ID NO: 113656 - DNA, 30 bp, Artificial Sequence
  Synthetic oligonucleotide
taccggagtgcgcgacaacggaatttaccg

SEQ ID NO: 113657 - DNA, 30 bp, Artificial Sequence
  Synthetic oligonucleotide
ccacaataaattgatctgcttataaacccg

SEQ ID NO: 113658 - DNA, 30 bp, Artificial Sequence
  Synthetic oligonucleotide
gacgaagtatctggcatcaaatgtaacccg

SEQ ID NO: 113659 - DNA, 30 bp, Artificial Sequence
  Synthetic oligonucleotide
cgagtacgtttagagaatacgtaacacccg

SEQ ID NO: 113660 - DNA, 30 bp, Artificial Sequence
  Synthetic oligonucleotide
taaacagaatgaagtactggcatacacccg

SEQ ID NO: 113661 - DNA, 30 bp, Artificial Sequence
  Synthetic oligonucleotide
cgaagttatgagccccaatcgttgcacccg

SEQ ID NO: 113662 - DNA, 30 bp, Artificial Sequence
  Synthetic oligonucleotide
ttgagcgagacagcggtgcaggccaccccg

SEQ ID NO: 113663 - DNA, 30 bp, Artificial Sequence
  Synthetic oligonucleotide
aaggaattgtacgtcatgatatgcaccccg

SEQ ID NO: 113664 - DNA, 30 bp, Artificial Sequence
  Synthetic oligonucleotide
tcactgatggagggtcaatcatggcccccg

SEQ ID NO: 113665 - DNA, 30 bp, Artificial Sequence
  Synthetic oligonucleotide
agaacctagggtggcgtggcgtgtcccccg

SEQ ID NO: 113666 - DNA, 30 bp, Artificial Sequence
  Synthetic oligonucleotide
tcaataattcgatccatcacacacgccccg

SEQ ID NO: 113667 - DNA, 30 bp, Artificial Sequence
  Synthetic oligonucleotide
gccaggaacaaaaagggtgcttactccccg

SEQ ID NO: 113668 - DNA, 30 bp, Artificial Sequence
  Synthetic oligonucleotide
acgtaatccagccgtatcaatcggtccccg

SEQ ID NO: 113669 - DNA, 30 bp, Artificial Sequence
  Synthetic oligonucleotide
cgacccgcggctgtgtagggaataagcccg

SEQ ID NO: 113670 - DNA, 30 bp, Artificial Sequence
  Synthetic oligonucleotide
tcggatgagaataatactcggctcagcccg

SEQ ID NO: 113671 - DNA, 30 bp, Artificial Sequence
  Synthetic oligonucleotide
gggatcgcgcaaattgcaagtacacgcccg

SEQ ID NO: 113672 - DNA, 30 bp, Artificial Sequence
  Synthetic oligonucleotide
tgcgaattgtataaatgtagttagcgcccg

SEQ ID NO: 113673 - DNA, 30 bp, Artificial Sequence
  Synthetic oligonucleotide
caattccgttctcgttgagccccgcgcccg

SEQ ID NO: 113674 - DNA, 30 bp, Artificial Sequence
  Synthetic oligonucleotide
atacggagtgtttactgtctcgctcgcccg

SEQ ID NO: 113675 - DNA, 30 bp, Artificial Sequence
  Synthetic oligonucleotide
ggtcgagtctaatacggcacacgtcgcccg

SEQ ID NO: 113676 - DNA, 30 bp, Artificial Sequence
  Synthetic oligonucleotide
atactacatgctgtgtaagagacaggcccg

SEQ ID NO: 113677 - DNA, 30 bp, Artificial Sequence
  Synthetic oligonucleotide
agtatactatcaaaatctgggaagggcccg

SEQ ID NO: 113678 - DNA, 30 bp, Artificial Sequence
  Synthetic oligonucleotide
gcggggttcatgcccgaagataagggcccg

SEQ ID NO: 113679 - DNA, 30 bp, Artificial Sequence
  Synthetic oligonucleotide
gtaaggtacaagaccgcccgaagttgcccg

SEQ ID NO: 113680 - DNA, 30 bp, Artificial Sequence
  Synthetic oligonucleotide
tcgctagttcgtacagcggctccgatcccg

SEQ ID NO: 113681 - DNA, 30 bp, Artificial Sequence
  Synthetic oligonucleotide
acctaggctgtcttcaaaggcatgatcccg

SEQ ID NO: 113682 - DNA, 30 bp, Artificial Sequence
  Synthetic oligonucleotide
acgatacagtggcggaaacaagtgatcccg

SEQ ID NO: 113683 - DNA, 30 bp, Artificial Sequence
  Synthetic oligonucleotide
ttttcgaaaggtatacgacttaaggtcccg

SEQ ID NO: 113684 - DNA, 30 bp, Artificial Sequence
  Synthetic oligonucleotide
catcgttaccagcttcacaaggcgttcccg

SEQ ID NO: 113685 - DNA, 30 bp, Artificial Sequence
  Synthetic oligonucleotide
cggggggaactgttgttgaaggttaagccg

SEQ ID NO: 113686 - DNA, 30 bp, Artificial Sequence
  Synthetic oligonucleotide
acggccatcatcttattcgtttttaagccg

SEQ ID NO: 113687 - DNA, 30 bp, Artificial Sequence
  Synthetic oligonucleotide
aacagacgcgtgaaccgaactcagcagccg

SEQ ID NO: 113688 - DNA, 30 bp, Artificial Sequence
  Synthetic oligonucleotide
ataagagatgttaccagaaggtttcagccg

SEQ ID NO: 113689 - DNA, 30 bp, Artificial Sequence
  Synthetic oligonucleotide
ccaattccagccacaagcgggtcagagccg

SEQ ID NO: 113690 - DNA, 30 bp, Artificial Sequence
  Synthetic oligonucleotide
gcgagaatgtagagactatttggtgagccg

SEQ ID NO: 113691 - DNA, 30 bp, Artificial Sequence
  Synthetic oligonucleotide
aagcccggtatcagacaactgccatagccg

SEQ ID NO: 113692 - DNA, 30 bp, Artificial Sequence
  Synthetic oligonucleotide
ggcggaggattacgatggtatcaaccgccg

SEQ ID NO: 113693 - DNA, 30 bp, Artificial Sequence
  Synthetic oligonucleotide
caccagataggatacagacagggaccgccg

SEQ ID NO: 113694 - DNA, 30 bp, Artificial Sequence
  Synthetic oligonucleotide
agtgaagagacctcattagggctaccgccg

SEQ ID NO: 113695 - DNA, 30 bp, Artificial Sequence
  Synthetic oligonucleotide
cgagcgatgtgagtagtatgagtgccgccg

SEQ ID NO: 113696 - DNA, 30 bp, Artificial Sequence
  Synthetic oligonucleotide
aactgaacaaacttctaggaggttccgccg

SEQ ID NO: 113697 - DNA, 30 bp, Artificial Sequence
  Synthetic oligonucleotide
gtaagacacgaattacacgttggatcgccg

SEQ ID NO: 113698 - DNA, 30 bp, Artificial Sequence
  Synthetic oligonucleotide
gataagatcagcgacgggcattcctcgccg

SEQ ID NO: 113699 - DNA, 30 bp, Artificial Sequence
  Synthetic oligonucleotide
gtaaccgtcgatttgagcacacgctcgccg

SEQ ID NO: 113700 - DNA, 30 bp, Artificial Sequence
  Synthetic oligonucleotide
gtaggaactaggggcagagttctctcgccg

SEQ ID NO: 113701 - DNA, 30 bp, Artificial Sequence
  Synthetic oligonucleotide
ccgtgtctggcttgagaacaagttaggccg

SEQ ID NO: 113702 - DNA, 30 bp, Artificial Sequence
  Synthetic oligonucleotide
atagtgtcgggacaggaaagtagacggccg

SEQ ID NO: 113703 - DNA, 30 bp, Artificial Sequence
  Synthetic oligonucleotide
cctccgtaacgtatatagcatctacggccg

SEQ ID NO: 113704 - DNA, 30 bp, Artificial Sequence
  Synthetic oligonucleotide
ccaagcccgtcaccagtgaccaaccggccg

SEQ ID NO: 113705 - DNA, 30 bp, Artificial Sequence
  Synthetic oligonucleotide
tacatcgtaatgtcttgataccatgggccg

SEQ ID NO: 113706 - DNA, 30 bp, Artificial Sequence
  Synthetic oligonucleotide
aagggccttgtctaggtatgcatatggccg

SEQ ID NO: 113707 - DNA, 30 bp, Artificial Sequence
  Synthetic oligonucleotide
ctggatcgacgggtcgcccagcatctgccg

SEQ ID NO: 113708 - DNA, 30 bp, Artificial Sequence
  Synthetic oligonucleotide
ggatgcggatgccagcgggactctctgccg

SEQ ID NO: 113709 - DNA, 30 bp, Artificial Sequence
  Synthetic oligonucleotide
gccgtgtcgcgatgtaacttgggcgtgccg

SEQ ID NO: 113710 - DNA, 30 bp, Artificial Sequence
  Synthetic oligonucleotide
ctacgccgtctaccaagtacgtcattgccg

SEQ ID NO: 113711 - DNA, 30 bp, Artificial Sequence
  Synthetic oligonucleotide
aacgggtgttgcttggcgtggcagttgccg

SEQ ID NO: 113712 - DNA, 30 bp, Artificial Sequence
  Synthetic oligonucleotide
gcacaggaaacggtatggtcacacaatccg

SEQ ID NO: 113713 - DNA, 30 bp, Artificial Sequence
  Synthetic oligonucleotide
tagtgagttagtctggagttcttcaatccg

SEQ ID NO: 113714 - DNA, 30 bp, Artificial Sequence
  Synthetic oligonucleotide
agtccgtaggagcatatacgtacgaatccg

SEQ ID NO: 113715 - DNA, 30 bp, Artificial Sequence
  Synthetic oligonucleotide
ggcattacgtttggatatgctcggaatccg

SEQ ID NO: 113716 - DNA, 30 bp, Artificial Sequence
  Synthetic oligonucleotide
agcccgagggacaccgccgtcatccatccg

SEQ ID NO: 113717 - DNA, 30 bp, Artificial Sequence
  Synthetic oligonucleotide
cgtcgtgatgcatatctgacgaaagatccg

SEQ ID NO: 113718 - DNA, 30 bp, Artificial Sequence
  Synthetic oligonucleotide
agactttgtttccagggtagtccagatccg

SEQ ID NO: 113719 - DNA, 30 bp, Artificial Sequence
  Synthetic oligonucleotide
tcgtgtcagcagggcggaatgaggtatccg

SEQ ID NO: 113720 - DNA, 30 bp, Artificial Sequence
  Synthetic oligonucleotide
gacttggaaatgaggcctgtgagaactccg

SEQ ID NO: 113721 - DNA, 30 bp, Artificial Sequence
  Synthetic oligonucleotide
aagttgaacggggcgatactaaagactccg

SEQ ID NO: 113722 - DNA, 30 bp, Artificial Sequence
  Synthetic oligonucleotide
gaagcatacttttgcatcgtacggactccg

SEQ ID NO: 113723 - DNA, 30 bp, Artificial Sequence
  Synthetic oligonucleotide
ggccatggtgaaagtacatgataacctccg

SEQ ID NO: 113724 - DNA, 30 bp, Artificial Sequence
  Synthetic oligonucleotide
tggagggaaaagagttggatgacacctccg

SEQ ID NO: 113725 - DNA, 30 bp, Artificial Sequence
  Synthetic oligonucleotide
ggaacaccgtgctgataggggatagctccg

SEQ ID NO: 113726 - DNA, 30 bp, Artificial Sequence
  Synthetic oligonucleotide
aggattataaatcgccctacacatgctccg

SEQ ID NO: 113727 - DNA, 30 bp, Artificial Sequence
  Synthetic oligonucleotide
gtgggggcagctccttgcactgaatctccg

SEQ ID NO: 113728 - DNA, 30 bp, Artificial Sequence
  Synthetic oligonucleotide
caagaagatggtactagtcaggattctccg

SEQ ID NO: 113729 - DNA, 31 bp, Artificial Sequence
  Synthetic oligonucleotide
ttgcaacagaccgggcgcgataagaagtccg

SEQ ID NO: 113730 - DNA, 30 bp, Artificial Sequence
  Synthetic oligonucleotide
tggatagattatggatggaaggggagtccg

SEQ ID NO: 113731 - DNA, 30 bp, Artificial Sequence
  Synthetic oligonucleotide
ggcaagctgagctcaaggttgattagtccg

SEQ ID NO: 113732 - DNA, 30 bp, Artificial Sequence
  Synthetic oligonucleotide
gggttccacattaccacggtctaacgtccg

SEQ ID NO: 113733 - DNA, 30 bp, Artificial Sequence
  Synthetic oligonucleotide
tcgtcggtggagagatgatgaacacgtccg

SEQ ID NO: 113734 - DNA, 30 bp, Artificial Sequence
  Synthetic oligonucleotide
accagtagaaacgccgcgaactgacgtccg

SEQ ID NO: 113735 - DNA, 30 bp, Artificial Sequence
  Synthetic oligonucleotide
gtattagctggattgagagaaatacgtccg

SEQ ID NO: 113736 - DNA, 30 bp, Artificial Sequence
  Synthetic oligonucleotide
ccgcgttggagacggtaggagcatcgtccg

SEQ ID NO: 113737 - DNA, 30 bp, Artificial Sequence
  Synthetic oligonucleotide
aaaacccatgctctggggttgggtcgtccg

SEQ ID NO: 113738 - DNA, 30 bp, Artificial Sequence
  Synthetic oligonucleotide
caatgatcagtatgacgactaaacggtccg

SEQ ID NO: 113739 - DNA, 30 bp, Artificial Sequence
  Synthetic oligonucleotide
tcggggtcgtcaggctaggcccgtggtccg

SEQ ID NO: 113740 - DNA, 30 bp, Artificial Sequence
  Synthetic oligonucleotide
tcgagttgtctggcatgagggggtggtccg

SEQ ID NO: 113741 - DNA, 30 bp, Artificial Sequence
  Synthetic oligonucleotide
ttaattcaatagcttaaaaaagcatgtccg

SEQ ID NO: 113742 - DNA, 30 bp, Artificial Sequence
  Synthetic oligonucleotide
ggtggccaatcggtgaccgggaaaattccg

SEQ ID NO: 113743 - DNA, 30 bp, Artificial Sequence
  Synthetic oligonucleotide
aacgtcacgccaccggggagtataattccg

SEQ ID NO: 113744 - DNA, 30 bp, Artificial Sequence
  Synthetic oligonucleotide
ggacgcgtttacatcgatatgaagattccg

SEQ ID NO: 113745 - DNA, 30 bp, Artificial Sequence
  Synthetic oligonucleotide
acaaccggctggggtagctcaaccgttccg

SEQ ID NO: 113746 - DNA, 30 bp, Artificial Sequence
  Synthetic oligonucleotide
ataggactatctgagatatatttggttccg

SEQ ID NO: 113747 - DNA, 30 bp, Artificial Sequence
  Synthetic oligonucleotide
cagtggtcgcgtaattcgtattcctttccg

SEQ ID NO: 113748 - DNA, 30 bp, Artificial Sequence
  Synthetic oligonucleotide
ggccatgctacaacgtgagacgtgtttccg

SEQ ID NO: 113749 - DNA, 30 bp, Artificial Sequence
  Synthetic oligonucleotide
tcctttaagacctatgcgactacaaaagcg

SEQ ID NO: 113750 - DNA, 30 bp, Artificial Sequence
  Synthetic oligonucleotide
caggtatacacaacactggaacggaaagcg

SEQ ID NO: 113751 - DNA, 30 bp, Artificial Sequence
  Synthetic oligonucleotide
atcgccatacagtatataagtgataaagcg

SEQ ID NO: 113752 - DNA, 30 bp, Artificial Sequence
  Synthetic oligonucleotide
cgaatggttattaaagatcgttaacaagcg

SEQ ID NO: 113753 - DNA, 30 bp, Artificial Sequence
  Synthetic oligonucleotide
gggtagccagaagagtttgggacacaagcg

SEQ ID NO: 113754 - DNA, 30 bp, Artificial Sequence
  Synthetic oligonucleotide
gtttgattcagaattgtgggaaaccaagcg

SEQ ID NO: 113755 - DNA, 30 bp, Artificial Sequence
  Synthetic oligonucleotide
aacattcaaaaattaggggattggcaagcg

SEQ ID NO: 113756 - DNA, 30 bp, Artificial Sequence
  Synthetic oligonucleotide
tggcaaaaagctagtcagttgattcaagcg

SEQ ID NO: 113757 - DNA, 30 bp, Artificial Sequence
  Synthetic oligonucleotide
aagtaagtctgcatgggtcagtttcaagcg

SEQ ID NO: 113758 - DNA, 30 bp, Artificial Sequence
  Synthetic oligonucleotide
tgtccgtaaatctaagcataggaataagcg

SEQ ID NO: 113759 - DNA, 30 bp, Artificial Sequence
  Synthetic oligonucleotide
cctattgccaagtctcagggggcataagcg

SEQ ID NO: 113760 - DNA, 30 bp, Artificial Sequence
  Synthetic oligonucleotide
cagatggtcgatgctcacaggcaaacagcg

SEQ ID NO: 113761 - DNA, 30 bp, Artificial Sequence
  Synthetic oligonucleotide
ccgtatcaccggtaagcatatgacacagcg

SEQ ID NO: 113762 - DNA, 30 bp, Artificial Sequence
  Synthetic oligonucleotide
ttaggcggcaagaccggatgagtcacagcg

SEQ ID NO: 113763 - DNA, 30 bp, Artificial Sequence
  Synthetic oligonucleotide
gcaccgccaacaggtaatccgtccccagcg

SEQ ID NO: 113764 - DNA, 30 bp, Artificial Sequence
  Synthetic oligonucleotide
ctgtcatagaacatcgtacaattgccagcg

SEQ ID NO: 113765 - DNA, 30 bp, Artificial Sequence
  Synthetic oligonucleotide
gggcgggatcgtgtagacggctctccagcg

SEQ ID NO: 113766 - DNA, 30 bp, Artificial Sequence
  Synthetic oligonucleotide
ggaactgcgccgttaactataggagcagcg

SEQ ID NO: 113767 - DNA, 30 bp, Artificial Sequence
  Synthetic oligonucleotide
ccctacagtcactccaatctagtagcagcg

SEQ ID NO: 113768 - DNA, 30 bp, Artificial Sequence
  Synthetic oligonucleotide
tgtgagataaggaacaaatgtgttgcagcg

SEQ ID NO: 113769 - DNA, 30 bp, Artificial Sequence
  Synthetic oligonucleotide
caaatcacatcttataggagggactcagcg

SEQ ID NO: 113770 - DNA, 30 bp, Artificial Sequence
  Synthetic oligonucleotide
ctatataaaagcaagcattggatctcagcg

SEQ ID NO: 113771 - DNA, 30 bp, Artificial Sequence
  Synthetic oligonucleotide
aacttagagccgagggccaaggtaagagcg

SEQ ID NO: 113772 - DNA, 30 bp, Artificial Sequence
  Synthetic oligonucleotide
cgatctcctgaacgttagcaggacagagcg

SEQ ID NO: 113773 - DNA, 30 bp, Artificial Sequence
  Synthetic oligonucleotide
cttgtgtccaaaggctcaattgccagagcg

SEQ ID NO: 113774 - DNA, 30 bp, Artificial Sequence
  Synthetic oligonucleotide
aaaacgttaacacaggatatcccgagagcg

SEQ ID NO: 113775 - DNA, 30 bp, Artificial Sequence
  Synthetic oligonucleotide
ggcaatgccatgtatcggaatccacgagcg

SEQ ID NO: 113776 - DNA, 31 bp, Artificial Sequence
  Synthetic oligonucleotide
attatgcggcggattgcccggaggacgagcg

SEQ ID NO: 113777 - DNA, 30 bp, Artificial Sequence
  Synthetic oligonucleotide
agcgtttgccgttgaatcgtatgacgagcg

SEQ ID NO: 113778 - DNA, 30 bp, Artificial Sequence
  Synthetic oligonucleotide
gccggtgatactgtgtgagaaccgggagcg

SEQ ID NO: 113779 - DNA, 30 bp, Artificial Sequence
  Synthetic oligonucleotide
cataagaaggcgaaattatgaccgggagcg

SEQ ID NO: 113780 - DNA, 30 bp, Artificial Sequence
  Synthetic oligonucleotide
aagagcgcagtaaaacgtaagacatgagcg

SEQ ID NO: 113781 - DNA, 30 bp, Artificial Sequence
  Synthetic oligonucleotide
ggggaatagtcgtgcgccgtacagtgagcg

SEQ ID NO: 113782 - DNA, 30 bp, Artificial Sequence
  Synthetic oligonucleotide
acaaaagcggggtttaagtaggggtgagcg

SEQ ID NO: 113783 - DNA, 30 bp, Artificial Sequence
  Synthetic oligonucleotide
gtctggaagcatcaacatcgcaattgagcg

SEQ ID NO: 113784 - DNA, 30 bp, Artificial Sequence
  Synthetic oligonucleotide
cttgacacgtcgttatctgcacagatagcg

SEQ ID NO: 113785 - DNA, 30 bp, Artificial Sequence
  Synthetic oligonucleotide
gcaagggggaactaactcacgcagatagcg

SEQ ID NO: 113786 - DNA, 30 bp, Artificial Sequence
  Synthetic oligonucleotide
aacacgacggacaagtggctgaggatagcg

SEQ ID NO: 113787 - DNA, 30 bp, Artificial Sequence
  Synthetic oligonucleotide
agcaacgtgggatcgcagggtgatatagcg

SEQ ID NO: 113788 - DNA, 30 bp, Artificial Sequence
  Synthetic oligonucleotide
ttaaaccaatattcgtgacaatatgtagcg

SEQ ID NO: 113789 - DNA, 30 bp, Artificial Sequence
  Synthetic oligonucleotide
gagccagtggcgtgctgggcggctgtagcg

SEQ ID NO: 113790 - DNA, 30 bp, Artificial Sequence
  Synthetic oligonucleotide
gccaaagaaagcgaaactacatctgtagcg

SEQ ID NO: 113791 - DNA, 30 bp, Artificial Sequence
  Synthetic oligonucleotide
attcgaagcggaggttcgccaaataacgcg

SEQ ID NO: 113792 - DNA, 30 bp, Artificial Sequence
  Synthetic oligonucleotide
cgttcattaaatcgctagggctaccacgcg

SEQ ID NO: 113793 - DNA, 30 bp, Artificial Sequence
  Synthetic oligonucleotide
tacgtggggtggcgctcgtgaccctacgcg

SEQ ID NO: 113794 - DNA, 30 bp, Artificial Sequence
  Synthetic oligonucleotide
ggttgcgtcttgccgtagtggctacccgcg

SEQ ID NO: 113795 - DNA, 30 bp, Artificial Sequence
  Synthetic oligonucleotide
gcactgttcggagatagtatggcgcccgcg

SEQ ID NO: 113796 - DNA, 31 bp, Artificial Sequence
  Synthetic oligonucleotide
cgcatcgcgtagaagcagaagacggcccgcg

SEQ ID NO: 113797 - DNA, 30 bp, Artificial Sequence
  Synthetic oligonucleotide
gaagagcgtgcccccattataatgcccgcg

SEQ ID NO: 113798 - DNA, 30 bp, Artificial Sequence
  Synthetic oligonucleotide
taataaatatagagggaagtaatagccgcg

SEQ ID NO: 113799 - DNA, 30 bp, Artificial Sequence
  Synthetic oligonucleotide
tatgtgcgtaattgaattgcactagccgcg

SEQ ID NO: 113800 - DNA, 30 bp, Artificial Sequence
  Synthetic oligonucleotide
tagacggaagactaaatgtaacatgccgcg

SEQ ID NO: 113801 - DNA, 30 bp, Artificial Sequence
  Synthetic oligonucleotide
acttcaaagctctaagaatcgcgatccgcg

SEQ ID NO: 113802 - DNA, 30 bp, Artificial Sequence
  Synthetic oligonucleotide
caacaagtccctgttatggtatgttccgcg

SEQ ID NO: 113803 - DNA, 30 bp, Artificial Sequence
  Synthetic oligonucleotide
tcgattgcaattcgaaagaggtgaagcgcg

SEQ ID NO: 113804 - DNA, 30 bp, Artificial Sequence
  Synthetic oligonucleotide
tcgtattaatgcgtcctattccctagcgcg

SEQ ID NO: 113805 - DNA, 30 bp, Artificial Sequence
  Synthetic oligonucleotide
cccatccttgagtgcgggagaggtagcgcg

SEQ ID NO: 113806 - DNA, 30 bp, Artificial Sequence
  Synthetic oligonucleotide
tcgaggacattacgacgggctcgacgcgcg

SEQ ID NO: 113807 - DNA, 30 bp, Artificial Sequence
  Synthetic oligonucleotide
gaagagcaagaaagtgtccaagaaggcgcg

SEQ ID NO: 113808 - DNA, 30 bp, Artificial Sequence
  Synthetic oligonucleotide
tagggctagtctattaagacaatctgcgcg

SEQ ID NO: 113809 - DNA, 30 bp, Artificial Sequence
  Synthetic oligonucleotide
agcatcgttgcatagcagaatggcatcgcg

SEQ ID NO: 113810 - DNA, 30 bp, Artificial Sequence
  Synthetic oligonucleotide
agtcttgtggatgaacgagtaagtatcgcg

SEQ ID NO: 113811 - DNA, 30 bp, Artificial Sequence
  Synthetic oligonucleotide
tgaccacacggcaacgaattaattatcgcg

SEQ ID NO: 113812 - DNA, 30 bp, Artificial Sequence
  Synthetic oligonucleotide
ggatgatatggcgcgtacagtggactcgcg

SEQ ID NO: 113813 - DNA, 30 bp, Artificial Sequence
  Synthetic oligonucleotide
ggctctggaacttctcgagtcccgctcgcg

SEQ ID NO: 113814 - DNA, 30 bp, Artificial Sequence
  Synthetic oligonucleotide
aagtggactgtaaacccactgggtctcgcg

SEQ ID NO: 113815 - DNA, 30 bp, Artificial Sequence
  Synthetic oligonucleotide
tgcttccaagtgcctggactccttttcgcg

SEQ ID NO: 113816 - DNA, 30 bp, Artificial Sequence
  Synthetic oligonucleotide
gtaacaagttttaggatagagcaaaaggcg

SEQ ID NO: 113817 - DNA, 30 bp, Artificial Sequence
  Synthetic oligonucleotide
acggacattcgtttaatgcttgaaaaggcg

SEQ ID NO: 113818 - DNA, 30 bp, Artificial Sequence
  Synthetic oligonucleotide
gtcgcgatgtgcgtacccaggaatgaggcg

SEQ ID NO: 113819 - DNA, 30 bp, Artificial Sequence
  Synthetic oligonucleotide
aaacgttgccttgatcggtaggaataggcg

SEQ ID NO: 113820 - DNA, 29 bp, Artificial Sequence
  Synthetic oligonucleotide
gatctgaagcttacaaaagtacataggcg

SEQ ID NO: 113821 - DNA, 30 bp, Artificial Sequence
  Synthetic oligonucleotide
tgcgggtaaggacgaattaaccgataggcg

SEQ ID NO: 113822 - DNA, 30 bp, Artificial Sequence
  Synthetic oligonucleotide
aattataacatacacatgggggtgtaggcg

SEQ ID NO: 113823 - DNA, 30 bp, Artificial Sequence
  Synthetic oligonucleotide
gagaaccggctctatacgacactaacggcg

SEQ ID NO: 113824 - DNA, 30 bp, Artificial Sequence
  Synthetic oligonucleotide
gaatattcagagttgcaaagacgcacggcg

SEQ ID NO: 113825 - DNA, 30 bp, Artificial Sequence
  Synthetic oligonucleotide
atcgaaggacgaagtaggaccgcgacggcg

SEQ ID NO: 113826 - DNA, 30 bp, Artificial Sequence
  Synthetic oligonucleotide
taaccgcctcggatcacgaagatgacggcg

SEQ ID NO: 113827 - DNA, 30 bp, Artificial Sequence
  Synthetic oligonucleotide
agcgcgccaatacattaggaaataccggcg

SEQ ID NO: 113828 - DNA, 30 bp, Artificial Sequence
  Synthetic oligonucleotide
agctctccaggatcgagacggtaagcggcg

SEQ ID NO: 113829 - DNA, 30 bp, Artificial Sequence
  Synthetic oligonucleotide
agtggggttcattcgctaccgctagcggcg

SEQ ID NO: 113830 - DNA, 30 bp, Artificial Sequence
  Synthetic oligonucleotide
tcgcttacattctctggaggacaaagggcg

SEQ ID NO: 113831 - DNA, 30 bp, Artificial Sequence
  Synthetic oligonucleotide
tgcctagcgtcatatgctgtaccaagggcg

SEQ ID NO: 113832 - DNA, 30 bp, Artificial Sequence
  Synthetic oligonucleotide
tgcgctatcattcgtattccttagagggcg

SEQ ID NO: 113833 - DNA, 30 bp, Artificial Sequence
  Synthetic oligonucleotide
atggtttgcaatgttagtctgtggagggcg

SEQ ID NO: 113834 - DNA, 30 bp, Artificial Sequence
  Synthetic oligonucleotide
aagtaatgatcctcgtacctgtatagggcg

SEQ ID NO: 113835 - DNA, 30 bp, Artificial Sequence
  Synthetic oligonucleotide
aaaagtctaatcgataaattatagcgggcg

SEQ ID NO: 113836 - DNA, 30 bp, Artificial Sequence
  Synthetic oligonucleotide
gggcgacgggaacgaggacagaacggggcg

SEQ ID NO: 113837 - DNA, 30 bp, Artificial Sequence
  Synthetic oligonucleotide
cgtaggccaatatattagattagcggggcg

SEQ ID NO: 113838 - DNA, 30 bp, Artificial Sequence
  Synthetic oligonucleotide
tcacactgaagttccggactttagggggcg

SEQ ID NO: 113839 - DNA, 30 bp, Artificial Sequence
  Synthetic oligonucleotide
aggttaaaccgtgcaagctctctgggggcg

SEQ ID NO: 113840 - DNA, 30 bp, Artificial Sequence
  Synthetic oligonucleotide
atgtagtcatgtaaatgtatgatatgggcg

SEQ ID NO: 113841 - DNA, 30 bp, Artificial Sequence
  Synthetic oligonucleotide
cgggtatacggctcattgaaagtatgggcg

SEQ ID NO: 113842 - DNA, 30 bp, Artificial Sequence
  Synthetic oligonucleotide
gatacgattagattaattcggacgtgggcg

SEQ ID NO: 113843 - DNA, 30 bp, Artificial Sequence
  Synthetic oligonucleotide
gcagggcaaatggtacaccgccgttgggcg

SEQ ID NO: 113844 - DNA, 30 bp, Artificial Sequence
  Synthetic oligonucleotide
ttgtgccgacggcacccctaatacatggcg

SEQ ID NO: 113845 - DNA, 30 bp, Artificial Sequence
  Synthetic oligonucleotide
ttgagaagtaggccgatgaggtggatggcg

SEQ ID NO: 113846 - DNA, 30 bp, Artificial Sequence
  Synthetic oligonucleotide
ttactcgcgatgaaaagtcacagtatggcg

SEQ ID NO: 113847 - DNA, 30 bp, Artificial Sequence
  Synthetic oligonucleotide
gaggactatccattagctataggactggcg

SEQ ID NO: 113848 - DNA, 30 bp, Artificial Sequence
  Synthetic oligonucleotide
ctagagaccctctatccccttagggtggcg

SEQ ID NO: 113849 - DNA, 30 bp, Artificial Sequence
  Synthetic oligonucleotide
gggctccatgggcgtgcatcgtgtgtggcg

SEQ ID NO: 113850 - DNA, 30 bp, Artificial Sequence
  Synthetic oligonucleotide
taacaaaaaggtagtcagggcaatttggcg

SEQ ID NO: 113851 - DNA, 30 bp, Artificial Sequence
  Synthetic oligonucleotide
acggtactggcgggcagagtagatttggcg

SEQ ID NO: 113852 - DNA, 30 bp, Artificial Sequence
  Synthetic oligonucleotide
aaggcaggattatgaaaaatttctttggcg

SEQ ID NO: 113853 - DNA, 30 bp, Artificial Sequence
  Synthetic oligonucleotide
ccacaagcaagaggaaaaagtctaaatgcg

SEQ ID NO: 113854 - DNA, 30 bp, Artificial Sequence
  Synthetic oligonucleotide
aaagaagagactgtataggtacctaatgcg

SEQ ID NO: 113855 - DNA, 30 bp, Artificial Sequence
  Synthetic oligonucleotide
agtggtgttacacgtaggcactaacatgcg

SEQ ID NO: 113856 - DNA, 30 bp, Artificial Sequence
  Synthetic oligonucleotide
caaaacatcctcattgcatttcgacatgcg

SEQ ID NO: 113857 - DNA, 30 bp, Artificial Sequence
  Synthetic oligonucleotide
cagagtttccaaagccaatggttccatgcg

SEQ ID NO: 113858 - DNA, 30 bp, Artificial Sequence
  Synthetic oligonucleotide
tactctggcagcggaatcggtcgagatgcg

SEQ ID NO: 113859 - DNA, 31 bp, Artificial Sequence
  Synthetic oligonucleotide
gcgccagtcggacagaaaacggcgaactgcg

SEQ ID NO: 113860 - DNA, 30 bp, Artificial Sequence
  Synthetic oligonucleotide
cctagctcgggatgtcctgacggcactgcg

SEQ ID NO: 113861 - DNA, 30 bp, Artificial Sequence
  Synthetic oligonucleotide
gactgcattaacacaggggcatgtactgcg

SEQ ID NO: 113862 - DNA, 30 bp, Artificial Sequence
  Synthetic oligonucleotide
cgggttggaaaaccgaacgaagtccctgcg

SEQ ID NO: 113863 - DNA, 30 bp, Artificial Sequence
  Synthetic oligonucleotide
ggccaataaattgactgtgaatttcctgcg

SEQ ID NO: 113864 - DNA, 30 bp, Artificial Sequence
  Synthetic oligonucleotide
acttggttgctccgtgtcatacaagctgcg

SEQ ID NO: 113865 - DNA, 30 bp, Artificial Sequence
  Synthetic oligonucleotide
ttgggcatcagactctatctgcgatctgcg

SEQ ID NO: 113866 - DNA, 30 bp, Artificial Sequence
  Synthetic oligonucleotide
agcacggtgcaaagctttcagaggtctgcg

SEQ ID NO: 113867 - DNA, 30 bp, Artificial Sequence
  Synthetic oligonucleotide
ctatgcttgtaatgatctcgagattctgcg

SEQ ID NO: 113868 - DNA, 30 bp, Artificial Sequence
  Synthetic oligonucleotide
ccaagctcaagttcaggaggtagttctgcg

SEQ ID NO: 113869 - DNA, 30 bp, Artificial Sequence
  Synthetic oligonucleotide
ttaggcatctaatgaggattccgttctgcg

SEQ ID NO: 113870 - DNA, 30 bp, Artificial Sequence
  Synthetic oligonucleotide
tgttggctggttcaggggctgcgttctgcg

SEQ ID NO: 113871 - DNA, 30 bp, Artificial Sequence
  Synthetic oligonucleotide
cggaactggggctacttggtctccagtgcg

SEQ ID NO: 113872 - DNA, 30 bp, Artificial Sequence
  Synthetic oligonucleotide
ggcttccaggaatgtcatttcgcgagtgcg

SEQ ID NO: 113873 - DNA, 30 bp, Artificial Sequence
  Synthetic oligonucleotide
cttggcagcatggcaagacgagggagtgcg

SEQ ID NO: 113874 - DNA, 30 bp, Artificial Sequence
  Synthetic oligonucleotide
aggacgaaggctaggcctacatgtagtgcg

SEQ ID NO: 113875 - DNA, 30 bp, Artificial Sequence
  Synthetic oligonucleotide
ctccagtaggtcaaaacggcaaaccgtgcg

SEQ ID NO: 113876 - DNA, 30 bp, Artificial Sequence
  Synthetic oligonucleotide
gcgtagacgtgtatgttgtgggggggtgcg

SEQ ID NO: 113877 - DNA, 30 bp, Artificial Sequence
  Synthetic oligonucleotide
cggccattgcacgttaaagatcagtgtgcg

SEQ ID NO: 113878 - DNA, 30 bp, Artificial Sequence
  Synthetic oligonucleotide
ggaagactctcagttttaggggaaattgcg

SEQ ID NO: 113879 - DNA, 30 bp, Artificial Sequence
  Synthetic oligonucleotide
atggcggagtaagcccaacagggtattgcg

SEQ ID NO: 113880 - DNA, 30 bp, Artificial Sequence
  Synthetic oligonucleotide
accgtggacggcaccgtacacattattgcg

SEQ ID NO: 113881 - DNA, 30 bp, Artificial Sequence
  Synthetic oligonucleotide
ttcacgttactaagtaggaaacgagttgcg

SEQ ID NO: 113882 - DNA, 30 bp, Artificial Sequence
  Synthetic oligonucleotide
tacgaactggggattcttatgattgttgcg

SEQ ID NO: 113883 - DNA, 30 bp, Artificial Sequence
  Synthetic oligonucleotide
tatcgagtgctctcgataacttcatttgcg

SEQ ID NO: 113884 - DNA, 30 bp, Artificial Sequence
  Synthetic oligonucleotide
ccgcgtctgaaaaatcgacttcactttgcg

SEQ ID NO: 113885 - DNA, 30 bp, Artificial Sequence
  Synthetic oligonucleotide
tctcctatgtggtgacgtcggacaaaatcg

SEQ ID NO: 113886 - DNA, 30 bp, Artificial Sequence
  Synthetic oligonucleotide
ttgatataaccgtccccgtaacgaaaatcg

SEQ ID NO: 113887 - DNA, 30 bp, Artificial Sequence
  Synthetic oligonucleotide
agtaaacagccaatgtctagatacaaatcg

SEQ ID NO: 113888 - DNA, 30 bp, Artificial Sequence
  Synthetic oligonucleotide
accgtcacgtccgaagcggagtctaaatcg

SEQ ID NO: 113889 - DNA, 30 bp, Artificial Sequence
  Synthetic oligonucleotide
gctaaacttatcattgacgagagtaaatcg

SEQ ID NO: 113890 - DNA, 30 bp, Artificial Sequence
  Synthetic oligonucleotide
acagatgaaatttaaagtcaataacaatcg

SEQ ID NO: 113891 - DNA, 30 bp, Artificial Sequence
  Synthetic oligonucleotide
actaaacagaaccttactgaagcccaatcg

SEQ ID NO: 113892 - DNA, 30 bp, Artificial Sequence
  Synthetic oligonucleotide
tcgggttttaagggtacactcgtccaatcg

SEQ ID NO: 113893 - DNA, 30 bp, Artificial Sequence
  Synthetic oligonucleotide
gagtctccaggtgacagacgagagcaatcg

SEQ ID NO: 113894 - DNA, 30 bp, Artificial Sequence
  Synthetic oligonucleotide
gaaggaagcagtcgaagtaagcaagaatcg

SEQ ID NO: 113895 - DNA, 30 bp, Artificial Sequence
  Synthetic oligonucleotide
gtccaaaccgcggcaacaactgaggaatcg

SEQ ID NO: 113896 - DNA, 30 bp, Artificial Sequence
  Synthetic oligonucleotide
caaccgttgcaaactggaggtatggaatcg

SEQ ID NO: 113897 - DNA, 30 bp, Artificial Sequence
  Synthetic oligonucleotide
tgcaataggggagatgtctggagataatcg

SEQ ID NO: 113898 - DNA, 30 bp, Artificial Sequence
  Synthetic oligonucleotide
cgcgtgagtttttaggttggtagttaatcg

SEQ ID NO: 113899 - DNA, 30 bp, Artificial Sequence
  Synthetic oligonucleotide
tcaataaagcaccgtgaatgaacaacatcg

SEQ ID NO: 113900 - DNA, 30 bp, Artificial Sequence
  Synthetic oligonucleotide
tctcacatgtattatcgtatcacaacatcg

SEQ ID NO: 113901 - DNA, 30 bp, Artificial Sequence
  Synthetic oligonucleotide
tttaaccgcggtgcaaaagggtacacatcg

SEQ ID NO: 113902 - DNA, 30 bp, Artificial Sequence
  Synthetic oligonucleotide
ctattcattctgaaatttaactatacatcg

SEQ ID NO: 113903 - DNA, 30 bp, Artificial Sequence
  Synthetic oligonucleotide
ggaagattactccatgggatatagccatcg

SEQ ID NO: 113904 - DNA, 30 bp, Artificial Sequence
  Synthetic oligonucleotide
tactagttgaacgatccttacatgccatcg

SEQ ID NO: 113905 - DNA, 30 bp, Artificial Sequence
  Synthetic oligonucleotide
gcaaagcgtcctctcgctcaacttccatcg

SEQ ID NO: 113906 - DNA, 30 bp, Artificial Sequence
  Synthetic oligonucleotide
cctaaattgaggccgtagggttaagcatcg

SEQ ID NO: 113907 - DNA, 30 bp, Artificial Sequence
  Synthetic oligonucleotide
cgcaattgcgtgttggttgaacaggcatcg

SEQ ID NO: 113908 - DNA, 30 bp, Artificial Sequence
  Synthetic oligonucleotide
ccatccacgggagaatcattgccggcatcg

SEQ ID NO: 113909 - DNA, 30 bp, Artificial Sequence
  Synthetic oligonucleotide
tctagcatctattgatcaaagctggcatcg

SEQ ID NO: 113910 - DNA, 30 bp, Artificial Sequence
  Synthetic oligonucleotide
gggcttggtttttacgacagttagtcatcg

SEQ ID NO: 113911 - DNA, 30 bp, Artificial Sequence
  Synthetic oligonucleotide
gaccaagacgccggatagcaatagagatcg

SEQ ID NO: 113912 - DNA, 30 bp, Artificial Sequence
  Synthetic oligonucleotide
cagtgggctgctaatgcatgcaggagatcg

SEQ ID NO: 113913 - DNA, 30 bp, Artificial Sequence
  Synthetic oligonucleotide
tgacgcacgcaaatgtgttcggtacgatcg

SEQ ID NO: 113914 - DNA, 30 bp, Artificial Sequence
  Synthetic oligonucleotide
gcgtcattcttatggtggcataaccgatcg

SEQ ID NO: 113915 - DNA, 30 bp, Artificial Sequence
  Synthetic oligonucleotide
ccaaacttctggcgtgaaccgtaccgatcg

SEQ ID NO: 113916 - DNA, 30 bp, Artificial Sequence
  Synthetic oligonucleotide
cctttgcctcggtatctgaactgccgatcg

SEQ ID NO: 113917 - DNA, 30 bp, Artificial Sequence
  Synthetic oligonucleotide
gcgatagtcaattgtagtgattgaggatcg

SEQ ID NO: 113918 - DNA, 30 bp, Artificial Sequence
  Synthetic oligonucleotide
tactgcacatcgcataccccagccatatcg

SEQ ID NO: 113919 - DNA, 30 bp, Artificial Sequence
  Synthetic oligonucleotide
cgaccttatataatgtaaaaaactctatcg

SEQ ID NO: 113920 - DNA, 30 bp, Artificial Sequence
  Synthetic oligonucleotide
gtacaaccgtcacatgtaaaccgagtatcg

SEQ ID NO: 113921 - DNA, 30 bp, Artificial Sequence
  Synthetic oligonucleotide
gctagggaacatgctcctcacgtggtatcg

SEQ ID NO: 113922 - DNA, 30 bp, Artificial Sequence
  Synthetic oligonucleotide
taactggacgggtgataaactagtgtatcg

SEQ ID NO: 113923 - DNA, 30 bp, Artificial Sequence
  Synthetic oligonucleotide
gcgttggctcaaaactccgaacctttatcg

SEQ ID NO: 113924 - DNA, 30 bp, Artificial Sequence
  Synthetic oligonucleotide
gacgccccaacaataaaataaggtttatcg

SEQ ID NO: 113925 - DNA, 30 bp, Artificial Sequence
  Synthetic oligonucleotide
ccttgtcggaagcaactacagcttttatcg

SEQ ID NO: 113926 - DNA, 30 bp, Artificial Sequence
  Synthetic oligonucleotide
attaagggttaaagccctgaagccaactcg

SEQ ID NO: 113927 - DNA, 30 bp, Artificial Sequence
  Synthetic oligonucleotide
cggtcaacgaacagcgtcagcagtaactcg

SEQ ID NO: 113928 - DNA, 30 bp, Artificial Sequence
  Synthetic oligonucleotide
ccggtagaggaactatggcttctacactcg

SEQ ID NO: 113929 - DNA, 30 bp, Artificial Sequence
  Synthetic oligonucleotide
gaaatgcacgaaggccctcagaaccactcg

SEQ ID NO: 113930 - DNA, 30 bp, Artificial Sequence
  Synthetic oligonucleotide
actaccggttacggatatgatcaagactcg

SEQ ID NO: 113931 - DNA, 30 bp, Artificial Sequence
  Synthetic oligonucleotide
agcaaattgtgtacaacaatacgcgactcg

SEQ ID NO: 113932 - DNA, 30 bp, Artificial Sequence
  Synthetic oligonucleotide
agcagttcagaagccaccgagatcgactcg

SEQ ID NO: 113933 - DNA, 30 bp, Artificial Sequence
  Synthetic oligonucleotide
cgacatctgagcttattcctataggactcg

SEQ ID NO: 113934 - DNA, 30 bp, Artificial Sequence
  Synthetic oligonucleotide
agcagacggaagccaatagcaagtgactcg

SEQ ID NO: 113935 - DNA, 30 bp, Artificial Sequence
  Synthetic oligonucleotide
tataccgttctgacatggaggaaatactcg

SEQ ID NO: 113936 - DNA, 30 bp, Artificial Sequence
  Synthetic oligonucleotide
gcttaaagcaggagttcttggcgatactcg

SEQ ID NO: 113937 - DNA, 30 bp, Artificial Sequence
  Synthetic oligonucleotide
caatggcgaggaggcaaaccgtcaacctcg

SEQ ID NO: 113938 - DNA, 30 bp, Artificial Sequence
  Synthetic oligonucleotide
ggtgcagtgttactggaacgtatcacctcg

SEQ ID NO: 113939 - DNA, 30 bp, Artificial Sequence
  Synthetic oligonucleotide
tagtcggctgagacgtatagacagccctcg

SEQ ID NO: 113940 - DNA, 30 bp, Artificial Sequence
  Synthetic oligonucleotide
acgggtgtgaggatcagcgtgatgccctcg

SEQ ID NO: 113941 - DNA, 30 bp, Artificial Sequence
  Synthetic oligonucleotide
acggaaacggtaagatcgcagcaatcctcg

SEQ ID NO: 113942 - DNA, 30 bp, Artificial Sequence
  Synthetic oligonucleotide
ttgtaaggtccgtatcacttatcatcctcg

SEQ ID NO: 113943 - DNA, 30 bp, Artificial Sequence
  Synthetic oligonucleotide
aaaccgggatggatccgtacggcgtcctcg

SEQ ID NO: 113944 - DNA, 30 bp, Artificial Sequence
  Synthetic oligonucleotide
cgtcgaatttattgttcaccactttcctcg

SEQ ID NO: 113945 - DNA, 30 bp, Artificial Sequence
  Synthetic oligonucleotide
aggcaagattttcaggggcaatccagctcg

SEQ ID NO: 113946 - DNA, 30 bp, Artificial Sequence
  Synthetic oligonucleotide
cgtaaacgaggaccacccctatttagctcg

SEQ ID NO: 113947 - DNA, 30 bp, Artificial Sequence
  Synthetic oligonucleotide
aatcggcgggggggaagaagctggcgctcg

SEQ ID NO: 113948 - DNA, 30 bp, Artificial Sequence
  Synthetic oligonucleotide
aggctagtaaacacggtcctgagaggctcg

SEQ ID NO: 113949 - DNA, 30 bp, Artificial Sequence
  Synthetic oligonucleotide
aagcgtgtgcatgtgcgcgaatcatgctcg

SEQ ID NO: 113950 - DNA, 30 bp, Artificial Sequence
  Synthetic oligonucleotide
tgaggaatcacataaagtttactatgctcg

SEQ ID NO: 113951 - DNA, 30 bp, Artificial Sequence
  Synthetic oligonucleotide
gcgtgggtgttaatcgaggagtagtgctcg

SEQ ID NO: 113952 - DNA, 30 bp, Artificial Sequence
  Synthetic oligonucleotide
gaaacatcgcgtggcaacagcacactctcg

SEQ ID NO: 113953 - DNA, 30 bp, Artificial Sequence
  Synthetic oligonucleotide
ccgggtatcgtcatggtggatcagctctcg

SEQ ID NO: 113954 - DNA, 30 bp, Artificial Sequence
  Synthetic oligonucleotide
atcaggttcggggcataagtatctctctcg

SEQ ID NO: 113955 - DNA, 30 bp, Artificial Sequence
  Synthetic oligonucleotide
tacgacgggtttcgccgtaaaggagtctcg

SEQ ID NO: 113956 - DNA, 30 bp, Artificial Sequence
  Synthetic oligonucleotide
tctgtaccgggagtgacatcgggtgtctcg

SEQ ID NO: 113957 - DNA, 30 bp, Artificial Sequence
  Synthetic oligonucleotide
ttaggacattatattgtactcttgttctcg

SEQ ID NO: 113958 - DNA, 30 bp, Artificial Sequence
  Synthetic oligonucleotide
tcagcccaagttagaggtttacaaaagtcg

SEQ ID NO: 113959 - DNA, 30 bp, Artificial Sequence
  Synthetic oligonucleotide
aaccctgcgttcagcgtagtccccaagtcg

SEQ ID NO: 113960 - DNA, 30 bp, Artificial Sequence
  Synthetic oligonucleotide
ccggctataccgaaatggccttctaagtcg

SEQ ID NO: 113961 - DNA, 30 bp, Artificial Sequence
  Synthetic oligonucleotide
tggagaattgttttagggctagaacagtcg

SEQ ID NO: 113962 - DNA, 30 bp, Artificial Sequence
  Synthetic oligonucleotide
ggcactaatcgggccaaacctgaacagtcg

SEQ ID NO: 113963 - DNA, 30 bp, Artificial Sequence
  Synthetic oligonucleotide
atgttttagcgaataccggcccgacagtcg

SEQ ID NO: 113964 - DNA, 30 bp, Artificial Sequence
  Synthetic oligonucleotide
gcatagaagaaaatatcctccctacagtcg

SEQ ID NO: 113965 - DNA, 30 bp, Artificial Sequence
  Synthetic oligonucleotide
aaacggagggggaaattgatctcgcagtcg

SEQ ID NO: 113966 - DNA, 30 bp, Artificial Sequence
  Synthetic oligonucleotide
gagcacgtgaatccctaagtacggcagtcg

SEQ ID NO: 113967 - DNA, 30 bp, Artificial Sequence
  Synthetic oligonucleotide
ggtccacgtattatgatacaccggcagtcg

SEQ ID NO: 113968 - DNA, 30 bp, Artificial Sequence
  Synthetic oligonucleotide
tgattgacgtaagagttgtgacttcagtcg

SEQ ID NO: 113969 - DNA, 30 bp, Artificial Sequence
  Synthetic oligonucleotide
cttcgatggcgtccggtgagcctagagtcg

SEQ ID NO: 113970 - DNA, 30 bp, Artificial Sequence
  Synthetic oligonucleotide
aagagcgacgtcaaatgggaatgggagtcg

SEQ ID NO: 113971 - DNA, 30 bp, Artificial Sequence
  Synthetic oligonucleotide
ggaaaggccagaaaggggtgctgatagtcg

SEQ ID NO: 113972 - DNA, 30 bp, Artificial Sequence
  Synthetic oligonucleotide
gtcgtatctcttcgagttctctcctagtcg

SEQ ID NO: 113973 - DNA, 30 bp, Artificial Sequence
  Synthetic oligonucleotide
cattccttgagttgggactagctctagtcg

SEQ ID NO: 113974 - DNA, 30 bp, Artificial Sequence
  Synthetic oligonucleotide
ccgtatagatggcctagtcgcacttagtcg

SEQ ID NO: 113975 - DNA, 30 bp, Artificial Sequence
  Synthetic oligonucleotide
cgggacggcttgggagtagcgctcacgtcg

SEQ ID NO: 113976 - DNA, 30 bp, Artificial Sequence
  Synthetic oligonucleotide
agcttgcagggagcgaacttgttcccgtcg

SEQ ID NO: 113977 - DNA, 30 bp, Artificial Sequence
  Synthetic oligonucleotide
gggggtgatcatagcattcctgtgccgtcg

SEQ ID NO: 113978 - DNA, 30 bp, Artificial Sequence
  Synthetic oligonucleotide
tatatagtagagcggaacctcccagcgtcg

SEQ ID NO: 113979 - DNA, 30 bp, Artificial Sequence
  Synthetic oligonucleotide
taattgcgaggccaaagcgatcacgcgtcg

SEQ ID NO: 113980 - DNA, 30 bp, Artificial Sequence
  Synthetic oligonucleotide
ccattgcattaacattatcttgcggcgtcg

SEQ ID NO: 113981 - DNA, 30 bp, Artificial Sequence
  Synthetic oligonucleotide
atcttccgtggagggatgatggcaaggtcg

SEQ ID NO: 113982 - DNA, 30 bp, Artificial Sequence
  Synthetic oligonucleotide
ataggaggtagagccgctcttgcaaggtcg

SEQ ID NO: 113983 - DNA, 30 bp, Artificial Sequence
  Synthetic oligonucleotide
gttagagaaagacccgcctatgagaggtcg

SEQ ID NO: 113984 - DNA, 30 bp, Artificial Sequence
  Synthetic oligonucleotide
tttgtcacgtattcgggggagtttaggtcg

SEQ ID NO: 113985 - DNA, 30 bp, Artificial Sequence
  Synthetic oligonucleotide
aaataccggtccaggtaaaacaaacggtcg

SEQ ID NO: 113986 - DNA, 30 bp, Artificial Sequence
  Synthetic oligonucleotide
tgcctcaaaatccgttaattcgtacggtcg

SEQ ID NO: 113987 - DNA, 30 bp, Artificial Sequence
  Synthetic oligonucleotide
ttacgcaaaatttttgcgaagctccggtcg

SEQ ID NO: 113988 - DNA, 30 bp, Artificial Sequence
  Synthetic oligonucleotide
actattacaccgtcaccaatatcgcggtcg

SEQ ID NO: 113989 - DNA, 30 bp, Artificial Sequence
  Synthetic oligonucleotide
gtcgataaagctcctcactcagatcggtcg

SEQ ID NO: 113990 - DNA, 30 bp, Artificial Sequence
  Synthetic oligonucleotide
cgtcgggccatcaaagtactagccgggtcg

SEQ ID NO: 113991 - DNA, 30 bp, Artificial Sequence
  Synthetic oligonucleotide
aaatgagcttgcctcttgacctcggggtcg

SEQ ID NO: 113992 - DNA, 30 bp, Artificial Sequence
  Synthetic oligonucleotide
gggagcaatgagctggatacgcaatggtcg

SEQ ID NO: 113993 - DNA, 30 bp, Artificial Sequence
  Synthetic oligonucleotide
ggcgtatattaccacccagctgtctggtcg

SEQ ID NO: 113994 - DNA, 30 bp, Artificial Sequence
  Synthetic oligonucleotide
gatacataagaaacagagtgggcgtggtcg

SEQ ID NO: 113995 - DNA, 30 bp, Artificial Sequence
  Synthetic oligonucleotide
tatgcatcgtggtggttatattcaatgtcg

SEQ ID NO: 113996 - DNA, 30 bp, Artificial Sequence
  Synthetic oligonucleotide
agactggtcacgcgagctgctcacatgtcg

SEQ ID NO: 113997 - DNA, 30 bp, Artificial Sequence
  Synthetic oligonucleotide
cgttgtactgtgccatgcttggggatgtcg

SEQ ID NO: 113998 - DNA, 30 bp, Artificial Sequence
  Synthetic oligonucleotide
gatatgccatgagaactggaacaggtgtcg

SEQ ID NO: 113999 - DNA, 30 bp, Artificial Sequence
  Synthetic oligonucleotide
tcaccatacttgtgtcggggttaggtgtcg

SEQ ID NO: 114000 - DNA, 30 bp, Artificial Sequence
  Synthetic oligonucleotide
ccaattgcaaggcccgtgatgctgttgtcg

SEQ ID NO: 114001 - DNA, 30 bp, Artificial Sequence
  Synthetic oligonucleotide
cgccccaggtttgggcccgatagcaattcg

SEQ ID NO: 114002 - DNA, 30 bp, Artificial Sequence
  Synthetic oligonucleotide
agcttacctactgagaacaagatcaattcg

SEQ ID NO: 114003 - DNA, 30 bp, Artificial Sequence
  Synthetic oligonucleotide
cccagaggatcgtaagagctgttacattcg

SEQ ID NO: 114004 - DNA, 30 bp, Artificial Sequence
  Synthetic oligonucleotide
tacatcccatgtggttttatgacccattcg

SEQ ID NO: 114005 - DNA, 30 bp, Artificial Sequence
  Synthetic oligonucleotide
agcacacatgggatagactacctccattcg

SEQ ID NO: 114006 - DNA, 30 bp, Artificial Sequence
  Synthetic oligonucleotide
tagaggcacctctctaccaggtggcattcg

SEQ ID NO: 114007 - DNA, 30 bp, Artificial Sequence
  Synthetic oligonucleotide
atgtgggcttgcagagtctaagctcattcg

SEQ ID NO: 114008 - DNA, 30 bp, Artificial Sequence
  Synthetic oligonucleotide
atgcctatccacggcatacgggcagattcg

SEQ ID NO: 114009 - DNA, 30 bp, Artificial Sequence
  Synthetic oligonucleotide
ggtcagctaccggaggcagatatagattcg

SEQ ID NO: 114010 - DNA, 30 bp, Artificial Sequence
  Synthetic oligonucleotide
actaacaactgtcaggataagtccgattcg

SEQ ID NO: 114011 - DNA, 31 bp, Artificial Sequence
  Synthetic oligonucleotide
agaagcgagaatactgtgtccggttgattcg

SEQ ID NO: 114012 - DNA, 30 bp, Artificial Sequence
  Synthetic oligonucleotide
ggtcaaatctaatgtccagaccagacttcg

SEQ ID NO: 114013 - DNA, 30 bp, Artificial Sequence
  Synthetic oligonucleotide
ccgccgattttggcagagagttagacttcg

SEQ ID NO: 114014 - DNA, 30 bp, Artificial Sequence
  Synthetic oligonucleotide
ctgtgggtacatgggttaccggatacttcg

SEQ ID NO: 114015 - DNA, 30 bp, Artificial Sequence
  Synthetic oligonucleotide
gaggcctgttaatgataacattaaccttcg

SEQ ID NO: 114016 - DNA, 30 bp, Artificial Sequence
  Synthetic oligonucleotide
aattatccataagaaatgagccccccttcg

SEQ ID NO: 114017 - DNA, 30 bp, Artificial Sequence
  Synthetic oligonucleotide
gggggcgacccgttgaaataaacgccttcg

SEQ ID NO: 114018 - DNA, 30 bp, Artificial Sequence
  Synthetic oligonucleotide
gcatggtaaattgtcaatggaacagcttcg

SEQ ID NO: 114019 - DNA, 30 bp, Artificial Sequence
  Synthetic oligonucleotide
cgagacgagtcccacataggattcgcttcg

SEQ ID NO: 114020 - DNA, 30 bp, Artificial Sequence
  Synthetic oligonucleotide
cttgacagcttctatatacaggcctcttcg

SEQ ID NO: 114021 - DNA, 30 bp, Artificial Sequence
  Synthetic oligonucleotide
cgtattaatcgccgcgaatagtagtcttcg

SEQ ID NO: 114022 - DNA, 30 bp, Artificial Sequence
  Synthetic oligonucleotide
ctagagggacaaaactcgagcgtgagttcg

SEQ ID NO: 114023 - DNA, 30 bp, Artificial Sequence
  Synthetic oligonucleotide
cgcgcatgttgatactgtggaactagttcg

SEQ ID NO: 114024 - DNA, 30 bp, Artificial Sequence
  Synthetic oligonucleotide
ggcctcgtggccatgcaggcgtgccgttcg

SEQ ID NO: 114025 - DNA, 30 bp, Artificial Sequence
  Synthetic oligonucleotide
ggtgctgcaaagctgccgttcaagcgttcg

SEQ ID NO: 114026 - DNA, 30 bp, Artificial Sequence
  Synthetic oligonucleotide
cacgtcaggaatcataattaggggcgttcg

SEQ ID NO: 114027 - DNA, 30 bp, Artificial Sequence
  Synthetic oligonucleotide
cacgtcaaagttgttctggctaccggttcg

SEQ ID NO: 114028 - DNA, 30 bp, Artificial Sequence
  Synthetic oligonucleotide
ttagaggttgtaatttaatagaccatttcg

SEQ ID NO: 114029 - DNA, 31 bp, Artificial Sequence
  Synthetic oligonucleotide
tggtctcaagtgcaacgcggaaacgatttcg

SEQ ID NO: 114030 - DNA, 30 bp, Artificial Sequence
  Synthetic oligonucleotide
gcctcaggtctatagtggacagggatttcg

SEQ ID NO: 114031 - DNA, 30 bp, Artificial Sequence
  Synthetic oligonucleotide
gttagggagagaggtgcgcgtgccctttcg

SEQ ID NO: 114032 - DNA, 30 bp, Artificial Sequence
  Synthetic oligonucleotide
atgacgaccttagctacgtctgaggtttcg

SEQ ID NO: 114033 - DNA, 30 bp, Artificial Sequence
  Synthetic oligonucleotide
ttgcagggctgagggtgatgctcattttcg

SEQ ID NO: 114034 - DNA, 30 bp, Artificial Sequence
  Synthetic oligonucleotide
acgtcgtcgcagaggctagcattattttcg

SEQ ID NO: 114035 - DNA, 30 bp, Artificial Sequence
  Synthetic oligonucleotide
ctagatgtggaagagctagttgcgttttcg

SEQ ID NO: 114036 - DNA, 30 bp, Artificial Sequence
  Synthetic oligonucleotide
accaggaacgacatttagtcgtctttttcg

SEQ ID NO: 114037 - DNA, 30 bp, Artificial Sequence
  Synthetic oligonucleotide
atgttaaaccgatacaagatggcaaaaagg

SEQ ID NO: 114038 - DNA, 30 bp, Artificial Sequence
  Synthetic oligonucleotide
tcacattgccaaattcttcgggtaaaaagg

SEQ ID NO: 114039 - DNA, 30 bp, Artificial Sequence
  Synthetic oligonucleotide
accacgcgcgatgtcatacggatcaaaagg

SEQ ID NO: 114040 - DNA, 30 bp, Artificial Sequence
  Synthetic oligonucleotide
ctatgcacgtaacacggccagcctcaaagg

SEQ ID NO: 114041 - DNA, 30 bp, Artificial Sequence
  Synthetic oligonucleotide
gagcaaacctatatgaaacaagttcaaagg

SEQ ID NO: 114042 - DNA, 30 bp, Artificial Sequence
  Synthetic oligonucleotide
gtgactgggccacagaattagcaggaaagg

SEQ ID NO: 114043 - DNA, 30 bp, Artificial Sequence
  Synthetic oligonucleotide
tgtgaacctggcgccgtgtcccatgaaagg

SEQ ID NO: 114044 - DNA, 30 bp, Artificial Sequence
  Synthetic oligonucleotide
ttaggtgcaaggcattcgtcggttgaaagg

SEQ ID NO: 114045 - DNA, 30 bp, Artificial Sequence
  Synthetic oligonucleotide
ctgtatgcgtaaacaatcaatttctaaagg

SEQ ID NO: 114046 - DNA, 30 bp, Artificial Sequence
  Synthetic oligonucleotide
taagaagcggagcctagagctcagtaaagg

SEQ ID NO: 114047 - DNA, 30 bp, Artificial Sequence
  Synthetic oligonucleotide
cgttgcataagagtaggggtacgttaaagg

SEQ ID NO: 114048 - DNA, 30 bp, Artificial Sequence
  Synthetic oligonucleotide
gacggaaaaaagtgctcatggcaaacaagg

SEQ ID NO: 114049 - DNA, 30 bp, Artificial Sequence
  Synthetic oligonucleotide
actaccgcttagggctgaatggtcacaagg

SEQ ID NO: 114050 - DNA, 30 bp, Artificial Sequence
  Synthetic oligonucleotide
cgacaatagcgccacgatacgacgacaagg

SEQ ID NO: 114051 - DNA, 30 bp, Artificial Sequence
  Synthetic oligonucleotide
gtcaccggcggacctaatagcgatacaagg

SEQ ID NO: 114052 - DNA, 30 bp, Artificial Sequence
  Synthetic oligonucleotide
tctcagccattaactacatagaacccaagg

SEQ ID NO: 114053 - DNA, 30 bp, Artificial Sequence
  Synthetic oligonucleotide
gttacagtcacccgcgtacccgagccaagg

SEQ ID NO: 114054 - DNA, 30 bp, Artificial Sequence
  Synthetic oligonucleotide
acaatttagcactcagaattgggagcaagg

SEQ ID NO: 114055 - DNA, 30 bp, Artificial Sequence
  Synthetic oligonucleotide
agtgaagagattcttgcattgaaggcaagg

SEQ ID NO: 114056 - DNA, 30 bp, Artificial Sequence
  Synthetic oligonucleotide
tgagtttattgacgtttcagggaggcaagg

SEQ ID NO: 114057 - DNA, 30 bp, Artificial Sequence
  Synthetic oligonucleotide
cggaaaagtcacgtggactagaggtcaagg

SEQ ID NO: 114058 - DNA, 30 bp, Artificial Sequence
  Synthetic oligonucleotide
cctatgtgactgtcgacctacatgtcaagg

SEQ ID NO: 114059 - DNA, 30 bp, Artificial Sequence
  Synthetic oligonucleotide
gtccaatgggaaacaaggccatcgagaagg

SEQ ID NO: 114060 - DNA, 30 bp, Artificial Sequence
  Synthetic oligonucleotide
catgctggggacttggcaggttgtagaagg

SEQ ID NO: 114061 - DNA, 30 bp, Artificial Sequence
  Synthetic oligonucleotide
ggcggcagaaattcactctaacggcgaagg

SEQ ID NO: 114062 - DNA, 30 bp, Artificial Sequence
  Synthetic oligonucleotide
gttcacaaataaaaggtccggaacggaagg

SEQ ID NO: 114063 - DNA, 30 bp, Artificial Sequence
  Synthetic oligonucleotide
agtcatcagctatgtatttaaggcggaagg

SEQ ID NO: 114064 - DNA, 30 bp, Artificial Sequence
  Synthetic oligonucleotide
tacgtgttaccaccgaaggatctcggaagg

SEQ ID NO: 114065 - DNA, 30 bp, Artificial Sequence
  Synthetic oligonucleotide
agggagacagtatacaaacatgagggaagg

SEQ ID NO: 114066 - DNA, 30 bp, Artificial Sequence
  Synthetic oligonucleotide
gcggcaaggcacggataggcctcgggaagg

SEQ ID NO: 114067 - DNA, 30 bp, Artificial Sequence
  Synthetic oligonucleotide
gtggcttgtacttgccgagtagggggaagg

SEQ ID NO: 114068 - DNA, 30 bp, Artificial Sequence
  Synthetic oligonucleotide
tcacaaagcccataacacagcgatggaagg

SEQ ID NO: 114069 - DNA, 30 bp, Artificial Sequence
  Synthetic oligonucleotide
catgtgagaggactgtccaagtatggaagg

SEQ ID NO: 114070 - DNA, 30 bp, Artificial Sequence
  Synthetic oligonucleotide
gcataaggcaggtcataaatgtgatgaagg

SEQ ID NO: 114071 - DNA, 30 bp, Artificial Sequence
  Synthetic oligonucleotide
caaagaatcctcgctcgtaacgagtgaagg

SEQ ID NO: 114072 - DNA, 30 bp, Artificial Sequence
  Synthetic oligonucleotide
aacttggggacagtgattagcacttgaagg

SEQ ID NO: 114073 - DNA, 30 bp, Artificial Sequence
  Synthetic oligonucleotide
gttgcgaatctgattgacaggacttgaagg

SEQ ID NO: 114074 - DNA, 30 bp, Artificial Sequence
  Synthetic oligonucleotide
ctcggacgctagcagtggcaagcttgaagg

SEQ ID NO: 114075 - DNA, 31 bp, Artificial Sequence
  Synthetic oligonucleotide
atgccgctaagtcccaaagaggacaataagg

SEQ ID NO: 114076 - DNA, 30 bp, Artificial Sequence
  Synthetic oligonucleotide
ggattagagtgagcggataagatcataagg

SEQ ID NO: 114077 - DNA, 30 bp, Artificial Sequence
  Synthetic oligonucleotide
ggcccaggttgctccacatacttgataagg

SEQ ID NO: 114078 - DNA, 30 bp, Artificial Sequence
  Synthetic oligonucleotide
cgattagaaaacggacgagtgcaactaagg

SEQ ID NO: 114079 - DNA, 30 bp, Artificial Sequence
  Synthetic oligonucleotide
tacgtaactatcgtagagtttaagctaagg

SEQ ID NO: 114080 - DNA, 30 bp, Artificial Sequence
  Synthetic oligonucleotide
ttggggggacgaagtgatatgaccgtaagg

SEQ ID NO: 114081 - DNA, 30 bp, Artificial Sequence
  Synthetic oligonucleotide
cgacaaccggtgcggtacgtacccgtaagg

SEQ ID NO: 114082 - DNA, 30 bp, Artificial Sequence
  Synthetic oligonucleotide
gacttcatcttcggaggaaagcgcgtaagg

SEQ ID NO: 114083 - DNA, 30 bp, Artificial Sequence
  Synthetic oligonucleotide
agggtgtgccgttacctgatatatgtaagg

SEQ ID NO: 114084 - DNA, 30 bp, Artificial Sequence
  Synthetic oligonucleotide
cacctcaagagtatttaagtctgtgtaagg

SEQ ID NO: 114085 - DNA, 30 bp, Artificial Sequence
  Synthetic oligonucleotide
accgccaggtggggactgtttgtattaagg

SEQ ID NO: 114086 - DNA, 30 bp, Artificial Sequence
  Synthetic oligonucleotide
cctgccggagattcgaggtaagagttaagg

SEQ ID NO: 114087 - DNA, 30 bp, Artificial Sequence
  Synthetic oligonucleotide
ggatagcagttctcgcgtgaggcgttaagg

SEQ ID NO: 114088 - DNA, 30 bp, Artificial Sequence
  Synthetic oligonucleotide
acaatgaagtgtagtttctgtcatttaagg

SEQ ID NO: 114089 - DNA, 30 bp, Artificial Sequence
  Synthetic oligonucleotide
gatcggcctagaccggtgccagcaaacagg

SEQ ID NO: 114090 - DNA, 30 bp, Artificial Sequence
  Synthetic oligonucleotide
gcataaaccagaagcatcccgcggaacagg

SEQ ID NO: 114091 - DNA, 30 bp, Artificial Sequence
  Synthetic oligonucleotide
ccgcttgactcatcaatgaaataacacagg

SEQ ID NO: 114092 - DNA, 30 bp, Artificial Sequence
  Synthetic oligonucleotide
gccgcgggggcaatggggaatgaccacagg

SEQ ID NO: 114093 - DNA, 30 bp, Artificial Sequence
  Synthetic oligonucleotide
agtttatacgaacgtcataacgatcacagg

SEQ ID NO: 114094 - DNA, 30 bp, Artificial Sequence
  Synthetic oligonucleotide
ttgacgacttacatggggccgactcacagg

SEQ ID NO: 114095 - DNA, 30 bp, Artificial Sequence
  Synthetic oligonucleotide
agaaaggatataaaaatacggactcacagg

SEQ ID NO: 114096 - DNA, 30 bp, Artificial Sequence
  Synthetic oligonucleotide
actcgttaaagctgtccccgcgctcacagg

SEQ ID NO: 114097 - DNA, 30 bp, Artificial Sequence
  Synthetic oligonucleotide
tcgtaactaagaatgccgttaggagacagg

SEQ ID NO: 114098 - DNA, 30 bp, Artificial Sequence
  Synthetic oligonucleotide
cggacaaatggggaatgggtgggggacagg

SEQ ID NO: 114099 - DNA, 30 bp, Artificial Sequence
  Synthetic oligonucleotide
aagccccttgaaagtcaggtctatgacagg

SEQ ID NO: 114100 - DNA, 30 bp, Artificial Sequence
  Synthetic oligonucleotide
acagtcaaagttgttgtcaggtcctacagg

SEQ ID NO: 114101 - DNA, 30 bp, Artificial Sequence
  Synthetic oligonucleotide
tgggttgcgcaactcggttccctctacagg

SEQ ID NO: 114102 - DNA, 30 bp, Artificial Sequence
  Synthetic oligonucleotide
tagcaagtgagaggcgacgtattctacagg

SEQ ID NO: 114103 - DNA, 30 bp, Artificial Sequence
  Synthetic oligonucleotide
cgaagccgtgcatcgtcaagctcttacagg

SEQ ID NO: 114104 - DNA, 30 bp, Artificial Sequence
  Synthetic oligonucleotide
cctgcaggcgcccgcagtgaggcaaccagg

SEQ ID NO: 114105 - DNA, 30 bp, Artificial Sequence
  Synthetic oligonucleotide
cgtgatccaaatagatcaccagtcaccagg

SEQ ID NO: 114106 - DNA, 30 bp, Artificial Sequence
  Synthetic oligonucleotide
gtgtcaacagaggcgtaaggctagaccagg

SEQ ID NO: 114107 - DNA, 30 bp, Artificial Sequence
  Synthetic oligonucleotide
aaacaaatagtagtgggtgctccgaccagg

SEQ ID NO: 114108 - DNA, 30 bp, Artificial Sequence
  Synthetic oligonucleotide
cgtcaatactggtgagtatctgcccccagg

SEQ ID NO: 114109 - DNA, 30 bp, Artificial Sequence
  Synthetic oligonucleotide
atatctcaataaggtggtcctctagccagg

SEQ ID NO: 114110 - DNA, 30 bp, Artificial Sequence
  Synthetic oligonucleotide
actcgggtggacctttgacgtctagccagg

SEQ ID NO: 114111 - DNA, 30 bp, Artificial Sequence
  Synthetic oligonucleotide
gagattctcaccaaaagtcaattagccagg

SEQ ID NO: 114112 - DNA, 30 bp, Artificial Sequence
  Synthetic oligonucleotide
tcgtaaaagtcctgtagactcgaggccagg

SEQ ID NO: 114113 - DNA, 30 bp, Artificial Sequence
  Synthetic oligonucleotide
ccgacctccgggcctcattctacgtccagg

SEQ ID NO: 114114 - DNA, 30 bp, Artificial Sequence
  Synthetic oligonucleotide
cagcgacatgggacgtgtcgtacaagcagg

SEQ ID NO: 114115 - DNA, 30 bp, Artificial Sequence
  Synthetic oligonucleotide
aggtgacatggtgtcccccggggaagcagg

SEQ ID NO: 114116 - DNA, 30 bp, Artificial Sequence
  Synthetic oligonucleotide
gaatgactcactatatgacaaagtagcagg

SEQ ID NO: 114117 - DNA, 30 bp, Artificial Sequence
  Synthetic oligonucleotide
aagtaaagacctaatttgtatgttagcagg

SEQ ID NO: 114118 - DNA, 30 bp, Artificial Sequence
  Synthetic oligonucleotide
taacaagtgccactatgcgggaggcgcagg

SEQ ID NO: 114119 - DNA, 30 bp, Artificial Sequence
  Synthetic oligonucleotide
gaggctcacgttacagcttccatgggcagg

SEQ ID NO: 114120 - DNA, 30 bp, Artificial Sequence
  Synthetic oligonucleotide
actagaatgaatgggtccctagaatgcagg

SEQ ID NO: 114121 - DNA, 30 bp, Artificial Sequence
  Synthetic oligonucleotide
ggtgacgagcgaaagacactcacatgcagg

SEQ ID NO: 114122 - DNA, 30 bp, Artificial Sequence
  Synthetic oligonucleotide
cacccagtcgtggaggttgctctttgcagg

SEQ ID NO: 114123 - DNA, 30 bp, Artificial Sequence
  Synthetic oligonucleotide
catttcgagcatgcttgggagggaatcagg

SEQ ID NO: 114124 - DNA, 30 bp, Artificial Sequence
  Synthetic oligonucleotide
atacatgtcaaagtgacggctatcatcagg

SEQ ID NO: 114125 - DNA, 30 bp, Artificial Sequence
  Synthetic oligonucleotide
ccgcaccagcgaattagcgcccggatcagg

SEQ ID NO: 114126 - DNA, 30 bp, Artificial Sequence
  Synthetic oligonucleotide
gaggatcagcccgaagaaccgtaactcagg

SEQ ID NO: 114127 - DNA, 30 bp, Artificial Sequence
  Synthetic oligonucleotide
taaatagaatcgtgggcactcgctgtcagg

SEQ ID NO: 114128 - DNA, 30 bp, Artificial Sequence
  Synthetic oligonucleotide
aacgagactagggctatagtcgctgtcagg

SEQ ID NO: 114129 - DNA, 30 bp, Artificial Sequence
  Synthetic oligonucleotide
aagctcaggcatcaaccgtcgaccttcagg

SEQ ID NO: 114130 - DNA, 30 bp, Artificial Sequence
  Synthetic oligonucleotide
ccaaacgggaaagcgggcctttccttcagg

SEQ ID NO: 114131 - DNA, 30 bp, Artificial Sequence
  Synthetic oligonucleotide
ggcttcgaccagatgaagttatacaagagg

SEQ ID NO: 114132 - DNA, 30 bp, Artificial Sequence
  Synthetic oligonucleotide
attaaatcccggatgcacttctgcaagagg

SEQ ID NO: 114133 - DNA, 30 bp, Artificial Sequence
  Synthetic oligonucleotide
tgaaaagtcgaacgttgtccacataagagg

SEQ ID NO: 114134 - DNA, 30 bp, Artificial Sequence
  Synthetic oligonucleotide
aagtcctgtgacaagagtcgccataagagg

SEQ ID NO: 114135 - DNA, 30 bp, Artificial Sequence
  Synthetic oligonucleotide
tgacccttgccttttcgagccgttaagagg

SEQ ID NO: 114136 - DNA, 30 bp, Artificial Sequence
  Synthetic oligonucleotide
ccgtaacgtagagcttatgggtcacagagg

SEQ ID NO: 114137 - DNA, 30 bp, Artificial Sequence
  Synthetic oligonucleotide
acaggaaatctaatgttaaccgcgcagagg

SEQ ID NO: 114138 - DNA, 30 bp, Artificial Sequence
  Synthetic oligonucleotide
aacgactccgattggaacgcggtagagagg

SEQ ID NO: 114139 - DNA, 30 bp, Artificial Sequence
  Synthetic oligonucleotide
gtagcggttagcaatgtgaaacacgagagg

SEQ ID NO: 114140 - DNA, 30 bp, Artificial Sequence
  Synthetic oligonucleotide
gccgtgtactgtacatacattagggagagg

SEQ ID NO: 114141 - DNA, 30 bp, Artificial Sequence
  Synthetic oligonucleotide
acgacgcgatttcagcgcaataatgagagg

SEQ ID NO: 114142 - DNA, 30 bp, Artificial Sequence
  Synthetic oligonucleotide
ctaaatcggtaatgtagctaaaacacgagg

SEQ ID NO: 114143 - DNA, 30 bp, Artificial Sequence
  Synthetic oligonucleotide
gcggatgcagccggcacagcacagacgagg

SEQ ID NO: 114144 - DNA, 30 bp, Artificial Sequence
  Synthetic oligonucleotide
ttcaagcaagttggtaaagtaagtacgagg

SEQ ID NO: 114145 - DNA, 30 bp, Artificial Sequence
  Synthetic oligonucleotide
ggtccgtcgaactatagtagttacccgagg

SEQ ID NO: 114146 - DNA, 30 bp, Artificial Sequence
  Synthetic oligonucleotide
ggcaagttattaaggaaattcgaggcgagg

SEQ ID NO: 114147 - DNA, 30 bp, Artificial Sequence
  Synthetic oligonucleotide
gatactaacgaaaccacgagttctgcgagg

SEQ ID NO: 114148 - DNA, 30 bp, Artificial Sequence
  Synthetic oligonucleotide
tgcgaagagcagacaattcgaacatcgagg

SEQ ID NO: 114149 - DNA, 30 bp, Artificial Sequence
  Synthetic oligonucleotide
tcggttatagatccacggaacaactcgagg

SEQ ID NO: 114150 - DNA, 30 bp, Artificial Sequence
  Synthetic oligonucleotide
tggcgttgaaacgggtattctaataggagg

SEQ ID NO: 114151 - DNA, 30 bp, Artificial Sequence
  Synthetic oligonucleotide
cgagtttcagggcggtgtacataacggagg

SEQ ID NO: 114152 - DNA, 30 bp, Artificial Sequence
  Synthetic oligonucleotide
cgaagcgcgatgatggaggagctccggagg

SEQ ID NO: 114153 - DNA, 30 bp, Artificial Sequence
  Synthetic oligonucleotide
agcctgctatgtgcatccgacaggcggagg

SEQ ID NO: 114154 - DNA, 30 bp, Artificial Sequence
  Synthetic oligonucleotide
cgtaacaccgcacgggaagatatgcggagg

SEQ ID NO: 114155 - DNA, 30 bp, Artificial Sequence
  Synthetic oligonucleotide
cgatcgctgggaagctaaatgtgtcggagg

SEQ ID NO: 114156 - DNA, 30 bp, Artificial Sequence
  Synthetic oligonucleotide
aaaaacagaccagtactgcacgaagggagg

SEQ ID NO: 114157 - DNA, 30 bp, Artificial Sequence
  Synthetic oligonucleotide
ctttggtagaggaatatgtctatagggagg

SEQ ID NO: 114158 - DNA, 30 bp, Artificial Sequence
  Synthetic oligonucleotide
tgattcagcgcagaaaactgtcatgggagg

SEQ ID NO: 114159 - DNA, 30 bp, Artificial Sequence
  Synthetic oligonucleotide
cacgttacgacttattggacgggatggagg

SEQ ID NO: 114160 - DNA, 30 bp, Artificial Sequence
  Synthetic oligonucleotide
accggaatgagacatgatgttaactggagg

SEQ ID NO: 114161 - DNA, 30 bp, Artificial Sequence
  Synthetic oligonucleotide
gtgcctcagaaacggtaacagcggtggagg

SEQ ID NO: 114162 - DNA, 30 bp, Artificial Sequence
  Synthetic oligonucleotide
ggggacattcgagctttggactcgctgagg

SEQ ID NO: 114163 - DNA, 30 bp, Artificial Sequence
  Synthetic oligonucleotide
cctgttgccagattcggcccccgtgtgagg

SEQ ID NO: 114164 - DNA, 30 bp, Artificial Sequence
  Synthetic oligonucleotide
cacatattaacgagtcgaattattgtgagg

SEQ ID NO: 114165 - DNA, 30 bp, Artificial Sequence
  Synthetic oligonucleotide
ggccgaatcggaggcttactgcgcttgagg

SEQ ID NO: 114166 - DNA, 30 bp, Artificial Sequence
  Synthetic oligonucleotide
aggaaagaatttaataagatcactttgagg

SEQ ID NO: 114167 - DNA, 30 bp, Artificial Sequence
  Synthetic oligonucleotide
cctgacgtgtgtgtagagatgataaatagg

SEQ ID NO: 114168 - DNA, 30 bp, Artificial Sequence
  Synthetic oligonucleotide
tgagcttcgtaggacactggttggaatagg

SEQ ID NO: 114169 - DNA, 30 bp, Artificial Sequence
  Synthetic oligonucleotide
tctgtcaccacgtgggagttcatgaatagg

SEQ ID NO: 114170 - DNA, 30 bp, Artificial Sequence
  Synthetic oligonucleotide
ggaggcgactctggcttatgattacatagg

SEQ ID NO: 114171 - DNA, 30 bp, Artificial Sequence
  Synthetic oligonucleotide
agtgaaacgcatatataataggggcatagg

SEQ ID NO: 114172 - DNA, 30 bp, Artificial Sequence
  Synthetic oligonucleotide
acgcgcagggggtgaagacacactcatagg

SEQ ID NO: 114173 - DNA, 30 bp, Artificial Sequence
  Synthetic oligonucleotide
agtaaaacgtatgaaacatcccgagatagg

SEQ ID NO: 114174 - DNA, 30 bp, Artificial Sequence
  Synthetic oligonucleotide
gcaaggacattgaaccttggctccgatagg

SEQ ID NO: 114175 - DNA, 30 bp, Artificial Sequence
  Synthetic oligonucleotide
caaatggcttaagctcatcatgtcgatagg

SEQ ID NO: 114176 - DNA, 30 bp, Artificial Sequence
  Synthetic oligonucleotide
atgaacattactagtagtatcacctatagg

SEQ ID NO: 114177 - DNA, 30 bp, Artificial Sequence
  Synthetic oligonucleotide
cctggctcggggaatcagccctcgtatagg

SEQ ID NO: 114178 - DNA, 30 bp, Artificial Sequence
  Synthetic oligonucleotide
acagtcagattgctgggtgtcggcactagg

SEQ ID NO: 114179 - DNA, 30 bp, Artificial Sequence
  Synthetic oligonucleotide
gattggacattacgccatgctcagactagg

SEQ ID NO: 114180 - DNA, 30 bp, Artificial Sequence
  Synthetic oligonucleotide
ctacggtgtgtacatccagagcgtactagg

SEQ ID NO: 114181 - DNA, 30 bp, Artificial Sequence
  Synthetic oligonucleotide
cggctgacaggaccagctggtttgcctagg

SEQ ID NO: 114182 - DNA, 30 bp, Artificial Sequence
  Synthetic oligonucleotide
tgcatgagccgaatggcgctgaaggctagg

SEQ ID NO: 114183 - DNA, 30 bp, Artificial Sequence
  Synthetic oligonucleotide
ctgaagggtgtacctacgtttgggtctagg

SEQ ID NO: 114184 - DNA, 30 bp, Artificial Sequence
  Synthetic oligonucleotide
tttcgttgtaagggtatgcacggttctagg

SEQ ID NO: 114185 - DNA, 31 bp, Artificial Sequence
  Synthetic oligonucleotide
tatggggtcacatatacggtgagtcagtagg

SEQ ID NO: 114186 - DNA, 30 bp, Artificial Sequence
  Synthetic oligonucleotide
gctgactcgtacttgtcctgagggagtagg

SEQ ID NO: 114187 - DNA, 30 bp, Artificial Sequence
  Synthetic oligonucleotide
tacaggatgtcctctgtccgtatgagtagg

SEQ ID NO: 114188 - DNA, 30 bp, Artificial Sequence
  Synthetic oligonucleotide
gggatggagtgtccgactcgtcgtagtagg

SEQ ID NO: 114189 - DNA, 30 bp, Artificial Sequence
  Synthetic oligonucleotide
ggacagtagagcgaaagtaattaccgtagg

SEQ ID NO: 114190 - DNA, 30 bp, Artificial Sequence
  Synthetic oligonucleotide
acggatactcgagtaaaaagtgcccgtagg

SEQ ID NO: 114191 - DNA, 30 bp, Artificial Sequence
  Synthetic oligonucleotide
gagagctcataagtaaacaaatatcgtagg

SEQ ID NO: 114192 - DNA, 30 bp, Artificial Sequence
  Synthetic oligonucleotide
ttggaaactgatagctaacaggttcgtagg

SEQ ID NO: 114193 - DNA, 30 bp, Artificial Sequence
  Synthetic oligonucleotide
actaccaggtaactttttgagcaaggtagg

SEQ ID NO: 114194 - DNA, 30 bp, Artificial Sequence
  Synthetic oligonucleotide
gtcgtgggctgtcccacatgataaggtagg

SEQ ID NO: 114195 - DNA, 30 bp, Artificial Sequence
  Synthetic oligonucleotide
aaatgtaagggtactccagatagaggtagg

SEQ ID NO: 114196 - DNA, 30 bp, Artificial Sequence
  Synthetic oligonucleotide
cgtgagaaccgttggtcagcgggaggtagg

SEQ ID NO: 114197 - DNA, 30 bp, Artificial Sequence
  Synthetic oligonucleotide
aagattatatatagcgcgcgtaacggtagg

SEQ ID NO: 114198 - DNA, 30 bp, Artificial Sequence
  Synthetic oligonucleotide
agtaagtagagtgaacgattatacggtagg

SEQ ID NO: 114199 - DNA, 30 bp, Artificial Sequence
  Synthetic oligonucleotide
aaggagcagggcttgcattcgaccggtagg

SEQ ID NO: 114200 - DNA, 30 bp, Artificial Sequence
  Synthetic oligonucleotide
agagagtatagcatatagggacaatgtagg

SEQ ID NO: 114201 - DNA, 30 bp, Artificial Sequence
  Synthetic oligonucleotide
ccaggacattacgctgcgagcatatgtagg

SEQ ID NO: 114202 - DNA, 30 bp, Artificial Sequence
  Synthetic oligonucleotide
ccattctaatggtctgacaatgggtgtagg

SEQ ID NO: 114203 - DNA, 30 bp, Artificial Sequence
  Synthetic oligonucleotide
ctccgacgggcatgaaccgggatgtgtagg

SEQ ID NO: 114204 - DNA, 30 bp, Artificial Sequence
  Synthetic oligonucleotide
ggtttagtgtcgtaacagtattcaattagg

SEQ ID NO: 114205 - DNA, 30 bp, Artificial Sequence
  Synthetic oligonucleotide
ccatgacagcacaaaagcgaaatcattagg

SEQ ID NO: 114206 - DNA, 30 bp, Artificial Sequence
  Synthetic oligonucleotide
tgcgttgtgttgacctatggtgcgattagg

SEQ ID NO: 114207 - DNA, 30 bp, Artificial Sequence
  Synthetic oligonucleotide
agatcctaacattgagcaagaggtattagg

SEQ ID NO: 114208 - DNA, 30 bp, Artificial Sequence
  Synthetic oligonucleotide
ctgggactctagatagcgggctgccttagg

SEQ ID NO: 114209 - DNA, 30 bp, Artificial Sequence
  Synthetic oligonucleotide
gctgcaagtagccttcaaataggtcttagg

SEQ ID NO: 114210 - DNA, 30 bp, Artificial Sequence
  Synthetic oligonucleotide
gttcaaataaaaaagtcgacataggttagg

SEQ ID NO: 114211 - DNA, 30 bp, Artificial Sequence
  Synthetic oligonucleotide
gcatagacagcgtgtcaactcggggttagg

SEQ ID NO: 114212 - DNA, 30 bp, Artificial Sequence
  Synthetic oligonucleotide
gcgagccattttctgaggcattttgttagg

SEQ ID NO: 114213 - DNA, 30 bp, Artificial Sequence
  Synthetic oligonucleotide
ttcagcgaaggatagtgtataaactttagg

SEQ ID NO: 114214 - DNA, 30 bp, Artificial Sequence
  Synthetic oligonucleotide
gtagcatgaagcgtgtttgtcgactttagg

SEQ ID NO: 114215 - DNA, 30 bp, Artificial Sequence
  Synthetic oligonucleotide
atgagcaattttatggtaacttagtttagg

SEQ ID NO: 114216 - DNA, 30 bp, Artificial Sequence
  Synthetic oligonucleotide
atgtcaatgcgatcgcggggagcgtttagg

SEQ ID NO: 114217 - DNA, 30 bp, Artificial Sequence
  Synthetic oligonucleotide
tcacccgtatggaggtaaaaatgttttagg

SEQ ID NO: 114218 - DNA, 30 bp, Artificial Sequence
  Synthetic oligonucleotide
aacaggactgcactcaagagtctttttagg

SEQ ID NO: 114219 - DNA, 30 bp, Artificial Sequence
  Synthetic oligonucleotide
aaaagtatggaaagtctgtcggtaaaacgg

SEQ ID NO: 114220 - DNA, 30 bp, Artificial Sequence
  Synthetic oligonucleotide
tagtagccgtagcctcaaagaagacaacgg

SEQ ID NO: 114221 - DNA, 30 bp, Artificial Sequence
  Synthetic oligonucleotide
catacgggatcaaatcggtcactccaacgg

SEQ ID NO: 114222 - DNA, 30 bp, Artificial Sequence
  Synthetic oligonucleotide
tcgccatacaaattgtggggcctgcaacgg

SEQ ID NO: 114223 - DNA, 30 bp, Artificial Sequence
  Synthetic oligonucleotide
tcatagataaatatatgtcaattgcaacgg

SEQ ID NO: 114224 - DNA, 30 bp, Artificial Sequence
  Synthetic oligonucleotide
cagatgcgagcagtcggtaagttgcaacgg

SEQ ID NO: 114225 - DNA, 30 bp, Artificial Sequence
  Synthetic oligonucleotide
caattacgtgacctaagtagtcaagaacgg

SEQ ID NO: 114226 - DNA, 30 bp, Artificial Sequence
  Synthetic oligonucleotide
agtgtcaatcaattacatcatgaagaacgg

SEQ ID NO: 114227 - DNA, 30 bp, Artificial Sequence
  Synthetic oligonucleotide
ttgccaggataaggactctggagagaacgg

SEQ ID NO: 114228 - DNA, 30 bp, Artificial Sequence
  Synthetic oligonucleotide
gctaggagcgccgatgagctcggagaacgg

SEQ ID NO: 114229 - DNA, 30 bp, Artificial Sequence
  Synthetic oligonucleotide
accacggagctactctggtctgccgaacgg

SEQ ID NO: 114230 - DNA, 30 bp, Artificial Sequence
  Synthetic oligonucleotide
gtggatcacggtccagctcattgcgaacgg

SEQ ID NO: 114231 - DNA, 30 bp, Artificial Sequence
  Synthetic oligonucleotide
ccgccttaagtgaccagattggtcgaacgg

SEQ ID NO: 114232 - DNA, 30 bp, Artificial Sequence
  Synthetic oligonucleotide
gtgacattaagcagtaccctgtcggaacgg

SEQ ID NO: 114233 - DNA, 30 bp, Artificial Sequence
  Synthetic oligonucleotide
cctcctcgaatggtcagagaaaggtaacgg

SEQ ID NO: 114234 - DNA, 30 bp, Artificial Sequence
  Synthetic oligonucleotide
cgaaaaccaacgccgacaaaacgaacacgg

SEQ ID NO: 114235 - DNA, 30 bp, Artificial Sequence
  Synthetic oligonucleotide
tagcatcccccgcccacctagagcacacgg

SEQ ID NO: 114236 - DNA, 30 bp, Artificial Sequence
  Synthetic oligonucleotide
gacaagatgctcggagccagacgaccacgg

SEQ ID NO: 114237 - DNA, 30 bp, Artificial Sequence
  Synthetic oligonucleotide
ggtttagtaatgcgataagggcacccacgg

SEQ ID NO: 114238 - DNA, 30 bp, Artificial Sequence
  Synthetic oligonucleotide
acatagagcgccggacggcgagcatcacgg

SEQ ID NO: 114239 - DNA, 30 bp, Artificial Sequence
  Synthetic oligonucleotide
gcctccgagtgggcaacgaaagtctcacgg

SEQ ID NO: 114240 - DNA, 30 bp, Artificial Sequence
  Synthetic oligonucleotide
caataaacgtatcaggtagaccagtcacgg

SEQ ID NO: 114241 - DNA, 30 bp, Artificial Sequence
  Synthetic oligonucleotide
atcgtgtctcttcgcatccttatttcacgg

SEQ ID NO: 114242 - DNA, 30 bp, Artificial Sequence
  Synthetic oligonucleotide
tcagatggtaaaataagtttacggagacgg

SEQ ID NO: 114243 - DNA, 30 bp, Artificial Sequence
  Synthetic oligonucleotide
gcatggcgtaaggatgacaatcgacgacgg

SEQ ID NO: 114244 - DNA, 30 bp, Artificial Sequence
  Synthetic oligonucleotide
aggaggaaattagttaatctagacggacgg

SEQ ID NO: 114245 - DNA, 30 bp, Artificial Sequence
  Synthetic oligonucleotide
agggatccattgtgctatgcgaagggacgg

SEQ ID NO: 114246 - DNA, 30 bp, Artificial Sequence
  Synthetic oligonucleotide
aaactagccacctcggtataccggggacgg

SEQ ID NO: 114247 - DNA, 30 bp, Artificial Sequence
  Synthetic oligonucleotide
tgcagaacgagtatggagcgcgggggacgg

SEQ ID NO: 114248 - DNA, 30 bp, Artificial Sequence
  Synthetic oligonucleotide
aggctaacgaacaatcggatggcctgacgg

SEQ ID NO: 114249 - DNA, 30 bp, Artificial Sequence
  Synthetic oligonucleotide
cctcgaccctgtgtcaagccagattgacgg

SEQ ID NO: 114250 - DNA, 30 bp, Artificial Sequence
  Synthetic oligonucleotide
ttgtcagtcggacggttgggaaacatacgg

SEQ ID NO: 114251 - DNA, 30 bp, Artificial Sequence
  Synthetic oligonucleotide
actaaagacataagatggagggacatacgg

SEQ ID NO: 114252 - DNA, 30 bp, Artificial Sequence
  Synthetic oligonucleotide
acgatcctagacattgactgcatcatacgg

SEQ ID NO: 114253 - DNA, 30 bp, Artificial Sequence
  Synthetic oligonucleotide
acaatgaagataggaaacccggttatacgg

SEQ ID NO: 114254 - DNA, 30 bp, Artificial Sequence
  Synthetic oligonucleotide
cggtctgcgtccccagccggaagagtacgg

SEQ ID NO: 114255 - DNA, 30 bp, Artificial Sequence
  Synthetic oligonucleotide
aggtagcgtagtctcagaatcatagtacgg

SEQ ID NO: 114256 - DNA, 30 bp, Artificial Sequence
  Synthetic oligonucleotide
ccgcaaggtagatagtattagtaggtacgg

SEQ ID NO: 114257 - DNA, 30 bp, Artificial Sequence
  Synthetic oligonucleotide
agaggagtgtatcatgtagtcttattacgg

SEQ ID NO: 114258 - DNA, 31 bp, Artificial Sequence
  Synthetic oligonucleotide
ggtacgtacacgttctagataagccttacgg

SEQ ID NO: 114259 - DNA, 30 bp, Artificial Sequence
  Synthetic oligonucleotide
tcgggcgaccgataagtcgggaatttacgg

SEQ ID NO: 114260 - DNA, 31 bp, Artificial Sequence
  Synthetic oligonucleotide
aggcaaatataaaatcataaatttaaaccgg

SEQ ID NO: 114261 - DNA, 30 bp, Artificial Sequence
  Synthetic oligonucleotide
gatagcctcatacgacattagaataaccgg

SEQ ID NO: 114262 - DNA, 30 bp, Artificial Sequence
  Synthetic oligonucleotide
ccacgacaggccagtttggtgaacgaccgg

SEQ ID NO: 114263 - DNA, 30 bp, Artificial Sequence
  Synthetic oligonucleotide
cctcacccaccacggataataactgaccgg

SEQ ID NO: 114264 - DNA, 30 bp, Artificial Sequence
  Synthetic oligonucleotide
tcgctcagcatcaaatctcggacctaccgg

SEQ ID NO: 114265 - DNA, 30 bp, Artificial Sequence
  Synthetic oligonucleotide
agatcagcgataaagacacgcacaacccgg

SEQ ID NO: 114266 - DNA, 30 bp, Artificial Sequence
  Synthetic oligonucleotide
tacctgcgaaacgtgcatataataacccgg

SEQ ID NO: 114267 - DNA, 30 bp, Artificial Sequence
  Synthetic oligonucleotide
ccattcagcagcggagagtacggtacccgg

SEQ ID NO: 114268 - DNA, 30 bp, Artificial Sequence
  Synthetic oligonucleotide
gagcaaacccaacacgtccatggagcccgg

SEQ ID NO: 114269 - DNA, 30 bp, Artificial Sequence
  Synthetic oligonucleotide
aggtatgaacgagtgatattctgggcccgg

SEQ ID NO: 114270 - DNA, 30 bp, Artificial Sequence
  Synthetic oligonucleotide
tacggtaaagtgaacgtgggaatttcccgg

SEQ ID NO: 114271 - DNA, 30 bp, Artificial Sequence
  Synthetic oligonucleotide
ttaataaacacgacagggtgataaagccgg

SEQ ID NO: 114272 - DNA, 30 bp, Artificial Sequence
  Synthetic oligonucleotide
cgtcctcgacaggaaggggggtcaagccgg

SEQ ID NO: 114273 - DNA, 30 bp, Artificial Sequence
  Synthetic oligonucleotide
tggctcagctaggaaaataaatgccgccgg

SEQ ID NO: 114274 - DNA, 30 bp, Artificial Sequence
  Synthetic oligonucleotide
gcgcacgtacaacttctatgattcggccgg

SEQ ID NO: 114275 - DNA, 30 bp, Artificial Sequence
  Synthetic oligonucleotide
gacagcggggaaccatcgccgaggggccgg

SEQ ID NO: 114276 - DNA, 30 bp, Artificial Sequence
  Synthetic oligonucleotide
aaacgcgaatgatacttctatggtggccgg

SEQ ID NO: 114277 - DNA, 30 bp, Artificial Sequence
  Synthetic oligonucleotide
cgacgagaccgagtcgtgaccgaaatccgg

SEQ ID NO: 114278 - DNA, 30 bp, Artificial Sequence
  Synthetic oligonucleotide
gtaaccatacgacattagctcataatccgg

SEQ ID NO: 114279 - DNA, 30 bp, Artificial Sequence
  Synthetic oligonucleotide
gggctcattgaaggtacagggaacatccgg

SEQ ID NO: 114280 - DNA, 30 bp, Artificial Sequence
  Synthetic oligonucleotide
cccaaatcgtctctcaataggcaactccgg

SEQ ID NO: 114281 - DNA, 30 bp, Artificial Sequence
  Synthetic oligonucleotide
agtatccgtattagaagcactaacttccgg

SEQ ID NO: 114282 - DNA, 30 bp, Artificial Sequence
  Synthetic oligonucleotide
acactgatcttgtggaaccagtatttccgg

SEQ ID NO: 114283 - DNA, 30 bp, Artificial Sequence
  Synthetic oligonucleotide
aagttgtgaagagattgttaacacaagcgg

SEQ ID NO: 114284 - DNA, 30 bp, Artificial Sequence
  Synthetic oligonucleotide
attaagaacgtcactacgtcgtgtaagcgg

SEQ ID NO: 114285 - DNA, 30 bp, Artificial Sequence
  Synthetic oligonucleotide
ggagcgatgagagcagcattcctggagcgg

SEQ ID NO: 114286 - DNA, 30 bp, Artificial Sequence
  Synthetic oligonucleotide
gttatggtcggcgaatgtagggaatagcgg

SEQ ID NO: 114287 - DNA, 30 bp, Artificial Sequence
  Synthetic oligonucleotide
tgtcggagcagttgcacaaactgctagcgg

SEQ ID NO: 114288 - DNA, 30 bp, Artificial Sequence
  Synthetic oligonucleotide
tagtattgtggtgaagacgaactgtagcgg

SEQ ID NO: 114289 - DNA, 30 bp, Artificial Sequence
  Synthetic oligonucleotide
acggaataacgaggtttgctcgtttagcgg

SEQ ID NO: 114290 - DNA, 31 bp, Artificial Sequence
  Synthetic oligonucleotide
tggacctaccagtgggcaacgtgaaacgcgg

SEQ ID NO: 114291 - DNA, 30 bp, Artificial Sequence
  Synthetic oligonucleotide
caggtccaaggtaacaatgagtggccgcgg

SEQ ID NO: 114292 - DNA, 30 bp, Artificial Sequence
  Synthetic oligonucleotide
actcagggacttaaactatcaatatcgcgg

SEQ ID NO: 114293 - DNA, 30 bp, Artificial Sequence
  Synthetic oligonucleotide
tagctcgccagacaggggcaacgccggcgg

SEQ ID NO: 114294 - DNA, 30 bp, Artificial Sequence
  Synthetic oligonucleotide
gacaggaatgagggaggcagaatccggcgg

SEQ ID NO: 114295 - DNA, 30 bp, Artificial Sequence
  Synthetic oligonucleotide
cataaaaattgaataacgtatgtccggcgg

SEQ ID NO: 114296 - DNA, 30 bp, Artificial Sequence
  Synthetic oligonucleotide
aagtctaacagatatcagactttccggcgg

SEQ ID NO: 114297 - DNA, 30 bp, Artificial Sequence
  Synthetic oligonucleotide
tagttaggcgagcgctatttcacagggcgg

SEQ ID NO: 114298 - DNA, 30 bp, Artificial Sequence
  Synthetic oligonucleotide
cttcggcaggatttctagagtagcgggcgg

SEQ ID NO: 114299 - DNA, 30 bp, Artificial Sequence
  Synthetic oligonucleotide
atctcgtggctaatgcaagggttggggcgg

SEQ ID NO: 114300 - DNA, 30 bp, Artificial Sequence
  Synthetic oligonucleotide
tcacaggtggagagatattgtggatggcgg

SEQ ID NO: 114301 - DNA, 30 bp, Artificial Sequence
  Synthetic oligonucleotide
tagacgagcctaaattatccgttatggcgg

SEQ ID NO: 114302 - DNA, 30 bp, Artificial Sequence
  Synthetic oligonucleotide
ggtgccagaattcagcggatcaactggcgg

SEQ ID NO: 114303 - DNA, 30 bp, Artificial Sequence
  Synthetic oligonucleotide
accatagtgtacgcgtatagggtctggcgg

SEQ ID NO: 114304 - DNA, 30 bp, Artificial Sequence
  Synthetic oligonucleotide
tctgtgattgacttgttgactgggtggcgg

SEQ ID NO: 114305 - DNA, 30 bp, Artificial Sequence
  Synthetic oligonucleotide
ggaatactcgtgaactctagaccttggcgg

SEQ ID NO: 114306 - DNA, 30 bp, Artificial Sequence
  Synthetic oligonucleotide
ggtagaagaactggctcgtttcatatgcgg

SEQ ID NO: 114307 - DNA, 30 bp, Artificial Sequence
  Synthetic oligonucleotide
cggctgtagtgaaggacgcgtgagctgcgg

SEQ ID NO: 114308 - DNA, 30 bp, Artificial Sequence
  Synthetic oligonucleotide
tcggcaagagcaaagcacagatccgtgcgg

SEQ ID NO: 114309 - DNA, 30 bp, Artificial Sequence
  Synthetic oligonucleotide
acttaagccggagccgcggtaagcgtgcgg

SEQ ID NO: 114310 - DNA, 30 bp, Artificial Sequence
  Synthetic oligonucleotide
agccgtcaactgacgactacccgattgcgg

SEQ ID NO: 114311 - DNA, 30 bp, Artificial Sequence
  Synthetic oligonucleotide
tactggcgatggtgagtatcttaaaatcgg

SEQ ID NO: 114312 - DNA, 30 bp, Artificial Sequence
  Synthetic oligonucleotide
tcgagtccagtgaaaagtgaagcacatcgg

SEQ ID NO: 114313 - DNA, 30 bp, Artificial Sequence
  Synthetic oligonucleotide
gtgggcgaacttgggtgttaactgcatcgg

SEQ ID NO: 114314 - DNA, 30 bp, Artificial Sequence
  Synthetic oligonucleotide
tgagttgggacaaagaatgcaattcatcgg

SEQ ID NO: 114315 - DNA, 30 bp, Artificial Sequence
  Synthetic oligonucleotide
agtactctaaggagacccacgctagatcgg

SEQ ID NO: 114316 - DNA, 30 bp, Artificial Sequence
  Synthetic oligonucleotide
attccgcagggtggtattcgttacgatcgg

SEQ ID NO: 114317 - DNA, 30 bp, Artificial Sequence
  Synthetic oligonucleotide
atcgaatctatagggtgttgtaaggatcgg

SEQ ID NO: 114318 - DNA, 30 bp, Artificial Sequence
  Synthetic oligonucleotide
tccactcgtcaggtacaacaaacggatcgg

SEQ ID NO: 114319 - DNA, 31 bp, Artificial Sequence
  Synthetic oligonucleotide
gtagcgtactaaatcacaggcaggggatcgg

SEQ ID NO: 114320 - DNA, 30 bp, Artificial Sequence
  Synthetic oligonucleotide
gcgatcgactcgtgtctataactggatcgg

SEQ ID NO: 114321 - DNA, 30 bp, Artificial Sequence
  Synthetic oligonucleotide
ttgactccggagaaaatgggccaatatcgg

SEQ ID NO: 114322 - DNA, 30 bp, Artificial Sequence
  Synthetic oligonucleotide
tccaacaggtactcaatcaaagaatatcgg

SEQ ID NO: 114323 - DNA, 30 bp, Artificial Sequence
  Synthetic oligonucleotide
agaagaccactaggccatggctaatatcgg

SEQ ID NO: 114324 - DNA, 30 bp, Artificial Sequence
  Synthetic oligonucleotide
caagatagtcacaaggaaccatgttatcgg

SEQ ID NO: 114325 - DNA, 29 bp, Artificial Sequence
  Synthetic oligonucleotide
ggacttctgagcagtgaggggatactcgg

SEQ ID NO: 114326 - DNA, 30 bp, Artificial Sequence
  Synthetic oligonucleotide
gctacgattacttcaacgagcatgcctcgg

SEQ ID NO: 114327 - DNA, 30 bp, Artificial Sequence
  Synthetic oligonucleotide
aggcttgctatacctcacaaggtagctcgg

SEQ ID NO: 114328 - DNA, 30 bp, Artificial Sequence
  Synthetic oligonucleotide
aaacaatcgtctctgctctaccgcgctcgg

SEQ ID NO: 114329 - DNA, 30 bp, Artificial Sequence
  Synthetic oligonucleotide
agtgtcggccatggccttacatgcgctcgg

SEQ ID NO: 114330 - DNA, 30 bp, Artificial Sequence
  Synthetic oligonucleotide
gaaggcgcaaagttcagatcgaaggctcgg

SEQ ID NO: 114331 - DNA, 30 bp, Artificial Sequence
  Synthetic oligonucleotide
tcagctatagacaatgtcgatcgctctcgg

SEQ ID NO: 114332 - DNA, 30 bp, Artificial Sequence
  Synthetic oligonucleotide
acatttgcctgctattgaaacggctctcgg

SEQ ID NO: 114333 - DNA, 30 bp, Artificial Sequence
  Synthetic oligonucleotide
ttatcagctcgaccagatgctaggtctcgg

SEQ ID NO: 114334 - DNA, 30 bp, Artificial Sequence
  Synthetic oligonucleotide
gtgagtagtaccaagcggcatggcagtcgg

SEQ ID NO: 114335 - DNA, 30 bp, Artificial Sequence
  Synthetic oligonucleotide
atagggtgcaaatattgccaaatacgtcgg

SEQ ID NO: 114336 - DNA, 30 bp, Artificial Sequence
  Synthetic oligonucleotide
cccttaaaacgatataaaacgggaggtcgg

SEQ ID NO: 114337 - DNA, 30 bp, Artificial Sequence
  Synthetic oligonucleotide
catagcccaaggtccccaaaaaacggtcgg

SEQ ID NO: 114338 - DNA, 30 bp, Artificial Sequence
  Synthetic oligonucleotide
tcaagttatgggcgccatcgtgggggtcgg

SEQ ID NO: 114339 - DNA, 30 bp, Artificial Sequence
  Synthetic oligonucleotide
ccggcgagattatatgtacgttaatgtcgg

SEQ ID NO: 114340 - DNA, 30 bp, Artificial Sequence
  Synthetic oligonucleotide
ccgctagagcacaaataaggtaactgtcgg

SEQ ID NO: 114341 - DNA, 30 bp, Artificial Sequence
  Synthetic oligonucleotide
gagcaacccgggatcggaatcaagtgtcgg

SEQ ID NO: 114342 - DNA, 30 bp, Artificial Sequence
  Synthetic oligonucleotide
cgtacaaacctcacaggttaatagtgtcgg

SEQ ID NO: 114343 - DNA, 30 bp, Artificial Sequence
  Synthetic oligonucleotide
ggctatgtcctaaggaagggatggtgtcgg

SEQ ID NO: 114344 - DNA, 30 bp, Artificial Sequence
  Synthetic oligonucleotide
cggtcctaaacgataccagatatgtgtcgg

SEQ ID NO: 114345 - DNA, 30 bp, Artificial Sequence
  Synthetic oligonucleotide
cgttccggagcgaccatgaaagacattcgg

SEQ ID NO: 114346 - DNA, 30 bp, Artificial Sequence
  Synthetic oligonucleotide
cccaccaaagtgttgagcaatggccttcgg

SEQ ID NO: 114347 - DNA, 30 bp, Artificial Sequence
  Synthetic oligonucleotide
catgacccagaaattggagtaacagttcgg

SEQ ID NO: 114348 - DNA, 30 bp, Artificial Sequence
  Synthetic oligonucleotide
tactgatggcgtccactaggtctcgttcgg

SEQ ID NO: 114349 - DNA, 30 bp, Artificial Sequence
  Synthetic oligonucleotide
gtgcactcgtcgccacaagactcctttcgg

SEQ ID NO: 114350 - DNA, 30 bp, Artificial Sequence
  Synthetic oligonucleotide
agccaacgcttctacgcaagcgggtttcgg

SEQ ID NO: 114351 - DNA, 30 bp, Artificial Sequence
  Synthetic oligonucleotide
caagtgtgcatgtcagattaattgtttcgg

SEQ ID NO: 114352 - DNA, 30 bp, Artificial Sequence
  Synthetic oligonucleotide
tgcttatcaagctgatgattgcaaaaaggg

SEQ ID NO: 114353 - DNA, 30 bp, Artificial Sequence
  Synthetic oligonucleotide
atcctcttactgcgatgaaaacggaaaggg

SEQ ID NO: 114354 - DNA, 30 bp, Artificial Sequence
  Synthetic oligonucleotide
tcattctccgcaaaaggaagtggtaaaggg

SEQ ID NO: 114355 - DNA, 30 bp, Artificial Sequence
  Synthetic oligonucleotide
ttcacaaaatacaggtaaacagctcaaggg

SEQ ID NO: 114356 - DNA, 30 bp, Artificial Sequence
  Synthetic oligonucleotide
ctatgattgcctacaccagaaggtcaaggg

SEQ ID NO: 114357 - DNA, 30 bp, Artificial Sequence
  Synthetic oligonucleotide
ggaaaggtaatcagctataaacttcaaggg

SEQ ID NO: 114358 - DNA, 30 bp, Artificial Sequence
  Synthetic oligonucleotide
gcaatgcgttaccaaatcacgaaagaaggg

SEQ ID NO: 114359 - DNA, 30 bp, Artificial Sequence
  Synthetic oligonucleotide
gtgggaggtcagcgtcatttgagcgaaggg

SEQ ID NO: 114360 - DNA, 30 bp, Artificial Sequence
  Synthetic oligonucleotide
atcgattcataaattgccacgtgcgaaggg

SEQ ID NO: 114361 - DNA, 30 bp, Artificial Sequence
  Synthetic oligonucleotide
atggtatattcctatcagctaggggaaggg

SEQ ID NO: 114362 - DNA, 30 bp, Artificial Sequence
  Synthetic oligonucleotide
cgtatagcccgcgaaattttccaataaggg

SEQ ID NO: 114363 - DNA, 30 bp, Artificial Sequence
  Synthetic oligonucleotide
acaggtgaatattcacttcctcggtaaggg

SEQ ID NO: 114364 - DNA, 30 bp, Artificial Sequence
  Synthetic oligonucleotide
agggaactcctgtacatctcgctgtaaggg

SEQ ID NO: 114365 - DNA, 30 bp, Artificial Sequence
  Synthetic oligonucleotide
ggcgctttatcgaggtaccgaataacaggg

SEQ ID NO: 114366 - DNA, 30 bp, Artificial Sequence
  Synthetic oligonucleotide
ggccgggacgtgcaggatagtcacacaggg

SEQ ID NO: 114367 - DNA, 30 bp, Artificial Sequence
  Synthetic oligonucleotide
aaacgtacacttttcattaagttgacaggg

SEQ ID NO: 114368 - DNA, 30 bp, Artificial Sequence
  Synthetic oligonucleotide
cgaatgggctctcaccttcgaggaccaggg

SEQ ID NO: 114369 - DNA, 30 bp, Artificial Sequence
  Synthetic oligonucleotide
catgacagtacattatactcgaagccaggg

SEQ ID NO: 114370 - DNA, 30 bp, Artificial Sequence
  Synthetic oligonucleotide
tcagcattcatcttgtccaaaaaagcaggg

SEQ ID NO: 114371 - DNA, 30 bp, Artificial Sequence
  Synthetic oligonucleotide
agcgttaataagaatctggtacgggcaggg

SEQ ID NO: 114372 - DNA, 30 bp, Artificial Sequence
  Synthetic oligonucleotide
agactaccgtcgaagaaggacacttcaggg

SEQ ID NO: 114373 - DNA, 29 bp, Artificial Sequence
  Synthetic oligonucleotide
atagagggggtgttgagatagcttcaggg

SEQ ID NO: 114374 - DNA, 30 bp, Artificial Sequence
  Synthetic oligonucleotide
gagactatattaccgtcgttcgcttcaggg

SEQ ID NO: 114375 - DNA, 30 bp, Artificial Sequence
  Synthetic oligonucleotide
gtttacaataccactttaacacccagaggg

SEQ ID NO: 114376 - DNA, 30 bp, Artificial Sequence
  Synthetic oligonucleotide
cggggaacgacaatctaggatcagagaggg

SEQ ID NO: 114377 - DNA, 30 bp, Artificial Sequence
  Synthetic oligonucleotide
atgccaataagcgctttttagaggagaggg

SEQ ID NO: 114378 - DNA, 30 bp, Artificial Sequence
  Synthetic oligonucleotide
actacgtctatcgcatctgatcggagaggg

SEQ ID NO: 114379 - DNA, 30 bp, Artificial Sequence
  Synthetic oligonucleotide
agctttgaaccaatcatgcagcatagaggg

SEQ ID NO: 114380 - DNA, 30 bp, Artificial Sequence
  Synthetic oligonucleotide
cgagggtacgtactgtgattacgtagaggg

SEQ ID NO: 114381 - DNA, 30 bp, Artificial Sequence
  Synthetic oligonucleotide
gctcctaacatgataggcttaccacgaggg

SEQ ID NO: 114382 - DNA, 30 bp, Artificial Sequence
  Synthetic oligonucleotide
tcttcctttatgttgcatagtgagcgaggg

SEQ ID NO: 114383 - DNA, 29 bp, Artificial Sequence
  Synthetic oligonucleotide
actagacattccatccgagggctcgaggg

SEQ ID NO: 114384 - DNA, 30 bp, Artificial Sequence
  Synthetic oligonucleotide
caggccacccatgtggaaagagtaggaggg

SEQ ID NO: 114385 - DNA, 30 bp, Artificial Sequence
  Synthetic oligonucleotide
tcaggggatgctaatgacggatggggaggg

SEQ ID NO: 114386 - DNA, 30 bp, Artificial Sequence
  Synthetic oligonucleotide
acttccaattggaacaatctcagatgaggg

SEQ ID NO: 114387 - DNA, 30 bp, Artificial Sequence
  Synthetic oligonucleotide
tagttaacgagtccctaaaggtgctgaggg

SEQ ID NO: 114388 - DNA, 30 bp, Artificial Sequence
  Synthetic oligonucleotide
ggttagattgatggatgtgcaaagtgaggg

SEQ ID NO: 114389 - DNA, 30 bp, Artificial Sequence
  Synthetic oligonucleotide
ctatgtaaaccaaatgtgtcatagtgaggg

SEQ ID NO: 114390 - DNA, 30 bp, Artificial Sequence
  Synthetic oligonucleotide
actgaatacttcactcaggcctcgtgaggg

SEQ ID NO: 114391 - DNA, 30 bp, Artificial Sequence
  Synthetic oligonucleotide
ctaagttcggctagtgacgggtggtgaggg

SEQ ID NO: 114392 - DNA, 30 bp, Artificial Sequence
  Synthetic oligonucleotide
ttcgagtaatgggcttgttgcaattgaggg

SEQ ID NO: 114393 - DNA, 30 bp, Artificial Sequence
  Synthetic oligonucleotide
cgcgtcggcgcacaacaatcgagttgaggg

SEQ ID NO: 114394 - DNA, 31 bp, Artificial Sequence
  Synthetic oligonucleotide
acaattcgacaatagtcgcttccaaataggg

SEQ ID NO: 114395 - DNA, 30 bp, Artificial Sequence
  Synthetic oligonucleotide
agatacgacgatgagaatcgtgaaataggg

SEQ ID NO: 114396 - DNA, 30 bp, Artificial Sequence
  Synthetic oligonucleotide
tgtaatagtcgagctcgcatgacaataggg

SEQ ID NO: 114397 - DNA, 30 bp, Artificial Sequence
  Synthetic oligonucleotide
gacttgctaggaagtgtggttaagataggg

SEQ ID NO: 114398 - DNA, 30 bp, Artificial Sequence
  Synthetic oligonucleotide
ctcgatgccagtcgacgcgaggcgataggg

SEQ ID NO: 114399 - DNA, 30 bp, Artificial Sequence
  Synthetic oligonucleotide
ggctcaggtacagaattgggatccctaggg

SEQ ID NO: 114400 - DNA, 30 bp, Artificial Sequence
  Synthetic oligonucleotide
gagaactgatgttgacttcggcttctaggg

SEQ ID NO: 114401 - DNA, 30 bp, Artificial Sequence
  Synthetic oligonucleotide
ttcattccaaagatatgagtacgcgtaggg

SEQ ID NO: 114402 - DNA, 30 bp, Artificial Sequence
  Synthetic oligonucleotide
gtgggcctacgttactcggcaagggtaggg

SEQ ID NO: 114403 - DNA, 30 bp, Artificial Sequence
  Synthetic oligonucleotide
ggagaagctcgcgaaatatggtgggtaggg

SEQ ID NO: 114404 - DNA, 30 bp, Artificial Sequence
  Synthetic oligonucleotide
gtaaaggaggcaaagcgtatcacattaggg

SEQ ID NO: 114405 - DNA, 30 bp, Artificial Sequence
  Synthetic oligonucleotide
gttgattgcgaggtgattgtgggcttaggg

SEQ ID NO: 114406 - DNA, 30 bp, Artificial Sequence
  Synthetic oligonucleotide
ccagtggcggatatggacacacctttaggg

SEQ ID NO: 114407 - DNA, 30 bp, Artificial Sequence
  Synthetic oligonucleotide
tccgggggccaatgacaggaccgaaacggg

SEQ ID NO: 114408 - DNA, 30 bp, Artificial Sequence
  Synthetic oligonucleotide
gacccggtaatcgaaagaacgttaaacggg

SEQ ID NO: 114409 - DNA, 30 bp, Artificial Sequence
  Synthetic oligonucleotide
acaatcaaaggaatggccgtacataacggg

SEQ ID NO: 114410 - DNA, 30 bp, Artificial Sequence
  Synthetic oligonucleotide
tccacacttcaggcaacgtttctccacggg

SEQ ID NO: 114411 - DNA, 30 bp, Artificial Sequence
  Synthetic oligonucleotide
aaggcacgcaccgtccagtaacgtcacggg

SEQ ID NO: 114412 - DNA, 30 bp, Artificial Sequence
  Synthetic oligonucleotide
attccgaattggtgaggagttaaagacggg

SEQ ID NO: 114413 - DNA, 30 bp, Artificial Sequence
  Synthetic oligonucleotide
taagtatgaagacgtcgaatgtcggacggg

SEQ ID NO: 114414 - DNA, 30 bp, Artificial Sequence
  Synthetic oligonucleotide
tctctgcgggtaatcagctaatgatacggg

SEQ ID NO: 114415 - DNA, 30 bp, Artificial Sequence
  Synthetic oligonucleotide
tcgactcataggcaacatgactattacggg

SEQ ID NO: 114416 - DNA, 30 bp, Artificial Sequence
  Synthetic oligonucleotide
acggtacagtgtgctgcaaacagacccggg

SEQ ID NO: 114417 - DNA, 30 bp, Artificial Sequence
  Synthetic oligonucleotide
tggcgggcaggaggattaggaccgcccggg

SEQ ID NO: 114418 - DNA, 30 bp, Artificial Sequence
  Synthetic oligonucleotide
gggaaaccgttttaagagcgtccgcccggg

SEQ ID NO: 114419 - DNA, 30 bp, Artificial Sequence
  Synthetic oligonucleotide
caggatactagaacggatcgcgcagccggg

SEQ ID NO: 114420 - DNA, 30 bp, Artificial Sequence
  Synthetic oligonucleotide
tggacttgctgaagtccgtcgcactccggg

SEQ ID NO: 114421 - DNA, 30 bp, Artificial Sequence
  Synthetic oligonucleotide
gttaggatcgagaaacggatttgctccggg

SEQ ID NO: 114422 - DNA, 30 bp, Artificial Sequence
  Synthetic oligonucleotide
gaagtggccaccagtataagctaaagcggg

SEQ ID NO: 114423 - DNA, 30 bp, Artificial Sequence
  Synthetic oligonucleotide
cagcttacaaaggtatgggggttaagcggg

SEQ ID NO: 114424 - DNA, 30 bp, Artificial Sequence
  Synthetic oligonucleotide
cgcggggtgtgtccaaactacctcagcggg

SEQ ID NO: 114425 - DNA, 30 bp, Artificial Sequence
  Synthetic oligonucleotide
tacataggtgaatcacagtcttcgtgcggg

SEQ ID NO: 114426 - DNA, 30 bp, Artificial Sequence
  Synthetic oligonucleotide
tagattagacactatagtaagccgatcggg

SEQ ID NO: 114427 - DNA, 30 bp, Artificial Sequence
  Synthetic oligonucleotide
acaaggctcggggccacacaatggatcggg

SEQ ID NO: 114428 - DNA, 30 bp, Artificial Sequence
  Synthetic oligonucleotide
aaaaacatgcatcaggactgcccagtcggg

SEQ ID NO: 114429 - DNA, 30 bp, Artificial Sequence
  Synthetic oligonucleotide
ggctaaagtggatacaacaaacttgtcggg

SEQ ID NO: 114430 - DNA, 30 bp, Artificial Sequence
  Synthetic oligonucleotide
aaggaacgcaaagtttgataaaacttcggg

SEQ ID NO: 114431 - DNA, 30 bp, Artificial Sequence
  Synthetic oligonucleotide
gcatactagctgctatcagtatgcttcggg

SEQ ID NO: 114432 - DNA, 30 bp, Artificial Sequence
  Synthetic oligonucleotide
ggccgggggcgatatcgggtgaagttcggg

SEQ ID NO: 114433 - DNA, 30 bp, Artificial Sequence
  Synthetic oligonucleotide
gccctaagttctggcactgtgaggttcggg

SEQ ID NO: 114434 - DNA, 30 bp, Artificial Sequence
  Synthetic oligonucleotide
aacagcagggtggatgagagctatttcggg

SEQ ID NO: 114435 - DNA, 30 bp, Artificial Sequence
  Synthetic oligonucleotide
cttgtaagccttgaggcatcgtgtttcggg

SEQ ID NO: 114436 - DNA, 30 bp, Artificial Sequence
  Synthetic oligonucleotide
cgcaagtggtttggcattgagccaaagggg

SEQ ID NO: 114437 - DNA, 30 bp, Artificial Sequence
  Synthetic oligonucleotide
ggacgcgaacgtgggaaaagcagaaagggg

SEQ ID NO: 114438 - DNA, 30 bp, Artificial Sequence
  Synthetic oligonucleotide
gagagagtcgttagggcagtgtacaagggg

SEQ ID NO: 114439 - DNA, 30 bp, Artificial Sequence
  Synthetic oligonucleotide
agtaaccaaaagtttaattagcgtaagggg

SEQ ID NO: 114440 - DNA, 30 bp, Artificial Sequence
  Synthetic oligonucleotide
tgatagtcggctgttgcgatcacacagggg

SEQ ID NO: 114441 - DNA, 30 bp, Artificial Sequence
  Synthetic oligonucleotide
taggggaaatatgctgctccgctccagggg

SEQ ID NO: 114442 - DNA, 30 bp, Artificial Sequence
  Synthetic oligonucleotide
ggagaagctcaacactgggaggatcagggg

SEQ ID NO: 114443 - DNA, 30 bp, Artificial Sequence
  Synthetic oligonucleotide
tagtgagctaatcgccagaagtgtcagggg

SEQ ID NO: 114444 - DNA, 30 bp, Artificial Sequence
  Synthetic oligonucleotide
ggcagtacctaatagagcgacctgtagggg

SEQ ID NO: 114445 - DNA, 30 bp, Artificial Sequence
  Synthetic oligonucleotide
atcgggggcttatcgtgtcttatgacgggg

SEQ ID NO: 114446 - DNA, 30 bp, Artificial Sequence
  Synthetic oligonucleotide
aacgtttcagcgccagagagaagaccgggg

SEQ ID NO: 114447 - DNA, 30 bp, Artificial Sequence
  Synthetic oligonucleotide
caagtataccagtgatagtccaatccgggg

SEQ ID NO: 114448 - DNA, 30 bp, Artificial Sequence
  Synthetic oligonucleotide
ataacggacccgaaactcattcacgcgggg

SEQ ID NO: 114449 - DNA, 30 bp, Artificial Sequence
  Synthetic oligonucleotide
tacgtattcataacgtatgataaatcgggg

SEQ ID NO: 114450 - DNA, 30 bp, Artificial Sequence
  Synthetic oligonucleotide
atatatcggtggaagcaatagggctcgggg

SEQ ID NO: 114451 - DNA, 30 bp, Artificial Sequence
  Synthetic oligonucleotide
ctttggaaaaaggtgttccgaatttcgggg

SEQ ID NO: 114452 - DNA, 30 bp, Artificial Sequence
  Synthetic oligonucleotide
cgaactgagccgaatcgtaattaaaggggg

SEQ ID NO: 114453 - DNA, 30 bp, Artificial Sequence
  Synthetic oligonucleotide
agcgtcaagagatacgactcctgaaggggg

SEQ ID NO: 114454 - DNA, 30 bp, Artificial Sequence
  Synthetic oligonucleotide
acctgctacgacaaatcaagcaggaggggg

SEQ ID NO: 114455 - DNA, 30 bp, Artificial Sequence
  Synthetic oligonucleotide
ccagaaccgttattagacatgaataggggg

SEQ ID NO: 114456 - DNA, 30 bp, Artificial Sequence
  Synthetic oligonucleotide
cgctaccgaagaagtaggtgtcaacggggg

SEQ ID NO: 114457 - DNA, 30 bp, Artificial Sequence
  Synthetic oligonucleotide
gttctaccaatccgtcagggatcccggggg

SEQ ID NO: 114458 - DNA, 30 bp, Artificial Sequence
  Synthetic oligonucleotide
ggtgctacttgagcgctaagtcgccggggg

SEQ ID NO: 114459 - DNA, 30 bp, Artificial Sequence
  Synthetic oligonucleotide
taggaaggtgagcaacgattactgcggggg

SEQ ID NO: 114460 - DNA, 30 bp, Artificial Sequence
  Synthetic oligonucleotide
ccaagcacccagtgccacgaccatcggggg

SEQ ID NO: 114461 - DNA, 30 bp, Artificial Sequence
  Synthetic oligonucleotide
tcgtgttccattgaggtcgagcgtcggggg

SEQ ID NO: 114462 - DNA, 30 bp, Artificial Sequence
  Synthetic oligonucleotide
ttgaccagagaaaagagcagcttagggggg

SEQ ID NO: 114463 - DNA, 38 bp, Artificial Sequence
  Synthetic oligonucleotide
aagataatacattcatggtatggtcggggatcgggggg

SEQ ID NO: 114464 - DNA, 30 bp, Artificial Sequence
  Synthetic oligonucleotide
cacaattcaaagcaaagcgataaggggggg

SEQ ID NO: 114465 - DNA, 30 bp, Artificial Sequence
  Synthetic oligonucleotide
agtcgtgactcatcgtctggggattggggg

SEQ ID NO: 114466 - DNA, 30 bp, Artificial Sequence
  Synthetic oligonucleotide
gggcgatcagtggtaaaaactgcgatgggg

SEQ ID NO: 114467 - DNA, 30 bp, Artificial Sequence
  Synthetic oligonucleotide
gtgtatgacttcgtcagggtaaggatgggg

SEQ ID NO: 114468 - DNA, 30 bp, Artificial Sequence
  Synthetic oligonucleotide
tccgttaaaggacagggtcaacaactgggg

SEQ ID NO: 114469 - DNA, 30 bp, Artificial Sequence
  Synthetic oligonucleotide
tgataggtgggcgttaaccaacatctgggg

SEQ ID NO: 114470 - DNA, 30 bp, Artificial Sequence
  Synthetic oligonucleotide
aggggacaagcggtcgagtgtcttctgggg

SEQ ID NO: 114471 - DNA, 30 bp, Artificial Sequence
  Synthetic oligonucleotide
tatgtcaatcgtcggatgaccatggtgggg

SEQ ID NO: 114472 - DNA, 30 bp, Artificial Sequence
  Synthetic oligonucleotide
ttacgtcttcgctaacggattgaattgggg

SEQ ID NO: 114473 - DNA, 30 bp, Artificial Sequence
  Synthetic oligonucleotide
catcagttcgacacaacaacgatgttgggg

SEQ ID NO: 114474 - DNA, 30 bp, Artificial Sequence
  Synthetic oligonucleotide
gccataatagcaaagcatgataaaaatggg

SEQ ID NO: 114475 - DNA, 30 bp, Artificial Sequence
  Synthetic oligonucleotide
ggaaagttagttgggagtctcgtaaatggg

SEQ ID NO: 114476 - DNA, 30 bp, Artificial Sequence
  Synthetic oligonucleotide
agcaggtctctgcgcattgcagacaatggg

SEQ ID NO: 114477 - DNA, 30 bp, Artificial Sequence
  Synthetic oligonucleotide
agccgacaagttgagtcagagttcaatggg

SEQ ID NO: 114478 - DNA, 30 bp, Artificial Sequence
  Synthetic oligonucleotide
cagcttcacagggccagctagcagaatggg

SEQ ID NO: 114479 - DNA, 30 bp, Artificial Sequence
  Synthetic oligonucleotide
atcaatgctataacacggttgaaccatggg

SEQ ID NO: 114480 - DNA, 31 bp, Artificial Sequence
  Synthetic oligonucleotide
gagggcgtgtagttcatgtgggcacgatggg

SEQ ID NO: 114481 - DNA, 30 bp, Artificial Sequence
  Synthetic oligonucleotide
tatcggacgaggagctgcggatatgatggg

SEQ ID NO: 114482 - DNA, 30 bp, Artificial Sequence
  Synthetic oligonucleotide
ggttaaggagagtaagggttttgatatggg

SEQ ID NO: 114483 - DNA, 30 bp, Artificial Sequence
  Synthetic oligonucleotide
tgggacgggggtgatactcaggtatatggg

SEQ ID NO: 114484 - DNA, 30 bp, Artificial Sequence
  Synthetic oligonucleotide
gggcagtttttgatacaatagtcctatggg

SEQ ID NO: 114485 - DNA, 30 bp, Artificial Sequence
  Synthetic oligonucleotide
gatagggtgatccgccgtttcacgtatggg

SEQ ID NO: 114486 - DNA, 30 bp, Artificial Sequence
  Synthetic oligonucleotide
cgacattgtcccctctttgaaaggactggg

SEQ ID NO: 114487 - DNA, 30 bp, Artificial Sequence
  Synthetic oligonucleotide
tagatccacctggaaggctttcatactggg

SEQ ID NO: 114488 - DNA, 30 bp, Artificial Sequence
  Synthetic oligonucleotide
ccagccagaggcaaaattaacgctactggg

SEQ ID NO: 114489 - DNA, 30 bp, Artificial Sequence
  Synthetic oligonucleotide
aggaattctaggagatagattaaccctggg

SEQ ID NO: 114490 - DNA, 30 bp, Artificial Sequence
  Synthetic oligonucleotide
gaaggatgttccgttacattgggtcctggg

SEQ ID NO: 114491 - DNA, 30 bp, Artificial Sequence
  Synthetic oligonucleotide
tttcagggtgtcagcgccgaagcagctggg

SEQ ID NO: 114492 - DNA, 30 bp, Artificial Sequence
  Synthetic oligonucleotide
cgtcggtatggcctgtataaaagagctggg

SEQ ID NO: 114493 - DNA, 30 bp, Artificial Sequence
  Synthetic oligonucleotide
gtgggcctcagaacaagttaagcaagtggg

SEQ ID NO: 114494 - DNA, 30 bp, Artificial Sequence
  Synthetic oligonucleotide
attgacaaaaaatgctggggagtaagtggg

SEQ ID NO: 114495 - DNA, 31 bp, Artificial Sequence
  Synthetic oligonucleotide
tagaagagccgtatgtgcacggaacagtggg

SEQ ID NO: 114496 - DNA, 30 bp, Artificial Sequence
  Synthetic oligonucleotide
caaggaactggctcacgaattttccgtggg

SEQ ID NO: 114497 - DNA, 30 bp, Artificial Sequence
  Synthetic oligonucleotide
aggggtgtagttgtttgcgtcagtcgtggg

SEQ ID NO: 114498 - DNA, 30 bp, Artificial Sequence
  Synthetic oligonucleotide
tgatcggggcagtaggggaataaaggtggg

SEQ ID NO: 114499 - DNA, 30 bp, Artificial Sequence
  Synthetic oligonucleotide
cgagacgatacagggcacacctctggtggg

SEQ ID NO: 114500 - DNA, 30 bp, Artificial Sequence
  Synthetic oligonucleotide
agcggagctattcaatggcttggtggtggg

SEQ ID NO: 114501 - DNA, 30 bp, Artificial Sequence
  Synthetic oligonucleotide
aagataccggagggcatttgtttatgtggg

SEQ ID NO: 114502 - DNA, 30 bp, Artificial Sequence
  Synthetic oligonucleotide
attaaacgtgacatcggtggatagtgtggg

SEQ ID NO: 114503 - DNA, 30 bp, Artificial Sequence
  Synthetic oligonucleotide
tacgggagcacaagggcctctcattgtggg

SEQ ID NO: 114504 - DNA, 30 bp, Artificial Sequence
  Synthetic oligonucleotide
ccataaaggcggtatggctctacaattggg

SEQ ID NO: 114505 - DNA, 30 bp, Artificial Sequence
  Synthetic oligonucleotide
gaagcagacggaagtgcccaaagaattggg

SEQ ID NO: 114506 - DNA, 30 bp, Artificial Sequence
  Synthetic oligonucleotide
tcggctcctggttatcttcagagaattggg

SEQ ID NO: 114507 - DNA, 30 bp, Artificial Sequence
  Synthetic oligonucleotide
tcagagtagctggtgctgtgcgggcttggg

SEQ ID NO: 114508 - DNA, 30 bp, Artificial Sequence
  Synthetic oligonucleotide
gccagaatggtcagttgtggtgggcttggg

SEQ ID NO: 114509 - DNA, 30 bp, Artificial Sequence
  Synthetic oligonucleotide
gtggggcccgcggtgtgcgtctgcgttggg

SEQ ID NO: 114510 - DNA, 30 bp, Artificial Sequence
  Synthetic oligonucleotide
agggagtgtaactaccaatcagtcgttggg

SEQ ID NO: 114511 - DNA, 30 bp, Artificial Sequence
  Synthetic oligonucleotide
tcgatcggaaaccacctcgctcatgttggg

SEQ ID NO: 114512 - DNA, 30 bp, Artificial Sequence
  Synthetic oligonucleotide
tccgaaacattaccgggcatagtctttggg

SEQ ID NO: 114513 - DNA, 30 bp, Artificial Sequence
  Synthetic oligonucleotide
cagacagggcaatcacacgcgccgtttggg

SEQ ID NO: 114514 - DNA, 30 bp, Artificial Sequence
  Synthetic oligonucleotide
ggatccccagggacttatttgacaaaatgg

SEQ ID NO: 114515 - DNA, 30 bp, Artificial Sequence
  Synthetic oligonucleotide
gagataactcgacaatgaaaatcaaaatgg

SEQ ID NO: 114516 - DNA, 30 bp, Artificial Sequence
  Synthetic oligonucleotide
gtcagtcacgtaaagtgccatcctaaatgg

SEQ ID NO: 114517 - DNA, 30 bp, Artificial Sequence
  Synthetic oligonucleotide
tccaccgaccaaattgctgttgttaaatgg

SEQ ID NO: 114518 - DNA, 30 bp, Artificial Sequence
  Synthetic oligonucleotide
tggaacggttatgagctttagctacaatgg

SEQ ID NO: 114519 - DNA, 30 bp, Artificial Sequence
  Synthetic oligonucleotide
ggaaagtctagctgttctctaggccaatgg

SEQ ID NO: 114520 - DNA, 30 bp, Artificial Sequence
  Synthetic oligonucleotide
atagtatcagcttagttcaataaggaatgg

SEQ ID NO: 114521 - DNA, 30 bp, Artificial Sequence
  Synthetic oligonucleotide
acactcgtagcccaactttctgcggaatgg

SEQ ID NO: 114522 - DNA, 30 bp, Artificial Sequence
  Synthetic oligonucleotide
gggggggcggtaattatatggcgtgaatgg

SEQ ID NO: 114523 - DNA, 30 bp, Artificial Sequence
  Synthetic oligonucleotide
ctcataacgaatcagactaagtggtaatgg

SEQ ID NO: 114524 - DNA, 30 bp, Artificial Sequence
  Synthetic oligonucleotide
ctccgctaacaaagcaggcacggttaatgg

SEQ ID NO: 114525 - DNA, 30 bp, Artificial Sequence
  Synthetic oligonucleotide
tcttagatggtatcaaacgagatttaatgg

SEQ ID NO: 114526 - DNA, 30 bp, Artificial Sequence
  Synthetic oligonucleotide
gattggtgttggatgagtgccgcaacatgg

SEQ ID NO: 114527 - DNA, 30 bp, Artificial Sequence
  Synthetic oligonucleotide
gatcggggagcgctcacgtgagccacatgg

SEQ ID NO: 114528 - DNA, 30 bp, Artificial Sequence
  Synthetic oligonucleotide
tgatgggataacgcgttattggttccatgg

SEQ ID NO: 114529 - DNA, 30 bp, Artificial Sequence
  Synthetic oligonucleotide
aagccaagagcaaaagtaaaagcggcatgg

SEQ ID NO: 114530 - DNA, 30 bp, Artificial Sequence
  Synthetic oligonucleotide
agctcagaggtttaaaccggccgggcatgg

SEQ ID NO: 114531 - DNA, 30 bp, Artificial Sequence
  Synthetic oligonucleotide
gatagttctcaaagtggaatagctgcatgg

SEQ ID NO: 114532 - DNA, 30 bp, Artificial Sequence
  Synthetic oligonucleotide
ttgctgacatagtggtccatggctgcatgg

SEQ ID NO: 114533 - DNA, 30 bp, Artificial Sequence
  Synthetic oligonucleotide
aggctggttcacgatggcattcttgcatgg

SEQ ID NO: 114534 - DNA, 30 bp, Artificial Sequence
  Synthetic oligonucleotide
tacggtgtatgagaaaaacccagatcatgg

SEQ ID NO: 114535 - DNA, 30 bp, Artificial Sequence
  Synthetic oligonucleotide
acacacaggagttgtcctttctcttcatgg

SEQ ID NO: 114536 - DNA, 30 bp, Artificial Sequence
  Synthetic oligonucleotide
caaccgggcacggagcgaacattttcatgg

SEQ ID NO: 114537 - DNA, 30 bp, Artificial Sequence
  Synthetic oligonucleotide
atctggtgcattcagagtgtgggaagatgg

SEQ ID NO: 114538 - DNA, 30 bp, Artificial Sequence
  Synthetic oligonucleotide
ttgtcttaggaagagcaaggtctgagatgg

SEQ ID NO: 114539 - DNA, 30 bp, Artificial Sequence
  Synthetic oligonucleotide
aagcccatacaacagcgccattgaggatgg

SEQ ID NO: 114540 - DNA, 31 bp, Artificial Sequence
  Synthetic oligonucleotide
taaggccgacccacatagtcctttcggatgg

SEQ ID NO: 114541 - DNA, 30 bp, Artificial Sequence
  Synthetic oligonucleotide
aaaagcacgattgtctcaaaaaagggatgg

SEQ ID NO: 114542 - DNA, 30 bp, Artificial Sequence
  Synthetic oligonucleotide
ttgactcaaattcaaaaccgcccgggatgg

SEQ ID NO: 114543 - DNA, 30 bp, Artificial Sequence
  Synthetic oligonucleotide
gactaaaaaccttccgggctagggggatgg

SEQ ID NO: 114544 - DNA, 30 bp, Artificial Sequence
  Synthetic oligonucleotide
ctgtcaacaagagctcgttatttgggatgg

SEQ ID NO: 114545 - DNA, 30 bp, Artificial Sequence
  Synthetic oligonucleotide
gtaaaatagcggggaccgaaggcatgatgg

SEQ ID NO: 114546 - DNA, 30 bp, Artificial Sequence
  Synthetic oligonucleotide
gagagctccggtcctgtcaagagctgatgg

SEQ ID NO: 114547 - DNA, 30 bp, Artificial Sequence
  Synthetic oligonucleotide
cagaattgtagcaaggtgtcgcgctgatgg

SEQ ID NO: 114548 - DNA, 30 bp, Artificial Sequence
  Synthetic oligonucleotide
ggtagaaagtcctcgtaaacaatctgatgg

SEQ ID NO: 114549 - DNA, 30 bp, Artificial Sequence
  Synthetic oligonucleotide
caataacaactagaaggtttgacgtgatgg

SEQ ID NO: 114550 - DNA, 30 bp, Artificial Sequence
  Synthetic oligonucleotide
tagacacgtggttaataggtacaaatatgg

SEQ ID NO: 114551 - DNA, 30 bp, Artificial Sequence
  Synthetic oligonucleotide
attcttacgaaaacaatgacagaaatatgg

SEQ ID NO: 114552 - DNA, 30 bp, Artificial Sequence
  Synthetic oligonucleotide
acatcaattcgcggtgcaatagcaatatgg

SEQ ID NO: 114553 - DNA, 30 bp, Artificial Sequence
  Synthetic oligonucleotide
tcgatacagtattcaacggcctgcatatgg

SEQ ID NO: 114554 - DNA, 30 bp, Artificial Sequence
  Synthetic oligonucleotide
tggagtttatcgaatagtaaagctatatgg

SEQ ID NO: 114555 - DNA, 30 bp, Artificial Sequence
  Synthetic oligonucleotide
gacatatgccgcacgggttaggctatatgg

SEQ ID NO: 114556 - DNA, 30 bp, Artificial Sequence
  Synthetic oligonucleotide
tggaataaaattactaaaattggactatgg

SEQ ID NO: 114557 - DNA, 30 bp, Artificial Sequence
  Synthetic oligonucleotide
caaagatatcataacgtccaatgagtatgg

SEQ ID NO: 114558 - DNA, 30 bp, Artificial Sequence
  Synthetic oligonucleotide
acggcgccaatcaggctacgcgaggtatgg

SEQ ID NO: 114559 - DNA, 30 bp, Artificial Sequence
  Synthetic oligonucleotide
tccacatagaaccggaatatccgggtatgg

SEQ ID NO: 114560 - DNA, 30 bp, Artificial Sequence
  Synthetic oligonucleotide
ttagataccaacgggctgtaacctgtatgg

SEQ ID NO: 114561 - DNA, 30 bp, Artificial Sequence
  Synthetic oligonucleotide
acgcggtttctgcgatagaaagcattatgg

SEQ ID NO: 114562 - DNA, 30 bp, Artificial Sequence
  Synthetic oligonucleotide
tgacgaaagtgtaaagttggttataactgg

SEQ ID NO: 114563 - DNA, 30 bp, Artificial Sequence
  Synthetic oligonucleotide
caatggctgcgaaatcctgtggagcactgg

SEQ ID NO: 114564 - DNA, 30 bp, Artificial Sequence
  Synthetic oligonucleotide
ttcgttaggaaacactactggctggactgg

SEQ ID NO: 114565 - DNA, 30 bp, Artificial Sequence
  Synthetic oligonucleotide
acagtcagtagcacgattggcagatactgg

SEQ ID NO: 114566 - DNA, 30 bp, Artificial Sequence
  Synthetic oligonucleotide
agcatggttggggcttgcatccactactgg

SEQ ID NO: 114567 - DNA, 30 bp, Artificial Sequence
  Synthetic oligonucleotide
aaaccaagaccattaacaattatctactgg

SEQ ID NO: 114568 - DNA, 30 bp, Artificial Sequence
  Synthetic oligonucleotide
aatctgggataggccaataggaagtactgg

SEQ ID NO: 114569 - DNA, 30 bp, Artificial Sequence
  Synthetic oligonucleotide
ggctcgcctcagcccaaaaacttaacctgg

SEQ ID NO: 114570 - DNA, 30 bp, Artificial Sequence
  Synthetic oligonucleotide
agggcagcattaaatgaagcgcagacctgg

SEQ ID NO: 114571 - DNA, 30 bp, Artificial Sequence
  Synthetic oligonucleotide
agagcggacacacctttactatatacctgg

SEQ ID NO: 114572 - DNA, 30 bp, Artificial Sequence
  Synthetic oligonucleotide
tggacgtctcatggtcgcggttatacctgg

SEQ ID NO: 114573 - DNA, 30 bp, Artificial Sequence
  Synthetic oligonucleotide
tctcgaagcatgtagttcgtggaaccctgg

SEQ ID NO: 114574 - DNA, 30 bp, Artificial Sequence
  Synthetic oligonucleotide
taacatggagcggatagagcctaaccctgg

SEQ ID NO: 114575 - DNA, 30 bp, Artificial Sequence
  Synthetic oligonucleotide
ccaatcgatcgaccgtgttaaataccctgg

SEQ ID NO: 114576 - DNA, 30 bp, Artificial Sequence
  Synthetic oligonucleotide
tggtggaatacctaacgggcgtctgcctgg

SEQ ID NO: 114577 - DNA, 30 bp, Artificial Sequence
  Synthetic oligonucleotide
ccacgtacacccggccaaaccgaaagctgg

SEQ ID NO: 114578 - DNA, 30 bp, Artificial Sequence
  Synthetic oligonucleotide
aagtggctatacgcactggtgataagctgg

SEQ ID NO: 114579 - DNA, 31 bp, Artificial Sequence
  Synthetic oligonucleotide
aaacatgacccgagcaaatccggtaagctgg

SEQ ID NO: 114580 - DNA, 30 bp, Artificial Sequence
  Synthetic oligonucleotide
cgaaatacgagtgcacctttatctagctgg

SEQ ID NO: 114581 - DNA, 30 bp, Artificial Sequence
  Synthetic oligonucleotide
cgatggtaatgatacgtaaaaaaacgctgg

SEQ ID NO: 114582 - DNA, 30 bp, Artificial Sequence
  Synthetic oligonucleotide
ggaacttcaacaccgtagtgcgaacgctgg

SEQ ID NO: 114583 - DNA, 30 bp, Artificial Sequence
  Synthetic oligonucleotide
aggttagcatgagcggaccgtgaacgctgg

SEQ ID NO: 114584 - DNA, 30 bp, Artificial Sequence
  Synthetic oligonucleotide
ggccagtgtcatggcttgcttctacgctgg

SEQ ID NO: 114585 - DNA, 30 bp, Artificial Sequence
  Synthetic oligonucleotide
cggtcggccaatcctacacaacgttgctgg

SEQ ID NO: 114586 - DNA, 30 bp, Artificial Sequence
  Synthetic oligonucleotide
gtgtataacttacggagtcggcaaatctgg

SEQ ID NO: 114587 - DNA, 30 bp, Artificial Sequence
  Synthetic oligonucleotide
tataccgaagcctgttggtataggatctgg

SEQ ID NO: 114588 - DNA, 30 bp, Artificial Sequence
  Synthetic oligonucleotide
actcggcttcgtagtgctacatatatctgg

SEQ ID NO: 114589 - DNA, 30 bp, Artificial Sequence
  Synthetic oligonucleotide
gcagacggtctgatatgcgtaaatctctgg

SEQ ID NO: 114590 - DNA, 30 bp, Artificial Sequence
  Synthetic oligonucleotide
tccgggtgtggataggataccgatgtctgg

SEQ ID NO: 114591 - DNA, 30 bp, Artificial Sequence
  Synthetic oligonucleotide
caacttgcctaaggagtcgtcgcgaagtgg

SEQ ID NO: 114592 - DNA, 30 bp, Artificial Sequence
  Synthetic oligonucleotide
cttaataagaggaaaagacaacgtaagtgg

SEQ ID NO: 114593 - DNA, 30 bp, Artificial Sequence
  Synthetic oligonucleotide
agtggcataaatgtttggaactatcagtgg

SEQ ID NO: 114594 - DNA, 30 bp, Artificial Sequence
  Synthetic oligonucleotide
cggggtgtgatggacagcatgcctcagtgg

SEQ ID NO: 114595 - DNA, 30 bp, Artificial Sequence
  Synthetic oligonucleotide
ccaccgaaaaggaccctaaatggtcagtgg

SEQ ID NO: 114596 - DNA, 30 bp, Artificial Sequence
  Synthetic oligonucleotide
ttaattcgggtcagaggtactatagagtgg

SEQ ID NO: 114597 - DNA, 30 bp, Artificial Sequence
  Synthetic oligonucleotide
cagtcggctaaggccagttccgaggagtgg

SEQ ID NO: 114598 - DNA, 30 bp, Artificial Sequence
  Synthetic oligonucleotide
agttaatggcagaaacgttgacatgagtgg

SEQ ID NO: 114599 - DNA, 30 bp, Artificial Sequence
  Synthetic oligonucleotide
gggggacgatgcaggcggatccgatagtgg

SEQ ID NO: 114600 - DNA, 30 bp, Artificial Sequence
  Synthetic oligonucleotide
gatggcctcgacgagggacaggactagtgg

SEQ ID NO: 114601 - DNA, 30 bp, Artificial Sequence
  Synthetic oligonucleotide
atgggcctaagcgcagattgtacgtagtgg

SEQ ID NO: 114602 - DNA, 30 bp, Artificial Sequence
  Synthetic oligonucleotide
agcttgcatgacaatgtcaaccatacgtgg

SEQ ID NO: 114603 - DNA, 30 bp, Artificial Sequence
  Synthetic oligonucleotide
tacatggatcaaagctacataacgccgtgg

SEQ ID NO: 114604 - DNA, 30 bp, Artificial Sequence
  Synthetic oligonucleotide
ggattatagcatattaaggactaagcgtgg

SEQ ID NO: 114605 - DNA, 30 bp, Artificial Sequence
  Synthetic oligonucleotide
tgccggtatacgaagtggatagcagcgtgg

SEQ ID NO: 114606 - DNA, 30 bp, Artificial Sequence
  Synthetic oligonucleotide
gagatctactgtgcgtaacggttagcgtgg

SEQ ID NO: 114607 - DNA, 30 bp, Artificial Sequence
  Synthetic oligonucleotide
cgttaccagacaagaatattgaacgcgtgg

SEQ ID NO: 114608 - DNA, 30 bp, Artificial Sequence
  Synthetic oligonucleotide
atgctcagggaccggtgcaggtaatcgtgg

SEQ ID NO: 114609 - DNA, 30 bp, Artificial Sequence
  Synthetic oligonucleotide
gagtcacgggagtagactggtatatcgtgg

SEQ ID NO: 114610 - DNA, 30 bp, Artificial Sequence
  Synthetic oligonucleotide
ggatccataacacgtagtggtagaaggtgg

SEQ ID NO: 114611 - DNA, 30 bp, Artificial Sequence
  Synthetic oligonucleotide
cacagatgatgacgaagtaattgcaggtgg

SEQ ID NO: 114612 - DNA, 30 bp, Artificial Sequence
  Synthetic oligonucleotide
aggacaacagggctcttggcgactaggtgg

SEQ ID NO: 114613 - DNA, 30 bp, Artificial Sequence
  Synthetic oligonucleotide
tacacgcactagtcaaaacagcgtaggtgg

SEQ ID NO: 114614 - DNA, 30 bp, Artificial Sequence
  Synthetic oligonucleotide
aggatcaccatgcattagtgaaatcggtgg

SEQ ID NO: 114615 - DNA, 30 bp, Artificial Sequence
  Synthetic oligonucleotide
gtcatagtggcccactagtgataagggtgg

SEQ ID NO: 114616 - DNA, 30 bp, Artificial Sequence
  Synthetic oligonucleotide
ttagatcgggaacctgaagatcgagggtgg

SEQ ID NO: 114617 - DNA, 30 bp, Artificial Sequence
  Synthetic oligonucleotide
agcatatttggctatcaagcaggcgggtgg

SEQ ID NO: 114618 - DNA, 30 bp, Artificial Sequence
  Synthetic oligonucleotide
tcgtgttggcgtgcaggggtgctcgggtgg

SEQ ID NO: 114619 - DNA, 30 bp, Artificial Sequence
  Synthetic oligonucleotide
gggaacgggatatctcaacgacatgggtgg

SEQ ID NO: 114620 - DNA, 30 bp, Artificial Sequence
  Synthetic oligonucleotide
agcagctagcgttggtcatcccagtggtgg

SEQ ID NO: 114621 - DNA, 30 bp, Artificial Sequence
  Synthetic oligonucleotide
cactcagagaagtaacgactcttcatgtgg

SEQ ID NO: 114622 - DNA, 30 bp, Artificial Sequence
  Synthetic oligonucleotide
acctcactgttcaccccactggagatgtgg

SEQ ID NO: 114623 - DNA, 30 bp, Artificial Sequence
  Synthetic oligonucleotide
gcagttagaacaccgtgcaactaactgtgg

SEQ ID NO: 114624 - DNA, 30 bp, Artificial Sequence
  Synthetic oligonucleotide
ccgagtcccgaacgcaaggaagacctgtgg

SEQ ID NO: 114625 - DNA, 30 bp, Artificial Sequence
  Synthetic oligonucleotide
tacttacccggaatacaaagagggctgtgg

SEQ ID NO: 114626 - DNA, 30 bp, Artificial Sequence
  Synthetic oligonucleotide
tcctgtcctggtggagaatgagctctgtgg

SEQ ID NO: 114627 - DNA, 30 bp, Artificial Sequence
  Synthetic oligonucleotide
tgataaacgtagacctaaaggtctctgtgg

SEQ ID NO: 114628 - DNA, 30 bp, Artificial Sequence
  Synthetic oligonucleotide
atgattgggtgcgcggcaaagcatgtgtgg

SEQ ID NO: 114629 - DNA, 30 bp, Artificial Sequence
  Synthetic oligonucleotide
tccgtgaataaagcaacagggcacttgtgg

SEQ ID NO: 114630 - DNA, 30 bp, Artificial Sequence
  Synthetic oligonucleotide
tgatctaacgaggggtccattgggttgtgg

SEQ ID NO: 114631 - DNA, 30 bp, Artificial Sequence
  Synthetic oligonucleotide
agccgcataattaatctaagagagaattgg

SEQ ID NO: 114632 - DNA, 30 bp, Artificial Sequence
  Synthetic oligonucleotide
atgggatactcgttgaaatcgagacattgg

SEQ ID NO: 114633 - DNA, 30 bp, Artificial Sequence
  Synthetic oligonucleotide
gtcatcaattgattgagatagtgacattgg

SEQ ID NO: 114634 - DNA, 30 bp, Artificial Sequence
  Synthetic oligonucleotide
tcgctatgatagcaacaggagctacattgg

SEQ ID NO: 114635 - DNA, 30 bp, Artificial Sequence
  Synthetic oligonucleotide
ggacattggaatggcgctcagatccattgg

SEQ ID NO: 114636 - DNA, 30 bp, Artificial Sequence
  Synthetic oligonucleotide
ttaattgacatgtgaagcagactagattgg

SEQ ID NO: 114637 - DNA, 30 bp, Artificial Sequence
  Synthetic oligonucleotide
gtagatctgatttgatcgcgtagggattgg

SEQ ID NO: 114638 - DNA, 30 bp, Artificial Sequence
  Synthetic oligonucleotide
aggggtttccacgggatcaaaaatgattgg

SEQ ID NO: 114639 - DNA, 30 bp, Artificial Sequence
  Synthetic oligonucleotide
gtgtctgcagactgtggggatgatgattgg

SEQ ID NO: 114640 - DNA, 30 bp, Artificial Sequence
  Synthetic oligonucleotide
ggggcctgaaactttagtgcaaattattgg

SEQ ID NO: 114641 - DNA, 30 bp, Artificial Sequence
  Synthetic oligonucleotide
acacgcgcctcctcggagagaagaccttgg

SEQ ID NO: 114642 - DNA, 30 bp, Artificial Sequence
  Synthetic oligonucleotide
acatatcaaagttagtttcagttagcttgg

SEQ ID NO: 114643 - DNA, 30 bp, Artificial Sequence
  Synthetic oligonucleotide
cgaataccaggtaggacctttggtgcttgg

SEQ ID NO: 114644 - DNA, 30 bp, Artificial Sequence
  Synthetic oligonucleotide
acaaggacgtgggcgtgtttgtttgcttgg

SEQ ID NO: 114645 - DNA, 30 bp, Artificial Sequence
  Synthetic oligonucleotide
gcgcaaaacatgtagaggatgttaagttgg

SEQ ID NO: 114646 - DNA, 30 bp, Artificial Sequence
  Synthetic oligonucleotide
taatgctagttcttggaggaatggcgttgg

SEQ ID NO: 114647 - DNA, 30 bp, Artificial Sequence
  Synthetic oligonucleotide
tcagtggatagggaaatgcccgctcgttgg

SEQ ID NO: 114648 - DNA, 30 bp, Artificial Sequence
  Synthetic oligonucleotide
atcacaggatatgggcttgttggtcgttgg

SEQ ID NO: 114649 - DNA, 30 bp, Artificial Sequence
  Synthetic oligonucleotide
caaaaatgtcacgagaaaaggaaaggttgg

SEQ ID NO: 114650 - DNA, 30 bp, Artificial Sequence
  Synthetic oligonucleotide
tggaggcggtttacgacggggacaggttgg

SEQ ID NO: 114651 - DNA, 30 bp, Artificial Sequence
  Synthetic oligonucleotide
gaaggtgtggctggtgatatgcagggttgg

SEQ ID NO: 114652 - DNA, 30 bp, Artificial Sequence
  Synthetic oligonucleotide
ggaactaggatgaccctgcacgctggttgg

SEQ ID NO: 114653 - DNA, 30 bp, Artificial Sequence
  Synthetic oligonucleotide
tgatcgatacttcattgtttaacgtgttgg

SEQ ID NO: 114654 - DNA, 30 bp, Artificial Sequence
  Synthetic oligonucleotide
aacagtccggttgcttccgggcacatttgg

SEQ ID NO: 114655 - DNA, 30 bp, Artificial Sequence
  Synthetic oligonucleotide
cccgggtgacatggtgacatgtacatttgg

SEQ ID NO: 114656 - DNA, 30 bp, Artificial Sequence
  Synthetic oligonucleotide
tgtagaaggtaccacgggttatccatttgg

SEQ ID NO: 114657 - DNA, 30 bp, Artificial Sequence
  Synthetic oligonucleotide
ttcctgctcaagaaacccgcaggcatttgg

SEQ ID NO: 114658 - DNA, 30 bp, Artificial Sequence
  Synthetic oligonucleotide
gagatcatgggtgagaagtagctcatttgg

SEQ ID NO: 114659 - DNA, 30 bp, Artificial Sequence
  Synthetic oligonucleotide
agattccaagcgaacatagacaggatttgg

SEQ ID NO: 114660 - DNA, 30 bp, Artificial Sequence
  Synthetic oligonucleotide
gactgtaaacgagaggttaacactatttgg

SEQ ID NO: 114661 - DNA, 30 bp, Artificial Sequence
  Synthetic oligonucleotide
gaggatccggccgaaaaagtaaagctttgg

SEQ ID NO: 114662 - DNA, 30 bp, Artificial Sequence
  Synthetic oligonucleotide
gcaaagccactaacaacaacggatctttgg

SEQ ID NO: 114663 - DNA, 30 bp, Artificial Sequence
  Synthetic oligonucleotide
gggtggttattagacaggattgatctttgg

SEQ ID NO: 114664 - DNA, 30 bp, Artificial Sequence
  Synthetic oligonucleotide
gtaccgagtggacgtcttttaagcgtttgg

SEQ ID NO: 114665 - DNA, 30 bp, Artificial Sequence
  Synthetic oligonucleotide
gctgctgagaagttcgttctggatgtttgg

SEQ ID NO: 114666 - DNA, 30 bp, Artificial Sequence
  Synthetic oligonucleotide
gataagggatacagagtatacgcattttgg

SEQ ID NO: 114667 - DNA, 30 bp, Artificial Sequence
  Synthetic oligonucleotide
ggagcagacttgtcccattcacgattttgg

SEQ ID NO: 114668 - DNA, 30 bp, Artificial Sequence
  Synthetic oligonucleotide
cggctttaggcaagaccatatggcttttgg

SEQ ID NO: 114669 - DNA, 30 bp, Artificial Sequence
  Synthetic oligonucleotide
acccaagggactacaaggagactcttttgg

SEQ ID NO: 114670 - DNA, 30 bp, Artificial Sequence
  Synthetic oligonucleotide
ccagtctcccaagggtcgagaaaaaaaatg

SEQ ID NO: 114671 - DNA, 30 bp, Artificial Sequence
  Synthetic oligonucleotide
accaaactgtcccaaggatcagcgaaaatg

SEQ ID NO: 114672 - DNA, 30 bp, Artificial Sequence
  Synthetic oligonucleotide
agccgatttcgtgtggacggtaggaaaatg

SEQ ID NO: 114673 - DNA, 30 bp, Artificial Sequence
  Synthetic oligonucleotide
ggttgtgcgatagacagtagtgcgcaaatg

SEQ ID NO: 114674 - DNA, 30 bp, Artificial Sequence
  Synthetic oligonucleotide
tatgtggcaagttatatgagtactcaaatg

SEQ ID NO: 114675 - DNA, 30 bp, Artificial Sequence
  Synthetic oligonucleotide
cccaagatacagtgtgcagctcgtcaaatg

SEQ ID NO: 114676 - DNA, 30 bp, Artificial Sequence
  Synthetic oligonucleotide
acgatgatctcactttcggtcgttcaaatg

SEQ ID NO: 114677 - DNA, 30 bp, Artificial Sequence
  Synthetic oligonucleotide
ggaaagatacactaagttcgaacagaaatg

SEQ ID NO: 114678 - DNA, 30 bp, Artificial Sequence
  Synthetic oligonucleotide
agtcgacgactcgctcgatgaatagaaatg

SEQ ID NO: 114679 - DNA, 30 bp, Artificial Sequence
  Synthetic oligonucleotide
cagcacgggcgcggtatgtccatagaaatg

SEQ ID NO: 114680 - DNA, 30 bp, Artificial Sequence
  Synthetic oligonucleotide
actagattatgaaggaatagtggcgaaatg

SEQ ID NO: 114681 - DNA, 30 bp, Artificial Sequence
  Synthetic oligonucleotide
taccatagtaggttcaccgctgaggaaatg

SEQ ID NO: 114682 - DNA, 30 bp, Artificial Sequence
  Synthetic oligonucleotide
ggcttcgaaatcagtcatgaataataaatg

SEQ ID NO: 114683 - DNA, 30 bp, Artificial Sequence
  Synthetic oligonucleotide
tcggctgggggagctgcaccattataaatg

SEQ ID NO: 114684 - DNA, 30 bp, Artificial Sequence
  Synthetic oligonucleotide
cgaactcggtttcctagtttgagctaaatg

SEQ ID NO: 114685 - DNA, 30 bp, Artificial Sequence
  Synthetic oligonucleotide
gctaggactcaggactcgtgtttgtaaatg

SEQ ID NO: 114686 - DNA, 30 bp, Artificial Sequence
  Synthetic oligonucleotide
acgtaaacgatgcgagcattaccaacaatg

SEQ ID NO: 114687 - DNA, 30 bp, Artificial Sequence
  Synthetic oligonucleotide
ggtcaccgaacccggtcggctagaacaatg

SEQ ID NO: 114688 - DNA, 30 bp, Artificial Sequence
  Synthetic oligonucleotide
ataggaagagaggcataaaatgctacaatg

SEQ ID NO: 114689 - DNA, 30 bp, Artificial Sequence
  Synthetic oligonucleotide
tcaggaaaaggtgttctatacggtacaatg

SEQ ID NO: 114690 - DNA, 30 bp, Artificial Sequence
  Synthetic oligonucleotide
ccacgctgggcgctaatcaaccggccaatg

SEQ ID NO: 114691 - DNA, 30 bp, Artificial Sequence
  Synthetic oligonucleotide
atagccagaaatgatatcgtctggccaatg

SEQ ID NO: 114692 - DNA, 30 bp, Artificial Sequence
  Synthetic oligonucleotide
agcgggcaaggctttattcaaaccgcaatg

SEQ ID NO: 114693 - DNA, 30 bp, Artificial Sequence
  Synthetic oligonucleotide
cggaagggtcgtatcatggatggatcaatg

SEQ ID NO: 114694 - DNA, 30 bp, Artificial Sequence
  Synthetic oligonucleotide
tagtgtgtgcgccggaacatagcttcaatg

SEQ ID NO: 114695 - DNA, 30 bp, Artificial Sequence
  Synthetic oligonucleotide
gtggtgattgttccgccgtcaataagaatg

SEQ ID NO: 114696 - DNA, 30 bp, Artificial Sequence
  Synthetic oligonucleotide
tcgaagtcaagagttctacaggggagaatg

SEQ ID NO: 114697 - DNA, 30 bp, Artificial Sequence
  Synthetic oligonucleotide
tgaggagaaagaggttggaattctagaatg

SEQ ID NO: 114698 - DNA, 30 bp, Artificial Sequence
  Synthetic oligonucleotide
tagctggcgtagcaaaactgtaaacgaatg

SEQ ID NO: 114699 - DNA, 30 bp, Artificial Sequence
  Synthetic oligonucleotide
agtgatatagatgaggtcaagtcacgaatg

SEQ ID NO: 114700 - DNA, 30 bp, Artificial Sequence
  Synthetic oligonucleotide
aaccatgtgagggaacgtgctagaggaatg

SEQ ID NO: 114701 - DNA, 30 bp, Artificial Sequence
  Synthetic oligonucleotide
tcacgcgtatgacaatatttcgagggaatg

SEQ ID NO: 114702 - DNA, 30 bp, Artificial Sequence
  Synthetic oligonucleotide
ggtcgcaacgtatactagttcaatggaatg

SEQ ID NO: 114703 - DNA, 30 bp, Artificial Sequence
  Synthetic oligonucleotide
actcatcttacatcgtccagaagtggaatg

SEQ ID NO: 114704 - DNA, 30 bp, Artificial Sequence
  Synthetic oligonucleotide
cagaaaggggcgcctaacatttagtgaatg

SEQ ID NO: 114705 - DNA, 30 bp, Artificial Sequence
  Synthetic oligonucleotide
ggtcgactcctcgagggtgcggggtgaatg

SEQ ID NO: 114706 - DNA, 30 bp, Artificial Sequence
  Synthetic oligonucleotide
gaacctacgagatgttcagcttaaataatg

SEQ ID NO: 114707 - DNA, 30 bp, Artificial Sequence
  Synthetic oligonucleotide
ggaaagtagtggatcggtgaagacctaatg

SEQ ID NO: 114708 - DNA, 30 bp, Artificial Sequence
  Synthetic oligonucleotide
tagcggcaattagatcgccgcctgctaatg

SEQ ID NO: 114709 - DNA, 30 bp, Artificial Sequence
  Synthetic oligonucleotide
cgaaggccagactgcaacactagattaatg

SEQ ID NO: 114710 - DNA, 30 bp, Artificial Sequence
  Synthetic oligonucleotide
gatgtttggatccatttaacgtgcttaatg

SEQ ID NO: 114711 - DNA, 30 bp, Artificial Sequence
  Synthetic oligonucleotide
cctaataccggattcgcaaatacgttaatg

SEQ ID NO: 114712 - DNA, 30 bp, Artificial Sequence
  Synthetic oligonucleotide
tggcacttggcgagtagggccaggttaatg

SEQ ID NO: 114713 - DNA, 30 bp, Artificial Sequence
  Synthetic oligonucleotide
ggaataacgtgcgcgacagaaatgttaatg

SEQ ID NO: 114714 - DNA, 30 bp, Artificial Sequence
  Synthetic oligonucleotide
aaagggcatacttgctaagagtcaaacatg

SEQ ID NO: 114715 - DNA, 30 bp, Artificial Sequence
  Synthetic oligonucleotide
gttagggcaagtgttaggcttaggaacatg

SEQ ID NO: 114716 - DNA, 30 bp, Artificial Sequence
  Synthetic oligonucleotide
tggagctgatcaacacagtcgcttaacatg

SEQ ID NO: 114717 - DNA, 30 bp, Artificial Sequence
  Synthetic oligonucleotide
aaagcgacactgccggcgaccctccacatg

SEQ ID NO: 114718 - DNA, 30 bp, Artificial Sequence
  Synthetic oligonucleotide
aaaacgcagtaagttaacggaaagcacatg

SEQ ID NO: 114719 - DNA, 30 bp, Artificial Sequence
  Synthetic oligonucleotide
cacaaggcgaaacagtgttctgttcacatg

SEQ ID NO: 114720 - DNA, 30 bp, Artificial Sequence
  Synthetic oligonucleotide
aaaaaaatatcagaatttcgcatcgacatg

SEQ ID NO: 114721 - DNA, 30 bp, Artificial Sequence
  Synthetic oligonucleotide
agggctcgataattaagttaagcggacatg

SEQ ID NO: 114722 - DNA, 30 bp, Artificial Sequence
  Synthetic oligonucleotide
tggcaccgacttatgcctgcctcggacatg

SEQ ID NO: 114723 - DNA, 30 bp, Artificial Sequence
  Synthetic oligonucleotide
ggtacacactcaggtatcctagcttacatg

SEQ ID NO: 114724 - DNA, 30 bp, Artificial Sequence
  Synthetic oligonucleotide
ggtgccacatgcgtaggaacagaaaccatg

SEQ ID NO: 114725 - DNA, 30 bp, Artificial Sequence
  Synthetic oligonucleotide
cattggatcaacatcatgaaccccaccatg

SEQ ID NO: 114726 - DNA, 30 bp, Artificial Sequence
  Synthetic oligonucleotide
cgtaaatagcggtagttgaataggaccatg

SEQ ID NO: 114727 - DNA, 30 bp, Artificial Sequence
  Synthetic oligonucleotide
tcaaacacaactctgaatcaagaacccatg

SEQ ID NO: 114728 - DNA, 30 bp, Artificial Sequence
  Synthetic oligonucleotide
ggagattagaccctgtgtgtatggcccatg

SEQ ID NO: 114729 - DNA, 30 bp, Artificial Sequence
  Synthetic oligonucleotide
gtttaaaaggacttaggaagtttgcccatg

SEQ ID NO: 114730 - DNA, 30 bp, Artificial Sequence
  Synthetic oligonucleotide
cccagtatgggtattgagtccagcgccatg

SEQ ID NO: 114731 - DNA, 30 bp, Artificial Sequence
  Synthetic oligonucleotide
gcagggtcagttcccacacctttggccatg

SEQ ID NO: 114732 - DNA, 30 bp, Artificial Sequence
  Synthetic oligonucleotide
ggcgaattgcatgcatgtgtggcatccatg

SEQ ID NO: 114733 - DNA, 30 bp, Artificial Sequence
  Synthetic oligonucleotide
gcttcaccgaagcggtacaacgcaagcatg

SEQ ID NO: 114734 - DNA, 30 bp, Artificial Sequence
  Synthetic oligonucleotide
ctgcttagctttacaataatgaacagcatg

SEQ ID NO: 114735 - DNA, 30 bp, Artificial Sequence
  Synthetic oligonucleotide
agggccgttagcgcggtcctcgtcagcatg

SEQ ID NO: 114736 - DNA, 30 bp, Artificial Sequence
  Synthetic oligonucleotide
ggcttgggaagacatgaatcaaggcgcatg

SEQ ID NO: 114737 - DNA, 30 bp, Artificial Sequence
  Synthetic oligonucleotide
cttcaaccttaagagttcacaataggcatg

SEQ ID NO: 114738 - DNA, 30 bp, Artificial Sequence
  Synthetic oligonucleotide
ctgtgcgtcgaaatatgaccatacggcatg

SEQ ID NO: 114739 - DNA, 30 bp, Artificial Sequence
  Synthetic oligonucleotide
aagactcggggaccttgtataggcggcatg

SEQ ID NO: 114740 - DNA, 30 bp, Artificial Sequence
  Synthetic oligonucleotide
tccttaagtaccagtccttggtagggcatg

SEQ ID NO: 114741 - DNA, 30 bp, Artificial Sequence
  Synthetic oligonucleotide
ttcaacatcaatctcgtggtccacatcatg

SEQ ID NO: 114742 - DNA, 30 bp, Artificial Sequence
  Synthetic oligonucleotide
atgtcactggatactcgcctcaccatcatg

SEQ ID NO: 114743 - DNA, 30 bp, Artificial Sequence
  Synthetic oligonucleotide
agtctcaccctggtaaccaaactcatcatg

SEQ ID NO: 114744 - DNA, 30 bp, Artificial Sequence
  Synthetic oligonucleotide
aatggaagttccatatacccgtatatcatg

SEQ ID NO: 114745 - DNA, 30 bp, Artificial Sequence
  Synthetic oligonucleotide
cacagggacctcaccatcgtataggtcatg

SEQ ID NO: 114746 - DNA, 30 bp, Artificial Sequence
  Synthetic oligonucleotide
caacacatatttattcaccagctggtcatg

SEQ ID NO: 114747 - DNA, 30 bp, Artificial Sequence
  Synthetic oligonucleotide
tttgcgatgaatatatatgtcggaaagatg

SEQ ID NO: 114748 - DNA, 30 bp, Artificial Sequence
  Synthetic oligonucleotide
gctgtgacgtgcctgcattacaccaagatg

SEQ ID NO: 114749 - DNA, 30 bp, Artificial Sequence
  Synthetic oligonucleotide
tggtcgcagtgtcggtgtagcatcaagatg

SEQ ID NO: 114750 - DNA, 30 bp, Artificial Sequence
  Synthetic oligonucleotide
actgacatccaacgggggcacgagaagatg

SEQ ID NO: 114751 - DNA, 30 bp, Artificial Sequence
  Synthetic oligonucleotide
cctagtgtccaattacacacgagtaagatg

SEQ ID NO: 114752 - DNA, 30 bp, Artificial Sequence
  Synthetic oligonucleotide
ccgagtagctgactcccgatggtacagatg

SEQ ID NO: 114753 - DNA, 30 bp, Artificial Sequence
  Synthetic oligonucleotide
gcgtggattattgtggagttaccccagatg

SEQ ID NO: 114754 - DNA, 30 bp, Artificial Sequence
  Synthetic oligonucleotide
gaagtctccacaaaaaagtgtgctcagatg

SEQ ID NO: 114755 - DNA, 30 bp, Artificial Sequence
  Synthetic oligonucleotide
gacgcggggttatggcctgtatttcagatg

SEQ ID NO: 114756 - DNA, 30 bp, Artificial Sequence
  Synthetic oligonucleotide
tgaataccagaggcaaattcaatagagatg

SEQ ID NO: 114757 - DNA, 30 bp, Artificial Sequence
  Synthetic oligonucleotide
tagtctctcgtaaggccgccaaaggagatg

SEQ ID NO: 114758 - DNA, 30 bp, Artificial Sequence
  Synthetic oligonucleotide
cggggacgtgtacacgagtcggactagatg

SEQ ID NO: 114759 - DNA, 30 bp, Artificial Sequence
  Synthetic oligonucleotide
cacgccggcatgatagcaccataaacgatg

SEQ ID NO: 114760 - DNA, 30 bp, Artificial Sequence
  Synthetic oligonucleotide
ttcggtcatcgcactcgcgaaccaacgatg

SEQ ID NO: 114761 - DNA, 30 bp, Artificial Sequence
  Synthetic oligonucleotide
gccggtcactgctagcgctaacagacgatg

SEQ ID NO: 114762 - DNA, 30 bp, Artificial Sequence
  Synthetic oligonucleotide
tgtagtaggccaatagtaactcctacgatg

SEQ ID NO: 114763 - DNA, 30 bp, Artificial Sequence
  Synthetic oligonucleotide
cggtataaggcaaatcaggggagcccgatg

SEQ ID NO: 114764 - DNA, 30 bp, Artificial Sequence
  Synthetic oligonucleotide
ccggactcggcaaaacattacagtccgatg

SEQ ID NO: 114765 - DNA, 30 bp, Artificial Sequence
  Synthetic oligonucleotide
aaggggtcatgacgtgacagggcagcgatg

SEQ ID NO: 114766 - DNA, 30 bp, Artificial Sequence
  Synthetic oligonucleotide
accactcggtagcgtatgtatatagcgatg

SEQ ID NO: 114767 - DNA, 30 bp, Artificial Sequence
  Synthetic oligonucleotide
ggcactagtccaacccaataccgctcgatg

SEQ ID NO: 114768 - DNA, 30 bp, Artificial Sequence
  Synthetic oligonucleotide
gtaccagccgtcttgatcagtggctcgatg

SEQ ID NO: 114769 - DNA, 30 bp, Artificial Sequence
  Synthetic oligonucleotide
aggcagggatcgtagttgagacagtcgatg

SEQ ID NO: 114770 - DNA, 30 bp, Artificial Sequence
  Synthetic oligonucleotide
ccgtgttctcaagatacgacaacgtcgatg

SEQ ID NO: 114771 - DNA, 30 bp, Artificial Sequence
  Synthetic oligonucleotide
atattgggatataagggccaatgttcgatg

SEQ ID NO: 114772 - DNA, 30 bp, Artificial Sequence
  Synthetic oligonucleotide
catgtatcatgcaaaatttatctttcgatg

SEQ ID NO: 114773 - DNA, 30 bp, Artificial Sequence
  Synthetic oligonucleotide
tgatcgacagagccgggcaacaccaggatg

SEQ ID NO: 114774 - DNA, 30 bp, Artificial Sequence
  Synthetic oligonucleotide
ttcccgaggtgaacgaaacattagaggatg

SEQ ID NO: 114775 - DNA, 30 bp, Artificial Sequence
  Synthetic oligonucleotide
aagggcagacgtaactgacattggcggatg

SEQ ID NO: 114776 - DNA, 30 bp, Artificial Sequence
  Synthetic oligonucleotide
gaaaagagggggctggtccaaaaatggatg

SEQ ID NO: 114777 - DNA, 30 bp, Artificial Sequence
  Synthetic oligonucleotide
atggagggctcccgcgggggaacatggatg

SEQ ID NO: 114778 - DNA, 30 bp, Artificial Sequence
  Synthetic oligonucleotide
atcctgatctgcaattacagctcatggatg

SEQ ID NO: 114779 - DNA, 30 bp, Artificial Sequence
  Synthetic oligonucleotide
gggggtgcatagcggcggaacacgtggatg

SEQ ID NO: 114780 - DNA, 30 bp, Artificial Sequence
  Synthetic oligonucleotide
ttacgcgaatctgaaagcagtgcaatgatg

SEQ ID NO: 114781 - DNA, 30 bp, Artificial Sequence
  Synthetic oligonucleotide
cccagcaaggagccagatttcaacatgatg

SEQ ID NO: 114782 - DNA, 30 bp, Artificial Sequence
  Synthetic oligonucleotide
taagtcgtgcgaaggttagcctatatgatg

SEQ ID NO: 114783 - DNA, 30 bp, Artificial Sequence
  Synthetic oligonucleotide
gtctccggatacactatcccagctatgatg

SEQ ID NO: 114784 - DNA, 30 bp, Artificial Sequence
  Synthetic oligonucleotide
agggagtgcgtgaccttgcattgactgatg

SEQ ID NO: 114785 - DNA, 30 bp, Artificial Sequence
  Synthetic oligonucleotide
agctcagttagagcggtgtctggcctgatg

SEQ ID NO: 114786 - DNA, 30 bp, Artificial Sequence
  Synthetic oligonucleotide
ccaatacttagagttagtttccatgtgatg

SEQ ID NO: 114787 - DNA, 30 bp, Artificial Sequence
  Synthetic oligonucleotide
gcgcatcgtggccgccacccaagattgatg

SEQ ID NO: 114788 - DNA, 30 bp, Artificial Sequence
  Synthetic oligonucleotide
gaagattccgggattggtgtccgtttgatg

SEQ ID NO: 114789 - DNA, 30 bp, Artificial Sequence
  Synthetic oligonucleotide
taccggtaacatcacgcatcaaaaaatatg

SEQ ID NO: 114790 - DNA, 30 bp, Artificial Sequence
  Synthetic oligonucleotide
tatatgtaatggtgaacgacgagaaatatg

SEQ ID NO: 114791 - DNA, 30 bp, Artificial Sequence
  Synthetic oligonucleotide
tacacgacgtcaccgcacgctagtaatatg

SEQ ID NO: 114792 - DNA, 30 bp, Artificial Sequence
  Synthetic oligonucleotide
acggcattaggtaggcttctaacacatatg

SEQ ID NO: 114793 - DNA, 30 bp, Artificial Sequence
  Synthetic oligonucleotide
cagacccggcaaattcatatacatcatatg

SEQ ID NO: 114794 - DNA, 30 bp, Artificial Sequence
  Synthetic oligonucleotide
gttggagacttaggcgcgttaatagatatg

SEQ ID NO: 114795 - DNA, 30 bp, Artificial Sequence
  Synthetic oligonucleotide
cggaacctttataggtgccgagaggatatg

SEQ ID NO: 114796 - DNA, 30 bp, Artificial Sequence
  Synthetic oligonucleotide
tgtctactgaaagaactcataggggatatg

SEQ ID NO: 114797 - DNA, 30 bp, Artificial Sequence
  Synthetic oligonucleotide
tgataacgtgtttctggataaaatgatatg

SEQ ID NO: 114798 - DNA, 30 bp, Artificial Sequence
  Synthetic oligonucleotide
tcaattgtctaagagtattcacatgatatg

SEQ ID NO: 114799 - DNA, 30 bp, Artificial Sequence
  Synthetic oligonucleotide
tcaaccctgccggttgcataagctgatatg

SEQ ID NO: 114800 - DNA, 30 bp, Artificial Sequence
  Synthetic oligonucleotide
gcgacgaaaaagcgtgatcaacgatatatg

SEQ ID NO: 114801 - DNA, 30 bp, Artificial Sequence
  Synthetic oligonucleotide
acttgtccctcggaacgactaatctatatg

SEQ ID NO: 114802 - DNA, 30 bp, Artificial Sequence
  Synthetic oligonucleotide
ggcgccgctgcgttcaggggcctctatatg

SEQ ID NO: 114803 - DNA, 30 bp, Artificial Sequence
  Synthetic oligonucleotide
tatcattgagcacagtacgtcccgtatatg

SEQ ID NO: 114804 - DNA, 30 bp, Artificial Sequence
  Synthetic oligonucleotide
taaggttcgaggccggcgacccaaactatg

SEQ ID NO: 114805 - DNA, 30 bp, Artificial Sequence
  Synthetic oligonucleotide
agttagatggaataacccacatctactatg

SEQ ID NO: 114806 - DNA, 30 bp, Artificial Sequence
  Synthetic oligonucleotide
gactaaatcaggaacaggtagaaacctatg

SEQ ID NO: 114807 - DNA, 30 bp, Artificial Sequence
  Synthetic oligonucleotide
ggtgggaatggtgcttttcgtttacctatg

SEQ ID NO: 114808 - DNA, 30 bp, Artificial Sequence
  Synthetic oligonucleotide
acatgaacttagtaaagtagcgtgcctatg

SEQ ID NO: 114809 - DNA, 30 bp, Artificial Sequence
  Synthetic oligonucleotide
tgtgccccgaggtaaaagaagggtcctatg

SEQ ID NO: 114810 - DNA, 30 bp, Artificial Sequence
  Synthetic oligonucleotide
agtgatggtagtccgtcccgggaagctatg

SEQ ID NO: 114811 - DNA, 30 bp, Artificial Sequence
  Synthetic oligonucleotide
catggtcaatttcagagcgtaatagctatg

SEQ ID NO: 114812 - DNA, 30 bp, Artificial Sequence
  Synthetic oligonucleotide
gccttggattggacttgagttctggctatg

SEQ ID NO: 114813 - DNA, 30 bp, Artificial Sequence
  Synthetic oligonucleotide
acaggggcctgcgtaccctacaaatctatg

SEQ ID NO: 114814 - DNA, 30 bp, Artificial Sequence
  Synthetic oligonucleotide
taatgacgaattcaggcctagaaatctatg

SEQ ID NO: 114815 - DNA, 30 bp, Artificial Sequence
  Synthetic oligonucleotide
acctgaaggtttctaaagaaagtatctatg

SEQ ID NO: 114816 - DNA, 30 bp, Artificial Sequence
  Synthetic oligonucleotide
gttgaggatcagcgacggagagagtctatg

SEQ ID NO: 114817 - DNA, 30 bp, Artificial Sequence
  Synthetic oligonucleotide
ccttgttcccaatcgatacgacatagtatg

SEQ ID NO: 114818 - DNA, 30 bp, Artificial Sequence
  Synthetic oligonucleotide
cacgcagagtgtgcccacattgatagtatg

SEQ ID NO: 114819 - DNA, 30 bp, Artificial Sequence
  Synthetic oligonucleotide
tacagtgtaccatgtagcgaaactagtatg

SEQ ID NO: 114820 - DNA, 30 bp, Artificial Sequence
  Synthetic oligonucleotide
actattgtgcaatcataaagcgaacgtatg

SEQ ID NO: 114821 - DNA, 30 bp, Artificial Sequence
  Synthetic oligonucleotide
aagacgggtctcgacggtctacgaggtatg

SEQ ID NO: 114822 - DNA, 30 bp, Artificial Sequence
  Synthetic oligonucleotide
ctgccactgacttggggcgggaacggtatg

SEQ ID NO: 114823 - DNA, 30 bp, Artificial Sequence
  Synthetic oligonucleotide
gtcttaagaataagaatgagccacggtatg

SEQ ID NO: 114824 - DNA, 30 bp, Artificial Sequence
  Synthetic oligonucleotide
agacctccacactagttactattcggtatg

SEQ ID NO: 114825 - DNA, 30 bp, Artificial Sequence
  Synthetic oligonucleotide
aggaaggccttcatgtccgaggaatgtatg

SEQ ID NO: 114826 - DNA, 30 bp, Artificial Sequence
  Synthetic oligonucleotide
acctggtacatggcgaatggttactgtatg

SEQ ID NO: 114827 - DNA, 30 bp, Artificial Sequence
  Synthetic oligonucleotide
ccactcgtgcggtcctggtgttccattatg

SEQ ID NO: 114828 - DNA, 30 bp, Artificial Sequence
  Synthetic oligonucleotide
gactcgctaacacttactcaggcgattatg

SEQ ID NO: 114829 - DNA, 30 bp, Artificial Sequence
  Synthetic oligonucleotide
tggccagggtaaccgccgaattctcttatg

SEQ ID NO: 114830 - DNA, 30 bp, Artificial Sequence
  Synthetic oligonucleotide
aggtatccaattgagtatttacgatttatg

SEQ ID NO: 114831 - DNA, 30 bp, Artificial Sequence
  Synthetic oligonucleotide
ggacgctgaaaagacaggtgagggtttatg

SEQ ID NO: 114832 - DNA, 30 bp, Artificial Sequence
  Synthetic oligonucleotide
gagggctgaccaacgccaagttacaaactg

SEQ ID NO: 114833 - DNA, 31 bp, Artificial Sequence
  Synthetic oligonucleotide
tggatttgtatgttttcagccaagcaaactg

SEQ ID NO: 114834 - DNA, 30 bp, Artificial Sequence
  Synthetic oligonucleotide
ttctgatggatgaggtgccgatcgaaactg

SEQ ID NO: 114835 - DNA, 30 bp, Artificial Sequence
  Synthetic oligonucleotide
acaattaagtcagcagcctggcggaaactg

SEQ ID NO: 114836 - DNA, 30 bp, Artificial Sequence
  Synthetic oligonucleotide
agctgacgcatacatgagaaggctaaactg

SEQ ID NO: 114837 - DNA, 30 bp, Artificial Sequence
  Synthetic oligonucleotide
aggcaatatgccttagcatgtgcacaactg

SEQ ID NO: 114838 - DNA, 30 bp, Artificial Sequence
  Synthetic oligonucleotide
agaccatgcctctagtgctcgggacaactg

SEQ ID NO: 114839 - DNA, 30 bp, Artificial Sequence
  Synthetic oligonucleotide
tgcggaatatccgcatatacactacaactg

SEQ ID NO: 114840 - DNA, 30 bp, Artificial Sequence
  Synthetic oligonucleotide
ggacgttgatcaaatttcggtgaccaactg

SEQ ID NO: 114841 - DNA, 30 bp, Artificial Sequence
  Synthetic oligonucleotide
cagtgaataaagttcatgagataccaactg

SEQ ID NO: 114842 - DNA, 30 bp, Artificial Sequence
  Synthetic oligonucleotide
cgcatgagaattgttctgcgtccgcaactg

SEQ ID NO: 114843 - DNA, 30 bp, Artificial Sequence
  Synthetic oligonucleotide
tggagtcaatcttccgttggcgtgcaactg

SEQ ID NO: 114844 - DNA, 30 bp, Artificial Sequence
  Synthetic oligonucleotide
cattagaggcatctcaatcgaggtcaactg

SEQ ID NO: 114845 - DNA, 30 bp, Artificial Sequence
  Synthetic oligonucleotide
acttcatggtacgatggctaccaagaactg

SEQ ID NO: 114846 - DNA, 30 bp, Artificial Sequence
  Synthetic oligonucleotide
gcctaatcaatgtctatccttctgtaactg

SEQ ID NO: 114847 - DNA, 30 bp, Artificial Sequence
  Synthetic oligonucleotide
cacaacacccggtatctaggatgttaactg

SEQ ID NO: 114848 - DNA, 30 bp, Artificial Sequence
  Synthetic oligonucleotide
ttaaagggggagctcagccccacaacactg

SEQ ID NO: 114849 - DNA, 30 bp, Artificial Sequence
  Synthetic oligonucleotide
cctgggccctgtacggtaattgaaccactg

SEQ ID NO: 114850 - DNA, 30 bp, Artificial Sequence
  Synthetic oligonucleotide
cactccttatgaatagaaaaggtaccactg

SEQ ID NO: 114851 - DNA, 30 bp, Artificial Sequence
  Synthetic oligonucleotide
catgtcacaaccataccggacattccactg

SEQ ID NO: 114852 - DNA, 30 bp, Artificial Sequence
  Synthetic oligonucleotide
ccgttggttggtgctaataacgttccactg

SEQ ID NO: 114853 - DNA, 30 bp, Artificial Sequence
  Synthetic oligonucleotide
tcagctgtagtattcagggaggtggcactg

SEQ ID NO: 114854 - DNA, 30 bp, Artificial Sequence
  Synthetic oligonucleotide
actgtaccactccgatccaaaactgcactg

SEQ ID NO: 114855 - DNA, 30 bp, Artificial Sequence
  Synthetic oligonucleotide
cggacattgacgagtcaattagcatcactg

SEQ ID NO: 114856 - DNA, 30 bp, Artificial Sequence
  Synthetic oligonucleotide
ttcgctagatatgataagcaggactcactg

SEQ ID NO: 114857 - DNA, 30 bp, Artificial Sequence
  Synthetic oligonucleotide
gcgtattatcgctgagaccggatctcactg

SEQ ID NO: 114858 - DNA, 30 bp, Artificial Sequence
  Synthetic oligonucleotide
aagccgacgatgtggacggtcaaaagactg

SEQ ID NO: 114859 - DNA, 30 bp, Artificial Sequence
  Synthetic oligonucleotide
ggatagaaactttattggcgttagagactg

SEQ ID NO: 114860 - DNA, 30 bp, Artificial Sequence
  Synthetic oligonucleotide
agaaaaacagttgcggtgcgttggagactg

SEQ ID NO: 114861 - DNA, 30 bp, Artificial Sequence
  Synthetic oligonucleotide
gtccaaatcccaagaataaccttgagactg

SEQ ID NO: 114862 - DNA, 30 bp, Artificial Sequence
  Synthetic oligonucleotide
gtaaccacattagacggaggtccacgactg

SEQ ID NO: 114863 - DNA, 30 bp, Artificial Sequence
  Synthetic oligonucleotide
tgctgtactgtaccttgtatcgatcgactg

SEQ ID NO: 114864 - DNA, 30 bp, Artificial Sequence
  Synthetic oligonucleotide
gctacctagctgaaagacaggaatggactg

SEQ ID NO: 114865 - DNA, 31 bp, Artificial Sequence
  Synthetic oligonucleotide
taacacctgcttcggtgcgtccagtggactg

SEQ ID NO: 114866 - DNA, 30 bp, Artificial Sequence
  Synthetic oligonucleotide
taagagattcaataaccaaacaacatactg

SEQ ID NO: 114867 - DNA, 30 bp, Artificial Sequence
  Synthetic oligonucleotide
catgtgtggaacctcatacaaatcatactg

SEQ ID NO: 114868 - DNA, 30 bp, Artificial Sequence
  Synthetic oligonucleotide
gcaggtggcgtcggtaacaggatactactg

SEQ ID NO: 114869 - DNA, 30 bp, Artificial Sequence
  Synthetic oligonucleotide
tatatggaaatacgaaagccgcatctactg

SEQ ID NO: 114870 - DNA, 30 bp, Artificial Sequence
  Synthetic oligonucleotide
aatgggttctcgtaccacctgagtctactg

SEQ ID NO: 114871 - DNA, 30 bp, Artificial Sequence
  Synthetic oligonucleotide
ttggtagagaggcgttcttccacagtactg

SEQ ID NO: 114872 - DNA, 30 bp, Artificial Sequence
  Synthetic oligonucleotide
agtcgggccatgtcgaactcatcagtactg

SEQ ID NO: 114873 - DNA, 30 bp, Artificial Sequence
  Synthetic oligonucleotide
tgcaactactgatatacctggaacgtactg

SEQ ID NO: 114874 - DNA, 30 bp, Artificial Sequence
  Synthetic oligonucleotide
gatggacatggagggtcgttccgggtactg

SEQ ID NO: 114875 - DNA, 30 bp, Artificial Sequence
  Synthetic oligonucleotide
attagctagtgtgaaaaccgagtggtactg

SEQ ID NO: 114876 - DNA, 30 bp, Artificial Sequence
  Synthetic oligonucleotide
tgccggcgagacagcaattgagagttactg

SEQ ID NO: 114877 - DNA, 30 bp, Artificial Sequence
  Synthetic oligonucleotide
ccatacagaatgtgaaatggttttttactg

SEQ ID NO: 114878 - DNA, 30 bp, Artificial Sequence
  Synthetic oligonucleotide
tgcaggtaatcaagacccctggcacacctg

SEQ ID NO: 114879 - DNA, 30 bp, Artificial Sequence
  Synthetic oligonucleotide
gaccccataagcgatagattcgaccacctg

SEQ ID NO: 114880 - DNA, 30 bp, Artificial Sequence
  Synthetic oligonucleotide
cgctgaaagtggaatggatcattcgacctg

SEQ ID NO: 114881 - DNA, 30 bp, Artificial Sequence
  Synthetic oligonucleotide
atcgaatcagtacgtctgacgtcttacctg

SEQ ID NO: 114882 - DNA, 30 bp, Artificial Sequence
  Synthetic oligonucleotide
tgcgcggcttcgttaggccgggagaccctg

SEQ ID NO: 114883 - DNA, 30 bp, Artificial Sequence
  Synthetic oligonucleotide
agcactgtcaagggtagtaccgcgaccctg

SEQ ID NO: 114884 - DNA, 30 bp, Artificial Sequence
  Synthetic oligonucleotide
ttccaggttaacgagcagatggcgaccctg

SEQ ID NO: 114885 - DNA, 30 bp, Artificial Sequence
  Synthetic oligonucleotide
accgtgctgaagaggcctcttattaccctg

SEQ ID NO: 114886 - DNA, 30 bp, Artificial Sequence
  Synthetic oligonucleotide
atagacgaagtccacacatatggccccctg

SEQ ID NO: 114887 - DNA, 30 bp, Artificial Sequence
  Synthetic oligonucleotide
caggggctgagacggtaactgatctccctg

SEQ ID NO: 114888 - DNA, 30 bp, Artificial Sequence
  Synthetic oligonucleotide
attcgtgaaacggctcgcagagcgtccctg

SEQ ID NO: 114889 - DNA, 30 bp, Artificial Sequence
  Synthetic oligonucleotide
tcgacaaaaaaatgtatggaaagaagcctg

SEQ ID NO: 114890 - DNA, 30 bp, Artificial Sequence
  Synthetic oligonucleotide
acagctaggtcaaatgttctagctagcctg

SEQ ID NO: 114891 - DNA, 30 bp, Artificial Sequence
  Synthetic oligonucleotide
cggtcgatcgtacatttcaatgaacgcctg

SEQ ID NO: 114892 - DNA, 30 bp, Artificial Sequence
  Synthetic oligonucleotide
ttttcgattggggctcaagaaagaggcctg

SEQ ID NO: 114893 - DNA, 30 bp, Artificial Sequence
  Synthetic oligonucleotide
gacaagcataattagctgtccagcggcctg

SEQ ID NO: 114894 - DNA, 30 bp, Artificial Sequence
  Synthetic oligonucleotide
gagcggtacacctgaggttaaagtggcctg

SEQ ID NO: 114895 - DNA, 30 bp, Artificial Sequence
  Synthetic oligonucleotide
cggtagaacgaggtgactcgtccctgcctg

SEQ ID NO: 114896 - DNA, 30 bp, Artificial Sequence
  Synthetic oligonucleotide
aacatctcgtacccacgagagcgcatcctg

SEQ ID NO: 114897 - DNA, 30 bp, Artificial Sequence
  Synthetic oligonucleotide
agaactggtaatcatttggcacagatcctg

SEQ ID NO: 114898 - DNA, 30 bp, Artificial Sequence
  Synthetic oligonucleotide
agcaaccctgactctgaacatcgactcctg

SEQ ID NO: 114899 - DNA, 30 bp, Artificial Sequence
  Synthetic oligonucleotide
tgtacgctcgacaatgcgtcgcatctcctg

SEQ ID NO: 114900 - DNA, 30 bp, Artificial Sequence
  Synthetic oligonucleotide
tacaccaagaagctgacaaagtaagtcctg

SEQ ID NO: 114901 - DNA, 30 bp, Artificial Sequence
  Synthetic oligonucleotide
cgagaatcgtgatcatttagagaggtcctg

SEQ ID NO: 114902 - DNA, 30 bp, Artificial Sequence
  Synthetic oligonucleotide
cccgttaatgggttctaccattctgtcctg

SEQ ID NO: 114903 - DNA, 30 bp, Artificial Sequence
  Synthetic oligonucleotide
agtcagacctgaatcccggagctcttcctg

SEQ ID NO: 114904 - DNA, 30 bp, Artificial Sequence
  Synthetic oligonucleotide
gctaccgtatcataaagtctattcttcctg

SEQ ID NO: 114905 - DNA, 30 bp, Artificial Sequence
  Synthetic oligonucleotide
atcagatgggtgaagaaagcatatttcctg

SEQ ID NO: 114906 - DNA, 30 bp, Artificial Sequence
  Synthetic oligonucleotide
tcgataaaacgatactaacgggaaaagctg

SEQ ID NO: 114907 - DNA, 30 bp, Artificial Sequence
  Synthetic oligonucleotide
cagtgaacaaataggtcagtcgacaagctg

SEQ ID NO: 114908 - DNA, 30 bp, Artificial Sequence
  Synthetic oligonucleotide
atgcatcagcgggggcggggtggtaagctg

SEQ ID NO: 114909 - DNA, 30 bp, Artificial Sequence
  Synthetic oligonucleotide
accgatgaggagcagggcgacttacagctg

SEQ ID NO: 114910 - DNA, 30 bp, Artificial Sequence
  Synthetic oligonucleotide
aagtaaagtgagggggcgtgtaatcagctg

SEQ ID NO: 114911 - DNA, 30 bp, Artificial Sequence
  Synthetic oligonucleotide
gggagaaggcaaatatcatcggccgagctg

SEQ ID NO: 114912 - DNA, 30 bp, Artificial Sequence
  Synthetic oligonucleotide
taaggctgtgtatcatcggagtatgagctg

SEQ ID NO: 114913 - DNA, 30 bp, Artificial Sequence
  Synthetic oligonucleotide
agggtgtcagggacattgagtggtgagctg

SEQ ID NO: 114914 - DNA, 30 bp, Artificial Sequence
  Synthetic oligonucleotide
gtctaagggttacaggcaccggcatagctg

SEQ ID NO: 114915 - DNA, 30 bp, Artificial Sequence
  Synthetic oligonucleotide
gacgcccgggagagtgtctcagtctagctg

SEQ ID NO: 114916 - DNA, 30 bp, Artificial Sequence
  Synthetic oligonucleotide
caagaacgtaacacgtgggtcgccacgctg

SEQ ID NO: 114917 - DNA, 30 bp, Artificial Sequence
  Synthetic oligonucleotide
tgaggcgaggtaaaataatccgatacgctg

SEQ ID NO: 114918 - DNA, 30 bp, Artificial Sequence
  Synthetic oligonucleotide
ctgtgagatgtgaaaggactgcaagcgctg

SEQ ID NO: 114919 - DNA, 30 bp, Artificial Sequence
  Synthetic oligonucleotide
gctcacgtgggtggggactcaagtgcgctg

SEQ ID NO: 114920 - DNA, 30 bp, Artificial Sequence
  Synthetic oligonucleotide
ttaataggtcgagcgtcaaactagcggctg

SEQ ID NO: 114921 - DNA, 30 bp, Artificial Sequence
  Synthetic oligonucleotide
tcagacgtggggtgtttgacgtgtcggctg

SEQ ID NO: 114922 - DNA, 30 bp, Artificial Sequence
  Synthetic oligonucleotide
aagtaacccggcgacggtatggtttggctg

SEQ ID NO: 114923 - DNA, 30 bp, Artificial Sequence
  Synthetic oligonucleotide
actaaagcttaaaccacaatgttttggctg

SEQ ID NO: 114924 - DNA, 30 bp, Artificial Sequence
  Synthetic oligonucleotide
cacggcatctttattaaaacgatcatgctg

SEQ ID NO: 114925 - DNA, 30 bp, Artificial Sequence
  Synthetic oligonucleotide
tcgcaggtcgcgcaaagcaaaaggatgctg

SEQ ID NO: 114926 - DNA, 30 bp, Artificial Sequence
  Synthetic oligonucleotide
tcatggaatatggcttgaataaatatgctg

SEQ ID NO: 114927 - DNA, 30 bp, Artificial Sequence
  Synthetic oligonucleotide
atagccagggtgaactcacgcgtactgctg

SEQ ID NO: 114928 - DNA, 30 bp, Artificial Sequence
  Synthetic oligonucleotide
aaaggtaatcaggagtccgggtcgctgctg

SEQ ID NO: 114929 - DNA, 30 bp, Artificial Sequence
  Synthetic oligonucleotide
taagggcgtagttggcttttatcagtgctg

SEQ ID NO: 114930 - DNA, 30 bp, Artificial Sequence
  Synthetic oligonucleotide
ctagcccggacccaacaggctatagtgctg

SEQ ID NO: 114931 - DNA, 30 bp, Artificial Sequence
  Synthetic oligonucleotide
atagtacatacgtccagtgttgtagtgctg

SEQ ID NO: 114932 - DNA, 30 bp, Artificial Sequence
  Synthetic oligonucleotide
agtctcgaacgcgtgactataggcgtgctg

SEQ ID NO: 114933 - DNA, 30 bp, Artificial Sequence
  Synthetic oligonucleotide
aaagctagtgcgacttgcgaatcgttgctg

SEQ ID NO: 114934 - DNA, 30 bp, Artificial Sequence
  Synthetic oligonucleotide
gggtacaacgggaagcgacaacgtttgctg

SEQ ID NO: 114935 - DNA, 30 bp, Artificial Sequence
  Synthetic oligonucleotide
atcacgaacaaatataccttccttttgctg

SEQ ID NO: 114936 - DNA, 30 bp, Artificial Sequence
  Synthetic oligonucleotide
agccgaacctccgtcctatcgataaatctg

SEQ ID NO: 114937 - DNA, 30 bp, Artificial Sequence
  Synthetic oligonucleotide
tccacgtctgcgagccagtgcgtaaatctg

SEQ ID NO: 114938 - DNA, 30 bp, Artificial Sequence
  Synthetic oligonucleotide
gacagttagaccctgggggtaggcaatctg

SEQ ID NO: 114939 - DNA, 30 bp, Artificial Sequence
  Synthetic oligonucleotide
atacagctacagcatcgtattgtacatctg

SEQ ID NO: 114940 - DNA, 30 bp, Artificial Sequence
  Synthetic oligonucleotide
gcgcacggttcaatcccgtggaggcatctg

SEQ ID NO: 114941 - DNA, 30 bp, Artificial Sequence
  Synthetic oligonucleotide
ggtgattgtaaaagcggcatagtgcatctg

SEQ ID NO: 114942 - DNA, 30 bp, Artificial Sequence
  Synthetic oligonucleotide
tatgcagttaaaagcgtataacacgatctg

SEQ ID NO: 114943 - DNA, 30 bp, Artificial Sequence
  Synthetic oligonucleotide
tcacgtacgccacaaagtgaggacgatctg

SEQ ID NO: 114944 - DNA, 30 bp, Artificial Sequence
  Synthetic oligonucleotide
tgatcctactaatttgataatcgtgatctg

SEQ ID NO: 114945 - DNA, 30 bp, Artificial Sequence
  Synthetic oligonucleotide
cctccatctaattgtgtgtgggccactctg

SEQ ID NO: 114946 - DNA, 30 bp, Artificial Sequence
  Synthetic oligonucleotide
tggcctaatggcatgactcattccactctg

SEQ ID NO: 114947 - DNA, 30 bp, Artificial Sequence
  Synthetic oligonucleotide
tccaaacacaactccaagcgccgcactctg

SEQ ID NO: 114948 - DNA, 30 bp, Artificial Sequence
  Synthetic oligonucleotide
cacttacgcgcgtaagcttccatcactctg

SEQ ID NO: 114949 - DNA, 30 bp, Artificial Sequence
  Synthetic oligonucleotide
acatgatagcataaacacaatatcactctg

SEQ ID NO: 114950 - DNA, 30 bp, Artificial Sequence
  Synthetic oligonucleotide
agggtagccggtacgacgaaagctactctg

SEQ ID NO: 114951 - DNA, 30 bp, Artificial Sequence
  Synthetic oligonucleotide
agctcaggcattgggccacgaggtactctg

SEQ ID NO: 114952 - DNA, 30 bp, Artificial Sequence
  Synthetic oligonucleotide
atcgatatcgacgagcaactttaacctctg

SEQ ID NO: 114953 - DNA, 30 bp, Artificial Sequence
  Synthetic oligonucleotide
taataactcatactcatatgaatgcctctg

SEQ ID NO: 114954 - DNA, 30 bp, Artificial Sequence
  Synthetic oligonucleotide
ggttaggagccaagtataatgactcctctg

SEQ ID NO: 114955 - DNA, 30 bp, Artificial Sequence
  Synthetic oligonucleotide
cctagtccgtgctagaagcaacaagctctg

SEQ ID NO: 114956 - DNA, 30 bp, Artificial Sequence
  Synthetic oligonucleotide
ccatagaaaggggtactcagtaatgctctg

SEQ ID NO: 114957 - DNA, 30 bp, Artificial Sequence
  Synthetic oligonucleotide
atagccatgtgacttcgcccatcgtctctg

SEQ ID NO: 114958 - DNA, 30 bp, Artificial Sequence
  Synthetic oligonucleotide
gagggccacagggataaggttacaagtctg

SEQ ID NO: 114959 - DNA, 30 bp, Artificial Sequence
  Synthetic oligonucleotide
gatcgtcctgccgtttccaaggctagtctg

SEQ ID NO: 114960 - DNA, 30 bp, Artificial Sequence
  Synthetic oligonucleotide
cgcgggatacagtataagcagtgtagtctg

SEQ ID NO: 114961 - DNA, 30 bp, Artificial Sequence
  Synthetic oligonucleotide
gacatcgaaccgttttggaatgtacgtctg

SEQ ID NO: 114962 - DNA, 30 bp, Artificial Sequence
  Synthetic oligonucleotide
agggatcgtacactaactagacatcgtctg

SEQ ID NO: 114963 - DNA, 30 bp, Artificial Sequence
  Synthetic oligonucleotide
ctttaaagggaatcctctagacttcgtctg

SEQ ID NO: 114964 - DNA, 30 bp, Artificial Sequence
  Synthetic oligonucleotide
aactgcgctaggtgtggtatcgtaggtctg

SEQ ID NO: 114965 - DNA, 30 bp, Artificial Sequence
  Synthetic oligonucleotide
atggaataggcaggatcccgagccattctg

SEQ ID NO: 114966 - DNA, 30 bp, Artificial Sequence
  Synthetic oligonucleotide
cagcatagcgtgattggcgatagcattctg

SEQ ID NO: 114967 - DNA, 30 bp, Artificial Sequence
  Synthetic oligonucleotide
gtaatgtggcaacggtctatcttcattctg

SEQ ID NO: 114968 - DNA, 30 bp, Artificial Sequence
  Synthetic oligonucleotide
caatgttcatctacatcatgttctattctg

SEQ ID NO: 114969 - DNA, 30 bp, Artificial Sequence
  Synthetic oligonucleotide
catattcgcggaggtttagatgtagttctg

SEQ ID NO: 114970 - DNA, 30 bp, Artificial Sequence
  Synthetic oligonucleotide
tatcgaccagtacggaatcggaaggttctg

SEQ ID NO: 114971 - DNA, 30 bp, Artificial Sequence
  Synthetic oligonucleotide
gcttcaccagcagagggagatacctttctg

SEQ ID NO: 114972 - DNA, 30 bp, Artificial Sequence
  Synthetic oligonucleotide
ttcggaagatcgggatgctcatagtttctg

SEQ ID NO: 114973 - DNA, 30 bp, Artificial Sequence
  Synthetic oligonucleotide
cggcccaaaaagggtttcaaggattttctg

SEQ ID NO: 114974 - DNA, 30 bp, Artificial Sequence
  Synthetic oligonucleotide
tggtagctagagattttgattccaaaagtg

SEQ ID NO: 114975 - DNA, 30 bp, Artificial Sequence
  Synthetic oligonucleotide
cggaccgttattagttgaatgaccaaagtg

SEQ ID NO: 114976 - DNA, 30 bp, Artificial Sequence
  Synthetic oligonucleotide
cgcttgtctccacaaaggttggtcaaagtg

SEQ ID NO: 114977 - DNA, 30 bp, Artificial Sequence
  Synthetic oligonucleotide
ataggtagttaagattaggatgagaaagtg

SEQ ID NO: 114978 - DNA, 30 bp, Artificial Sequence
  Synthetic oligonucleotide
ttcagcaaatgaatccataacgtgaaagtg

SEQ ID NO: 114979 - DNA, 30 bp, Artificial Sequence
  Synthetic oligonucleotide
ccctgggctcgacccactttccataaagtg

SEQ ID NO: 114980 - DNA, 30 bp, Artificial Sequence
  Synthetic oligonucleotide
aactcgaacatttactgggacattaaagtg

SEQ ID NO: 114981 - DNA, 30 bp, Artificial Sequence
  Synthetic oligonucleotide
acggtctcgcccgagctcagccttaaagtg

SEQ ID NO: 114982 - DNA, 30 bp, Artificial Sequence
  Synthetic oligonucleotide
tggtcaagctaaataggttaaggagaagtg

SEQ ID NO: 114983 - DNA, 30 bp, Artificial Sequence
  Synthetic oligonucleotide
ttggatatagagtgtcatgtagacgaagtg

SEQ ID NO: 114984 - DNA, 30 bp, Artificial Sequence
  Synthetic oligonucleotide
agagtgacaaatggtaccggaatcgaagtg

SEQ ID NO: 114985 - DNA, 28 bp, Artificial Sequence
  Synthetic oligonucleotide
actaaatctgacaagctcgtttgaagtg

SEQ ID NO: 114986 - DNA, 30 bp, Artificial Sequence
  Synthetic oligonucleotide
caggagaaaccttacgtataaaggtaagtg

SEQ ID NO: 114987 - DNA, 30 bp, Artificial Sequence
  Synthetic oligonucleotide
aaagctcagtgtggctacgtaagaacagtg

SEQ ID NO: 114988 - DNA, 30 bp, Artificial Sequence
  Synthetic oligonucleotide
ggactactagttggcgagggttgaacagtg

SEQ ID NO: 114989 - DNA, 30 bp, Artificial Sequence
  Synthetic oligonucleotide
ttgtccgtgggtccagcctattagacagtg

SEQ ID NO: 114990 - DNA, 30 bp, Artificial Sequence
  Synthetic oligonucleotide
gcatttattgtggacgagtcgggcccagtg

SEQ ID NO: 114991 - DNA, 30 bp, Artificial Sequence
  Synthetic oligonucleotide
caataccaatttcggtgtaccgttccagtg

SEQ ID NO: 114992 - DNA, 30 bp, Artificial Sequence
  Synthetic oligonucleotide
tgacagcgagacaataaaattcacgcagtg

SEQ ID NO: 114993 - DNA, 31 bp, Artificial Sequence
  Synthetic oligonucleotide
caacagctggatgtaatatgaatgcgcagtg

SEQ ID NO: 114994 - DNA, 30 bp, Artificial Sequence
  Synthetic oligonucleotide
ccattgctaaggagggttcaaaactcagtg

SEQ ID NO: 114995 - DNA, 30 bp, Artificial Sequence
  Synthetic oligonucleotide
tgattgtaggggaagggtgttaattcagtg

SEQ ID NO: 114996 - DNA, 30 bp, Artificial Sequence
  Synthetic oligonucleotide
catccaggtcctttttggctagacagagtg

SEQ ID NO: 114997 - DNA, 30 bp, Artificial Sequence
  Synthetic oligonucleotide
ttaggtagcatttgatctgagtagagagtg

SEQ ID NO: 114998 - DNA, 30 bp, Artificial Sequence
  Synthetic oligonucleotide
tctgaggccttatacacccttctacgagtg

SEQ ID NO: 114999 - DNA, 30 bp, Artificial Sequence
  Synthetic oligonucleotide
acaaatccaccgatcgagcaccctcgagtg

SEQ ID NO: 115000 - DNA, 30 bp, Artificial Sequence
  Synthetic oligonucleotide
tgaagtaacgaacgatacttgaaatgagtg

SEQ ID NO: 115001 - DNA, 30 bp, Artificial Sequence
  Synthetic oligonucleotide
gaatcggaaaagtgaaaactttcatgagtg

SEQ ID NO: 115002 - DNA, 30 bp, Artificial Sequence
  Synthetic oligonucleotide
actatagctgcggggaagctttattgagtg

SEQ ID NO: 115003 - DNA, 30 bp, Artificial Sequence
  Synthetic oligonucleotide
gaactcagcctcgacgaccgtccaatagtg

SEQ ID NO: 115004 - DNA, 30 bp, Artificial Sequence
  Synthetic oligonucleotide
tggaggaggttattctcaaacagaatagtg

SEQ ID NO: 115005 - DNA, 30 bp, Artificial Sequence
  Synthetic oligonucleotide
gagagagcaagctataagtgtagcatagtg

SEQ ID NO: 115006 - DNA, 30 bp, Artificial Sequence
  Synthetic oligonucleotide
acactccaaagtttggcacacgtgatagtg

SEQ ID NO: 115007 - DNA, 30 bp, Artificial Sequence
  Synthetic oligonucleotide
gagtaaatcatactgcttggtacactagtg

SEQ ID NO: 115008 - DNA, 30 bp, Artificial Sequence
  Synthetic oligonucleotide
attaatgagagtaagtggcatatactagtg

SEQ ID NO: 115009 - DNA, 30 bp, Artificial Sequence
  Synthetic oligonucleotide
tgtcgaggctattgcgagtctgtcctagtg

SEQ ID NO: 115010 - DNA, 30 bp, Artificial Sequence
  Synthetic oligonucleotide
tcacagatgtcggtgggagctctagtagtg

SEQ ID NO: 115011 - DNA, 30 bp, Artificial Sequence
  Synthetic oligonucleotide
tcaatacacgtggtagtacgccgcttagtg

SEQ ID NO: 115012 - DNA, 30 bp, Artificial Sequence
  Synthetic oligonucleotide
acggtgaacgcggtcagtcgtgcaaacgtg

SEQ ID NO: 115013 - DNA, 30 bp, Artificial Sequence
  Synthetic oligonucleotide
atcccagcggtaagctgtgctgccaacgtg

SEQ ID NO: 115014 - DNA, 30 bp, Artificial Sequence
  Synthetic oligonucleotide
tactatagggtactgacagcgatgaacgtg

SEQ ID NO: 115015 - DNA, 30 bp, Artificial Sequence
  Synthetic oligonucleotide
cagttaagtatgggttgtggagctaacgtg

SEQ ID NO: 115016 - DNA, 30 bp, Artificial Sequence
  Synthetic oligonucleotide
gtcgtctaaggaatgatcgctgttaacgtg

SEQ ID NO: 115017 - DNA, 30 bp, Artificial Sequence
  Synthetic oligonucleotide
cgggtctctgatagcataggtcagcacgtg

SEQ ID NO: 115018 - DNA, 30 bp, Artificial Sequence
  Synthetic oligonucleotide
acaatacacagtaagtatgtcgtgcacgtg

SEQ ID NO: 115019 - DNA, 30 bp, Artificial Sequence
  Synthetic oligonucleotide
aggagcagggtatgtcacagtggagacgtg

SEQ ID NO: 115020 - DNA, 30 bp, Artificial Sequence
  Synthetic oligonucleotide
cgtcttaaagtgggtcatacgtccgacgtg

SEQ ID NO: 115021 - DNA, 30 bp, Artificial Sequence
  Synthetic oligonucleotide
atgctagttcgcaacattggggaggacgtg

SEQ ID NO: 115022 - DNA, 30 bp, Artificial Sequence
  Synthetic oligonucleotide
aatactggaacatcgcggacgtcggacgtg

SEQ ID NO: 115023 - DNA, 30 bp, Artificial Sequence
  Synthetic oligonucleotide
ctttggacgtggatatggcggcaatacgtg

SEQ ID NO: 115024 - DNA, 30 bp, Artificial Sequence
  Synthetic oligonucleotide
tcactgctcactctaatcgagccgtacgtg

SEQ ID NO: 115025 - DNA, 30 bp, Artificial Sequence
  Synthetic oligonucleotide
cgggacggagttccccctaaaggttacgtg

SEQ ID NO: 115026 - DNA, 30 bp, Artificial Sequence
  Synthetic oligonucleotide
tgttacataaggattgcattaattgccgtg

SEQ ID NO: 115027 - DNA, 30 bp, Artificial Sequence
  Synthetic oligonucleotide
atcttagtaacaagggattgccagtccgtg

SEQ ID NO: 115028 - DNA, 30 bp, Artificial Sequence
  Synthetic oligonucleotide
tacgcgaggtcactatggataacgtccgtg

SEQ ID NO: 115029 - DNA, 30 bp, Artificial Sequence
  Synthetic oligonucleotide
gatggacgatgcgggcgatttgccagcgtg

SEQ ID NO: 115030 - DNA, 30 bp, Artificial Sequence
  Synthetic oligonucleotide
tccgagcaaagtgttgtttcccttagcgtg

SEQ ID NO: 115031 - DNA, 30 bp, Artificial Sequence
  Synthetic oligonucleotide
ctggaggccgtagaaataacccaacgcgtg

SEQ ID NO: 115032 - DNA, 30 bp, Artificial Sequence
  Synthetic oligonucleotide
ggtttaggtcagacaggtaagagccgcgtg

SEQ ID NO: 115033 - DNA, 30 bp, Artificial Sequence
  Synthetic oligonucleotide
caagctccggtggaaagcgaatgccgcgtg

SEQ ID NO: 115034 - DNA, 30 bp, Artificial Sequence
  Synthetic oligonucleotide
acggtgacaccatcgcaacagtctcgcgtg

SEQ ID NO: 115035 - DNA, 30 bp, Artificial Sequence
  Synthetic oligonucleotide
ttacataccgcggaggccagccgaggcgtg

SEQ ID NO: 115036 - DNA, 30 bp, Artificial Sequence
  Synthetic oligonucleotide
ggtgataagtatgaagtggcgtgatgcgtg

SEQ ID NO: 115037 - DNA, 30 bp, Artificial Sequence
  Synthetic oligonucleotide
agtaggtgtagtaggcagacggcctgcgtg

SEQ ID NO: 115038 - DNA, 30 bp, Artificial Sequence
  Synthetic oligonucleotide
gattggcgacttgaaaacgtttagtgcgtg

SEQ ID NO: 115039 - DNA, 30 bp, Artificial Sequence
  Synthetic oligonucleotide
agcgggcacttgaaaatctgaaattgcgtg

SEQ ID NO: 115040 - DNA, 30 bp, Artificial Sequence
  Synthetic oligonucleotide
tccccgattcgcggggcaaggcaaatcgtg

SEQ ID NO: 115041 - DNA, 30 bp, Artificial Sequence
  Synthetic oligonucleotide
gaagtgattcattcaggatagtacatcgtg

SEQ ID NO: 115042 - DNA, 30 bp, Artificial Sequence
  Synthetic oligonucleotide
atcacattaaggcattgtgccatcatcgtg

SEQ ID NO: 115043 - DNA, 30 bp, Artificial Sequence
  Synthetic oligonucleotide
aaaaccgcctagcaaaataggtagctcgtg

SEQ ID NO: 115044 - DNA, 30 bp, Artificial Sequence
  Synthetic oligonucleotide
gcgcaactctacacctacacacacgtcgtg

SEQ ID NO: 115045 - DNA, 30 bp, Artificial Sequence
  Synthetic oligonucleotide
ggctaaaaccggtccttacagtatgtcgtg

SEQ ID NO: 115046 - DNA, 30 bp, Artificial Sequence
  Synthetic oligonucleotide
ttgtgttagtgaaacgtgttgcgtgtcgtg

SEQ ID NO: 115047 - DNA, 30 bp, Artificial Sequence
  Synthetic oligonucleotide
atcaccaggaaacagggaaacccattcgtg

SEQ ID NO: 115048 - DNA, 30 bp, Artificial Sequence
  Synthetic oligonucleotide
cggacttcagcccggcgtagggtattcgtg

SEQ ID NO: 115049 - DNA, 30 bp, Artificial Sequence
  Synthetic oligonucleotide
gatcaggatcaaggacggcgttagttcgtg

SEQ ID NO: 115050 - DNA, 30 bp, Artificial Sequence
  Synthetic oligonucleotide
ggcagagctaattgatcgtcaagaaaggtg

SEQ ID NO: 115051 - DNA, 30 bp, Artificial Sequence
  Synthetic oligonucleotide
caggacacgagggttccgagggttaaggtg

SEQ ID NO: 115052 - DNA, 30 bp, Artificial Sequence
  Synthetic oligonucleotide
gggatgtgcatacccggctaaatacaggtg

SEQ ID NO: 115053 - DNA, 30 bp, Artificial Sequence
  Synthetic oligonucleotide
cgggccgtttttagaagcgaataccaggtg

SEQ ID NO: 115054 - DNA, 30 bp, Artificial Sequence
  Synthetic oligonucleotide
acgtccatctacagaagatagttagaggtg

SEQ ID NO: 115055 - DNA, 30 bp, Artificial Sequence
  Synthetic oligonucleotide
tctagttcgttaacagctagtggggaggtg

SEQ ID NO: 115056 - DNA, 30 bp, Artificial Sequence
  Synthetic oligonucleotide
agcgaaggtcgcatgggttggcaataggtg

SEQ ID NO: 115057 - DNA, 30 bp, Artificial Sequence
  Synthetic oligonucleotide
cgtgtcagactctgatgacccttgtaggtg

SEQ ID NO: 115058 - DNA, 30 bp, Artificial Sequence
  Synthetic oligonucleotide
agatgtttgaatacgatcttgcattaggtg

SEQ ID NO: 115059 - DNA, 30 bp, Artificial Sequence
  Synthetic oligonucleotide
gctcaatccgaggtcaagcgaataacggtg

SEQ ID NO: 115060 - DNA, 30 bp, Artificial Sequence
  Synthetic oligonucleotide
cacacagtctaggagtaaactacgacggtg

SEQ ID NO: 115061 - DNA, 30 bp, Artificial Sequence
  Synthetic oligonucleotide
taatagtcaacacggctcaaacttacggtg

SEQ ID NO: 115062 - DNA, 31 bp, Artificial Sequence
  Synthetic oligonucleotide
ccggactggaaagatccagagacgagcggtg

SEQ ID NO: 115063 - DNA, 30 bp, Artificial Sequence
  Synthetic oligonucleotide
aaggattaagccgtagttgcagaggcggtg

SEQ ID NO: 115064 - DNA, 30 bp, Artificial Sequence
  Synthetic oligonucleotide
cagattagctcgcacactatataggcggtg

SEQ ID NO: 115065 - DNA, 30 bp, Artificial Sequence
  Synthetic oligonucleotide
ggggaggtgtccgtagcgcaggctgcggtg

SEQ ID NO: 115066 - DNA, 30 bp, Artificial Sequence
  Synthetic oligonucleotide
ggtcacaactaaacgatttacggatcggtg

SEQ ID NO: 115067 - DNA, 30 bp, Artificial Sequence
  Synthetic oligonucleotide
taagcctaaaggtaaatccggatatcggtg

SEQ ID NO: 115068 - DNA, 30 bp, Artificial Sequence
  Synthetic oligonucleotide
atcatatgccttgacttaagtaggtcggtg

SEQ ID NO: 115069 - DNA, 30 bp, Artificial Sequence
  Synthetic oligonucleotide
catacagacttggtctccttcaaaagggtg

SEQ ID NO: 115070 - DNA, 30 bp, Artificial Sequence
  Synthetic oligonucleotide
cctcgccggccttactaaagtgccagggtg

SEQ ID NO: 115071 - DNA, 30 bp, Artificial Sequence
  Synthetic oligonucleotide
gggcgcagttgttagtctactgtcagggtg

SEQ ID NO: 115072 - DNA, 30 bp, Artificial Sequence
  Synthetic oligonucleotide
gacttggtcggtggatggtaatcgagggtg

SEQ ID NO: 115073 - DNA, 30 bp, Artificial Sequence
  Synthetic oligonucleotide
tggcgctctcgaccgatctgctggagggtg

SEQ ID NO: 115074 - DNA, 30 bp, Artificial Sequence
  Synthetic oligonucleotide
agttcaggacacatatttctaaaacgggtg

SEQ ID NO: 115075 - DNA, 30 bp, Artificial Sequence
  Synthetic oligonucleotide
gccaacagctaataacaataattaggggtg

SEQ ID NO: 115076 - DNA, 30 bp, Artificial Sequence
  Synthetic oligonucleotide
catggacatcacttggtacaaactggggtg

SEQ ID NO: 115077 - DNA, 30 bp, Artificial Sequence
  Synthetic oligonucleotide
gggacatcaccagattcttggactggggtg

SEQ ID NO: 115078 - DNA, 30 bp, Artificial Sequence
  Synthetic oligonucleotide
caagttgagaggtgacaggttgtctgggtg

SEQ ID NO: 115079 - DNA, 30 bp, Artificial Sequence
  Synthetic oligonucleotide
acgacaatacagtacatagtaatttgggtg

SEQ ID NO: 115080 - DNA, 30 bp, Artificial Sequence
  Synthetic oligonucleotide
aaggcttctcccaatgtgcgtaggatggtg

SEQ ID NO: 115081 - DNA, 30 bp, Artificial Sequence
  Synthetic oligonucleotide
agatggccgactctgtatcagtggatggtg

SEQ ID NO: 115082 - DNA, 30 bp, Artificial Sequence
  Synthetic oligonucleotide
acgtaaacagcaaacggcaaatagctggtg

SEQ ID NO: 115083 - DNA, 30 bp, Artificial Sequence
  Synthetic oligonucleotide
gggtacgccccggtatctcttcctctggtg

SEQ ID NO: 115084 - DNA, 30 bp, Artificial Sequence
  Synthetic oligonucleotide
tagaatcagtaaagagtccgaagtctggtg

SEQ ID NO: 115085 - DNA, 30 bp, Artificial Sequence
  Synthetic oligonucleotide
gcacaaggggggccctactcacacgtggtg

SEQ ID NO: 115086 - DNA, 30 bp, Artificial Sequence
  Synthetic oligonucleotide
tgcacgtaagccttgtgaaggcaggtggtg

SEQ ID NO: 115087 - DNA, 30 bp, Artificial Sequence
  Synthetic oligonucleotide
tctcacagttagctctttacattggtggtg

SEQ ID NO: 115088 - DNA, 30 bp, Artificial Sequence
  Synthetic oligonucleotide
cgcattatcaatgatatttgggatgtggtg

SEQ ID NO: 115089 - DNA, 30 bp, Artificial Sequence
  Synthetic oligonucleotide
aagcgtatatgcgctgtgacctttgtggtg

SEQ ID NO: 115090 - DNA, 30 bp, Artificial Sequence
  Synthetic oligonucleotide
gatgttacattaacgtgacatagattggtg

SEQ ID NO: 115091 - DNA, 30 bp, Artificial Sequence
  Synthetic oligonucleotide
ggccatggtgtgaccgtggtcaacttggtg

SEQ ID NO: 115092 - DNA, 30 bp, Artificial Sequence
  Synthetic oligonucleotide
cgtgagcagtgcttaagcgctgagttggtg

SEQ ID NO: 115093 - DNA, 30 bp, Artificial Sequence
  Synthetic oligonucleotide
ttatgaggttggctgggtctcaggttggtg

SEQ ID NO: 115094 - DNA, 30 bp, Artificial Sequence
  Synthetic oligonucleotide
gagggaatcttcgtaagaagacacaatgtg

SEQ ID NO: 115095 - DNA, 30 bp, Artificial Sequence
  Synthetic oligonucleotide
gacgcaggtatgactacaaaatacaatgtg

SEQ ID NO: 115096 - DNA, 30 bp, Artificial Sequence
  Synthetic oligonucleotide
accctcaaaagcgacccgcctgtcaatgtg

SEQ ID NO: 115097 - DNA, 30 bp, Artificial Sequence
  Synthetic oligonucleotide
tacccagcgcgagggtgactggggaatgtg

SEQ ID NO: 115098 - DNA, 30 bp, Artificial Sequence
  Synthetic oligonucleotide
ttccgcctgagaagcgactaacaacatgtg

SEQ ID NO: 115099 - DNA, 30 bp, Artificial Sequence
  Synthetic oligonucleotide
cgcgaagggtcagacctgtgccgccatgtg

SEQ ID NO: 115100 - DNA, 30 bp, Artificial Sequence
  Synthetic oligonucleotide
ttgaggatgatatcgcatgtgtatcatgtg

SEQ ID NO: 115101 - DNA, 30 bp, Artificial Sequence
  Synthetic oligonucleotide
ccacgtgagagggtgttaaggcactatgtg

SEQ ID NO: 115102 - DNA, 30 bp, Artificial Sequence
  Synthetic oligonucleotide
tagatcacggggctgactatcgagtatgtg

SEQ ID NO: 115103 - DNA, 30 bp, Artificial Sequence
  Synthetic oligonucleotide
gtgaaagctgtttgcacaataagaactgtg

SEQ ID NO: 115104 - DNA, 30 bp, Artificial Sequence
  Synthetic oligonucleotide
cacgcttaaatggtgccaactagaactgtg

SEQ ID NO: 115105 - DNA, 30 bp, Artificial Sequence
  Synthetic oligonucleotide
aggttcgctagtgaaagctggtagactgtg

SEQ ID NO: 115106 - DNA, 30 bp, Artificial Sequence
  Synthetic oligonucleotide
gggggcagcagtggatagtcataccctgtg

SEQ ID NO: 115107 - DNA, 30 bp, Artificial Sequence
  Synthetic oligonucleotide
aaggcacgtaaagcatagaccgtgcctgtg

SEQ ID NO: 115108 - DNA, 30 bp, Artificial Sequence
  Synthetic oligonucleotide
catcaggggcttgccaaaaagtacgctgtg

SEQ ID NO: 115109 - DNA, 30 bp, Artificial Sequence
  Synthetic oligonucleotide
cctgccgttagaaaaacctccaatgctgtg

SEQ ID NO: 115110 - DNA, 30 bp, Artificial Sequence
  Synthetic oligonucleotide
agtgccatacacaaaaagggaaattctgtg

SEQ ID NO: 115111 - DNA, 30 bp, Artificial Sequence
  Synthetic oligonucleotide
ctatctagcctaaagggggtcagaagtgtg

SEQ ID NO: 115112 - DNA, 30 bp, Artificial Sequence
  Synthetic oligonucleotide
gttgatggagtaggaagggccttcagtgtg

SEQ ID NO: 115113 - DNA, 30 bp, Artificial Sequence
  Synthetic oligonucleotide
tttggcaacaacggcgtgaccgcgagtgtg

SEQ ID NO: 115114 - DNA, 30 bp, Artificial Sequence
  Synthetic oligonucleotide
aatagatgggttttccctgcgaggagtgtg

SEQ ID NO: 115115 - DNA, 30 bp, Artificial Sequence
  Synthetic oligonucleotide
agagcgctgacccattcatagactagtgtg

SEQ ID NO: 115116 - DNA, 30 bp, Artificial Sequence
  Synthetic oligonucleotide
gaacaaatgacgtatcgccaggcaggtgtg

SEQ ID NO: 115117 - DNA, 30 bp, Artificial Sequence
  Synthetic oligonucleotide
tgtccagctgtaaacatccgcatcggtgtg

SEQ ID NO: 115118 - DNA, 30 bp, Artificial Sequence
  Synthetic oligonucleotide
ggaaaatttctacgtaaactcaagggtgtg

SEQ ID NO: 115119 - DNA, 30 bp, Artificial Sequence
  Synthetic oligonucleotide
atgcgcacgaactctgtaaagctgggtgtg

SEQ ID NO: 115120 - DNA, 30 bp, Artificial Sequence
  Synthetic oligonucleotide
gactaccaagtggcatattcgaaatgtgtg

SEQ ID NO: 115121 - DNA, 30 bp, Artificial Sequence
  Synthetic oligonucleotide
gaagatagattcaatccgccgccatgtgtg

SEQ ID NO: 115122 - DNA, 30 bp, Artificial Sequence
  Synthetic oligonucleotide
tttgtagacatttcttagcaaggatgtgtg

SEQ ID NO: 115123 - DNA, 30 bp, Artificial Sequence
  Synthetic oligonucleotide
gttcacgagcagggtgaggcatgaattgtg

SEQ ID NO: 115124 - DNA, 30 bp, Artificial Sequence
  Synthetic oligonucleotide
ttcaggaggaaagaaacctaccgacttgtg

SEQ ID NO: 115125 - DNA, 30 bp, Artificial Sequence
  Synthetic oligonucleotide
gtggcagtagctttgcgtggtagggttgtg

SEQ ID NO: 115126 - DNA, 30 bp, Artificial Sequence
  Synthetic oligonucleotide
gttaacacgtaagcgtaccaacatgttgtg

SEQ ID NO: 115127 - DNA, 30 bp, Artificial Sequence
  Synthetic oligonucleotide
tggaaaatgctcgaaaccgaatgctttgtg

SEQ ID NO: 115128 - DNA, 30 bp, Artificial Sequence
  Synthetic oligonucleotide
agctcatagtagtatcctagtaagtttgtg

SEQ ID NO: 115129 - DNA, 30 bp, Artificial Sequence
  Synthetic oligonucleotide
ggatcctaaaatgttagtaccccgtttgtg

SEQ ID NO: 115130 - DNA, 30 bp, Artificial Sequence
  Synthetic oligonucleotide
ctgggtcgcaatacgcgaggtgtgtttgtg

SEQ ID NO: 115131 - DNA, 30 bp, Artificial Sequence
  Synthetic oligonucleotide
ctgctgcagcagggttacccagattttgtg

SEQ ID NO: 115132 - DNA, 30 bp, Artificial Sequence
  Synthetic oligonucleotide
gatgcgtaagacggcgcaactacgaaattg

SEQ ID NO: 115133 - DNA, 30 bp, Artificial Sequence
  Synthetic oligonucleotide
ctagggtatactacgtactaatcgaaattg

SEQ ID NO: 115134 - DNA, 30 bp, Artificial Sequence
  Synthetic oligonucleotide
cgccgaccagggagccctgatcggaaattg

SEQ ID NO: 115135 - DNA, 30 bp, Artificial Sequence
  Synthetic oligonucleotide
aaccccaagtaacctctcagagtgcaattg

SEQ ID NO: 115136 - DNA, 30 bp, Artificial Sequence
  Synthetic oligonucleotide
atctgcgcggatcgggtaacgcatcaattg

SEQ ID NO: 115137 - DNA, 30 bp, Artificial Sequence
  Synthetic oligonucleotide
agcatcagatatataaaagcctgagaattg

SEQ ID NO: 115138 - DNA, 30 bp, Artificial Sequence
  Synthetic oligonucleotide
atggtatgcagtcaggttttatgtgaattg

SEQ ID NO: 115139 - DNA, 30 bp, Artificial Sequence
  Synthetic oligonucleotide
ataggtccgtaacgaccgaggggaacattg

SEQ ID NO: 115140 - DNA, 30 bp, Artificial Sequence
  Synthetic oligonucleotide
gaggaacacgtatgcgtatgcctaacattg

SEQ ID NO: 115141 - DNA, 30 bp, Artificial Sequence
  Synthetic oligonucleotide
cttagtctccgaggggatcaccttacattg

SEQ ID NO: 115142 - DNA, 30 bp, Artificial Sequence
  Synthetic oligonucleotide
ctcctgggacagaggcttgtaaggccattg

SEQ ID NO: 115143 - DNA, 30 bp, Artificial Sequence
  Synthetic oligonucleotide
cgggctacaaatgcacagtccaaagcattg

SEQ ID NO: 115144 - DNA, 30 bp, Artificial Sequence
  Synthetic oligonucleotide
tgacggcttaccggaacggcagttagattg

SEQ ID NO: 115145 - DNA, 30 bp, Artificial Sequence
  Synthetic oligonucleotide
tagggtatcgtcgtggatgcctccggattg

SEQ ID NO: 115146 - DNA, 30 bp, Artificial Sequence
  Synthetic oligonucleotide
tgcgtaacgtagcagtagacaatcggattg

SEQ ID NO: 115147 - DNA, 30 bp, Artificial Sequence
  Synthetic oligonucleotide
tgcacgctggggcccggtagcgttggattg

SEQ ID NO: 115148 - DNA, 30 bp, Artificial Sequence
  Synthetic oligonucleotide
atggtacggatctagcctttacaatgattg

SEQ ID NO: 115149 - DNA, 30 bp, Artificial Sequence
  Synthetic oligonucleotide
gcgcggttctaagctctagcacgatgattg

SEQ ID NO: 115150 - DNA, 30 bp, Artificial Sequence
  Synthetic oligonucleotide
ctgacaaccaaagtcaaggtcggttgattg

SEQ ID NO: 115151 - DNA, 30 bp, Artificial Sequence
  Synthetic oligonucleotide
tgtttcgtgcgggggatagtgggaatattg

SEQ ID NO: 115152 - DNA, 30 bp, Artificial Sequence
  Synthetic oligonucleotide
tacgggaattgcaagttacggcccatattg

SEQ ID NO: 115153 - DNA, 30 bp, Artificial Sequence
  Synthetic oligonucleotide
cgcgatatctgaggccttggcaagctattg

SEQ ID NO: 115154 - DNA, 30 bp, Artificial Sequence
  Synthetic oligonucleotide
aaggaggcttgttccttcccttagctattg

SEQ ID NO: 115155 - DNA, 30 bp, Artificial Sequence
  Synthetic oligonucleotide
ggtagtacgggtggggagatattgctattg

SEQ ID NO: 115156 - DNA, 30 bp, Artificial Sequence
  Synthetic oligonucleotide
tgtaagatgttcggaaatagaggggtattg

SEQ ID NO: 115157 - DNA, 30 bp, Artificial Sequence
  Synthetic oligonucleotide
ccttcaaatatgggtagagattggttattg

SEQ ID NO: 115158 - DNA, 30 bp, Artificial Sequence
  Synthetic oligonucleotide
cgtgcccaacggtgtttgctcctgaacttg

SEQ ID NO: 115159 - DNA, 30 bp, Artificial Sequence
  Synthetic oligonucleotide
agtagaaggtttaagcaattgtgtaacttg

SEQ ID NO: 115160 - DNA, 30 bp, Artificial Sequence
  Synthetic oligonucleotide
cggtcccaaactgttaaccgatcacacttg

SEQ ID NO: 115161 - DNA, 30 bp, Artificial Sequence
  Synthetic oligonucleotide
cccagacgactttcgaggacaggcgacttg

SEQ ID NO: 115162 - DNA, 30 bp, Artificial Sequence
  Synthetic oligonucleotide
ccaggcaaatgcacttagtcgcctgacttg

SEQ ID NO: 115163 - DNA, 30 bp, Artificial Sequence
  Synthetic oligonucleotide
cttggcgtctggtactgtcgccaatacttg

SEQ ID NO: 115164 - DNA, 30 bp, Artificial Sequence
  Synthetic oligonucleotide
ggcataggatatgactgcgcacgatacttg

SEQ ID NO: 115165 - DNA, 30 bp, Artificial Sequence
  Synthetic oligonucleotide
ttcgcggaagatcctcaatctcaaaccttg

SEQ ID NO: 115166 - DNA, 30 bp, Artificial Sequence
  Synthetic oligonucleotide
taagttacgaatttactggtaagacccttg

SEQ ID NO: 115167 - DNA, 30 bp, Artificial Sequence
  Synthetic oligonucleotide
aagtgagacttcgacaggtccctacccttg

SEQ ID NO: 115168 - DNA, 30 bp, Artificial Sequence
  Synthetic oligonucleotide
tacggcgttgaaaactgtggccatgccttg

SEQ ID NO: 115169 - DNA, 30 bp, Artificial Sequence
  Synthetic oligonucleotide
gcgtaccaaggtctcctaaacctatccttg

SEQ ID NO: 115170 - DNA, 30 bp, Artificial Sequence
  Synthetic oligonucleotide
atcgacacattcactgaggccatgtccttg

SEQ ID NO: 115171 - DNA, 30 bp, Artificial Sequence
  Synthetic oligonucleotide
gtccgagtataggggggcttgagttccttg

SEQ ID NO: 115172 - DNA, 30 bp, Artificial Sequence
  Synthetic oligonucleotide
taacagcggtcgtgtaggttagagagcttg

SEQ ID NO: 115173 - DNA, 30 bp, Artificial Sequence
  Synthetic oligonucleotide
cccagatcagtgcagacgttcgatcgcttg

SEQ ID NO: 115174 - DNA, 30 bp, Artificial Sequence
  Synthetic oligonucleotide
gctggggacagtggagcattccgcggcttg

SEQ ID NO: 115175 - DNA, 30 bp, Artificial Sequence
  Synthetic oligonucleotide
ggacctgaacactcgcgtacaaattgcttg

SEQ ID NO: 115176 - DNA, 30 bp, Artificial Sequence
  Synthetic oligonucleotide
cgtcagtccacgcaccgttaagtaatcttg

SEQ ID NO: 115177 - DNA, 30 bp, Artificial Sequence
  Synthetic oligonucleotide
tgaaacggttaagcatgagcaagcatcttg

SEQ ID NO: 115178 - DNA, 30 bp, Artificial Sequence
  Synthetic oligonucleotide
agtcggtttctacacgggaaatgtctcttg

SEQ ID NO: 115179 - DNA, 30 bp, Artificial Sequence
  Synthetic oligonucleotide
tggcaagtatggacgaggtcgcaagtcttg

SEQ ID NO: 115180 - DNA, 30 bp, Artificial Sequence
  Synthetic oligonucleotide
gtcgaagggtggtgaaattaatcggtcttg

SEQ ID NO: 115181 - DNA, 30 bp, Artificial Sequence
  Synthetic oligonucleotide
cggggataataaaaatcaagagggttcttg

SEQ ID NO: 115182 - DNA, 30 bp, Artificial Sequence
  Synthetic oligonucleotide
cgtgggtgccaggggaagaaatggttcttg

SEQ ID NO: 115183 - DNA, 30 bp, Artificial Sequence
  Synthetic oligonucleotide
agtagagattggaaccgtctgtgcaagttg

SEQ ID NO: 115184 - DNA, 30 bp, Artificial Sequence
  Synthetic oligonucleotide
cgaagacacgcagatggggggagtaagttg

SEQ ID NO: 115185 - DNA, 30 bp, Artificial Sequence
  Synthetic oligonucleotide
aaggggtgctgtggaggttcccttaagttg

SEQ ID NO: 115186 - DNA, 30 bp, Artificial Sequence
  Synthetic oligonucleotide
ataagggacatcaggtgtatacaacagttg

SEQ ID NO: 115187 - DNA, 30 bp, Artificial Sequence
  Synthetic oligonucleotide
acatacggacagacgtgtacatctcagttg

SEQ ID NO: 115188 - DNA, 30 bp, Artificial Sequence
  Synthetic oligonucleotide
actggaacgagcaactcctgaaacgagttg

SEQ ID NO: 115189 - DNA, 30 bp, Artificial Sequence
  Synthetic oligonucleotide
ggctgcaaacgacccgaagtgcatgagttg

SEQ ID NO: 115190 - DNA, 30 bp, Artificial Sequence
  Synthetic oligonucleotide
cggcacgcacgtttgggccgtagctagttg

SEQ ID NO: 115191 - DNA, 30 bp, Artificial Sequence
  Synthetic oligonucleotide
cgctcgtgaggttggattggatgctagttg

SEQ ID NO: 115192 - DNA, 29 bp, Artificial Sequence
  Synthetic oligonucleotide
ggacatgttatagtccgtcagtgacgttg

SEQ ID NO: 115193 - DNA, 30 bp, Artificial Sequence
  Synthetic oligonucleotide
tacataaggtcacagggtatgggtacgttg

SEQ ID NO: 115194 - DNA, 30 bp, Artificial Sequence
  Synthetic oligonucleotide
atgatggatacgtagtttgaatcggcgttg

SEQ ID NO: 115195 - DNA, 31 bp, Artificial Sequence
  Synthetic oligonucleotide
gccaatgccccacctcacaaggaactcgttg

SEQ ID NO: 115196 - DNA, 30 bp, Artificial Sequence
  Synthetic oligonucleotide
gcaaacagtcacgcgaattggatgtcgttg

SEQ ID NO: 115197 - DNA, 30 bp, Artificial Sequence
  Synthetic oligonucleotide
catatgtcgtgccgaagtcggatttcgttg

SEQ ID NO: 115198 - DNA, 30 bp, Artificial Sequence
  Synthetic oligonucleotide
ccgatgcaatgagggttcacagaaaggttg

SEQ ID NO: 115199 - DNA, 30 bp, Artificial Sequence
  Synthetic oligonucleotide
ctggaaagatctgatctaacgcaagggttg

SEQ ID NO: 115200 - DNA, 30 bp, Artificial Sequence
  Synthetic oligonucleotide
gacgtaaggttcctctgtggggacgggttg

SEQ ID NO: 115201 - DNA, 30 bp, Artificial Sequence
  Synthetic oligonucleotide
acacctagggactctcgggtaatcgggttg

SEQ ID NO: 115202 - DNA, 30 bp, Artificial Sequence
  Synthetic oligonucleotide
tcgaccgatactagctggaaactggggttg

SEQ ID NO: 115203 - DNA, 30 bp, Artificial Sequence
  Synthetic oligonucleotide
atctccggaacagactgaactctggggttg

SEQ ID NO: 115204 - DNA, 30 bp, Artificial Sequence
  Synthetic oligonucleotide
aagttaaacgtgccacaggtcggctggttg

SEQ ID NO: 115205 - DNA, 30 bp, Artificial Sequence
  Synthetic oligonucleotide
cctatcgaagctactcagcttacaatgttg

SEQ ID NO: 115206 - DNA, 30 bp, Artificial Sequence
  Synthetic oligonucleotide
gacgcgtagggcggctcttcgcgaatgttg

SEQ ID NO: 115207 - DNA, 30 bp, Artificial Sequence
  Synthetic oligonucleotide
cgttgcggtcaaccgcaatgatgaatgttg

SEQ ID NO: 115208 - DNA, 30 bp, Artificial Sequence
  Synthetic oligonucleotide
gaaacagatgtacacaagtaggtgatgttg

SEQ ID NO: 115209 - DNA, 30 bp, Artificial Sequence
  Synthetic oligonucleotide
ctagctaaagtgtagccctcccgcctgttg

SEQ ID NO: 115210 - DNA, 30 bp, Artificial Sequence
  Synthetic oligonucleotide
cgactcgtaacgtttaccgttttgctgttg

SEQ ID NO: 115211 - DNA, 30 bp, Artificial Sequence
  Synthetic oligonucleotide
gttagagtgagctaacgacacggtctgttg

SEQ ID NO: 115212 - DNA, 30 bp, Artificial Sequence
  Synthetic oligonucleotide
ccataggttaacgttaaattttgtctgttg

SEQ ID NO: 115213 - DNA, 30 bp, Artificial Sequence
  Synthetic oligonucleotide
ccctgggtgaggtgctagtctcaagtgttg

SEQ ID NO: 115214 - DNA, 30 bp, Artificial Sequence
  Synthetic oligonucleotide
gtccaagaaagaaaaccaatataagtgttg

SEQ ID NO: 115215 - DNA, 30 bp, Artificial Sequence
  Synthetic oligonucleotide
ggcatgtgcaagcggctagggtccttgttg

SEQ ID NO: 115216 - DNA, 30 bp, Artificial Sequence
  Synthetic oligonucleotide
taagggcacgtatgagtggcagaccatttg

SEQ ID NO: 115217 - DNA, 30 bp, Artificial Sequence
  Synthetic oligonucleotide
agaggggagcgcaaattcccagttcatttg

SEQ ID NO: 115218 - DNA, 29 bp, Artificial Sequence
  Synthetic oligonucleotide
acatgtatgctacaagaaaaggagatttg

SEQ ID NO: 115219 - DNA, 30 bp, Artificial Sequence
  Synthetic oligonucleotide
ccttcgcccgtatcaaccgcttccgatttg

SEQ ID NO: 115220 - DNA, 30 bp, Artificial Sequence
  Synthetic oligonucleotide
gtggatagagggaagcgtaccagcgatttg

SEQ ID NO: 115221 - DNA, 30 bp, Artificial Sequence
  Synthetic oligonucleotide
tgcgctcgatacacggatactagcgatttg

SEQ ID NO: 115222 - DNA, 30 bp, Artificial Sequence
  Synthetic oligonucleotide
aaggaatctggagtcagggtgacatatttg

SEQ ID NO: 115223 - DNA, 30 bp, Artificial Sequence
  Synthetic oligonucleotide
gtaagttggggtactgcaataaggtatttg

SEQ ID NO: 115224 - DNA, 30 bp, Artificial Sequence
  Synthetic oligonucleotide
tggtggatgacgcattacgcgtgaactttg

SEQ ID NO: 115225 - DNA, 30 bp, Artificial Sequence
  Synthetic oligonucleotide
agggctccaacccgattccagaacactttg

SEQ ID NO: 115226 - DNA, 30 bp, Artificial Sequence
  Synthetic oligonucleotide
gtcacgggtccatcgcaacagcgcactttg

SEQ ID NO: 115227 - DNA, 30 bp, Artificial Sequence
  Synthetic oligonucleotide
gtcgagaaacctggatggtcgtaacctttg

SEQ ID NO: 115228 - DNA, 30 bp, Artificial Sequence
  Synthetic oligonucleotide
gcgagcgtcgccgaatctgaagtgcctttg

SEQ ID NO: 115229 - DNA, 30 bp, Artificial Sequence
  Synthetic oligonucleotide
aactggtcctggcaacatcgttaggctttg

SEQ ID NO: 115230 - DNA, 30 bp, Artificial Sequence
  Synthetic oligonucleotide
tagccgttcgatgctggattcggtgctttg

SEQ ID NO: 115231 - DNA, 30 bp, Artificial Sequence
  Synthetic oligonucleotide
aggggaattattcaccccaaatcgtctttg

SEQ ID NO: 115232 - DNA, 30 bp, Artificial Sequence
  Synthetic oligonucleotide
tagtcatagaaaatccacatgcgaagtttg

SEQ ID NO: 115233 - DNA, 30 bp, Artificial Sequence
  Synthetic oligonucleotide
taagtgtgggaaacatgaataattagtttg

SEQ ID NO: 115234 - DNA, 30 bp, Artificial Sequence
  Synthetic oligonucleotide
tggcgtggcagagtctgccgaagccgtttg

SEQ ID NO: 115235 - DNA, 30 bp, Artificial Sequence
  Synthetic oligonucleotide
gcttgggatcacagcaagccgagtcgtttg

SEQ ID NO: 115236 - DNA, 30 bp, Artificial Sequence
  Synthetic oligonucleotide
agcgaggtgtggatcacagatttaggtttg

SEQ ID NO: 115237 - DNA, 30 bp, Artificial Sequence
  Synthetic oligonucleotide
tgagaggaaactcacaatataggcggtttg

SEQ ID NO: 115238 - DNA, 30 bp, Artificial Sequence
  Synthetic oligonucleotide
caaatgatagggtggtcgtctgcgggtttg

SEQ ID NO: 115239 - DNA, 30 bp, Artificial Sequence
  Synthetic oligonucleotide
tgtgcagttattgctcgctagtggggtttg

SEQ ID NO: 115240 - DNA, 30 bp, Artificial Sequence
  Synthetic oligonucleotide
ccgattttggtagggggtcagtaatgtttg

SEQ ID NO: 115241 - DNA, 30 bp, Artificial Sequence
  Synthetic oligonucleotide
ggttcaggtggcgtgctcagtacatgtttg

SEQ ID NO: 115242 - DNA, 30 bp, Artificial Sequence
  Synthetic oligonucleotide
gcggatcattaagcaagaggtggcattttg

SEQ ID NO: 115243 - DNA, 30 bp, Artificial Sequence
  Synthetic oligonucleotide
taagcgcgagtattcttgtccgagattttg

SEQ ID NO: 115244 - DNA, 30 bp, Artificial Sequence
  Synthetic oligonucleotide
aggtttatcgcaacataaccgactattttg

SEQ ID NO: 115245 - DNA, 30 bp, Artificial Sequence
  Synthetic oligonucleotide
ccgacttctgtcgtggatccgcaagttttg

SEQ ID NO: 115246 - DNA, 30 bp, Artificial Sequence
  Synthetic oligonucleotide
tgctaagacaagagtagcagtgaagttttg

SEQ ID NO: 115247 - DNA, 30 bp, Artificial Sequence
  Synthetic oligonucleotide
tctcggaaaggcactctcctctgagttttg

SEQ ID NO: 115248 - DNA, 30 bp, Artificial Sequence
  Synthetic oligonucleotide
gggtggacgaatctggggtcgcgcgttttg

SEQ ID NO: 115249 - DNA, 30 bp, Artificial Sequence
  Synthetic oligonucleotide
agggccgtcatgtacttcattggtgttttg

SEQ ID NO: 115250 - DNA, 30 bp, Artificial Sequence
  Synthetic oligonucleotide
caggcgtaagaggttttcactaagtttttg

SEQ ID NO: 115251 - DNA, 30 bp, Artificial Sequence
  Synthetic oligonucleotide
cagtcgtggcaaaacatcctgccaaaaaat

SEQ ID NO: 115252 - DNA, 30 bp, Artificial Sequence
  Synthetic oligonucleotide
ggtagtgcgaattgtatcgtaggcaaaaat

SEQ ID NO: 115253 - DNA, 30 bp, Artificial Sequence
  Synthetic oligonucleotide
aagtgcagggcgggaacgagacataaaaat

SEQ ID NO: 115254 - DNA, 30 bp, Artificial Sequence
  Synthetic oligonucleotide
ggcaggtattaaagccaggagcataaaaat

SEQ ID NO: 115255 - DNA, 30 bp, Artificial Sequence
  Synthetic oligonucleotide
ttgggacaacagcgttcgcgggctaaaaat

SEQ ID NO: 115256 - DNA, 30 bp, Artificial Sequence
  Synthetic oligonucleotide
acaagctatagtgcaggcgcaacgcaaaat

SEQ ID NO: 115257 - DNA, 30 bp, Artificial Sequence
  Synthetic oligonucleotide
agggcgcaggaagcaacaggtgtagaaaat

SEQ ID NO: 115258 - DNA, 30 bp, Artificial Sequence
  Synthetic oligonucleotide
ttttgggcaaccgagcgttggtgggaaaat

SEQ ID NO: 115259 - DNA, 30 bp, Artificial Sequence
  Synthetic oligonucleotide
cgctacgtggccgcccaatgtagataaaat

SEQ ID NO: 115260 - DNA, 30 bp, Artificial Sequence
  Synthetic oligonucleotide
tgcgctcggatccctaagagggactaaaat

SEQ ID NO: 115261 - DNA, 30 bp, Artificial Sequence
  Synthetic oligonucleotide
agtgctacaagcaaagcacgagtgtaaaat

SEQ ID NO: 115262 - DNA, 30 bp, Artificial Sequence
  Synthetic oligonucleotide
cagatcacagaagctgcacaagacacaaat

SEQ ID NO: 115263 - DNA, 30 bp, Artificial Sequence
  Synthetic oligonucleotide
gagtttaactcgggcaaggggcggacaaat

SEQ ID NO: 115264 - DNA, 30 bp, Artificial Sequence
  Synthetic oligonucleotide
gttcgaggtaacagtccaggcaatacaaat

SEQ ID NO: 115265 - DNA, 30 bp, Artificial Sequence
  Synthetic oligonucleotide
tagaggctcaccctgataacgtctacaaat

SEQ ID NO: 115266 - DNA, 30 bp, Artificial Sequence
  Synthetic oligonucleotide
tgtggagggtactatattttaaaagcaaat

SEQ ID NO: 115267 - DNA, 30 bp, Artificial Sequence
  Synthetic oligonucleotide
cggtgcgcgcaacgacaaaaatgcgcaaat

SEQ ID NO: 115268 - DNA, 31 bp, Artificial Sequence
  Synthetic oligonucleotide
agaggggtctatggtaagtcaacctgcaaat

SEQ ID NO: 115269 - DNA, 30 bp, Artificial Sequence
  Synthetic oligonucleotide
gcctatccaggatcggtgtctaaaagaaat

SEQ ID NO: 115270 - DNA, 30 bp, Artificial Sequence
  Synthetic oligonucleotide
aacgcataacagtatttgacaactagaaat

SEQ ID NO: 115271 - DNA, 30 bp, Artificial Sequence
  Synthetic oligonucleotide
tagcttgattaaagagcatggatccgaaat

SEQ ID NO: 115272 - DNA, 30 bp, Artificial Sequence
  Synthetic oligonucleotide
catcctgtttaggcgtactaaaagcgaaat

SEQ ID NO: 115273 - DNA, 30 bp, Artificial Sequence
  Synthetic oligonucleotide
gaatggctgttactactgcaagtgcgaaat

SEQ ID NO: 115274 - DNA, 30 bp, Artificial Sequence
  Synthetic oligonucleotide
catacgtgtaaccgtaatgtcagaggaaat

SEQ ID NO: 115275 - DNA, 30 bp, Artificial Sequence
  Synthetic oligonucleotide
gccgcgcgcgactcaacgagtagaggaaat

SEQ ID NO: 115276 - DNA, 30 bp, Artificial Sequence
  Synthetic oligonucleotide
cttaggcatagtgatgtaagtcgaggaaat

SEQ ID NO: 115277 - DNA, 30 bp, Artificial Sequence
  Synthetic oligonucleotide
tcacgataagctgagggcatgataggaaat

SEQ ID NO: 115278 - DNA, 30 bp, Artificial Sequence
  Synthetic oligonucleotide
gcccagtcgaggtggttaaggcatggaaat

SEQ ID NO: 115279 - DNA, 30 bp, Artificial Sequence
  Synthetic oligonucleotide
caacgtatgacacgtcaggaaagtggaaat

SEQ ID NO: 115280 - DNA, 30 bp, Artificial Sequence
  Synthetic oligonucleotide
tctagacaattacgacatccgagttgaaat

SEQ ID NO: 115281 - DNA, 30 bp, Artificial Sequence
  Synthetic oligonucleotide
aaaccgatagaaggaatttcattttgaaat

SEQ ID NO: 115282 - DNA, 30 bp, Artificial Sequence
  Synthetic oligonucleotide
tggcgcacaacaaagcgacatgacataaat

SEQ ID NO: 115283 - DNA, 30 bp, Artificial Sequence
  Synthetic oligonucleotide
gcgcactggagtatgaattactacataaat

SEQ ID NO: 115284 - DNA, 30 bp, Artificial Sequence
  Synthetic oligonucleotide
ccacgtatccagtcacccgtattcctaaat

SEQ ID NO: 115285 - DNA, 30 bp, Artificial Sequence
  Synthetic oligonucleotide
tgttgtaaagttcagaatgggtggctaaat

SEQ ID NO: 115286 - DNA, 30 bp, Artificial Sequence
  Synthetic oligonucleotide
acatgtccacaaacgcgtgatcttctaaat

SEQ ID NO: 115287 - DNA, 30 bp, Artificial Sequence
  Synthetic oligonucleotide
tctcatgacaatgcgtcagtttaagtaaat

SEQ ID NO: 115288 - DNA, 30 bp, Artificial Sequence
  Synthetic oligonucleotide
gcacggtccacgcggcgctactgggtaaat

SEQ ID NO: 115289 - DNA, 30 bp, Artificial Sequence
  Synthetic oligonucleotide
tctacgggaagccttgatgtcatggtaaat

SEQ ID NO: 115290 - DNA, 30 bp, Artificial Sequence
  Synthetic oligonucleotide
agctaccgatactagtaacaagtggtaaat

SEQ ID NO: 115291 - DNA, 30 bp, Artificial Sequence
  Synthetic oligonucleotide
tcagaagaatgggggcatacaactgtaaat

SEQ ID NO: 115292 - DNA, 30 bp, Artificial Sequence
  Synthetic oligonucleotide
agaacgagggacgcgcgaatgtgtgtaaat

SEQ ID NO: 115293 - DNA, 30 bp, Artificial Sequence
  Synthetic oligonucleotide
tgaggaaatgtcttggcgactccattaaat

SEQ ID NO: 115294 - DNA, 30 bp, Artificial Sequence
  Synthetic oligonucleotide
accgtgttagctatctgagagacgttaaat

SEQ ID NO: 115295 - DNA, 30 bp, Artificial Sequence
  Synthetic oligonucleotide
gatacggaatcatcaaaaatgaagaacaat

SEQ ID NO: 115296 - DNA, 30 bp, Artificial Sequence
  Synthetic oligonucleotide
gaatagcggacgaatgaaagtgagaacaat

SEQ ID NO: 115297 - DNA, 30 bp, Artificial Sequence
  Synthetic oligonucleotide
tgcgtatgcgcactccgatacccgaacaat

SEQ ID NO: 115298 - DNA, 30 bp, Artificial Sequence
  Synthetic oligonucleotide
aagggcattcattaccactcgcttaacaat

SEQ ID NO: 115299 - DNA, 30 bp, Artificial Sequence
  Synthetic oligonucleotide
gcatcataaagcaccaggctgttccacaat

SEQ ID NO: 115300 - DNA, 30 bp, Artificial Sequence
  Synthetic oligonucleotide
acaagttgagacgtggcggttgagcacaat

SEQ ID NO: 115301 - DNA, 30 bp, Artificial Sequence
  Synthetic oligonucleotide
gtcgggcaggaagcagatgagtctcacaat

SEQ ID NO: 115302 - DNA, 30 bp, Artificial Sequence
  Synthetic oligonucleotide
ctcataaggcgcataccatacggtcacaat

SEQ ID NO: 115303 - DNA, 30 bp, Artificial Sequence
  Synthetic oligonucleotide
gcctggtcaccaaagtgtaatcgagacaat

SEQ ID NO: 115304 - DNA, 30 bp, Artificial Sequence
  Synthetic oligonucleotide
tttctagcgggggaacaacacccggacaat

SEQ ID NO: 115305 - DNA, 30 bp, Artificial Sequence
  Synthetic oligonucleotide
gtcgatgacacttgattcgatgtatacaat

SEQ ID NO: 115306 - DNA, 30 bp, Artificial Sequence
  Synthetic oligonucleotide
acgcgtgatctggctcaatccctctacaat

SEQ ID NO: 115307 - DNA, 30 bp, Artificial Sequence
  Synthetic oligonucleotide
gtggcatccagactaacgacgtcttacaat

SEQ ID NO: 115308 - DNA, 30 bp, Artificial Sequence
  Synthetic oligonucleotide
cattagggatggtacaaatcgttttacaat

SEQ ID NO: 115309 - DNA, 30 bp, Artificial Sequence
  Synthetic oligonucleotide
gcgatatacggtcacagaaaatacaccaat

SEQ ID NO: 115310 - DNA, 30 bp, Artificial Sequence
  Synthetic oligonucleotide
cgtaagaggatcgggcaacggcccaccaat

SEQ ID NO: 115311 - DNA, 30 bp, Artificial Sequence
  Synthetic oligonucleotide
caaggtcctaatttacgaataagtaccaat

SEQ ID NO: 115312 - DNA, 30 bp, Artificial Sequence
  Synthetic oligonucleotide
caatacttacgcgaatacatgtcgagcaat

SEQ ID NO: 115313 - DNA, 30 bp, Artificial Sequence
  Synthetic oligonucleotide
ctaatccagaaatcagtagcatatagcaat

SEQ ID NO: 115314 - DNA, 30 bp, Artificial Sequence
  Synthetic oligonucleotide
gtgcggagtccagaaccggctggtagcaat

SEQ ID NO: 115315 - DNA, 30 bp, Artificial Sequence
  Synthetic oligonucleotide
atgagaagaggggactggtgcttccgcaat

SEQ ID NO: 115316 - DNA, 30 bp, Artificial Sequence
  Synthetic oligonucleotide
caaataatagatataaatactgcaggcaat

SEQ ID NO: 115317 - DNA, 30 bp, Artificial Sequence
  Synthetic oligonucleotide
gtcagagctaacagccacgcaatcggcaat

SEQ ID NO: 115318 - DNA, 30 bp, Artificial Sequence
  Synthetic oligonucleotide
gatgatccattgcattaccagggtggcaat

SEQ ID NO: 115319 - DNA, 30 bp, Artificial Sequence
  Synthetic oligonucleotide
caggatcgtttagaggcctcgtactgcaat

SEQ ID NO: 115320 - DNA, 30 bp, Artificial Sequence
  Synthetic oligonucleotide
caggctcgaatgacctggggggtttgcaat

SEQ ID NO: 115321 - DNA, 30 bp, Artificial Sequence
  Synthetic oligonucleotide
ttgtaaagagttagtcttcggcgaatcaat

SEQ ID NO: 115322 - DNA, 30 bp, Artificial Sequence
  Synthetic oligonucleotide
tacgggcgtgttgtcattatcgtcatcaat

SEQ ID NO: 115323 - DNA, 30 bp, Artificial Sequence
  Synthetic oligonucleotide
cgtaactcccgcctcgggtcggtcatcaat

SEQ ID NO: 115324 - DNA, 30 bp, Artificial Sequence
  Synthetic oligonucleotide
tctcctgaaagcgattgaaggcagatcaat

SEQ ID NO: 115325 - DNA, 30 bp, Artificial Sequence
  Synthetic oligonucleotide
cattcacaaactggagaggtactgatcaat

SEQ ID NO: 115326 - DNA, 30 bp, Artificial Sequence
  Synthetic oligonucleotide
acgtggtaggagagaagtaatttgatcaat

SEQ ID NO: 115327 - DNA, 30 bp, Artificial Sequence
  Synthetic oligonucleotide
gtcggccagttaatccagcagatactcaat

SEQ ID NO: 115328 - DNA, 30 bp, Artificial Sequence
  Synthetic oligonucleotide
agaggaactggttataagagttatctcaat

SEQ ID NO: 115329 - DNA, 30 bp, Artificial Sequence
  Synthetic oligonucleotide
cggcatcccgaaacgcaacgggctctcaat

SEQ ID NO: 115330 - DNA, 30 bp, Artificial Sequence
  Synthetic oligonucleotide
gggtagatggaaggaccagatggtctcaat

SEQ ID NO: 115331 - DNA, 30 bp, Artificial Sequence
  Synthetic oligonucleotide
tgccggctgtaaagtcagtgcggagtcaat

SEQ ID NO: 115332 - DNA, 30 bp, Artificial Sequence
  Synthetic oligonucleotide
gcgttcgatccggattcttcacacgtcaat

SEQ ID NO: 115333 - DNA, 30 bp, Artificial Sequence
  Synthetic oligonucleotide
tcggcttctaatccctaacatgttgtcaat

SEQ ID NO: 115334 - DNA, 30 bp, Artificial Sequence
  Synthetic oligonucleotide
cgaggatgtaagtgctttcgcaaattcaat

SEQ ID NO: 115335 - DNA, 30 bp, Artificial Sequence
  Synthetic oligonucleotide
aggacttgtaatttaagtttgcgattcaat

SEQ ID NO: 115336 - DNA, 30 bp, Artificial Sequence
  Synthetic oligonucleotide
cgattatgggggcgtacactagatttcaat

SEQ ID NO: 115337 - DNA, 30 bp, Artificial Sequence
  Synthetic oligonucleotide
ggaaccacgtcagcagatgccggaaagaat

SEQ ID NO: 115338 - DNA, 30 bp, Artificial Sequence
  Synthetic oligonucleotide
agttagcatggtttggggcggggagagaat

SEQ ID NO: 115339 - DNA, 30 bp, Artificial Sequence
  Synthetic oligonucleotide
gggttatttcgtctagggtgtgcgtagaat

SEQ ID NO: 115340 - DNA, 30 bp, Artificial Sequence
  Synthetic oligonucleotide
ggggcaatgttggccgaatctacaccgaat

SEQ ID NO: 115341 - DNA, 30 bp, Artificial Sequence
  Synthetic oligonucleotide
ttcgctcgcttgaaaaagaacataccgaat

SEQ ID NO: 115342 - DNA, 30 bp, Artificial Sequence
  Synthetic oligonucleotide
tgatcctcggcttgtgaacggaggccgaat

SEQ ID NO: 115343 - DNA, 30 bp, Artificial Sequence
  Synthetic oligonucleotide
atcaagcaagagcactatctcctgccgaat

SEQ ID NO: 115344 - DNA, 30 bp, Artificial Sequence
  Synthetic oligonucleotide
cagcggcaccgtgagggttgcgaggcgaat

SEQ ID NO: 115345 - DNA, 30 bp, Artificial Sequence
  Synthetic oligonucleotide
attgtgagcggatatcgaatcatggcgaat

SEQ ID NO: 115346 - DNA, 30 bp, Artificial Sequence
  Synthetic oligonucleotide
aagctactttggcagtaaggtgtggcgaat

SEQ ID NO: 115347 - DNA, 30 bp, Artificial Sequence
  Synthetic oligonucleotide
tcactcaagattagcggagggtgatcgaat

SEQ ID NO: 115348 - DNA, 30 bp, Artificial Sequence
  Synthetic oligonucleotide
cagaatcaccagcagagcgaagagtcgaat

SEQ ID NO: 115349 - DNA, 30 bp, Artificial Sequence
  Synthetic oligonucleotide
acgcggaagcctccacatcagccttcgaat

SEQ ID NO: 115350 - DNA, 30 bp, Artificial Sequence
  Synthetic oligonucleotide
atgcttaccaccccacgtgaacaaaggaat

SEQ ID NO: 115351 - DNA, 30 bp, Artificial Sequence
  Synthetic oligonucleotide
atgttgcgctagagaacaagtgtcaggaat

SEQ ID NO: 115352 - DNA, 30 bp, Artificial Sequence
  Synthetic oligonucleotide
cagctccggcgatctggatctaagaggaat

SEQ ID NO: 115353 - DNA, 30 bp, Artificial Sequence
  Synthetic oligonucleotide
tggagtgtactgtgacgtcaaaaacggaat

SEQ ID NO: 115354 - DNA, 30 bp, Artificial Sequence
  Synthetic oligonucleotide
aagcatggtaccgcgatatcattcgggaat

SEQ ID NO: 115355 - DNA, 30 bp, Artificial Sequence
  Synthetic oligonucleotide
cggcatcacgcggtgtcgcacatggggaat

SEQ ID NO: 115356 - DNA, 30 bp, Artificial Sequence
  Synthetic oligonucleotide
cggacaaacccacggggggtcaggatgaat

SEQ ID NO: 115357 - DNA, 30 bp, Artificial Sequence
  Synthetic oligonucleotide
atgtggacgctggcgtaaactcggatgaat

SEQ ID NO: 115358 - DNA, 30 bp, Artificial Sequence
  Synthetic oligonucleotide
ggaactgcggccatggttaatttgatgaat

SEQ ID NO: 115359 - DNA, 30 bp, Artificial Sequence
  Synthetic oligonucleotide
ttacggtccggcttttttggaggcctgaat

SEQ ID NO: 115360 - DNA, 30 bp, Artificial Sequence
  Synthetic oligonucleotide
tgtgacgagctagaagttatcaaagtgaat

SEQ ID NO: 115361 - DNA, 31 bp, Artificial Sequence
  Synthetic oligonucleotide
tggatgagcacttcagatgactaacgtgaat

SEQ ID NO: 115362 - DNA, 30 bp, Artificial Sequence
  Synthetic oligonucleotide
ttgggagtcccttccaaagcaaccgtgaat

SEQ ID NO: 115363 - DNA, 30 bp, Artificial Sequence
  Synthetic oligonucleotide
tcgcgtgagacgtctagcaggcgggtgaat

SEQ ID NO: 115364 - DNA, 30 bp, Artificial Sequence
  Synthetic oligonucleotide
ccctacggggggaagatcagttgggtgaat

SEQ ID NO: 115365 - DNA, 30 bp, Artificial Sequence
  Synthetic oligonucleotide
aagaaaggaccgggcgagacggtggtgaat

SEQ ID NO: 115366 - DNA, 30 bp, Artificial Sequence
  Synthetic oligonucleotide
taataatatccagttcaagcaagtgtgaat

SEQ ID NO: 115367 - DNA, 30 bp, Artificial Sequence
  Synthetic oligonucleotide
ttggccgagggttcaccctgccgattgaat

SEQ ID NO: 115368 - DNA, 30 bp, Artificial Sequence
  Synthetic oligonucleotide
cgagcaacggaacatcgaacgaatttgaat

SEQ ID NO: 115369 - DNA, 30 bp, Artificial Sequence
  Synthetic oligonucleotide
aaggtaagagggaaagttgcctatttgaat

SEQ ID NO: 115370 - DNA, 30 bp, Artificial Sequence
  Synthetic oligonucleotide
cggtacattggagaggatgtttgtttgaat

SEQ ID NO: 115371 - DNA, 30 bp, Artificial Sequence
  Synthetic oligonucleotide
caatggatgcgaatacatactcgcaataat

SEQ ID NO: 115372 - DNA, 30 bp, Artificial Sequence
  Synthetic oligonucleotide
agggaaacatggcatcgcgggtgtaataat

SEQ ID NO: 115373 - DNA, 30 bp, Artificial Sequence
  Synthetic oligonucleotide
gactacatgaagtgactatgcctccataat

SEQ ID NO: 115374 - DNA, 30 bp, Artificial Sequence
  Synthetic oligonucleotide
ccaccaaaatgcgagccccccgctcataat

SEQ ID NO: 115375 - DNA, 30 bp, Artificial Sequence
  Synthetic oligonucleotide
actgtgtaattgtgtaagtggcttcataat

SEQ ID NO: 115376 - DNA, 30 bp, Artificial Sequence
  Synthetic oligonucleotide
gggcaaagcagtagaaggctacaagataat

SEQ ID NO: 115377 - DNA, 30 bp, Artificial Sequence
  Synthetic oligonucleotide
ggcgtagcagtgtaggaataagtggataat

SEQ ID NO: 115378 - DNA, 30 bp, Artificial Sequence
  Synthetic oligonucleotide
aggcgcaaaatattacagggtcatgataat

SEQ ID NO: 115379 - DNA, 30 bp, Artificial Sequence
  Synthetic oligonucleotide
aggcggggatctgtccatttcctgtataat

SEQ ID NO: 115380 - DNA, 30 bp, Artificial Sequence
  Synthetic oligonucleotide
atcaacaaagtgagcagccacaaaactaat

SEQ ID NO: 115381 - DNA, 30 bp, Artificial Sequence
  Synthetic oligonucleotide
gatgggggggcgttttgtaggcaaactaat

SEQ ID NO: 115382 - DNA, 30 bp, Artificial Sequence
  Synthetic oligonucleotide
tctcagaggaggcaagataacggaactaat

SEQ ID NO: 115383 - DNA, 30 bp, Artificial Sequence
  Synthetic oligonucleotide
acaatcaggcggccgaagctgaacactaat

SEQ ID NO: 115384 - DNA, 30 bp, Artificial Sequence
  Synthetic oligonucleotide
aggccgtactaggcgtaccacggcactaat

SEQ ID NO: 115385 - DNA, 30 bp, Artificial Sequence
  Synthetic oligonucleotide
cgggatagctgtagtactcagtgacctaat

SEQ ID NO: 115386 - DNA, 30 bp, Artificial Sequence
  Synthetic oligonucleotide
ccctgaccagacgggcggggtaaccctaat

SEQ ID NO: 115387 - DNA, 30 bp, Artificial Sequence
  Synthetic oligonucleotide
cgggatgccccgggcacaaagacgcctaat

SEQ ID NO: 115388 - DNA, 30 bp, Artificial Sequence
  Synthetic oligonucleotide
aaggcgtcatagttagaagagaggcctaat

SEQ ID NO: 115389 - DNA, 30 bp, Artificial Sequence
  Synthetic oligonucleotide
gaacgacctccatggagcgcgaggcctaat

SEQ ID NO: 115390 - DNA, 30 bp, Artificial Sequence
  Synthetic oligonucleotide
gagttactcacgtgacgagactgtcctaat

SEQ ID NO: 115391 - DNA, 30 bp, Artificial Sequence
  Synthetic oligonucleotide
cacaaacaagtccgcccattgaaagctaat

SEQ ID NO: 115392 - DNA, 30 bp, Artificial Sequence
  Synthetic oligonucleotide
cgttagagatccgaacgaacataagctaat

SEQ ID NO: 115393 - DNA, 30 bp, Artificial Sequence
  Synthetic oligonucleotide
ttgttgacggtacgtataaggggggctaat

SEQ ID NO: 115394 - DNA, 30 bp, Artificial Sequence
  Synthetic oligonucleotide
ctaacacccgcatagcaagagggttctaat

SEQ ID NO: 115395 - DNA, 30 bp, Artificial Sequence
  Synthetic oligonucleotide
aaaggcggcgtggcaaagtatggttctaat

SEQ ID NO: 115396 - DNA, 30 bp, Artificial Sequence
  Synthetic oligonucleotide
cttgtgagggaccggcggggaccaagtaat

SEQ ID NO: 115397 - DNA, 30 bp, Artificial Sequence
  Synthetic oligonucleotide
cttagcattcgaaaaaggggcgacagtaat

SEQ ID NO: 115398 - DNA, 30 bp, Artificial Sequence
  Synthetic oligonucleotide
gcagcgcggaaagggtctcggacacgtaat

SEQ ID NO: 115399 - DNA, 30 bp, Artificial Sequence
  Synthetic oligonucleotide
tataccgtgccaacatgaagaagacgtaat

SEQ ID NO: 115400 - DNA, 30 bp, Artificial Sequence
  Synthetic oligonucleotide
atgtggttggattaagctaacctaggtaat

SEQ ID NO: 115401 - DNA, 30 bp, Artificial Sequence
  Synthetic oligonucleotide
agccggagtctgtcaaacggtccgggtaat

SEQ ID NO: 115402 - DNA, 30 bp, Artificial Sequence
  Synthetic oligonucleotide
tcaggcgtgcgtagtcatggagggggtaat

SEQ ID NO: 115403 - DNA, 30 bp, Artificial Sequence
  Synthetic oligonucleotide
ccatgtagaggcatatggccaattggtaat

SEQ ID NO: 115404 - DNA, 30 bp, Artificial Sequence
  Synthetic oligonucleotide
atagggacttctaagagtcggcaaattaat

SEQ ID NO: 115405 - DNA, 30 bp, Artificial Sequence
  Synthetic oligonucleotide
acgagtacagcagtactgcattaaattaat

SEQ ID NO: 115406 - DNA, 30 bp, Artificial Sequence
  Synthetic oligonucleotide
aaaagagctgagccggaggagcccattaat

SEQ ID NO: 115407 - DNA, 30 bp, Artificial Sequence
  Synthetic oligonucleotide
taagaaggtgagatagtgttgtccattaat

SEQ ID NO: 115408 - DNA, 30 bp, Artificial Sequence
  Synthetic oligonucleotide
agggataagggggccagactgccgattaat

SEQ ID NO: 115409 - DNA, 30 bp, Artificial Sequence
  Synthetic oligonucleotide
aactgacggtgcacgacaccaatccttaat

SEQ ID NO: 115410 - DNA, 30 bp, Artificial Sequence
  Synthetic oligonucleotide
gatccctagctatatcagtggaagcttaat

SEQ ID NO: 115411 - DNA, 30 bp, Artificial Sequence
  Synthetic oligonucleotide
gatgattcagtgtgccgaggggacgttaat

SEQ ID NO: 115412 - DNA, 31 bp, Artificial Sequence
  Synthetic oligonucleotide
ggaagggggttcagcagttcgttcggttaat

SEQ ID NO: 115413 - DNA, 30 bp, Artificial Sequence
  Synthetic oligonucleotide
atcgtagcaggctgcgacgaggctgttaat

SEQ ID NO: 115414 - DNA, 30 bp, Artificial Sequence
  Synthetic oligonucleotide
ccagctttgtaaaagtgaggagccaaacat

SEQ ID NO: 115415 - DNA, 30 bp, Artificial Sequence
  Synthetic oligonucleotide
cagattgcaactcgaagaccgagcaaacat

SEQ ID NO: 115416 - DNA, 29 bp, Artificial Sequence
  Synthetic oligonucleotide
ctcactagaatcgcccccgttaacaacat

SEQ ID NO: 115417 - DNA, 30 bp, Artificial Sequence
  Synthetic oligonucleotide
ttccccggtaatagtgcgcgctggcaacat

SEQ ID NO: 115418 - DNA, 30 bp, Artificial Sequence
  Synthetic oligonucleotide
acgagacacccgtgtgaggagttgcaacat

SEQ ID NO: 115419 - DNA, 30 bp, Artificial Sequence
  Synthetic oligonucleotide
acaaagcaaagcgttttggatagtcaacat

SEQ ID NO: 115420 - DNA, 30 bp, Artificial Sequence
  Synthetic oligonucleotide
ggcttaactctggtaacggatgttcaacat

SEQ ID NO: 115421 - DNA, 30 bp, Artificial Sequence
  Synthetic oligonucleotide
acgtaccgagattctccatggtcggaacat

SEQ ID NO: 115422 - DNA, 30 bp, Artificial Sequence
  Synthetic oligonucleotide
cgggctcagcgggaaaaatgacttgaacat

SEQ ID NO: 115423 - DNA, 30 bp, Artificial Sequence
  Synthetic oligonucleotide
tcggaatgacttactctcattgcataacat

SEQ ID NO: 115424 - DNA, 30 bp, Artificial Sequence
  Synthetic oligonucleotide
gggcatcatatgtcagaccccaagtaacat

SEQ ID NO: 115425 - DNA, 30 bp, Artificial Sequence
  Synthetic oligonucleotide
tcgcgttgtgctgattgctggacgtaacat

SEQ ID NO: 115426 - DNA, 30 bp, Artificial Sequence
  Synthetic oligonucleotide
gctcgtgaagcacggacattcaattaacat

SEQ ID NO: 115427 - DNA, 30 bp, Artificial Sequence
  Synthetic oligonucleotide
ccgggaacgattgactaggttaaaacacat

SEQ ID NO: 115428 - DNA, 30 bp, Artificial Sequence
  Synthetic oligonucleotide
ggcaaacgtacacccaatgcgcatacacat

SEQ ID NO: 115429 - DNA, 30 bp, Artificial Sequence
  Synthetic oligonucleotide
gatagaagccgtcgaccggcccgcccacat

SEQ ID NO: 115430 - DNA, 30 bp, Artificial Sequence
  Synthetic oligonucleotide
gaacggcctgagttccgctggcgcccacat

SEQ ID NO: 115431 - DNA, 30 bp, Artificial Sequence
  Synthetic oligonucleotide
tggatgcggtatatattgttacggccacat

SEQ ID NO: 115432 - DNA, 30 bp, Artificial Sequence
  Synthetic oligonucleotide
cacactggagaattgcagaacaaggcacat

SEQ ID NO: 115433 - DNA, 30 bp, Artificial Sequence
  Synthetic oligonucleotide
taagctgcgagggcgactgtggcttcacat

SEQ ID NO: 115434 - DNA, 30 bp, Artificial Sequence
  Synthetic oligonucleotide
gtagggcgcacatacgtgggggtaagacat

SEQ ID NO: 115435 - DNA, 30 bp, Artificial Sequence
  Synthetic oligonucleotide
agtacatgcaaggaatccctagtcagacat

SEQ ID NO: 115436 - DNA, 30 bp, Artificial Sequence
  Synthetic oligonucleotide
aagttcgaaaaactctcacgtacacgacat

SEQ ID NO: 115437 - DNA, 30 bp, Artificial Sequence
  Synthetic oligonucleotide
agacgtcggaattgatacattcgtcgacat

SEQ ID NO: 115438 - DNA, 30 bp, Artificial Sequence
  Synthetic oligonucleotide
tcggagacgtacagcttaagaaacggacat

SEQ ID NO: 115439 - DNA, 30 bp, Artificial Sequence
  Synthetic oligonucleotide
ccttaacggtaccgacaggggagcggacat

SEQ ID NO: 115440 - DNA, 30 bp, Artificial Sequence
  Synthetic oligonucleotide
aacgtcatcaaaaaagtgtaacagggacat

SEQ ID NO: 115441 - DNA, 30 bp, Artificial Sequence
  Synthetic oligonucleotide
gaaggacactgattgaacacgtagtgacat

SEQ ID NO: 115442 - DNA, 30 bp, Artificial Sequence
  Synthetic oligonucleotide
accgtatacgaagacattgcaacgctacat

SEQ ID NO: 115443 - DNA, 30 bp, Artificial Sequence
  Synthetic oligonucleotide
actggcgagcagcatactcacgggctacat

SEQ ID NO: 115444 - DNA, 30 bp, Artificial Sequence
  Synthetic oligonucleotide
aagctatcatgccgatatgaatttctacat

SEQ ID NO: 115445 - DNA, 30 bp, Artificial Sequence
  Synthetic oligonucleotide
agcgaacgggccagggcgtgaccggtacat

SEQ ID NO: 115446 - DNA, 30 bp, Artificial Sequence
  Synthetic oligonucleotide
agaggagggcggagcacgccaagggtacat

SEQ ID NO: 115447 - DNA, 30 bp, Artificial Sequence
  Synthetic oligonucleotide
ggaaccgaaatacttgtgccgtatgtacat

SEQ ID NO: 115448 - DNA, 30 bp, Artificial Sequence
  Synthetic oligonucleotide
atccgaaactgtcgactcgccggaaaccat

SEQ ID NO: 115449 - DNA, 30 bp, Artificial Sequence
  Synthetic oligonucleotide
taccgagcaggaatttggcgctacaaccat

SEQ ID NO: 115450 - DNA, 30 bp, Artificial Sequence
  Synthetic oligonucleotide
tcttgaacagttagctctagaccccaccat

SEQ ID NO: 115451 - DNA, 30 bp, Artificial Sequence
  Synthetic oligonucleotide
tatgggggcatttagaggcgcgcccaccat

SEQ ID NO: 115452 - DNA, 30 bp, Artificial Sequence
  Synthetic oligonucleotide
acgcacggcgattcacccgagaagcaccat

SEQ ID NO: 115453 - DNA, 30 bp, Artificial Sequence
  Synthetic oligonucleotide
tcaccccgtgcttggcataaagtggaccat

SEQ ID NO: 115454 - DNA, 30 bp, Artificial Sequence
  Synthetic oligonucleotide
gatcgcaaacaccgtttgaaatatgaccat

SEQ ID NO: 115455 - DNA, 30 bp, Artificial Sequence
  Synthetic oligonucleotide
aaggctgtatgtgacaagaatgcataccat

SEQ ID NO: 115456 - DNA, 30 bp, Artificial Sequence
  Synthetic oligonucleotide
gctggcggggagggatcagtaccgtaccat

SEQ ID NO: 115457 - DNA, 30 bp, Artificial Sequence
  Synthetic oligonucleotide
tcgggaatcgtgccaattccggccacccat

SEQ ID NO: 115458 - DNA, 30 bp, Artificial Sequence
  Synthetic oligonucleotide
gcgagacaaagctagacgacgtcggcccat

SEQ ID NO: 115459 - DNA, 30 bp, Artificial Sequence
  Synthetic oligonucleotide
actggcatggggtaaaacattagatcccat

SEQ ID NO: 115460 - DNA, 30 bp, Artificial Sequence
  Synthetic oligonucleotide
tcacggcgacgtcgagctgttctatcccat

SEQ ID NO: 115461 - DNA, 30 bp, Artificial Sequence
  Synthetic oligonucleotide
aggaatcgcaggataatttactactcccat

SEQ ID NO: 115462 - DNA, 31 bp, Artificial Sequence
  Synthetic oligonucleotide
atcaaacgggtgaacgtctgccgtgtcccat

SEQ ID NO: 115463 - DNA, 30 bp, Artificial Sequence
  Synthetic oligonucleotide
aatggtacttctaaaaggctaaattcccat

SEQ ID NO: 115464 - DNA, 30 bp, Artificial Sequence
  Synthetic oligonucleotide
accacttgatacagtttcctagaaagccat

SEQ ID NO: 115465 - DNA, 30 bp, Artificial Sequence
  Synthetic oligonucleotide
gtgggcaaatattccggcaatctaagccat

SEQ ID NO: 115466 - DNA, 30 bp, Artificial Sequence
  Synthetic oligonucleotide
cggggggtgaatatatcctacgcgagccat

SEQ ID NO: 115467 - DNA, 30 bp, Artificial Sequence
  Synthetic oligonucleotide
cggagccgctcgcagtcaagtatgagccat

SEQ ID NO: 115468 - DNA, 30 bp, Artificial Sequence
  Synthetic oligonucleotide
ggacaccggaacaccgttatctaccgccat

SEQ ID NO: 115469 - DNA, 30 bp, Artificial Sequence
  Synthetic oligonucleotide
gagagacccagaaaccaacatcatcgccat

SEQ ID NO: 115470 - DNA, 30 bp, Artificial Sequence
  Synthetic oligonucleotide
gaccggattagtgggctgtctggaggccat

SEQ ID NO: 115471 - DNA, 30 bp, Artificial Sequence
  Synthetic oligonucleotide
ccgtatgtaagttaaatagcgctaggccat

SEQ ID NO: 115472 - DNA, 30 bp, Artificial Sequence
  Synthetic oligonucleotide
acgaaccgtcgttgttaatctatcggccat

SEQ ID NO: 115473 - DNA, 30 bp, Artificial Sequence
  Synthetic oligonucleotide
aagccggaagtgccgatccgtctgggccat

SEQ ID NO: 115474 - DNA, 30 bp, Artificial Sequence
  Synthetic oligonucleotide
tcatgtaggatgcacccagcgcgtggccat

SEQ ID NO: 115475 - DNA, 30 bp, Artificial Sequence
  Synthetic oligonucleotide
ctcgcccgaggatcgtctcatgttggccat

SEQ ID NO: 115476 - DNA, 30 bp, Artificial Sequence
  Synthetic oligonucleotide
ttgctactcccgcaaatccaaacatgccat

SEQ ID NO: 115477 - DNA, 30 bp, Artificial Sequence
  Synthetic oligonucleotide
agggggaagtgtgtatccacaacctgccat

SEQ ID NO: 115478 - DNA, 30 bp, Artificial Sequence
  Synthetic oligonucleotide
atagggcaccaagaccggtacgtttgccat

SEQ ID NO: 115479 - DNA, 30 bp, Artificial Sequence
  Synthetic oligonucleotide
gagaatctctgccgggaaacgaacatccat

SEQ ID NO: 115480 - DNA, 30 bp, Artificial Sequence
  Synthetic oligonucleotide
acaagtggtacaataagatcactgatccat

SEQ ID NO: 115481 - DNA, 30 bp, Artificial Sequence
  Synthetic oligonucleotide
cggagataaaggtacactaccaggctccat

SEQ ID NO: 115482 - DNA, 30 bp, Artificial Sequence
  Synthetic oligonucleotide
atggatagttaaacagggaatcaagtccat

SEQ ID NO: 115483 - DNA, 30 bp, Artificial Sequence
  Synthetic oligonucleotide
tgtaacaaggcgtggagattaacggtccat

SEQ ID NO: 115484 - DNA, 30 bp, Artificial Sequence
  Synthetic oligonucleotide
tggagatttagggccatataacgaaagcat

SEQ ID NO: 115485 - DNA, 30 bp, Artificial Sequence
  Synthetic oligonucleotide
ctcggcgtatggcaaatccattgcaagcat

SEQ ID NO: 115486 - DNA, 30 bp, Artificial Sequence
  Synthetic oligonucleotide
ccggcaaggattctcagccccgcgaagcat

SEQ ID NO: 115487 - DNA, 30 bp, Artificial Sequence
  Synthetic oligonucleotide
aggggaacttaaacccgatatctacagcat

SEQ ID NO: 115488 - DNA, 30 bp, Artificial Sequence
  Synthetic oligonucleotide
agcaaaatcaagtggcggtgcatcgagcat

SEQ ID NO: 115489 - DNA, 30 bp, Artificial Sequence
  Synthetic oligonucleotide
gtcacgtccgcattgtaggggggggagcat

SEQ ID NO: 115490 - DNA, 30 bp, Artificial Sequence
  Synthetic oligonucleotide
tgttctgatggaaactatttctgggagcat

SEQ ID NO: 115491 - DNA, 30 bp, Artificial Sequence
  Synthetic oligonucleotide
tctagacatctgggtgactacgagtagcat

SEQ ID NO: 115492 - DNA, 30 bp, Artificial Sequence
  Synthetic oligonucleotide
agggtatccaaccccttttcgagttagcat

SEQ ID NO: 115493 - DNA, 30 bp, Artificial Sequence
  Synthetic oligonucleotide
gaaatcagacccagacccagtcaaacgcat

SEQ ID NO: 115494 - DNA, 30 bp, Artificial Sequence
  Synthetic oligonucleotide
ataacggggctagcggatagagcaccgcat

SEQ ID NO: 115495 - DNA, 30 bp, Artificial Sequence
  Synthetic oligonucleotide
cattcgctcgtacttgctcaactcccgcat

SEQ ID NO: 115496 - DNA, 30 bp, Artificial Sequence
  Synthetic oligonucleotide
gccggatctacaatatagaatagtgcgcat

SEQ ID NO: 115497 - DNA, 30 bp, Artificial Sequence
  Synthetic oligonucleotide
cggaaacagtcacatggcgcctattcgcat

SEQ ID NO: 115498 - DNA, 30 bp, Artificial Sequence
  Synthetic oligonucleotide
cgggtcttcattgcacagtcacaaaggcat

SEQ ID NO: 115499 - DNA, 30 bp, Artificial Sequence
  Synthetic oligonucleotide
aggctgcaggactcggagcgatacaggcat

SEQ ID NO: 115500 - DNA, 30 bp, Artificial Sequence
  Synthetic oligonucleotide
tggggctcgcattgtcgtactcccaggcat

SEQ ID NO: 115501 - DNA, 30 bp, Artificial Sequence
  Synthetic oligonucleotide
gtcgagtacactcatacggtaatcaggcat

SEQ ID NO: 115502 - DNA, 30 bp, Artificial Sequence
  Synthetic oligonucleotide
gtcatgataatggggcacagatgtaggcat

SEQ ID NO: 115503 - DNA, 30 bp, Artificial Sequence
  Synthetic oligonucleotide
gtacaacgtcacccaatagaggaccggcat

SEQ ID NO: 115504 - DNA, 30 bp, Artificial Sequence
  Synthetic oligonucleotide
gatgaacctagttatcgtagttagcggcat

SEQ ID NO: 115505 - DNA, 30 bp, Artificial Sequence
  Synthetic oligonucleotide
tcgaaggacacgtcttgtaacattcggcat

SEQ ID NO: 115506 - DNA, 30 bp, Artificial Sequence
  Synthetic oligonucleotide
gggtcgacaacctcgtcaacaacggggcat

SEQ ID NO: 115507 - DNA, 30 bp, Artificial Sequence
  Synthetic oligonucleotide
tgatctcacaaggtgagcgaagaatggcat

SEQ ID NO: 115508 - DNA, 30 bp, Artificial Sequence
  Synthetic oligonucleotide
aaataaaaaacgtaaccaggttcatggcat

SEQ ID NO: 115509 - DNA, 30 bp, Artificial Sequence
  Synthetic oligonucleotide
acgccgtggcttgggccataaaactggcat

SEQ ID NO: 115510 - DNA, 30 bp, Artificial Sequence
  Synthetic oligonucleotide
agggtcacaagcccaccggtggggtggcat

SEQ ID NO: 115511 - DNA, 30 bp, Artificial Sequence
  Synthetic oligonucleotide
tctgatacgactaggtgtacactcatgcat

SEQ ID NO: 115512 - DNA, 30 bp, Artificial Sequence
  Synthetic oligonucleotide
catgaagttactcgagaaacagttatgcat

SEQ ID NO: 115513 - DNA, 30 bp, Artificial Sequence
  Synthetic oligonucleotide
tctggtgaagccgcgtgatgaccagtgcat

SEQ ID NO: 115514 - DNA, 30 bp, Artificial Sequence
  Synthetic oligonucleotide
gaactcgtgaggttaaagcatgtggtgcat

SEQ ID NO: 115515 - DNA, 30 bp, Artificial Sequence
  Synthetic oligonucleotide
tggagacggttacagaactccttggtgcat

SEQ ID NO: 115516 - DNA, 30 bp, Artificial Sequence
  Synthetic oligonucleotide
tcattggcacaggagcggaattgattgcat

SEQ ID NO: 115517 - DNA, 30 bp, Artificial Sequence
  Synthetic oligonucleotide
ataacacgacggcctgtgttcggaaatcat

SEQ ID NO: 115518 - DNA, 30 bp, Artificial Sequence
  Synthetic oligonucleotide
gcaaaatctagactagagttcatgaatcat

SEQ ID NO: 115519 - DNA, 30 bp, Artificial Sequence
  Synthetic oligonucleotide
atggccatcgctggacataaggtgaatcat

SEQ ID NO: 115520 - DNA, 30 bp, Artificial Sequence
  Synthetic oligonucleotide
ggaccgctcacagaagagcctgggcatcat

SEQ ID NO: 115521 - DNA, 29 bp, Artificial Sequence
  Synthetic oligonucleotide
ttggaaattaggttacacggcctcatcat

SEQ ID NO: 115522 - DNA, 30 bp, Artificial Sequence
  Synthetic oligonucleotide
ctgtgaatttttagactagcgcgaactcat

SEQ ID NO: 115523 - DNA, 30 bp, Artificial Sequence
  Synthetic oligonucleotide
caccgttactgatttcagaggaatactcat

SEQ ID NO: 115524 - DNA, 29 bp, Artificial Sequence
  Synthetic oligonucleotide
gtggatatatgggtaggtctagccctcat

SEQ ID NO: 115525 - DNA, 30 bp, Artificial Sequence
  Synthetic oligonucleotide
atggaccaagccggacgtgaatgagctcat

SEQ ID NO: 115526 - DNA, 30 bp, Artificial Sequence
  Synthetic oligonucleotide
gcttggtctccacttagcggataggctcat

SEQ ID NO: 115527 - DNA, 30 bp, Artificial Sequence
  Synthetic oligonucleotide
tagaacacgcataaataattatccagtcat

SEQ ID NO: 115528 - DNA, 30 bp, Artificial Sequence
  Synthetic oligonucleotide
gtctcccttaaaagcccagaggggagtcat

SEQ ID NO: 115529 - DNA, 30 bp, Artificial Sequence
  Synthetic oligonucleotide
aacgtcactcgggcgacattgcctagtcat

SEQ ID NO: 115530 - DNA, 30 bp, Artificial Sequence
  Synthetic oligonucleotide
aggttagaccctcacctaatggtacgtcat

SEQ ID NO: 115531 - DNA, 30 bp, Artificial Sequence
  Synthetic oligonucleotide
gtcggagcccggaaccccttaaagcgtcat

SEQ ID NO: 115532 - DNA, 30 bp, Artificial Sequence
  Synthetic oligonucleotide
cactcgtgctaaagcaataatgggcgtcat

SEQ ID NO: 115533 - DNA, 30 bp, Artificial Sequence
  Synthetic oligonucleotide
atggaccggcaagcacgaaacgtgcgtcat

SEQ ID NO: 115534 - DNA, 30 bp, Artificial Sequence
  Synthetic oligonucleotide
gtgacagaggaatagacaggcggaggtcat

SEQ ID NO: 115535 - DNA, 30 bp, Artificial Sequence
  Synthetic oligonucleotide
tcgaggtcaacaaatacgtatcacggtcat

SEQ ID NO: 115536 - DNA, 30 bp, Artificial Sequence
  Synthetic oligonucleotide
aggatgttctccgtgcttccaagcattcat

SEQ ID NO: 115537 - DNA, 30 bp, Artificial Sequence
  Synthetic oligonucleotide
cgacccaaccgaaagatatatatgattcat

SEQ ID NO: 115538 - DNA, 30 bp, Artificial Sequence
  Synthetic oligonucleotide
acacatcgagatccctgaacaacagttcat

SEQ ID NO: 115539 - DNA, 30 bp, Artificial Sequence
  Synthetic oligonucleotide
agtatcgacgattagaaagcctaggttcat

SEQ ID NO: 115540 - DNA, 30 bp, Artificial Sequence
  Synthetic oligonucleotide
ggtttagaagactaaatgggcattgttcat

SEQ ID NO: 115541 - DNA, 30 bp, Artificial Sequence
  Synthetic oligonucleotide
agagagactaagtcaatcatgaaatttcat

SEQ ID NO: 115542 - DNA, 30 bp, Artificial Sequence
  Synthetic oligonucleotide
gacgagctccgtaattagaccgagtttcat

SEQ ID NO: 115543 - DNA, 30 bp, Artificial Sequence
  Synthetic oligonucleotide
acaagggatgcctggcatatgcggtttcat

SEQ ID NO: 115544 - DNA, 30 bp, Artificial Sequence
  Synthetic oligonucleotide
tagcgggcgtagccgtggtcgccaaaagat

SEQ ID NO: 115545 - DNA, 30 bp, Artificial Sequence
  Synthetic oligonucleotide
atcggtaaggacggtatggctccaaaagat

SEQ ID NO: 115546 - DNA, 30 bp, Artificial Sequence
  Synthetic oligonucleotide
gatcatggaaacgcatggggaagaaaagat

SEQ ID NO: 115547 - DNA, 30 bp, Artificial Sequence
  Synthetic oligonucleotide
gtggtgggagagactataatgctcaaagat

SEQ ID NO: 115548 - DNA, 30 bp, Artificial Sequence
  Synthetic oligonucleotide
ataaggaaacaagcgcgcaaatggaaagat

SEQ ID NO: 115549 - DNA, 30 bp, Artificial Sequence
  Synthetic oligonucleotide
agtggcgagatatgtatgattgataaagat

SEQ ID NO: 115550 - DNA, 30 bp, Artificial Sequence
  Synthetic oligonucleotide
tgggacggaatatctaagttcagacaagat

SEQ ID NO: 115551 - DNA, 30 bp, Artificial Sequence
  Synthetic oligonucleotide
ttcaaggcggtgttcagcgcaagccaagat

SEQ ID NO: 115552 - DNA, 30 bp, Artificial Sequence
  Synthetic oligonucleotide
ccgagttaatcaacttcgtgtggtcaagat

SEQ ID NO: 115553 - DNA, 30 bp, Artificial Sequence
  Synthetic oligonucleotide
ccggtcacctcccagcaaggtaacgaagat

SEQ ID NO: 115554 - DNA, 30 bp, Artificial Sequence
  Synthetic oligonucleotide
tagtacggtgtgtcaaacccacttgaagat

SEQ ID NO: 115555 - DNA, 30 bp, Artificial Sequence
  Synthetic oligonucleotide
gatagaacgacagttgaatacacataagat

SEQ ID NO: 115556 - DNA, 30 bp, Artificial Sequence
  Synthetic oligonucleotide
tcataggtcttctgataaggtagataagat

SEQ ID NO: 115557 - DNA, 30 bp, Artificial Sequence
  Synthetic oligonucleotide
actgggcggtggttgtagggggtgtaagat

SEQ ID NO: 115558 - DNA, 30 bp, Artificial Sequence
  Synthetic oligonucleotide
ctagtttattcgcgagacggggccacagat

SEQ ID NO: 115559 - DNA, 30 bp, Artificial Sequence
  Synthetic oligonucleotide
tcgacctatgcataagtggcggggacagat

SEQ ID NO: 115560 - DNA, 30 bp, Artificial Sequence
  Synthetic oligonucleotide
ttagcagtgtattccggcgccgtgacagat

SEQ ID NO: 115561 - DNA, 30 bp, Artificial Sequence
  Synthetic oligonucleotide
tagggtttgctcggtgatctcgctacagat

SEQ ID NO: 115562 - DNA, 30 bp, Artificial Sequence
  Synthetic oligonucleotide
ctgtaccctaagaacggagtgggaccagat

SEQ ID NO: 115563 - DNA, 30 bp, Artificial Sequence
  Synthetic oligonucleotide
tgaactacaaggtcatgtcagtccccagat

SEQ ID NO: 115564 - DNA, 30 bp, Artificial Sequence
  Synthetic oligonucleotide
gaagcacgaagcgcagttcctcgagcagat

SEQ ID NO: 115565 - DNA, 31 bp, Artificial Sequence
  Synthetic oligonucleotide
aaaaagaaaaggcatataaggcatcgcagat

SEQ ID NO: 115566 - DNA, 30 bp, Artificial Sequence
  Synthetic oligonucleotide
gtgcggtaatccgtgtgggagtaatcagat

SEQ ID NO: 115567 - DNA, 30 bp, Artificial Sequence
  Synthetic oligonucleotide
tgcgttacgtggggaggtcatgcctcagat

SEQ ID NO: 115568 - DNA, 31 bp, Artificial Sequence
  Synthetic oligonucleotide
tgcggagagggtgcgagcgcaaccgtcagat

SEQ ID NO: 115569 - DNA, 30 bp, Artificial Sequence
  Synthetic oligonucleotide
acgccgatttccaacgtcaaacggtcagat

SEQ ID NO: 115570 - DNA, 30 bp, Artificial Sequence
  Synthetic oligonucleotide
ggtagacttttgcgactagtcgggtcagat

SEQ ID NO: 115571 - DNA, 30 bp, Artificial Sequence
  Synthetic oligonucleotide
ctgagcctgagttggctatggttgtcagat

SEQ ID NO: 115572 - DNA, 30 bp, Artificial Sequence
  Synthetic oligonucleotide
ccccaatggtcgagggaggctgattcagat

SEQ ID NO: 115573 - DNA, 30 bp, Artificial Sequence
  Synthetic oligonucleotide
tgtcagttctatgtggaagaattaagagat

SEQ ID NO: 115574 - DNA, 30 bp, Artificial Sequence
  Synthetic oligonucleotide
taacgccaaggataaaaacaggcgagagat

SEQ ID NO: 115575 - DNA, 30 bp, Artificial Sequence
  Synthetic oligonucleotide
gcaaggccggcaatacctgaaaggagagat

SEQ ID NO: 115576 - DNA, 30 bp, Artificial Sequence
  Synthetic oligonucleotide
gctaacaatgtagcagccctgctgagagat

SEQ ID NO: 115577 - DNA, 30 bp, Artificial Sequence
  Synthetic oligonucleotide
taagataaagcggaaattacaagtagagat

SEQ ID NO: 115578 - DNA, 30 bp, Artificial Sequence
  Synthetic oligonucleotide
ctacagccgggaggatgattagggcgagat

SEQ ID NO: 115579 - DNA, 30 bp, Artificial Sequence
  Synthetic oligonucleotide
acttccggtgcgctgatggtggtgcgagat

SEQ ID NO: 115580 - DNA, 30 bp, Artificial Sequence
  Synthetic oligonucleotide
tttagactgctcgtatcgaagtgaggagat

SEQ ID NO: 115581 - DNA, 30 bp, Artificial Sequence
  Synthetic oligonucleotide
aagtcggactctgaagggtgaaccggagat

SEQ ID NO: 115582 - DNA, 30 bp, Artificial Sequence
  Synthetic oligonucleotide
acactgcacataacatcaatgaggtgagat

SEQ ID NO: 115583 - DNA, 30 bp, Artificial Sequence
  Synthetic oligonucleotide
gtcaccaagaaatgtttaacacgcatagat

SEQ ID NO: 115584 - DNA, 30 bp, Artificial Sequence
  Synthetic oligonucleotide
tctctgtgctgtcacacggtacgactagat

SEQ ID NO: 115585 - DNA, 30 bp, Artificial Sequence
  Synthetic oligonucleotide
gtcatgcagtccttagacacacgattagat

SEQ ID NO: 115586 - DNA, 30 bp, Artificial Sequence
  Synthetic oligonucleotide
acttgacctcagaggcgatactttaacgat

SEQ ID NO: 115587 - DNA, 30 bp, Artificial Sequence
  Synthetic oligonucleotide
aggctgaacagaagatgaacccgccacgat

SEQ ID NO: 115588 - DNA, 30 bp, Artificial Sequence
  Synthetic oligonucleotide
atcactatcagcacaaattctaaacccgat

SEQ ID NO: 115589 - DNA, 30 bp, Artificial Sequence
  Synthetic oligonucleotide
cgaaagagttctgtctgtatcgaccccgat

SEQ ID NO: 115590 - DNA, 31 bp, Artificial Sequence
  Synthetic oligonucleotide
ataattcaaaactctcaatttagttcccgat

SEQ ID NO: 115591 - DNA, 30 bp, Artificial Sequence
  Synthetic oligonucleotide
acgtccgacattgaggatcggaaagccgat

SEQ ID NO: 115592 - DNA, 30 bp, Artificial Sequence
  Synthetic oligonucleotide
ttggggggaataaattaccgcgaagccgat

SEQ ID NO: 115593 - DNA, 30 bp, Artificial Sequence
  Synthetic oligonucleotide
tatgtggacatccctatcacataagccgat

SEQ ID NO: 115594 - DNA, 30 bp, Artificial Sequence
  Synthetic oligonucleotide
agggaggagcaacctatgggacgtgccgat

SEQ ID NO: 115595 - DNA, 30 bp, Artificial Sequence
  Synthetic oligonucleotide
tcaacgtgatattcaatacagccaagcgat

SEQ ID NO: 115596 - DNA, 30 bp, Artificial Sequence
  Synthetic oligonucleotide
ccatgccgggctcggcactataacagcgat

SEQ ID NO: 115597 - DNA, 30 bp, Artificial Sequence
  Synthetic oligonucleotide
ttatggtgactgggtgactaagacagcgat

SEQ ID NO: 115598 - DNA, 30 bp, Artificial Sequence
  Synthetic oligonucleotide
ggggtcagccataaatgccaggccagcgat

SEQ ID NO: 115599 - DNA, 30 bp, Artificial Sequence
  Synthetic oligonucleotide
gggcagccaggcaacagagccttgagcgat

SEQ ID NO: 115600 - DNA, 30 bp, Artificial Sequence
  Synthetic oligonucleotide
gtcaggacatcttctacagttagtagcgat

SEQ ID NO: 115601 - DNA, 30 bp, Artificial Sequence
  Synthetic oligonucleotide
gtaccgggtaccgactgaaatccacgcgat

SEQ ID NO: 115602 - DNA, 30 bp, Artificial Sequence
  Synthetic oligonucleotide
tgcaccgtaaaaagtcatactgggggcgat

SEQ ID NO: 115603 - DNA, 30 bp, Artificial Sequence
  Synthetic oligonucleotide
agcgatctagttcttcgaacgtcatgcgat

SEQ ID NO: 115604 - DNA, 30 bp, Artificial Sequence
  Synthetic oligonucleotide
agggccatcattcacgctgtatagatcgat

SEQ ID NO: 115605 - DNA, 30 bp, Artificial Sequence
  Synthetic oligonucleotide
ctcggctggtggggcggttaattactcgat

SEQ ID NO: 115606 - DNA, 30 bp, Artificial Sequence
  Synthetic oligonucleotide
gtacgaatcgtaccgggcagaatcctcgat

SEQ ID NO: 115607 - DNA, 30 bp, Artificial Sequence
  Synthetic oligonucleotide
tgtgcttatgattgatacaccgttctcgat

SEQ ID NO: 115608 - DNA, 30 bp, Artificial Sequence
  Synthetic oligonucleotide
tgtagtaaataagtcaagacgaacgtcgat

SEQ ID NO: 115609 - DNA, 30 bp, Artificial Sequence
  Synthetic oligonucleotide
ttgtggagatcagccaagatgatgttcgat

SEQ ID NO: 115610 - DNA, 30 bp, Artificial Sequence
  Synthetic oligonucleotide
cggttgagctcagggtgcacttttttcgat

SEQ ID NO: 115611 - DNA, 30 bp, Artificial Sequence
  Synthetic oligonucleotide
aggggattcagtgccatacacccacaggat

SEQ ID NO: 115612 - DNA, 30 bp, Artificial Sequence
  Synthetic oligonucleotide
aggcccaccaggattctgggggttcaggat

SEQ ID NO: 115613 - DNA, 30 bp, Artificial Sequence
  Synthetic oligonucleotide
cgcgggcgcaagcaacgttttgcagaggat

SEQ ID NO: 115614 - DNA, 30 bp, Artificial Sequence
  Synthetic oligonucleotide
acatgcgaccaacaaactttacgcgaggat

SEQ ID NO: 115615 - DNA, 30 bp, Artificial Sequence
  Synthetic oligonucleotide
aagtcaataggaatcgtgcgccacacggat

SEQ ID NO: 115616 - DNA, 30 bp, Artificial Sequence
  Synthetic oligonucleotide
ggctgagcgtaagtgttatagtggacggat

SEQ ID NO: 115617 - DNA, 30 bp, Artificial Sequence
  Synthetic oligonucleotide
agcgtggggatgaataatgcagttacggat

SEQ ID NO: 115618 - DNA, 30 bp, Artificial Sequence
  Synthetic oligonucleotide
gagggcgtgagacaagcgccaaaaccggat

SEQ ID NO: 115619 - DNA, 30 bp, Artificial Sequence
  Synthetic oligonucleotide
aataggcaggcagagagtatatgcccggat

SEQ ID NO: 115620 - DNA, 30 bp, Artificial Sequence
  Synthetic oligonucleotide
gcaacaatgacaggacgataccacgcggat

SEQ ID NO: 115621 - DNA, 30 bp, Artificial Sequence
  Synthetic oligonucleotide
agcagctcttaacagatgagtcgtgcggat

SEQ ID NO: 115622 - DNA, 30 bp, Artificial Sequence
  Synthetic oligonucleotide
cacatgtcgtgggtgttccgactgtcggat

SEQ ID NO: 115623 - DNA, 31 bp, Artificial Sequence
  Synthetic oligonucleotide
ctagaggaaacccgggagtgaggaaagggat

SEQ ID NO: 115624 - DNA, 30 bp, Artificial Sequence
  Synthetic oligonucleotide
tggctcgcaggcgagcataacgacagggat

SEQ ID NO: 115625 - DNA, 30 bp, Artificial Sequence
  Synthetic oligonucleotide
ggggcacagtgcgaactatcggtcagggat

SEQ ID NO: 115626 - DNA, 30 bp, Artificial Sequence
  Synthetic oligonucleotide
gaataacagtttagtaggcccaagagggat

SEQ ID NO: 115627 - DNA, 30 bp, Artificial Sequence
  Synthetic oligonucleotide
gctacgaattcgttaatgtggtagagggat

SEQ ID NO: 115628 - DNA, 30 bp, Artificial Sequence
  Synthetic oligonucleotide
tacgaggagaccgactcgctgcttagggat

SEQ ID NO: 115629 - DNA, 30 bp, Artificial Sequence
  Synthetic oligonucleotide
aaagcgtagcgagacccgaacaaccgggat

SEQ ID NO: 115630 - DNA, 30 bp, Artificial Sequence
  Synthetic oligonucleotide
cgtaagataataatacatcttgggcgggat

SEQ ID NO: 115631 - DNA, 30 bp, Artificial Sequence
  Synthetic oligonucleotide
aggctgatgtgcctggcaattcctcgggat

SEQ ID NO: 115632 - DNA, 30 bp, Artificial Sequence
  Synthetic oligonucleotide
tggtatagaaaatgtatacatcgtcgggat

SEQ ID NO: 115633 - DNA, 30 bp, Artificial Sequence
  Synthetic oligonucleotide
cgtaattggcgcaagcgaatatttcgggat

SEQ ID NO: 115634 - DNA, 30 bp, Artificial Sequence
  Synthetic oligonucleotide
cagtatgacgaaggatgactaagatgggat

SEQ ID NO: 115635 - DNA, 30 bp, Artificial Sequence
  Synthetic oligonucleotide
atcaggcggaggcgttcataacgatgggat

SEQ ID NO: 115636 - DNA, 30 bp, Artificial Sequence
  Synthetic oligonucleotide
actagcattccggtaatataagactgggat

SEQ ID NO: 115637 - DNA, 30 bp, Artificial Sequence
  Synthetic oligonucleotide
ctgtgtatttgaaaaacccattagtgggat

SEQ ID NO: 115638 - DNA, 30 bp, Artificial Sequence
  Synthetic oligonucleotide
ccgcaataggcaatttacactaatctggat

SEQ ID NO: 115639 - DNA, 30 bp, Artificial Sequence
  Synthetic oligonucleotide
gggataggtagtgaaatcaactacgtggat

SEQ ID NO: 115640 - DNA, 30 bp, Artificial Sequence
  Synthetic oligonucleotide
aagactaggaaacgttgtatacgggtggat

SEQ ID NO: 115641 - DNA, 31 bp, Artificial Sequence
  Synthetic oligonucleotide
caggctcgaatcgactcgatccgtgttggat

SEQ ID NO: 115642 - DNA, 30 bp, Artificial Sequence
  Synthetic oligonucleotide
tcgggaccgagggggtttcgacccaatgat

SEQ ID NO: 115643 - DNA, 30 bp, Artificial Sequence
  Synthetic oligonucleotide
tttcggccagagacaaccccggcgaatgat

SEQ ID NO: 115644 - DNA, 30 bp, Artificial Sequence
  Synthetic oligonucleotide
ttgatatcagctgtgcgtcgtcgtaatgat

SEQ ID NO: 115645 - DNA, 30 bp, Artificial Sequence
  Synthetic oligonucleotide
atcacaattgcgtacaatgagattaatgat

SEQ ID NO: 115646 - DNA, 30 bp, Artificial Sequence
  Synthetic oligonucleotide
agagggcattgagtgagcttctccgatgat

SEQ ID NO: 115647 - DNA, 30 bp, Artificial Sequence
  Synthetic oligonucleotide
ttgtcgctgattaaaataaaaaaggatgat

SEQ ID NO: 115648 - DNA, 30 bp, Artificial Sequence
  Synthetic oligonucleotide
tcgtcaaatcttcttaatcagatggatgat

SEQ ID NO: 115649 - DNA, 30 bp, Artificial Sequence
  Synthetic oligonucleotide
caactgcgctcatggcgacgggatgatgat

SEQ ID NO: 115650 - DNA, 30 bp, Artificial Sequence
  Synthetic oligonucleotide
gggaagaggtttggctatacagtatatgat

SEQ ID NO: 115651 - DNA, 30 bp, Artificial Sequence
  Synthetic oligonucleotide
actaaatgcgtcactaatactacttatgat

SEQ ID NO: 115652 - DNA, 30 bp, Artificial Sequence
  Synthetic oligonucleotide
tccaaacgggaccaccagttacaaactgat

SEQ ID NO: 115653 - DNA, 30 bp, Artificial Sequence
  Synthetic oligonucleotide
ttaattgtcagctgagagttattaactgat

SEQ ID NO: 115654 - DNA, 30 bp, Artificial Sequence
  Synthetic oligonucleotide
agtggctaatgccccttctcaaaacctgat

SEQ ID NO: 115655 - DNA, 30 bp, Artificial Sequence
  Synthetic oligonucleotide
ttgaatcggggacatagcccaagccctgat

SEQ ID NO: 115656 - DNA, 30 bp, Artificial Sequence
  Synthetic oligonucleotide
accgtaggttatatggagtcttactctgat

SEQ ID NO: 115657 - DNA, 30 bp, Artificial Sequence
  Synthetic oligonucleotide
tcgggggttcccacatgtgtgcggagtgat

SEQ ID NO: 115658 - DNA, 30 bp, Artificial Sequence
  Synthetic oligonucleotide
cactcaaatgtgtgaatgtgagctagtgat

SEQ ID NO: 115659 - DNA, 30 bp, Artificial Sequence
  Synthetic oligonucleotide
actgatcatgtgtaggataacggccgtgat

SEQ ID NO: 115660 - DNA, 30 bp, Artificial Sequence
  Synthetic oligonucleotide
gcgcctattccagattagtgccagcgtgat

SEQ ID NO: 115661 - DNA, 30 bp, Artificial Sequence
  Synthetic oligonucleotide
cagaaagtagctactcattgaagaggtgat

SEQ ID NO: 115662 - DNA, 30 bp, Artificial Sequence
  Synthetic oligonucleotide
gtctaagcggcacgaacggaacgctgtgat

SEQ ID NO: 115663 - DNA, 30 bp, Artificial Sequence
  Synthetic oligonucleotide
gtcgggagtaaacgaccttcgacgtgtgat

SEQ ID NO: 115664 - DNA, 30 bp, Artificial Sequence
  Synthetic oligonucleotide
cactaccgaatttaagcccccggaattgat

SEQ ID NO: 115665 - DNA, 30 bp, Artificial Sequence
  Synthetic oligonucleotide
ttagagaaggctgccaagtatggcattgat

SEQ ID NO: 115666 - DNA, 30 bp, Artificial Sequence
  Synthetic oligonucleotide
gtagaacatagtgagaatcggtgcattgat

SEQ ID NO: 115667 - DNA, 30 bp, Artificial Sequence
  Synthetic oligonucleotide
tagcatgagggctagaggtggagacttgat

SEQ ID NO: 115668 - DNA, 30 bp, Artificial Sequence
  Synthetic oligonucleotide
cgccaccggttggggcgacatcgcgttgat

SEQ ID NO: 115669 - DNA, 30 bp, Artificial Sequence
  Synthetic oligonucleotide
tgggagtatcgcgacctgtcactggttgat

SEQ ID NO: 115670 - DNA, 30 bp, Artificial Sequence
  Synthetic oligonucleotide
cgatacgagattgcagtgtaataatttgat

SEQ ID NO: 115671 - DNA, 30 bp, Artificial Sequence
  Synthetic oligonucleotide
gtacgtgaaaacttgcccgcccccaaatat

SEQ ID NO: 115672 - DNA, 30 bp, Artificial Sequence
  Synthetic oligonucleotide
aggggggaaaattccgaagaaaggaaatat

SEQ ID NO: 115673 - DNA, 30 bp, Artificial Sequence
  Synthetic oligonucleotide
gcggacgatctcgtctctaggtgtaaatat

SEQ ID NO: 115674 - DNA, 30 bp, Artificial Sequence
  Synthetic oligonucleotide
aagcagtcaccgaggcacacgctacaatat

SEQ ID NO: 115675 - DNA, 30 bp, Artificial Sequence
  Synthetic oligonucleotide
ttggagggctgattgatcaacatgcaatat

SEQ ID NO: 115676 - DNA, 30 bp, Artificial Sequence
  Synthetic oligonucleotide
gaagcgaggggtgaggttttggatcaatat

SEQ ID NO: 115677 - DNA, 30 bp, Artificial Sequence
  Synthetic oligonucleotide
tagtgcatgtttgggagatagcgtcaatat

SEQ ID NO: 115678 - DNA, 30 bp, Artificial Sequence
  Synthetic oligonucleotide
ggtcgcgctgccaccagccatcgtcaatat

SEQ ID NO: 115679 - DNA, 30 bp, Artificial Sequence
  Synthetic oligonucleotide
gctatcgagatggattaagcggtgtaatat

SEQ ID NO: 115680 - DNA, 30 bp, Artificial Sequence
  Synthetic oligonucleotide
cgatagcgcgcgtggtatgacttgtaatat

SEQ ID NO: 115681 - DNA, 30 bp, Artificial Sequence
  Synthetic oligonucleotide
atggggtaaacagcccgtcatataacatat

SEQ ID NO: 115682 - DNA, 30 bp, Artificial Sequence
  Synthetic oligonucleotide
agagtaagcaacgctagctatgtaacatat

SEQ ID NO: 115683 - DNA, 30 bp, Artificial Sequence
  Synthetic oligonucleotide
acgtcacggaaaatatgcactatcacatat

SEQ ID NO: 115684 - DNA, 30 bp, Artificial Sequence
  Synthetic oligonucleotide
gggcgacttgaatgggcgctaaaagcatat

SEQ ID NO: 115685 - DNA, 30 bp, Artificial Sequence
  Synthetic oligonucleotide
acagccgagcagcatctgaatacagcatat

SEQ ID NO: 115686 - DNA, 30 bp, Artificial Sequence
  Synthetic oligonucleotide
ctgcaccggatccgattgacctaggcatat

SEQ ID NO: 115687 - DNA, 30 bp, Artificial Sequence
  Synthetic oligonucleotide
gaggccggtacattaacgcctttaagatat

SEQ ID NO: 115688 - DNA, 30 bp, Artificial Sequence
  Synthetic oligonucleotide
cagccatgaaccacagggatctagagatat

SEQ ID NO: 115689 - DNA, 30 bp, Artificial Sequence
  Synthetic oligonucleotide
ctactgaccctacgatacggccaaggatat

SEQ ID NO: 115690 - DNA, 30 bp, Artificial Sequence
  Synthetic oligonucleotide
gacgggtcggtagacgagaagcaaggatat

SEQ ID NO: 115691 - DNA, 30 bp, Artificial Sequence
  Synthetic oligonucleotide
ggtctccatgatcactcaaataccggatat

SEQ ID NO: 115692 - DNA, 30 bp, Artificial Sequence
  Synthetic oligonucleotide
cctacgtcataaagctgactagtgggatat

SEQ ID NO: 115693 - DNA, 30 bp, Artificial Sequence
  Synthetic oligonucleotide
tctacgttctcaaggtgacgtatctgatat

SEQ ID NO: 115694 - DNA, 30 bp, Artificial Sequence
  Synthetic oligonucleotide
tacatgtataagctccaccctagaatatat

SEQ ID NO: 115695 - DNA, 30 bp, Artificial Sequence
  Synthetic oligonucleotide
cagactgcggaaaaaccgcgacaactatat

SEQ ID NO: 115696 - DNA, 30 bp, Artificial Sequence
  Synthetic oligonucleotide
acaagtagcaacaacgtgtgaacactatat

SEQ ID NO: 115697 - DNA, 30 bp, Artificial Sequence
  Synthetic oligonucleotide
tcaagccgtgtgagtgggagtgacctatat

SEQ ID NO: 115698 - DNA, 30 bp, Artificial Sequence
  Synthetic oligonucleotide
cgcgtggagcacgacgctgaagatctatat

SEQ ID NO: 115699 - DNA, 30 bp, Artificial Sequence
  Synthetic oligonucleotide
gggcccctcgttacaatacctactctatat

SEQ ID NO: 115700 - DNA, 30 bp, Artificial Sequence
  Synthetic oligonucleotide
gaatgatagaaggagttatctatcgtatat

SEQ ID NO: 115701 - DNA, 30 bp, Artificial Sequence
  Synthetic oligonucleotide
acggacctattctctggctgcaagttatat

SEQ ID NO: 115702 - DNA, 30 bp, Artificial Sequence
  Synthetic oligonucleotide
ggagcgaacattagataggtcaagaactat

SEQ ID NO: 115703 - DNA, 30 bp, Artificial Sequence
  Synthetic oligonucleotide
aagatcgggtaattagggttacagaactat

SEQ ID NO: 115704 - DNA, 30 bp, Artificial Sequence
  Synthetic oligonucleotide
tcaagccgaattaatgtttagctgaactat

SEQ ID NO: 115705 - DNA, 30 bp, Artificial Sequence
  Synthetic oligonucleotide
gtgcggtgtcacgtggcctcagaacactat

SEQ ID NO: 115706 - DNA, 30 bp, Artificial Sequence
  Synthetic oligonucleotide
tccaggaagccgagcctgcggttgcactat

SEQ ID NO: 115707 - DNA, 30 bp, Artificial Sequence
  Synthetic oligonucleotide
ctggttgggacgaattatggggttcactat

SEQ ID NO: 115708 - DNA, 30 bp, Artificial Sequence
  Synthetic oligonucleotide
tgagggtatccaatggtagcttgcacctat

SEQ ID NO: 115709 - DNA, 30 bp, Artificial Sequence
  Synthetic oligonucleotide
cgtacggtctcgggttaatgggatccctat

SEQ ID NO: 115710 - DNA, 30 bp, Artificial Sequence
  Synthetic oligonucleotide
agcgtggtcctatatcacctgcttccctat

SEQ ID NO: 115711 - DNA, 30 bp, Artificial Sequence
  Synthetic oligonucleotide
gacggaggaagctgacgggcagatgcctat

SEQ ID NO: 115712 - DNA, 30 bp, Artificial Sequence
  Synthetic oligonucleotide
agataagggtatcgggatgagataagctat

SEQ ID NO: 115713 - DNA, 30 bp, Artificial Sequence
  Synthetic oligonucleotide
gtagtctaaaacaaagcgtggggcggctat

SEQ ID NO: 115714 - DNA, 30 bp, Artificial Sequence
  Synthetic oligonucleotide
tcagcaactaaatggggaaaacggggctat

SEQ ID NO: 115715 - DNA, 30 bp, Artificial Sequence
  Synthetic oligonucleotide
ggaggcatggccggaactcggattggctat

SEQ ID NO: 115716 - DNA, 30 bp, Artificial Sequence
  Synthetic oligonucleotide
tgacaaatgtgccagaaaaggtttatctat

SEQ ID NO: 115717 - DNA, 30 bp, Artificial Sequence
  Synthetic oligonucleotide
gcgcgacatggttgctgacgttaactctat

SEQ ID NO: 115718 - DNA, 30 bp, Artificial Sequence
  Synthetic oligonucleotide
ccattgaacatctgaatagtaatactctat

SEQ ID NO: 115719 - DNA, 30 bp, Artificial Sequence
  Synthetic oligonucleotide
cagaaagtttcttgcgtacatgtgctctat

SEQ ID NO: 115720 - DNA, 30 bp, Artificial Sequence
  Synthetic oligonucleotide
ctggacataagtcttcaggtttgaaagtat

SEQ ID NO: 115721 - DNA, 30 bp, Artificial Sequence
  Synthetic oligonucleotide
cggtacgcctctggattgttagcgaagtat

SEQ ID NO: 115722 - DNA, 30 bp, Artificial Sequence
  Synthetic oligonucleotide
aagattgacctgattactggagtacagtat

SEQ ID NO: 115723 - DNA, 30 bp, Artificial Sequence
  Synthetic oligonucleotide
cgacccattcatggcgcaaggagccagtat

SEQ ID NO: 115724 - DNA, 30 bp, Artificial Sequence
  Synthetic oligonucleotide
tcgagagcgatacaggttaaacttcagtat

SEQ ID NO: 115725 - DNA, 30 bp, Artificial Sequence
  Synthetic oligonucleotide
gtgggtgtcaggggggttaatccggagtat

SEQ ID NO: 115726 - DNA, 30 bp, Artificial Sequence
  Synthetic oligonucleotide
tacccaatgcggagtacagatgttgagtat

SEQ ID NO: 115727 - DNA, 30 bp, Artificial Sequence
  Synthetic oligonucleotide
ccaatggtgcatggtgggaatatatagtat

SEQ ID NO: 115728 - DNA, 30 bp, Artificial Sequence
  Synthetic oligonucleotide
tctgggaagcgctgaccagtagctacgtat

SEQ ID NO: 115729 - DNA, 30 bp, Artificial Sequence
  Synthetic oligonucleotide
atctgtcgataagtatgaatgtggccgtat

SEQ ID NO: 115730 - DNA, 30 bp, Artificial Sequence
  Synthetic oligonucleotide
atctcgctaggaactagcgggctagcgtat

SEQ ID NO: 115731 - DNA, 30 bp, Artificial Sequence
  Synthetic oligonucleotide
cagccggaccaggtgaaaacaggctcgtat

SEQ ID NO: 115732 - DNA, 30 bp, Artificial Sequence
  Synthetic oligonucleotide
aggccaaagcacggtcacacgaggtcgtat

SEQ ID NO: 115733 - DNA, 30 bp, Artificial Sequence
  Synthetic oligonucleotide
cgaaatccgaatagattcaaaagttcgtat

SEQ ID NO: 115734 - DNA, 30 bp, Artificial Sequence
  Synthetic oligonucleotide
acttaaagttgagagatggtaggaaggtat

SEQ ID NO: 115735 - DNA, 30 bp, Artificial Sequence
  Synthetic oligonucleotide
tggaagggcgagttacagtagatcaggtat

SEQ ID NO: 115736 - DNA, 30 bp, Artificial Sequence
  Synthetic oligonucleotide
agattgtcttggcgtgtcgaccggaggtat

SEQ ID NO: 115737 - DNA, 30 bp, Artificial Sequence
  Synthetic oligonucleotide
ggtgagtcgagagacgtatcttataggtat

SEQ ID NO: 115738 - DNA, 30 bp, Artificial Sequence
  Synthetic oligonucleotide
caggtgtagtgtcatttaagtgatcggtat

SEQ ID NO: 115739 - DNA, 30 bp, Artificial Sequence
  Synthetic oligonucleotide
cagggaaattatctattcagagtcgggtat

SEQ ID NO: 115740 - DNA, 30 bp, Artificial Sequence
  Synthetic oligonucleotide
caccgcaaccgaacatgggtcgattggtat

SEQ ID NO: 115741 - DNA, 30 bp, Artificial Sequence
  Synthetic oligonucleotide
cacagcgggcataagcctcccgaaatgtat

SEQ ID NO: 115742 - DNA, 30 bp, Artificial Sequence
  Synthetic oligonucleotide
accaaagctcagtaccgctaactgatgtat

SEQ ID NO: 115743 - DNA, 30 bp, Artificial Sequence
  Synthetic oligonucleotide
caagatatggggatcctgcgttgtatgtat

SEQ ID NO: 115744 - DNA, 31 bp, Artificial Sequence
  Synthetic oligonucleotide
atgtcatcgtttagacgagctacacctgtat

SEQ ID NO: 115745 - DNA, 30 bp, Artificial Sequence
  Synthetic oligonucleotide
ttgttgtaagctccacccagaatgctgtat

SEQ ID NO: 115746 - DNA, 30 bp, Artificial Sequence
  Synthetic oligonucleotide
cagggggatttgctatggtaagaagtgtat

SEQ ID NO: 115747 - DNA, 30 bp, Artificial Sequence
  Synthetic oligonucleotide
cggtaaggacctactgtatagcacgtgtat

SEQ ID NO: 115748 - DNA, 30 bp, Artificial Sequence
  Synthetic oligonucleotide
ggactgggacactgagaagttaccgtgtat

SEQ ID NO: 115749 - DNA, 30 bp, Artificial Sequence
  Synthetic oligonucleotide
acgacgccgtagcctgtgcgcatcgtgtat

SEQ ID NO: 115750 - DNA, 30 bp, Artificial Sequence
  Synthetic oligonucleotide
tctaagcaggctgggccagatgatgtgtat

SEQ ID NO: 115751 - DNA, 30 bp, Artificial Sequence
  Synthetic oligonucleotide
tcttatctgttgtgttgtcctcttgtgtat

SEQ ID NO: 115752 - DNA, 30 bp, Artificial Sequence
  Synthetic oligonucleotide
acgtgctgggtgttacttgaccgcaattat

SEQ ID NO: 115753 - DNA, 30 bp, Artificial Sequence
  Synthetic oligonucleotide
gaggcgtaagatctcctagccccagattat

SEQ ID NO: 115754 - DNA, 30 bp, Artificial Sequence
  Synthetic oligonucleotide
caacggttcggtctacacgttagcgattat

SEQ ID NO: 115755 - DNA, 30 bp, Artificial Sequence
  Synthetic oligonucleotide
agatcccaatgagggaacacgtgtgattat

SEQ ID NO: 115756 - DNA, 30 bp, Artificial Sequence
  Synthetic oligonucleotide
agcggaccacatagtagctgttgtgattat

SEQ ID NO: 115757 - DNA, 30 bp, Artificial Sequence
  Synthetic oligonucleotide
tcggtgcggaccgcgtacaacagtgcttat

SEQ ID NO: 115758 - DNA, 30 bp, Artificial Sequence
  Synthetic oligonucleotide
ttgagttaagggaaggacaggatctcttat

SEQ ID NO: 115759 - DNA, 30 bp, Artificial Sequence
  Synthetic oligonucleotide
tcagcgtgctactacgtgtaagattcttat

SEQ ID NO: 115760 - DNA, 30 bp, Artificial Sequence
  Synthetic oligonucleotide
gtctgaacagcatagaagcagtgaagttat

SEQ ID NO: 115761 - DNA, 30 bp, Artificial Sequence
  Synthetic oligonucleotide
actttcagacggaaaagagcaggtagttat

SEQ ID NO: 115762 - DNA, 30 bp, Artificial Sequence
  Synthetic oligonucleotide
tgcatgacgtcaatgatccagtgccgttat

SEQ ID NO: 115763 - DNA, 30 bp, Artificial Sequence
  Synthetic oligonucleotide
tacggacttgacatggagagggacggttat

SEQ ID NO: 115764 - DNA, 30 bp, Artificial Sequence
  Synthetic oligonucleotide
cgcctcacaagtggaggaccgtacggttat

SEQ ID NO: 115765 - DNA, 30 bp, Artificial Sequence
  Synthetic oligonucleotide
gcagggcatacgaacaacgtgtgcggttat

SEQ ID NO: 115766 - DNA, 30 bp, Artificial Sequence
  Synthetic oligonucleotide
ctcggggcatggcaagcagacatcctttat

SEQ ID NO: 115767 - DNA, 30 bp, Artificial Sequence
  Synthetic oligonucleotide
gactaagcgagagaacagtggggcaaaact

SEQ ID NO: 115768 - DNA, 30 bp, Artificial Sequence
  Synthetic oligonucleotide
gcataccgaaggaatctattcctcaaaact

SEQ ID NO: 115769 - DNA, 30 bp, Artificial Sequence
  Synthetic oligonucleotide
aaatgaagccgccaccagtgctagaaaact

SEQ ID NO: 115770 - DNA, 30 bp, Artificial Sequence
  Synthetic oligonucleotide
aggtagaagtcacgacccaaatataaaact

SEQ ID NO: 115771 - DNA, 30 bp, Artificial Sequence
  Synthetic oligonucleotide
ctcaaaaactgcctgaatctgggtaaaact

SEQ ID NO: 115772 - DNA, 30 bp, Artificial Sequence
  Synthetic oligonucleotide
tcattgaatgagggcgcgccacgacaaact

SEQ ID NO: 115773 - DNA, 30 bp, Artificial Sequence
  Synthetic oligonucleotide
tatgtcccacgtgagtgtggcggacaaact

SEQ ID NO: 115774 - DNA, 30 bp, Artificial Sequence
  Synthetic oligonucleotide
ctatgagggagtacgagaagactacaaact

SEQ ID NO: 115775 - DNA, 30 bp, Artificial Sequence
  Synthetic oligonucleotide
gtgacagaaactctgcttaagttccaaact

SEQ ID NO: 115776 - DNA, 30 bp, Artificial Sequence
  Synthetic oligonucleotide
ttatcaatgaacatctaaacaatgcaaact

SEQ ID NO: 115777 - DNA, 30 bp, Artificial Sequence
  Synthetic oligonucleotide
agagtaaccagcagcgggactgccgaaact

SEQ ID NO: 115778 - DNA, 30 bp, Artificial Sequence
  Synthetic oligonucleotide
aatatggcgaggcccctgccgggggaaact

SEQ ID NO: 115779 - DNA, 30 bp, Artificial Sequence
  Synthetic oligonucleotide
tggatacgaaattccttggcaacataaact

SEQ ID NO: 115780 - DNA, 30 bp, Artificial Sequence
  Synthetic oligonucleotide
atcggggacataagttgaatctactaaact

SEQ ID NO: 115781 - DNA, 30 bp, Artificial Sequence
  Synthetic oligonucleotide
ctgtccaaacgggacaaatgtaccacaact

SEQ ID NO: 115782 - DNA, 30 bp, Artificial Sequence
  Synthetic oligonucleotide
gccgtttaaggtaagtacatcgacccaact

SEQ ID NO: 115783 - DNA, 30 bp, Artificial Sequence
  Synthetic oligonucleotide
agggagaagtatattgggccacatccaact

SEQ ID NO: 115784 - DNA, 30 bp, Artificial Sequence
  Synthetic oligonucleotide
cggaacggtggtagcacattctgcgcaact

SEQ ID NO: 115785 - DNA, 30 bp, Artificial Sequence
  Synthetic oligonucleotide
atgccgaatcatgtccttaccgagtcaact

SEQ ID NO: 115786 - DNA, 30 bp, Artificial Sequence
  Synthetic oligonucleotide
gtcaaggttgcttcaatgctaagttcaact

SEQ ID NO: 115787 - DNA, 30 bp, Artificial Sequence
  Synthetic oligonucleotide
gtcgatgagtctactacgagtgccagaact

SEQ ID NO: 115788 - DNA, 30 bp, Artificial Sequence
  Synthetic oligonucleotide
ctggctggggatgattgtgacgatagaact

SEQ ID NO: 115789 - DNA, 30 bp, Artificial Sequence
  Synthetic oligonucleotide
agcgattcgaggataaattaagaccgaact

SEQ ID NO: 115790 - DNA, 30 bp, Artificial Sequence
  Synthetic oligonucleotide
acccgaccgcgattgacatggtcccgaact

SEQ ID NO: 115791 - DNA, 30 bp, Artificial Sequence
  Synthetic oligonucleotide
tcttatctgttaagataggtagttcgaact

SEQ ID NO: 115792 - DNA, 30 bp, Artificial Sequence
  Synthetic oligonucleotide
atgactttccagcctcacctgtaaggaact

SEQ ID NO: 115793 - DNA, 30 bp, Artificial Sequence
  Synthetic oligonucleotide
ggagaaagggggaggcggaagaacggaact

SEQ ID NO: 115794 - DNA, 30 bp, Artificial Sequence
  Synthetic oligonucleotide
ttaggagcgggaggtaggcaatagtgaact

SEQ ID NO: 115795 - DNA, 30 bp, Artificial Sequence
  Synthetic oligonucleotide
actgaagactgggtagcgtcccccataact

SEQ ID NO: 115796 - DNA, 30 bp, Artificial Sequence
  Synthetic oligonucleotide
cgacattcgccacaccaggtaggcataact

SEQ ID NO: 115797 - DNA, 30 bp, Artificial Sequence
  Synthetic oligonucleotide
agaggaatctggactaccaatcaactaact

SEQ ID NO: 115798 - DNA, 30 bp, Artificial Sequence
  Synthetic oligonucleotide
gcgacctccgaacgagtaagtgcgctaact

SEQ ID NO: 115799 - DNA, 30 bp, Artificial Sequence
  Synthetic oligonucleotide
tgcggaagacgaggtaccgccgaagtaact

SEQ ID NO: 115800 - DNA, 30 bp, Artificial Sequence
  Synthetic oligonucleotide
gtagcggaatccaatcgaaattgcgtaact

SEQ ID NO: 115801 - DNA, 30 bp, Artificial Sequence
  Synthetic oligonucleotide
taaacattagggaagcatgataaggtaact

SEQ ID NO: 115802 - DNA, 30 bp, Artificial Sequence
  Synthetic oligonucleotide
cgtatggaagcgcaaccttgtcttgtaact

SEQ ID NO: 115803 - DNA, 30 bp, Artificial Sequence
  Synthetic oligonucleotide
acatgcgatatgggggaacattataacact

SEQ ID NO: 115804 - DNA, 30 bp, Artificial Sequence
  Synthetic oligonucleotide
gatcagcatcaagctgtacgctgagacact

SEQ ID NO: 115805 - DNA, 30 bp, Artificial Sequence
  Synthetic oligonucleotide
ccaggcgtgtaataacgttattgcgacact

SEQ ID NO: 115806 - DNA, 30 bp, Artificial Sequence
  Synthetic oligonucleotide
caaaatatcatttgggtattagaggacact

SEQ ID NO: 115807 - DNA, 30 bp, Artificial Sequence
  Synthetic oligonucleotide
taggacgctctcccctaggactcatacact

SEQ ID NO: 115808 - DNA, 30 bp, Artificial Sequence
  Synthetic oligonucleotide
cttatatatttcacacgattaggctacact

SEQ ID NO: 115809 - DNA, 30 bp, Artificial Sequence
  Synthetic oligonucleotide
tgagagcacagctccgttaataacaccact

SEQ ID NO: 115810 - DNA, 30 bp, Artificial Sequence
  Synthetic oligonucleotide
aatcagtctgtgcgggccatcgggaccact

SEQ ID NO: 115811 - DNA, 30 bp, Artificial Sequence
  Synthetic oligonucleotide
cctttctacaacgaggggccgtgtaccact

SEQ ID NO: 115812 - DNA, 30 bp, Artificial Sequence
  Synthetic oligonucleotide
gaccgagagggaacacagagtcttaccact

SEQ ID NO: 115813 - DNA, 30 bp, Artificial Sequence
  Synthetic oligonucleotide
tgacagtgtacatggtcgagtaaggccact

SEQ ID NO: 115814 - DNA, 30 bp, Artificial Sequence
  Synthetic oligonucleotide
gttagaaccgatcggctatcgagggccact

SEQ ID NO: 115815 - DNA, 30 bp, Artificial Sequence
  Synthetic oligonucleotide
cgggcaaacgccacagaggttcagagcact

SEQ ID NO: 115816 - DNA, 31 bp, Artificial Sequence
  Synthetic oligonucleotide
cctcgcgtagggcgaccgccatgttagcact

SEQ ID NO: 115817 - DNA, 30 bp, Artificial Sequence
  Synthetic oligonucleotide
ggtcacaatcggtcgaggcaaacgcgcact

SEQ ID NO: 115818 - DNA, 30 bp, Artificial Sequence
  Synthetic oligonucleotide
ctcctagctgatcacaagtaggaaggcact

SEQ ID NO: 115819 - DNA, 30 bp, Artificial Sequence
  Synthetic oligonucleotide
gatcacggcaacacactagtccggggcact

SEQ ID NO: 115820 - DNA, 30 bp, Artificial Sequence
  Synthetic oligonucleotide
gatggtttgacccttacgagggaatgcact

SEQ ID NO: 115821 - DNA, 30 bp, Artificial Sequence
  Synthetic oligonucleotide
tcaacggggctttcgatcgcagagtgcact

SEQ ID NO: 115822 - DNA, 30 bp, Artificial Sequence
  Synthetic oligonucleotide
atgctgaactaagacgtcttagggtgcact

SEQ ID NO: 115823 - DNA, 30 bp, Artificial Sequence
  Synthetic oligonucleotide
acacggtagggggcgagtaagtgttgcact

SEQ ID NO: 115824 - DNA, 30 bp, Artificial Sequence
  Synthetic oligonucleotide
gtaccgggacactagcggacttatatcact

SEQ ID NO: 115825 - DNA, 30 bp, Artificial Sequence
  Synthetic oligonucleotide
gcatcggcgattaagcaggttactatcact

SEQ ID NO: 115826 - DNA, 30 bp, Artificial Sequence
  Synthetic oligonucleotide
cgacggacgtgccgcccacttgctatcact

SEQ ID NO: 115827 - DNA, 30 bp, Artificial Sequence
  Synthetic oligonucleotide
taagtcagtgggcatagcgtttctatcact

SEQ ID NO: 115828 - DNA, 29 bp, Artificial Sequence
  Synthetic oligonucleotide
ttggatgggattgggccttaacactcact

SEQ ID NO: 115829 - DNA, 30 bp, Artificial Sequence
  Synthetic oligonucleotide
tgaccccgcgtctgagcagaagacgtcact

SEQ ID NO: 115830 - DNA, 30 bp, Artificial Sequence
  Synthetic oligonucleotide
cctgcacgacatcaaacggatcaattcact

SEQ ID NO: 115831 - DNA, 30 bp, Artificial Sequence
  Synthetic oligonucleotide
cgtacgtttaaccatcgggcagtaaagact

SEQ ID NO: 115832 - DNA, 30 bp, Artificial Sequence
  Synthetic oligonucleotide
gcattcagcaccggagcgaccgcgaagact

SEQ ID NO: 115833 - DNA, 30 bp, Artificial Sequence
  Synthetic oligonucleotide
actaaggcttcagccccggattcccagact

SEQ ID NO: 115834 - DNA, 30 bp, Artificial Sequence
  Synthetic oligonucleotide
attggcctaaatgaatcgtattctcagact

SEQ ID NO: 115835 - DNA, 30 bp, Artificial Sequence
  Synthetic oligonucleotide
tcgcaacatatcggtgtactccaagagact

SEQ ID NO: 115836 - DNA, 30 bp, Artificial Sequence
  Synthetic oligonucleotide
ggagtatatcaacgttgcgatcaagagact

SEQ ID NO: 115837 - DNA, 30 bp, Artificial Sequence
  Synthetic oligonucleotide
gcttaagtaagtacaacaaacatagagact

SEQ ID NO: 115838 - DNA, 30 bp, Artificial Sequence
  Synthetic oligonucleotide
tggattcgcatatcctggagaagtgagact

SEQ ID NO: 115839 - DNA, 30 bp, Artificial Sequence
  Synthetic oligonucleotide
ccaagtaggatcgttttgaatgactagact

SEQ ID NO: 115840 - DNA, 30 bp, Artificial Sequence
  Synthetic oligonucleotide
cgtccccatcgcacgccgacattctagact

SEQ ID NO: 115841 - DNA, 30 bp, Artificial Sequence
  Synthetic oligonucleotide
acctgaaacccgcacggatctccaacgact

SEQ ID NO: 115842 - DNA, 30 bp, Artificial Sequence
  Synthetic oligonucleotide
tcaaatggtttaatctcgagacacacgact

SEQ ID NO: 115843 - DNA, 30 bp, Artificial Sequence
  Synthetic oligonucleotide
acgagctgacgcgccagcagccctacgact

SEQ ID NO: 115844 - DNA, 31 bp, Artificial Sequence
  Synthetic oligonucleotide
ctcgggagaaatgggcggttaagctccgact

SEQ ID NO: 115845 - DNA, 30 bp, Artificial Sequence
  Synthetic oligonucleotide
gagggtcaggatcgacttttaaacgcgact

SEQ ID NO: 115846 - DNA, 30 bp, Artificial Sequence
  Synthetic oligonucleotide
gcccgaagtgcggatacggagaacgcgact

SEQ ID NO: 115847 - DNA, 30 bp, Artificial Sequence
  Synthetic oligonucleotide
agacacggagtcgacggatattgggcgact

SEQ ID NO: 115848 - DNA, 30 bp, Artificial Sequence
  Synthetic oligonucleotide
cttcgagtcaatgtatcgattatggcgact

SEQ ID NO: 115849 - DNA, 30 bp, Artificial Sequence
  Synthetic oligonucleotide
tcgcgtcgtcacacctgggagagatcgact

SEQ ID NO: 115850 - DNA, 30 bp, Artificial Sequence
  Synthetic oligonucleotide
ttacggaccactctggtgggaatatcgact

SEQ ID NO: 115851 - DNA, 30 bp, Artificial Sequence
  Synthetic oligonucleotide
acccagaacgcgcgttggtatacgaggact

SEQ ID NO: 115852 - DNA, 30 bp, Artificial Sequence
  Synthetic oligonucleotide
tgaaaagcaaagtcagcagctttccggact

SEQ ID NO: 115853 - DNA, 30 bp, Artificial Sequence
  Synthetic oligonucleotide
cgacaaagtttattggcggaatcgcggact

SEQ ID NO: 115854 - DNA, 30 bp, Artificial Sequence
  Synthetic oligonucleotide
tcttagattatgaccgagtgcgtagggact

SEQ ID NO: 115855 - DNA, 30 bp, Artificial Sequence
  Synthetic oligonucleotide
aggcctgtcatacggaacgcgacctggact

SEQ ID NO: 115856 - DNA, 30 bp, Artificial Sequence
  Synthetic oligonucleotide
gcgattacacgtcgtaaggaactgatgact

SEQ ID NO: 115857 - DNA, 30 bp, Artificial Sequence
  Synthetic oligonucleotide
cgtaccaaaaattatgtccggtgcctgact

SEQ ID NO: 115858 - DNA, 30 bp, Artificial Sequence
  Synthetic oligonucleotide
ggccaaagtgaatcccaagaactagtgact

SEQ ID NO: 115859 - DNA, 30 bp, Artificial Sequence
  Synthetic oligonucleotide
gtcgctcgaaaaggctccgaactggtgact

SEQ ID NO: 115860 - DNA, 30 bp, Artificial Sequence
  Synthetic oligonucleotide
acttaaatacaatggagtgggtttgtgact

SEQ ID NO: 115861 - DNA, 30 bp, Artificial Sequence
  Synthetic oligonucleotide
agagacatccagcttacgatattacatact

SEQ ID NO: 115862 - DNA, 30 bp, Artificial Sequence
  Synthetic oligonucleotide
gtgggcctgtaggtaggaaagagtcatact

SEQ ID NO: 115863 - DNA, 30 bp, Artificial Sequence
  Synthetic oligonucleotide
acttacgaggatggtcgggtgtgcgatact

SEQ ID NO: 115864 - DNA, 30 bp, Artificial Sequence
  Synthetic oligonucleotide
gatggaggtatgagtacttcagaatatact

SEQ ID NO: 115865 - DNA, 30 bp, Artificial Sequence
  Synthetic oligonucleotide
gaacatagcctggggagaaacacgtatact

SEQ ID NO: 115866 - DNA, 30 bp, Artificial Sequence
  Synthetic oligonucleotide
tatgggtagaagtgaacgttgtggtctact

SEQ ID NO: 115867 - DNA, 30 bp, Artificial Sequence
  Synthetic oligonucleotide
gcaactgagaggatgtctactaaaagtact

SEQ ID NO: 115868 - DNA, 30 bp, Artificial Sequence
  Synthetic oligonucleotide
tcaccaattgtcaaccgccccggcagtact

SEQ ID NO: 115869 - DNA, 30 bp, Artificial Sequence
  Synthetic oligonucleotide
cagcataaacgagagtggaaaacgcgtact

SEQ ID NO: 115870 - DNA, 30 bp, Artificial Sequence
  Synthetic oligonucleotide
cgtcaccttagaactaagtttccgcgtact

SEQ ID NO: 115871 - DNA, 30 bp, Artificial Sequence
  Synthetic oligonucleotide
ttgcttcatcataaaaatcacattcgtact

SEQ ID NO: 115872 - DNA, 30 bp, Artificial Sequence
  Synthetic oligonucleotide
gaagggtgattagtacaaaccacaggtact

SEQ ID NO: 115873 - DNA, 30 bp, Artificial Sequence
  Synthetic oligonucleotide
acacctgtgacatgtagcggatacggtact

SEQ ID NO: 115874 - DNA, 30 bp, Artificial Sequence
  Synthetic oligonucleotide
cggctgggagtatggtctataatcggtact

SEQ ID NO: 115875 - DNA, 30 bp, Artificial Sequence
  Synthetic oligonucleotide
acgcccacactagcatttcaaattggtact

SEQ ID NO: 115876 - DNA, 30 bp, Artificial Sequence
  Synthetic oligonucleotide
catccgactcaataataaattgtatgtact

SEQ ID NO: 115877 - DNA, 30 bp, Artificial Sequence
  Synthetic oligonucleotide
taccgttgagcgagtatgcggaagtgtact

SEQ ID NO: 115878 - DNA, 30 bp, Artificial Sequence
  Synthetic oligonucleotide
tagcgaacaacgtcctataccccttgtact

SEQ ID NO: 115879 - DNA, 30 bp, Artificial Sequence
  Synthetic oligonucleotide
gtaagcaccgcgtcactcacacaaattact

SEQ ID NO: 115880 - DNA, 30 bp, Artificial Sequence
  Synthetic oligonucleotide
tgcctgttccgagggtcagctggcattact

SEQ ID NO: 115881 - DNA, 30 bp, Artificial Sequence
  Synthetic oligonucleotide
cgaagagttgcaaggcattattgacttact

SEQ ID NO: 115882 - DNA, 30 bp, Artificial Sequence
  Synthetic oligonucleotide
caccggaagccgtagccgaccaagcttact

SEQ ID NO: 115883 - DNA, 30 bp, Artificial Sequence
  Synthetic oligonucleotide
agaaacgaaaaaagaggtaaggatcttact

SEQ ID NO: 115884 - DNA, 30 bp, Artificial Sequence
  Synthetic oligonucleotide
tacgtcatccgtcccgctcctcaggttact

SEQ ID NO: 115885 - DNA, 30 bp, Artificial Sequence
  Synthetic oligonucleotide
cctcgggaatcgtgtcatcatatatttact

SEQ ID NO: 115886 - DNA, 30 bp, Artificial Sequence
  Synthetic oligonucleotide
ctggaaagtggaatatttaggagctttact

SEQ ID NO: 115887 - DNA, 30 bp, Artificial Sequence
  Synthetic oligonucleotide
gataggagaggataagctagtgacaaacct

SEQ ID NO: 115888 - DNA, 30 bp, Artificial Sequence
  Synthetic oligonucleotide
gctggtgagaacatatgtactggtaaacct

SEQ ID NO: 115889 - DNA, 30 bp, Artificial Sequence
  Synthetic oligonucleotide
gcattaagtggagtctgaggctagcaacct

SEQ ID NO: 115890 - DNA, 30 bp, Artificial Sequence
  Synthetic oligonucleotide
ggtaaatcacctcaagtaatcatgcaacct

SEQ ID NO: 115891 - DNA, 30 bp, Artificial Sequence
  Synthetic oligonucleotide
ctaggacagtccgaaatgattagtcaacct

SEQ ID NO: 115892 - DNA, 30 bp, Artificial Sequence
  Synthetic oligonucleotide
ctactaaataaagtggccaggacagaacct

SEQ ID NO: 115893 - DNA, 30 bp, Artificial Sequence
  Synthetic oligonucleotide
ccggcaaaatgaccgaaccgtacggaacct

SEQ ID NO: 115894 - DNA, 30 bp, Artificial Sequence
  Synthetic oligonucleotide
cctcagtccacttgcgtaacggcataacct

SEQ ID NO: 115895 - DNA, 30 bp, Artificial Sequence
  Synthetic oligonucleotide
tcggagatccatagatgatagagaacacct

SEQ ID NO: 115896 - DNA, 30 bp, Artificial Sequence
  Synthetic oligonucleotide
tagagattaaataggaacctagtaacacct

SEQ ID NO: 115897 - DNA, 30 bp, Artificial Sequence
  Synthetic oligonucleotide
ctgatccataccccatgaaaagatacacct

SEQ ID NO: 115898 - DNA, 30 bp, Artificial Sequence
  Synthetic oligonucleotide
cggaaacggcatggctatactttgccacct

SEQ ID NO: 115899 - DNA, 30 bp, Artificial Sequence
  Synthetic oligonucleotide
ttgtcaacgagtatgtcttccctcgcacct

SEQ ID NO: 115900 - DNA, 30 bp, Artificial Sequence
  Synthetic oligonucleotide
atgcatcaattggagcagaccagttcacct

SEQ ID NO: 115901 - DNA, 30 bp, Artificial Sequence
  Synthetic oligonucleotide
ttgtaaaaggggactgcgtcatcgagacct

SEQ ID NO: 115902 - DNA, 30 bp, Artificial Sequence
  Synthetic oligonucleotide
ggcgaacttttgatgccgacggttcgacct

SEQ ID NO: 115903 - DNA, 30 bp, Artificial Sequence
  Synthetic oligonucleotide
cagcgatcgacgaaccagaaggcaggacct

SEQ ID NO: 115904 - DNA, 30 bp, Artificial Sequence
  Synthetic oligonucleotide
gttgggttgaaaaaaagggctactggacct

SEQ ID NO: 115905 - DNA, 30 bp, Artificial Sequence
  Synthetic oligonucleotide
cgttagacggaggtttccgtgggatgacct

SEQ ID NO: 115906 - DNA, 30 bp, Artificial Sequence
  Synthetic oligonucleotide
cggacaaggggcacttaccacccctgacct

SEQ ID NO: 115907 - DNA, 30 bp, Artificial Sequence
  Synthetic oligonucleotide
ggaccgataaaatggttgtccgagatacct

SEQ ID NO: 115908 - DNA, 30 bp, Artificial Sequence
  Synthetic oligonucleotide
agacgagggtagcagaacgtagaggtacct

SEQ ID NO: 115909 - DNA, 30 bp, Artificial Sequence
  Synthetic oligonucleotide
tcctgacaatttgaagccggaatggtacct

SEQ ID NO: 115910 - DNA, 30 bp, Artificial Sequence
  Synthetic oligonucleotide
gtaacaatcgtcgcataccttccaaaccct

SEQ ID NO: 115911 - DNA, 30 bp, Artificial Sequence
  Synthetic oligonucleotide
acgacccccgtgcattatatccgccaccct

SEQ ID NO: 115912 - DNA, 30 bp, Artificial Sequence
  Synthetic oligonucleotide
aggagatacattcccgaagatcgccaccct

SEQ ID NO: 115913 - DNA, 30 bp, Artificial Sequence
  Synthetic oligonucleotide
gaacaataaacggataacagaagtcaccct

SEQ ID NO: 115914 - DNA, 30 bp, Artificial Sequence
  Synthetic oligonucleotide
ctgagccaataggcaggccaatgtgaccct

SEQ ID NO: 115915 - DNA, 30 bp, Artificial Sequence
  Synthetic oligonucleotide
ggtaccgtcatgagcttataagcaagccct

SEQ ID NO: 115916 - DNA, 30 bp, Artificial Sequence
  Synthetic oligonucleotide
tgtcctaatggccagtctgtcgtccgccct

SEQ ID NO: 115917 - DNA, 30 bp, Artificial Sequence
  Synthetic oligonucleotide
cgggttgcaacattgataatccagcgccct

SEQ ID NO: 115918 - DNA, 30 bp, Artificial Sequence
  Synthetic oligonucleotide
cgggcacccattgaatgagaattaggccct

SEQ ID NO: 115919 - DNA, 31 bp, Artificial Sequence
  Synthetic oligonucleotide
cgtaatcgccgtcattgactggaaatgccct

SEQ ID NO: 115920 - DNA, 30 bp, Artificial Sequence
  Synthetic oligonucleotide
tcggaccacgcctgcaaccgcaagatccct

SEQ ID NO: 115921 - DNA, 30 bp, Artificial Sequence
  Synthetic oligonucleotide
agggtgcattgaatgtaaccaatgatccct

SEQ ID NO: 115922 - DNA, 30 bp, Artificial Sequence
  Synthetic oligonucleotide
tagggaggggggcccaatagactgctccct

SEQ ID NO: 115923 - DNA, 30 bp, Artificial Sequence
  Synthetic oligonucleotide
gcgcgaatgttgagttaagccacagtccct

SEQ ID NO: 115924 - DNA, 30 bp, Artificial Sequence
  Synthetic oligonucleotide
cgatgattaggagagtcagcaaatgtccct

SEQ ID NO: 115925 - DNA, 30 bp, Artificial Sequence
  Synthetic oligonucleotide
atcattccgaaggaagcggtgagcaagcct

SEQ ID NO: 115926 - DNA, 30 bp, Artificial Sequence
  Synthetic oligonucleotide
attaccaggcacccatttaaccatgagcct

SEQ ID NO: 115927 - DNA, 30 bp, Artificial Sequence
  Synthetic oligonucleotide
gcggctgtaactacaattatatcctagcct

SEQ ID NO: 115928 - DNA, 30 bp, Artificial Sequence
  Synthetic oligonucleotide
tcgcgttggcgacacacgtatcgaacgcct

SEQ ID NO: 115929 - DNA, 30 bp, Artificial Sequence
  Synthetic oligonucleotide
agatgaccccggtcaacgattgccgcgcct

SEQ ID NO: 115930 - DNA, 30 bp, Artificial Sequence
  Synthetic oligonucleotide
gaccacactaaatggggaatgtggtcgcct

SEQ ID NO: 115931 - DNA, 30 bp, Artificial Sequence
  Synthetic oligonucleotide
gcactgacgttcacccataggaccaggcct

SEQ ID NO: 115932 - DNA, 30 bp, Artificial Sequence
  Synthetic oligonucleotide
acatcaagtcaggaattaatagtgcggcct

SEQ ID NO: 115933 - DNA, 30 bp, Artificial Sequence
  Synthetic oligonucleotide
gaacgtccagtaaaacataagtcggggcct

SEQ ID NO: 115934 - DNA, 30 bp, Artificial Sequence
  Synthetic oligonucleotide
tccaaagttatagagaagggtacgtggcct

SEQ ID NO: 115935 - DNA, 30 bp, Artificial Sequence
  Synthetic oligonucleotide
catgagcttggacgtcccgggacgatgcct

SEQ ID NO: 115936 - DNA, 30 bp, Artificial Sequence
  Synthetic oligonucleotide
gatcgtagtgccatatggtgggtgatgcct

SEQ ID NO: 115937 - DNA, 30 bp, Artificial Sequence
  Synthetic oligonucleotide
ggatagccaatgaaatttggaggtatgcct

SEQ ID NO: 115938 - DNA, 30 bp, Artificial Sequence
  Synthetic oligonucleotide
attggacggatttccaacgggtgactgcct

SEQ ID NO: 115939 - DNA, 30 bp, Artificial Sequence
  Synthetic oligonucleotide
aacggtagtagacaaccgcggcccaatcct

SEQ ID NO: 115940 - DNA, 30 bp, Artificial Sequence
  Synthetic oligonucleotide
tggttaacagcgcgaaatgcccagaatcct

SEQ ID NO: 115941 - DNA, 30 bp, Artificial Sequence
  Synthetic oligonucleotide
cgcaatccctttgcgaatagatggcatcct

SEQ ID NO: 115942 - DNA, 30 bp, Artificial Sequence
  Synthetic oligonucleotide
tgcaagattgacgatgcatatgtcgatcct

SEQ ID NO: 115943 - DNA, 30 bp, Artificial Sequence
  Synthetic oligonucleotide
tgcggttgaaagtgcgcgcataaacctcct

SEQ ID NO: 115944 - DNA, 30 bp, Artificial Sequence
  Synthetic oligonucleotide
aacggacatgaacaagtccatcgccctcct

SEQ ID NO: 115945 - DNA, 30 bp, Artificial Sequence
  Synthetic oligonucleotide
catgggtggaattgcgttcggatagctcct

SEQ ID NO: 115946 - DNA, 30 bp, Artificial Sequence
  Synthetic oligonucleotide
cctgtacaacaggatggttggatagctcct

SEQ ID NO: 115947 - DNA, 30 bp, Artificial Sequence
  Synthetic oligonucleotide
cgcctttacctgattgtggggctcgctcct

SEQ ID NO: 115948 - DNA, 30 bp, Artificial Sequence
  Synthetic oligonucleotide
tttacagcagcgtaacgtagggatcgtcct

SEQ ID NO: 115949 - DNA, 30 bp, Artificial Sequence
  Synthetic oligonucleotide
gcgacgtggcaacgattcaatgacggtcct

SEQ ID NO: 115950 - DNA, 30 bp, Artificial Sequence
  Synthetic oligonucleotide
tacgggatgtttcttaattgggaaattcct

SEQ ID NO: 115951 - DNA, 30 bp, Artificial Sequence
  Synthetic oligonucleotide
tcacgcttcggtaatggggtaagcgttcct

SEQ ID NO: 115952 - DNA, 30 bp, Artificial Sequence
  Synthetic oligonucleotide
gtcgtgaacgggggcacctgcggtgttcct

SEQ ID NO: 115953 - DNA, 30 bp, Artificial Sequence
  Synthetic oligonucleotide
accacagagtattctcttgcagtaaaagct

SEQ ID NO: 115954 - DNA, 30 bp, Artificial Sequence
  Synthetic oligonucleotide
agaaggctccctaataagtatgacaaagct

SEQ ID NO: 115955 - DNA, 30 bp, Artificial Sequence
  Synthetic oligonucleotide
cagggtatagatgctcaaacccagaaagct

SEQ ID NO: 115956 - DNA, 30 bp, Artificial Sequence
  Synthetic oligonucleotide
cgatcgtaacactccatgttcaaacaagct

SEQ ID NO: 115957 - DNA, 30 bp, Artificial Sequence
  Synthetic oligonucleotide
tagggggtaccaagggaccccagacaagct

SEQ ID NO: 115958 - DNA, 30 bp, Artificial Sequence
  Synthetic oligonucleotide
acaataactcgtgaaacggcggaccaagct

SEQ ID NO: 115959 - DNA, 30 bp, Artificial Sequence
  Synthetic oligonucleotide
actgacacgattaagcgcctcatgcaagct

SEQ ID NO: 115960 - DNA, 30 bp, Artificial Sequence
  Synthetic oligonucleotide
gtcagagatgtacatcatggattgcaagct

SEQ ID NO: 115961 - DNA, 30 bp, Artificial Sequence
  Synthetic oligonucleotide
cggcgtccactgtgcgagggtattcaagct

SEQ ID NO: 115962 - DNA, 30 bp, Artificial Sequence
  Synthetic oligonucleotide
acaagctggataccaggaatgtaagaagct

SEQ ID NO: 115963 - DNA, 30 bp, Artificial Sequence
  Synthetic oligonucleotide
ttaggcgagtattggcactacagagaagct

SEQ ID NO: 115964 - DNA, 30 bp, Artificial Sequence
  Synthetic oligonucleotide
acaatcgatgttcggacctgttcggaagct

SEQ ID NO: 115965 - DNA, 30 bp, Artificial Sequence
  Synthetic oligonucleotide
tttggcgaaaatgatcccggtggggaagct

SEQ ID NO: 115966 - DNA, 30 bp, Artificial Sequence
  Synthetic oligonucleotide
tgtaattgataccgtgcatcgtatgaagct

SEQ ID NO: 115967 - DNA, 30 bp, Artificial Sequence
  Synthetic oligonucleotide
aaagcggtaaagcctacacctgcaacagct

SEQ ID NO: 115968 - DNA, 30 bp, Artificial Sequence
  Synthetic oligonucleotide
accagtgttgtgacgcttaaacacacagct

SEQ ID NO: 115969 - DNA, 30 bp, Artificial Sequence
  Synthetic oligonucleotide
tctatcacagtgtacaaaggcatcccagct

SEQ ID NO: 115970 - DNA, 30 bp, Artificial Sequence
  Synthetic oligonucleotide
aggaaagggtcgggttcgtcccgcgcagct

SEQ ID NO: 115971 - DNA, 30 bp, Artificial Sequence
  Synthetic oligonucleotide
gtgctaaaaagtgcgtaagtggtctcagct

SEQ ID NO: 115972 - DNA, 30 bp, Artificial Sequence
  Synthetic oligonucleotide
gcgtaatgatactcgatctggcagtcagct

SEQ ID NO: 115973 - DNA, 30 bp, Artificial Sequence
  Synthetic oligonucleotide
cggtagagacaagttggcagtacgtcagct

SEQ ID NO: 115974 - DNA, 30 bp, Artificial Sequence
  Synthetic oligonucleotide
aagaggtggcgagagttgcttgtaagagct

SEQ ID NO: 115975 - DNA, 30 bp, Artificial Sequence
  Synthetic oligonucleotide
caactctaacaagacatatccaagagagct

SEQ ID NO: 115976 - DNA, 30 bp, Artificial Sequence
  Synthetic oligonucleotide
gacacctagaggggataggcgaagagagct

SEQ ID NO: 115977 - DNA, 30 bp, Artificial Sequence
  Synthetic oligonucleotide
acgtagtattgctccgcggggaagagagct

SEQ ID NO: 115978 - DNA, 30 bp, Artificial Sequence
  Synthetic oligonucleotide
actgcgggagcacagccctaaaaacgagct

SEQ ID NO: 115979 - DNA, 30 bp, Artificial Sequence
  Synthetic oligonucleotide
tcacaccacaggtaacctcgcatccgagct

SEQ ID NO: 115980 - DNA, 30 bp, Artificial Sequence
  Synthetic oligonucleotide
acggaaattgtaaatttgaagatccgagct

SEQ ID NO: 115981 - DNA, 30 bp, Artificial Sequence
  Synthetic oligonucleotide
taaatggtttgaactgccgacataatagct

SEQ ID NO: 115982 - DNA, 30 bp, Artificial Sequence
  Synthetic oligonucleotide
ctgttaaaccgcaccaccatctacatagct

SEQ ID NO: 115983 - DNA, 30 bp, Artificial Sequence
  Synthetic oligonucleotide
atatggagtggggagggctataccatagct

SEQ ID NO: 115984 - DNA, 30 bp, Artificial Sequence
  Synthetic oligonucleotide
aggcgcacccctccgaagtggttcatagct

SEQ ID NO: 115985 - DNA, 30 bp, Artificial Sequence
  Synthetic oligonucleotide
ccatataacgtgcgactctggtgactagct

SEQ ID NO: 115986 - DNA, 30 bp, Artificial Sequence
  Synthetic oligonucleotide
ggactcgctcgcagaggccgtcgcgtagct

SEQ ID NO: 115987 - DNA, 30 bp, Artificial Sequence
  Synthetic oligonucleotide
acttccggtagcgatcgatcattggtagct

SEQ ID NO: 115988 - DNA, 30 bp, Artificial Sequence
  Synthetic oligonucleotide
acgggtgcttgaagatgggtgcgcttagct

SEQ ID NO: 115989 - DNA, 30 bp, Artificial Sequence
  Synthetic oligonucleotide
cgcttgattgtatgattggattgtttagct

SEQ ID NO: 115990 - DNA, 30 bp, Artificial Sequence
  Synthetic oligonucleotide
ttacaccggcacgaaatgccttgacacgct

SEQ ID NO: 115991 - DNA, 30 bp, Artificial Sequence
  Synthetic oligonucleotide
tcagtactgtacgcgacggacaggtacgct

SEQ ID NO: 115992 - DNA, 30 bp, Artificial Sequence
  Synthetic oligonucleotide
acggtgagtgaaggagggtatattcccgct

SEQ ID NO: 115993 - DNA, 30 bp, Artificial Sequence
  Synthetic oligonucleotide
attgcgagcaaattatccaccagggccgct

SEQ ID NO: 115994 - DNA, 30 bp, Artificial Sequence
  Synthetic oligonucleotide
atcaggaacacgctaattgaagagtccgct

SEQ ID NO: 115995 - DNA, 30 bp, Artificial Sequence
  Synthetic oligonucleotide
agagaagggtgtccgtgtccgagtcgcgct

SEQ ID NO: 115996 - DNA, 30 bp, Artificial Sequence
  Synthetic oligonucleotide
cgaccggatagcggacactttattcgcgct

SEQ ID NO: 115997 - DNA, 30 bp, Artificial Sequence
  Synthetic oligonucleotide
aggttaacaacaatctattgcagaatcgct

SEQ ID NO: 115998 - DNA, 30 bp, Artificial Sequence
  Synthetic oligonucleotide
gtagcacgtaagcagtccgtctcaaaggct

SEQ ID NO: 115999 - DNA, 30 bp, Artificial Sequence
  Synthetic oligonucleotide
ataaataatcttgtccacaccttcaaggct

SEQ ID NO: 116000 - DNA, 30 bp, Artificial Sequence
  Synthetic oligonucleotide
ttagccggcgacagaacgtaatctaaggct

SEQ ID NO: 116001 - DNA, 30 bp, Artificial Sequence
  Synthetic oligonucleotide
ccgattgaaattctaacgtcctttaaggct

SEQ ID NO: 116002 - DNA, 30 bp, Artificial Sequence
  Synthetic oligonucleotide
aaccaatgctgtggataagtcgaccaggct

SEQ ID NO: 116003 - DNA, 30 bp, Artificial Sequence
  Synthetic oligonucleotide
gataacccggaggttaaggactgtcaggct

SEQ ID NO: 116004 - DNA, 30 bp, Artificial Sequence
  Synthetic oligonucleotide
tgggcacatgcggaacaccctcacgaggct

SEQ ID NO: 116005 - DNA, 31 bp, Artificial Sequence
  Synthetic oligonucleotide
ggatgtcaacagtctatccgtagaggaggct

SEQ ID NO: 116006 - DNA, 30 bp, Artificial Sequence
  Synthetic oligonucleotide
tcgggtgatattaacgcaatcggggaggct

SEQ ID NO: 116007 - DNA, 30 bp, Artificial Sequence
  Synthetic oligonucleotide
ccgttatgatattcaacgtttgcataggct

SEQ ID NO: 116008 - DNA, 30 bp, Artificial Sequence
  Synthetic oligonucleotide
ctgtataggcttaggcgaggcccctaggct

SEQ ID NO: 116009 - DNA, 30 bp, Artificial Sequence
  Synthetic oligonucleotide
ctaaatgcggtaaatgcttacacaacggct

SEQ ID NO: 116010 - DNA, 30 bp, Artificial Sequence
  Synthetic oligonucleotide
taacacacacagaatacagccttaacggct

SEQ ID NO: 116011 - DNA, 30 bp, Artificial Sequence
  Synthetic oligonucleotide
tccaagtgaacattcaagtgtaggacggct

SEQ ID NO: 116012 - DNA, 30 bp, Artificial Sequence
  Synthetic oligonucleotide
tgtcagcgaccacgctatttacaaccggct

SEQ ID NO: 116013 - DNA, 30 bp, Artificial Sequence
  Synthetic oligonucleotide
tagccgtatgaagatatggacagcccggct

SEQ ID NO: 116014 - DNA, 30 bp, Artificial Sequence
  Synthetic oligonucleotide
cccgctacaccagactagttgaagccggct

SEQ ID NO: 116015 - DNA, 30 bp, Artificial Sequence
  Synthetic oligonucleotide
gagcaaattatggactcaagtttgccggct

SEQ ID NO: 116016 - DNA, 30 bp, Artificial Sequence
  Synthetic oligonucleotide
tacacgaaaccaattacttcagttccggct

SEQ ID NO: 116017 - DNA, 30 bp, Artificial Sequence
  Synthetic oligonucleotide
atgagtcaggcttaatctgaatgcgcggct

SEQ ID NO: 116018 - DNA, 30 bp, Artificial Sequence
  Synthetic oligonucleotide
gtcattacacacgggaaggggtgtgcggct

SEQ ID NO: 116019 - DNA, 30 bp, Artificial Sequence
  Synthetic oligonucleotide
tgataatcttgtcaggaaatcgaatcggct

SEQ ID NO: 116020 - DNA, 30 bp, Artificial Sequence
  Synthetic oligonucleotide
ccaacaccaacctatagcaaggcatcggct

SEQ ID NO: 116021 - DNA, 30 bp, Artificial Sequence
  Synthetic oligonucleotide
atgaaactcagctagaaggcctggtcggct

SEQ ID NO: 116022 - DNA, 30 bp, Artificial Sequence
  Synthetic oligonucleotide
atcaagacaacaaagttcagtgtgagggct

SEQ ID NO: 116023 - DNA, 30 bp, Artificial Sequence
  Synthetic oligonucleotide
ggctagactcgggaattacgggatagggct

SEQ ID NO: 116024 - DNA, 30 bp, Artificial Sequence
  Synthetic oligonucleotide
tagcactgtcgagtccagttcagtcgggct

SEQ ID NO: 116025 - DNA, 30 bp, Artificial Sequence
  Synthetic oligonucleotide
tttgagtatacgataggatcgagaggggct

SEQ ID NO: 116026 - DNA, 30 bp, Artificial Sequence
  Synthetic oligonucleotide
ccggtagtccgaatcacctcgtgtggggct

SEQ ID NO: 116027 - DNA, 30 bp, Artificial Sequence
  Synthetic oligonucleotide
acggaagtaagtatgtttcgggaatgggct

SEQ ID NO: 116028 - DNA, 30 bp, Artificial Sequence
  Synthetic oligonucleotide
cattgaagcttagggttgcggggatgggct

SEQ ID NO: 116029 - DNA, 30 bp, Artificial Sequence
  Synthetic oligonucleotide
cgaaactacgttgctgtcgtgccgtgggct

SEQ ID NO: 116030 - DNA, 30 bp, Artificial Sequence
  Synthetic oligonucleotide
ggataatgatacaaatgagctttaatggct

SEQ ID NO: 116031 - DNA, 30 bp, Artificial Sequence
  Synthetic oligonucleotide
caccgcaggatggacgctcaccgcatggct

SEQ ID NO: 116032 - DNA, 29 bp, Artificial Sequence
  Synthetic oligonucleotide
gatctgaggaaccagtggtcaaagtggct

SEQ ID NO: 116033 - DNA, 30 bp, Artificial Sequence
  Synthetic oligonucleotide
gcgtgtagtcggtacgatttaagggtggct

SEQ ID NO: 116034 - DNA, 30 bp, Artificial Sequence
  Synthetic oligonucleotide
gatcacaaaccgttcatagtatgggtggct

SEQ ID NO: 116035 - DNA, 30 bp, Artificial Sequence
  Synthetic oligonucleotide
caatagactcatagaaaacgcataaatgct

SEQ ID NO: 116036 - DNA, 30 bp, Artificial Sequence
  Synthetic oligonucleotide
atggaattcagtaaacataagagcaatgct

SEQ ID NO: 116037 - DNA, 30 bp, Artificial Sequence
  Synthetic oligonucleotide
aacgcgaggtccaaacattccctgcatgct

SEQ ID NO: 116038 - DNA, 30 bp, Artificial Sequence
  Synthetic oligonucleotide
tcgacatgcatagccaccgaagctcatgct

SEQ ID NO: 116039 - DNA, 30 bp, Artificial Sequence
  Synthetic oligonucleotide
cgtcgtcgatgtgtcaaactagccgatgct

SEQ ID NO: 116040 - DNA, 30 bp, Artificial Sequence
  Synthetic oligonucleotide
cggaaaagcgcttaggctggaaaggatgct

SEQ ID NO: 116041 - DNA, 30 bp, Artificial Sequence
  Synthetic oligonucleotide
ctaagtacacgcataagagcaagtgatgct

SEQ ID NO: 116042 - DNA, 30 bp, Artificial Sequence
  Synthetic oligonucleotide
atctcgtggcgaaaactagaagaatatgct

SEQ ID NO: 116043 - DNA, 30 bp, Artificial Sequence
  Synthetic oligonucleotide
gaacttaacacgtagtggcaccgctatgct

SEQ ID NO: 116044 - DNA, 30 bp, Artificial Sequence
  Synthetic oligonucleotide
cagtccgacaactcttcgtatccgtatgct

SEQ ID NO: 116045 - DNA, 30 bp, Artificial Sequence
  Synthetic oligonucleotide
agtgcgggtgcgcggcgcacattaactgct

SEQ ID NO: 116046 - DNA, 30 bp, Artificial Sequence
  Synthetic oligonucleotide
atgatcaaatgcggaaggcctacgcctgct

SEQ ID NO: 116047 - DNA, 30 bp, Artificial Sequence
  Synthetic oligonucleotide
agcgcgcgaatgctctctaatagatctgct

SEQ ID NO: 116048 - DNA, 30 bp, Artificial Sequence
  Synthetic oligonucleotide
tggggacaagttattattcgtttctctgct

SEQ ID NO: 116049 - DNA, 30 bp, Artificial Sequence
  Synthetic oligonucleotide
gatagcggcaattcttgcgtggaccgtgct

SEQ ID NO: 116050 - DNA, 30 bp, Artificial Sequence
  Synthetic oligonucleotide
gtggagccgctcagtaagtcaagccgtgct

SEQ ID NO: 116051 - DNA, 30 bp, Artificial Sequence
  Synthetic oligonucleotide
gcggaggcaagagcagggccttatcgtgct

SEQ ID NO: 116052 - DNA, 30 bp, Artificial Sequence
  Synthetic oligonucleotide
gatcactcctaagatgagaatggtcgtgct

SEQ ID NO: 116053 - DNA, 30 bp, Artificial Sequence
  Synthetic oligonucleotide
aggcctcaagcgtgggctgaacgaggtgct

SEQ ID NO: 116054 - DNA, 30 bp, Artificial Sequence
  Synthetic oligonucleotide
ggaagaagagtgcactcaagtcatggtgct

SEQ ID NO: 116055 - DNA, 30 bp, Artificial Sequence
  Synthetic oligonucleotide
ggcgatcatctctttatcaggcaatgtgct

SEQ ID NO: 116056 - DNA, 30 bp, Artificial Sequence
  Synthetic oligonucleotide
cttaacgggagatgacggatcggacttgct

SEQ ID NO: 116057 - DNA, 30 bp, Artificial Sequence
  Synthetic oligonucleotide
ggcgtcaaggatggtgcatgttgacttgct

SEQ ID NO: 116058 - DNA, 30 bp, Artificial Sequence
  Synthetic oligonucleotide
agcagtaccttcgcgaaagtgggatttgct

SEQ ID NO: 116059 - DNA, 30 bp, Artificial Sequence
  Synthetic oligonucleotide
tgacagtacggctgcccagaccactttgct

SEQ ID NO: 116060 - DNA, 30 bp, Artificial Sequence
  Synthetic oligonucleotide
gcgttacgagcaccacaactgcggtttgct

SEQ ID NO: 116061 - DNA, 30 bp, Artificial Sequence
  Synthetic oligonucleotide
caaatagaaccaaacaacgcacgacaatct

SEQ ID NO: 116062 - DNA, 30 bp, Artificial Sequence
  Synthetic oligonucleotide
gttaggagcgagtaagacactgcccaatct

SEQ ID NO: 116063 - DNA, 30 bp, Artificial Sequence
  Synthetic oligonucleotide
ggccgctttcagccgaaaaaataagaatct

SEQ ID NO: 116064 - DNA, 30 bp, Artificial Sequence
  Synthetic oligonucleotide
gcgtcgtcaaaggataatatgtcagaatct

SEQ ID NO: 116065 - DNA, 30 bp, Artificial Sequence
  Synthetic oligonucleotide
cggataagtgtgctagtactccactaatct

SEQ ID NO: 116066 - DNA, 30 bp, Artificial Sequence
  Synthetic oligonucleotide
gtttacacacacccacacatcacttaatct

SEQ ID NO: 116067 - DNA, 30 bp, Artificial Sequence
  Synthetic oligonucleotide
ggttacaggagacgaggagtatgttaatct

SEQ ID NO: 116068 - DNA, 30 bp, Artificial Sequence
  Synthetic oligonucleotide
tacagaggtgcgaagcgagggcccacatct

SEQ ID NO: 116069 - DNA, 29 bp, Artificial Sequence
  Synthetic oligonucleotide
ctgtcggtttgccgacaacagatacatct

SEQ ID NO: 116070 - DNA, 30 bp, Artificial Sequence
  Synthetic oligonucleotide
ctcagggagttcgaggaacgcaaagcatct

SEQ ID NO: 116071 - DNA, 30 bp, Artificial Sequence
  Synthetic oligonucleotide
caggacctcgcatggcctccataagcatct

SEQ ID NO: 116072 - DNA, 30 bp, Artificial Sequence
  Synthetic oligonucleotide
gggaaaggtgcccgaactgggcatgcatct

SEQ ID NO: 116073 - DNA, 30 bp, Artificial Sequence
  Synthetic oligonucleotide
ttgagacatacaatcattccgacatcatct

SEQ ID NO: 116074 - DNA, 30 bp, Artificial Sequence
  Synthetic oligonucleotide
tcctgtcaaagaatatatggaatatcatct

SEQ ID NO: 116075 - DNA, 30 bp, Artificial Sequence
  Synthetic oligonucleotide
aaaccacgaacgtatcgatacaggtcatct

SEQ ID NO: 116076 - DNA, 30 bp, Artificial Sequence
  Synthetic oligonucleotide
aggaagcattgggactcggacgcaagatct

SEQ ID NO: 116077 - DNA, 30 bp, Artificial Sequence
  Synthetic oligonucleotide
ataatgtggagtccctccaaaacgagatct

SEQ ID NO: 116078 - DNA, 30 bp, Artificial Sequence
  Synthetic oligonucleotide
actaaagctgaaaagacttcatcgagatct

SEQ ID NO: 116079 - DNA, 30 bp, Artificial Sequence
  Synthetic oligonucleotide
agtcggctgacacactaattaaggagatct

SEQ ID NO: 116080 - DNA, 30 bp, Artificial Sequence
  Synthetic oligonucleotide
tacctcactgaaacttacagcgcccgatct

SEQ ID NO: 116081 - DNA, 30 bp, Artificial Sequence
  Synthetic oligonucleotide
agtaattgtgagtcaataaacgagcgatct

SEQ ID NO: 116082 - DNA, 30 bp, Artificial Sequence
  Synthetic oligonucleotide
ctagaggggcctcaaatattgaatcgatct

SEQ ID NO: 116083 - DNA, 30 bp, Artificial Sequence
  Synthetic oligonucleotide
gacgtggcgttcattaatggttccggatct

SEQ ID NO: 116084 - DNA, 30 bp, Artificial Sequence
  Synthetic oligonucleotide
ggaaaaaagcgagccttaatgaggtgatct

SEQ ID NO: 116085 - DNA, 30 bp, Artificial Sequence
  Synthetic oligonucleotide
aggttccatcaaaacttgatcccaatatct

SEQ ID NO: 116086 - DNA, 30 bp, Artificial Sequence
  Synthetic oligonucleotide
aggtccgacaaggttgcctgggttctatct

SEQ ID NO: 116087 - DNA, 30 bp, Artificial Sequence
  Synthetic oligonucleotide
agcctgattagggaagtagagacaaactct

SEQ ID NO: 116088 - DNA, 30 bp, Artificial Sequence
  Synthetic oligonucleotide
gaaatgcatgggagtgggaaagagaactct

SEQ ID NO: 116089 - DNA, 30 bp, Artificial Sequence
  Synthetic oligonucleotide
agggcgggctgtattccaccactacactct

SEQ ID NO: 116090 - DNA, 30 bp, Artificial Sequence
  Synthetic oligonucleotide
aacgggcagtttaaatttaggcaagactct

SEQ ID NO: 116091 - DNA, 30 bp, Artificial Sequence
  Synthetic oligonucleotide
gcggcacgtaaactgatccttgacgactct

SEQ ID NO: 116092 - DNA, 30 bp, Artificial Sequence
  Synthetic oligonucleotide
gaatgccgggacaacgagcagtgcgactct

SEQ ID NO: 116093 - DNA, 30 bp, Artificial Sequence
  Synthetic oligonucleotide
ggcataaacggaggacctccttctgactct

SEQ ID NO: 116094 - DNA, 30 bp, Artificial Sequence
  Synthetic oligonucleotide
atctaaggagaaagtgcacaaggtccctct

SEQ ID NO: 116095 - DNA, 30 bp, Artificial Sequence
  Synthetic oligonucleotide
ggacaatacaaatggcgacgggttccctct

SEQ ID NO: 116096 - DNA, 30 bp, Artificial Sequence
  Synthetic oligonucleotide
gaatcacccacaggaaacctgaatgcctct

SEQ ID NO: 116097 - DNA, 30 bp, Artificial Sequence
  Synthetic oligonucleotide
cgagttccgaggagcatgtgtgctgcctct

SEQ ID NO: 116098 - DNA, 30 bp, Artificial Sequence
  Synthetic oligonucleotide
gaacgataaaaggggagcggaccatcctct

SEQ ID NO: 116099 - DNA, 30 bp, Artificial Sequence
  Synthetic oligonucleotide
tggatggcacacatttaagtggggtcctct

SEQ ID NO: 116100 - DNA, 30 bp, Artificial Sequence
  Synthetic oligonucleotide
cggatacgtgtccattataaggcgagctct

SEQ ID NO: 116101 - DNA, 30 bp, Artificial Sequence
  Synthetic oligonucleotide
attcgtgtacgtgaggcaatgtctcgctct

SEQ ID NO: 116102 - DNA, 30 bp, Artificial Sequence
  Synthetic oligonucleotide
agggctttaacgaaaactaactgtggctct

SEQ ID NO: 116103 - DNA, 30 bp, Artificial Sequence
  Synthetic oligonucleotide
atggccaatccgttggaagatgtttgctct

SEQ ID NO: 116104 - DNA, 30 bp, Artificial Sequence
  Synthetic oligonucleotide
aacgggcaatcgcagtctgtctacatctct

SEQ ID NO: 116105 - DNA, 30 bp, Artificial Sequence
  Synthetic oligonucleotide
tgcggagacaaacttcgtaccaccatctct

SEQ ID NO: 116106 - DNA, 30 bp, Artificial Sequence
  Synthetic oligonucleotide
ttcgtggtcatcggtataaacggcttctct

SEQ ID NO: 116107 - DNA, 30 bp, Artificial Sequence
  Synthetic oligonucleotide
accagtgggtccacctacgaaaagcagtct

SEQ ID NO: 116108 - DNA, 30 bp, Artificial Sequence
  Synthetic oligonucleotide
gctcaatgcggagcgtggagccagcagtct

SEQ ID NO: 116109 - DNA, 30 bp, Artificial Sequence
  Synthetic oligonucleotide
caagagtaggtgagccacaagtcgcagtct

SEQ ID NO: 116110 - DNA, 30 bp, Artificial Sequence
  Synthetic oligonucleotide
ttgccgtattcggatatacataaatagtct

SEQ ID NO: 116111 - DNA, 30 bp, Artificial Sequence
  Synthetic oligonucleotide
tgattcagcgcgtgggtacatttctagtct

SEQ ID NO: 116112 - DNA, 30 bp, Artificial Sequence
  Synthetic oligonucleotide
aggaggtaataccagagtggttgaacgtct

SEQ ID NO: 116113 - DNA, 30 bp, Artificial Sequence
  Synthetic oligonucleotide
ggggggagaaacttgtgttttagtccgtct

SEQ ID NO: 116114 - DNA, 30 bp, Artificial Sequence
  Synthetic oligonucleotide
aggctaatgcgattcacccaggaggcgtct

SEQ ID NO: 116115 - DNA, 30 bp, Artificial Sequence
  Synthetic oligonucleotide
actacaagggcaccaatcacagatgcgtct

SEQ ID NO: 116116 - DNA, 30 bp, Artificial Sequence
  Synthetic oligonucleotide
cgtgacaatctgttcagctgaacatcgtct

SEQ ID NO: 116117 - DNA, 30 bp, Artificial Sequence
  Synthetic oligonucleotide
tcatcgtccatctcgcagggccgatcgtct

SEQ ID NO: 116118 - DNA, 30 bp, Artificial Sequence
  Synthetic oligonucleotide
cgtaaaataggtggttatgggtattcgtct

SEQ ID NO: 116119 - DNA, 30 bp, Artificial Sequence
  Synthetic oligonucleotide
aaatgattaacggggacaaaacgtaggtct

SEQ ID NO: 116120 - DNA, 30 bp, Artificial Sequence
  Synthetic oligonucleotide
ggatagtgaggacaaagtgtgagtcggtct

SEQ ID NO: 116121 - DNA, 30 bp, Artificial Sequence
  Synthetic oligonucleotide
cagatgggccgcaagcgatgccaatggtct

SEQ ID NO: 116122 - DNA, 30 bp, Artificial Sequence
  Synthetic oligonucleotide
ctctttatagctgtcgaggagtcctggtct

SEQ ID NO: 116123 - DNA, 30 bp, Artificial Sequence
  Synthetic oligonucleotide
taagcctgcgaacggggtggccagtggtct

SEQ ID NO: 116124 - DNA, 30 bp, Artificial Sequence
  Synthetic oligonucleotide
ggattctaacactaccgtgagcgaatgtct

SEQ ID NO: 116125 - DNA, 30 bp, Artificial Sequence
  Synthetic oligonucleotide
agtgttctggtaagttaacggctaatgtct

SEQ ID NO: 116126 - DNA, 30 bp, Artificial Sequence
  Synthetic oligonucleotide
gtgtcggagagaatctaacctcagctgtct

SEQ ID NO: 116127 - DNA, 30 bp, Artificial Sequence
  Synthetic oligonucleotide
ctgaaaggggcaactggatacaatctgtct

SEQ ID NO: 116128 - DNA, 30 bp, Artificial Sequence
  Synthetic oligonucleotide
aagctcaagcgtggcgccgcatttctgtct

SEQ ID NO: 116129 - DNA, 30 bp, Artificial Sequence
  Synthetic oligonucleotide
gacacgtcatgagtgctagcaaggttgtct

SEQ ID NO: 116130 - DNA, 30 bp, Artificial Sequence
  Synthetic oligonucleotide
taagttcgaataaaccttctccggttgtct

SEQ ID NO: 116131 - DNA, 30 bp, Artificial Sequence
  Synthetic oligonucleotide
tcagcgtgcgagcgtgggcctaaaaattct

SEQ ID NO: 116132 - DNA, 31 bp, Artificial Sequence
  Synthetic oligonucleotide
gcacacagttgatatgagaaagcaaaattct

SEQ ID NO: 116133 - DNA, 30 bp, Artificial Sequence
  Synthetic oligonucleotide
atggtcctcgacttgaactttgcccattct

SEQ ID NO: 116134 - DNA, 30 bp, Artificial Sequence
  Synthetic oligonucleotide
ggtcaatgggcagtaactaaccaatattct

SEQ ID NO: 116135 - DNA, 30 bp, Artificial Sequence
  Synthetic oligonucleotide
aacgacgtgcgtgtcactatttgctattct

SEQ ID NO: 116136 - DNA, 30 bp, Artificial Sequence
  Synthetic oligonucleotide
cttcaggaaatatccaagatgcaaacttct

SEQ ID NO: 116137 - DNA, 30 bp, Artificial Sequence
  Synthetic oligonucleotide
gaggtaacgtacatcggcgggataacttct

SEQ ID NO: 116138 - DNA, 30 bp, Artificial Sequence
  Synthetic oligonucleotide
cgcgaccgtgccaatcccgatgtgacttct

SEQ ID NO: 116139 - DNA, 30 bp, Artificial Sequence
  Synthetic oligonucleotide
cctggagaagagtgttctgacgttccttct

SEQ ID NO: 116140 - DNA, 30 bp, Artificial Sequence
  Synthetic oligonucleotide
acaaaacgaccacgatatcgccaggcttct

SEQ ID NO: 116141 - DNA, 30 bp, Artificial Sequence
  Synthetic oligonucleotide
caagtgagtgcgtaaatgcggcaatcttct

SEQ ID NO: 116142 - DNA, 30 bp, Artificial Sequence
  Synthetic oligonucleotide
ccaagcgcatgttcttcatagcgatcttct

SEQ ID NO: 116143 - DNA, 30 bp, Artificial Sequence
  Synthetic oligonucleotide
acgaagtgagaatggaccttatggagttct

SEQ ID NO: 116144 - DNA, 30 bp, Artificial Sequence
  Synthetic oligonucleotide
actgaaaagaaccaccctgataatcgttct

SEQ ID NO: 116145 - DNA, 31 bp, Artificial Sequence
  Synthetic oligonucleotide
ggtccgataggcatcgttaataaacggttct

SEQ ID NO: 116146 - DNA, 30 bp, Artificial Sequence
  Synthetic oligonucleotide
ggtgcagagtctaagtgcctgcagtgttct

SEQ ID NO: 116147 - DNA, 30 bp, Artificial Sequence
  Synthetic oligonucleotide
catgtataggacagggtgaatatttgttct

SEQ ID NO: 116148 - DNA, 30 bp, Artificial Sequence
  Synthetic oligonucleotide
tccgggaactaggctgatatgcggatttct

SEQ ID NO: 116149 - DNA, 30 bp, Artificial Sequence
  Synthetic oligonucleotide
acgactgcgcctctgttcacgtgtatttct

SEQ ID NO: 116150 - DNA, 30 bp, Artificial Sequence
  Synthetic oligonucleotide
tacggatggttcgctatcctccaaaaaagt

SEQ ID NO: 116151 - DNA, 30 bp, Artificial Sequence
  Synthetic oligonucleotide
ggggtgcaaggctcaatcttaaagaaaagt

SEQ ID NO: 116152 - DNA, 30 bp, Artificial Sequence
  Synthetic oligonucleotide
cacggtacacctagaccgactcggaaaagt

SEQ ID NO: 116153 - DNA, 30 bp, Artificial Sequence
  Synthetic oligonucleotide
ttccaaaaaaactaacattgtgtgaaaagt

SEQ ID NO: 116154 - DNA, 30 bp, Artificial Sequence
  Synthetic oligonucleotide
cctcgtagatttaatatccagcagcaaagt

SEQ ID NO: 116155 - DNA, 30 bp, Artificial Sequence
  Synthetic oligonucleotide
acaggtcggggggatgtggataggcaaagt

SEQ ID NO: 116156 - DNA, 30 bp, Artificial Sequence
  Synthetic oligonucleotide
aggagcatctgaaggccaatggggcaaagt

SEQ ID NO: 116157 - DNA, 30 bp, Artificial Sequence
  Synthetic oligonucleotide
tacgtcagcatgcgccgtatgaatcaaagt

SEQ ID NO: 116158 - DNA, 30 bp, Artificial Sequence
  Synthetic oligonucleotide
aacaacattaatagcgatggtccagaaagt

SEQ ID NO: 116159 - DNA, 30 bp, Artificial Sequence
  Synthetic oligonucleotide
ttcggctctacgcaatggtccggggaaagt

SEQ ID NO: 116160 - DNA, 30 bp, Artificial Sequence
  Synthetic oligonucleotide
aacgggaaatacatcccggtaattgaaagt

SEQ ID NO: 116161 - DNA, 30 bp, Artificial Sequence
  Synthetic oligonucleotide
atagcacctgagcttgctccgggataaagt

SEQ ID NO: 116162 - DNA, 30 bp, Artificial Sequence
  Synthetic oligonucleotide
gccataggtccagaagctacgaagtaaagt

SEQ ID NO: 116163 - DNA, 30 bp, Artificial Sequence
  Synthetic oligonucleotide
tgggtgatgcgatacagtgtaatttaaagt

SEQ ID NO: 116164 - DNA, 30 bp, Artificial Sequence
  Synthetic oligonucleotide
gggggcgtagagtggcaaattatcacaagt

SEQ ID NO: 116165 - DNA, 30 bp, Artificial Sequence
  Synthetic oligonucleotide
atagggtgggaagcgcaattaccgacaagt

SEQ ID NO: 116166 - DNA, 30 bp, Artificial Sequence
  Synthetic oligonucleotide
cggctaacacaaattggataaactacaagt

SEQ ID NO: 116167 - DNA, 30 bp, Artificial Sequence
  Synthetic oligonucleotide
tcaaaggtaccattcattcgttttccaagt

SEQ ID NO: 116168 - DNA, 30 bp, Artificial Sequence
  Synthetic oligonucleotide
aaactgaacaaatgtcacgggagagcaagt

SEQ ID NO: 116169 - DNA, 30 bp, Artificial Sequence
  Synthetic oligonucleotide
cttagggaaagcacagttctgagagcaagt

SEQ ID NO: 116170 - DNA, 30 bp, Artificial Sequence
  Synthetic oligonucleotide
ttctaaatggaggagttgaagttagcaagt

SEQ ID NO: 116171 - DNA, 30 bp, Artificial Sequence
  Synthetic oligonucleotide
agcccaaatttagatattcgcatcgcaagt

SEQ ID NO: 116172 - DNA, 30 bp, Artificial Sequence
  Synthetic oligonucleotide
gatcaaacgttatgcaagtaggaatcaagt

SEQ ID NO: 116173 - DNA, 30 bp, Artificial Sequence
  Synthetic oligonucleotide
ggaaagcatttttaagggtagaagtcaagt

SEQ ID NO: 116174 - DNA, 30 bp, Artificial Sequence
  Synthetic oligonucleotide
tctaatggggaaagctattcctaaagaagt

SEQ ID NO: 116175 - DNA, 30 bp, Artificial Sequence
  Synthetic oligonucleotide
agaagacgtctatctcacagatcaagaagt

SEQ ID NO: 116176 - DNA, 30 bp, Artificial Sequence
  Synthetic oligonucleotide
aacgatttagtactacaatcgggaagaagt

SEQ ID NO: 116177 - DNA, 30 bp, Artificial Sequence
  Synthetic oligonucleotide
aggtacgttacgaataggttcaagagaagt

SEQ ID NO: 116178 - DNA, 30 bp, Artificial Sequence
  Synthetic oligonucleotide
tgacactatgaaaggcggtgaccacgaagt

SEQ ID NO: 116179 - DNA, 30 bp, Artificial Sequence
  Synthetic oligonucleotide
gtgcctattacgatccatctgagccgaagt

SEQ ID NO: 116180 - DNA, 30 bp, Artificial Sequence
  Synthetic oligonucleotide
ggggggagttgacatatttgcgcgcgaagt

SEQ ID NO: 116181 - DNA, 30 bp, Artificial Sequence
  Synthetic oligonucleotide
agaatggagcggctgtacgtcgaaggaagt

SEQ ID NO: 116182 - DNA, 30 bp, Artificial Sequence
  Synthetic oligonucleotide
atataagatcctgggcgacggccgggaagt

SEQ ID NO: 116183 - DNA, 30 bp, Artificial Sequence
  Synthetic oligonucleotide
ggatgggtgaccgacgatactgattgaagt

SEQ ID NO: 116184 - DNA, 30 bp, Artificial Sequence
  Synthetic oligonucleotide
ttgtggtcccacgggtgagctcgttgaagt

SEQ ID NO: 116185 - DNA, 30 bp, Artificial Sequence
  Synthetic oligonucleotide
atgtggctgtgcaccggaaccgtaataagt

SEQ ID NO: 116186 - DNA, 30 bp, Artificial Sequence
  Synthetic oligonucleotide
gaggaagggtaacctagagcttcgataagt

SEQ ID NO: 116187 - DNA, 30 bp, Artificial Sequence
  Synthetic oligonucleotide
tagggggactcacttattggtcaactaagt

SEQ ID NO: 116188 - DNA, 30 bp, Artificial Sequence
  Synthetic oligonucleotide
tggggaggtaatgaccggcctccactaagt

SEQ ID NO: 116189 - DNA, 30 bp, Artificial Sequence
  Synthetic oligonucleotide
acccgcagttggagccgtccatcactaagt

SEQ ID NO: 116190 - DNA, 30 bp, Artificial Sequence
  Synthetic oligonucleotide
actagagagctagactgagccggactaagt

SEQ ID NO: 116191 - DNA, 30 bp, Artificial Sequence
  Synthetic oligonucleotide
gacataagcaagatgttgatgaccctaagt

SEQ ID NO: 116192 - DNA, 30 bp, Artificial Sequence
  Synthetic oligonucleotide
atgtgtcttgaaaacgatacacagctaagt

SEQ ID NO: 116193 - DNA, 30 bp, Artificial Sequence
  Synthetic oligonucleotide
tggtatattaagtatcacagagggctaagt

SEQ ID NO: 116194 - DNA, 30 bp, Artificial Sequence
  Synthetic oligonucleotide
ctagacatgagcggcctaggcggcgtaagt

SEQ ID NO: 116195 - DNA, 30 bp, Artificial Sequence
  Synthetic oligonucleotide
tccttcgaattaaggtgcactaaggtaagt

SEQ ID NO: 116196 - DNA, 30 bp, Artificial Sequence
  Synthetic oligonucleotide
aggggtcccgggctagcaaggtatgtaagt

SEQ ID NO: 116197 - DNA, 30 bp, Artificial Sequence
  Synthetic oligonucleotide
gaggtcgatctcgctcgccgaacgaacagt

SEQ ID NO: 116198 - DNA, 30 bp, Artificial Sequence
  Synthetic oligonucleotide
tactagggcatttgcgcatcctcgaacagt

SEQ ID NO: 116199 - DNA, 30 bp, Artificial Sequence
  Synthetic oligonucleotide
cactatgctgtcatattaattgtgaacagt

SEQ ID NO: 116200 - DNA, 30 bp, Artificial Sequence
  Synthetic oligonucleotide
tgaccatggatgcgacctactgaacacagt

SEQ ID NO: 116201 - DNA, 30 bp, Artificial Sequence
  Synthetic oligonucleotide
tgagaggtaaagtgccctaaatcacacagt

SEQ ID NO: 116202 - DNA, 30 bp, Artificial Sequence
  Synthetic oligonucleotide
tacagcgtgaatagtaggaggaagcacagt

SEQ ID NO: 116203 - DNA, 30 bp, Artificial Sequence
  Synthetic oligonucleotide
aagctcggcggaggccaacattagtacagt

SEQ ID NO: 116204 - DNA, 30 bp, Artificial Sequence
  Synthetic oligonucleotide
gggtcaagctacaccaatgccggcaccagt

SEQ ID NO: 116205 - DNA, 30 bp, Artificial Sequence
  Synthetic oligonucleotide
gcgatccagggcaccagcgttttcaccagt

SEQ ID NO: 116206 - DNA, 30 bp, Artificial Sequence
  Synthetic oligonucleotide
tggtgtagaacttagactgccgagaccagt

SEQ ID NO: 116207 - DNA, 30 bp, Artificial Sequence
  Synthetic oligonucleotide
ccggcgtaaggcaccttcgagtgtaccagt

SEQ ID NO: 116208 - DNA, 30 bp, Artificial Sequence
  Synthetic oligonucleotide
tcacaaccatatagcccactgcgccccagt

SEQ ID NO: 116209 - DNA, 30 bp, Artificial Sequence
  Synthetic oligonucleotide
ttattagggagggtccgtctacaagccagt

SEQ ID NO: 116210 - DNA, 30 bp, Artificial Sequence
  Synthetic oligonucleotide
ggacggtctttctgggagcgacccgccagt

SEQ ID NO: 116211 - DNA, 30 bp, Artificial Sequence
  Synthetic oligonucleotide
agctagggttcatgaccttaaggcgccagt

SEQ ID NO: 116212 - DNA, 30 bp, Artificial Sequence
  Synthetic oligonucleotide
cggtaaagttcttagacgatgttcgccagt

SEQ ID NO: 116213 - DNA, 30 bp, Artificial Sequence
  Synthetic oligonucleotide
gtaaaagtgtgaaagcatatagttgccagt

SEQ ID NO: 116214 - DNA, 30 bp, Artificial Sequence
  Synthetic oligonucleotide
tcacgaattgcattttaggagccaagcagt

SEQ ID NO: 116215 - DNA, 30 bp, Artificial Sequence
  Synthetic oligonucleotide
acacagtgaaacaggaacgcgacgagcagt

SEQ ID NO: 116216 - DNA, 31 bp, Artificial Sequence
  Synthetic oligonucleotide
ttagactgaatcggattatggccctagcagt

SEQ ID NO: 116217 - DNA, 30 bp, Artificial Sequence
  Synthetic oligonucleotide
cggatagagtttagcgagcgcacacgcagt

SEQ ID NO: 116218 - DNA, 30 bp, Artificial Sequence
  Synthetic oligonucleotide
acgcgcgaaacgatacagccacaatgcagt

SEQ ID NO: 116219 - DNA, 30 bp, Artificial Sequence
  Synthetic oligonucleotide
tagcggtaccgtcaatgggctcagtgcagt

SEQ ID NO: 116220 - DNA, 30 bp, Artificial Sequence
  Synthetic oligonucleotide
gtcaatgatgttaaaaaaaagcaaatcagt

SEQ ID NO: 116221 - DNA, 30 bp, Artificial Sequence
  Synthetic oligonucleotide
cctaagggatatcaggctctgtacatcagt

SEQ ID NO: 116222 - DNA, 30 bp, Artificial Sequence
  Synthetic oligonucleotide
atgcctgagcgtattagacacctcctcagt

SEQ ID NO: 116223 - DNA, 30 bp, Artificial Sequence
  Synthetic oligonucleotide
atcacgcatgccgacaatatccgtctcagt

SEQ ID NO: 116224 - DNA, 30 bp, Artificial Sequence
  Synthetic oligonucleotide
ccgttccgtagcttggtggacatcgtcagt

SEQ ID NO: 116225 - DNA, 30 bp, Artificial Sequence
  Synthetic oligonucleotide
gtgggagggtggcgggattgttctgtcagt

SEQ ID NO: 116226 - DNA, 30 bp, Artificial Sequence
  Synthetic oligonucleotide
caatagtgacgattgccgcaaggtgtcagt

SEQ ID NO: 116227 - DNA, 30 bp, Artificial Sequence
  Synthetic oligonucleotide
aggttgaacattatgtacagggttttcagt

SEQ ID NO: 116228 - DNA, 30 bp, Artificial Sequence
  Synthetic oligonucleotide
atcgatcagcagtttgctaggcacaagagt

SEQ ID NO: 116229 - DNA, 30 bp, Artificial Sequence
  Synthetic oligonucleotide
tatgtaggtttaaaacacgatgccaagagt

SEQ ID NO: 116230 - DNA, 30 bp, Artificial Sequence
  Synthetic oligonucleotide
ggggtagaagcataacgtgtcttcaagagt

SEQ ID NO: 116231 - DNA, 30 bp, Artificial Sequence
  Synthetic oligonucleotide
aattgcagtaggttacctaatttcaagagt

SEQ ID NO: 116232 - DNA, 30 bp, Artificial Sequence
  Synthetic oligonucleotide
gggatttggttacattgtggtgagaagagt

SEQ ID NO: 116233 - DNA, 30 bp, Artificial Sequence
  Synthetic oligonucleotide
ggcgggaccgcttacagggtcgtgaagagt

SEQ ID NO: 116234 - DNA, 30 bp, Artificial Sequence
  Synthetic oligonucleotide
gaatagaaagtatgtgagtggagacagagt

SEQ ID NO: 116235 - DNA, 30 bp, Artificial Sequence
  Synthetic oligonucleotide
tagaggacgtcctctatgaagcgacagagt

SEQ ID NO: 116236 - DNA, 30 bp, Artificial Sequence
  Synthetic oligonucleotide
aggggccagccttgcgggcctaagcagagt

SEQ ID NO: 116237 - DNA, 30 bp, Artificial Sequence
  Synthetic oligonucleotide
cggccgcgaacttgctgtacatatcagagt

SEQ ID NO: 116238 - DNA, 30 bp, Artificial Sequence
  Synthetic oligonucleotide
tggcaggcatagcgaagcacatctcagagt

SEQ ID NO: 116239 - DNA, 30 bp, Artificial Sequence
  Synthetic oligonucleotide
aaggatttatcgcgggtggcatttcagagt

SEQ ID NO: 116240 - DNA, 30 bp, Artificial Sequence
  Synthetic oligonucleotide
ccagggggctgtaagacgtgtttagagagt

SEQ ID NO: 116241 - DNA, 30 bp, Artificial Sequence
  Synthetic oligonucleotide
agagagtttatagcggggtaatccgagagt

SEQ ID NO: 116242 - DNA, 30 bp, Artificial Sequence
  Synthetic oligonucleotide
cacggggaaaggggctgtccggttgagagt

SEQ ID NO: 116243 - DNA, 30 bp, Artificial Sequence
  Synthetic oligonucleotide
tcaccctgcaatttgcaagacggatagagt

SEQ ID NO: 116244 - DNA, 30 bp, Artificial Sequence
  Synthetic oligonucleotide
ttaagattgagcgtcggaagaagttagagt

SEQ ID NO: 116245 - DNA, 31 bp, Artificial Sequence
  Synthetic oligonucleotide
gcctaccactttaggtacctacagcacgagt

SEQ ID NO: 116246 - DNA, 30 bp, Artificial Sequence
  Synthetic oligonucleotide
gggcgtatctagtaagttaccctgccgagt

SEQ ID NO: 116247 - DNA, 30 bp, Artificial Sequence
  Synthetic oligonucleotide
cgaagttaatacgtagtccaatctccgagt

SEQ ID NO: 116248 - DNA, 30 bp, Artificial Sequence
  Synthetic oligonucleotide
tttcgcagtaattaacagagcggtccgagt

SEQ ID NO: 116249 - DNA, 30 bp, Artificial Sequence
  Synthetic oligonucleotide
ggctgcttaaggcaaggaacgtcagcgagt

SEQ ID NO: 116250 - DNA, 30 bp, Artificial Sequence
  Synthetic oligonucleotide
aatatagccagagttccccaatcggcgagt

SEQ ID NO: 116251 - DNA, 30 bp, Artificial Sequence
  Synthetic oligonucleotide
aggcaggctgtctatagtaggcgggcgagt

SEQ ID NO: 116252 - DNA, 30 bp, Artificial Sequence
  Synthetic oligonucleotide
tgtaaatatattacgtacaagttcaggagt

SEQ ID NO: 116253 - DNA, 30 bp, Artificial Sequence
  Synthetic oligonucleotide
aaatgcgcgaagatgcaatcgcagaggagt

SEQ ID NO: 116254 - DNA, 30 bp, Artificial Sequence
  Synthetic oligonucleotide
ggcgcatggatgagacccgattgacggagt

SEQ ID NO: 116255 - DNA, 30 bp, Artificial Sequence
  Synthetic oligonucleotide
atgttgcccatgctaagatcggaagggagt

SEQ ID NO: 116256 - DNA, 30 bp, Artificial Sequence
  Synthetic oligonucleotide
acaccttgggctgtgtaaagatcagggagt

SEQ ID NO: 116257 - DNA, 30 bp, Artificial Sequence
  Synthetic oligonucleotide
ggccaccaaaggttggcatgatactggagt

SEQ ID NO: 116258 - DNA, 30 bp, Artificial Sequence
  Synthetic oligonucleotide
caaaagcaaaggaaactattcgtctggagt

SEQ ID NO: 116259 - DNA, 30 bp, Artificial Sequence
  Synthetic oligonucleotide
ggcctaggttagattgattacacgtggagt

SEQ ID NO: 116260 - DNA, 30 bp, Artificial Sequence
  Synthetic oligonucleotide
tcctgagtttcgagcctcgcaatgtggagt

SEQ ID NO: 116261 - DNA, 30 bp, Artificial Sequence
  Synthetic oligonucleotide
ttgatgactagattgtgaactcagatgagt

SEQ ID NO: 116262 - DNA, 30 bp, Artificial Sequence
  Synthetic oligonucleotide
ttgttattaagatatctgtcgtcgatgagt

SEQ ID NO: 116263 - DNA, 31 bp, Artificial Sequence
  Synthetic oligonucleotide
cttatactagggatacccaccaggtatgagt

SEQ ID NO: 116264 - DNA, 30 bp, Artificial Sequence
  Synthetic oligonucleotide
caacagcccagaactgctatacgtctgagt

SEQ ID NO: 116265 - DNA, 30 bp, Artificial Sequence
  Synthetic oligonucleotide
cgcactggacagagcgtatgaacagtgagt

SEQ ID NO: 116266 - DNA, 30 bp, Artificial Sequence
  Synthetic oligonucleotide
cttatcattgtaattccatcatgagtgagt

SEQ ID NO: 116267 - DNA, 30 bp, Artificial Sequence
  Synthetic oligonucleotide
tgagtagcaccgggttcaggacacgtgagt

SEQ ID NO: 116268 - DNA, 30 bp, Artificial Sequence
  Synthetic oligonucleotide
cctatggcgtttttgtaaagcaaggtgagt

SEQ ID NO: 116269 - DNA, 30 bp, Artificial Sequence
  Synthetic oligonucleotide
aatcgcgcataaaaagctgctcaggtgagt

SEQ ID NO: 116270 - DNA, 30 bp, Artificial Sequence
  Synthetic oligonucleotide
ctaaggagattccctgtatcaccggtgagt

SEQ ID NO: 116271 - DNA, 30 bp, Artificial Sequence
  Synthetic oligonucleotide
tagcaggagccagtctggctctagttgagt

SEQ ID NO: 116272 - DNA, 30 bp, Artificial Sequence
  Synthetic oligonucleotide
ggacatggtatcgcaactataaatttgagt

SEQ ID NO: 116273 - DNA, 30 bp, Artificial Sequence
  Synthetic oligonucleotide
aggaatgcagaaagcagtttgaatttgagt

SEQ ID NO: 116274 - DNA, 30 bp, Artificial Sequence
  Synthetic oligonucleotide
caaggcacagtaagagcagccaacaatagt

SEQ ID NO: 116275 - DNA, 30 bp, Artificial Sequence
  Synthetic oligonucleotide
tcgagacatgagtttgggctctagaatagt

SEQ ID NO: 116276 - DNA, 30 bp, Artificial Sequence
  Synthetic oligonucleotide
gaagggaatgcggtgtttgcttggcatagt

SEQ ID NO: 116277 - DNA, 30 bp, Artificial Sequence
  Synthetic oligonucleotide
ggagacgtacctacgccgagttaagatagt

SEQ ID NO: 116278 - DNA, 30 bp, Artificial Sequence
  Synthetic oligonucleotide
caattgcagacctgtgaagtcggggatagt

SEQ ID NO: 116279 - DNA, 30 bp, Artificial Sequence
  Synthetic oligonucleotide
gcggaaggcgaacactcgtcgcctgatagt

SEQ ID NO: 116280 - DNA, 30 bp, Artificial Sequence
  Synthetic oligonucleotide
agtcaatcataagtaataactatctatagt

SEQ ID NO: 116281 - DNA, 30 bp, Artificial Sequence
  Synthetic oligonucleotide
catactatctcagaagcgaggaggtatagt

SEQ ID NO: 116282 - DNA, 30 bp, Artificial Sequence
  Synthetic oligonucleotide
taggatcagggggcatggcggcgcactagt

SEQ ID NO: 116283 - DNA, 30 bp, Artificial Sequence
  Synthetic oligonucleotide
agggctagtctaatatgtgcatgtcctagt

SEQ ID NO: 116284 - DNA, 30 bp, Artificial Sequence
  Synthetic oligonucleotide
ttgttgcgtctaggattcaggtgcgctagt

SEQ ID NO: 116285 - DNA, 30 bp, Artificial Sequence
  Synthetic oligonucleotide
aagcgacgttgatgaacaggcacatctagt

SEQ ID NO: 116286 - DNA, 30 bp, Artificial Sequence
  Synthetic oligonucleotide
gactcgatggccgcttaccaaaggagtagt

SEQ ID NO: 116287 - DNA, 30 bp, Artificial Sequence
  Synthetic oligonucleotide
cataaggtaagttaaattagttggagtagt

SEQ ID NO: 116288 - DNA, 30 bp, Artificial Sequence
  Synthetic oligonucleotide
acttcacaagagaacctcctgtcccgtagt

SEQ ID NO: 116289 - DNA, 30 bp, Artificial Sequence
  Synthetic oligonucleotide
ttatcaggcgacagtagcgaggcgcgtagt

SEQ ID NO: 116290 - DNA, 30 bp, Artificial Sequence
  Synthetic oligonucleotide
aggcatgggtagtcagagagcctgcgtagt

SEQ ID NO: 116291 - DNA, 30 bp, Artificial Sequence
  Synthetic oligonucleotide
tgggcagtttagggcagtctcgtcggtagt

SEQ ID NO: 116292 - DNA, 30 bp, Artificial Sequence
  Synthetic oligonucleotide
tctgtacgagcgagcagatagccgtgtagt

SEQ ID NO: 116293 - DNA, 30 bp, Artificial Sequence
  Synthetic oligonucleotide
taacttgatgtgaagaagggactgtgtagt

SEQ ID NO: 116294 - DNA, 30 bp, Artificial Sequence
  Synthetic oligonucleotide
ctacgcgtagtaaaaccctaatagattagt

SEQ ID NO: 116295 - DNA, 30 bp, Artificial Sequence
  Synthetic oligonucleotide
ggccggatttgaggatatagatggattagt

SEQ ID NO: 116296 - DNA, 30 bp, Artificial Sequence
  Synthetic oligonucleotide
gtatcgggcagagtggaacggtatattagt

SEQ ID NO: 116297 - DNA, 30 bp, Artificial Sequence
  Synthetic oligonucleotide
atcaagaatcatgtataacgctaggttagt

SEQ ID NO: 116298 - DNA, 30 bp, Artificial Sequence
  Synthetic oligonucleotide
cgtcaatgtcgagcgaggtagacggttagt

SEQ ID NO: 116299 - DNA, 30 bp, Artificial Sequence
  Synthetic oligonucleotide
gcttaccagtaatgtttaagagtaaaacgt

SEQ ID NO: 116300 - DNA, 30 bp, Artificial Sequence
  Synthetic oligonucleotide
cgctcaggtcgtccgatccttgtaaaacgt

SEQ ID NO: 116301 - DNA, 30 bp, Artificial Sequence
  Synthetic oligonucleotide
ctagaatggctggatggctctactcaacgt

SEQ ID NO: 116302 - DNA, 30 bp, Artificial Sequence
  Synthetic oligonucleotide
taagcggagtaagggagcgtgcccgaacgt

SEQ ID NO: 116303 - DNA, 30 bp, Artificial Sequence
  Synthetic oligonucleotide
gcactatagatcctagtgacgtactaacgt

SEQ ID NO: 116304 - DNA, 30 bp, Artificial Sequence
  Synthetic oligonucleotide
ttagaaaaaaatgtcgacagtaccccacgt

SEQ ID NO: 116305 - DNA, 30 bp, Artificial Sequence
  Synthetic oligonucleotide
tcgccaagtaagacattgaagccggcacgt

SEQ ID NO: 116306 - DNA, 30 bp, Artificial Sequence
  Synthetic oligonucleotide
ggcacaggagactagcatattatgtcacgt

SEQ ID NO: 116307 - DNA, 30 bp, Artificial Sequence
  Synthetic oligonucleotide
agcaaaacattccgaaccaggatttcacgt

SEQ ID NO: 116308 - DNA, 30 bp, Artificial Sequence
  Synthetic oligonucleotide
ccgagactggcccgcgcctagtagagacgt

SEQ ID NO: 116309 - DNA, 30 bp, Artificial Sequence
  Synthetic oligonucleotide
actgaagtctcactctggctcgaacgacgt

SEQ ID NO: 116310 - DNA, 30 bp, Artificial Sequence
  Synthetic oligonucleotide
tgaagcaccaaggctagatcgaaccgacgt

SEQ ID NO: 116311 - DNA, 30 bp, Artificial Sequence
  Synthetic oligonucleotide
ggtagtgaaaactagacatgatagcgacgt

SEQ ID NO: 116312 - DNA, 30 bp, Artificial Sequence
  Synthetic oligonucleotide
gtgcaaggagattctgtaaactagcgacgt

SEQ ID NO: 116313 - DNA, 30 bp, Artificial Sequence
  Synthetic oligonucleotide
gacttagagtagggcatatgggatcgacgt

SEQ ID NO: 116314 - DNA, 30 bp, Artificial Sequence
  Synthetic oligonucleotide
tgaggcgggggtgccagtcgcggctgacgt

SEQ ID NO: 116315 - DNA, 30 bp, Artificial Sequence
  Synthetic oligonucleotide
gggagttgcgcgatctcaggctgcatacgt

SEQ ID NO: 116316 - DNA, 29 bp, Artificial Sequence
  Synthetic oligonucleotide
ggtagtaagctgttaatcatgagatacgt

SEQ ID NO: 116317 - DNA, 30 bp, Artificial Sequence
  Synthetic oligonucleotide
cacgtatcggagaagttagcggttctacgt

SEQ ID NO: 116318 - DNA, 30 bp, Artificial Sequence
  Synthetic oligonucleotide
gtgcagatgctcaaagaaagccctttacgt

SEQ ID NO: 116319 - DNA, 30 bp, Artificial Sequence
  Synthetic oligonucleotide
ccaaatccgataaaactcagtcgccaccgt

SEQ ID NO: 116320 - DNA, 30 bp, Artificial Sequence
  Synthetic oligonucleotide
tgtgggtgaggataggacattcatcaccgt

SEQ ID NO: 116321 - DNA, 30 bp, Artificial Sequence
  Synthetic oligonucleotide
tcacacttgccgtggttcgactgtgaccgt

SEQ ID NO: 116322 - DNA, 30 bp, Artificial Sequence
  Synthetic oligonucleotide
gcaaagcatccagacttgtcaaggacccgt

SEQ ID NO: 116323 - DNA, 30 bp, Artificial Sequence
  Synthetic oligonucleotide
agcgggtgcggagtcactacctacccccgt

SEQ ID NO: 116324 - DNA, 30 bp, Artificial Sequence
  Synthetic oligonucleotide
aggacgccttgttttaagagggatccccgt

SEQ ID NO: 116325 - DNA, 30 bp, Artificial Sequence
  Synthetic oligonucleotide
agttgtcaaagctcgaaggtacacgcccgt

SEQ ID NO: 116326 - DNA, 30 bp, Artificial Sequence
  Synthetic oligonucleotide
ccattacccgacacaatttcataaagccgt

SEQ ID NO: 116327 - DNA, 30 bp, Artificial Sequence
  Synthetic oligonucleotide
cacaacgtgattccattcgagtcaagccgt

SEQ ID NO: 116328 - DNA, 30 bp, Artificial Sequence
  Synthetic oligonucleotide
aggggatatcggttcctcggtctgtgccgt

SEQ ID NO: 116329 - DNA, 30 bp, Artificial Sequence
  Synthetic oligonucleotide
agtggcgacaagagtatagagttaatccgt

SEQ ID NO: 116330 - DNA, 30 bp, Artificial Sequence
  Synthetic oligonucleotide
catatcaatagccgaaggccacaagtccgt

SEQ ID NO: 116331 - DNA, 30 bp, Artificial Sequence
  Synthetic oligonucleotide
accggattgcgtgccacgaggggagtccgt

SEQ ID NO: 116332 - DNA, 30 bp, Artificial Sequence
  Synthetic oligonucleotide
taggggggacaacagtaagatgtcgtccgt

SEQ ID NO: 116333 - DNA, 30 bp, Artificial Sequence
  Synthetic oligonucleotide
tatgactgcgaattgaaaaggtatttccgt

SEQ ID NO: 116334 - DNA, 30 bp, Artificial Sequence
  Synthetic oligonucleotide
ccaagggatagatggatacggcgtttccgt

SEQ ID NO: 116335 - DNA, 30 bp, Artificial Sequence
  Synthetic oligonucleotide
tcggtcggcttgctttagtaggtccagcgt

SEQ ID NO: 116336 - DNA, 30 bp, Artificial Sequence
  Synthetic oligonucleotide
ttcccttgaaaaggagcggtccgagagcgt

SEQ ID NO: 116337 - DNA, 30 bp, Artificial Sequence
  Synthetic oligonucleotide
gctgcttcggctctcgatgggcaggagcgt

SEQ ID NO: 116338 - DNA, 30 bp, Artificial Sequence
  Synthetic oligonucleotide
acttataagaattggcaacaaagatagcgt

SEQ ID NO: 116339 - DNA, 30 bp, Artificial Sequence
  Synthetic oligonucleotide
aatatcgtgatgttggacggaaactagcgt

SEQ ID NO: 116340 - DNA, 30 bp, Artificial Sequence
  Synthetic oligonucleotide
gcggactcgtcggatcggactccgtagcgt

SEQ ID NO: 116341 - DNA, 30 bp, Artificial Sequence
  Synthetic oligonucleotide
aataaaggaaccttagagaacgaagcgcgt

SEQ ID NO: 116342 - DNA, 30 bp, Artificial Sequence
  Synthetic oligonucleotide
ggactgccctcgaacgatacaggcgcgcgt

SEQ ID NO: 116343 - DNA, 30 bp, Artificial Sequence
  Synthetic oligonucleotide
ctctgcacgtgggaatcgtacagctcgcgt

SEQ ID NO: 116344 - DNA, 30 bp, Artificial Sequence
  Synthetic oligonucleotide
tacgttgggaagggacagacatgtcggcgt

SEQ ID NO: 116345 - DNA, 30 bp, Artificial Sequence
  Synthetic oligonucleotide
gctcatgcggactaaatataaaacgggcgt

SEQ ID NO: 116346 - DNA, 31 bp, Artificial Sequence
  Synthetic oligonucleotide
acatcgtctcggctctgacacggaatggcgt

SEQ ID NO: 116347 - DNA, 30 bp, Artificial Sequence
  Synthetic oligonucleotide
gctacaaagaacaatatcgataactggcgt

SEQ ID NO: 116348 - DNA, 30 bp, Artificial Sequence
  Synthetic oligonucleotide
attgggcagaagactctctgagcctggcgt

SEQ ID NO: 116349 - DNA, 30 bp, Artificial Sequence
  Synthetic oligonucleotide
gggccgaggatagctgcaattaggtggcgt

SEQ ID NO: 116350 - DNA, 30 bp, Artificial Sequence
  Synthetic oligonucleotide
acagagaggagcggtagggtcctgtggcgt

SEQ ID NO: 116351 - DNA, 30 bp, Artificial Sequence
  Synthetic oligonucleotide
gtccgcactaccggaaggaactattggcgt

SEQ ID NO: 116352 - DNA, 30 bp, Artificial Sequence
  Synthetic oligonucleotide
tcgagtaattataactggtcaaatatgcgt

SEQ ID NO: 116353 - DNA, 30 bp, Artificial Sequence
  Synthetic oligonucleotide
catgcattctagaagtggcatgttatgcgt

SEQ ID NO: 116354 - DNA, 30 bp, Artificial Sequence
  Synthetic oligonucleotide
tcgtgctcgggagggactatacccctgcgt

SEQ ID NO: 116355 - DNA, 30 bp, Artificial Sequence
  Synthetic oligonucleotide
gaggaacagaggatccccaacgagctgcgt

SEQ ID NO: 116356 - DNA, 30 bp, Artificial Sequence
  Synthetic oligonucleotide
tatcggcaacatttcggtagggagctgcgt

SEQ ID NO: 116357 - DNA, 30 bp, Artificial Sequence
  Synthetic oligonucleotide
caatgcatgacggaattaactgtggtgcgt

SEQ ID NO: 116358 - DNA, 30 bp, Artificial Sequence
  Synthetic oligonucleotide
acctagcgtaaggttaaccagattttgcgt

SEQ ID NO: 116359 - DNA, 30 bp, Artificial Sequence
  Synthetic oligonucleotide
gtgcgagtagggggcgttatagataatcgt

SEQ ID NO: 116360 - DNA, 30 bp, Artificial Sequence
  Synthetic oligonucleotide
gatcgtccgggataccaacatgtacatcgt

SEQ ID NO: 116361 - DNA, 30 bp, Artificial Sequence
  Synthetic oligonucleotide
gcatgtgacatagagagtctcggtcatcgt

SEQ ID NO: 116362 - DNA, 30 bp, Artificial Sequence
  Synthetic oligonucleotide
tctaatatatgagcaccagattgcgatcgt

SEQ ID NO: 116363 - DNA, 30 bp, Artificial Sequence
  Synthetic oligonucleotide
ttgggctgttcggatttccttcgtgatcgt

SEQ ID NO: 116364 - DNA, 30 bp, Artificial Sequence
  Synthetic oligonucleotide
attggcaccattatgggtcggggaactcgt

SEQ ID NO: 116365 - DNA, 30 bp, Artificial Sequence
  Synthetic oligonucleotide
cgtggcgcgtgcgcagactcgtgaactcgt

SEQ ID NO: 116366 - DNA, 30 bp, Artificial Sequence
  Synthetic oligonucleotide
cgaatatgtacaatatcaagtcgcgctcgt

SEQ ID NO: 116367 - DNA, 30 bp, Artificial Sequence
  Synthetic oligonucleotide
agctcaacgcgcgcccttcacatatctcgt

SEQ ID NO: 116368 - DNA, 31 bp, Artificial Sequence
  Synthetic oligonucleotide
taaacaccgcgcgcctggaacatggtctcgt

SEQ ID NO: 116369 - DNA, 30 bp, Artificial Sequence
  Synthetic oligonucleotide
ccctaaagggtccgaaagagaaacagtcgt

SEQ ID NO: 116370 - DNA, 30 bp, Artificial Sequence
  Synthetic oligonucleotide
aacaccgaatgctcgaaagggctcagtcgt

SEQ ID NO: 116371 - DNA, 30 bp, Artificial Sequence
  Synthetic oligonucleotide
ccattgcttgcggcctcaagtacgagtcgt

SEQ ID NO: 116372 - DNA, 30 bp, Artificial Sequence
  Synthetic oligonucleotide
cattacaattacacgtcaggtaggagtcgt

SEQ ID NO: 116373 - DNA, 30 bp, Artificial Sequence
  Synthetic oligonucleotide
atggtaggccgataagatgttcggagtcgt

SEQ ID NO: 116374 - DNA, 30 bp, Artificial Sequence
  Synthetic oligonucleotide
aacgagctaagtcgggaagtcctctgtcgt

SEQ ID NO: 116375 - DNA, 30 bp, Artificial Sequence
  Synthetic oligonucleotide
cagcgggcgaaacgcgatgcgacttgtcgt

SEQ ID NO: 116376 - DNA, 30 bp, Artificial Sequence
  Synthetic oligonucleotide
gcggacctactatcgtatggtaaagttcgt

SEQ ID NO: 116377 - DNA, 30 bp, Artificial Sequence
  Synthetic oligonucleotide
cgataagctctgccggggaatccggttcgt

SEQ ID NO: 116378 - DNA, 30 bp, Artificial Sequence
  Synthetic oligonucleotide
atatggaatagcgttcagacctatgttcgt

SEQ ID NO: 116379 - DNA, 30 bp, Artificial Sequence
  Synthetic oligonucleotide
atgaggctgcggaacatggtgtaatttcgt

SEQ ID NO: 116380 - DNA, 30 bp, Artificial Sequence
  Synthetic oligonucleotide
agcccgcgtaaactcaggcacaggtttcgt

SEQ ID NO: 116381 - DNA, 30 bp, Artificial Sequence
  Synthetic oligonucleotide
taaagcatttactacggcgaccccaaaggt

SEQ ID NO: 116382 - DNA, 30 bp, Artificial Sequence
  Synthetic oligonucleotide
ggtaagagtaccaaacagtgagccaaaggt

SEQ ID NO: 116383 - DNA, 30 bp, Artificial Sequence
  Synthetic oligonucleotide
acagtccatgtgtgcatagaggtgaaaggt

SEQ ID NO: 116384 - DNA, 30 bp, Artificial Sequence
  Synthetic oligonucleotide
tgctccacaagctgaaccacacgtaaaggt

SEQ ID NO: 116385 - DNA, 30 bp, Artificial Sequence
  Synthetic oligonucleotide
aatgctaaagaaaagcgatagacggaaggt

SEQ ID NO: 116386 - DNA, 30 bp, Artificial Sequence
  Synthetic oligonucleotide
agctaagacccactacacgaaggataaggt

SEQ ID NO: 116387 - DNA, 30 bp, Artificial Sequence
  Synthetic oligonucleotide
agcttgtgctccacgagcttaaaaacaggt

SEQ ID NO: 116388 - DNA, 30 bp, Artificial Sequence
  Synthetic oligonucleotide
gggggtccacccaagtacttagtaccaggt

SEQ ID NO: 116389 - DNA, 30 bp, Artificial Sequence
  Synthetic oligonucleotide
accagcgtgagtagtagtgaagcggcaggt

SEQ ID NO: 116390 - DNA, 30 bp, Artificial Sequence
  Synthetic oligonucleotide
ggcatatgccaaaagtccgagaggtcaggt

SEQ ID NO: 116391 - DNA, 30 bp, Artificial Sequence
  Synthetic oligonucleotide
ctacagtggtgcgcttcggatagttcaggt

SEQ ID NO: 116392 - DNA, 30 bp, Artificial Sequence
  Synthetic oligonucleotide
gtagaggtattcctacgagtgacaagaggt

SEQ ID NO: 116393 - DNA, 30 bp, Artificial Sequence
  Synthetic oligonucleotide
ggggtcggtctttgcttagaactccgaggt

SEQ ID NO: 116394 - DNA, 30 bp, Artificial Sequence
  Synthetic oligonucleotide
cgttggcattgataaccgcagtaaggaggt

SEQ ID NO: 116395 - DNA, 30 bp, Artificial Sequence
  Synthetic oligonucleotide
ttcaaggtggtttaaggccgaaaatgaggt

SEQ ID NO: 116396 - DNA, 30 bp, Artificial Sequence
  Synthetic oligonucleotide
tcggatgaagagcgtcggggctcatgaggt

SEQ ID NO: 116397 - DNA, 30 bp, Artificial Sequence
  Synthetic oligonucleotide
aacgccatcgcgccatcagatgtctgaggt

SEQ ID NO: 116398 - DNA, 30 bp, Artificial Sequence
  Synthetic oligonucleotide
cagagcaacggaacagaaggtaggtgaggt

SEQ ID NO: 116399 - DNA, 30 bp, Artificial Sequence
  Synthetic oligonucleotide
caactcttcaaggaacaaactaaactaggt

SEQ ID NO: 116400 - DNA, 30 bp, Artificial Sequence
  Synthetic oligonucleotide
gggagtagtgtacttaaagaatccgtaggt

SEQ ID NO: 116401 - DNA, 30 bp, Artificial Sequence
  Synthetic oligonucleotide
gattaagcgtagaactatgttacattaggt

SEQ ID NO: 116402 - DNA, 30 bp, Artificial Sequence
  Synthetic oligonucleotide
ccaaagggccatgcttacggaagattaggt

SEQ ID NO: 116403 - DNA, 30 bp, Artificial Sequence
  Synthetic oligonucleotide
ttcccggcgacatatatatgcaccttaggt

SEQ ID NO: 116404 - DNA, 30 bp, Artificial Sequence
  Synthetic oligonucleotide
ggttgaaaaaatgtaatcggacggttaggt

SEQ ID NO: 116405 - DNA, 30 bp, Artificial Sequence
  Synthetic oligonucleotide
tcggatactcatcacaaaggcactttaggt

SEQ ID NO: 116406 - DNA, 30 bp, Artificial Sequence
  Synthetic oligonucleotide
accgcgtctgtaggttaaaatgctttaggt

SEQ ID NO: 116407 - DNA, 29 bp, Artificial Sequence
  Synthetic oligonucleotide
ggtataaggagagcaagaaggaaaacggt

SEQ ID NO: 116408 - DNA, 30 bp, Artificial Sequence
  Synthetic oligonucleotide
actcgaaggttgaaccccaaaacaaacggt

SEQ ID NO: 116409 - DNA, 30 bp, Artificial Sequence
  Synthetic oligonucleotide
gatcaaatatgggatacacgagacaacggt

SEQ ID NO: 116410 - DNA, 30 bp, Artificial Sequence
  Synthetic oligonucleotide
agtgcgtgtgcacgagcggtaatgaacggt

SEQ ID NO: 116411 - DNA, 30 bp, Artificial Sequence
  Synthetic oligonucleotide
accggctatgatcataagggaaataacggt

SEQ ID NO: 116412 - DNA, 30 bp, Artificial Sequence
  Synthetic oligonucleotide
cgatgcctatgctaactcatacagcacggt

SEQ ID NO: 116413 - DNA, 29 bp, Artificial Sequence
  Synthetic oligonucleotide
tgtagagtggtgtagagggccatcacggt

SEQ ID NO: 116414 - DNA, 30 bp, Artificial Sequence
  Synthetic oligonucleotide
aggaacaacgtgtggggctaatgtgacggt

SEQ ID NO: 116415 - DNA, 30 bp, Artificial Sequence
  Synthetic oligonucleotide
agtaaaacaagtcgtgcatcctcctacggt

SEQ ID NO: 116416 - DNA, 30 bp, Artificial Sequence
  Synthetic oligonucleotide
ccgggtacctatgacatcgtaagctacggt

SEQ ID NO: 116417 - DNA, 30 bp, Artificial Sequence
  Synthetic oligonucleotide
ccagttgtatggaatcaagtcgggtacggt

SEQ ID NO: 116418 - DNA, 30 bp, Artificial Sequence
  Synthetic oligonucleotide
aatgcccataacttccccggcggaaccggt

SEQ ID NO: 116419 - DNA, 30 bp, Artificial Sequence
  Synthetic oligonucleotide
gccaggggagaggaccagtcgtaccccggt

SEQ ID NO: 116420 - DNA, 30 bp, Artificial Sequence
  Synthetic oligonucleotide
cgaccgtaggtctcgcgaaagttttccggt

SEQ ID NO: 116421 - DNA, 30 bp, Artificial Sequence
  Synthetic oligonucleotide
cgacgggcaatgtaaatccagatgagcggt

SEQ ID NO: 116422 - DNA, 30 bp, Artificial Sequence
  Synthetic oligonucleotide
tttacatggtagcccacaacagatggcggt

SEQ ID NO: 116423 - DNA, 30 bp, Artificial Sequence
  Synthetic oligonucleotide
gaaacgggctgggcacacatatactgcggt

SEQ ID NO: 116424 - DNA, 30 bp, Artificial Sequence
  Synthetic oligonucleotide
gcatagttcttcacggtcgagaattgcggt

SEQ ID NO: 116425 - DNA, 30 bp, Artificial Sequence
  Synthetic oligonucleotide
ccatgttagcattaatcctacgtaatcggt

SEQ ID NO: 116426 - DNA, 30 bp, Artificial Sequence
  Synthetic oligonucleotide
tctgggagagaagtccaacaatgactcggt

SEQ ID NO: 116427 - DNA, 30 bp, Artificial Sequence
  Synthetic oligonucleotide
acccgtaggtggcgacttattatgctcggt

SEQ ID NO: 116428 - DNA, 30 bp, Artificial Sequence
  Synthetic oligonucleotide
ccaacatgcctaatacgtgtggatctcggt

SEQ ID NO: 116429 - DNA, 30 bp, Artificial Sequence
  Synthetic oligonucleotide
gataacgaatgaacgagcgtaaaagtcggt

SEQ ID NO: 116430 - DNA, 30 bp, Artificial Sequence
  Synthetic oligonucleotide
aatgtacaagtaacagattaaggggtcggt

SEQ ID NO: 116431 - DNA, 30 bp, Artificial Sequence
  Synthetic oligonucleotide
gggttagggatgtgaatatctgatgtcggt

SEQ ID NO: 116432 - DNA, 30 bp, Artificial Sequence
  Synthetic oligonucleotide
ggatcagaggtaaaataaggtcttgtcggt

SEQ ID NO: 116433 - DNA, 30 bp, Artificial Sequence
  Synthetic oligonucleotide
tcacggcagaccgctaccttacccttcggt

SEQ ID NO: 116434 - DNA, 30 bp, Artificial Sequence
  Synthetic oligonucleotide
ttcatgacacatcggtgggaaagtttcggt

SEQ ID NO: 116435 - DNA, 30 bp, Artificial Sequence
  Synthetic oligonucleotide
atcgaagcacaagggcagcaatgtttcggt

SEQ ID NO: 116436 - DNA, 30 bp, Artificial Sequence
  Synthetic oligonucleotide
caatcccagggcgggtgggaaaagaagggt

SEQ ID NO: 116437 - DNA, 30 bp, Artificial Sequence
  Synthetic oligonucleotide
cactggtacatcaagagcgagcctaagggt

SEQ ID NO: 116438 - DNA, 30 bp, Artificial Sequence
  Synthetic oligonucleotide
tcgtagaactgcccatcgacctcctagggt

SEQ ID NO: 116439 - DNA, 30 bp, Artificial Sequence
  Synthetic oligonucleotide
atgaactcacctactggttcgagctagggt

SEQ ID NO: 116440 - DNA, 30 bp, Artificial Sequence
  Synthetic oligonucleotide
aatgacgatgcctcggattgctggtagggt

SEQ ID NO: 116441 - DNA, 30 bp, Artificial Sequence
  Synthetic oligonucleotide
tcgattgctcgatcatctaggtatacgggt

SEQ ID NO: 116442 - DNA, 30 bp, Artificial Sequence
  Synthetic oligonucleotide
tggacggtgaatccaatagggtttacgggt

SEQ ID NO: 116443 - DNA, 30 bp, Artificial Sequence
  Synthetic oligonucleotide
agcaatcgtttggtcgtgaaatggccgggt

SEQ ID NO: 116444 - DNA, 30 bp, Artificial Sequence
  Synthetic oligonucleotide
agcctatcataacaagtatcggaagcgggt

SEQ ID NO: 116445 - DNA, 30 bp, Artificial Sequence
  Synthetic oligonucleotide
acgaactggattatggcgaaagtatcgggt

SEQ ID NO: 116446 - DNA, 30 bp, Artificial Sequence
  Synthetic oligonucleotide
aatcaagtgaataatcgagccgtatcgggt

SEQ ID NO: 116447 - DNA, 30 bp, Artificial Sequence
  Synthetic oligonucleotide
gggcaattcggaggttagctgtctaggggt

SEQ ID NO: 116448 - DNA, 30 bp, Artificial Sequence
  Synthetic oligonucleotide
ggtaaaaatcgggtaatcgtcaaagggggt

SEQ ID NO: 116449 - DNA, 30 bp, Artificial Sequence
  Synthetic oligonucleotide
gtgcctctgcgaaaggggtgttcggggggt

SEQ ID NO: 116450 - DNA, 30 bp, Artificial Sequence
  Synthetic oligonucleotide
atccaaacatctgtgcgtcgaatggggggt

SEQ ID NO: 116451 - DNA, 30 bp, Artificial Sequence
  Synthetic oligonucleotide
gtcacgtctggaaccagtacgcaatggggt

SEQ ID NO: 116452 - DNA, 30 bp, Artificial Sequence
  Synthetic oligonucleotide
gcgttcggtgccgtcaatgaatatatgggt

SEQ ID NO: 116453 - DNA, 30 bp, Artificial Sequence
  Synthetic oligonucleotide
gcctcactacggtgacgatatcaactgggt

SEQ ID NO: 116454 - DNA, 30 bp, Artificial Sequence
  Synthetic oligonucleotide
ccgtattaaatatcaatctgccatctgggt

SEQ ID NO: 116455 - DNA, 30 bp, Artificial Sequence
  Synthetic oligonucleotide
agttggcaagcaagaggagagagagtgggt

SEQ ID NO: 116456 - DNA, 30 bp, Artificial Sequence
  Synthetic oligonucleotide
cagacagtcggggagctacaacgcttgggt

SEQ ID NO: 116457 - DNA, 30 bp, Artificial Sequence
  Synthetic oligonucleotide
ggtagcaatgatcagtcgaggccgttgggt

SEQ ID NO: 116458 - DNA, 30 bp, Artificial Sequence
  Synthetic oligonucleotide
aacgcacttgtcgttcgatatcaaaatggt

SEQ ID NO: 116459 - DNA, 30 bp, Artificial Sequence
  Synthetic oligonucleotide
acatcctagcatggatcagtaagaaatggt

SEQ ID NO: 116460 - DNA, 30 bp, Artificial Sequence
  Synthetic oligonucleotide
cgtgactttatgcgcactgaggcgaatggt

SEQ ID NO: 116461 - DNA, 30 bp, Artificial Sequence
  Synthetic oligonucleotide
gctaggaagtccataccccggtagcatggt

SEQ ID NO: 116462 - DNA, 30 bp, Artificial Sequence
  Synthetic oligonucleotide
tcaacagggacgagcggggtgaattatggt

SEQ ID NO: 116463 - DNA, 30 bp, Artificial Sequence
  Synthetic oligonucleotide
gcgtgcgagccgacgaagggtacttatggt

SEQ ID NO: 116464 - DNA, 30 bp, Artificial Sequence
  Synthetic oligonucleotide
tcgcgaagccactgcgagagtcgttatggt

SEQ ID NO: 116465 - DNA, 30 bp, Artificial Sequence
  Synthetic oligonucleotide
cacggcccgttacaggactaagatcctggt

SEQ ID NO: 116466 - DNA, 30 bp, Artificial Sequence
  Synthetic oligonucleotide
cccaagtaacggagttttgtgttcgctggt

SEQ ID NO: 116467 - DNA, 30 bp, Artificial Sequence
  Synthetic oligonucleotide
gcttgaatactccatgtccacagtgctggt

SEQ ID NO: 116468 - DNA, 30 bp, Artificial Sequence
  Synthetic oligonucleotide
ttaagccgtagtcgctcaaggattgctggt

SEQ ID NO: 116469 - DNA, 30 bp, Artificial Sequence
  Synthetic oligonucleotide
tgtcggggctgagtaagagagatctctggt

SEQ ID NO: 116470 - DNA, 30 bp, Artificial Sequence
  Synthetic oligonucleotide
tcgagggtatcgggcctgccgaagtctggt

SEQ ID NO: 116471 - DNA, 30 bp, Artificial Sequence
  Synthetic oligonucleotide
aaagggtatacataaatgggtgtgtctggt

SEQ ID NO: 116472 - DNA, 30 bp, Artificial Sequence
  Synthetic oligonucleotide
ggagaagtatgctgcctcattgtgtctggt

SEQ ID NO: 116473 - DNA, 30 bp, Artificial Sequence
  Synthetic oligonucleotide
gcgtgtacgaaaaacccgacacaaagtggt

SEQ ID NO: 116474 - DNA, 29 bp, Artificial Sequence
  Synthetic oligonucleotide
gcgggtccgtatgcaaagcaacaagtggt

SEQ ID NO: 116475 - DNA, 30 bp, Artificial Sequence
  Synthetic oligonucleotide
gagaggtgttccaactggttcccgagtggt

SEQ ID NO: 116476 - DNA, 30 bp, Artificial Sequence
  Synthetic oligonucleotide
cgagtcctggccctagcagggttgcgtggt

SEQ ID NO: 116477 - DNA, 30 bp, Artificial Sequence
  Synthetic oligonucleotide
tgatggtgctcgtactaagaaattggtggt

SEQ ID NO: 116478 - DNA, 30 bp, Artificial Sequence
  Synthetic oligonucleotide
agtgattaaccaaagcgaaaaatatgtggt

SEQ ID NO: 116479 - DNA, 30 bp, Artificial Sequence
  Synthetic oligonucleotide
aaaaacaacgatatcaatgcgcagtgtggt

SEQ ID NO: 116480 - DNA, 30 bp, Artificial Sequence
  Synthetic oligonucleotide
atggcgggtcgacgggctagtatgattggt

SEQ ID NO: 116481 - DNA, 30 bp, Artificial Sequence
  Synthetic oligonucleotide
ccagatacacttaacgtgggtctgattggt

SEQ ID NO: 116482 - DNA, 30 bp, Artificial Sequence
  Synthetic oligonucleotide
ctttgatgcgtagcagtggatattattggt

SEQ ID NO: 116483 - DNA, 30 bp, Artificial Sequence
  Synthetic oligonucleotide
cacttccgactgggaaactgaggggttggt

SEQ ID NO: 116484 - DNA, 30 bp, Artificial Sequence
  Synthetic oligonucleotide
caacagcgggtatgggactattgggttggt

SEQ ID NO: 116485 - DNA, 30 bp, Artificial Sequence
  Synthetic oligonucleotide
agtgtacgatccgtcatgttactaaaatgt

SEQ ID NO: 116486 - DNA, 30 bp, Artificial Sequence
  Synthetic oligonucleotide
gtgtaattaggggtacgatataagaaatgt

SEQ ID NO: 116487 - DNA, 30 bp, Artificial Sequence
  Synthetic oligonucleotide
gcccgggcttaggcaatcgctaggaaatgt

SEQ ID NO: 116488 - DNA, 30 bp, Artificial Sequence
  Synthetic oligonucleotide
tccaggtcatcagggctagctaagcaatgt

SEQ ID NO: 116489 - DNA, 30 bp, Artificial Sequence
  Synthetic oligonucleotide
tgcacgtcaggctagaaccttacataatgt

SEQ ID NO: 116490 - DNA, 30 bp, Artificial Sequence
  Synthetic oligonucleotide
gtctcgattagaactaacatgcgataatgt

SEQ ID NO: 116491 - DNA, 30 bp, Artificial Sequence
  Synthetic oligonucleotide
atcagagcacggtaccatcccttaacatgt

SEQ ID NO: 116492 - DNA, 30 bp, Artificial Sequence
  Synthetic oligonucleotide
ataggtaaaaggactttttctgagacatgt

SEQ ID NO: 116493 - DNA, 30 bp, Artificial Sequence
  Synthetic oligonucleotide
tcgactaaaggtgggaggaccacaccatgt

SEQ ID NO: 116494 - DNA, 30 bp, Artificial Sequence
  Synthetic oligonucleotide
ggacgactcatactcctgacttctccatgt

SEQ ID NO: 116495 - DNA, 30 bp, Artificial Sequence
  Synthetic oligonucleotide
ttaaatgcactggttctgacaggatcatgt

SEQ ID NO: 116496 - DNA, 30 bp, Artificial Sequence
  Synthetic oligonucleotide
agaagaagaagtcttcgagaggagagatgt

SEQ ID NO: 116497 - DNA, 30 bp, Artificial Sequence
  Synthetic oligonucleotide
ccgtaaccagttatcatgcatcagcgatgt

SEQ ID NO: 116498 - DNA, 30 bp, Artificial Sequence
  Synthetic oligonucleotide
cgctgcctgtgaagaaaagagttgcgatgt

SEQ ID NO: 116499 - DNA, 30 bp, Artificial Sequence
  Synthetic oligonucleotide
caagcggtcgaaagtgactaaatgggatgt

SEQ ID NO: 116500 - DNA, 30 bp, Artificial Sequence
  Synthetic oligonucleotide
ggtaccattacatactgacgggcgtgatgt

SEQ ID NO: 116501 - DNA, 30 bp, Artificial Sequence
  Synthetic oligonucleotide
acggagcaagcgcaagaggctaggtgatgt

SEQ ID NO: 116502 - DNA, 30 bp, Artificial Sequence
  Synthetic oligonucleotide
tcgtttgggacggggagatgcggttgatgt

SEQ ID NO: 116503 - DNA, 30 bp, Artificial Sequence
  Synthetic oligonucleotide
aaccagagtctcacacgctctcgtctatgt

SEQ ID NO: 116504 - DNA, 30 bp, Artificial Sequence
  Synthetic oligonucleotide
ggttcaggaattgcacgtattagagtatgt

SEQ ID NO: 116505 - DNA, 30 bp, Artificial Sequence
  Synthetic oligonucleotide
gatcgtatgagacagatactctacgtatgt

SEQ ID NO: 116506 - DNA, 30 bp, Artificial Sequence
  Synthetic oligonucleotide
cttgattgctctggaacggaaaaggtatgt

SEQ ID NO: 116507 - DNA, 30 bp, Artificial Sequence
  Synthetic oligonucleotide
aacagagtgtaccttctaatagttgtatgt

SEQ ID NO: 116508 - DNA, 30 bp, Artificial Sequence
  Synthetic oligonucleotide
gcatggcgtggcgttcggagagaattatgt

SEQ ID NO: 116509 - DNA, 30 bp, Artificial Sequence
  Synthetic oligonucleotide
gcaagagcatgtatacagattactttatgt

SEQ ID NO: 116510 - DNA, 30 bp, Artificial Sequence
  Synthetic oligonucleotide
cggtgcttcacgtcaggccaaattttatgt

SEQ ID NO: 116511 - DNA, 30 bp, Artificial Sequence
  Synthetic oligonucleotide
ctgtcatggtacagtaatgtcggcaactgt

SEQ ID NO: 116512 - DNA, 30 bp, Artificial Sequence
  Synthetic oligonucleotide
tggatggcgcccggagaaacaatacactgt

SEQ ID NO: 116513 - DNA, 30 bp, Artificial Sequence
  Synthetic oligonucleotide
tctataagtcagggcacacggccttactgt

SEQ ID NO: 116514 - DNA, 30 bp, Artificial Sequence
  Synthetic oligonucleotide
gggtagacattcgaccatccgtaaccctgt

SEQ ID NO: 116515 - DNA, 30 bp, Artificial Sequence
  Synthetic oligonucleotide
agagaacaccttaaggcgcaagggccctgt

SEQ ID NO: 116516 - DNA, 30 bp, Artificial Sequence
  Synthetic oligonucleotide
aggtggccgacttcttgggccaaagcctgt

SEQ ID NO: 116517 - DNA, 30 bp, Artificial Sequence
  Synthetic oligonucleotide
aagaaagaccaggtccgagcgctggcctgt

SEQ ID NO: 116518 - DNA, 30 bp, Artificial Sequence
  Synthetic oligonucleotide
cggtgaggggatgattttgcctagtcctgt

SEQ ID NO: 116519 - DNA, 30 bp, Artificial Sequence
  Synthetic oligonucleotide
atgccattggagaacgtcaagggcagctgt

SEQ ID NO: 116520 - DNA, 30 bp, Artificial Sequence
  Synthetic oligonucleotide
cttcaaacggggcacggtcagtgcagctgt

SEQ ID NO: 116521 - DNA, 30 bp, Artificial Sequence
  Synthetic oligonucleotide
gtatgatacagcaaggcaaattcgagctgt

SEQ ID NO: 116522 - DNA, 30 bp, Artificial Sequence
  Synthetic oligonucleotide
gtacgagctcggacctgcgctattagctgt

SEQ ID NO: 116523 - DNA, 30 bp, Artificial Sequence
  Synthetic oligonucleotide
atcgaacatctccggaaaggacttagctgt

SEQ ID NO: 116524 - DNA, 30 bp, Artificial Sequence
  Synthetic oligonucleotide
gatacgagaagggtgagtcctaccggctgt

SEQ ID NO: 116525 - DNA, 30 bp, Artificial Sequence
  Synthetic oligonucleotide
atatcgtggaagttgacaagaggtggctgt

SEQ ID NO: 116526 - DNA, 30 bp, Artificial Sequence
  Synthetic oligonucleotide
actcgtaggatccaaccgcaatacttctgt

SEQ ID NO: 116527 - DNA, 30 bp, Artificial Sequence
  Synthetic oligonucleotide
gcgaaaaacgtccctgtctagaagaagtgt

SEQ ID NO: 116528 - DNA, 30 bp, Artificial Sequence
  Synthetic oligonucleotide
tcggcgaatcatcttttatggggtaagtgt

SEQ ID NO: 116529 - DNA, 30 bp, Artificial Sequence
  Synthetic oligonucleotide
ccgggggtcgtgcgggatttcgaccagtgt

SEQ ID NO: 116530 - DNA, 30 bp, Artificial Sequence
  Synthetic oligonucleotide
agcaacgataaaggtcccaacggccagtgt

SEQ ID NO: 116531 - DNA, 30 bp, Artificial Sequence
  Synthetic oligonucleotide
accacgatccgatcaaggtattgtgagtgt

SEQ ID NO: 116532 - DNA, 30 bp, Artificial Sequence
  Synthetic oligonucleotide
ggagaacgagaccggcgaacacactagtgt

SEQ ID NO: 116533 - DNA, 30 bp, Artificial Sequence
  Synthetic oligonucleotide
atgagcgtttccgggaaaaccacctagtgt

SEQ ID NO: 116534 - DNA, 30 bp, Artificial Sequence
  Synthetic oligonucleotide
actcacagaaactccagtcataaaccgtgt

SEQ ID NO: 116535 - DNA, 30 bp, Artificial Sequence
  Synthetic oligonucleotide
ggatataccacccgtaggaacagttcgtgt

SEQ ID NO: 116536 - DNA, 30 bp, Artificial Sequence
  Synthetic oligonucleotide
tagtctcggaggcgtaatctcatttcgtgt

SEQ ID NO: 116537 - DNA, 30 bp, Artificial Sequence
  Synthetic oligonucleotide
ccgttacatataaggacgaaaaaaaggtgt

SEQ ID NO: 116538 - DNA, 30 bp, Artificial Sequence
  Synthetic oligonucleotide
acttcgccgtacggaaactggaaacggtgt

SEQ ID NO: 116539 - DNA, 30 bp, Artificial Sequence
  Synthetic oligonucleotide
gtcgttcgtttgctcaaagggtgcgggtgt

SEQ ID NO: 116540 - DNA, 30 bp, Artificial Sequence
  Synthetic oligonucleotide
cccagattccgaaactagatgatgatgtgt

SEQ ID NO: 116541 - DNA, 30 bp, Artificial Sequence
  Synthetic oligonucleotide
taccaacagggaggaatttgtagtatgtgt

SEQ ID NO: 116542 - DNA, 30 bp, Artificial Sequence
  Synthetic oligonucleotide
tcactagacatttcagattatcgactgtgt

SEQ ID NO: 116543 - DNA, 30 bp, Artificial Sequence
  Synthetic oligonucleotide
ggttggggacgggctcaacgagacgtgtgt

SEQ ID NO: 116544 - DNA, 30 bp, Artificial Sequence
  Synthetic oligonucleotide
cgtcctcgtcgtcagccgtggttcgtgtgt

SEQ ID NO: 116545 - DNA, 30 bp, Artificial Sequence
  Synthetic oligonucleotide
tgcacttcgaaggagagtgccgtattgtgt

SEQ ID NO: 116546 - DNA, 30 bp, Artificial Sequence
  Synthetic oligonucleotide
catgttttatgagatcacagtgagttgtgt

SEQ ID NO: 116547 - DNA, 30 bp, Artificial Sequence
  Synthetic oligonucleotide
catggtggtaagggctctgtgtcgttgtgt

SEQ ID NO: 116548 - DNA, 30 bp, Artificial Sequence
  Synthetic oligonucleotide
cagactgagagcacattgtcaccaaattgt

SEQ ID NO: 116549 - DNA, 30 bp, Artificial Sequence
  Synthetic oligonucleotide
gtggtgggaaacagaggttctacacattgt

SEQ ID NO: 116550 - DNA, 30 bp, Artificial Sequence
  Synthetic oligonucleotide
acgtatcgttctacgaacgggatgcattgt

SEQ ID NO: 116551 - DNA, 30 bp, Artificial Sequence
  Synthetic oligonucleotide
agtgggaaacaagtatcttcaaaggattgt

SEQ ID NO: 116552 - DNA, 30 bp, Artificial Sequence
  Synthetic oligonucleotide
cgagaaaccatcaggactgcacgtgattgt

SEQ ID NO: 116553 - DNA, 30 bp, Artificial Sequence
  Synthetic oligonucleotide
ggttgaggctgagggaagggactaacttgt

SEQ ID NO: 116554 - DNA, 30 bp, Artificial Sequence
  Synthetic oligonucleotide
acaccacggtactattgtatatcgacttgt

SEQ ID NO: 116555 - DNA, 30 bp, Artificial Sequence
  Synthetic oligonucleotide
ggccaccaccgacaaacagttggtacttgt

SEQ ID NO: 116556 - DNA, 30 bp, Artificial Sequence
  Synthetic oligonucleotide
gcgtgggttagtgatagatgatgtccttgt

SEQ ID NO: 116557 - DNA, 30 bp, Artificial Sequence
  Synthetic oligonucleotide
cttgctcgattgcgataatcagcggcttgt

SEQ ID NO: 116558 - DNA, 30 bp, Artificial Sequence
  Synthetic oligonucleotide
ccgtacacaaaccagcagtatagatcttgt

SEQ ID NO: 116559 - DNA, 30 bp, Artificial Sequence
  Synthetic oligonucleotide
ggcagaggcgtaggcccgacggtatcttgt

SEQ ID NO: 116560 - DNA, 30 bp, Artificial Sequence
  Synthetic oligonucleotide
tgagagtgctacgccacgctgtgtagttgt

SEQ ID NO: 116561 - DNA, 30 bp, Artificial Sequence
  Synthetic oligonucleotide
agtcaaacaccgcttagtcaatgtcgttgt

SEQ ID NO: 116562 - DNA, 30 bp, Artificial Sequence
  Synthetic oligonucleotide
tccccgagcgtgaagagtgttcaaggttgt

SEQ ID NO: 116563 - DNA, 30 bp, Artificial Sequence
  Synthetic oligonucleotide
aacaggtgaaatatcgaccttgctggttgt

SEQ ID NO: 116564 - DNA, 30 bp, Artificial Sequence
  Synthetic oligonucleotide
tgtaaaaaagaaatgaacgacatgatttgt

SEQ ID NO: 116565 - DNA, 30 bp, Artificial Sequence
  Synthetic oligonucleotide
cgtctaacgacaccagagaaattactttgt

SEQ ID NO: 116566 - DNA, 30 bp, Artificial Sequence
  Synthetic oligonucleotide
gcggcgtcgtcggtgaagatatgcgtttgt

SEQ ID NO: 116567 - DNA, 30 bp, Artificial Sequence
  Synthetic oligonucleotide
agtatggatgggacgtggtctatcgtttgt

SEQ ID NO: 116568 - DNA, 30 bp, Artificial Sequence
  Synthetic oligonucleotide
tcaagaactgggaatgtaccacatttttgt

SEQ ID NO: 116569 - DNA, 30 bp, Artificial Sequence
  Synthetic oligonucleotide
cccgatacttaccttagagcgatgaaaatt

SEQ ID NO: 116570 - DNA, 30 bp, Artificial Sequence
  Synthetic oligonucleotide
tatgcagattaacgaactgagctgaaaatt

SEQ ID NO: 116571 - DNA, 30 bp, Artificial Sequence
  Synthetic oligonucleotide
ggtccgagtcagcggatccatgaataaatt

SEQ ID NO: 116572 - DNA, 30 bp, Artificial Sequence
  Synthetic oligonucleotide
tgacggtcagatgactcagttatttaaatt

SEQ ID NO: 116573 - DNA, 30 bp, Artificial Sequence
  Synthetic oligonucleotide
cacgcccatgagtaggtgttcaagacaatt

SEQ ID NO: 116574 - DNA, 30 bp, Artificial Sequence
  Synthetic oligonucleotide
ggacacagtctaactgtgaattatgcaatt

SEQ ID NO: 116575 - DNA, 30 bp, Artificial Sequence
  Synthetic oligonucleotide
agacaaggggcattcccagccattgcaatt

SEQ ID NO: 116576 - DNA, 30 bp, Artificial Sequence
  Synthetic oligonucleotide
aagtaagaataggaagcggttccctcaatt

SEQ ID NO: 116577 - DNA, 30 bp, Artificial Sequence
  Synthetic oligonucleotide
cccgacttctgctcctcgactatgtcaatt

SEQ ID NO: 116578 - DNA, 30 bp, Artificial Sequence
  Synthetic oligonucleotide
tcgtgcgaaccggatttgttccacagaatt

SEQ ID NO: 116579 - DNA, 30 bp, Artificial Sequence
  Synthetic oligonucleotide
caaaagcggtgccgccgaaacatgagaatt

SEQ ID NO: 116580 - DNA, 30 bp, Artificial Sequence
  Synthetic oligonucleotide
ctacacatgtagcgagggcgcattagaatt

SEQ ID NO: 116581 - DNA, 31 bp, Artificial Sequence
  Synthetic oligonucleotide
tatggataaatgggagggtaactcgcgaatt

SEQ ID NO: 116582 - DNA, 30 bp, Artificial Sequence
  Synthetic oligonucleotide
acagggcgtaacaaacacgaagggcgaatt

SEQ ID NO: 116583 - DNA, 30 bp, Artificial Sequence
  Synthetic oligonucleotide
gttgtccaatcgtgccatcagaaaggaatt

SEQ ID NO: 116584 - DNA, 30 bp, Artificial Sequence
  Synthetic oligonucleotide
tcacaagtccaaaggcgctgagtctgaatt

SEQ ID NO: 116585 - DNA, 30 bp, Artificial Sequence
  Synthetic oligonucleotide
gagcaggaagaaagatcctctataataatt

SEQ ID NO: 116586 - DNA, 30 bp, Artificial Sequence
  Synthetic oligonucleotide
cacataaagaggagatcggctggcataatt

SEQ ID NO: 116587 - DNA, 30 bp, Artificial Sequence
  Synthetic oligonucleotide
tagctggcgatataattacacacactaatt

SEQ ID NO: 116588 - DNA, 30 bp, Artificial Sequence
  Synthetic oligonucleotide
ttgcgcgacttgggcccgagagtactaatt

SEQ ID NO: 116589 - DNA, 30 bp, Artificial Sequence
  Synthetic oligonucleotide
cacaaggtacgagctccagactagctaatt

SEQ ID NO: 116590 - DNA, 30 bp, Artificial Sequence
  Synthetic oligonucleotide
catagatcagaaattagaagatacgtaatt

SEQ ID NO: 116591 - DNA, 30 bp, Artificial Sequence
  Synthetic oligonucleotide
tcactttggtcaaaatagaaggaggtaatt

SEQ ID NO: 116592 - DNA, 30 bp, Artificial Sequence
  Synthetic oligonucleotide
agcgaaccagacaagccggagtcattaatt

SEQ ID NO: 116593 - DNA, 30 bp, Artificial Sequence
  Synthetic oligonucleotide
gatagaaacgatcaattcagcagcttaatt

SEQ ID NO: 116594 - DNA, 30 bp, Artificial Sequence
  Synthetic oligonucleotide
cccacaggcgattggttaggggtgttaatt

SEQ ID NO: 116595 - DNA, 30 bp, Artificial Sequence
  Synthetic oligonucleotide
cgagggatcgtgcctactgatgctaacatt

SEQ ID NO: 116596 - DNA, 30 bp, Artificial Sequence
  Synthetic oligonucleotide
ctactagttggtacaagactggaacacatt

SEQ ID NO: 116597 - DNA, 30 bp, Artificial Sequence
  Synthetic oligonucleotide
aggttgggaggatcccggtcaacccacatt

SEQ ID NO: 116598 - DNA, 30 bp, Artificial Sequence
  Synthetic oligonucleotide
aagtgcccgccgaggaggatattccacatt

SEQ ID NO: 116599 - DNA, 30 bp, Artificial Sequence
  Synthetic oligonucleotide
ccctaaaggctgtaacgagaaacgcacatt

SEQ ID NO: 116600 - DNA, 30 bp, Artificial Sequence
  Synthetic oligonucleotide
attacatacatataataattaattcacatt

SEQ ID NO: 116601 - DNA, 30 bp, Artificial Sequence
  Synthetic oligonucleotide
aacgttgaggtgaggacttcaagggacatt

SEQ ID NO: 116602 - DNA, 30 bp, Artificial Sequence
  Synthetic oligonucleotide
gatctgaccaagtttaggattatggacatt

SEQ ID NO: 116603 - DNA, 30 bp, Artificial Sequence
  Synthetic oligonucleotide
caggcgtgtggtcagcctaaactggacatt

SEQ ID NO: 116604 - DNA, 30 bp, Artificial Sequence
  Synthetic oligonucleotide
agagcgcgagacatcagagtgcgtgacatt

SEQ ID NO: 116605 - DNA, 30 bp, Artificial Sequence
  Synthetic oligonucleotide
gtaagagaagcgtcgcccagcagatacatt

SEQ ID NO: 116606 - DNA, 30 bp, Artificial Sequence
  Synthetic oligonucleotide
cctcagatcaaggttcggtattgcaccatt

SEQ ID NO: 116607 - DNA, 30 bp, Artificial Sequence
  Synthetic oligonucleotide
aggggagaataccgttacgtatataccatt

SEQ ID NO: 116608 - DNA, 30 bp, Artificial Sequence
  Synthetic oligonucleotide
gacgttttaatagacaaagagtgtcccatt

SEQ ID NO: 116609 - DNA, 30 bp, Artificial Sequence
  Synthetic oligonucleotide
ttacggctcgcttaccgccgaccggccatt

SEQ ID NO: 116610 - DNA, 30 bp, Artificial Sequence
  Synthetic oligonucleotide
ttgttgaataggcatcgcgagggatccatt

SEQ ID NO: 116611 - DNA, 30 bp, Artificial Sequence
  Synthetic oligonucleotide
ggggaaagctagcgttgaagagcctccatt

SEQ ID NO: 116612 - DNA, 30 bp, Artificial Sequence
  Synthetic oligonucleotide
agattccttattagtgctaaattaagcatt

SEQ ID NO: 116613 - DNA, 30 bp, Artificial Sequence
  Synthetic oligonucleotide
gcttagtattaccctggaccgtagagcatt

SEQ ID NO: 116614 - DNA, 30 bp, Artificial Sequence
  Synthetic oligonucleotide
accgtgggtcataacgctcaaaatagcatt

SEQ ID NO: 116615 - DNA, 30 bp, Artificial Sequence
  Synthetic oligonucleotide
aacgatggagctggctaaggtgtgcgcatt

SEQ ID NO: 116616 - DNA, 30 bp, Artificial Sequence
  Synthetic oligonucleotide
tgcatcggtcggcggtaactgagcggcatt

SEQ ID NO: 116617 - DNA, 30 bp, Artificial Sequence
  Synthetic oligonucleotide
ggacgttagagaggggctagctcgggcatt

SEQ ID NO: 116618 - DNA, 30 bp, Artificial Sequence
  Synthetic oligonucleotide
aggtgggtaaatcaggtgtagtcatgcatt

SEQ ID NO: 116619 - DNA, 30 bp, Artificial Sequence
  Synthetic oligonucleotide
tccaaagggctaagcaaacccatctgcatt

SEQ ID NO: 116620 - DNA, 30 bp, Artificial Sequence
  Synthetic oligonucleotide
acgaagccacacctaccgttaataatcatt

SEQ ID NO: 116621 - DNA, 30 bp, Artificial Sequence
  Synthetic oligonucleotide
cggaattcaatcagaatcgttgtaatcatt

SEQ ID NO: 116622 - DNA, 30 bp, Artificial Sequence
  Synthetic oligonucleotide
gtgtgcaactcaaaaggattagaactcatt

SEQ ID NO: 116623 - DNA, 30 bp, Artificial Sequence
  Synthetic oligonucleotide
cgccaaagttgtgtatcaatccagctcatt

SEQ ID NO: 116624 - DNA, 30 bp, Artificial Sequence
  Synthetic oligonucleotide
agcggcactgctactaaaaggtcgctcatt

SEQ ID NO: 116625 - DNA, 30 bp, Artificial Sequence
  Synthetic oligonucleotide
catgtcacgagtggatgggttaaattcatt

SEQ ID NO: 116626 - DNA, 30 bp, Artificial Sequence
  Synthetic oligonucleotide
acgggcattacagatagactcttcttcatt

SEQ ID NO: 116627 - DNA, 30 bp, Artificial Sequence
  Synthetic oligonucleotide
accaatggataaatactccgcagaaagatt

SEQ ID NO: 116628 - DNA, 30 bp, Artificial Sequence
  Synthetic oligonucleotide
gttgtacatcgaacaatacctgcagagatt

SEQ ID NO: 116629 - DNA, 30 bp, Artificial Sequence
  Synthetic oligonucleotide
ttgtgagaaacagactaggaagcgacgatt

SEQ ID NO: 116630 - DNA, 30 bp, Artificial Sequence
  Synthetic oligonucleotide
cgggcactcgaagaagatgtcggtacgatt

SEQ ID NO: 116631 - DNA, 30 bp, Artificial Sequence
  Synthetic oligonucleotide
ccaagtctcaaccgttaacgacaaccgatt

SEQ ID NO: 116632 - DNA, 30 bp, Artificial Sequence
  Synthetic oligonucleotide
cattggtcacgcgtgtgtaaggaaccgatt

SEQ ID NO: 116633 - DNA, 30 bp, Artificial Sequence
  Synthetic oligonucleotide
ccgagcgttgctagtaaataaagtccgatt

SEQ ID NO: 116634 - DNA, 30 bp, Artificial Sequence
  Synthetic oligonucleotide
agataggcacagcgagggtctatatcgatt

SEQ ID NO: 116635 - DNA, 30 bp, Artificial Sequence
  Synthetic oligonucleotide
ggatgtaaaacatgactcaagcagtcgatt

SEQ ID NO: 116636 - DNA, 30 bp, Artificial Sequence
  Synthetic oligonucleotide
gtcacacgatgccccatatgaagaaggatt

SEQ ID NO: 116637 - DNA, 30 bp, Artificial Sequence
  Synthetic oligonucleotide
catacaaaaaggagtggtggggaacggatt

SEQ ID NO: 116638 - DNA, 30 bp, Artificial Sequence
  Synthetic oligonucleotide
tagtgtctggtcagtggcgacgaccggatt

SEQ ID NO: 116639 - DNA, 30 bp, Artificial Sequence
  Synthetic oligonucleotide
ggcaaagatgtgcggctggtgggggggatt

SEQ ID NO: 116640 - DNA, 30 bp, Artificial Sequence
  Synthetic oligonucleotide
aacggtgtgtgcgtggggatcgagtggatt

SEQ ID NO: 116641 - DNA, 30 bp, Artificial Sequence
  Synthetic oligonucleotide
aggattctactagatggagtgatgtggatt

SEQ ID NO: 116642 - DNA, 30 bp, Artificial Sequence
  Synthetic oligonucleotide
acgtctggcaggagtaatcagctgtggatt

SEQ ID NO: 116643 - DNA, 30 bp, Artificial Sequence
  Synthetic oligonucleotide
cacgtgttggataaccatctctgttggatt

SEQ ID NO: 116644 - DNA, 30 bp, Artificial Sequence
  Synthetic oligonucleotide
cccaatgtggcgcgagctcagggagtgatt

SEQ ID NO: 116645 - DNA, 30 bp, Artificial Sequence
  Synthetic oligonucleotide
gcgatagcgaaggtgcaagaatgtgtgatt

SEQ ID NO: 116646 - DNA, 30 bp, Artificial Sequence
  Synthetic oligonucleotide
acagcggcagcacaaggactgaggttgatt

SEQ ID NO: 116647 - DNA, 30 bp, Artificial Sequence
  Synthetic oligonucleotide
tactgtactccaaggaatcagggcaatatt

SEQ ID NO: 116648 - DNA, 30 bp, Artificial Sequence
  Synthetic oligonucleotide
cgtagagcgcgggctagtataaaccatatt

SEQ ID NO: 116649 - DNA, 30 bp, Artificial Sequence
  Synthetic oligonucleotide
tcgacgtaactagcaatggtcgagcatatt

SEQ ID NO: 116650 - DNA, 30 bp, Artificial Sequence
  Synthetic oligonucleotide
ttgcttccgatgaattcctgtttcgatatt

SEQ ID NO: 116651 - DNA, 30 bp, Artificial Sequence
  Synthetic oligonucleotide
acagacctggaggagaggtcggactatatt

SEQ ID NO: 116652 - DNA, 30 bp, Artificial Sequence
  Synthetic oligonucleotide
ggatagcgagcctggcggtaagaaactatt

SEQ ID NO: 116653 - DNA, 30 bp, Artificial Sequence
  Synthetic oligonucleotide
aaggaagtcgtttgcgaccgtgtcactatt

SEQ ID NO: 116654 - DNA, 30 bp, Artificial Sequence
  Synthetic oligonucleotide
cgtctcactcgtaatttagcgcaacctatt

SEQ ID NO: 116655 - DNA, 30 bp, Artificial Sequence
  Synthetic oligonucleotide
ggagggtgaggacctgtagggcagcctatt

SEQ ID NO: 116656 - DNA, 30 bp, Artificial Sequence
  Synthetic oligonucleotide
cagcgcacacgtcagtagatacatgctatt

SEQ ID NO: 116657 - DNA, 30 bp, Artificial Sequence
  Synthetic oligonucleotide
ttcgaaggggtagaggctttgggaagtatt

SEQ ID NO: 116658 - DNA, 30 bp, Artificial Sequence
  Synthetic oligonucleotide
taggtatcattataaagtgggaagagtatt

SEQ ID NO: 116659 - DNA, 30 bp, Artificial Sequence
  Synthetic oligonucleotide
ctaattgaatgtggcaggggccagagtatt

SEQ ID NO: 116660 - DNA, 30 bp, Artificial Sequence
  Synthetic oligonucleotide
agcaagcgattaccacccattgtgcgtatt

SEQ ID NO: 116661 - DNA, 30 bp, Artificial Sequence
  Synthetic oligonucleotide
gacggaaagtgatcatattaacttcgtatt

SEQ ID NO: 116662 - DNA, 30 bp, Artificial Sequence
  Synthetic oligonucleotide
ggtacaacgaggagtagatgggaaattatt

SEQ ID NO: 116663 - DNA, 30 bp, Artificial Sequence
  Synthetic oligonucleotide
caccggaagcaacttaccgagagtattatt

SEQ ID NO: 116664 - DNA, 30 bp, Artificial Sequence
  Synthetic oligonucleotide
tgaaactcgcatggaatacaggtgcttatt

SEQ ID NO: 116665 - DNA, 30 bp, Artificial Sequence
  Synthetic oligonucleotide
ccgcgatcaattaatagctgaatatttatt

SEQ ID NO: 116666 - DNA, 30 bp, Artificial Sequence
  Synthetic oligonucleotide
gataaggaagaggataaggatgcctttatt

SEQ ID NO: 116667 - DNA, 30 bp, Artificial Sequence
  Synthetic oligonucleotide
acacaacgacaccggtaattaacgtttatt

SEQ ID NO: 116668 - DNA, 30 bp, Artificial Sequence
  Synthetic oligonucleotide
ctcgtattgtgcgatgaaaagccgtttatt

SEQ ID NO: 116669 - DNA, 30 bp, Artificial Sequence
  Synthetic oligonucleotide
acgattaaaccccataatcacgattttatt

SEQ ID NO: 116670 - DNA, 30 bp, Artificial Sequence
  Synthetic oligonucleotide
gccatatgtgtccaagttaagcaaaaactt

SEQ ID NO: 116671 - DNA, 30 bp, Artificial Sequence
  Synthetic oligonucleotide
ttctgaggctccagctgggcgataaaactt

SEQ ID NO: 116672 - DNA, 30 bp, Artificial Sequence
  Synthetic oligonucleotide
cccgtagaggaatgtgagagaactaaactt

SEQ ID NO: 116673 - DNA, 30 bp, Artificial Sequence
  Synthetic oligonucleotide
gggacgatcaatcggtccgactggcaactt

SEQ ID NO: 116674 - DNA, 30 bp, Artificial Sequence
  Synthetic oligonucleotide
acggtgggaacaccgcgctccgaagaactt

SEQ ID NO: 116675 - DNA, 30 bp, Artificial Sequence
  Synthetic oligonucleotide
aatgcccggttgaataccgagtacgaactt

SEQ ID NO: 116676 - DNA, 30 bp, Artificial Sequence
  Synthetic oligonucleotide
acacgtaaaacccgatgtaactgggaactt

SEQ ID NO: 116677 - DNA, 30 bp, Artificial Sequence
  Synthetic oligonucleotide
cgcggctagcaacgcatatccagataactt

SEQ ID NO: 116678 - DNA, 30 bp, Artificial Sequence
  Synthetic oligonucleotide
tcgcgactgctagagaacaacgtataactt

SEQ ID NO: 116679 - DNA, 30 bp, Artificial Sequence
  Synthetic oligonucleotide
attgactcggcaggaatcgcggaaacactt

SEQ ID NO: 116680 - DNA, 30 bp, Artificial Sequence
  Synthetic oligonucleotide
ccgctgtgacaggcaccggagtgaacactt

SEQ ID NO: 116681 - DNA, 30 bp, Artificial Sequence
  Synthetic oligonucleotide
tgacaagacgtgctttatcgccggacactt

SEQ ID NO: 116682 - DNA, 30 bp, Artificial Sequence
  Synthetic oligonucleotide
cagtaatccggggtcagccacaaaccactt

SEQ ID NO: 116683 - DNA, 30 bp, Artificial Sequence
  Synthetic oligonucleotide
gcgacaatatttggttccgtttcagcactt

SEQ ID NO: 116684 - DNA, 30 bp, Artificial Sequence
  Synthetic oligonucleotide
aaagcgttagcggttagcgtcggagcactt

SEQ ID NO: 116685 - DNA, 30 bp, Artificial Sequence
  Synthetic oligonucleotide
accggaaatgagacataagttctcgcactt

SEQ ID NO: 116686 - DNA, 30 bp, Artificial Sequence
  Synthetic oligonucleotide
cggtcgcaaagaaaacggtgtaatgcactt

SEQ ID NO: 116687 - DNA, 30 bp, Artificial Sequence
  Synthetic oligonucleotide
aatggtctggagtgtgacaccacatcactt

SEQ ID NO: 116688 - DNA, 30 bp, Artificial Sequence
  Synthetic oligonucleotide
tttgcgccgaataagtacccagaaagactt

SEQ ID NO: 116689 - DNA, 30 bp, Artificial Sequence
  Synthetic oligonucleotide
taaagaaaataggcagtgcgataaagactt

SEQ ID NO: 116690 - DNA, 30 bp, Artificial Sequence
  Synthetic oligonucleotide
ggatgatagtgaggccggccctcgagactt

SEQ ID NO: 116691 - DNA, 30 bp, Artificial Sequence
  Synthetic oligonucleotide
tggcctgcacggcactggtattctagactt

SEQ ID NO: 116692 - DNA, 30 bp, Artificial Sequence
  Synthetic oligonucleotide
atcataaacccgtacccagcaggccgactt

SEQ ID NO: 116693 - DNA, 30 bp, Artificial Sequence
  Synthetic oligonucleotide
actgttgtagtcatctaatacgtccgactt

SEQ ID NO: 116694 - DNA, 30 bp, Artificial Sequence
  Synthetic oligonucleotide
tcaactaaggtacacaaaggggaatgactt

SEQ ID NO: 116695 - DNA, 30 bp, Artificial Sequence
  Synthetic oligonucleotide
cttagaaatggccaactatgcccctgactt

SEQ ID NO: 116696 - DNA, 30 bp, Artificial Sequence
  Synthetic oligonucleotide
cacataccaataaacaactctaagtgactt

SEQ ID NO: 116697 - DNA, 30 bp, Artificial Sequence
  Synthetic oligonucleotide
aaggctatctccatttcgaactccatactt

SEQ ID NO: 116698 - DNA, 30 bp, Artificial Sequence
  Synthetic oligonucleotide
cgtgcgtgtacgcggggtcgggtcatactt

SEQ ID NO: 116699 - DNA, 30 bp, Artificial Sequence
  Synthetic oligonucleotide
gagagtacttatggactacatgaactactt

SEQ ID NO: 116700 - DNA, 30 bp, Artificial Sequence
  Synthetic oligonucleotide
gggcctaggttaatacgaggtaagctactt

SEQ ID NO: 116701 - DNA, 30 bp, Artificial Sequence
  Synthetic oligonucleotide
gggccatcccctagtagaaaaagattactt

SEQ ID NO: 116702 - DNA, 30 bp, Artificial Sequence
  Synthetic oligonucleotide
aaggtccacagaaaacgaggctctaacctt

SEQ ID NO: 116703 - DNA, 30 bp, Artificial Sequence
  Synthetic oligonucleotide
tgcgacctaaatgatcagtgataggacctt

SEQ ID NO: 116704 - DNA, 30 bp, Artificial Sequence
  Synthetic oligonucleotide
tcgtccgacatgacgtttctgccttacctt

SEQ ID NO: 116705 - DNA, 30 bp, Artificial Sequence
  Synthetic oligonucleotide
ccgcaactaccattcaaacatagacccctt

SEQ ID NO: 116706 - DNA, 30 bp, Artificial Sequence
  Synthetic oligonucleotide
ccgtgttatccccgacattagctgtccctt

SEQ ID NO: 116707 - DNA, 30 bp, Artificial Sequence
  Synthetic oligonucleotide
gattagatgccgactgagactgtgtccctt

SEQ ID NO: 116708 - DNA, 30 bp, Artificial Sequence
  Synthetic oligonucleotide
acgtaataagatacgggacagagaagcctt

SEQ ID NO: 116709 - DNA, 30 bp, Artificial Sequence
  Synthetic oligonucleotide
tcgggagatcgggtcactagggtacgcctt

SEQ ID NO: 116710 - DNA, 30 bp, Artificial Sequence
  Synthetic oligonucleotide
ctcggcgctagcttcgaaaataacggcctt

SEQ ID NO: 116711 - DNA, 30 bp, Artificial Sequence
  Synthetic oligonucleotide
tttcagaggaggggtgactggatgctcctt

SEQ ID NO: 116712 - DNA, 30 bp, Artificial Sequence
  Synthetic oligonucleotide
agggttcactagaaacaattaagtctcctt

SEQ ID NO: 116713 - DNA, 30 bp, Artificial Sequence
  Synthetic oligonucleotide
cataggcagagagggaggactgatcagctt

SEQ ID NO: 116714 - DNA, 30 bp, Artificial Sequence
  Synthetic oligonucleotide
cgaaattcgacactaaccctgttagagctt

SEQ ID NO: 116715 - DNA, 30 bp, Artificial Sequence
  Synthetic oligonucleotide
acagatgtggggctaatatttgatgagctt

SEQ ID NO: 116716 - DNA, 30 bp, Artificial Sequence
  Synthetic oligonucleotide
gatacgcacacataatgagggatatagctt

SEQ ID NO: 116717 - DNA, 30 bp, Artificial Sequence
  Synthetic oligonucleotide
gagccgatccgagtatatacgacctagctt

SEQ ID NO: 116718 - DNA, 30 bp, Artificial Sequence
  Synthetic oligonucleotide
aaggagctcactccgctactagaaccgctt

SEQ ID NO: 116719 - DNA, 30 bp, Artificial Sequence
  Synthetic oligonucleotide
aggagcgaggtgagggctcactagccgctt

SEQ ID NO: 116720 - DNA, 30 bp, Artificial Sequence
  Synthetic oligonucleotide
gcattgagtaggtcaggtcgtacagcgctt

SEQ ID NO: 116721 - DNA, 30 bp, Artificial Sequence
  Synthetic oligonucleotide
ttgcaaaatggcgtgttgcgatgggcgctt

SEQ ID NO: 116722 - DNA, 30 bp, Artificial Sequence
  Synthetic oligonucleotide
cctccaaacagtcgtgatagcaagtcgctt

SEQ ID NO: 116723 - DNA, 30 bp, Artificial Sequence
  Synthetic oligonucleotide
cgtactacttcagtagtgcaactgtcgctt

SEQ ID NO: 116724 - DNA, 30 bp, Artificial Sequence
  Synthetic oligonucleotide
gtcaggccaaattagatacgtctttcgctt

SEQ ID NO: 116725 - DNA, 30 bp, Artificial Sequence
  Synthetic oligonucleotide
tagcatcggaatcaggctctcgcaaggctt

SEQ ID NO: 116726 - DNA, 30 bp, Artificial Sequence
  Synthetic oligonucleotide
ataaaggtgacgaccgccaaggtcaggctt

SEQ ID NO: 116727 - DNA, 30 bp, Artificial Sequence
  Synthetic oligonucleotide
cttgcaccggggagatcgagtagtaggctt

SEQ ID NO: 116728 - DNA, 30 bp, Artificial Sequence
  Synthetic oligonucleotide
tatacaaaagtactgtagcagtgcgggctt

SEQ ID NO: 116729 - DNA, 30 bp, Artificial Sequence
  Synthetic oligonucleotide
tagacggagcgactaagacggggggggctt

SEQ ID NO: 116730 - DNA, 30 bp, Artificial Sequence
  Synthetic oligonucleotide
cataggctgataagccctaattgatggctt

SEQ ID NO: 116731 - DNA, 30 bp, Artificial Sequence
  Synthetic oligonucleotide
gcgacgtagtcctggtctatcgatatgctt

SEQ ID NO: 116732 - DNA, 30 bp, Artificial Sequence
  Synthetic oligonucleotide
ggtgcttagtgctgagtagaagacgtgctt

SEQ ID NO: 116733 - DNA, 30 bp, Artificial Sequence
  Synthetic oligonucleotide
tcgctggcggggtcaatcctgaatgtgctt

SEQ ID NO: 116734 - DNA, 30 bp, Artificial Sequence
  Synthetic oligonucleotide
ccgagcggctaccagagtctcccgaatctt

SEQ ID NO: 116735 - DNA, 30 bp, Artificial Sequence
  Synthetic oligonucleotide
tcatataggtcccgaacttatacccatctt

SEQ ID NO: 116736 - DNA, 30 bp, Artificial Sequence
  Synthetic oligonucleotide
agaaatgccgcgccggcaaaacaagatctt

SEQ ID NO: 116737 - DNA, 30 bp, Artificial Sequence
  Synthetic oligonucleotide
cgaagtactccggccggtaaccaagatctt

SEQ ID NO: 116738 - DNA, 30 bp, Artificial Sequence
  Synthetic oligonucleotide
aggggcacatttaaataataggtcgatctt

SEQ ID NO: 116739 - DNA, 30 bp, Artificial Sequence
  Synthetic oligonucleotide
gcacgtcatctgcagaccatacatgatctt

SEQ ID NO: 116740 - DNA, 30 bp, Artificial Sequence
  Synthetic oligonucleotide
acggctatcatacgctgttgaagttatctt

SEQ ID NO: 116741 - DNA, 30 bp, Artificial Sequence
  Synthetic oligonucleotide
tcgtgtaacgaacgacttgatcgttatctt

SEQ ID NO: 116742 - DNA, 30 bp, Artificial Sequence
  Synthetic oligonucleotide
cataatacgccatgggacataaggactctt

SEQ ID NO: 116743 - DNA, 30 bp, Artificial Sequence
  Synthetic oligonucleotide
acgggcatgacaggacaattacatactctt

SEQ ID NO: 116744 - DNA, 30 bp, Artificial Sequence
  Synthetic oligonucleotide
tgcataaagtgcacaatcaatacgcctctt

SEQ ID NO: 116745 - DNA, 30 bp, Artificial Sequence
  Synthetic oligonucleotide
atacaagaccacatcccgaggcccgctctt

SEQ ID NO: 116746 - DNA, 30 bp, Artificial Sequence
  Synthetic oligonucleotide
gcactccaggaataccccggaagccgtctt

SEQ ID NO: 116747 - DNA, 30 bp, Artificial Sequence
  Synthetic oligonucleotide
cgagcgaagctcctgcaacttcatggtctt

SEQ ID NO: 116748 - DNA, 30 bp, Artificial Sequence
  Synthetic oligonucleotide
cagagtttgcgaggttaaaaacgtggtctt

SEQ ID NO: 116749 - DNA, 30 bp, Artificial Sequence
  Synthetic oligonucleotide
agtgacgttcgaatgaaaatgtcgtgtctt

SEQ ID NO: 116750 - DNA, 30 bp, Artificial Sequence
  Synthetic oligonucleotide
acatgggagtatctggacgactacgttctt

SEQ ID NO: 116751 - DNA, 30 bp, Artificial Sequence
  Synthetic oligonucleotide
gacggagcttcatgagaagccgccaaagtt

SEQ ID NO: 116752 - DNA, 30 bp, Artificial Sequence
  Synthetic oligonucleotide
gatggaggagactcgcgtatcggtaaagtt

SEQ ID NO: 116753 - DNA, 30 bp, Artificial Sequence
  Synthetic oligonucleotide
gaaaacgcgtaacgccccggttgtaaagtt

SEQ ID NO: 116754 - DNA, 30 bp, Artificial Sequence
  Synthetic oligonucleotide
ctgcgaagccgacactcggagactgaagtt

SEQ ID NO: 116755 - DNA, 30 bp, Artificial Sequence
  Synthetic oligonucleotide
gggcgaacaacgagaggtacaattgaagtt

SEQ ID NO: 116756 - DNA, 30 bp, Artificial Sequence
  Synthetic oligonucleotide
tgttggtgtggtgggagcttgcaaacagtt

SEQ ID NO: 116757 - DNA, 30 bp, Artificial Sequence
  Synthetic oligonucleotide
cggatcccgtggcgcgaacacggaccagtt

SEQ ID NO: 116758 - DNA, 30 bp, Artificial Sequence
  Synthetic oligonucleotide
cccgatgggctggttcgggctctaccagtt

SEQ ID NO: 116759 - DNA, 30 bp, Artificial Sequence
  Synthetic oligonucleotide
accttatcgggacaccccacgttaccagtt

SEQ ID NO: 116760 - DNA, 30 bp, Artificial Sequence
  Synthetic oligonucleotide
agaacgactggcgcgaagaaaaatgcagtt

SEQ ID NO: 116761 - DNA, 30 bp, Artificial Sequence
  Synthetic oligonucleotide
ggttcaacgcattctggtgctggaagagtt

SEQ ID NO: 116762 - DNA, 30 bp, Artificial Sequence
  Synthetic oligonucleotide
cgctgtgcaagacccgatcaactaagagtt

SEQ ID NO: 116763 - DNA, 30 bp, Artificial Sequence
  Synthetic oligonucleotide
ggacgaattatgcgacgaaagcatagagtt

SEQ ID NO: 116764 - DNA, 30 bp, Artificial Sequence
  Synthetic oligonucleotide
gtgttaagtgacgggagaaaatctagagtt

SEQ ID NO: 116765 - DNA, 30 bp, Artificial Sequence
  Synthetic oligonucleotide
gctagtgtgaaggctcacagagatcgagtt

SEQ ID NO: 116766 - DNA, 30 bp, Artificial Sequence
  Synthetic oligonucleotide
ttaccgggggcatgataggaggccggagtt

SEQ ID NO: 116767 - DNA, 30 bp, Artificial Sequence
  Synthetic oligonucleotide
acagcaggagcggaaggctttagcggagtt

SEQ ID NO: 116768 - DNA, 30 bp, Artificial Sequence
  Synthetic oligonucleotide
ccaacaagtgtgaaattatgcctttgagtt

SEQ ID NO: 116769 - DNA, 30 bp, Artificial Sequence
  Synthetic oligonucleotide
atagtcgataacaaaactgacctcatagtt

SEQ ID NO: 116770 - DNA, 30 bp, Artificial Sequence
  Synthetic oligonucleotide
acgggacgctaagagatcaccaaactagtt

SEQ ID NO: 116771 - DNA, 30 bp, Artificial Sequence
  Synthetic oligonucleotide
ggcgccagttggatcggaataggggtagtt

SEQ ID NO: 116772 - DNA, 30 bp, Artificial Sequence
  Synthetic oligonucleotide
tcgctactgctaagtgcgatctgattagtt

SEQ ID NO: 116773 - DNA, 30 bp, Artificial Sequence
  Synthetic oligonucleotide
ttaggggcgacaaatacataccacttagtt

SEQ ID NO: 116774 - DNA, 30 bp, Artificial Sequence
  Synthetic oligonucleotide
acggcaacggcatgactttaatacaacgtt

SEQ ID NO: 116775 - DNA, 30 bp, Artificial Sequence
  Synthetic oligonucleotide
tacatggtctatttgaaaacatgcaacgtt

SEQ ID NO: 116776 - DNA, 30 bp, Artificial Sequence
  Synthetic oligonucleotide
ggtcgaaagaaacgggctttcaataacgtt

SEQ ID NO: 116777 - DNA, 30 bp, Artificial Sequence
  Synthetic oligonucleotide
gtgggagactgttcattgtcgtatgacgtt

SEQ ID NO: 116778 - DNA, 30 bp, Artificial Sequence
  Synthetic oligonucleotide
ctgagctatacaagcatcgctaacaccgtt

SEQ ID NO: 116779 - DNA, 30 bp, Artificial Sequence
  Synthetic oligonucleotide
gggaaagtcagtaacgggtatcgcaccgtt

SEQ ID NO: 116780 - DNA, 30 bp, Artificial Sequence
  Synthetic oligonucleotide
gacaaaaggcatgaatcttaataccccgtt

SEQ ID NO: 116781 - DNA, 30 bp, Artificial Sequence
  Synthetic oligonucleotide
aagtgatagagtggccgagactagcccgtt

SEQ ID NO: 116782 - DNA, 30 bp, Artificial Sequence
  Synthetic oligonucleotide
agggccacagcgtattgtaggctctccgtt

SEQ ID NO: 116783 - DNA, 30 bp, Artificial Sequence
  Synthetic oligonucleotide
cgggaagcgatggtagcgtggacttccgtt

SEQ ID NO: 116784 - DNA, 30 bp, Artificial Sequence
  Synthetic oligonucleotide
tcaagcgcgctaggcgacaacgaccgcgtt

SEQ ID NO: 116785 - DNA, 30 bp, Artificial Sequence
  Synthetic oligonucleotide
ctagagtactacgttgtgggagatcgcgtt

SEQ ID NO: 116786 - DNA, 30 bp, Artificial Sequence
  Synthetic oligonucleotide
aagtgtgtggtctacggtcaagctggcgtt

SEQ ID NO: 116787 - DNA, 30 bp, Artificial Sequence
  Synthetic oligonucleotide
cacactaaaaatgacaggaccggctgcgtt

SEQ ID NO: 116788 - DNA, 30 bp, Artificial Sequence
  Synthetic oligonucleotide
agacagctctagaagtgaccgtagtgcgtt

SEQ ID NO: 116789 - DNA, 30 bp, Artificial Sequence
  Synthetic oligonucleotide
tgcggaggcgttcttaagactgtcctcgtt

SEQ ID NO: 116790 - DNA, 30 bp, Artificial Sequence
  Synthetic oligonucleotide
acaccgagctttgtaccggattccgtcgtt

SEQ ID NO: 116791 - DNA, 30 bp, Artificial Sequence
  Synthetic oligonucleotide
gaactacacggagaaggccgcatcgtcgtt

SEQ ID NO: 116792 - DNA, 30 bp, Artificial Sequence
  Synthetic oligonucleotide
gccggaacggatggaaaattggacttcgtt

SEQ ID NO: 116793 - DNA, 30 bp, Artificial Sequence
  Synthetic oligonucleotide
acaacaacgttaagatgttctgcgttcgtt

SEQ ID NO: 116794 - DNA, 30 bp, Artificial Sequence
  Synthetic oligonucleotide
aaagcgcgcacatcgcaaaaacttaaggtt

SEQ ID NO: 116795 - DNA, 30 bp, Artificial Sequence
  Synthetic oligonucleotide
tatggtacttgccatgggaggttcgaggtt

SEQ ID NO: 116796 - DNA, 30 bp, Artificial Sequence
  Synthetic oligonucleotide
tcaatatggagttgcactgacaatgaggtt

SEQ ID NO: 116797 - DNA, 30 bp, Artificial Sequence
  Synthetic oligonucleotide
ctaccgatccagctcgacaatccataggtt

SEQ ID NO: 116798 - DNA, 30 bp, Artificial Sequence
  Synthetic oligonucleotide
ggcaccattggcttgagtggaatgtaggtt

SEQ ID NO: 116799 - DNA, 30 bp, Artificial Sequence
  Synthetic oligonucleotide
gaatgtcagacaaggcgcggcgtgtaggtt

SEQ ID NO: 116800 - DNA, 30 bp, Artificial Sequence
  Synthetic oligonucleotide
gcgccgatcggtataaaggccaacccggtt

SEQ ID NO: 116801 - DNA, 30 bp, Artificial Sequence
  Synthetic oligonucleotide
ggaggcgaatgattcttttaatggccggtt

SEQ ID NO: 116802 - DNA, 30 bp, Artificial Sequence
  Synthetic oligonucleotide
aactcgcactgctagaaaggattggcggtt

SEQ ID NO: 116803 - DNA, 30 bp, Artificial Sequence
  Synthetic oligonucleotide
gcctgatactcgaacattgaatcgagggtt

SEQ ID NO: 116804 - DNA, 30 bp, Artificial Sequence
  Synthetic oligonucleotide
tcggacaacaagtagtgataaatgagggtt

SEQ ID NO: 116805 - DNA, 31 bp, Artificial Sequence
  Synthetic oligonucleotide
gttcaccacgagacgtctaggggctagggtt

SEQ ID NO: 116806 - DNA, 30 bp, Artificial Sequence
  Synthetic oligonucleotide
aaacaattaaagcacactggatcgcgggtt

SEQ ID NO: 116807 - DNA, 30 bp, Artificial Sequence
  Synthetic oligonucleotide
caaagaaaataactggaaacttaaggggtt

SEQ ID NO: 116808 - DNA, 31 bp, Artificial Sequence
  Synthetic oligonucleotide
cgcgaacagatggctgactcgcataggggtt

SEQ ID NO: 116809 - DNA, 30 bp, Artificial Sequence
  Synthetic oligonucleotide
gtgtgatccgatacagtttggtatggggtt

SEQ ID NO: 116810 - DNA, 30 bp, Artificial Sequence
  Synthetic oligonucleotide
cgtaccagaactgggccgggcaaatgggtt

SEQ ID NO: 116811 - DNA, 30 bp, Artificial Sequence
  Synthetic oligonucleotide
cggaaagtgtagctcgattatccgtgggtt

SEQ ID NO: 116812 - DNA, 30 bp, Artificial Sequence
  Synthetic oligonucleotide
gtgaagatcactaattactctcacatggtt

SEQ ID NO: 116813 - DNA, 30 bp, Artificial Sequence
  Synthetic oligonucleotide
acagggagttgggacactatggtgatggtt

SEQ ID NO: 116814 - DNA, 30 bp, Artificial Sequence
  Synthetic oligonucleotide
taaggtcgtacataccaagcagaactggtt

SEQ ID NO: 116815 - DNA, 30 bp, Artificial Sequence
  Synthetic oligonucleotide
caatcagggcagtcataaaatcgactggtt

SEQ ID NO: 116816 - DNA, 30 bp, Artificial Sequence
  Synthetic oligonucleotide
tcgaaattaaccgagggcttaatgctggtt

SEQ ID NO: 116817 - DNA, 30 bp, Artificial Sequence
  Synthetic oligonucleotide
ttaaccaggaggcgaattctctgagtggtt

SEQ ID NO: 116818 - DNA, 30 bp, Artificial Sequence
  Synthetic oligonucleotide
gactaagcgtgtggtagataacaattggtt

SEQ ID NO: 116819 - DNA, 30 bp, Artificial Sequence
  Synthetic oligonucleotide
caaagacatgctatgggaccaacattggtt

SEQ ID NO: 116820 - DNA, 30 bp, Artificial Sequence
  Synthetic oligonucleotide
agatgctgtacacgtaaggcccagttggtt

SEQ ID NO: 116821 - DNA, 30 bp, Artificial Sequence
  Synthetic oligonucleotide
ctcgtatcgggcgatacatcggcgttggtt

SEQ ID NO: 116822 - DNA, 30 bp, Artificial Sequence
  Synthetic oligonucleotide
ccagtcggacgcgaatcaagttaaaatgtt

SEQ ID NO: 116823 - DNA, 30 bp, Artificial Sequence
  Synthetic oligonucleotide
agagaaccgtatgtggttcaaagcaatgtt

SEQ ID NO: 116824 - DNA, 30 bp, Artificial Sequence
  Synthetic oligonucleotide
tgctatagagacagtgccacacctaatgtt

SEQ ID NO: 116825 - DNA, 30 bp, Artificial Sequence
  Synthetic oligonucleotide
ccttgggtagaaactggttagggtaatgtt

SEQ ID NO: 116826 - DNA, 30 bp, Artificial Sequence
  Synthetic oligonucleotide
tcagctagtcaaaccgaccaataccatgtt

SEQ ID NO: 116827 - DNA, 30 bp, Artificial Sequence
  Synthetic oligonucleotide
ctcgtcgatgactgagctagttcccatgtt

SEQ ID NO: 116828 - DNA, 30 bp, Artificial Sequence
  Synthetic oligonucleotide
caccgtcattcggagtggaacactcatgtt

SEQ ID NO: 116829 - DNA, 30 bp, Artificial Sequence
  Synthetic oligonucleotide
ttagactcgtaaaggtaatatgctgatgtt

SEQ ID NO: 116830 - DNA, 30 bp, Artificial Sequence
  Synthetic oligonucleotide
gatgtcgcgggaaagaatctaggatatgtt

SEQ ID NO: 116831 - DNA, 30 bp, Artificial Sequence
  Synthetic oligonucleotide
tacgtagtgcgggtaaggtaagattatgtt

SEQ ID NO: 116832 - DNA, 30 bp, Artificial Sequence
  Synthetic oligonucleotide
ggagaggcattcccttggcctcgcactgtt

SEQ ID NO: 116833 - DNA, 30 bp, Artificial Sequence
  Synthetic oligonucleotide
agaacgcgatcccccaacaaaagccctgtt

SEQ ID NO: 116834 - DNA, 30 bp, Artificial Sequence
  Synthetic oligonucleotide
cacggatgactataaccagttacagctgtt

SEQ ID NO: 116835 - DNA, 30 bp, Artificial Sequence
  Synthetic oligonucleotide
accgaacgactcgatcggattggcgctgtt

SEQ ID NO: 116836 - DNA, 30 bp, Artificial Sequence
  Synthetic oligonucleotide
tggatgataacgcattgttgtggggctgtt

SEQ ID NO: 116837 - DNA, 30 bp, Artificial Sequence
  Synthetic oligonucleotide
gatgcaattagaccagccaaaatcagtgtt

SEQ ID NO: 116838 - DNA, 30 bp, Artificial Sequence
  Synthetic oligonucleotide
aggtagtcccctgtctaactatagagtgtt

SEQ ID NO: 116839 - DNA, 30 bp, Artificial Sequence
  Synthetic oligonucleotide
caaaagaaggcactctcttgtgggagtgtt

SEQ ID NO: 116840 - DNA, 30 bp, Artificial Sequence
  Synthetic oligonucleotide
gggtaagctcgtacacgcctaaaacgtgtt

SEQ ID NO: 116841 - DNA, 30 bp, Artificial Sequence
  Synthetic oligonucleotide
tatacccaaaagactcaaaccacacgtgtt

SEQ ID NO: 116842 - DNA, 30 bp, Artificial Sequence
  Synthetic oligonucleotide
agggctggtttcttaggaagtatccgtgtt

SEQ ID NO: 116843 - DNA, 30 bp, Artificial Sequence
  Synthetic oligonucleotide
ggatagaacgatcatcctctatagcgtgtt

SEQ ID NO: 116844 - DNA, 30 bp, Artificial Sequence
  Synthetic oligonucleotide
cgtatacctcaggcatcttaatacggtgtt

SEQ ID NO: 116845 - DNA, 30 bp, Artificial Sequence
  Synthetic oligonucleotide
ttggtgtagtgatcgggatcgtcatgtgtt

SEQ ID NO: 116846 - DNA, 30 bp, Artificial Sequence
  Synthetic oligonucleotide
aaggactcggaaacacgaaggctctgtgtt

SEQ ID NO: 116847 - DNA, 31 bp, Artificial Sequence
  Synthetic oligonucleotide
tcttgcgggacaccatgttacctatattgtt

SEQ ID NO: 116848 - DNA, 30 bp, Artificial Sequence
  Synthetic oligonucleotide
acaccagcagcatcggggtcagcacttgtt

SEQ ID NO: 116849 - DNA, 30 bp, Artificial Sequence
  Synthetic oligonucleotide
ggtgagaccataagtagtttagatcttgtt

SEQ ID NO: 116850 - DNA, 30 bp, Artificial Sequence
  Synthetic oligonucleotide
tggcggcgctcgacacgcagctgggttgtt

SEQ ID NO: 116851 - DNA, 30 bp, Artificial Sequence
  Synthetic oligonucleotide
ttgcgagacaagaaggtttgaccgcaattt

SEQ ID NO: 116852 - DNA, 30 bp, Artificial Sequence
  Synthetic oligonucleotide
acgattactatatcgagagtccgtcaattt

SEQ ID NO: 116853 - DNA, 30 bp, Artificial Sequence
  Synthetic oligonucleotide
taactgcacggctagtgcgggccggaattt

SEQ ID NO: 116854 - DNA, 30 bp, Artificial Sequence
  Synthetic oligonucleotide
gggaactaaaaccaactatattctgaattt

SEQ ID NO: 116855 - DNA, 30 bp, Artificial Sequence
  Synthetic oligonucleotide
tctatctatgggagaaagtagacataattt

SEQ ID NO: 116856 - DNA, 30 bp, Artificial Sequence
  Synthetic oligonucleotide
gggaaaagacagtcatttgctctataattt

SEQ ID NO: 116857 - DNA, 30 bp, Artificial Sequence
  Synthetic oligonucleotide
gagctaaagttgattaccaataagccattt

SEQ ID NO: 116858 - DNA, 30 bp, Artificial Sequence
  Synthetic oligonucleotide
taggaaagttaggggacattgcttccattt

SEQ ID NO: 116859 - DNA, 39 bp, Artificial Sequence
  Synthetic oligonucleotide
tgtatgcgcggcgtgacctgaagaaacggttttccattt

SEQ ID NO: 116860 - DNA, 30 bp, Artificial Sequence
  Synthetic oligonucleotide
ctagggcagacctcagttaaggctagattt

SEQ ID NO: 116861 - DNA, 30 bp, Artificial Sequence
  Synthetic oligonucleotide
gggtaaaatgactgtgaataataccgattt

SEQ ID NO: 116862 - DNA, 30 bp, Artificial Sequence
  Synthetic oligonucleotide
agacactactcggacatgacctcccgattt

SEQ ID NO: 116863 - DNA, 30 bp, Artificial Sequence
  Synthetic oligonucleotide
ggtagacaccagtagtcccgaattcgattt

SEQ ID NO: 116864 - DNA, 30 bp, Artificial Sequence
  Synthetic oligonucleotide
ctagtggtcgtgggcagctacatcggattt

SEQ ID NO: 116865 - DNA, 30 bp, Artificial Sequence
  Synthetic oligonucleotide
gttaggcacatctagtatagcaagatattt

SEQ ID NO: 116866 - DNA, 30 bp, Artificial Sequence
  Synthetic oligonucleotide
gcgaactgggggtactaggcgattatattt

SEQ ID NO: 116867 - DNA, 30 bp, Artificial Sequence
  Synthetic oligonucleotide
acgaggggctattcgtctcgtatcgtattt

SEQ ID NO: 116868 - DNA, 30 bp, Artificial Sequence
  Synthetic oligonucleotide
agggcgtcggtgagaaagggaggaaacttt

SEQ ID NO: 116869 - DNA, 30 bp, Artificial Sequence
  Synthetic oligonucleotide
cgaattgcgtgtgacagcatgttcaacttt

SEQ ID NO: 116870 - DNA, 30 bp, Artificial Sequence
  Synthetic oligonucleotide
taacaaggtttagtaaagttggggaacttt

SEQ ID NO: 116871 - DNA, 30 bp, Artificial Sequence
  Synthetic oligonucleotide
cgtgctaaaacctcccatttactgaacttt

SEQ ID NO: 116872 - DNA, 30 bp, Artificial Sequence
  Synthetic oligonucleotide
tacgttacctgaccacaactaggtcacttt

SEQ ID NO: 116873 - DNA, 30 bp, Artificial Sequence
  Synthetic oligonucleotide
accgtattacaaggtctagcaaaatacttt

SEQ ID NO: 116874 - DNA, 30 bp, Artificial Sequence
  Synthetic oligonucleotide
acctatacaagcaaaaggaaaatatacttt

SEQ ID NO: 116875 - DNA, 30 bp, Artificial Sequence
  Synthetic oligonucleotide
cggacatggtttagtttggtgcctaccttt

SEQ ID NO: 116876 - DNA, 30 bp, Artificial Sequence
  Synthetic oligonucleotide
tgcgacccatcgtccataagtcttcccttt

SEQ ID NO: 116877 - DNA, 30 bp, Artificial Sequence
  Synthetic oligonucleotide
gagtaaaattcagatggacgtaacggcttt

SEQ ID NO: 116878 - DNA, 30 bp, Artificial Sequence
  Synthetic oligonucleotide
gggggttcagctccatcttggatactcttt

SEQ ID NO: 116879 - DNA, 30 bp, Artificial Sequence
  Synthetic oligonucleotide
gtcgatgttgaaatagtgacgtcagtcttt

SEQ ID NO: 116880 - DNA, 30 bp, Artificial Sequence
  Synthetic oligonucleotide
atcaaacagggtgtaatagggcggttcttt

SEQ ID NO: 116881 - DNA, 30 bp, Artificial Sequence
  Synthetic oligonucleotide
taagtaagcgtgcaaggagcttgcaagttt

SEQ ID NO: 116882 - DNA, 30 bp, Artificial Sequence
  Synthetic oligonucleotide
gcgagaagaaagcagtatggcagtaagttt

SEQ ID NO: 116883 - DNA, 30 bp, Artificial Sequence
  Synthetic oligonucleotide
cttaaaccataacacgcaatagcagagttt

SEQ ID NO: 116884 - DNA, 30 bp, Artificial Sequence
  Synthetic oligonucleotide
cgggttgtaggatttaaattagtagagttt

SEQ ID NO: 116885 - DNA, 30 bp, Artificial Sequence
  Synthetic oligonucleotide
cagtgtacacacgtggctggatgctagttt

SEQ ID NO: 116886 - DNA, 30 bp, Artificial Sequence
  Synthetic oligonucleotide
cgggagcccgcggcaacgacaagaacgttt

SEQ ID NO: 116887 - DNA, 30 bp, Artificial Sequence
  Synthetic oligonucleotide
ggctggggacaatgagaacaattaacgttt

SEQ ID NO: 116888 - DNA, 30 bp, Artificial Sequence
  Synthetic oligonucleotide
cactaaacccgatagacgaattccccgttt

SEQ ID NO: 116889 - DNA, 29 bp, Artificial Sequence
  Synthetic oligonucleotide
taggtgtggcaagttgcgggttgccgttt

SEQ ID NO: 116890 - DNA, 26 bp, Artificial Sequence
  Synthetic oligonucleotide
cacgagcgcaaggtgatttgccgttt

SEQ ID NO: 116891 - DNA, 30 bp, Artificial Sequence
  Synthetic oligonucleotide
acttgtcgacagggataagcgcgtccgttt

SEQ ID NO: 116892 - DNA, 30 bp, Artificial Sequence
  Synthetic oligonucleotide
gactcgcgattgtgacgaaaagatgcgttt

SEQ ID NO: 116893 - DNA, 30 bp, Artificial Sequence
  Synthetic oligonucleotide
gatgagaggtatgcgtgatgcccatcgttt

SEQ ID NO: 116894 - DNA, 30 bp, Artificial Sequence
  Synthetic oligonucleotide
gcataaaaccgacagctcgccgtaaggttt

SEQ ID NO: 116895 - DNA, 30 bp, Artificial Sequence
  Synthetic oligonucleotide
gtgcggcatccagcggttagagtgcggttt

SEQ ID NO: 116896 - DNA, 30 bp, Artificial Sequence
  Synthetic oligonucleotide
cgggaactattacgcgtactgctcgggttt

SEQ ID NO: 116897 - DNA, 30 bp, Artificial Sequence
  Synthetic oligonucleotide
ataagtatacactacgatacaggggggttt

SEQ ID NO: 116898 - DNA, 30 bp, Artificial Sequence
  Synthetic oligonucleotide
gctcagaagcggcaaaggtcgttgtggttt

SEQ ID NO: 116899 - DNA, 30 bp, Artificial Sequence
  Synthetic oligonucleotide
gacagctttcgcgaaccactgaagatgttt

SEQ ID NO: 116900 - DNA, 30 bp, Artificial Sequence
  Synthetic oligonucleotide
cggtagccccggggcatggcaacactgttt

SEQ ID NO: 116901 - DNA, 30 bp, Artificial Sequence
  Synthetic oligonucleotide
aagcgaaccgaacgtgtaggcaggctgttt

SEQ ID NO: 116902 - DNA, 30 bp, Artificial Sequence
  Synthetic oligonucleotide
tactcgtaccagagtggggaacgggtgttt

SEQ ID NO: 116903 - DNA, 30 bp, Artificial Sequence
  Synthetic oligonucleotide
aagggtggcgggcacctcttaaatttgttt

SEQ ID NO: 116904 - DNA, 30 bp, Artificial Sequence
  Synthetic oligonucleotide
tgaattagagaagacatagctcatcatttt

SEQ ID NO: 116905 - DNA, 30 bp, Artificial Sequence
  Synthetic oligonucleotide
acagtgcatgctgtctgactgaacgatttt

SEQ ID NO: 116906 - DNA, 31 bp, Artificial Sequence
  Synthetic oligonucleotide
acacacacagtttgatcaacttaacgatttt

SEQ ID NO: 116907 - DNA, 30 bp, Artificial Sequence
  Synthetic oligonucleotide
acggtacccgtggcatagagtcactatttt

SEQ ID NO: 116908 - DNA, 30 bp, Artificial Sequence
  Synthetic oligonucleotide
gtagcgagggtattctgtgttgcctatttt

SEQ ID NO: 116909 - DNA, 30 bp, Artificial Sequence
  Synthetic oligonucleotide
cgggggcaggggacgtacaaaacttatttt

SEQ ID NO: 116910 - DNA, 30 bp, Artificial Sequence
  Synthetic oligonucleotide
gacggggaatgcccaataacttacactttt

SEQ ID NO: 116911 - DNA, 30 bp, Artificial Sequence
  Synthetic oligonucleotide
gggcggtgtaacaaagggcatactactttt

SEQ ID NO: 116912 - DNA, 30 bp, Artificial Sequence
  Synthetic oligonucleotide
gggctgcacacctagagtgcttcgcttttt

SEQ ID NO: 116913 - DNA, 30 bp, Artificial Sequence
  Synthetic oligonucleotide
cgtagtgctcgatcatacttggtatttttt

SEQ ID NO: 116914 - DNA, 30 bp, Artificial Sequence
  Synthetic oligonucleotide
gttaagagagatcgtcaacagaccaaaaaa

SEQ ID NO: 116915 - DNA, 30 bp, Artificial Sequence
  Synthetic oligonucleotide
tggctcgcgactgaagttgggtccaaaaaa

SEQ ID NO: 116916 - DNA, 30 bp, Artificial Sequence
  Synthetic oligonucleotide
ctattggacagcagttacaatcaccaaaaa

SEQ ID NO: 116917 - DNA, 30 bp, Artificial Sequence
  Synthetic oligonucleotide
cgcattggctgcccacaggaattgcaaaaa

SEQ ID NO: 116918 - DNA, 30 bp, Artificial Sequence
  Synthetic oligonucleotide
tacaatttgccggcggacaacactcaaaaa

SEQ ID NO: 116919 - DNA, 30 bp, Artificial Sequence
  Synthetic oligonucleotide
aacgtaccggcggacctggcctcagaaaaa

SEQ ID NO: 116920 - DNA, 30 bp, Artificial Sequence
  Synthetic oligonucleotide
cgtagtatcggcgtacgctagaccgaaaaa

SEQ ID NO: 116921 - DNA, 30 bp, Artificial Sequence
  Synthetic oligonucleotide
gcgacgtcaacaaaaacagccggggaaaaa

SEQ ID NO: 116922 - DNA, 30 bp, Artificial Sequence
  Synthetic oligonucleotide
ctaggccgcaatcgcggatgtgtggaaaaa

SEQ ID NO: 116923 - DNA, 30 bp, Artificial Sequence
  Synthetic oligonucleotide
tgacgggatccgaactggatcagataaaaa

SEQ ID NO: 116924 - DNA, 30 bp, Artificial Sequence
  Synthetic oligonucleotide
tgggcgtatatcagtttgccagcctaaaaa

SEQ ID NO: 116925 - DNA, 30 bp, Artificial Sequence
  Synthetic oligonucleotide
cgagttacgccatcttgcagcgcctaaaaa

SEQ ID NO: 116926 - DNA, 30 bp, Artificial Sequence
  Synthetic oligonucleotide
tagtaccggaagcgctatggtcgctaaaaa

SEQ ID NO: 116927 - DNA, 30 bp, Artificial Sequence
  Synthetic oligonucleotide
aggcaatgccggattatctaagattaaaaa

SEQ ID NO: 116928 - DNA, 30 bp, Artificial Sequence
  Synthetic oligonucleotide
acataggacaccgggcagagctcgacaaaa

SEQ ID NO: 116929 - DNA, 30 bp, Artificial Sequence
  Synthetic oligonucleotide
ggcgtagacacgagagcccacgatacaaaa

SEQ ID NO: 116930 - DNA, 30 bp, Artificial Sequence
  Synthetic oligonucleotide
actgacgggctgtccgtaccgtaaccaaaa

SEQ ID NO: 116931 - DNA, 30 bp, Artificial Sequence
  Synthetic oligonucleotide
agagtgcgctcaaggacccgtttcgcaaaa

SEQ ID NO: 116932 - DNA, 30 bp, Artificial Sequence
  Synthetic oligonucleotide
aacacgcaagttatcgcagcgacggcaaaa

SEQ ID NO: 116933 - DNA, 30 bp, Artificial Sequence
  Synthetic oligonucleotide
gtccgggtaggagaccccctgttggcaaaa

SEQ ID NO: 116934 - DNA, 30 bp, Artificial Sequence
  Synthetic oligonucleotide
ctgtgcccggtgaagtgaacaattgcaaaa

SEQ ID NO: 116935 - DNA, 30 bp, Artificial Sequence
  Synthetic oligonucleotide
catagacaccaaggatttgaatactcaaaa

SEQ ID NO: 116936 - DNA, 30 bp, Artificial Sequence
  Synthetic oligonucleotide
gggggagatgcgactttcgacgtctcaaaa

SEQ ID NO: 116937 - DNA, 30 bp, Artificial Sequence
  Synthetic oligonucleotide
tccattcaaggaaggagtcggatgtcaaaa

SEQ ID NO: 116938 - DNA, 30 bp, Artificial Sequence
  Synthetic oligonucleotide
taaatgcggggtggcagtgcgctccgaaaa

SEQ ID NO: 116939 - DNA, 30 bp, Artificial Sequence
  Synthetic oligonucleotide
tgaggcagataacagatgggcggtcgaaaa

SEQ ID NO: 116940 - DNA, 30 bp, Artificial Sequence
  Synthetic oligonucleotide
ttgactaaattcacgggagcactaggaaaa

SEQ ID NO: 116941 - DNA, 30 bp, Artificial Sequence
  Synthetic oligonucleotide
gcagatactgtagatcttggaaagggaaaa

SEQ ID NO: 116942 - DNA, 30 bp, Artificial Sequence
  Synthetic oligonucleotide
gtcactgctattacatgtgccaagggaaaa

SEQ ID NO: 116943 - DNA, 30 bp, Artificial Sequence
  Synthetic oligonucleotide
cactagccctagtcaggtattaagggaaaa

SEQ ID NO: 116944 - DNA, 30 bp, Artificial Sequence
  Synthetic oligonucleotide
gacgtgatactcgcattcaattagggaaaa

SEQ ID NO: 116945 - DNA, 30 bp, Artificial Sequence
  Synthetic oligonucleotide
accaggcttaaccgacccactaggggaaaa

SEQ ID NO: 116946 - DNA, 30 bp, Artificial Sequence
  Synthetic oligonucleotide
ggccgcagccgactagcaaatcggggaaaa

SEQ ID NO: 116947 - DNA, 30 bp, Artificial Sequence
  Synthetic oligonucleotide
gcggttggtcaaggcccgggagatggaaaa

SEQ ID NO: 116948 - DNA, 30 bp, Artificial Sequence
  Synthetic oligonucleotide
agaatacgtctttcgtgaaagggtggaaaa

SEQ ID NO: 116949 - DNA, 30 bp, Artificial Sequence
  Synthetic oligonucleotide
aagaccagccggtgcgagcggattggaaaa

SEQ ID NO: 116950 - DNA, 30 bp, Artificial Sequence
  Synthetic oligonucleotide
gttggcactgcatacttgtggatatgaaaa

SEQ ID NO: 116951 - DNA, 30 bp, Artificial Sequence
  Synthetic oligonucleotide
gtactgcgccgcctgacccagggctgaaaa

SEQ ID NO: 116952 - DNA, 30 bp, Artificial Sequence
  Synthetic oligonucleotide
gggaatagaaagtagaatgaatgctgaaaa

SEQ ID NO: 116953 - DNA, 30 bp, Artificial Sequence
  Synthetic oligonucleotide
agctgttagctgcctcttagagcgtgaaaa

SEQ ID NO: 116954 - DNA, 30 bp, Artificial Sequence
  Synthetic oligonucleotide
aactataatcaaagcacggtagattgaaaa

SEQ ID NO: 116955 - DNA, 30 bp, Artificial Sequence
  Synthetic oligonucleotide
atacgccacagcaagataaatcgttgaaaa

SEQ ID NO: 116956 - DNA, 30 bp, Artificial Sequence
  Synthetic oligonucleotide
tcataaccgcatgagttaggggaaataaaa

SEQ ID NO: 116957 - DNA, 30 bp, Artificial Sequence
  Synthetic oligonucleotide
cgaccgtcccagccacgcccgtgcataaaa

SEQ ID NO: 116958 - DNA, 30 bp, Artificial Sequence
  Synthetic oligonucleotide
actggtgggctggcgttccctgagataaaa

SEQ ID NO: 116959 - DNA, 30 bp, Artificial Sequence
  Synthetic oligonucleotide
aactcacaggaagcagagagatagataaaa

SEQ ID NO: 116960 - DNA, 30 bp, Artificial Sequence
  Synthetic oligonucleotide
acggttccatcggaagcctccatgataaaa

SEQ ID NO: 116961 - DNA, 30 bp, Artificial Sequence
  Synthetic oligonucleotide
gaggagggccccaaggcgctgagtataaaa

SEQ ID NO: 116962 - DNA, 30 bp, Artificial Sequence
  Synthetic oligonucleotide
atagaaaagcacctaggccgtctcgtaaaa

SEQ ID NO: 116963 - DNA, 30 bp, Artificial Sequence
  Synthetic oligonucleotide
cggcaaggagggaggcgccattgggtaaaa

SEQ ID NO: 116964 - DNA, 30 bp, Artificial Sequence
  Synthetic oligonucleotide
gttggcatggaaacagtagtggatgtaaaa

SEQ ID NO: 116965 - DNA, 30 bp, Artificial Sequence
  Synthetic oligonucleotide
gcgtataggagaaatccgaagggtgtaaaa

SEQ ID NO: 116966 - DNA, 30 bp, Artificial Sequence
  Synthetic oligonucleotide
ccgggcttggtacggtctatagaattaaaa

SEQ ID NO: 116967 - DNA, 30 bp, Artificial Sequence
  Synthetic oligonucleotide
caggagtcacaggacacaggagcattaaaa

SEQ ID NO: 116968 - DNA, 30 bp, Artificial Sequence
  Synthetic oligonucleotide
tactaagggcatactcaggatggattaaaa

SEQ ID NO: 116969 - DNA, 30 bp, Artificial Sequence
  Synthetic oligonucleotide
agggaaggaccctgataacggtccttaaaa

SEQ ID NO: 116970 - DNA, 30 bp, Artificial Sequence
  Synthetic oligonucleotide
ccgaacgtgtatcacaacctcttgttaaaa

SEQ ID NO: 116971 - DNA, 30 bp, Artificial Sequence
  Synthetic oligonucleotide
cgagttgcagggcaatgaaactgccacaaa

SEQ ID NO: 116972 - DNA, 30 bp, Artificial Sequence
  Synthetic oligonucleotide
agctacaccatccattcaggattccacaaa

SEQ ID NO: 116973 - DNA, 31 bp, Artificial Sequence
  Synthetic oligonucleotide
taatgtcaatgacttcacggggggtcacaaa

SEQ ID NO: 116974 - DNA, 30 bp, Artificial Sequence
  Synthetic oligonucleotide
gccttgtgaaacttaaattcagaagacaaa

SEQ ID NO: 116975 - DNA, 30 bp, Artificial Sequence
  Synthetic oligonucleotide
tagcgcttgagcggagcgagccacgacaaa

SEQ ID NO: 116976 - DNA, 30 bp, Artificial Sequence
  Synthetic oligonucleotide
tccggtaggctggcgacgctcgaggacaaa

SEQ ID NO: 116977 - DNA, 30 bp, Artificial Sequence
  Synthetic oligonucleotide
gaggtcattattaacgttgctgtggacaaa

SEQ ID NO: 116978 - DNA, 30 bp, Artificial Sequence
  Synthetic oligonucleotide
gtggtagtcagtgaattccaacgtgacaaa

SEQ ID NO: 116979 - DNA, 30 bp, Artificial Sequence
  Synthetic oligonucleotide
gaaggtgtgtgccgtatgcgagactacaaa

SEQ ID NO: 116980 - DNA, 30 bp, Artificial Sequence
  Synthetic oligonucleotide
cgcatggacagctgcaagcaatactacaaa

SEQ ID NO: 116981 - DNA, 30 bp, Artificial Sequence
  Synthetic oligonucleotide
gccgattcttgggcttgaggaatctacaaa

SEQ ID NO: 116982 - DNA, 30 bp, Artificial Sequence
  Synthetic oligonucleotide
tggggaccttcatatgtcgaatggtacaaa

SEQ ID NO: 116983 - DNA, 30 bp, Artificial Sequence
  Synthetic oligonucleotide
tgagcttattcgtcaagcggaaccaccaaa

SEQ ID NO: 116984 - DNA, 30 bp, Artificial Sequence
  Synthetic oligonucleotide
gcctgcagagcccatatgcggcccaccaaa

SEQ ID NO: 116985 - DNA, 30 bp, Artificial Sequence
  Synthetic oligonucleotide
ttgtgcgcttccgcgggtgttcgtcccaaa

SEQ ID NO: 116986 - DNA, 30 bp, Artificial Sequence
  Synthetic oligonucleotide
cgggcatcactgcaacagcctagggccaaa

SEQ ID NO: 116987 - DNA, 30 bp, Artificial Sequence
  Synthetic oligonucleotide
tgagagtaattacatagacgtactgccaaa

SEQ ID NO: 116988 - DNA, 30 bp, Artificial Sequence
  Synthetic oligonucleotide
tccctacgtactcttatcgtgtttgccaaa

SEQ ID NO: 116989 - DNA, 30 bp, Artificial Sequence
  Synthetic oligonucleotide
ccactcgtggcctatatggcgacctccaaa

SEQ ID NO: 116990 - DNA, 30 bp, Artificial Sequence
  Synthetic oligonucleotide
actagctgcatcaaaattgaaaacagcaaa

SEQ ID NO: 116991 - DNA, 30 bp, Artificial Sequence
  Synthetic oligonucleotide
atctcatcacacgccgtgtcagggagcaaa

SEQ ID NO: 116992 - DNA, 30 bp, Artificial Sequence
  Synthetic oligonucleotide
ggggcaggtcatgatcgggatatgagcaaa

SEQ ID NO: 116993 - DNA, 30 bp, Artificial Sequence
  Synthetic oligonucleotide
tggagagaggaagcgacgactggtagcaaa

SEQ ID NO: 116994 - DNA, 30 bp, Artificial Sequence
  Synthetic oligonucleotide
tgcgtacgtgtaaggatactaatacgcaaa

SEQ ID NO: 116995 - DNA, 30 bp, Artificial Sequence
  Synthetic oligonucleotide
aactgtaaggatcggcagattacgcgcaaa

SEQ ID NO: 116996 - DNA, 30 bp, Artificial Sequence
  Synthetic oligonucleotide
tctacgagaactgtcccgctagctcgcaaa

SEQ ID NO: 116997 - DNA, 30 bp, Artificial Sequence
  Synthetic oligonucleotide
acaaggacgtgatggacagtcagtcgcaaa

SEQ ID NO: 116998 - DNA, 30 bp, Artificial Sequence
  Synthetic oligonucleotide
aaagcatgaagcaaacgaacataaggcaaa

SEQ ID NO: 116999 - DNA, 30 bp, Artificial Sequence
  Synthetic oligonucleotide
gccggtactgtacagatcaggtatggcaaa

SEQ ID NO: 117000 - DNA, 30 bp, Artificial Sequence
  Synthetic oligonucleotide
tgacggttaagctccgtcgagactggcaaa

SEQ ID NO: 117001 - DNA, 30 bp, Artificial Sequence
  Synthetic oligonucleotide
agaccacgcaaattacgaatctctggcaaa

SEQ ID NO: 117002 - DNA, 30 bp, Artificial Sequence
  Synthetic oligonucleotide
gcgattggggctatcgtgctgtaatgcaaa

SEQ ID NO: 117003 - DNA, 30 bp, Artificial Sequence
  Synthetic oligonucleotide
atccttcactaaatatgagtaacatgcaaa

SEQ ID NO: 117004 - DNA, 30 bp, Artificial Sequence
  Synthetic oligonucleotide
atgtctcaaatagataaggctggatgcaaa

SEQ ID NO: 117005 - DNA, 30 bp, Artificial Sequence
  Synthetic oligonucleotide
cgggttcgatatatgtagcgcaactgcaaa

SEQ ID NO: 117006 - DNA, 29 bp, Artificial Sequence
  Synthetic oligonucleotide
ggagcacaggcacaagaagccgctgcaaa

SEQ ID NO: 117007 - DNA, 30 bp, Artificial Sequence
  Synthetic oligonucleotide
cgagggcaactaacgctatggatgtgcaaa

SEQ ID NO: 117008 - DNA, 30 bp, Artificial Sequence
  Synthetic oligonucleotide
tgcacaagtgacacattagataaaatcaaa

SEQ ID NO: 117009 - DNA, 30 bp, Artificial Sequence
  Synthetic oligonucleotide
taccggaatctatacataagagcaatcaaa

SEQ ID NO: 117010 - DNA, 30 bp, Artificial Sequence
  Synthetic oligonucleotide
atacgggagagtctcggaatacatatcaaa

SEQ ID NO: 117011 - DNA, 30 bp, Artificial Sequence
  Synthetic oligonucleotide
cgggtcacgtcaactgcgctgcagctcaaa

SEQ ID NO: 117012 - DNA, 30 bp, Artificial Sequence
  Synthetic oligonucleotide
cgctacgcgaatacccaaaacgaggtcaaa

SEQ ID NO: 117013 - DNA, 30 bp, Artificial Sequence
  Synthetic oligonucleotide
aggctcagtcataattcacattaggtcaaa

SEQ ID NO: 117014 - DNA, 30 bp, Artificial Sequence
  Synthetic oligonucleotide
tgtaccgacacccaccatgagctggtcaaa

SEQ ID NO: 117015 - DNA, 30 bp, Artificial Sequence
  Synthetic oligonucleotide
atggcgtggggtcgactacctaatgtcaaa

SEQ ID NO: 117016 - DNA, 30 bp, Artificial Sequence
  Synthetic oligonucleotide
ttaggcctaaagcgtcgggtttctgtcaaa

SEQ ID NO: 117017 - DNA, 30 bp, Artificial Sequence
  Synthetic oligonucleotide
gcccacatgagcgagcaacagagtgtcaaa

SEQ ID NO: 117018 - DNA, 30 bp, Artificial Sequence
  Synthetic oligonucleotide
ggaaaagcaaaccataatgtaattgtcaaa

SEQ ID NO: 117019 - DNA, 30 bp, Artificial Sequence
  Synthetic oligonucleotide
catacctaacctacccaatgccttgtcaaa

SEQ ID NO: 117020 - DNA, 30 bp, Artificial Sequence
  Synthetic oligonucleotide
tgtcgaatggcatcctaacacctcttcaaa

SEQ ID NO: 117021 - DNA, 30 bp, Artificial Sequence
  Synthetic oligonucleotide
cggcctttgcgaaatcaaatgttcttcaaa

SEQ ID NO: 117022 - DNA, 30 bp, Artificial Sequence
  Synthetic oligonucleotide
gctctataaggcgtgggttgagggaagaaa

SEQ ID NO: 117023 - DNA, 30 bp, Artificial Sequence
  Synthetic oligonucleotide
aaagggcgcggcatcgaggaagtacagaaa

SEQ ID NO: 117024 - DNA, 30 bp, Artificial Sequence
  Synthetic oligonucleotide
ttcgggcgcggacggatgtgtaagcagaaa

SEQ ID NO: 117025 - DNA, 30 bp, Artificial Sequence
  Synthetic oligonucleotide
tctgacagacgatggctagagtggcagaaa

SEQ ID NO: 117026 - DNA, 30 bp, Artificial Sequence
  Synthetic oligonucleotide
gacgatcaactagatgtcaatgaagagaaa

SEQ ID NO: 117027 - DNA, 30 bp, Artificial Sequence
  Synthetic oligonucleotide
taggcgcgactgaacattctcaaggagaaa

SEQ ID NO: 117028 - DNA, 30 bp, Artificial Sequence
  Synthetic oligonucleotide
gataaaggcagcagggagacaatggagaaa

SEQ ID NO: 117029 - DNA, 30 bp, Artificial Sequence
  Synthetic oligonucleotide
aagtttttcgcaagacaaaccactgagaaa

SEQ ID NO: 117030 - DNA, 30 bp, Artificial Sequence
  Synthetic oligonucleotide
aactcaccaccccatggtacacgttagaaa

SEQ ID NO: 117031 - DNA, 30 bp, Artificial Sequence
  Synthetic oligonucleotide
attctcggaataaggttaaaaaccacgaaa

SEQ ID NO: 117032 - DNA, 30 bp, Artificial Sequence
  Synthetic oligonucleotide
gtcgatcaaagcccgtaagaggatacgaaa

SEQ ID NO: 117033 - DNA, 30 bp, Artificial Sequence
  Synthetic oligonucleotide
cttgagtagatggtagggagttctacgaaa

SEQ ID NO: 117034 - DNA, 30 bp, Artificial Sequence
  Synthetic oligonucleotide
gtgcggagaaggacgtatgagtgtacgaaa

SEQ ID NO: 117035 - DNA, 30 bp, Artificial Sequence
  Synthetic oligonucleotide
tcttaagaacgcatcggggaatatccgaaa

SEQ ID NO: 117036 - DNA, 30 bp, Artificial Sequence
  Synthetic oligonucleotide
tgctgctgtaaggtagggataaaagcgaaa

SEQ ID NO: 117037 - DNA, 30 bp, Artificial Sequence
  Synthetic oligonucleotide
gccggcgataattaatggcgctaagcgaaa

SEQ ID NO: 117038 - DNA, 30 bp, Artificial Sequence
  Synthetic oligonucleotide
gagggtgattcttggtgcaccttagcgaaa

SEQ ID NO: 117039 - DNA, 30 bp, Artificial Sequence
  Synthetic oligonucleotide
cacaagccacactatcgatatttagcgaaa

SEQ ID NO: 117040 - DNA, 30 bp, Artificial Sequence
  Synthetic oligonucleotide
acaaaaccacgggcgacggctggcgcgaaa

SEQ ID NO: 117041 - DNA, 30 bp, Artificial Sequence
  Synthetic oligonucleotide
acagcggaaagtaggatgaatgcggcgaaa

SEQ ID NO: 117042 - DNA, 30 bp, Artificial Sequence
  Synthetic oligonucleotide
tgttcagatgtatcgtatccgcatgcgaaa

SEQ ID NO: 117043 - DNA, 30 bp, Artificial Sequence
  Synthetic oligonucleotide
tgaagtagctagatagtaatgggtgcgaaa

SEQ ID NO: 117044 - DNA, 30 bp, Artificial Sequence
  Synthetic oligonucleotide
agccatgagatgcaggtgtgttgttcgaaa

SEQ ID NO: 117045 - DNA, 30 bp, Artificial Sequence
  Synthetic oligonucleotide
cgtagtggcatctacaagtctcagaggaaa

SEQ ID NO: 117046 - DNA, 30 bp, Artificial Sequence
  Synthetic oligonucleotide
gaagccccgactcgagaggttgagaggaaa

SEQ ID NO: 117047 - DNA, 30 bp, Artificial Sequence
  Synthetic oligonucleotide
agggaagcgcaggggtttcagactaggaaa

SEQ ID NO: 117048 - DNA, 30 bp, Artificial Sequence
  Synthetic oligonucleotide
aagttacctagcgcggatataaagcggaaa

SEQ ID NO: 117049 - DNA, 30 bp, Artificial Sequence
  Synthetic oligonucleotide
tagtaaccgtactacacttcaaggcggaaa

SEQ ID NO: 117050 - DNA, 30 bp, Artificial Sequence
  Synthetic oligonucleotide
ggaacaggactttgattatgttggcggaaa

SEQ ID NO: 117051 - DNA, 30 bp, Artificial Sequence
  Synthetic oligonucleotide
tatgagctgggcaccagtaaggtcgggaaa

SEQ ID NO: 117052 - DNA, 30 bp, Artificial Sequence
  Synthetic oligonucleotide
tgtgccaagctgaacaggttgagatggaaa

SEQ ID NO: 117053 - DNA, 30 bp, Artificial Sequence
  Synthetic oligonucleotide
ccacggagataacgacttctgtgttggaaa

SEQ ID NO: 117054 - DNA, 30 bp, Artificial Sequence
  Synthetic oligonucleotide
ttcgctagatatgaacttgaattttggaaa

SEQ ID NO: 117055 - DNA, 30 bp, Artificial Sequence
  Synthetic oligonucleotide
ttgtcgatcgaaccagtcccaaacatgaaa

SEQ ID NO: 117056 - DNA, 30 bp, Artificial Sequence
  Synthetic oligonucleotide
accaggcaaatagggcgttatcctatgaaa

SEQ ID NO: 117057 - DNA, 30 bp, Artificial Sequence
  Synthetic oligonucleotide
cggcacagatctgcaaaggtgtaactgaaa

SEQ ID NO: 117058 - DNA, 30 bp, Artificial Sequence
  Synthetic oligonucleotide
caccgtgcataaaattcggttagtctgaaa

SEQ ID NO: 117059 - DNA, 30 bp, Artificial Sequence
  Synthetic oligonucleotide
tagtaggaagtgaccactagcattctgaaa

SEQ ID NO: 117060 - DNA, 30 bp, Artificial Sequence
  Synthetic oligonucleotide
gtagtatgggttcctgatcaaaaagtgaaa

SEQ ID NO: 117061 - DNA, 30 bp, Artificial Sequence
  Synthetic oligonucleotide
tatcaagaaaatgaaatggcttcagtgaaa

SEQ ID NO: 117062 - DNA, 30 bp, Artificial Sequence
  Synthetic oligonucleotide
atagtgcaacccctagcgctcgacgtgaaa

SEQ ID NO: 117063 - DNA, 30 bp, Artificial Sequence
  Synthetic oligonucleotide
gtgcacagtacagagtaaaatcgggtgaaa

SEQ ID NO: 117064 - DNA, 30 bp, Artificial Sequence
  Synthetic oligonucleotide
cggttgaacaaccacgcacaacgattgaaa

SEQ ID NO: 117065 - DNA, 30 bp, Artificial Sequence
  Synthetic oligonucleotide
tctgcggaaatagtattatcgcacttgaaa

SEQ ID NO: 117066 - DNA, 30 bp, Artificial Sequence
  Synthetic oligonucleotide
aggctctagaagatctagatgccaaataaa

SEQ ID NO: 117067 - DNA, 30 bp, Artificial Sequence
  Synthetic oligonucleotide
ccgtgacacgaattgtgcatttccaataaa

SEQ ID NO: 117068 - DNA, 30 bp, Artificial Sequence
  Synthetic oligonucleotide
tcggtactgtgtcagaactccggccataaa

SEQ ID NO: 117069 - DNA, 30 bp, Artificial Sequence
  Synthetic oligonucleotide
cgatcgttagcgggcgctgattgagataaa

SEQ ID NO: 117070 - DNA, 30 bp, Artificial Sequence
  Synthetic oligonucleotide
gaccgatttgcggttgtgaacgtagataaa

SEQ ID NO: 117071 - DNA, 30 bp, Artificial Sequence
  Synthetic oligonucleotide
tccttagcctcagtaaagaaaaacgataaa

SEQ ID NO: 117072 - DNA, 30 bp, Artificial Sequence
  Synthetic oligonucleotide
ttaggacaggctgtgcgctgaaccgataaa

SEQ ID NO: 117073 - DNA, 30 bp, Artificial Sequence
  Synthetic oligonucleotide
aggaaggtgacagggccacgagccgataaa

SEQ ID NO: 117074 - DNA, 30 bp, Artificial Sequence
  Synthetic oligonucleotide
gtgggtaacaaacgttccagtatcgataaa

SEQ ID NO: 117075 - DNA, 30 bp, Artificial Sequence
  Synthetic oligonucleotide
agcaacatcctcgcgtgcacttcggataaa

SEQ ID NO: 117076 - DNA, 30 bp, Artificial Sequence
  Synthetic oligonucleotide
tacaataatgacatacggtagcctgataaa

SEQ ID NO: 117077 - DNA, 30 bp, Artificial Sequence
  Synthetic oligonucleotide
ccataactcacaaaactgtatcaatataaa

SEQ ID NO: 117078 - DNA, 30 bp, Artificial Sequence
  Synthetic oligonucleotide
cgtcgcacggaatgcaacgcataatataaa

SEQ ID NO: 117079 - DNA, 30 bp, Artificial Sequence
  Synthetic oligonucleotide
cagggctgttagatcgggcattcgtataaa

SEQ ID NO: 117080 - DNA, 30 bp, Artificial Sequence
  Synthetic oligonucleotide
gccacgttctggctccagaaacaaactaaa

SEQ ID NO: 117081 - DNA, 30 bp, Artificial Sequence
  Synthetic oligonucleotide
gcattacagaacatagttcagtgcactaaa

SEQ ID NO: 117082 - DNA, 30 bp, Artificial Sequence
  Synthetic oligonucleotide
ataaagaggaatcggtacgtaaggactaaa

SEQ ID NO: 117083 - DNA, 30 bp, Artificial Sequence
  Synthetic oligonucleotide
cctaacatgagatacatcggcccacctaaa

SEQ ID NO: 117084 - DNA, 31 bp, Artificial Sequence
  Synthetic oligonucleotide
gtggtgcgagatatggctgcgcgtacctaaa

SEQ ID NO: 117085 - DNA, 30 bp, Artificial Sequence
  Synthetic oligonucleotide
caaatatcagtcttacgttcctgccctaaa

SEQ ID NO: 117086 - DNA, 30 bp, Artificial Sequence
  Synthetic oligonucleotide
taaggttacatcctgctgcgagtgcctaaa

SEQ ID NO: 117087 - DNA, 30 bp, Artificial Sequence
  Synthetic oligonucleotide
acccaggctcggagcggtaagtcagctaaa

SEQ ID NO: 117088 - DNA, 30 bp, Artificial Sequence
  Synthetic oligonucleotide
cgttacatcaatgttagaatgcgcgctaaa

SEQ ID NO: 117089 - DNA, 30 bp, Artificial Sequence
  Synthetic oligonucleotide
aaggtgatgcactcggccccacaatctaaa

SEQ ID NO: 117090 - DNA, 30 bp, Artificial Sequence
  Synthetic oligonucleotide
tgcgacatcgggcacgctctccaatctaaa

SEQ ID NO: 117091 - DNA, 30 bp, Artificial Sequence
  Synthetic oligonucleotide
tcgacaacgcatattgtgcaaacctctaaa

SEQ ID NO: 117092 - DNA, 30 bp, Artificial Sequence
  Synthetic oligonucleotide
gtaaaaaagcagtgggcatgttagtctaaa

SEQ ID NO: 117093 - DNA, 30 bp, Artificial Sequence
  Synthetic oligonucleotide
taaggccaatgggcgctcagccggtctaaa

SEQ ID NO: 117094 - DNA, 30 bp, Artificial Sequence
  Synthetic oligonucleotide
atgcttgcgtaaatcgtacacgggagtaaa

SEQ ID NO: 117095 - DNA, 30 bp, Artificial Sequence
  Synthetic oligonucleotide
agtgaaatgccaaatcgcatgctgagtaaa

SEQ ID NO: 117096 - DNA, 30 bp, Artificial Sequence
  Synthetic oligonucleotide
acaccatgggtttgaccaatagttagtaaa

SEQ ID NO: 117097 - DNA, 30 bp, Artificial Sequence
  Synthetic oligonucleotide
gacacgagcgactattaaccttttagtaaa

SEQ ID NO: 117098 - DNA, 30 bp, Artificial Sequence
  Synthetic oligonucleotide
gtaagataatggccgactgggtgacgtaaa

SEQ ID NO: 117099 - DNA, 30 bp, Artificial Sequence
  Synthetic oligonucleotide
cgggcggggagcatacaggtgcttcgtaaa

SEQ ID NO: 117100 - DNA, 30 bp, Artificial Sequence
  Synthetic oligonucleotide
tcgagcatccgaatccgattgaccggtaaa

SEQ ID NO: 117101 - DNA, 30 bp, Artificial Sequence
  Synthetic oligonucleotide
taggcccagaggaacggaaccacgggtaaa

SEQ ID NO: 117102 - DNA, 30 bp, Artificial Sequence
  Synthetic oligonucleotide
ggtcgttcagcggtggagaatccgggtaaa

SEQ ID NO: 117103 - DNA, 30 bp, Artificial Sequence
  Synthetic oligonucleotide
gcgtgggcttagggtgtatccgatggtaaa

SEQ ID NO: 117104 - DNA, 30 bp, Artificial Sequence
  Synthetic oligonucleotide
ggtcgttacaataagcttcaagttggtaaa

SEQ ID NO: 117105 - DNA, 30 bp, Artificial Sequence
  Synthetic oligonucleotide
gacggtaattagggataaaagccctgtaaa

SEQ ID NO: 117106 - DNA, 30 bp, Artificial Sequence
  Synthetic oligonucleotide
atcgggtgccaacatatatagtgctgtaaa

SEQ ID NO: 117107 - DNA, 30 bp, Artificial Sequence
  Synthetic oligonucleotide
gcactaacaaaacgaacagatccgtgtaaa

SEQ ID NO: 117108 - DNA, 30 bp, Artificial Sequence
  Synthetic oligonucleotide
atcagtgcaaagccgactatgtggtgtaaa

SEQ ID NO: 117109 - DNA, 30 bp, Artificial Sequence
  Synthetic oligonucleotide
gggctatagatacgggtaacttggtgtaaa

SEQ ID NO: 117110 - DNA, 30 bp, Artificial Sequence
  Synthetic oligonucleotide
cctcacgggtcgcggtgtaggttgtgtaaa

SEQ ID NO: 117111 - DNA, 30 bp, Artificial Sequence
  Synthetic oligonucleotide
tggatacatccagaaattgacgacattaaa

SEQ ID NO: 117112 - DNA, 29 bp, Artificial Sequence
  Synthetic oligonucleotide
cgaacactaacgcaagtcgaaccattaaa

SEQ ID NO: 117113 - DNA, 30 bp, Artificial Sequence
  Synthetic oligonucleotide
ctaaggctgccaccctgccggttcattaaa

SEQ ID NO: 117114 - DNA, 30 bp, Artificial Sequence
  Synthetic oligonucleotide
cgtatactcaggtatacttcgtggattaaa

SEQ ID NO: 117115 - DNA, 30 bp, Artificial Sequence
  Synthetic oligonucleotide
gccgaatagtggcgatcgtgttggattaaa

SEQ ID NO: 117116 - DNA, 30 bp, Artificial Sequence
  Synthetic oligonucleotide
ccaggaggggaatgagcccgattgattaaa

SEQ ID NO: 117117 - DNA, 30 bp, Artificial Sequence
  Synthetic oligonucleotide
tcgcgacacgaattaggcgggttgattaaa

SEQ ID NO: 117118 - DNA, 30 bp, Artificial Sequence
  Synthetic oligonucleotide
aaaggtgcacgcaaacgtacggatattaaa

SEQ ID NO: 117119 - DNA, 30 bp, Artificial Sequence
  Synthetic oligonucleotide
cgatcgtggtgcaagttgtcctatcttaaa

SEQ ID NO: 117120 - DNA, 30 bp, Artificial Sequence
  Synthetic oligonucleotide
ggtgaaatgtatgttggaatctgtcttaaa

SEQ ID NO: 117121 - DNA, 30 bp, Artificial Sequence
  Synthetic oligonucleotide
gtgtcgtagggcgtgtaacaaaacgttaaa

SEQ ID NO: 117122 - DNA, 30 bp, Artificial Sequence
  Synthetic oligonucleotide
cgagatcgcccagatagggctgccgttaaa

SEQ ID NO: 117123 - DNA, 30 bp, Artificial Sequence
  Synthetic oligonucleotide
gcggactctcacatgacagtgatatttaaa

SEQ ID NO: 117124 - DNA, 30 bp, Artificial Sequence
  Synthetic oligonucleotide
ctgtatccgagaggccgttgccgttttaaa

SEQ ID NO: 117125 - DNA, 30 bp, Artificial Sequence
  Synthetic oligonucleotide
tgtgccgcggggctagtgatagtaaaacaa

SEQ ID NO: 117126 - DNA, 30 bp, Artificial Sequence
  Synthetic oligonucleotide
agggcgaatatactgatgaaggacaaacaa

SEQ ID NO: 117127 - DNA, 30 bp, Artificial Sequence
  Synthetic oligonucleotide
ggcagcagtgggaagcaagggcttaaacaa

SEQ ID NO: 117128 - DNA, 30 bp, Artificial Sequence
  Synthetic oligonucleotide
tacttaacgcggtgcctcgcaggccaacaa

SEQ ID NO: 117129 - DNA, 30 bp, Artificial Sequence
  Synthetic oligonucleotide
taacgcgctagtcgatcgggaaagcaacaa

SEQ ID NO: 117130 - DNA, 30 bp, Artificial Sequence
  Synthetic oligonucleotide
tgttggagccctgcccggcacaccgaacaa

SEQ ID NO: 117131 - DNA, 30 bp, Artificial Sequence
  Synthetic oligonucleotide
gttcatatgatagatacagataccgaacaa

SEQ ID NO: 117132 - DNA, 30 bp, Artificial Sequence
  Synthetic oligonucleotide
gggccgtttcgaaaatcggtactcgaacaa

SEQ ID NO: 117133 - DNA, 30 bp, Artificial Sequence
  Synthetic oligonucleotide
aatgctcagaaccataacgattaataacaa

SEQ ID NO: 117134 - DNA, 30 bp, Artificial Sequence
  Synthetic oligonucleotide
ggatgtatgccaagtacgttagactaacaa

SEQ ID NO: 117135 - DNA, 30 bp, Artificial Sequence
  Synthetic oligonucleotide
taagagctatatgtgtggattaggacacaa

SEQ ID NO: 117136 - DNA, 30 bp, Artificial Sequence
  Synthetic oligonucleotide
agcagcctcatccaatccgatgtgacacaa

SEQ ID NO: 117137 - DNA, 30 bp, Artificial Sequence
  Synthetic oligonucleotide
aaggctaatggcaagacacattgtacacaa

SEQ ID NO: 117138 - DNA, 30 bp, Artificial Sequence
  Synthetic oligonucleotide
ccgcggttagaaggtttcaaaacgccacaa

SEQ ID NO: 117139 - DNA, 30 bp, Artificial Sequence
  Synthetic oligonucleotide
actgttttgcaggagaaatctgtgccacaa

SEQ ID NO: 117140 - DNA, 30 bp, Artificial Sequence
  Synthetic oligonucleotide
ctgaaagcacggtaaaagtcctatccacaa

SEQ ID NO: 117141 - DNA, 30 bp, Artificial Sequence
  Synthetic oligonucleotide
cgggcactaagcatcgccacatacgcacaa

SEQ ID NO: 117142 - DNA, 30 bp, Artificial Sequence
  Synthetic oligonucleotide
atcgtagaacatgttttatgggcggcacaa

SEQ ID NO: 117143 - DNA, 30 bp, Artificial Sequence
  Synthetic oligonucleotide
ttcggcagaaaggaaagctgatatgcacaa

SEQ ID NO: 117144 - DNA, 30 bp, Artificial Sequence
  Synthetic oligonucleotide
ttgagtggcgaaagactgagtggtgcacaa

SEQ ID NO: 117145 - DNA, 30 bp, Artificial Sequence
  Synthetic oligonucleotide
tacttccgattacagtggggtatatcacaa

SEQ ID NO: 117146 - DNA, 30 bp, Artificial Sequence
  Synthetic oligonucleotide
ctgctatgcaatttgcaattctggtcacaa

SEQ ID NO: 117147 - DNA, 30 bp, Artificial Sequence
  Synthetic oligonucleotide
gaaaatcagcttaatcttcaaccttcacaa

SEQ ID NO: 117148 - DNA, 30 bp, Artificial Sequence
  Synthetic oligonucleotide
gggcgcgcgaatgtgagggtatttagacaa

SEQ ID NO: 117149 - DNA, 30 bp, Artificial Sequence
  Synthetic oligonucleotide
cgctggaggacttttgtattaggacgacaa

SEQ ID NO: 117150 - DNA, 30 bp, Artificial Sequence
  Synthetic oligonucleotide
taagccatagcgtaggaccgtaagcgacaa

SEQ ID NO: 117151 - DNA, 30 bp, Artificial Sequence
  Synthetic oligonucleotide
atcgagctgttctggttgatccagcgacaa

SEQ ID NO: 117152 - DNA, 30 bp, Artificial Sequence
  Synthetic oligonucleotide
ggaggcggtcagctcgtatgggctcgacaa

SEQ ID NO: 117153 - DNA, 30 bp, Artificial Sequence
  Synthetic oligonucleotide
gtaatacgcaacgcctcacgtaaaggacaa

SEQ ID NO: 117154 - DNA, 30 bp, Artificial Sequence
  Synthetic oligonucleotide
gcgagtgactatcggtaccgcctaggacaa

SEQ ID NO: 117155 - DNA, 30 bp, Artificial Sequence
  Synthetic oligonucleotide
agattggtgattaaatagaaaaacggacaa

SEQ ID NO: 117156 - DNA, 31 bp, Artificial Sequence
  Synthetic oligonucleotide
ctacataacagccgaagctcattagtgacaa

SEQ ID NO: 117157 - DNA, 30 bp, Artificial Sequence
  Synthetic oligonucleotide
tgaggatccaggatgggggacaggtgacaa

SEQ ID NO: 117158 - DNA, 30 bp, Artificial Sequence
  Synthetic oligonucleotide
tttggggcttggcatgcctaatggtgacaa

SEQ ID NO: 117159 - DNA, 30 bp, Artificial Sequence
  Synthetic oligonucleotide
cgtgttgcgaatgccggtttatggtgacaa

SEQ ID NO: 117160 - DNA, 30 bp, Artificial Sequence
  Synthetic oligonucleotide
ccaagagaggccgtaagtgagcgaatacaa

SEQ ID NO: 117161 - DNA, 30 bp, Artificial Sequence
  Synthetic oligonucleotide
tctgcatgtatactgggcagatacatacaa

SEQ ID NO: 117162 - DNA, 30 bp, Artificial Sequence
  Synthetic oligonucleotide
cacgcctggattccgaaatgcaccatacaa

SEQ ID NO: 117163 - DNA, 30 bp, Artificial Sequence
  Synthetic oligonucleotide
gacaaggtggggttactaccgggtatacaa

SEQ ID NO: 117164 - DNA, 30 bp, Artificial Sequence
  Synthetic oligonucleotide
caaagttacgaaatgcgcttaaaactacaa

SEQ ID NO: 117165 - DNA, 30 bp, Artificial Sequence
  Synthetic oligonucleotide
gagagtagcgtctcctaagatcagctacaa

SEQ ID NO: 117166 - DNA, 30 bp, Artificial Sequence
  Synthetic oligonucleotide
gggcatggtgccggacgtgtcactctacaa

SEQ ID NO: 117167 - DNA, 30 bp, Artificial Sequence
  Synthetic oligonucleotide
gctaaacgtataaagattcctactctacaa

SEQ ID NO: 117168 - DNA, 30 bp, Artificial Sequence
  Synthetic oligonucleotide
ttttcgcccaaccgtactagacatgtacaa

SEQ ID NO: 117169 - DNA, 30 bp, Artificial Sequence
  Synthetic oligonucleotide
tgtagcaaacaggatgagggagtcttacaa

SEQ ID NO: 117170 - DNA, 30 bp, Artificial Sequence
  Synthetic oligonucleotide
cgcacgctccaaatagtacttaatttacaa

SEQ ID NO: 117171 - DNA, 30 bp, Artificial Sequence
  Synthetic oligonucleotide
gcaccgagccgaaatcttgttccaaaccaa

SEQ ID NO: 117172 - DNA, 30 bp, Artificial Sequence
  Synthetic oligonucleotide
agctctgagcaactaccgggattaaaccaa

SEQ ID NO: 117173 - DNA, 30 bp, Artificial Sequence
  Synthetic oligonucleotide
tcagctcgcatactttgatagggacaccaa

SEQ ID NO: 117174 - DNA, 30 bp, Artificial Sequence
  Synthetic oligonucleotide
gtacaaaatacagaagtgggagcccaccaa

SEQ ID NO: 117175 - DNA, 30 bp, Artificial Sequence
  Synthetic oligonucleotide
acactcgccttcgtactaggtcgccaccaa

SEQ ID NO: 117176 - DNA, 30 bp, Artificial Sequence
  Synthetic oligonucleotide
tagtaacaatgggagtgtcgggatcaccaa

SEQ ID NO: 117177 - DNA, 30 bp, Artificial Sequence
  Synthetic oligonucleotide
aggacttgatacattttcgccagtcaccaa

SEQ ID NO: 117178 - DNA, 30 bp, Artificial Sequence
  Synthetic oligonucleotide
cgataccgccctgtatcgaattgagaccaa

SEQ ID NO: 117179 - DNA, 30 bp, Artificial Sequence
  Synthetic oligonucleotide
tctagtgtggaggacagagtcactgaccaa

SEQ ID NO: 117180 - DNA, 30 bp, Artificial Sequence
  Synthetic oligonucleotide
aaagtgcctgacaaaacacatagtgaccaa

SEQ ID NO: 117181 - DNA, 30 bp, Artificial Sequence
  Synthetic oligonucleotide
tcttcagggcagtataacgtggagtaccaa

SEQ ID NO: 117182 - DNA, 30 bp, Artificial Sequence
  Synthetic oligonucleotide
aagcaatagcatgaccataattcaccccaa

SEQ ID NO: 117183 - DNA, 30 bp, Artificial Sequence
  Synthetic oligonucleotide
gcgaggtgataaacccctaacgacgcccaa

SEQ ID NO: 117184 - DNA, 30 bp, Artificial Sequence
  Synthetic oligonucleotide
aaacactctggttggctgccaaaatcccaa

SEQ ID NO: 117185 - DNA, 30 bp, Artificial Sequence
  Synthetic oligonucleotide
gtcaacttatgtaatggacaaacttcccaa

SEQ ID NO: 117186 - DNA, 30 bp, Artificial Sequence
  Synthetic oligonucleotide
ccatgggagcatgcagacgacccgagccaa

SEQ ID NO: 117187 - DNA, 30 bp, Artificial Sequence
  Synthetic oligonucleotide
aacggaccggctaccattccgaaaggccaa

SEQ ID NO: 117188 - DNA, 30 bp, Artificial Sequence
  Synthetic oligonucleotide
ggaggcctatgaggtcattgaacaggccaa

SEQ ID NO: 117189 - DNA, 30 bp, Artificial Sequence
  Synthetic oligonucleotide
aaggtaataagggggtttataaacggccaa

SEQ ID NO: 117190 - DNA, 30 bp, Artificial Sequence
  Synthetic oligonucleotide
agctacacatgtcgagggttagatggccaa

SEQ ID NO: 117191 - DNA, 30 bp, Artificial Sequence
  Synthetic oligonucleotide
gtacatcattgtgtccaggacattggccaa

SEQ ID NO: 117192 - DNA, 30 bp, Artificial Sequence
  Synthetic oligonucleotide
gaagattaaatggagaccggaccgtgccaa

SEQ ID NO: 117193 - DNA, 30 bp, Artificial Sequence
  Synthetic oligonucleotide
gaatcaagtagtagacactgggtgtgccaa

SEQ ID NO: 117194 - DNA, 30 bp, Artificial Sequence
  Synthetic oligonucleotide
ggagcggccgagttgaagttttattgccaa

SEQ ID NO: 117195 - DNA, 30 bp, Artificial Sequence
  Synthetic oligonucleotide
ataataggggtcccgagtcgaagaatccaa

SEQ ID NO: 117196 - DNA, 30 bp, Artificial Sequence
  Synthetic oligonucleotide
acaataaatttttaacccatcgtaatccaa

SEQ ID NO: 117197 - DNA, 30 bp, Artificial Sequence
  Synthetic oligonucleotide
tctcaaaccgagaggtatgggggcatccaa

SEQ ID NO: 117198 - DNA, 30 bp, Artificial Sequence
  Synthetic oligonucleotide
ccgcgacaaatcttcggtcggggcgtccaa

SEQ ID NO: 117199 - DNA, 30 bp, Artificial Sequence
  Synthetic oligonucleotide
gaggttccaagagcctagtcgagattccaa

SEQ ID NO: 117200 - DNA, 30 bp, Artificial Sequence
  Synthetic oligonucleotide
gagcgttgctgcgggcgcgatcacttccaa

SEQ ID NO: 117201 - DNA, 30 bp, Artificial Sequence
  Synthetic oligonucleotide
cgtttgtgagtaggatccttcaggttccaa

SEQ ID NO: 117202 - DNA, 30 bp, Artificial Sequence
  Synthetic oligonucleotide
tagactgaaggttggggacgaaaaaagcaa

SEQ ID NO: 117203 - DNA, 30 bp, Artificial Sequence
  Synthetic oligonucleotide
aaacaatatgccggcaagacgttaaagcaa

SEQ ID NO: 117204 - DNA, 30 bp, Artificial Sequence
  Synthetic oligonucleotide
ctcggtcaaacggtcacgcctcacaagcaa

SEQ ID NO: 117205 - DNA, 30 bp, Artificial Sequence
  Synthetic oligonucleotide
ggcacaaactctctaacgcgacccaagcaa

SEQ ID NO: 117206 - DNA, 30 bp, Artificial Sequence
  Synthetic oligonucleotide
attacgtaacgtgtcgctggggcgaagcaa

SEQ ID NO: 117207 - DNA, 30 bp, Artificial Sequence
  Synthetic oligonucleotide
agcgccgcgttaaacgtatttatgaagcaa

SEQ ID NO: 117208 - DNA, 30 bp, Artificial Sequence
  Synthetic oligonucleotide
gtcagtgtgtcgggggatgccaaacagcaa

SEQ ID NO: 117209 - DNA, 30 bp, Artificial Sequence
  Synthetic oligonucleotide
acgactgatacaaccgtatgggaccagcaa

SEQ ID NO: 117210 - DNA, 30 bp, Artificial Sequence
  Synthetic oligonucleotide
gcctcaagcaactactcatgtgcagagcaa

SEQ ID NO: 117211 - DNA, 30 bp, Artificial Sequence
  Synthetic oligonucleotide
taacggtaccgcccaaatgggttagagcaa

SEQ ID NO: 117212 - DNA, 30 bp, Artificial Sequence
  Synthetic oligonucleotide
cattaacaaggcccttacgctttcgagcaa

SEQ ID NO: 117213 - DNA, 30 bp, Artificial Sequence
  Synthetic oligonucleotide
catggtaaagcagcgccacatcaggagcaa

SEQ ID NO: 117214 - DNA, 30 bp, Artificial Sequence
  Synthetic oligonucleotide
ccttggatcacctagctaaggccatagcaa

SEQ ID NO: 117215 - DNA, 30 bp, Artificial Sequence
  Synthetic oligonucleotide
gattcaagaacaaggaaggcaaactagcaa

SEQ ID NO: 117216 - DNA, 30 bp, Artificial Sequence
  Synthetic oligonucleotide
caagcctcgtttgagctttacaagtagcaa

SEQ ID NO: 117217 - DNA, 30 bp, Artificial Sequence
  Synthetic oligonucleotide
tcgatatgaatgatggcaggcgggtagcaa

SEQ ID NO: 117218 - DNA, 31 bp, Artificial Sequence
  Synthetic oligonucleotide
ggagtcatgtgaattctgacataattagcaa

SEQ ID NO: 117219 - DNA, 30 bp, Artificial Sequence
  Synthetic oligonucleotide
cattaagcatcggttaagagtcatacgcaa

SEQ ID NO: 117220 - DNA, 30 bp, Artificial Sequence
  Synthetic oligonucleotide
tagaatttctctcgaaagggtgcgccgcaa

SEQ ID NO: 117221 - DNA, 30 bp, Artificial Sequence
  Synthetic oligonucleotide
acagcgtaagttatgacagcatggccgcaa

SEQ ID NO: 117222 - DNA, 30 bp, Artificial Sequence
  Synthetic oligonucleotide
tgcgggaatagcgttgaggaatgtccgcaa

SEQ ID NO: 117223 - DNA, 30 bp, Artificial Sequence
  Synthetic oligonucleotide
ttggctcgatgatttcgaaacagcgcgcaa

SEQ ID NO: 117224 - DNA, 30 bp, Artificial Sequence
  Synthetic oligonucleotide
tggaatcacatacttggttaaatcgcgcaa

SEQ ID NO: 117225 - DNA, 30 bp, Artificial Sequence
  Synthetic oligonucleotide
gtgggcagcgtaatgattaaactcgcgcaa

SEQ ID NO: 117226 - DNA, 30 bp, Artificial Sequence
  Synthetic oligonucleotide
ggctcggtccagacctaagggggtgcgcaa

SEQ ID NO: 117227 - DNA, 30 bp, Artificial Sequence
  Synthetic oligonucleotide
tcctgccctcagtgtccagagcttgcgcaa

SEQ ID NO: 117228 - DNA, 30 bp, Artificial Sequence
  Synthetic oligonucleotide
tttaggcgggattacacttctctatcgcaa

SEQ ID NO: 117229 - DNA, 30 bp, Artificial Sequence
  Synthetic oligonucleotide
cgctggaacgcctaaataagtgcgtcgcaa

SEQ ID NO: 117230 - DNA, 30 bp, Artificial Sequence
  Synthetic oligonucleotide
ttagggggcgtcttggagcaatggtcgcaa

SEQ ID NO: 117231 - DNA, 30 bp, Artificial Sequence
  Synthetic oligonucleotide
acggataatttgtagggggggtgaaggcaa

SEQ ID NO: 117232 - DNA, 30 bp, Artificial Sequence
  Synthetic oligonucleotide
tccagcagagacgcctctaagtagcggcaa

SEQ ID NO: 117233 - DNA, 30 bp, Artificial Sequence
  Synthetic oligonucleotide
ggcgtatattcttgaaaccgtagtcggcaa

SEQ ID NO: 117234 - DNA, 30 bp, Artificial Sequence
  Synthetic oligonucleotide
tcaaactgtaaagcagaatcacaagggcaa

SEQ ID NO: 117235 - DNA, 30 bp, Artificial Sequence
  Synthetic oligonucleotide
tgatgtcataaggatgggtatgaagggcaa

SEQ ID NO: 117236 - DNA, 30 bp, Artificial Sequence
  Synthetic oligonucleotide
cgaggggacccgaactacatgtcagggcaa

SEQ ID NO: 117237 - DNA, 30 bp, Artificial Sequence
  Synthetic oligonucleotide
aatcacgcttgtaagtgggggtgggggcaa

SEQ ID NO: 117238 - DNA, 30 bp, Artificial Sequence
  Synthetic oligonucleotide
cggaagccaatatggttagaccatgggcaa

SEQ ID NO: 117239 - DNA, 30 bp, Artificial Sequence
  Synthetic oligonucleotide
ccgaagggccggtgaaagtgaccatggcaa

SEQ ID NO: 117240 - DNA, 30 bp, Artificial Sequence
  Synthetic oligonucleotide
tcgcagaggtgctgagaagacagatggcaa

SEQ ID NO: 117241 - DNA, 30 bp, Artificial Sequence
  Synthetic oligonucleotide
cgtgcccaggacgagctagctacgtggcaa

SEQ ID NO: 117242 - DNA, 30 bp, Artificial Sequence
  Synthetic oligonucleotide
aataggactcatataaaaatagtttggcaa

SEQ ID NO: 117243 - DNA, 30 bp, Artificial Sequence
  Synthetic oligonucleotide
cagcgatagcggctggtatagataatgcaa

SEQ ID NO: 117244 - DNA, 30 bp, Artificial Sequence
  Synthetic oligonucleotide
actctgtctgagctaaacagctccatgcaa

SEQ ID NO: 117245 - DNA, 30 bp, Artificial Sequence
  Synthetic oligonucleotide
gaggagttccgacacgacgaactcctgcaa

SEQ ID NO: 117246 - DNA, 30 bp, Artificial Sequence
  Synthetic oligonucleotide
cgtgaagcattaaatcaagtatatctgcaa

SEQ ID NO: 117247 - DNA, 30 bp, Artificial Sequence
  Synthetic oligonucleotide
atgcaccagggagtcctttcaagagtgcaa

SEQ ID NO: 117248 - DNA, 30 bp, Artificial Sequence
  Synthetic oligonucleotide
gtgcctcgtttatgctcaattagagtgcaa

SEQ ID NO: 117249 - DNA, 30 bp, Artificial Sequence
  Synthetic oligonucleotide
cacaggttcgacatgagaagatgtgtgcaa

SEQ ID NO: 117250 - DNA, 30 bp, Artificial Sequence
  Synthetic oligonucleotide
agcaattgctatccttgctactcattgcaa

SEQ ID NO: 117251 - DNA, 30 bp, Artificial Sequence
  Synthetic oligonucleotide
cactataaggagggaattagggtcttgcaa

SEQ ID NO: 117252 - DNA, 30 bp, Artificial Sequence
  Synthetic oligonucleotide
agacgttggcactggacgaggtagttgcaa

SEQ ID NO: 117253 - DNA, 31 bp, Artificial Sequence
  Synthetic oligonucleotide
tgggtcaggtttccctaaaagtggcaatcaa

SEQ ID NO: 117254 - DNA, 30 bp, Artificial Sequence
  Synthetic oligonucleotide
gcggcgacgcgttttccaacccggaatcaa

SEQ ID NO: 117255 - DNA, 30 bp, Artificial Sequence
  Synthetic oligonucleotide
cacaaaggcgcaacatcttgcactaatcaa

SEQ ID NO: 117256 - DNA, 30 bp, Artificial Sequence
  Synthetic oligonucleotide
cgacacggattctccacaacaaagcatcaa

SEQ ID NO: 117257 - DNA, 30 bp, Artificial Sequence
  Synthetic oligonucleotide
atgaaaaatctctggatgagccggcatcaa

SEQ ID NO: 117258 - DNA, 30 bp, Artificial Sequence
  Synthetic oligonucleotide
gtagagagctaaacttcaaaattgcatcaa

SEQ ID NO: 117259 - DNA, 30 bp, Artificial Sequence
  Synthetic oligonucleotide
aaaggagcacgacatgggcgcccagatcaa

SEQ ID NO: 117260 - DNA, 30 bp, Artificial Sequence
  Synthetic oligonucleotide
aactagatgctgagctgtgaacgagatcaa

SEQ ID NO: 117261 - DNA, 30 bp, Artificial Sequence
  Synthetic oligonucleotide
ggttacttggtggacaaagcgtcggatcaa

SEQ ID NO: 117262 - DNA, 30 bp, Artificial Sequence
  Synthetic oligonucleotide
tatgtacacatacaaattgttgatgatcaa

SEQ ID NO: 117263 - DNA, 30 bp, Artificial Sequence
  Synthetic oligonucleotide
tggtaggaaaacagccacttgccttatcaa

SEQ ID NO: 117264 - DNA, 30 bp, Artificial Sequence
  Synthetic oligonucleotide
aaccgcaatacggtatgtatggcttatcaa

SEQ ID NO: 117265 - DNA, 30 bp, Artificial Sequence
  Synthetic oligonucleotide
tggcgctcacgattccccatcagttatcaa

SEQ ID NO: 117266 - DNA, 30 bp, Artificial Sequence
  Synthetic oligonucleotide
atgatacaggctgatttatccttaactcaa

SEQ ID NO: 117267 - DNA, 30 bp, Artificial Sequence
  Synthetic oligonucleotide
cagcgtgtgatataattgggcaacactcaa

SEQ ID NO: 117268 - DNA, 30 bp, Artificial Sequence
  Synthetic oligonucleotide
aatatggctcaacctaatcgctacactcaa

SEQ ID NO: 117269 - DNA, 30 bp, Artificial Sequence
  Synthetic oligonucleotide
agcgatcggtcataagcggtgagcactcaa

SEQ ID NO: 117270 - DNA, 30 bp, Artificial Sequence
  Synthetic oligonucleotide
tcaggcgacctgcactcaagatacgctcaa

SEQ ID NO: 117271 - DNA, 30 bp, Artificial Sequence
  Synthetic oligonucleotide
agagctatcctccagaaaagaagcgctcaa

SEQ ID NO: 117272 - DNA, 30 bp, Artificial Sequence
  Synthetic oligonucleotide
gccgctgcacgggactagtgaacggctcaa

SEQ ID NO: 117273 - DNA, 30 bp, Artificial Sequence
  Synthetic oligonucleotide
tagggctgccatcctgcggtctcggctcaa

SEQ ID NO: 117274 - DNA, 30 bp, Artificial Sequence
  Synthetic oligonucleotide
tactcaccttcttcagaatcagcatctcaa

SEQ ID NO: 117275 - DNA, 30 bp, Artificial Sequence
  Synthetic oligonucleotide
ctagggattaggagagagaagggctctcaa

SEQ ID NO: 117276 - DNA, 30 bp, Artificial Sequence
  Synthetic oligonucleotide
caataaggtaggtagggctcggcgtctcaa

SEQ ID NO: 117277 - DNA, 30 bp, Artificial Sequence
  Synthetic oligonucleotide
tagtgcggacttcctatttgtcggagtcaa

SEQ ID NO: 117278 - DNA, 30 bp, Artificial Sequence
  Synthetic oligonucleotide
aactcgacaagtaatgggaatcctagtcaa

SEQ ID NO: 117279 - DNA, 30 bp, Artificial Sequence
  Synthetic oligonucleotide
cttcagactaggccaggaccgcttagtcaa

SEQ ID NO: 117280 - DNA, 30 bp, Artificial Sequence
  Synthetic oligonucleotide
gaaaggaggagagtctaaacatttagtcaa

SEQ ID NO: 117281 - DNA, 30 bp, Artificial Sequence
  Synthetic oligonucleotide
acgaatcttgatcaacacttaaaacgtcaa

SEQ ID NO: 117282 - DNA, 30 bp, Artificial Sequence
  Synthetic oligonucleotide
gcggggggtcatcgggctcaacgacgtcaa

SEQ ID NO: 117283 - DNA, 30 bp, Artificial Sequence
  Synthetic oligonucleotide
tcatatccgagctactatctgcctcgtcaa

SEQ ID NO: 117284 - DNA, 30 bp, Artificial Sequence
  Synthetic oligonucleotide
cgtggggaagcttctcggactggtcgtcaa

SEQ ID NO: 117285 - DNA, 30 bp, Artificial Sequence
  Synthetic oligonucleotide
gatcgggcctagattaagcgagttcgtcaa

SEQ ID NO: 117286 - DNA, 30 bp, Artificial Sequence
  Synthetic oligonucleotide
gcctaacagaggtcactcacggcatgtcaa

SEQ ID NO: 117287 - DNA, 30 bp, Artificial Sequence
  Synthetic oligonucleotide
ccgagacgtgagatctggaggccctgtcaa

SEQ ID NO: 117288 - DNA, 30 bp, Artificial Sequence
  Synthetic oligonucleotide
acttcggacatcggctgttcacgctgtcaa

SEQ ID NO: 117289 - DNA, 30 bp, Artificial Sequence
  Synthetic oligonucleotide
catggttaaactagaatagtcgattgtcaa

SEQ ID NO: 117290 - DNA, 30 bp, Artificial Sequence
  Synthetic oligonucleotide
aatgtgtctggccaagacgactgttgtcaa

SEQ ID NO: 117291 - DNA, 30 bp, Artificial Sequence
  Synthetic oligonucleotide
aaagcctagaatcactttacagccattcaa

SEQ ID NO: 117292 - DNA, 30 bp, Artificial Sequence
  Synthetic oligonucleotide
tgatactggagagctagcggacagattcaa

SEQ ID NO: 117293 - DNA, 30 bp, Artificial Sequence
  Synthetic oligonucleotide
cagccaaagtctaatgcggacaggattcaa

SEQ ID NO: 117294 - DNA, 30 bp, Artificial Sequence
  Synthetic oligonucleotide
tatgacctaacattgaatcgaaatattcaa

SEQ ID NO: 117295 - DNA, 30 bp, Artificial Sequence
  Synthetic oligonucleotide
acctacaaatgagataacacatttattcaa

SEQ ID NO: 117296 - DNA, 30 bp, Artificial Sequence
  Synthetic oligonucleotide
tcatcacagaaaacacaatccgaacttcaa

SEQ ID NO: 117297 - DNA, 30 bp, Artificial Sequence
  Synthetic oligonucleotide
aggtgatcggatgggtaggataggcttcaa

SEQ ID NO: 117298 - DNA, 30 bp, Artificial Sequence
  Synthetic oligonucleotide
gggggattatgtaaagtgagactgcttcaa

SEQ ID NO: 117299 - DNA, 30 bp, Artificial Sequence
  Synthetic oligonucleotide
ctaaaccgtattccgcaaaccacagttcaa

SEQ ID NO: 117300 - DNA, 30 bp, Artificial Sequence
  Synthetic oligonucleotide
tgggtgtagtcgggttgtgatgtagttcaa

SEQ ID NO: 117301 - DNA, 30 bp, Artificial Sequence
  Synthetic oligonucleotide
gaggaatgaatatctagatcggccgttcaa

SEQ ID NO: 117302 - DNA, 30 bp, Artificial Sequence
  Synthetic oligonucleotide
agccaactccacagaccggaaggcgttcaa

SEQ ID NO: 117303 - DNA, 30 bp, Artificial Sequence
  Synthetic oligonucleotide
acactggatcgaacagacagcaaggttcaa

SEQ ID NO: 117304 - DNA, 30 bp, Artificial Sequence
  Synthetic oligonucleotide
tccgaccgcgggaagctggcagtatttcaa

SEQ ID NO: 117305 - DNA, 30 bp, Artificial Sequence
  Synthetic oligonucleotide
gtccaaagccttcgctggccttacaaagaa

SEQ ID NO: 117306 - DNA, 30 bp, Artificial Sequence
  Synthetic oligonucleotide
cttgtatatgggtgcctaacagggaaagaa

SEQ ID NO: 117307 - DNA, 30 bp, Artificial Sequence
  Synthetic oligonucleotide
caaggcagtcacattgattttaaacaagaa

SEQ ID NO: 117308 - DNA, 30 bp, Artificial Sequence
  Synthetic oligonucleotide
acgacctgttagagcgttcgctcccaagaa

SEQ ID NO: 117309 - DNA, 30 bp, Artificial Sequence
  Synthetic oligonucleotide
gcgtggactggtcaggggcgaaagcaagaa

SEQ ID NO: 117310 - DNA, 30 bp, Artificial Sequence
  Synthetic oligonucleotide
gattcagggcgaggtggggatcatcaagaa

SEQ ID NO: 117311 - DNA, 30 bp, Artificial Sequence
  Synthetic oligonucleotide
cagcgatacgggcctcgggaataggaagaa

SEQ ID NO: 117312 - DNA, 30 bp, Artificial Sequence
  Synthetic oligonucleotide
caacgggagtctcaaggggcatcggaagaa

SEQ ID NO: 117313 - DNA, 30 bp, Artificial Sequence
  Synthetic oligonucleotide
caagatatatggctatcggcagaataagaa

SEQ ID NO: 117314 - DNA, 30 bp, Artificial Sequence
  Synthetic oligonucleotide
cgttcccgctatcagactacatcgtaagaa

SEQ ID NO: 117315 - DNA, 30 bp, Artificial Sequence
  Synthetic oligonucleotide
ggggggataacgcccccatctgattaagaa

SEQ ID NO: 117316 - DNA, 30 bp, Artificial Sequence
  Synthetic oligonucleotide
agtttgtagtatgcggtgcccgcgccagaa

SEQ ID NO: 117317 - DNA, 30 bp, Artificial Sequence
  Synthetic oligonucleotide
gctaacatcggtaaagaacgaaggccagaa

SEQ ID NO: 117318 - DNA, 30 bp, Artificial Sequence
  Synthetic oligonucleotide
gggtcgtcagggcgagacaccgctccagaa

SEQ ID NO: 117319 - DNA, 30 bp, Artificial Sequence
  Synthetic oligonucleotide
gcattaagattaaagcaggaagtagcagaa

SEQ ID NO: 117320 - DNA, 30 bp, Artificial Sequence
  Synthetic oligonucleotide
gcagttgatggccggtgacagaatgcagaa

SEQ ID NO: 117321 - DNA, 30 bp, Artificial Sequence
  Synthetic oligonucleotide
gtacattgcgggtttgcatcccaaagagaa

SEQ ID NO: 117322 - DNA, 30 bp, Artificial Sequence
  Synthetic oligonucleotide
tggcaagtaccctataatcttaagagagaa

SEQ ID NO: 117323 - DNA, 30 bp, Artificial Sequence
  Synthetic oligonucleotide
gatccgtcggaaaaggctgatcagagagaa

SEQ ID NO: 117324 - DNA, 30 bp, Artificial Sequence
  Synthetic oligonucleotide
cacgtttaaagattaggctaaatacgagaa

SEQ ID NO: 117325 - DNA, 30 bp, Artificial Sequence
  Synthetic oligonucleotide
gagtaaccataggataggagggtacgagaa

SEQ ID NO: 117326 - DNA, 30 bp, Artificial Sequence
  Synthetic oligonucleotide
aatcgaaaaaacgtatctaactgtcgagaa

SEQ ID NO: 117327 - DNA, 30 bp, Artificial Sequence
  Synthetic oligonucleotide
gtgagttgtgatgccggttgccaaatagaa

SEQ ID NO: 117328 - DNA, 30 bp, Artificial Sequence
  Synthetic oligonucleotide
tcgggatagccacttctcatctacatagaa

SEQ ID NO: 117329 - DNA, 30 bp, Artificial Sequence
  Synthetic oligonucleotide
acctggaggaccgcagagtgaagcatagaa

SEQ ID NO: 117330 - DNA, 30 bp, Artificial Sequence
  Synthetic oligonucleotide
gagcttgttctagcgaatgtgagcatagaa

SEQ ID NO: 117331 - DNA, 30 bp, Artificial Sequence
  Synthetic oligonucleotide
gccaagcaactcttaaataagcgcatagaa

SEQ ID NO: 117332 - DNA, 30 bp, Artificial Sequence
  Synthetic oligonucleotide
tcacaagtcccaaacgactcgcctatagaa

SEQ ID NO: 117333 - DNA, 29 bp, Artificial Sequence
  Synthetic oligonucleotide
atgaatctgcgaatggtggccagctagaa

SEQ ID NO: 117334 - DNA, 30 bp, Artificial Sequence
  Synthetic oligonucleotide
taatgtcgggggtaccgatacgctctagaa

SEQ ID NO: 117335 - DNA, 30 bp, Artificial Sequence
  Synthetic oligonucleotide
agaggaatgatattcccgcgactagtagaa

SEQ ID NO: 117336 - DNA, 30 bp, Artificial Sequence
  Synthetic oligonucleotide
aaaaataatcgaaacgatatggttgtagaa

SEQ ID NO: 117337 - DNA, 30 bp, Artificial Sequence
  Synthetic oligonucleotide
cgcgacctcggaatcgattatgcaaacgaa

SEQ ID NO: 117338 - DNA, 30 bp, Artificial Sequence
  Synthetic oligonucleotide
ggacggtatgatgtcatatatcgaaacgaa

SEQ ID NO: 117339 - DNA, 30 bp, Artificial Sequence
  Synthetic oligonucleotide
tggccggagtcatgcactgagtcgaacgaa

SEQ ID NO: 117340 - DNA, 30 bp, Artificial Sequence
  Synthetic oligonucleotide
aagctaggaccaaagtaggggcataacgaa

SEQ ID NO: 117341 - DNA, 30 bp, Artificial Sequence
  Synthetic oligonucleotide
caaaccgatgaggataatcagccacacgaa

SEQ ID NO: 117342 - DNA, 30 bp, Artificial Sequence
  Synthetic oligonucleotide
ttcacaagggcgcaaacgcgaagacacgaa

SEQ ID NO: 117343 - DNA, 30 bp, Artificial Sequence
  Synthetic oligonucleotide
tcgagactgcttcgggtatttgagcacgaa

SEQ ID NO: 117344 - DNA, 30 bp, Artificial Sequence
  Synthetic oligonucleotide
taatatgtcacttgagtcacgcccgacgaa

SEQ ID NO: 117345 - DNA, 30 bp, Artificial Sequence
  Synthetic oligonucleotide
aaggctgcggggcaggccgggcaggacgaa

SEQ ID NO: 117346 - DNA, 30 bp, Artificial Sequence
  Synthetic oligonucleotide
cgctgtaacagactaaccctcccggacgaa

SEQ ID NO: 117347 - DNA, 30 bp, Artificial Sequence
  Synthetic oligonucleotide
ctagggatagctgtcgtgcgaaagtacgaa

SEQ ID NO: 117348 - DNA, 30 bp, Artificial Sequence
  Synthetic oligonucleotide
atccagatcatgcaagacatggggtacgaa

SEQ ID NO: 117349 - DNA, 30 bp, Artificial Sequence
  Synthetic oligonucleotide
tcatcaacgtcgtcggtagggtattacgaa

SEQ ID NO: 117350 - DNA, 30 bp, Artificial Sequence
  Synthetic oligonucleotide
cctaagaaattacagcgaccaccttacgaa

SEQ ID NO: 117351 - DNA, 30 bp, Artificial Sequence
  Synthetic oligonucleotide
cagcgataggagccattctccatttacgaa

SEQ ID NO: 117352 - DNA, 30 bp, Artificial Sequence
  Synthetic oligonucleotide
ggaccttacggcccctgtacagcaaccgaa

SEQ ID NO: 117353 - DNA, 30 bp, Artificial Sequence
  Synthetic oligonucleotide
tcagcacgtgtgcatcttcagctaaccgaa

SEQ ID NO: 117354 - DNA, 30 bp, Artificial Sequence
  Synthetic oligonucleotide
tctacgtagtttcgggggagcacgaccgaa

SEQ ID NO: 117355 - DNA, 30 bp, Artificial Sequence
  Synthetic oligonucleotide
ctgtctaatggcccttcacagatgaccgaa

SEQ ID NO: 117356 - DNA, 30 bp, Artificial Sequence
  Synthetic oligonucleotide
ggtcggcccatatcgtgctgccgtaccgaa

SEQ ID NO: 117357 - DNA, 30 bp, Artificial Sequence
  Synthetic oligonucleotide
tagagtgcggaagagtataaagagcccgaa

SEQ ID NO: 117358 - DNA, 30 bp, Artificial Sequence
  Synthetic oligonucleotide
ctgtccatgttgtgaataatccatcccgaa

SEQ ID NO: 117359 - DNA, 30 bp, Artificial Sequence
  Synthetic oligonucleotide
catcatggatgattgggcatgctatccgaa

SEQ ID NO: 117360 - DNA, 30 bp, Artificial Sequence
  Synthetic oligonucleotide
agttaagggccaggtacaaggcattccgaa

SEQ ID NO: 117361 - DNA, 30 bp, Artificial Sequence
  Synthetic oligonucleotide
tagtattgtgaacggaagggcccgagcgaa

SEQ ID NO: 117362 - DNA, 30 bp, Artificial Sequence
  Synthetic oligonucleotide
caaagtagacctctggacacacatagcgaa

SEQ ID NO: 117363 - DNA, 30 bp, Artificial Sequence
  Synthetic oligonucleotide
agtttgagaatacgggcaggccatagcgaa

SEQ ID NO: 117364 - DNA, 30 bp, Artificial Sequence
  Synthetic oligonucleotide
gaccgtttgagtgttcaaaaaacacgcgaa

SEQ ID NO: 117365 - DNA, 30 bp, Artificial Sequence
  Synthetic oligonucleotide
gtagtgaattaatttaactaaatacgcgaa

SEQ ID NO: 117366 - DNA, 30 bp, Artificial Sequence
  Synthetic oligonucleotide
agggatgagtcgcccagggccctacgcgaa

SEQ ID NO: 117367 - DNA, 30 bp, Artificial Sequence
  Synthetic oligonucleotide
taagtgggagaaacctgttaggaaggcgaa

SEQ ID NO: 117368 - DNA, 30 bp, Artificial Sequence
  Synthetic oligonucleotide
ctacaccagggtatatagtgaggaggcgaa

SEQ ID NO: 117369 - DNA, 30 bp, Artificial Sequence
  Synthetic oligonucleotide
ggcaggctagggggacctaagctaggcgaa

SEQ ID NO: 117370 - DNA, 30 bp, Artificial Sequence
  Synthetic oligonucleotide
agaactctctaaaagagtctggggggcgaa

SEQ ID NO: 117371 - DNA, 30 bp, Artificial Sequence
  Synthetic oligonucleotide
tatcgcgagtagacgcgctaggatggcgaa

SEQ ID NO: 117372 - DNA, 30 bp, Artificial Sequence
  Synthetic oligonucleotide
atcgcgagtggatgccactttcaatgcgaa

SEQ ID NO: 117373 - DNA, 30 bp, Artificial Sequence
  Synthetic oligonucleotide
cacaccggaccaatactacacgcatgcgaa

SEQ ID NO: 117374 - DNA, 30 bp, Artificial Sequence
  Synthetic oligonucleotide
tcaataacaatggtatcgaggccgtgcgaa

SEQ ID NO: 117375 - DNA, 30 bp, Artificial Sequence
  Synthetic oligonucleotide
gagcgtacagcgtcgtacatgaggtgcgaa

SEQ ID NO: 117376 - DNA, 30 bp, Artificial Sequence
  Synthetic oligonucleotide
tctaattgccattccgaatacgggtgcgaa

SEQ ID NO: 117377 - DNA, 30 bp, Artificial Sequence
  Synthetic oligonucleotide
ggtggacaacgggcccgaaattcaatcgaa

SEQ ID NO: 117378 - DNA, 30 bp, Artificial Sequence
  Synthetic oligonucleotide
gccgtatattttgcacatagctcgatcgaa

SEQ ID NO: 117379 - DNA, 30 bp, Artificial Sequence
  Synthetic oligonucleotide
ttaaccaagacgaaccctggatgtatcgaa

SEQ ID NO: 117380 - DNA, 30 bp, Artificial Sequence
  Synthetic oligonucleotide
gcgagagaacatttcttagaaatactcgaa

SEQ ID NO: 117381 - DNA, 30 bp, Artificial Sequence
  Synthetic oligonucleotide
aggggagatttacatcatgtttagctcgaa

SEQ ID NO: 117382 - DNA, 30 bp, Artificial Sequence
  Synthetic oligonucleotide
ggctgtgtgtacagaaggggttcgctcgaa

SEQ ID NO: 117383 - DNA, 30 bp, Artificial Sequence
  Synthetic oligonucleotide
ggggaaaggcgaccagctagtcctgtcgaa

SEQ ID NO: 117384 - DNA, 29 bp, Artificial Sequence
  Synthetic oligonucleotide
gacataacgaggggattgcgaacttcgaa

SEQ ID NO: 117385 - DNA, 30 bp, Artificial Sequence
  Synthetic oligonucleotide
gaatcggtgcgccacggagattacttcgaa

SEQ ID NO: 117386 - DNA, 30 bp, Artificial Sequence
  Synthetic oligonucleotide
ccgtctgggaggctgaccgccggcttcgaa

SEQ ID NO: 117387 - DNA, 30 bp, Artificial Sequence
  Synthetic oligonucleotide
tcgctcgtggagagtcatctttgtttcgaa

SEQ ID NO: 117388 - DNA, 30 bp, Artificial Sequence
  Synthetic oligonucleotide
cgtagacgctttctgatcgcctgaaaggaa

SEQ ID NO: 117389 - DNA, 30 bp, Artificial Sequence
  Synthetic oligonucleotide
cacaattggaaaagctcttgagacaaggaa

SEQ ID NO: 117390 - DNA, 30 bp, Artificial Sequence
  Synthetic oligonucleotide
aatgtcgtagatagttccgtgagcaaggaa

SEQ ID NO: 117391 - DNA, 30 bp, Artificial Sequence
  Synthetic oligonucleotide
gtgacccatgacgatccgtaaatcaaggaa

SEQ ID NO: 117392 - DNA, 30 bp, Artificial Sequence
  Synthetic oligonucleotide
ttaacccacgcgtcctcgacaactaaggaa

SEQ ID NO: 117393 - DNA, 30 bp, Artificial Sequence
  Synthetic oligonucleotide
cgcgtacagatgaatgttaacgctaaggaa

SEQ ID NO: 117394 - DNA, 30 bp, Artificial Sequence
  Synthetic oligonucleotide
tgcggccctgaatatcaccttccacaggaa

SEQ ID NO: 117395 - DNA, 30 bp, Artificial Sequence
  Synthetic oligonucleotide
ggattcctcgtatggaagcaaaagcaggaa

SEQ ID NO: 117396 - DNA, 30 bp, Artificial Sequence
  Synthetic oligonucleotide
gggctacaaaccgatcgatgatggcaggaa

SEQ ID NO: 117397 - DNA, 30 bp, Artificial Sequence
  Synthetic oligonucleotide
caataagtgttttattcccaaactcaggaa

SEQ ID NO: 117398 - DNA, 30 bp, Artificial Sequence
  Synthetic oligonucleotide
gccggtgaagcagggttactgcgtcaggaa

SEQ ID NO: 117399 - DNA, 30 bp, Artificial Sequence
  Synthetic oligonucleotide
tatcaggaggcgcgtgggacttaggaggaa

SEQ ID NO: 117400 - DNA, 30 bp, Artificial Sequence
  Synthetic oligonucleotide
gcagtcgccggtgactagtgctcggaggaa

SEQ ID NO: 117401 - DNA, 30 bp, Artificial Sequence
  Synthetic oligonucleotide
tttaggtttcaatcaggaggaactgaggaa

SEQ ID NO: 117402 - DNA, 30 bp, Artificial Sequence
  Synthetic oligonucleotide
tctagtgaagcgtaggtatcgcgataggaa

SEQ ID NO: 117403 - DNA, 30 bp, Artificial Sequence
  Synthetic oligonucleotide
gacgaatagtgcgaatcagttggataggaa

SEQ ID NO: 117404 - DNA, 30 bp, Artificial Sequence
  Synthetic oligonucleotide
caggttcccgcattaccatacaaaacggaa

SEQ ID NO: 117405 - DNA, 30 bp, Artificial Sequence
  Synthetic oligonucleotide
cggatcaaatcctggcggttcaaaacggaa

SEQ ID NO: 117406 - DNA, 30 bp, Artificial Sequence
  Synthetic oligonucleotide
tgtactagaaatgcatacatattcacggaa

SEQ ID NO: 117407 - DNA, 30 bp, Artificial Sequence
  Synthetic oligonucleotide
tgtaggtgggtttaacagacgtcgacggaa

SEQ ID NO: 117408 - DNA, 30 bp, Artificial Sequence
  Synthetic oligonucleotide
aaagtggagcaaggcctaggctctacggaa

SEQ ID NO: 117409 - DNA, 30 bp, Artificial Sequence
  Synthetic oligonucleotide
gcttagtacgcgcgttttggtggtacggaa

SEQ ID NO: 117410 - DNA, 30 bp, Artificial Sequence
  Synthetic oligonucleotide
ccttagaggagatacgcgaaatcaccggaa

SEQ ID NO: 117411 - DNA, 30 bp, Artificial Sequence
  Synthetic oligonucleotide
tacataggactgttaagtaacatcccggaa

SEQ ID NO: 117412 - DNA, 30 bp, Artificial Sequence
  Synthetic oligonucleotide
agttgatgggatacaatatgggtcccggaa

SEQ ID NO: 117413 - DNA, 30 bp, Artificial Sequence
  Synthetic oligonucleotide
aataaagcttccagcgtggagcttccggaa

SEQ ID NO: 117414 - DNA, 30 bp, Artificial Sequence
  Synthetic oligonucleotide
aaaagcatttgaggcgtacccaacgcggaa

SEQ ID NO: 117415 - DNA, 30 bp, Artificial Sequence
  Synthetic oligonucleotide
gttatgaagaggtatgagcaacaatcggaa

SEQ ID NO: 117416 - DNA, 30 bp, Artificial Sequence
  Synthetic oligonucleotide
gagtacatgcgaacaaaacgccgatcggaa

SEQ ID NO: 117417 - DNA, 30 bp, Artificial Sequence
  Synthetic oligonucleotide
agaatccaccagatgatacaagcgtcggaa

SEQ ID NO: 117418 - DNA, 30 bp, Artificial Sequence
  Synthetic oligonucleotide
atgtggaaagcggagtaataactaagggaa

SEQ ID NO: 117419 - DNA, 30 bp, Artificial Sequence
  Synthetic oligonucleotide
cgtcgtcataacttctccgaagacggggaa

SEQ ID NO: 117420 - DNA, 30 bp, Artificial Sequence
  Synthetic oligonucleotide
gattatggaggtcagaccaaggacggggaa

SEQ ID NO: 117421 - DNA, 30 bp, Artificial Sequence
  Synthetic oligonucleotide
ctaaagatagtatggacgtgttatggggaa

SEQ ID NO: 117422 - DNA, 30 bp, Artificial Sequence
  Synthetic oligonucleotide
ttgtggaaaaaatccggaaatagtggggaa

SEQ ID NO: 117423 - DNA, 30 bp, Artificial Sequence
  Synthetic oligonucleotide
ggtacaaagccaagcgggacggtaatggaa

SEQ ID NO: 117424 - DNA, 30 bp, Artificial Sequence
  Synthetic oligonucleotide
ccctgattcagcaggcaaagaggtatggaa

SEQ ID NO: 117425 - DNA, 30 bp, Artificial Sequence
  Synthetic oligonucleotide
attagggcacgattcaagggtaagctggaa

SEQ ID NO: 117426 - DNA, 30 bp, Artificial Sequence
  Synthetic oligonucleotide
atgcaaacaattaaggcgcttcatctggaa

SEQ ID NO: 117427 - DNA, 30 bp, Artificial Sequence
  Synthetic oligonucleotide
atcgctagtttaggttggattcaagtggaa

SEQ ID NO: 117428 - DNA, 30 bp, Artificial Sequence
  Synthetic oligonucleotide
actgtgaatgcacagcgtcagtccgtggaa

SEQ ID NO: 117429 - DNA, 30 bp, Artificial Sequence
  Synthetic oligonucleotide
gcccttaaggatatgcaagcgagcgtggaa

SEQ ID NO: 117430 - DNA, 30 bp, Artificial Sequence
  Synthetic oligonucleotide
catgcgatagtacttcctaaccgcgtggaa

SEQ ID NO: 117431 - DNA, 30 bp, Artificial Sequence
  Synthetic oligonucleotide
atagatacttatggtcagaccggattggaa

SEQ ID NO: 117432 - DNA, 30 bp, Artificial Sequence
  Synthetic oligonucleotide
tggcgtcgataagacagatacaatttggaa

SEQ ID NO: 117433 - DNA, 30 bp, Artificial Sequence
  Synthetic oligonucleotide
cagtaaccttgagcccgtatgcgaaatgaa

SEQ ID NO: 117434 - DNA, 30 bp, Artificial Sequence
  Synthetic oligonucleotide
aacgtacctgaggtggcatgggccaatgaa

SEQ ID NO: 117435 - DNA, 30 bp, Artificial Sequence
  Synthetic oligonucleotide
tcaagtttgatgcttatcgaaagcaatgaa

SEQ ID NO: 117436 - DNA, 30 bp, Artificial Sequence
  Synthetic oligonucleotide
gaactgccagtttgtaacccggataatgaa

SEQ ID NO: 117437 - DNA, 30 bp, Artificial Sequence
  Synthetic oligonucleotide
tccggccctatatacaagagggaacatgaa

SEQ ID NO: 117438 - DNA, 30 bp, Artificial Sequence
  Synthetic oligonucleotide
accaacgtggatgaccactgtacacatgaa

SEQ ID NO: 117439 - DNA, 30 bp, Artificial Sequence
  Synthetic oligonucleotide
gccaccatatttgaataagggttacatgaa

SEQ ID NO: 117440 - DNA, 30 bp, Artificial Sequence
  Synthetic oligonucleotide
agctggccgatgcgtacgtacgaccatgaa

SEQ ID NO: 117441 - DNA, 30 bp, Artificial Sequence
  Synthetic oligonucleotide
aggcatatgattgtttaagatacgcatgaa

SEQ ID NO: 117442 - DNA, 30 bp, Artificial Sequence
  Synthetic oligonucleotide
ctatactagagcaagctagttgggcatgaa

SEQ ID NO: 117443 - DNA, 30 bp, Artificial Sequence
  Synthetic oligonucleotide
gcggagtggtcaggcgctcgtttgcatgaa

SEQ ID NO: 117444 - DNA, 30 bp, Artificial Sequence
  Synthetic oligonucleotide
acgggtagggaccctgtcttaggtgatgaa

SEQ ID NO: 117445 - DNA, 30 bp, Artificial Sequence
  Synthetic oligonucleotide
gccaagtctccaacccaaatatttgatgaa

SEQ ID NO: 117446 - DNA, 30 bp, Artificial Sequence
  Synthetic oligonucleotide
taagggggaccaggggcgcctaaatatgaa

SEQ ID NO: 117447 - DNA, 30 bp, Artificial Sequence
  Synthetic oligonucleotide
gaggatccacagggctattcacaatatgaa

SEQ ID NO: 117448 - DNA, 30 bp, Artificial Sequence
  Synthetic oligonucleotide
actccccacgggagtacgagagagtatgaa

SEQ ID NO: 117449 - DNA, 30 bp, Artificial Sequence
  Synthetic oligonucleotide
gtatggtcgatataactgtaaaggtatgaa

SEQ ID NO: 117450 - DNA, 30 bp, Artificial Sequence
  Synthetic oligonucleotide
tgatccaagaaggacagaagacgttatgaa

SEQ ID NO: 117451 - DNA, 30 bp, Artificial Sequence
  Synthetic oligonucleotide
gggggcatgtacaaaatacccaggactgaa

SEQ ID NO: 117452 - DNA, 30 bp, Artificial Sequence
  Synthetic oligonucleotide
tagttcgagctccagccgtgatatactgaa

SEQ ID NO: 117453 - DNA, 30 bp, Artificial Sequence
  Synthetic oligonucleotide
gtgaaaaacttggaagcagtacgtactgaa

SEQ ID NO: 117454 - DNA, 30 bp, Artificial Sequence
  Synthetic oligonucleotide
gccggtaaacctaagcgtgtatttactgaa

SEQ ID NO: 117455 - DNA, 30 bp, Artificial Sequence
  Synthetic oligonucleotide
gatctcctgccctcgaaagcaacgcctgaa

SEQ ID NO: 117456 - DNA, 30 bp, Artificial Sequence
  Synthetic oligonucleotide
tccctgctagacacgacgctacggcctgaa

SEQ ID NO: 117457 - DNA, 30 bp, Artificial Sequence
  Synthetic oligonucleotide
ccgtgattatccaagttattggatcctgaa

SEQ ID NO: 117458 - DNA, 30 bp, Artificial Sequence
  Synthetic oligonucleotide
cacttaacagcggggaccattcctcctgaa

SEQ ID NO: 117459 - DNA, 30 bp, Artificial Sequence
  Synthetic oligonucleotide
agtgataaacggtccggcgtgggcgctgaa

SEQ ID NO: 117460 - DNA, 30 bp, Artificial Sequence
  Synthetic oligonucleotide
aacacggttgcccgataacaagtcgctgaa

SEQ ID NO: 117461 - DNA, 30 bp, Artificial Sequence
  Synthetic oligonucleotide
caaacaaataagcctgaattttgctctgaa

SEQ ID NO: 117462 - DNA, 30 bp, Artificial Sequence
  Synthetic oligonucleotide
gtacgcgccgagtacattcggtgcagtgaa

SEQ ID NO: 117463 - DNA, 30 bp, Artificial Sequence
  Synthetic oligonucleotide
gtaggttgcatgtcaacgtcgtagagtgaa

SEQ ID NO: 117464 - DNA, 30 bp, Artificial Sequence
  Synthetic oligonucleotide
tcagaaagtgaaccggaatgtcttagtgaa

SEQ ID NO: 117465 - DNA, 30 bp, Artificial Sequence
  Synthetic oligonucleotide
cgcgtaacacgctgggattgttcacgtgaa

SEQ ID NO: 117466 - DNA, 30 bp, Artificial Sequence
  Synthetic oligonucleotide
ggcggggatgtcaggcttgacccatgtgaa

SEQ ID NO: 117467 - DNA, 30 bp, Artificial Sequence
  Synthetic oligonucleotide
tagggttattaggtcgtccggcagtgtgaa

SEQ ID NO: 117468 - DNA, 30 bp, Artificial Sequence
  Synthetic oligonucleotide
agaggtattatggcgaacccaggaattgaa

SEQ ID NO: 117469 - DNA, 30 bp, Artificial Sequence
  Synthetic oligonucleotide
ctaggaggccgacatgatcataacattgaa

SEQ ID NO: 117470 - DNA, 30 bp, Artificial Sequence
  Synthetic oligonucleotide
ctataaaggacacaccgctctagccttgaa

SEQ ID NO: 117471 - DNA, 30 bp, Artificial Sequence
  Synthetic oligonucleotide
ttaggacgaaacttgctcggggtccttgaa

SEQ ID NO: 117472 - DNA, 30 bp, Artificial Sequence
  Synthetic oligonucleotide
gaactatggttcaacagtgtgtagcttgaa

SEQ ID NO: 117473 - DNA, 30 bp, Artificial Sequence
  Synthetic oligonucleotide
tattcgacaactaccggtaaacttcttgaa

SEQ ID NO: 117474 - DNA, 30 bp, Artificial Sequence
  Synthetic oligonucleotide
tcaatgcgtgcggtcctgcataaggttgaa

SEQ ID NO: 117475 - DNA, 30 bp, Artificial Sequence
  Synthetic oligonucleotide
tctgccactggaccgaaagcacaatttgaa

SEQ ID NO: 117476 - DNA, 30 bp, Artificial Sequence
  Synthetic oligonucleotide
ccgtgccgcggatctcttgatgactttgaa

SEQ ID NO: 117477 - DNA, 30 bp, Artificial Sequence
  Synthetic oligonucleotide
gcgtaaagaatgatttacggttattttgaa

SEQ ID NO: 117478 - DNA, 30 bp, Artificial Sequence
  Synthetic oligonucleotide
agatgttccagagatgaacggctaaaataa

SEQ ID NO: 117479 - DNA, 30 bp, Artificial Sequence
  Synthetic oligonucleotide
gtagctgtcgtaacaatttgacacaaataa

SEQ ID NO: 117480 - DNA, 30 bp, Artificial Sequence
  Synthetic oligonucleotide
agttcccgatcagagggtactggacaataa

SEQ ID NO: 117481 - DNA, 30 bp, Artificial Sequence
  Synthetic oligonucleotide
gatcgtctacggttagaaggcaatgaataa

SEQ ID NO: 117482 - DNA, 30 bp, Artificial Sequence
  Synthetic oligonucleotide
tgtgggtatgagcgccaaccactgtaataa

SEQ ID NO: 117483 - DNA, 30 bp, Artificial Sequence
  Synthetic oligonucleotide
gatgtgggttgtataattgactaaacataa

SEQ ID NO: 117484 - DNA, 30 bp, Artificial Sequence
  Synthetic oligonucleotide
agttccctactaagggacttttgcacataa

SEQ ID NO: 117485 - DNA, 30 bp, Artificial Sequence
  Synthetic oligonucleotide
ggagtgagcgtaaatcggggaaagacataa

SEQ ID NO: 117486 - DNA, 30 bp, Artificial Sequence
  Synthetic oligonucleotide
taaggaagccggaatctcatctcaccataa

SEQ ID NO: 117487 - DNA, 30 bp, Artificial Sequence
  Synthetic oligonucleotide
ataaaggggatggaagtcagtataccataa

SEQ ID NO: 117488 - DNA, 30 bp, Artificial Sequence
  Synthetic oligonucleotide
atgctagttaaggaccttttccagccataa

SEQ ID NO: 117489 - DNA, 30 bp, Artificial Sequence
  Synthetic oligonucleotide
ccgggcggggatcgggtatgtcaagcataa

SEQ ID NO: 117490 - DNA, 30 bp, Artificial Sequence
  Synthetic oligonucleotide
gccgtaacatcgtgtgcacgaccagcataa

SEQ ID NO: 117491 - DNA, 30 bp, Artificial Sequence
  Synthetic oligonucleotide
ggaggtgatcgatgagtataggcagcataa

SEQ ID NO: 117492 - DNA, 30 bp, Artificial Sequence
  Synthetic oligonucleotide
ccagtttcgtaaggtcggtggttagcataa

SEQ ID NO: 117493 - DNA, 30 bp, Artificial Sequence
  Synthetic oligonucleotide
ggcacgtagaaagctacatgccggtcataa

SEQ ID NO: 117494 - DNA, 30 bp, Artificial Sequence
  Synthetic oligonucleotide
ataggccgtgtaaaacaaaacgtaagataa

SEQ ID NO: 117495 - DNA, 30 bp, Artificial Sequence
  Synthetic oligonucleotide
tattggtaaagacaccataaacgtagataa

SEQ ID NO: 117496 - DNA, 30 bp, Artificial Sequence
  Synthetic oligonucleotide
cttctgtgcactcaaggattcaaccgataa

SEQ ID NO: 117497 - DNA, 30 bp, Artificial Sequence
  Synthetic oligonucleotide
cagcactttgcacgactccctggccgataa

SEQ ID NO: 117498 - DNA, 30 bp, Artificial Sequence
  Synthetic oligonucleotide
ttctaccggccaacgcggacgaatcgataa

SEQ ID NO: 117499 - DNA, 30 bp, Artificial Sequence
  Synthetic oligonucleotide
ttgcggcagtggacttatggagttcgataa

SEQ ID NO: 117500 - DNA, 30 bp, Artificial Sequence
  Synthetic oligonucleotide
gtcaaattttattcgaaggtggcaggataa

SEQ ID NO: 117501 - DNA, 30 bp, Artificial Sequence
  Synthetic oligonucleotide
ctacggtggttccgcaccgagatgggataa

SEQ ID NO: 117502 - DNA, 30 bp, Artificial Sequence
  Synthetic oligonucleotide
ggcattgaagactgtaagcagcctggataa

SEQ ID NO: 117503 - DNA, 30 bp, Artificial Sequence
  Synthetic oligonucleotide
aatgtaggtgacccagtcccaatctgataa

SEQ ID NO: 117504 - DNA, 30 bp, Artificial Sequence
  Synthetic oligonucleotide
tttgaggaatgagggccagaaacaatataa

SEQ ID NO: 117505 - DNA, 30 bp, Artificial Sequence
  Synthetic oligonucleotide
ctgcactccgccaaccgcactacaatataa

SEQ ID NO: 117506 - DNA, 30 bp, Artificial Sequence
  Synthetic oligonucleotide
ggaggcaggtgatccgttcgtctgatataa

SEQ ID NO: 117507 - DNA, 30 bp, Artificial Sequence
  Synthetic oligonucleotide
ctcgcataggttacatcgtgcttgatataa

SEQ ID NO: 117508 - DNA, 30 bp, Artificial Sequence
  Synthetic oligonucleotide
tcaacgtcggacaacgggcgagtactataa

SEQ ID NO: 117509 - DNA, 30 bp, Artificial Sequence
  Synthetic oligonucleotide
atagtgaacagggcgaatcgatacctataa

SEQ ID NO: 117510 - DNA, 30 bp, Artificial Sequence
  Synthetic oligonucleotide
atggataactgccccgaaagttaagtataa

SEQ ID NO: 117511 - DNA, 31 bp, Artificial Sequence
  Synthetic oligonucleotide
cgccactcaaccattgaccccaaatgtataa

SEQ ID NO: 117512 - DNA, 30 bp, Artificial Sequence
  Synthetic oligonucleotide
gaccaagtgcgcagcgcagtacatgtataa

SEQ ID NO: 117513 - DNA, 30 bp, Artificial Sequence
  Synthetic oligonucleotide
ccgagtagagaacccggtcttcatgtataa

SEQ ID NO: 117514 - DNA, 30 bp, Artificial Sequence
  Synthetic oligonucleotide
ggtgagaattttcgagaacggcctgtataa

SEQ ID NO: 117515 - DNA, 30 bp, Artificial Sequence
  Synthetic oligonucleotide
ggctagtccacgtgaggcttgcagttataa

SEQ ID NO: 117516 - DNA, 30 bp, Artificial Sequence
  Synthetic oligonucleotide
cccccgacagccggtaagtcatagaactaa

SEQ ID NO: 117517 - DNA, 30 bp, Artificial Sequence
  Synthetic oligonucleotide
gttgtgtatgtccggaatacatgtcactaa

SEQ ID NO: 117518 - DNA, 30 bp, Artificial Sequence
  Synthetic oligonucleotide
tctgacagtgggagggttcgacgcgactaa

SEQ ID NO: 117519 - DNA, 30 bp, Artificial Sequence
  Synthetic oligonucleotide
gcggcatctggcgacattttaccggactaa

SEQ ID NO: 117520 - DNA, 30 bp, Artificial Sequence
  Synthetic oligonucleotide
ccccaatctcatttaaataagtatgactaa

SEQ ID NO: 117521 - DNA, 30 bp, Artificial Sequence
  Synthetic oligonucleotide
cgatgtccttattacaagcgaattgactaa

SEQ ID NO: 117522 - DNA, 30 bp, Artificial Sequence
  Synthetic oligonucleotide
gcttgggcgcgtatctatgatattgactaa

SEQ ID NO: 117523 - DNA, 30 bp, Artificial Sequence
  Synthetic oligonucleotide
atggtaaggcgcctaggtgtggcctactaa

SEQ ID NO: 117524 - DNA, 30 bp, Artificial Sequence
  Synthetic oligonucleotide
ggaagaaatagggggtaggcgcgttactaa

SEQ ID NO: 117525 - DNA, 30 bp, Artificial Sequence
  Synthetic oligonucleotide
aaagactacacttgtatatgtgtcacctaa

SEQ ID NO: 117526 - DNA, 30 bp, Artificial Sequence
  Synthetic oligonucleotide
aacatagactctgtcatggataaagcctaa

SEQ ID NO: 117527 - DNA, 30 bp, Artificial Sequence
  Synthetic oligonucleotide
gtaaaacgttagtatggggaagaagcctaa

SEQ ID NO: 117528 - DNA, 30 bp, Artificial Sequence
  Synthetic oligonucleotide
catacccgacttggaaccaataaggcctaa

SEQ ID NO: 117529 - DNA, 30 bp, Artificial Sequence
  Synthetic oligonucleotide
gaacatgatcgggatgccttcgtggcctaa

SEQ ID NO: 117530 - DNA, 30 bp, Artificial Sequence
  Synthetic oligonucleotide
gtgggaactcttgtatctacaacatcctaa

SEQ ID NO: 117531 - DNA, 30 bp, Artificial Sequence
  Synthetic oligonucleotide
tcactgtcagttaattcgattctaagctaa

SEQ ID NO: 117532 - DNA, 30 bp, Artificial Sequence
  Synthetic oligonucleotide
cagggtaggtaaaaagaccacttaagctaa

SEQ ID NO: 117533 - DNA, 30 bp, Artificial Sequence
  Synthetic oligonucleotide
ggacagtacaagatactgcggggcagctaa

SEQ ID NO: 117534 - DNA, 29 bp, Artificial Sequence
  Synthetic oligonucleotide
gctcagtactgtaggacctcctacgctaa

SEQ ID NO: 117535 - DNA, 30 bp, Artificial Sequence
  Synthetic oligonucleotide
cctggggttcggaggcagagaatccgctaa

SEQ ID NO: 117536 - DNA, 30 bp, Artificial Sequence
  Synthetic oligonucleotide
cgcttagaaataaaactccgacagggctaa

SEQ ID NO: 117537 - DNA, 30 bp, Artificial Sequence
  Synthetic oligonucleotide
tctatggatgtattaatgggaattggctaa

SEQ ID NO: 117538 - DNA, 30 bp, Artificial Sequence
  Synthetic oligonucleotide
agaagtgatcgccttttcgtaatttgctaa

SEQ ID NO: 117539 - DNA, 30 bp, Artificial Sequence
  Synthetic oligonucleotide
agctacatgatttttaaacctatcatctaa

SEQ ID NO: 117540 - DNA, 30 bp, Artificial Sequence
  Synthetic oligonucleotide
ggaggttaaggaaagtgacaattcatctaa

SEQ ID NO: 117541 - DNA, 30 bp, Artificial Sequence
  Synthetic oligonucleotide
ccgagacacacggatcattgtcaagtctaa

SEQ ID NO: 117542 - DNA, 30 bp, Artificial Sequence
  Synthetic oligonucleotide
cctcatgctggccgaggttaccgagtctaa

SEQ ID NO: 117543 - DNA, 30 bp, Artificial Sequence
  Synthetic oligonucleotide
ttggttacaagtctgcagaggggtgtctaa

SEQ ID NO: 117544 - DNA, 30 bp, Artificial Sequence
  Synthetic oligonucleotide
cgtggcgttataaccggagcgaccttctaa

SEQ ID NO: 117545 - DNA, 30 bp, Artificial Sequence
  Synthetic oligonucleotide
gcgctggttgagaatagcccctagttctaa

SEQ ID NO: 117546 - DNA, 30 bp, Artificial Sequence
  Synthetic oligonucleotide
ctcgaataagcgtggtaggacgtcaagtaa

SEQ ID NO: 117547 - DNA, 30 bp, Artificial Sequence
  Synthetic oligonucleotide
actataagggcaaattatgacaggaagtaa

SEQ ID NO: 117548 - DNA, 30 bp, Artificial Sequence
  Synthetic oligonucleotide
atcgcgatgattggtccagcactgaagtaa

SEQ ID NO: 117549 - DNA, 30 bp, Artificial Sequence
  Synthetic oligonucleotide
ctatccgtttccggcgtgaaccctaagtaa

SEQ ID NO: 117550 - DNA, 30 bp, Artificial Sequence
  Synthetic oligonucleotide
tatggaatggtggtttagccctctaagtaa

SEQ ID NO: 117551 - DNA, 30 bp, Artificial Sequence
  Synthetic oligonucleotide
ctagactcgaaatgtaggtaggtacagtaa

SEQ ID NO: 117552 - DNA, 30 bp, Artificial Sequence
  Synthetic oligonucleotide
ggggaaccaatctaaggttacaagcagtaa

SEQ ID NO: 117553 - DNA, 30 bp, Artificial Sequence
  Synthetic oligonucleotide
cattcaaagaaaagacctaaacggcagtaa

SEQ ID NO: 117554 - DNA, 29 bp, Artificial Sequence
  Synthetic oligonucleotide
gggatcagacggcaacggtctctcagtaa

SEQ ID NO: 117555 - DNA, 30 bp, Artificial Sequence
  Synthetic oligonucleotide
agtcagttaagtgagcggtttagagagtaa

SEQ ID NO: 117556 - DNA, 30 bp, Artificial Sequence
  Synthetic oligonucleotide
atgtgagctgtaaggcggaggagggagtaa

SEQ ID NO: 117557 - DNA, 30 bp, Artificial Sequence
  Synthetic oligonucleotide
tcacgagccggagtgcggttagctgagtaa

SEQ ID NO: 117558 - DNA, 30 bp, Artificial Sequence
  Synthetic oligonucleotide
acagcacaatgaccttagcgtgttgagtaa

SEQ ID NO: 117559 - DNA, 30 bp, Artificial Sequence
  Synthetic oligonucleotide
gtctgaaggaaatcttaggttgcctagtaa

SEQ ID NO: 117560 - DNA, 30 bp, Artificial Sequence
  Synthetic oligonucleotide
cacccgggccagcgcgaaacagtctagtaa

SEQ ID NO: 117561 - DNA, 30 bp, Artificial Sequence
  Synthetic oligonucleotide
gttcatggggacaaatcgattagttagtaa

SEQ ID NO: 117562 - DNA, 30 bp, Artificial Sequence
  Synthetic oligonucleotide
aaaatgtaggactaggcgcccatgccgtaa

SEQ ID NO: 117563 - DNA, 30 bp, Artificial Sequence
  Synthetic oligonucleotide
taaggggatacggaggcactgagtccgtaa

SEQ ID NO: 117564 - DNA, 30 bp, Artificial Sequence
  Synthetic oligonucleotide
cacatgtcaaaagtggaccaagttccgtaa

SEQ ID NO: 117565 - DNA, 30 bp, Artificial Sequence
  Synthetic oligonucleotide
gtcttcgcagacgaacatgacaaggcgtaa

SEQ ID NO: 117566 - DNA, 30 bp, Artificial Sequence
  Synthetic oligonucleotide
actcattagagcgcatcgccgtgatcgtaa

SEQ ID NO: 117567 - DNA, 30 bp, Artificial Sequence
  Synthetic oligonucleotide
aggacctagagcgtggttggttattcgtaa

SEQ ID NO: 117568 - DNA, 30 bp, Artificial Sequence
  Synthetic oligonucleotide
acatatcaccccgattaaaaactaaggtaa

SEQ ID NO: 117569 - DNA, 30 bp, Artificial Sequence
  Synthetic oligonucleotide
aaaccgtaagaagaaataattgtcaggtaa

SEQ ID NO: 117570 - DNA, 30 bp, Artificial Sequence
  Synthetic oligonucleotide
tgggtgctcatcatggagagagaccggtaa

SEQ ID NO: 117571 - DNA, 30 bp, Artificial Sequence
  Synthetic oligonucleotide
tcggttcaaaacaattcatgagagcggtaa

SEQ ID NO: 117572 - DNA, 30 bp, Artificial Sequence
  Synthetic oligonucleotide
tcgaaacttctcagacgaacatagcggtaa

SEQ ID NO: 117573 - DNA, 30 bp, Artificial Sequence
  Synthetic oligonucleotide
caggcagatggagaggttcaaaatcggtaa

SEQ ID NO: 117574 - DNA, 30 bp, Artificial Sequence
  Synthetic oligonucleotide
ggtattgcaacagtcgacccccttcggtaa

SEQ ID NO: 117575 - DNA, 30 bp, Artificial Sequence
  Synthetic oligonucleotide
ggacagggatcggcgaccgaatttcggtaa

SEQ ID NO: 117576 - DNA, 30 bp, Artificial Sequence
  Synthetic oligonucleotide
cgcacaaggcacttctggccaagggggtaa

SEQ ID NO: 117577 - DNA, 30 bp, Artificial Sequence
  Synthetic oligonucleotide
cggttatcaacctatgtgaaaggggggtaa

SEQ ID NO: 117578 - DNA, 30 bp, Artificial Sequence
  Synthetic oligonucleotide
gggtcaagacgaccaaactctggggggtaa

SEQ ID NO: 117579 - DNA, 30 bp, Artificial Sequence
  Synthetic oligonucleotide
cgtcagcaggactagttcggctcgtggtaa

SEQ ID NO: 117580 - DNA, 30 bp, Artificial Sequence
  Synthetic oligonucleotide
gagctggtgtttaggacgtcactgtggtaa

SEQ ID NO: 117581 - DNA, 30 bp, Artificial Sequence
  Synthetic oligonucleotide
agataaactgtcaatgtcaaaacttggtaa

SEQ ID NO: 117582 - DNA, 28 bp, Artificial Sequence
  Synthetic oligonucleotide
cttgcatcaatgaggaattagttggtaa

SEQ ID NO: 117583 - DNA, 30 bp, Artificial Sequence
  Synthetic oligonucleotide
atacgcgcaaacgcacaatggccaatgtaa

SEQ ID NO: 117584 - DNA, 30 bp, Artificial Sequence
  Synthetic oligonucleotide
aggttaaactcttgcttagtaaacatgtaa

SEQ ID NO: 117585 - DNA, 30 bp, Artificial Sequence
  Synthetic oligonucleotide
atggaaacacgaacagacagctgcatgtaa

SEQ ID NO: 117586 - DNA, 30 bp, Artificial Sequence
  Synthetic oligonucleotide
acacggtaacaccatgacgttatactgtaa

SEQ ID NO: 117587 - DNA, 30 bp, Artificial Sequence
  Synthetic oligonucleotide
gacctggtaaaggaaacatccgacctgtaa

SEQ ID NO: 117588 - DNA, 30 bp, Artificial Sequence
  Synthetic oligonucleotide
aaggatttgggttctgacgtgagagtgtaa

SEQ ID NO: 117589 - DNA, 30 bp, Artificial Sequence
  Synthetic oligonucleotide
cacaccagatcacgcaagcgaaaggtgtaa

SEQ ID NO: 117590 - DNA, 30 bp, Artificial Sequence
  Synthetic oligonucleotide
gctactgataagatggactaaattttgtaa

SEQ ID NO: 117591 - DNA, 30 bp, Artificial Sequence
  Synthetic oligonucleotide
agtaagaccactcggaaattcctaaattaa

SEQ ID NO: 117592 - DNA, 30 bp, Artificial Sequence
  Synthetic oligonucleotide
acactgccgagcagtaaggggcggaattaa

SEQ ID NO: 117593 - DNA, 30 bp, Artificial Sequence
  Synthetic oligonucleotide
agcttagaaagttccaggatatggaattaa

SEQ ID NO: 117594 - DNA, 30 bp, Artificial Sequence
  Synthetic oligonucleotide
taggtgacccgagtaacggcgcataattaa

SEQ ID NO: 117595 - DNA, 30 bp, Artificial Sequence
  Synthetic oligonucleotide
cctcaaaggacgtatggtaaatctaattaa

SEQ ID NO: 117596 - DNA, 30 bp, Artificial Sequence
  Synthetic oligonucleotide
cactaaatatccgacccaagccgtaattaa

SEQ ID NO: 117597 - DNA, 30 bp, Artificial Sequence
  Synthetic oligonucleotide
ctggaccaggagtgtcgactggaacattaa

SEQ ID NO: 117598 - DNA, 30 bp, Artificial Sequence
  Synthetic oligonucleotide
tccatctcgagggtacaccatgaacattaa

SEQ ID NO: 117599 - DNA, 30 bp, Artificial Sequence
  Synthetic oligonucleotide
tctgtaaatactaccaaaaggcgacattaa

SEQ ID NO: 117600 - DNA, 30 bp, Artificial Sequence
  Synthetic oligonucleotide
ggatacgacaccactctaccaggccattaa

SEQ ID NO: 117601 - DNA, 30 bp, Artificial Sequence
  Synthetic oligonucleotide
aagataatgcgcactggaaaaaatcattaa

SEQ ID NO: 117602 - DNA, 30 bp, Artificial Sequence
  Synthetic oligonucleotide
atatcggaattagtgtggatcagtcattaa

SEQ ID NO: 117603 - DNA, 30 bp, Artificial Sequence
  Synthetic oligonucleotide
cacaggttttcggacgagacgagagattaa

SEQ ID NO: 117604 - DNA, 30 bp, Artificial Sequence
  Synthetic oligonucleotide
cgtgataacagcccggcccagcgtgattaa

SEQ ID NO: 117605 - DNA, 30 bp, Artificial Sequence
  Synthetic oligonucleotide
tcacgacagtaaggagaggttgactattaa

SEQ ID NO: 117606 - DNA, 30 bp, Artificial Sequence
  Synthetic oligonucleotide
aggggaactggagactggagaaacacttaa

SEQ ID NO: 117607 - DNA, 30 bp, Artificial Sequence
  Synthetic oligonucleotide
atgatagactagtagggacagtcaccttaa

SEQ ID NO: 117608 - DNA, 30 bp, Artificial Sequence
  Synthetic oligonucleotide
gatcgtaatccgtagtatatctccgcttaa

SEQ ID NO: 117609 - DNA, 30 bp, Artificial Sequence
  Synthetic oligonucleotide
aagactatgagacaacgggtggtcgcttaa

SEQ ID NO: 117610 - DNA, 30 bp, Artificial Sequence
  Synthetic oligonucleotide
gtcacattgcgcgaatataaagaggcttaa

SEQ ID NO: 117611 - DNA, 30 bp, Artificial Sequence
  Synthetic oligonucleotide
caagatactcttaatccgtgatgtgcttaa

SEQ ID NO: 117612 - DNA, 30 bp, Artificial Sequence
  Synthetic oligonucleotide
gctgcgaaagctgcatgattatagtcttaa

SEQ ID NO: 117613 - DNA, 30 bp, Artificial Sequence
  Synthetic oligonucleotide
acggatcggtgggaatgaggagcttcttaa

SEQ ID NO: 117614 - DNA, 30 bp, Artificial Sequence
  Synthetic oligonucleotide
gaagaaagcccttctaatgagaaaagttaa

SEQ ID NO: 117615 - DNA, 30 bp, Artificial Sequence
  Synthetic oligonucleotide
tatcgccactatctggtaattagcagttaa

SEQ ID NO: 117616 - DNA, 30 bp, Artificial Sequence
  Synthetic oligonucleotide
cgtggagacgggatctggggcgtgagttaa

SEQ ID NO: 117617 - DNA, 30 bp, Artificial Sequence
  Synthetic oligonucleotide
aggtatagtgtcgtactttagggtagttaa

SEQ ID NO: 117618 - DNA, 30 bp, Artificial Sequence
  Synthetic oligonucleotide
ggtggacataagtactcgacgaggcgttaa

SEQ ID NO: 117619 - DNA, 30 bp, Artificial Sequence
  Synthetic oligonucleotide
agtcgtatgacattgagccggcatcgttaa

SEQ ID NO: 117620 - DNA, 30 bp, Artificial Sequence
  Synthetic oligonucleotide
tgcacggaacgctaaatcacacatggttaa

SEQ ID NO: 117621 - DNA, 30 bp, Artificial Sequence
  Synthetic oligonucleotide
atgaggagataccggacccccgatggttaa

SEQ ID NO: 117622 - DNA, 30 bp, Artificial Sequence
  Synthetic oligonucleotide
gatatgtgacgttatctacaaggatgttaa

SEQ ID NO: 117623 - DNA, 30 bp, Artificial Sequence
  Synthetic oligonucleotide
gtcgttacagtcgagaaggctaactgttaa

SEQ ID NO: 117624 - DNA, 30 bp, Artificial Sequence
  Synthetic oligonucleotide
agtccaggaatattgcgcaaactgtgttaa

SEQ ID NO: 117625 - DNA, 30 bp, Artificial Sequence
  Synthetic oligonucleotide
gacagcgattattagagtcgcagttgttaa

SEQ ID NO: 117626 - DNA, 30 bp, Artificial Sequence
  Synthetic oligonucleotide
ggcataagagataatgaccaagtcctttaa

SEQ ID NO: 117627 - DNA, 30 bp, Artificial Sequence
  Synthetic oligonucleotide
aggtcgaacgtatataaagacaaagtttaa

SEQ ID NO: 117628 - DNA, 30 bp, Artificial Sequence
  Synthetic oligonucleotide
aagggagattcagcagaagaatcggtttaa

SEQ ID NO: 117629 - DNA, 30 bp, Artificial Sequence
  Synthetic oligonucleotide
tgtatcggtctaatacacagtaaaaaaaca

SEQ ID NO: 117630 - DNA, 30 bp, Artificial Sequence
  Synthetic oligonucleotide
atggcggagtttcgcgtgtcatgaaaaaca

SEQ ID NO: 117631 - DNA, 30 bp, Artificial Sequence
  Synthetic oligonucleotide
cgtgagagctttcggcattccttcaaaaca

SEQ ID NO: 117632 - DNA, 30 bp, Artificial Sequence
  Synthetic oligonucleotide
atgacaagaaccgctgccggtaggaaaaca

SEQ ID NO: 117633 - DNA, 30 bp, Artificial Sequence
  Synthetic oligonucleotide
aacgtgggggaatctcgcggtaaacaaaca

SEQ ID NO: 117634 - DNA, 30 bp, Artificial Sequence
  Synthetic oligonucleotide
caaacggcgcatccacgtccgcaagaaaca

SEQ ID NO: 117635 - DNA, 30 bp, Artificial Sequence
  Synthetic oligonucleotide
gatagtgcgtcctagaacagccaataaaca

SEQ ID NO: 117636 - DNA, 30 bp, Artificial Sequence
  Synthetic oligonucleotide
gcaagggatcgcagaaaaggattgtaaaca

SEQ ID NO: 117637 - DNA, 30 bp, Artificial Sequence
  Synthetic oligonucleotide
aacacgtagctcctgctagactcttaaaca

SEQ ID NO: 117638 - DNA, 30 bp, Artificial Sequence
  Synthetic oligonucleotide
gccgtcgtaccgtggttaacgatttaaaca

SEQ ID NO: 117639 - DNA, 30 bp, Artificial Sequence
  Synthetic oligonucleotide
gctgggagtgtatcaagatgggtttaaaca

SEQ ID NO: 117640 - DNA, 30 bp, Artificial Sequence
  Synthetic oligonucleotide
gtcacacattcgaagttgtattgaacaaca

SEQ ID NO: 117641 - DNA, 30 bp, Artificial Sequence
  Synthetic oligonucleotide
gcatgtctccagcgtgctcacataacaaca

SEQ ID NO: 117642 - DNA, 30 bp, Artificial Sequence
  Synthetic oligonucleotide
gcaaaaggcgcgtagtcatatgtcacaaca

SEQ ID NO: 117643 - DNA, 30 bp, Artificial Sequence
  Synthetic oligonucleotide
attcgactcaaggacagaccagctacaaca

SEQ ID NO: 117644 - DNA, 31 bp, Artificial Sequence
  Synthetic oligonucleotide
atttgacgagtgggccagcaacataccaaca

SEQ ID NO: 117645 - DNA, 30 bp, Artificial Sequence
  Synthetic oligonucleotide
ccgaactagaagtgcacaggcgatccaaca

SEQ ID NO: 117646 - DNA, 30 bp, Artificial Sequence
  Synthetic oligonucleotide
gcgcgtggtgagttatgtgagagtccaaca

SEQ ID NO: 117647 - DNA, 30 bp, Artificial Sequence
  Synthetic oligonucleotide
tatcgtgataagccgagcatcgaagcaaca

SEQ ID NO: 117648 - DNA, 30 bp, Artificial Sequence
  Synthetic oligonucleotide
ttacttgattattggcccgaggacgcaaca

SEQ ID NO: 117649 - DNA, 30 bp, Artificial Sequence
  Synthetic oligonucleotide
cgtgtggcggcgtggagtgttgaggcaaca

SEQ ID NO: 117650 - DNA, 30 bp, Artificial Sequence
  Synthetic oligonucleotide
ggaagtgcatggctggctggtacggcaaca

SEQ ID NO: 117651 - DNA, 30 bp, Artificial Sequence
  Synthetic oligonucleotide
agcgaatcggccttttagttgcaatcaaca

SEQ ID NO: 117652 - DNA, 30 bp, Artificial Sequence
  Synthetic oligonucleotide
gccagtgactggggtcgaaaaagatcaaca

SEQ ID NO: 117653 - DNA, 30 bp, Artificial Sequence
  Synthetic oligonucleotide
gagacctaatcgctcggagctacgtcaaca

SEQ ID NO: 117654 - DNA, 30 bp, Artificial Sequence
  Synthetic oligonucleotide
tcatacatgaaaggggattctatgtcaaca

SEQ ID NO: 117655 - DNA, 30 bp, Artificial Sequence
  Synthetic oligonucleotide
acactgccaggaggccataacgaaagaaca

SEQ ID NO: 117656 - DNA, 30 bp, Artificial Sequence
  Synthetic oligonucleotide
gtaattgacatctcgtgtctccagagaaca

SEQ ID NO: 117657 - DNA, 30 bp, Artificial Sequence
  Synthetic oligonucleotide
ttgcgaggtgtataccttagcgttagaaca

SEQ ID NO: 117658 - DNA, 30 bp, Artificial Sequence
  Synthetic oligonucleotide
cgggaatacgagttcgtgctctttagaaca

SEQ ID NO: 117659 - DNA, 30 bp, Artificial Sequence
  Synthetic oligonucleotide
ggtacacaaccgcagccatcgatacgaaca

SEQ ID NO: 117660 - DNA, 30 bp, Artificial Sequence
  Synthetic oligonucleotide
gtccgatcaagacgagggaccccgcgaaca

SEQ ID NO: 117661 - DNA, 30 bp, Artificial Sequence
  Synthetic oligonucleotide
gcgttgggcggagcataaccatcgcgaaca

SEQ ID NO: 117662 - DNA, 30 bp, Artificial Sequence
  Synthetic oligonucleotide
catgtcacgtggtggggcttacgtcgaaca

SEQ ID NO: 117663 - DNA, 30 bp, Artificial Sequence
  Synthetic oligonucleotide
tcgtgtgggggagggaggtccccaggaaca

SEQ ID NO: 117664 - DNA, 30 bp, Artificial Sequence
  Synthetic oligonucleotide
tcgtatagcacgtgctaatgagtgggaaca

SEQ ID NO: 117665 - DNA, 30 bp, Artificial Sequence
  Synthetic oligonucleotide
cgtcccaaccgttttcttggccatggaaca

SEQ ID NO: 117666 - DNA, 30 bp, Artificial Sequence
  Synthetic oligonucleotide
ccggatggggacgagttgtgagcgtgaaca

SEQ ID NO: 117667 - DNA, 30 bp, Artificial Sequence
  Synthetic oligonucleotide
agatctcgtcgtcaagaggatggttgaaca

SEQ ID NO: 117668 - DNA, 30 bp, Artificial Sequence
  Synthetic oligonucleotide
tacgtgcgtacataccgaattgccataaca

SEQ ID NO: 117669 - DNA, 30 bp, Artificial Sequence
  Synthetic oligonucleotide
cacgtcgagtaacccactgtttaagtaaca

SEQ ID NO: 117670 - DNA, 30 bp, Artificial Sequence
  Synthetic oligonucleotide
gctcgacagcgtagatcagtcgccgtaaca

SEQ ID NO: 117671 - DNA, 30 bp, Artificial Sequence
  Synthetic oligonucleotide
actaaaggacataggaccccggtcgtaaca

SEQ ID NO: 117672 - DNA, 30 bp, Artificial Sequence
  Synthetic oligonucleotide
ggaaggtagtctgatgtcagtgtcgtaaca

SEQ ID NO: 117673 - DNA, 30 bp, Artificial Sequence
  Synthetic oligonucleotide
tcatggagtaccgtacggtgcaaaaacaca

SEQ ID NO: 117674 - DNA, 30 bp, Artificial Sequence
  Synthetic oligonucleotide
gcaaggacgatagagcacttttgaaacaca

SEQ ID NO: 117675 - DNA, 30 bp, Artificial Sequence
  Synthetic oligonucleotide
tgatggaagagcacgttacagaggaacaca

SEQ ID NO: 117676 - DNA, 30 bp, Artificial Sequence
  Synthetic oligonucleotide
tcgtactgtgtaagagtcggcagtaacaca

SEQ ID NO: 117677 - DNA, 30 bp, Artificial Sequence
  Synthetic oligonucleotide
gattaaggggagctaggaagatgtaacaca

SEQ ID NO: 117678 - DNA, 30 bp, Artificial Sequence
  Synthetic oligonucleotide
actacgcgcacccgagccgttgaacacaca

SEQ ID NO: 117679 - DNA, 30 bp, Artificial Sequence
  Synthetic oligonucleotide
tagtataaggggctagtgtggggagacaca

SEQ ID NO: 117680 - DNA, 30 bp, Artificial Sequence
  Synthetic oligonucleotide
cgaatacgccccccgggataaccggacaca

SEQ ID NO: 117681 - DNA, 30 bp, Artificial Sequence
  Synthetic oligonucleotide
tccagggcccaccacctgtcggctgacaca

SEQ ID NO: 117682 - DNA, 30 bp, Artificial Sequence
  Synthetic oligonucleotide
cctcaacggctaaatggccggctatacaca

SEQ ID NO: 117683 - DNA, 30 bp, Artificial Sequence
  Synthetic oligonucleotide
gtgagcgataatgtagcgcccttgtacaca

SEQ ID NO: 117684 - DNA, 30 bp, Artificial Sequence
  Synthetic oligonucleotide
gtgcgcgttgaatttttaggatcaaccaca

SEQ ID NO: 117685 - DNA, 30 bp, Artificial Sequence
  Synthetic oligonucleotide
ttcctgagaccactcaccttacgtgccaca

SEQ ID NO: 117686 - DNA, 30 bp, Artificial Sequence
  Synthetic oligonucleotide
ccagactcagtggcgatgagtgactccaca

SEQ ID NO: 117687 - DNA, 30 bp, Artificial Sequence
  Synthetic oligonucleotide
attgcaagccggaaaggtaggacgtccaca

SEQ ID NO: 117688 - DNA, 30 bp, Artificial Sequence
  Synthetic oligonucleotide
tacaacgcagaaaccttcgtaccgtccaca

SEQ ID NO: 117689 - DNA, 30 bp, Artificial Sequence
  Synthetic oligonucleotide
catacctgatctcaaatgtatggttccaca

SEQ ID NO: 117690 - DNA, 30 bp, Artificial Sequence
  Synthetic oligonucleotide
aagatatgagtgcccaataagcaaagcaca

SEQ ID NO: 117691 - DNA, 30 bp, Artificial Sequence
  Synthetic oligonucleotide
ttcggggggacagtggcatgtaatagcaca

SEQ ID NO: 117692 - DNA, 30 bp, Artificial Sequence
  Synthetic oligonucleotide
aagcccaagccggcacaagacgaccgcaca

SEQ ID NO: 117693 - DNA, 30 bp, Artificial Sequence
  Synthetic oligonucleotide
tcgaccgatactgacattgaatatcgcaca

SEQ ID NO: 117694 - DNA, 29 bp, Artificial Sequence
  Synthetic oligonucleotide
tttcatcaaagagggggcaggaatgcaca

SEQ ID NO: 117695 - DNA, 30 bp, Artificial Sequence
  Synthetic oligonucleotide
tcagaccagtcgatgtaagcgtgatgcaca

SEQ ID NO: 117696 - DNA, 30 bp, Artificial Sequence
  Synthetic oligonucleotide
cagtgacagaaagaacgtcatggctgcaca

SEQ ID NO: 117697 - DNA, 30 bp, Artificial Sequence
  Synthetic oligonucleotide
gccgcggacactttcatgatgtggtgcaca

SEQ ID NO: 117698 - DNA, 30 bp, Artificial Sequence
  Synthetic oligonucleotide
gttcaccttgggaaacgagttaccatcaca

SEQ ID NO: 117699 - DNA, 30 bp, Artificial Sequence
  Synthetic oligonucleotide
aactcgagaggaatattaattacgatcaca

SEQ ID NO: 117700 - DNA, 30 bp, Artificial Sequence
  Synthetic oligonucleotide
gccctaacggacgccaaggaactcctcaca

SEQ ID NO: 117701 - DNA, 30 bp, Artificial Sequence
  Synthetic oligonucleotide
gtaggtgaaaagacgaacggcccagtcaca

SEQ ID NO: 117702 - DNA, 30 bp, Artificial Sequence
  Synthetic oligonucleotide
gcctaataagcggttcgcccgtgcgtcaca

SEQ ID NO: 117703 - DNA, 30 bp, Artificial Sequence
  Synthetic oligonucleotide
cactaggtaagttagtttgaaggggtcaca

SEQ ID NO: 117704 - DNA, 30 bp, Artificial Sequence
  Synthetic oligonucleotide
agacacgtagttggccaacagtttgtcaca

SEQ ID NO: 117705 - DNA, 30 bp, Artificial Sequence
  Synthetic oligonucleotide
gctggaagatctggctcaggactattcaca

SEQ ID NO: 117706 - DNA, 30 bp, Artificial Sequence
  Synthetic oligonucleotide
aaggtgtacggctagccatttttattcaca

SEQ ID NO: 117707 - DNA, 30 bp, Artificial Sequence
  Synthetic oligonucleotide
attgagtaaccgttagcacaatacttcaca

SEQ ID NO: 117708 - DNA, 30 bp, Artificial Sequence
  Synthetic oligonucleotide
cattaatagcggcgtcagacggtcttcaca

SEQ ID NO: 117709 - DNA, 31 bp, Artificial Sequence
  Synthetic oligonucleotide
acttagtcagagacgggacgaagtgttcaca

SEQ ID NO: 117710 - DNA, 30 bp, Artificial Sequence
  Synthetic oligonucleotide
acgcgattccttgttctcactcctttcaca

SEQ ID NO: 117711 - DNA, 30 bp, Artificial Sequence
  Synthetic oligonucleotide
tggatgcctctcgttgtgaatgaaaagaca

SEQ ID NO: 117712 - DNA, 30 bp, Artificial Sequence
  Synthetic oligonucleotide
agccctcccgcgctcgggcctaagaagaca

SEQ ID NO: 117713 - DNA, 30 bp, Artificial Sequence
  Synthetic oligonucleotide
agcgattgtaaagggtagggtaagaagaca

SEQ ID NO: 117714 - DNA, 30 bp, Artificial Sequence
  Synthetic oligonucleotide
actgataagttaaggccccagcagaagaca

SEQ ID NO: 117715 - DNA, 30 bp, Artificial Sequence
  Synthetic oligonucleotide
gaggtgtagtacacgtgtgattcgaagaca

SEQ ID NO: 117716 - DNA, 30 bp, Artificial Sequence
  Synthetic oligonucleotide
gactgccgtagaaacgacacgtgtaagaca

SEQ ID NO: 117717 - DNA, 30 bp, Artificial Sequence
  Synthetic oligonucleotide
cttgccacgagttctcggtaagaacagaca

SEQ ID NO: 117718 - DNA, 30 bp, Artificial Sequence
  Synthetic oligonucleotide
ccgacggtgtccacccgaggccgacagaca

SEQ ID NO: 117719 - DNA, 30 bp, Artificial Sequence
  Synthetic oligonucleotide
ctaccccgaccaactgtaaacgtacagaca

SEQ ID NO: 117720 - DNA, 30 bp, Artificial Sequence
  Synthetic oligonucleotide
cacgttgataggtacgatagtctccagaca

SEQ ID NO: 117721 - DNA, 30 bp, Artificial Sequence
  Synthetic oligonucleotide
gcgagtcaattgcgggtacggtcgcagaca

SEQ ID NO: 117722 - DNA, 30 bp, Artificial Sequence
  Synthetic oligonucleotide
gacgaggtgaatagcacgagcggtcagaca

SEQ ID NO: 117723 - DNA, 30 bp, Artificial Sequence
  Synthetic oligonucleotide
cttgccgactgtgccggggaaacagagaca

SEQ ID NO: 117724 - DNA, 30 bp, Artificial Sequence
  Synthetic oligonucleotide
tcgctgcaaatggtggcaggaccagagaca

SEQ ID NO: 117725 - DNA, 30 bp, Artificial Sequence
  Synthetic oligonucleotide
agggggtaggagatgatttcatgtgagaca

SEQ ID NO: 117726 - DNA, 30 bp, Artificial Sequence
  Synthetic oligonucleotide
gggggaaagttagctggccgatttgagaca

SEQ ID NO: 117727 - DNA, 30 bp, Artificial Sequence
  Synthetic oligonucleotide
tgcaacagatcctgaagggttgcttagaca

SEQ ID NO: 117728 - DNA, 30 bp, Artificial Sequence
  Synthetic oligonucleotide
acaggggctctacagacgtgttcaacgaca

SEQ ID NO: 117729 - DNA, 30 bp, Artificial Sequence
  Synthetic oligonucleotide
caggactatgacagattttggtccacgaca

SEQ ID NO: 117730 - DNA, 30 bp, Artificial Sequence
  Synthetic oligonucleotide
aagtaaggtgggcgcgcacaacacccgaca

SEQ ID NO: 117731 - DNA, 30 bp, Artificial Sequence
  Synthetic oligonucleotide
ggcagttgtaatgccaattgatctccgaca

SEQ ID NO: 117732 - DNA, 30 bp, Artificial Sequence
  Synthetic oligonucleotide
gcgttactggaaagagctaacatggcgaca

SEQ ID NO: 117733 - DNA, 30 bp, Artificial Sequence
  Synthetic oligonucleotide
cttaacatcgatagaaggagaggtgcgaca

SEQ ID NO: 117734 - DNA, 30 bp, Artificial Sequence
  Synthetic oligonucleotide
ggcatgagcatccgtttgatcgttgcgaca

SEQ ID NO: 117735 - DNA, 30 bp, Artificial Sequence
  Synthetic oligonucleotide
ataccgaagcaaatggtctgggtttcgaca

SEQ ID NO: 117736 - DNA, 30 bp, Artificial Sequence
  Synthetic oligonucleotide
ctatcgataaaaaactggctacgaaggaca

SEQ ID NO: 117737 - DNA, 30 bp, Artificial Sequence
  Synthetic oligonucleotide
atcctatccagcccgcgggcccgaaggaca

SEQ ID NO: 117738 - DNA, 30 bp, Artificial Sequence
  Synthetic oligonucleotide
gattcggaaagcaagcgaactgagaggaca

SEQ ID NO: 117739 - DNA, 30 bp, Artificial Sequence
  Synthetic oligonucleotide
acacgaggaattaggtcagattaacggaca

SEQ ID NO: 117740 - DNA, 30 bp, Artificial Sequence
  Synthetic oligonucleotide
ttcaagacaaacacacattttaatcggaca

SEQ ID NO: 117741 - DNA, 30 bp, Artificial Sequence
  Synthetic oligonucleotide
gactgctggcgggttctgaacaacgggaca

SEQ ID NO: 117742 - DNA, 30 bp, Artificial Sequence
  Synthetic oligonucleotide
caagctccggacaatctgaaaaaggggaca

SEQ ID NO: 117743 - DNA, 30 bp, Artificial Sequence
  Synthetic oligonucleotide
cgaatcttgcttctgcattagcaggggaca

SEQ ID NO: 117744 - DNA, 30 bp, Artificial Sequence
  Synthetic oligonucleotide
acgtaataggtaaactcatgacttgggaca

SEQ ID NO: 117745 - DNA, 30 bp, Artificial Sequence
  Synthetic oligonucleotide
ccaaccgatctatgactgggaaactggaca

SEQ ID NO: 117746 - DNA, 30 bp, Artificial Sequence
  Synthetic oligonucleotide
acaataactggtaatctgttggagtggaca

SEQ ID NO: 117747 - DNA, 30 bp, Artificial Sequence
  Synthetic oligonucleotide
aatacgctgatgaacgaaacgataatgaca

SEQ ID NO: 117748 - DNA, 30 bp, Artificial Sequence
  Synthetic oligonucleotide
gcaccaagcagttgagtgtttagcatgaca

SEQ ID NO: 117749 - DNA, 30 bp, Artificial Sequence
  Synthetic oligonucleotide
acaccggaaacggagaagtcagtcatgaca

SEQ ID NO: 117750 - DNA, 30 bp, Artificial Sequence
  Synthetic oligonucleotide
cacataaaaaaattgagcaagcctatgaca

SEQ ID NO: 117751 - DNA, 30 bp, Artificial Sequence
  Synthetic oligonucleotide
gcgtttgggccggataggacttcactgaca

SEQ ID NO: 117752 - DNA, 30 bp, Artificial Sequence
  Synthetic oligonucleotide
gggaagatcagtgaattctgattactgaca

SEQ ID NO: 117753 - DNA, 30 bp, Artificial Sequence
  Synthetic oligonucleotide
cgtgcgatcctcgaccatgcgccgctgaca

SEQ ID NO: 117754 - DNA, 30 bp, Artificial Sequence
  Synthetic oligonucleotide
gggtcaagaggcttaaaaaacaggctgaca

SEQ ID NO: 117755 - DNA, 30 bp, Artificial Sequence
  Synthetic oligonucleotide
caggttcattcatgaccaattgaagtgaca

SEQ ID NO: 117756 - DNA, 30 bp, Artificial Sequence
  Synthetic oligonucleotide
cggggacgtggatggtgctgaccagtgaca

SEQ ID NO: 117757 - DNA, 30 bp, Artificial Sequence
  Synthetic oligonucleotide
caaatgtgatctcacaacgtccgagtgaca

SEQ ID NO: 117758 - DNA, 30 bp, Artificial Sequence
  Synthetic oligonucleotide
cgacaacgagacagcctttcgaccgtgaca

SEQ ID NO: 117759 - DNA, 30 bp, Artificial Sequence
  Synthetic oligonucleotide
taaccgtggagagttataagcagcgtgaca

SEQ ID NO: 117760 - DNA, 30 bp, Artificial Sequence
  Synthetic oligonucleotide
gcggagaggtcaacttggtagtcattgaca

SEQ ID NO: 117761 - DNA, 30 bp, Artificial Sequence
  Synthetic oligonucleotide
cggctgcacagcgttggtgtaagattgaca

SEQ ID NO: 117762 - DNA, 30 bp, Artificial Sequence
  Synthetic oligonucleotide
aacgatggataggcaagtcgaggcaataca

SEQ ID NO: 117763 - DNA, 30 bp, Artificial Sequence
  Synthetic oligonucleotide
tatcgtgttcacagttttatgaagaataca

SEQ ID NO: 117764 - DNA, 30 bp, Artificial Sequence
  Synthetic oligonucleotide
gtcgctcccccaaagtggctggtacataca

SEQ ID NO: 117765 - DNA, 30 bp, Artificial Sequence
  Synthetic oligonucleotide
cgggcacgggacctggcctgatggcataca

SEQ ID NO: 117766 - DNA, 30 bp, Artificial Sequence
  Synthetic oligonucleotide
ggacaagagatcaggtacgtgcttcataca

SEQ ID NO: 117767 - DNA, 30 bp, Artificial Sequence
  Synthetic oligonucleotide
gaaggcatctggcaggtatggtcagataca

SEQ ID NO: 117768 - DNA, 30 bp, Artificial Sequence
  Synthetic oligonucleotide
gtgtccgtgacacatggtttgaacgataca

SEQ ID NO: 117769 - DNA, 30 bp, Artificial Sequence
  Synthetic oligonucleotide
cattcggatttcaccgtgaatggcgataca

SEQ ID NO: 117770 - DNA, 30 bp, Artificial Sequence
  Synthetic oligonucleotide
gcgagttctagcttaaaaggtgtcgataca

SEQ ID NO: 117771 - DNA, 30 bp, Artificial Sequence
  Synthetic oligonucleotide
gcaccgtcggatccggcatatcgggataca

SEQ ID NO: 117772 - DNA, 30 bp, Artificial Sequence
  Synthetic oligonucleotide
gacctacacgaaattaagaacggggataca

SEQ ID NO: 117773 - DNA, 30 bp, Artificial Sequence
  Synthetic oligonucleotide
gcagaagtcccattgtacatcatggataca

SEQ ID NO: 117774 - DNA, 30 bp, Artificial Sequence
  Synthetic oligonucleotide
caagtcggcgtagttacataggttgataca

SEQ ID NO: 117775 - DNA, 30 bp, Artificial Sequence
  Synthetic oligonucleotide
gtcggtagctatctgaataccacatataca

SEQ ID NO: 117776 - DNA, 30 bp, Artificial Sequence
  Synthetic oligonucleotide
cctacggatgaggctggagagtactataca

SEQ ID NO: 117777 - DNA, 30 bp, Artificial Sequence
  Synthetic oligonucleotide
ggaatgtcaacaacactccccacctataca

SEQ ID NO: 117778 - DNA, 30 bp, Artificial Sequence
  Synthetic oligonucleotide
ctagcaggttcgtactacaggtcgtataca

SEQ ID NO: 117779 - DNA, 30 bp, Artificial Sequence
  Synthetic oligonucleotide
cgcgtcagattcgaaatccatcggtataca

SEQ ID NO: 117780 - DNA, 30 bp, Artificial Sequence
  Synthetic oligonucleotide
ccgccttatcacaatcatccctggtataca

SEQ ID NO: 117781 - DNA, 30 bp, Artificial Sequence
  Synthetic oligonucleotide
ggggtatagatccgaccgagtaacactaca

SEQ ID NO: 117782 - DNA, 30 bp, Artificial Sequence
  Synthetic oligonucleotide
ttattttccagcgtgggcgcatgcactaca

SEQ ID NO: 117783 - DNA, 30 bp, Artificial Sequence
  Synthetic oligonucleotide
ggatgggataaattaacatatgcgactaca

SEQ ID NO: 117784 - DNA, 30 bp, Artificial Sequence
  Synthetic oligonucleotide
acttaccagggcccaggggcgaaacctaca

SEQ ID NO: 117785 - DNA, 30 bp, Artificial Sequence
  Synthetic oligonucleotide
ggagctgtgcttataatcgcgggacctaca

SEQ ID NO: 117786 - DNA, 30 bp, Artificial Sequence
  Synthetic oligonucleotide
gggatgtacagtctatcactgtcagctaca

SEQ ID NO: 117787 - DNA, 30 bp, Artificial Sequence
  Synthetic oligonucleotide
cgagtacgatagcggcatagcctagctaca

SEQ ID NO: 117788 - DNA, 30 bp, Artificial Sequence
  Synthetic oligonucleotide
aaactgacaactatgccagagagggctaca

SEQ ID NO: 117789 - DNA, 30 bp, Artificial Sequence
  Synthetic oligonucleotide
gtggttacgggcgtacagtctttggctaca

SEQ ID NO: 117790 - DNA, 30 bp, Artificial Sequence
  Synthetic oligonucleotide
aacgggcgccaaggcgtagagatctctaca

SEQ ID NO: 117791 - DNA, 30 bp, Artificial Sequence
  Synthetic oligonucleotide
gcaggcaactgcggaccgtcagagtctaca

SEQ ID NO: 117792 - DNA, 31 bp, Artificial Sequence
  Synthetic oligonucleotide
ccactatatgttggggcacacacgtagtaca

SEQ ID NO: 117793 - DNA, 30 bp, Artificial Sequence
  Synthetic oligonucleotide
ggtaaccaccagtgggctgccggtagtaca

SEQ ID NO: 117794 - DNA, 30 bp, Artificial Sequence
  Synthetic oligonucleotide
agagtgggtgtggaaatgtctgggcgtaca

SEQ ID NO: 117795 - DNA, 30 bp, Artificial Sequence
  Synthetic oligonucleotide
gcgtcgggacgtttttaatggcgtcgtaca

SEQ ID NO: 117796 - DNA, 30 bp, Artificial Sequence
  Synthetic oligonucleotide
gcgttggagtttagtgccagaatcggtaca

SEQ ID NO: 117797 - DNA, 30 bp, Artificial Sequence
  Synthetic oligonucleotide
cggtgatattgtccagggccgcatggtaca

SEQ ID NO: 117798 - DNA, 30 bp, Artificial Sequence
  Synthetic oligonucleotide
acagaaccttagggcgcgattcatggtaca

SEQ ID NO: 117799 - DNA, 30 bp, Artificial Sequence
  Synthetic oligonucleotide
ttagcgcggtcatctccaccagactgtaca

SEQ ID NO: 117800 - DNA, 30 bp, Artificial Sequence
  Synthetic oligonucleotide
atcgtcccaaaaaaggtaatcagttgtaca

SEQ ID NO: 117801 - DNA, 30 bp, Artificial Sequence
  Synthetic oligonucleotide
taaggcaaatggcttatccctctttgtaca

SEQ ID NO: 117802 - DNA, 30 bp, Artificial Sequence
  Synthetic oligonucleotide
caccgagatccgccaaaaatcctaattaca

SEQ ID NO: 117803 - DNA, 30 bp, Artificial Sequence
  Synthetic oligonucleotide
tataagaacagtaagttaagggacattaca

SEQ ID NO: 117804 - DNA, 30 bp, Artificial Sequence
  Synthetic oligonucleotide
ttaagcgagagactatgcgacagacttaca

SEQ ID NO: 117805 - DNA, 31 bp, Artificial Sequence
  Synthetic oligonucleotide
atattcggggcatcgagagtgtcgccttaca

SEQ ID NO: 117806 - DNA, 30 bp, Artificial Sequence
  Synthetic oligonucleotide
gtgcacgatgtccgatctggtccagttaca

SEQ ID NO: 117807 - DNA, 30 bp, Artificial Sequence
  Synthetic oligonucleotide
ccttctgccccgtgataccaagtcgttaca

SEQ ID NO: 117808 - DNA, 30 bp, Artificial Sequence
  Synthetic oligonucleotide
gatgaggaaaagcgattaatgggatttaca

SEQ ID NO: 117809 - DNA, 30 bp, Artificial Sequence
  Synthetic oligonucleotide
tacactgccagacttcaacttaactttaca

SEQ ID NO: 117810 - DNA, 30 bp, Artificial Sequence
  Synthetic oligonucleotide
acggtatctccttacgttcgctcccaacca

SEQ ID NO: 117811 - DNA, 30 bp, Artificial Sequence
  Synthetic oligonucleotide
ggcggtaagagtttacttgtctgtcaacca

SEQ ID NO: 117812 - DNA, 30 bp, Artificial Sequence
  Synthetic oligonucleotide
aaaggtccaaatctagttggtatagaacca

SEQ ID NO: 117813 - DNA, 30 bp, Artificial Sequence
  Synthetic oligonucleotide
cgatactgtgtaacccaggaacgtgaacca

SEQ ID NO: 117814 - DNA, 30 bp, Artificial Sequence
  Synthetic oligonucleotide
agagtaaggaaaggctactctggtgaacca

SEQ ID NO: 117815 - DNA, 30 bp, Artificial Sequence
  Synthetic oligonucleotide
gggacggagaggggctcgtacaactaacca

SEQ ID NO: 117816 - DNA, 30 bp, Artificial Sequence
  Synthetic oligonucleotide
gcgaagagaccttcgtcgtatgactaacca

SEQ ID NO: 117817 - DNA, 30 bp, Artificial Sequence
  Synthetic oligonucleotide
cgagaatagcatcatgagggacaaacacca

SEQ ID NO: 117818 - DNA, 30 bp, Artificial Sequence
  Synthetic oligonucleotide
ggatcgggaactgttcagcgggcaacacca

SEQ ID NO: 117819 - DNA, 30 bp, Artificial Sequence
  Synthetic oligonucleotide
tgtctgaaggcgaacgattaccgaacacca

SEQ ID NO: 117820 - DNA, 30 bp, Artificial Sequence
  Synthetic oligonucleotide
gcaatagatggttgtgggctggcgacacca

SEQ ID NO: 117821 - DNA, 31 bp, Artificial Sequence
  Synthetic oligonucleotide
tataagcagtctgatctgtaaattgacacca

SEQ ID NO: 117822 - DNA, 30 bp, Artificial Sequence
  Synthetic oligonucleotide
gggtgaacataaaaagtactatgcccacca

SEQ ID NO: 117823 - DNA, 30 bp, Artificial Sequence
  Synthetic oligonucleotide
ttagggtccggtggaaccagacggccacca

SEQ ID NO: 117824 - DNA, 30 bp, Artificial Sequence
  Synthetic oligonucleotide
cttacacctgcataaagtctcatagcacca

SEQ ID NO: 117825 - DNA, 30 bp, Artificial Sequence
  Synthetic oligonucleotide
gtaatacatcaaataatagggcacgcacca

SEQ ID NO: 117826 - DNA, 30 bp, Artificial Sequence
  Synthetic oligonucleotide
gatgcgatccgcaattggaaaatcgcacca

SEQ ID NO: 117827 - DNA, 30 bp, Artificial Sequence
  Synthetic oligonucleotide
ggaagggacttgcccacaatggaggcacca

SEQ ID NO: 117828 - DNA, 31 bp, Artificial Sequence
  Synthetic oligonucleotide
aatatcaacacctcaccagtagcgggcacca

SEQ ID NO: 117829 - DNA, 30 bp, Artificial Sequence
  Synthetic oligonucleotide
tgtcactaggacgctacgacgggtgcacca

SEQ ID NO: 117830 - DNA, 30 bp, Artificial Sequence
  Synthetic oligonucleotide
cagttcggtggcggggtacgggcatcacca

SEQ ID NO: 117831 - DNA, 30 bp, Artificial Sequence
  Synthetic oligonucleotide
cgtgaactagaagagtcctcctagtcacca

SEQ ID NO: 117832 - DNA, 30 bp, Artificial Sequence
  Synthetic oligonucleotide
cagtgccgatattcgaaccgatggtcacca

SEQ ID NO: 117833 - DNA, 30 bp, Artificial Sequence
  Synthetic oligonucleotide
aaaggtacatggtgatgattcctcagacca

SEQ ID NO: 117834 - DNA, 30 bp, Artificial Sequence
  Synthetic oligonucleotide
gcattaaaaccatattaattgaatagacca

SEQ ID NO: 117835 - DNA, 30 bp, Artificial Sequence
  Synthetic oligonucleotide
ctcgagagtctgcgcagccacatacgacca

SEQ ID NO: 117836 - DNA, 30 bp, Artificial Sequence
  Synthetic oligonucleotide
caaattcggctacgatcccctgtccgacca

SEQ ID NO: 117837 - DNA, 30 bp, Artificial Sequence
  Synthetic oligonucleotide
ggctgatcatatccggttagaaaaggacca

SEQ ID NO: 117838 - DNA, 30 bp, Artificial Sequence
  Synthetic oligonucleotide
cgacttgaatcaaagacaaagcggggacca

SEQ ID NO: 117839 - DNA, 30 bp, Artificial Sequence
  Synthetic oligonucleotide
gcgatagattctgggaaatacatgggacca

SEQ ID NO: 117840 - DNA, 30 bp, Artificial Sequence
  Synthetic oligonucleotide
tcacgcgattactctcaatggcgtggacca

SEQ ID NO: 117841 - DNA, 30 bp, Artificial Sequence
  Synthetic oligonucleotide
gttcagagcacttacatgtcggaatgacca

SEQ ID NO: 117842 - DNA, 30 bp, Artificial Sequence
  Synthetic oligonucleotide
aggaagtggttaatagttgccttatgacca

SEQ ID NO: 117843 - DNA, 30 bp, Artificial Sequence
  Synthetic oligonucleotide
cctcgttctcttcagagctgcgcaatacca

SEQ ID NO: 117844 - DNA, 30 bp, Artificial Sequence
  Synthetic oligonucleotide
ctgtggggagggaactggcacgccatacca

SEQ ID NO: 117845 - DNA, 30 bp, Artificial Sequence
  Synthetic oligonucleotide
tccttgggaagtgctaagtagtcgatacca

SEQ ID NO: 117846 - DNA, 30 bp, Artificial Sequence
  Synthetic oligonucleotide
catttccagtgccacacacaatggatacca

SEQ ID NO: 117847 - DNA, 30 bp, Artificial Sequence
  Synthetic oligonucleotide
tgtacaatgcgacgttggacgatgatacca

SEQ ID NO: 117848 - DNA, 30 bp, Artificial Sequence
  Synthetic oligonucleotide
tgcgaagtaaattccctgacgccactacca

SEQ ID NO: 117849 - DNA, 30 bp, Artificial Sequence
  Synthetic oligonucleotide
ggcgggggaggttgctcgagtttgctacca

SEQ ID NO: 117850 - DNA, 30 bp, Artificial Sequence
  Synthetic oligonucleotide
cacagggtgttcgggggtcaaagtctacca

SEQ ID NO: 117851 - DNA, 30 bp, Artificial Sequence
  Synthetic oligonucleotide
ttaacatgcgttgaccagttgtatgtacca

SEQ ID NO: 117852 - DNA, 30 bp, Artificial Sequence
  Synthetic oligonucleotide
tcagacgtaaaccaatccagctctgtacca

SEQ ID NO: 117853 - DNA, 30 bp, Artificial Sequence
  Synthetic oligonucleotide
gggaatatatccgtagtgactccattacca

SEQ ID NO: 117854 - DNA, 30 bp, Artificial Sequence
  Synthetic oligonucleotide
ctggaataggctagtagttgcagaaaccca

SEQ ID NO: 117855 - DNA, 30 bp, Artificial Sequence
  Synthetic oligonucleotide
agaactgtatcgcgccaccttgagaaccca

SEQ ID NO: 117856 - DNA, 30 bp, Artificial Sequence
  Synthetic oligonucleotide
actagtacggtggtatgcgatcctaaccca

SEQ ID NO: 117857 - DNA, 30 bp, Artificial Sequence
  Synthetic oligonucleotide
gcatcttcgtacaaataaaagattcaccca

SEQ ID NO: 117858 - DNA, 30 bp, Artificial Sequence
  Synthetic oligonucleotide
cactatcaccatagtgttaaggcagaccca

SEQ ID NO: 117859 - DNA, 30 bp, Artificial Sequence
  Synthetic oligonucleotide
ggtcaggatctcaaacaacataacgaccca

SEQ ID NO: 117860 - DNA, 30 bp, Artificial Sequence
  Synthetic oligonucleotide
cctataccgccttgattcgctaccgaccca

SEQ ID NO: 117861 - DNA, 30 bp, Artificial Sequence
  Synthetic oligonucleotide
cggattccgtgattgttcaacctttaccca

SEQ ID NO: 117862 - DNA, 30 bp, Artificial Sequence
  Synthetic oligonucleotide
gaagtcgccacacactcgcacgtttaccca

SEQ ID NO: 117863 - DNA, 30 bp, Artificial Sequence
  Synthetic oligonucleotide
gtatcatgaccagactcgaataacgcccca

SEQ ID NO: 117864 - DNA, 30 bp, Artificial Sequence
  Synthetic oligonucleotide
atacacaaatgaagggacgcccacgcccca

SEQ ID NO: 117865 - DNA, 30 bp, Artificial Sequence
  Synthetic oligonucleotide
cacaaagtcgaggagacagatcgggcccca

SEQ ID NO: 117866 - DNA, 30 bp, Artificial Sequence
  Synthetic oligonucleotide
tgggggtagctgtcgcctaagggaagccca

SEQ ID NO: 117867 - DNA, 30 bp, Artificial Sequence
  Synthetic oligonucleotide
ctgatcaattaaaggtggaagcgcagccca

SEQ ID NO: 117868 - DNA, 30 bp, Artificial Sequence
  Synthetic oligonucleotide
gtgatgtttgaagagcgatcgattagccca

SEQ ID NO: 117869 - DNA, 30 bp, Artificial Sequence
  Synthetic oligonucleotide
gcaaagcttgttcagcgtggggttagccca

SEQ ID NO: 117870 - DNA, 30 bp, Artificial Sequence
  Synthetic oligonucleotide
gttgaacctaagctcaaatgcatccgccca

SEQ ID NO: 117871 - DNA, 30 bp, Artificial Sequence
  Synthetic oligonucleotide
acagataaaaaaaaagtgcaacaaatccca

SEQ ID NO: 117872 - DNA, 30 bp, Artificial Sequence
  Synthetic oligonucleotide
tggacgacgatggagttgaggaagatccca

SEQ ID NO: 117873 - DNA, 30 bp, Artificial Sequence
  Synthetic oligonucleotide
gtgacgacgaagcgcacaatgccactccca

SEQ ID NO: 117874 - DNA, 30 bp, Artificial Sequence
  Synthetic oligonucleotide
aggacagtcattgaggcccgatacctccca

SEQ ID NO: 117875 - DNA, 30 bp, Artificial Sequence
  Synthetic oligonucleotide
ccataacgttatatatggcgaacgctccca

SEQ ID NO: 117876 - DNA, 30 bp, Artificial Sequence
  Synthetic oligonucleotide
aggtgagatttcggccaataacacgtccca

SEQ ID NO: 117877 - DNA, 30 bp, Artificial Sequence
  Synthetic oligonucleotide
ggggggagtactggtgataacgacgtccca

SEQ ID NO: 117878 - DNA, 31 bp, Artificial Sequence
  Synthetic oligonucleotide
tagctacaagccgtcgctaacctgcgtccca

SEQ ID NO: 117879 - DNA, 30 bp, Artificial Sequence
  Synthetic oligonucleotide
tatacggttcaggcacgtcatcctgtccca

SEQ ID NO: 117880 - DNA, 30 bp, Artificial Sequence
  Synthetic oligonucleotide
atacgccggcgttgagccaccctaaagcca

SEQ ID NO: 117881 - DNA, 30 bp, Artificial Sequence
  Synthetic oligonucleotide
gccctcaacacctggcgacacaggaagcca

SEQ ID NO: 117882 - DNA, 30 bp, Artificial Sequence
  Synthetic oligonucleotide
catggcggcagaaatggggaatctaagcca

SEQ ID NO: 117883 - DNA, 30 bp, Artificial Sequence
  Synthetic oligonucleotide
caccaatctgtgcatggcgcataacagcca

SEQ ID NO: 117884 - DNA, 30 bp, Artificial Sequence
  Synthetic oligonucleotide
tgctaacctacagatcaaacaggccagcca

SEQ ID NO: 117885 - DNA, 30 bp, Artificial Sequence
  Synthetic oligonucleotide
catcatgacttagcaatccagaagcagcca

SEQ ID NO: 117886 - DNA, 30 bp, Artificial Sequence
  Synthetic oligonucleotide
gcgtccaaagtgctttttatgtccgagcca

SEQ ID NO: 117887 - DNA, 30 bp, Artificial Sequence
  Synthetic oligonucleotide
ctaacactagagaggcaaaatgtctagcca

SEQ ID NO: 117888 - DNA, 30 bp, Artificial Sequence
  Synthetic oligonucleotide
agatatacaaagctgtcagttaagtagcca

SEQ ID NO: 117889 - DNA, 30 bp, Artificial Sequence
  Synthetic oligonucleotide
aatgctcatggtggctagggacagtagcca

SEQ ID NO: 117890 - DNA, 30 bp, Artificial Sequence
  Synthetic oligonucleotide
agtgtcagaatgtaggtaaggaattagcca

SEQ ID NO: 117891 - DNA, 30 bp, Artificial Sequence
  Synthetic oligonucleotide
cttgattgaaccctggacttgtctccgcca

SEQ ID NO: 117892 - DNA, 30 bp, Artificial Sequence
  Synthetic oligonucleotide
gtcgttcagactgcacgattaaaagcgcca

SEQ ID NO: 117893 - DNA, 30 bp, Artificial Sequence
  Synthetic oligonucleotide
cagaaaggggcgattaacaacgcagcgcca

SEQ ID NO: 117894 - DNA, 30 bp, Artificial Sequence
  Synthetic oligonucleotide
agcctcatcacctataaagaagtgcggcca

SEQ ID NO: 117895 - DNA, 30 bp, Artificial Sequence
  Synthetic oligonucleotide
ctgtgccaaccccggaaacttgatcggcca

SEQ ID NO: 117896 - DNA, 30 bp, Artificial Sequence
  Synthetic oligonucleotide
tggcaaggatccatgacggacattcggcca

SEQ ID NO: 117897 - DNA, 30 bp, Artificial Sequence
  Synthetic oligonucleotide
tcaattggagacactactggacaagggcca

SEQ ID NO: 117898 - DNA, 30 bp, Artificial Sequence
  Synthetic oligonucleotide
atcagccggacagctgatgttactgggcca

SEQ ID NO: 117899 - DNA, 30 bp, Artificial Sequence
  Synthetic oligonucleotide
ttagggtatgcggcattctgaaagctgcca

SEQ ID NO: 117900 - DNA, 30 bp, Artificial Sequence
  Synthetic oligonucleotide
cagcaagtaacgctagtgctataagtgcca

SEQ ID NO: 117901 - DNA, 30 bp, Artificial Sequence
  Synthetic oligonucleotide
agcatagcccagattcagctagaggtgcca

SEQ ID NO: 117902 - DNA, 30 bp, Artificial Sequence
  Synthetic oligonucleotide
agtgactaccagagaaggactcttgtgcca

SEQ ID NO: 117903 - DNA, 30 bp, Artificial Sequence
  Synthetic oligonucleotide
cgtgttaggcacttatatcggcccttgcca

SEQ ID NO: 117904 - DNA, 30 bp, Artificial Sequence
  Synthetic oligonucleotide
tcttagaacaagatgatgcgcgtgttgcca

SEQ ID NO: 117905 - DNA, 30 bp, Artificial Sequence
  Synthetic oligonucleotide
ccccattaggtctcgaaaaaggccaatcca

SEQ ID NO: 117906 - DNA, 30 bp, Artificial Sequence
  Synthetic oligonucleotide
cgtagatatagttggtattcggggaatcca

SEQ ID NO: 117907 - DNA, 30 bp, Artificial Sequence
  Synthetic oligonucleotide
agaagcggaccaagtagccttgtgaatcca

SEQ ID NO: 117908 - DNA, 30 bp, Artificial Sequence
  Synthetic oligonucleotide
ggcgtaaaccatcctaaaatccgacatcca

SEQ ID NO: 117909 - DNA, 30 bp, Artificial Sequence
  Synthetic oligonucleotide
atggaaaggaaagggtctctgggacatcca

SEQ ID NO: 117910 - DNA, 30 bp, Artificial Sequence
  Synthetic oligonucleotide
cgtaaacatgcacgcagtgcccagcatcca

SEQ ID NO: 117911 - DNA, 30 bp, Artificial Sequence
  Synthetic oligonucleotide
ttacagatgcaacgagtcgcactgcatcca

SEQ ID NO: 117912 - DNA, 30 bp, Artificial Sequence
  Synthetic oligonucleotide
ggcgaaaatgtcaactgcaaccgtcatcca

SEQ ID NO: 117913 - DNA, 30 bp, Artificial Sequence
  Synthetic oligonucleotide
tggtggcactgtaatacacgatctgatcca

SEQ ID NO: 117914 - DNA, 30 bp, Artificial Sequence
  Synthetic oligonucleotide
aaagcccagaatagagcagagcgtgatcca

SEQ ID NO: 117915 - DNA, 30 bp, Artificial Sequence
  Synthetic oligonucleotide
atataagaatgcaagactatgtggtatcca

SEQ ID NO: 117916 - DNA, 30 bp, Artificial Sequence
  Synthetic oligonucleotide
accgtgcaccaaggtggcccgcagcctcca

SEQ ID NO: 117917 - DNA, 30 bp, Artificial Sequence
  Synthetic oligonucleotide
tacacccccaatatcgtgattcggcctcca

SEQ ID NO: 117918 - DNA, 30 bp, Artificial Sequence
  Synthetic oligonucleotide
atggagaaagagtagtaaataaatcctcca

SEQ ID NO: 117919 - DNA, 30 bp, Artificial Sequence
  Synthetic oligonucleotide
agcgcgatcgtgcaagtccgtgctcctcca

SEQ ID NO: 117920 - DNA, 30 bp, Artificial Sequence
  Synthetic oligonucleotide
gtagcgtacgccgaccgaatgttagctcca

SEQ ID NO: 117921 - DNA, 30 bp, Artificial Sequence
  Synthetic oligonucleotide
atagtgaactagttgcgcttgacatctcca

SEQ ID NO: 117922 - DNA, 30 bp, Artificial Sequence
  Synthetic oligonucleotide
caaggtctcaataaaatgtaaccctctcca

SEQ ID NO: 117923 - DNA, 30 bp, Artificial Sequence
  Synthetic oligonucleotide
tcataagatattcatcaactacagagtcca

SEQ ID NO: 117924 - DNA, 30 bp, Artificial Sequence
  Synthetic oligonucleotide
aggagccagggcattaaggacgttagtcca

SEQ ID NO: 117925 - DNA, 30 bp, Artificial Sequence
  Synthetic oligonucleotide
gaaaacgtagttccagtgcggattcgtcca

SEQ ID NO: 117926 - DNA, 30 bp, Artificial Sequence
  Synthetic oligonucleotide
gtacctctagacccgaacgaagagggtcca

SEQ ID NO: 117927 - DNA, 30 bp, Artificial Sequence
  Synthetic oligonucleotide
acattagttcggagctattagaggtgtcca

SEQ ID NO: 117928 - DNA, 31 bp, Artificial Sequence
  Synthetic oligonucleotide
gaccagatctatatggggaaataattgtcca

SEQ ID NO: 117929 - DNA, 30 bp, Artificial Sequence
  Synthetic oligonucleotide
gttatgcctacagtgccagattattgtcca

SEQ ID NO: 117930 - DNA, 30 bp, Artificial Sequence
  Synthetic oligonucleotide
tcacgtactgaatcatatatggcaattcca

SEQ ID NO: 117931 - DNA, 30 bp, Artificial Sequence
  Synthetic oligonucleotide
acgctcagtacgactatcaatacgattcca

SEQ ID NO: 117932 - DNA, 30 bp, Artificial Sequence
  Synthetic oligonucleotide
ttcagtccaatggtaggagtacgtattcca

SEQ ID NO: 117933 - DNA, 30 bp, Artificial Sequence
  Synthetic oligonucleotide
gctggcggtcagtataagtccagagttcca

SEQ ID NO: 117934 - DNA, 30 bp, Artificial Sequence
  Synthetic oligonucleotide
caacaacgggcatcttatggtgaggttcca

SEQ ID NO: 117935 - DNA, 30 bp, Artificial Sequence
  Synthetic oligonucleotide
gggccgatgagggccggaaccatatttcca

SEQ ID NO: 117936 - DNA, 30 bp, Artificial Sequence
  Synthetic oligonucleotide
catgcacggtcggatgtaagagtatttcca

SEQ ID NO: 117937 - DNA, 30 bp, Artificial Sequence
  Synthetic oligonucleotide
gtggttgcgatgtgaccaattacttttcca

SEQ ID NO: 117938 - DNA, 30 bp, Artificial Sequence
  Synthetic oligonucleotide
ctgtaatcgatactttgatcagggaaagca

SEQ ID NO: 117939 - DNA, 30 bp, Artificial Sequence
  Synthetic oligonucleotide
tagatgcccgattcggttacgagtaaagca

SEQ ID NO: 117940 - DNA, 30 bp, Artificial Sequence
  Synthetic oligonucleotide
aaactgcgcaagcgacatcggttacaagca

SEQ ID NO: 117941 - DNA, 30 bp, Artificial Sequence
  Synthetic oligonucleotide
cattgcgaatattagtggcctcctcaagca

SEQ ID NO: 117942 - DNA, 30 bp, Artificial Sequence
  Synthetic oligonucleotide
gtctatcagaggacaggttaggctcaagca

SEQ ID NO: 117943 - DNA, 30 bp, Artificial Sequence
  Synthetic oligonucleotide
gcgtggctggcaatggggaatgctcaagca

SEQ ID NO: 117944 - DNA, 30 bp, Artificial Sequence
  Synthetic oligonucleotide
gctaagaagggttagttccccagagaagca

SEQ ID NO: 117945 - DNA, 30 bp, Artificial Sequence
  Synthetic oligonucleotide
taggatgcccagaagcatatccaggaagca

SEQ ID NO: 117946 - DNA, 30 bp, Artificial Sequence
  Synthetic oligonucleotide
tatcgccagagcgttacgggcggtgaagca

SEQ ID NO: 117947 - DNA, 30 bp, Artificial Sequence
  Synthetic oligonucleotide
atcgcaatgaacaattagtagagttaagca

SEQ ID NO: 117948 - DNA, 30 bp, Artificial Sequence
  Synthetic oligonucleotide
tacgtaagtagtactcttggaatttaagca

SEQ ID NO: 117949 - DNA, 30 bp, Artificial Sequence
  Synthetic oligonucleotide
ccaagaatctgcgtctgctcggcgacagca

SEQ ID NO: 117950 - DNA, 30 bp, Artificial Sequence
  Synthetic oligonucleotide
tgctaagcttggacttcagctcttacagca

SEQ ID NO: 117951 - DNA, 30 bp, Artificial Sequence
  Synthetic oligonucleotide
gaactagcaacgatatgggtaacgccagca

SEQ ID NO: 117952 - DNA, 30 bp, Artificial Sequence
  Synthetic oligonucleotide
acaagaaattacagcttcgtactagcagca

SEQ ID NO: 117953 - DNA, 30 bp, Artificial Sequence
  Synthetic oligonucleotide
atgcgacacatgaaaacgacgcccgcagca

SEQ ID NO: 117954 - DNA, 30 bp, Artificial Sequence
  Synthetic oligonucleotide
ctacagtcggtcccccaaaacgtggcagca

SEQ ID NO: 117955 - DNA, 30 bp, Artificial Sequence
  Synthetic oligonucleotide
acggagcaaagtagtatcaatacatcagca

SEQ ID NO: 117956 - DNA, 30 bp, Artificial Sequence
  Synthetic oligonucleotide
accgtagaagatttttctaggcactcagca

SEQ ID NO: 117957 - DNA, 30 bp, Artificial Sequence
  Synthetic oligonucleotide
accggctaagatttaacagagctctcagca

SEQ ID NO: 117958 - DNA, 30 bp, Artificial Sequence
  Synthetic oligonucleotide
aacaaaaaaggtcgtactggcgcgtcagca

SEQ ID NO: 117959 - DNA, 30 bp, Artificial Sequence
  Synthetic oligonucleotide
ctagtatcgcacagcgttaacacttcagca

SEQ ID NO: 117960 - DNA, 30 bp, Artificial Sequence
  Synthetic oligonucleotide
agcagggccattagcacccctctgagagca

SEQ ID NO: 117961 - DNA, 30 bp, Artificial Sequence
  Synthetic oligonucleotide
atgcgctggcattggtccagacatagagca

SEQ ID NO: 117962 - DNA, 30 bp, Artificial Sequence
  Synthetic oligonucleotide
taatatatggatatcgccaagcaacgagca

SEQ ID NO: 117963 - DNA, 30 bp, Artificial Sequence
  Synthetic oligonucleotide
gacaagataacttaaggtgtcatccgagca

SEQ ID NO: 117964 - DNA, 30 bp, Artificial Sequence
  Synthetic oligonucleotide
agtcaactttccgttagctctggtcgagca

SEQ ID NO: 117965 - DNA, 30 bp, Artificial Sequence
  Synthetic oligonucleotide
gatgaatgcgataattactccccgggagca

SEQ ID NO: 117966 - DNA, 30 bp, Artificial Sequence
  Synthetic oligonucleotide
ttaactattgaaaattcgatgatatgagca

SEQ ID NO: 117967 - DNA, 30 bp, Artificial Sequence
  Synthetic oligonucleotide
agcgcatatattattgttttgctatgagca

SEQ ID NO: 117968 - DNA, 30 bp, Artificial Sequence
  Synthetic oligonucleotide
ctagaacatccaagttatatcaaaatagca

SEQ ID NO: 117969 - DNA, 30 bp, Artificial Sequence
  Synthetic oligonucleotide
taaatcattgtcaaagatctcacgatagca

SEQ ID NO: 117970 - DNA, 30 bp, Artificial Sequence
  Synthetic oligonucleotide
tgggaaggggtgttaaatcaaactatagca

SEQ ID NO: 117971 - DNA, 30 bp, Artificial Sequence
  Synthetic oligonucleotide
ggtaaactcaagtggaccgggcgtatagca

SEQ ID NO: 117972 - DNA, 30 bp, Artificial Sequence
  Synthetic oligonucleotide
ggaatcccggtgggttaaaccgcactagca

SEQ ID NO: 117973 - DNA, 30 bp, Artificial Sequence
  Synthetic oligonucleotide
tacgtctaatacaccacggtacacctagca

SEQ ID NO: 117974 - DNA, 30 bp, Artificial Sequence
  Synthetic oligonucleotide
cagagatgtgtagaatggcacgtcctagca

SEQ ID NO: 117975 - DNA, 30 bp, Artificial Sequence
  Synthetic oligonucleotide
cctacacatgcgagcatttgggatctagca

SEQ ID NO: 117976 - DNA, 30 bp, Artificial Sequence
  Synthetic oligonucleotide
ggcagaacggccacgctaaacagtctagca

SEQ ID NO: 117977 - DNA, 30 bp, Artificial Sequence
  Synthetic oligonucleotide
agactggttcggctcaatgtgaaggtagca

SEQ ID NO: 117978 - DNA, 30 bp, Artificial Sequence
  Synthetic oligonucleotide
gttaccattgaggaaagttaatgggtagca

SEQ ID NO: 117979 - DNA, 30 bp, Artificial Sequence
  Synthetic oligonucleotide
aactttgcataaccgcaataatatgtagca

SEQ ID NO: 117980 - DNA, 31 bp, Artificial Sequence
  Synthetic oligonucleotide
aaccgtcccaagtcatagtagttagttagca

SEQ ID NO: 117981 - DNA, 30 bp, Artificial Sequence
  Synthetic oligonucleotide
ctgatgataccgctccttaaatctttagca

SEQ ID NO: 117982 - DNA, 30 bp, Artificial Sequence
  Synthetic oligonucleotide
gcaaaggtggttcgaatgagatgtttagca

SEQ ID NO: 117983 - DNA, 30 bp, Artificial Sequence
  Synthetic oligonucleotide
aggtaatgcgtgtcagctagcattttagca

SEQ ID NO: 117984 - DNA, 30 bp, Artificial Sequence
  Synthetic oligonucleotide
aaggggcattgggattttggcaacaacgca

SEQ ID NO: 117985 - DNA, 30 bp, Artificial Sequence
  Synthetic oligonucleotide
actggagttaagaagtggtgaatcaacgca

SEQ ID NO: 117986 - DNA, 30 bp, Artificial Sequence
  Synthetic oligonucleotide
gctaaatgtcatgattcaaccccacacgca

SEQ ID NO: 117987 - DNA, 30 bp, Artificial Sequence
  Synthetic oligonucleotide
ggtatccgacggacaacaggatcacacgca

SEQ ID NO: 117988 - DNA, 30 bp, Artificial Sequence
  Synthetic oligonucleotide
tgtacggatattgactcagggaaccacgca

SEQ ID NO: 117989 - DNA, 30 bp, Artificial Sequence
  Synthetic oligonucleotide
aacagagagtaagtcaacaggacgcacgca

SEQ ID NO: 117990 - DNA, 30 bp, Artificial Sequence
  Synthetic oligonucleotide
ccattcgattcaagattaggaaatcacgca

SEQ ID NO: 117991 - DNA, 30 bp, Artificial Sequence
  Synthetic oligonucleotide
atgggagtgacaatccagacgccatacgca

SEQ ID NO: 117992 - DNA, 30 bp, Artificial Sequence
  Synthetic oligonucleotide
acggcaaaccgaacgattcttatttacgca

SEQ ID NO: 117993 - DNA, 30 bp, Artificial Sequence
  Synthetic oligonucleotide
ggacaagtggctccggcaagaaagaccgca

SEQ ID NO: 117994 - DNA, 30 bp, Artificial Sequence
  Synthetic oligonucleotide
ctgtccagcagggagataaatccacccgca

SEQ ID NO: 117995 - DNA, 30 bp, Artificial Sequence
  Synthetic oligonucleotide
ggaccgtggactcactgcacggcacccgca

SEQ ID NO: 117996 - DNA, 30 bp, Artificial Sequence
  Synthetic oligonucleotide
tgacaaaggttggtgccaaactctcccgca

SEQ ID NO: 117997 - DNA, 30 bp, Artificial Sequence
  Synthetic oligonucleotide
aatctggagtgttcacacgaccacgccgca

SEQ ID NO: 117998 - DNA, 30 bp, Artificial Sequence
  Synthetic oligonucleotide
ctccctggtacggtacgatacctcgccgca

SEQ ID NO: 117999 - DNA, 30 bp, Artificial Sequence
  Synthetic oligonucleotide
aaaggtcccacctagggctaaggatccgca

SEQ ID NO: 118000 - DNA, 30 bp, Artificial Sequence
  Synthetic oligonucleotide
gctccaggtcaatagggcgggatcagcgca

SEQ ID NO: 118001 - DNA, 30 bp, Artificial Sequence
  Synthetic oligonucleotide
atgggtgctctacatgggggtctcagcgca

SEQ ID NO: 118002 - DNA, 30 bp, Artificial Sequence
  Synthetic oligonucleotide
gacggttttagcgtcggttcgactagcgca

SEQ ID NO: 118003 - DNA, 30 bp, Artificial Sequence
  Synthetic oligonucleotide
acagttggcacaagcagtataaaacgcgca

SEQ ID NO: 118004 - DNA, 30 bp, Artificial Sequence
  Synthetic oligonucleotide
cacggaggcgcagcaccgttcaggcgcgca

SEQ ID NO: 118005 - DNA, 30 bp, Artificial Sequence
  Synthetic oligonucleotide
gtcaccgttgttccggtcccattgcgcgca

SEQ ID NO: 118006 - DNA, 30 bp, Artificial Sequence
  Synthetic oligonucleotide
ttacggggcagagttccgggcgaaggcgca

SEQ ID NO: 118007 - DNA, 30 bp, Artificial Sequence
  Synthetic oligonucleotide
atgcgaacgggagaaccccgccggggcgca

SEQ ID NO: 118008 - DNA, 30 bp, Artificial Sequence
  Synthetic oligonucleotide
aggtaaatcccctgcacgtaacttggcgca

SEQ ID NO: 118009 - DNA, 30 bp, Artificial Sequence
  Synthetic oligonucleotide
gggttagcaacagggagcggacaaatcgca

SEQ ID NO: 118010 - DNA, 30 bp, Artificial Sequence
  Synthetic oligonucleotide
gagcccgaacgatcgcggatcgtcatcgca

SEQ ID NO: 118011 - DNA, 30 bp, Artificial Sequence
  Synthetic oligonucleotide
ggtgaggtgtcgaatcgtagtttcctcgca

SEQ ID NO: 118012 - DNA, 30 bp, Artificial Sequence
  Synthetic oligonucleotide
tctcccgcgtcacccgggagtacgctcgca

SEQ ID NO: 118013 - DNA, 30 bp, Artificial Sequence
  Synthetic oligonucleotide
gccatcgcattaaaaccacaaatgctcgca

SEQ ID NO: 118014 - DNA, 30 bp, Artificial Sequence
  Synthetic oligonucleotide
gggtaaatggatcacaatcgtggggtcgca

SEQ ID NO: 118015 - DNA, 30 bp, Artificial Sequence
  Synthetic oligonucleotide
atcatctcgacactgtgccagggtttcgca

SEQ ID NO: 118016 - DNA, 30 bp, Artificial Sequence
  Synthetic oligonucleotide
ctataaagtagtgaggaattatacaaggca

SEQ ID NO: 118017 - DNA, 30 bp, Artificial Sequence
  Synthetic oligonucleotide
atgtgcttgatgcaacaagattgacaggca

SEQ ID NO: 118018 - DNA, 30 bp, Artificial Sequence
  Synthetic oligonucleotide
gatcataggcacgattttatcgaccaggca

SEQ ID NO: 118019 - DNA, 30 bp, Artificial Sequence
  Synthetic oligonucleotide
agcaataattcggtttggaaccaagaggca

SEQ ID NO: 118020 - DNA, 30 bp, Artificial Sequence
  Synthetic oligonucleotide
ggataccgtttagcaacttaaggtgaggca

SEQ ID NO: 118021 - DNA, 30 bp, Artificial Sequence
  Synthetic oligonucleotide
ctggttgtcgagggaagacggagataggca

SEQ ID NO: 118022 - DNA, 30 bp, Artificial Sequence
  Synthetic oligonucleotide
cagcgccccgtgccaagcggatcctaggca

SEQ ID NO: 118023 - DNA, 30 bp, Artificial Sequence
  Synthetic oligonucleotide
acgaaagatatcgacgatcattagtaggca

SEQ ID NO: 118024 - DNA, 30 bp, Artificial Sequence
  Synthetic oligonucleotide
catacgcactcaacagatagtatgtaggca

SEQ ID NO: 118025 - DNA, 30 bp, Artificial Sequence
  Synthetic oligonucleotide
tgtcatgtagagcttcaagatccttaggca

SEQ ID NO: 118026 - DNA, 30 bp, Artificial Sequence
  Synthetic oligonucleotide
tctgtgcacgatatcaagtcatctacggca

SEQ ID NO: 118027 - DNA, 30 bp, Artificial Sequence
  Synthetic oligonucleotide
taaggactttcgaaggtagttctaccggca

SEQ ID NO: 118028 - DNA, 30 bp, Artificial Sequence
  Synthetic oligonucleotide
cggatcacacaaacacaggacaatccggca

SEQ ID NO: 118029 - DNA, 30 bp, Artificial Sequence
  Synthetic oligonucleotide
atcgaacactcggccctagtaaacgcggca

SEQ ID NO: 118030 - DNA, 30 bp, Artificial Sequence
  Synthetic oligonucleotide
cccaatcattacgttcttcaataggcggca

SEQ ID NO: 118031 - DNA, 30 bp, Artificial Sequence
  Synthetic oligonucleotide
ggtcataatggtcgaaccgtacgtgcggca

SEQ ID NO: 118032 - DNA, 30 bp, Artificial Sequence
  Synthetic oligonucleotide
ttgggccgagagtttgggagaataagggca

SEQ ID NO: 118033 - DNA, 30 bp, Artificial Sequence
  Synthetic oligonucleotide
taatagacgattaggttgcatatcagggca

SEQ ID NO: 118034 - DNA, 30 bp, Artificial Sequence
  Synthetic oligonucleotide
tgatcgaatattccggcggctcggagggca

SEQ ID NO: 118035 - DNA, 30 bp, Artificial Sequence
  Synthetic oligonucleotide
aggaaagatagctgacaggcagatagggca

SEQ ID NO: 118036 - DNA, 30 bp, Artificial Sequence
  Synthetic oligonucleotide
taagcaaaggcaggattatcacgtagggca

SEQ ID NO: 118037 - DNA, 30 bp, Artificial Sequence
  Synthetic oligonucleotide
ctacgtaagagaacgcgtggaaagcgggca

SEQ ID NO: 118038 - DNA, 30 bp, Artificial Sequence
  Synthetic oligonucleotide
actacacagcaatacggacagggaggggca

SEQ ID NO: 118039 - DNA, 31 bp, Artificial Sequence
  Synthetic oligonucleotide
gtcaggacgagaataaggcgttctaggggca

SEQ ID NO: 118040 - DNA, 30 bp, Artificial Sequence
  Synthetic oligonucleotide
tcgggacgaatggcgctagtcaacggggca

SEQ ID NO: 118041 - DNA, 30 bp, Artificial Sequence
  Synthetic oligonucleotide
acaacttacgctagctaacaggatggggca

SEQ ID NO: 118042 - DNA, 30 bp, Artificial Sequence
  Synthetic oligonucleotide
aaagctagattcaggaattcaggtggggca

SEQ ID NO: 118043 - DNA, 30 bp, Artificial Sequence
  Synthetic oligonucleotide
ggagtcaacatatcaaaggtcacatgggca

SEQ ID NO: 118044 - DNA, 30 bp, Artificial Sequence
  Synthetic oligonucleotide
cagaaccgttaattactcaacccttgggca

SEQ ID NO: 118045 - DNA, 30 bp, Artificial Sequence
  Synthetic oligonucleotide
gggtggatgagatctaggactcacatggca

SEQ ID NO: 118046 - DNA, 30 bp, Artificial Sequence
  Synthetic oligonucleotide
atgcaagccgacgaaggacccatcatggca

SEQ ID NO: 118047 - DNA, 30 bp, Artificial Sequence
  Synthetic oligonucleotide
gaagcgcggatccttgaagcatctatggca

SEQ ID NO: 118048 - DNA, 30 bp, Artificial Sequence
  Synthetic oligonucleotide
actccacgatgaggcacaaaggagctggca

SEQ ID NO: 118049 - DNA, 30 bp, Artificial Sequence
  Synthetic oligonucleotide
cagcactcgactccctcattaagagtggca

SEQ ID NO: 118050 - DNA, 30 bp, Artificial Sequence
  Synthetic oligonucleotide
agatccactactttctaacatctagtggca

SEQ ID NO: 118051 - DNA, 30 bp, Artificial Sequence
  Synthetic oligonucleotide
gttgtcggtaagacagaaccacgcgtggca

SEQ ID NO: 118052 - DNA, 30 bp, Artificial Sequence
  Synthetic oligonucleotide
ttcatatcgggtagtcaaggagcggtggca

SEQ ID NO: 118053 - DNA, 30 bp, Artificial Sequence
  Synthetic oligonucleotide
gcgactgtatcaccacctaacctgttggca

SEQ ID NO: 118054 - DNA, 30 bp, Artificial Sequence
  Synthetic oligonucleotide
tggatactgctgaactacctctgcaatgca

SEQ ID NO: 118055 - DNA, 30 bp, Artificial Sequence
  Synthetic oligonucleotide
ggtatctcgaaagcctaaccactgaatgca

SEQ ID NO: 118056 - DNA, 30 bp, Artificial Sequence
  Synthetic oligonucleotide
gacacgtgagctgtagtacaagaacatgca

SEQ ID NO: 118057 - DNA, 30 bp, Artificial Sequence
  Synthetic oligonucleotide
caaccaaagagaggaataaacgaccatgca

SEQ ID NO: 118058 - DNA, 30 bp, Artificial Sequence
  Synthetic oligonucleotide
acttgaccgaccaggtgactcggagatgca

SEQ ID NO: 118059 - DNA, 30 bp, Artificial Sequence
  Synthetic oligonucleotide
aaacctccgtgcgagcaagagtatgatgca

SEQ ID NO: 118060 - DNA, 30 bp, Artificial Sequence
  Synthetic oligonucleotide
ttgacgtgtctaaaagaataaccatatgca

SEQ ID NO: 118061 - DNA, 30 bp, Artificial Sequence
  Synthetic oligonucleotide
cgggcccaaatagtggttgtacggactgca

SEQ ID NO: 118062 - DNA, 30 bp, Artificial Sequence
  Synthetic oligonucleotide
atcgacctggacatgcttaacgcgcctgca

SEQ ID NO: 118063 - DNA, 30 bp, Artificial Sequence
  Synthetic oligonucleotide
ggagccaagacgacttatcgcccagctgca

SEQ ID NO: 118064 - DNA, 30 bp, Artificial Sequence
  Synthetic oligonucleotide
agtagagaagctgaagcaaggttggctgca

SEQ ID NO: 118065 - DNA, 30 bp, Artificial Sequence
  Synthetic oligonucleotide
ttgacttcgataggcggtggatctgctgca

SEQ ID NO: 118066 - DNA, 30 bp, Artificial Sequence
  Synthetic oligonucleotide
cacggcggagtaacttgagtcaggtctgca

SEQ ID NO: 118067 - DNA, 30 bp, Artificial Sequence
  Synthetic oligonucleotide
ggcgaactcgaccgcctccatctgtctgca

SEQ ID NO: 118068 - DNA, 30 bp, Artificial Sequence
  Synthetic oligonucleotide
ttgatctccccggaaaacagcggaagtgca

SEQ ID NO: 118069 - DNA, 30 bp, Artificial Sequence
  Synthetic oligonucleotide
acgatatccatggtatacccagtaagtgca

SEQ ID NO: 118070 - DNA, 30 bp, Artificial Sequence
  Synthetic oligonucleotide
cagggctcctattggtttgtgaccagtgca

SEQ ID NO: 118071 - DNA, 30 bp, Artificial Sequence
  Synthetic oligonucleotide
tcaacgcccattcattgcgtccctagtgca

SEQ ID NO: 118072 - DNA, 30 bp, Artificial Sequence
  Synthetic oligonucleotide
gctacaattacgaagttcagttcacgtgca

SEQ ID NO: 118073 - DNA, 30 bp, Artificial Sequence
  Synthetic oligonucleotide
tagcctgtaattcccgtaccgacccgtgca

SEQ ID NO: 118074 - DNA, 30 bp, Artificial Sequence
  Synthetic oligonucleotide
gatcagcacgggtagctctcgaccggtgca

SEQ ID NO: 118075 - DNA, 30 bp, Artificial Sequence
  Synthetic oligonucleotide
acgtgtccacaggcagagactcagtgtgca

SEQ ID NO: 118076 - DNA, 30 bp, Artificial Sequence
  Synthetic oligonucleotide
gctcaatgattaagtggcaagccgattgca

SEQ ID NO: 118077 - DNA, 30 bp, Artificial Sequence
  Synthetic oligonucleotide
tgcgacccgatgcctcgggaaacacttgca

SEQ ID NO: 118078 - DNA, 30 bp, Artificial Sequence
  Synthetic oligonucleotide
tggggatacatgccgtcggcttcacttgca

SEQ ID NO: 118079 - DNA, 30 bp, Artificial Sequence
  Synthetic oligonucleotide
aactggtccgtctacaaaaagaaatttgca

SEQ ID NO: 118080 - DNA, 30 bp, Artificial Sequence
  Synthetic oligonucleotide
tcaatccttatgtgatccgcgatgtttgca

SEQ ID NO: 118081 - DNA, 30 bp, Artificial Sequence
  Synthetic oligonucleotide
aaagagatgtgttcatcccggccaaaatca

SEQ ID NO: 118082 - DNA, 30 bp, Artificial Sequence
  Synthetic oligonucleotide
cgtgagacttaacccgatgtgtgcaaatca

SEQ ID NO: 118083 - DNA, 30 bp, Artificial Sequence
  Synthetic oligonucleotide
aagggcaagcttagaaaataaagtaaatca

SEQ ID NO: 118084 - DNA, 30 bp, Artificial Sequence
  Synthetic oligonucleotide
aaagagtattcgggtcgccccgcacaatca

SEQ ID NO: 118085 - DNA, 30 bp, Artificial Sequence
  Synthetic oligonucleotide
cgctcctggtatcatagtttatgcgaatca

SEQ ID NO: 118086 - DNA, 30 bp, Artificial Sequence
  Synthetic oligonucleotide
acaatctgaggggaagaggttccggaatca

SEQ ID NO: 118087 - DNA, 30 bp, Artificial Sequence
  Synthetic oligonucleotide
tgacgcatcggacaacatgcgggggaatca

SEQ ID NO: 118088 - DNA, 30 bp, Artificial Sequence
  Synthetic oligonucleotide
gcattattgacgacaaaggcttctgaatca

SEQ ID NO: 118089 - DNA, 30 bp, Artificial Sequence
  Synthetic oligonucleotide
cggtcgagacattcacccgtcaactaatca

SEQ ID NO: 118090 - DNA, 30 bp, Artificial Sequence
  Synthetic oligonucleotide
agttgtgtcatatagaatcagagctaatca

SEQ ID NO: 118091 - DNA, 30 bp, Artificial Sequence
  Synthetic oligonucleotide
tgcctgccccggaaccatcacgtctaatca

SEQ ID NO: 118092 - DNA, 30 bp, Artificial Sequence
  Synthetic oligonucleotide
catgtgactgtatagtggccggcgtaatca

SEQ ID NO: 118093 - DNA, 30 bp, Artificial Sequence
  Synthetic oligonucleotide
gggtgagtgctcgttcttgagatttaatca

SEQ ID NO: 118094 - DNA, 30 bp, Artificial Sequence
  Synthetic oligonucleotide
actttcctattagctgctcgaaaaacatca

SEQ ID NO: 118095 - DNA, 30 bp, Artificial Sequence
  Synthetic oligonucleotide
cgggcattcataacgtgaagaacaacatca

SEQ ID NO: 118096 - DNA, 30 bp, Artificial Sequence
  Synthetic oligonucleotide
tctcaggattaaaatgtggtgggaccatca

SEQ ID NO: 118097 - DNA, 30 bp, Artificial Sequence
  Synthetic oligonucleotide
gacggcggcgttgtgaaatttaggccatca

SEQ ID NO: 118098 - DNA, 30 bp, Artificial Sequence
  Synthetic oligonucleotide
ctcgcgaagcgcatcagcttagggccatca

SEQ ID NO: 118099 - DNA, 30 bp, Artificial Sequence
  Synthetic oligonucleotide
ccccatagagtagggaagtaacacgcatca

SEQ ID NO: 118100 - DNA, 30 bp, Artificial Sequence
  Synthetic oligonucleotide
atcttgagctggtgtcctgcgctcgcatca

SEQ ID NO: 118101 - DNA, 30 bp, Artificial Sequence
  Synthetic oligonucleotide
atccacgacacctgacggctccagagatca

SEQ ID NO: 118102 - DNA, 30 bp, Artificial Sequence
  Synthetic oligonucleotide
gttaattgctcgtatggaacggggagatca

SEQ ID NO: 118103 - DNA, 30 bp, Artificial Sequence
  Synthetic oligonucleotide
ggcatgcgttatattagggtggggagatca

SEQ ID NO: 118104 - DNA, 30 bp, Artificial Sequence
  Synthetic oligonucleotide
caaggctcgaaaggaactgggtatagatca

SEQ ID NO: 118105 - DNA, 30 bp, Artificial Sequence
  Synthetic oligonucleotide
ctggtcaaacctgctaaaggttagcgatca

SEQ ID NO: 118106 - DNA, 30 bp, Artificial Sequence
  Synthetic oligonucleotide
tggatagtaattgcaagtttagatcgatca

SEQ ID NO: 118107 - DNA, 30 bp, Artificial Sequence
  Synthetic oligonucleotide
gttggataagtaaacggccagagaggatca

SEQ ID NO: 118108 - DNA, 30 bp, Artificial Sequence
  Synthetic oligonucleotide
attgatggttagtctcctcagatcggatca

SEQ ID NO: 118109 - DNA, 28 bp, Artificial Sequence
  Synthetic oligonucleotide
acctggaagatggcgtctgatcggatca

SEQ ID NO: 118110 - DNA, 30 bp, Artificial Sequence
  Synthetic oligonucleotide
tatcgtctcgtgttgaagcgggtgggatca

SEQ ID NO: 118111 - DNA, 30 bp, Artificial Sequence
  Synthetic oligonucleotide
gaagtggtgggccaagcgatgggtggatca

SEQ ID NO: 118112 - DNA, 30 bp, Artificial Sequence
  Synthetic oligonucleotide
ctattcctaaggtatgaaatatcatgatca

SEQ ID NO: 118113 - DNA, 30 bp, Artificial Sequence
  Synthetic oligonucleotide
gaaggacagggatatgactattcctgatca

SEQ ID NO: 118114 - DNA, 30 bp, Artificial Sequence
  Synthetic oligonucleotide
ctgagggacctcgcggctgttggaatatca

SEQ ID NO: 118115 - DNA, 30 bp, Artificial Sequence
  Synthetic oligonucleotide
acgggtgatggggggttgggctgcatatca

SEQ ID NO: 118116 - DNA, 30 bp, Artificial Sequence
  Synthetic oligonucleotide
atgaggtactcaggccaagtgacactatca

SEQ ID NO: 118117 - DNA, 30 bp, Artificial Sequence
  Synthetic oligonucleotide
ccgccaataagtaatcatacgtgcctatca

SEQ ID NO: 118118 - DNA, 30 bp, Artificial Sequence
  Synthetic oligonucleotide
ggatagctgcgcgagccgaaagagctatca

SEQ ID NO: 118119 - DNA, 30 bp, Artificial Sequence
  Synthetic oligonucleotide
acggaaaaacagctgagcgctacgctatca

SEQ ID NO: 118120 - DNA, 30 bp, Artificial Sequence
  Synthetic oligonucleotide
tataacgtcatgtaccccacgactctatca

SEQ ID NO: 118121 - DNA, 30 bp, Artificial Sequence
  Synthetic oligonucleotide
tgggggtccggcgctgcgaatcacgtatca

SEQ ID NO: 118122 - DNA, 30 bp, Artificial Sequence
  Synthetic oligonucleotide
actcagcgtcgcacgacagaccccgtatca

SEQ ID NO: 118123 - DNA, 30 bp, Artificial Sequence
  Synthetic oligonucleotide
tgctgaaccggttaaggtcgtaaggtatca

SEQ ID NO: 118124 - DNA, 30 bp, Artificial Sequence
  Synthetic oligonucleotide
atgtgttccaggtcaagtgaagttgtatca

SEQ ID NO: 118125 - DNA, 30 bp, Artificial Sequence
  Synthetic oligonucleotide
acgggcccatatcgctaatcgtgtttatca

SEQ ID NO: 118126 - DNA, 30 bp, Artificial Sequence
  Synthetic oligonucleotide
cgccggcagaagtgcggattcattttatca

SEQ ID NO: 118127 - DNA, 30 bp, Artificial Sequence
  Synthetic oligonucleotide
acttatacacacggcctcactagaaactca

SEQ ID NO: 118128 - DNA, 30 bp, Artificial Sequence
  Synthetic oligonucleotide
caaccccacgaaaggaacttaaacaactca

SEQ ID NO: 118129 - DNA, 30 bp, Artificial Sequence
  Synthetic oligonucleotide
aaggttccgttaagagttgactataactca

SEQ ID NO: 118130 - DNA, 30 bp, Artificial Sequence
  Synthetic oligonucleotide
agattctgggatcgatggacttataactca

SEQ ID NO: 118131 - DNA, 30 bp, Artificial Sequence
  Synthetic oligonucleotide
ggcagggggcaggaagtccagtcagactca

SEQ ID NO: 118132 - DNA, 30 bp, Artificial Sequence
  Synthetic oligonucleotide
aagtacagcggtatagaggttatggactca

SEQ ID NO: 118133 - DNA, 30 bp, Artificial Sequence
  Synthetic oligonucleotide
gtgttaaacaattaacccgatagtgactca

SEQ ID NO: 118134 - DNA, 30 bp, Artificial Sequence
  Synthetic oligonucleotide
cgcagaaggaaaaggaggagccgaacctca

SEQ ID NO: 118135 - DNA, 30 bp, Artificial Sequence
  Synthetic oligonucleotide
caacgatgtgcttcataggggcgaacctca

SEQ ID NO: 118136 - DNA, 30 bp, Artificial Sequence
  Synthetic oligonucleotide
tcacaccgatgccgtaagtgtacgacctca

SEQ ID NO: 118137 - DNA, 30 bp, Artificial Sequence
  Synthetic oligonucleotide
ttggtaggtgggttgcgtgacataccctca

SEQ ID NO: 118138 - DNA, 30 bp, Artificial Sequence
  Synthetic oligonucleotide
ggttcatctttggtcagaaataccccctca

SEQ ID NO: 118139 - DNA, 30 bp, Artificial Sequence
  Synthetic oligonucleotide
cagacctaacagtggtctcatttcgcctca

SEQ ID NO: 118140 - DNA, 30 bp, Artificial Sequence
  Synthetic oligonucleotide
cacgtaattttaacaacatggagaagctca

SEQ ID NO: 118141 - DNA, 30 bp, Artificial Sequence
  Synthetic oligonucleotide
tggatccgtggcgaacacgggtcgagctca

SEQ ID NO: 118142 - DNA, 30 bp, Artificial Sequence
  Synthetic oligonucleotide
atctggatacaagagccagagaaacgctca

SEQ ID NO: 118143 - DNA, 30 bp, Artificial Sequence
  Synthetic oligonucleotide
aagcgtccacaaacaagaggcgtccgctca

SEQ ID NO: 118144 - DNA, 30 bp, Artificial Sequence
  Synthetic oligonucleotide
tagttaacctgagtttacaggtgtcgctca

SEQ ID NO: 118145 - DNA, 30 bp, Artificial Sequence
  Synthetic oligonucleotide
tacaaggatttgcaggggtatcaaggctca

SEQ ID NO: 118146 - DNA, 30 bp, Artificial Sequence
  Synthetic oligonucleotide
ccaaagagcattctcctcgacctaggctca

SEQ ID NO: 118147 - DNA, 30 bp, Artificial Sequence
  Synthetic oligonucleotide
cccgtcaggcatctgttacaattgggctca

SEQ ID NO: 118148 - DNA, 30 bp, Artificial Sequence
  Synthetic oligonucleotide
agtggatatttcgtaagtaattatggctca

SEQ ID NO: 118149 - DNA, 30 bp, Artificial Sequence
  Synthetic oligonucleotide
gctgtggagtacagatgaagacgatgctca

SEQ ID NO: 118150 - DNA, 30 bp, Artificial Sequence
  Synthetic oligonucleotide
ctaacaagcagcagttatggaggttgctca

SEQ ID NO: 118151 - DNA, 30 bp, Artificial Sequence
  Synthetic oligonucleotide
cccagacgaggacatggataatgttgctca

SEQ ID NO: 118152 - DNA, 30 bp, Artificial Sequence
  Synthetic oligonucleotide
aaataggtgtcgcttagcgtgatgatctca

SEQ ID NO: 118153 - DNA, 30 bp, Artificial Sequence
  Synthetic oligonucleotide
aaacgtcgaggaaatgacaccgtgatctca

SEQ ID NO: 118154 - DNA, 30 bp, Artificial Sequence
  Synthetic oligonucleotide
tcagttcgtgccgtaggttccgtgatctca

SEQ ID NO: 118155 - DNA, 30 bp, Artificial Sequence
  Synthetic oligonucleotide
actcaagcgtagagggactcggggctctca

SEQ ID NO: 118156 - DNA, 30 bp, Artificial Sequence
  Synthetic oligonucleotide
aagctgaccgggtgggaaagctaagtctca

SEQ ID NO: 118157 - DNA, 30 bp, Artificial Sequence
  Synthetic oligonucleotide
aaggtctgtaaatcaggggtgcttgtctca

SEQ ID NO: 118158 - DNA, 30 bp, Artificial Sequence
  Synthetic oligonucleotide
gaggggattgaggctttggattgtttctca

SEQ ID NO: 118159 - DNA, 30 bp, Artificial Sequence
  Synthetic oligonucleotide
aaacatgggatggacttggctagaaagtca

SEQ ID NO: 118160 - DNA, 30 bp, Artificial Sequence
  Synthetic oligonucleotide
acgtacccataaatctatgcctgaaagtca

SEQ ID NO: 118161 - DNA, 30 bp, Artificial Sequence
  Synthetic oligonucleotide
tttggtgtggaagggcaacccgcgaagtca

SEQ ID NO: 118162 - DNA, 30 bp, Artificial Sequence
  Synthetic oligonucleotide
tgtgctgaagtgctaagttcactacagtca

SEQ ID NO: 118163 - DNA, 30 bp, Artificial Sequence
  Synthetic oligonucleotide
gccggtccgattctattccttaaccagtca

SEQ ID NO: 118164 - DNA, 30 bp, Artificial Sequence
  Synthetic oligonucleotide
gcggcgtgtagcgctggaaatggccagtca

SEQ ID NO: 118165 - DNA, 30 bp, Artificial Sequence
  Synthetic oligonucleotide
gcctgagttatcagggagtacacgcagtca

SEQ ID NO: 118166 - DNA, 30 bp, Artificial Sequence
  Synthetic oligonucleotide
aacgtgctgctcggaccaaacgggcagtca

SEQ ID NO: 118167 - DNA, 30 bp, Artificial Sequence
  Synthetic oligonucleotide
aacaataaaaacaccgtatgccatcagtca

SEQ ID NO: 118168 - DNA, 30 bp, Artificial Sequence
  Synthetic oligonucleotide
gcctatacaaggctaagcacatgcgagtca

SEQ ID NO: 118169 - DNA, 30 bp, Artificial Sequence
  Synthetic oligonucleotide
gtcctgaacacataaaccacaaatgagtca

SEQ ID NO: 118170 - DNA, 30 bp, Artificial Sequence
  Synthetic oligonucleotide
ttagaaaatgcgacaccctgctttgagtca

SEQ ID NO: 118171 - DNA, 30 bp, Artificial Sequence
  Synthetic oligonucleotide
atagacgctaggaggccgtccaactagtca

SEQ ID NO: 118172 - DNA, 30 bp, Artificial Sequence
  Synthetic oligonucleotide
cccattaggatcggaagtgattagtagtca

SEQ ID NO: 118173 - DNA, 30 bp, Artificial Sequence
  Synthetic oligonucleotide
ttacgtccagtagccataaatctaacgtca

SEQ ID NO: 118174 - DNA, 30 bp, Artificial Sequence
  Synthetic oligonucleotide
ctcgctgttggagtggctaagggcacgtca

SEQ ID NO: 118175 - DNA, 30 bp, Artificial Sequence
  Synthetic oligonucleotide
aacatagctcagataagtaccccgacgtca

SEQ ID NO: 118176 - DNA, 29 bp, Artificial Sequence
  Synthetic oligonucleotide
gacactacatctgcaggacatcgacgtca

SEQ ID NO: 118177 - DNA, 30 bp, Artificial Sequence
  Synthetic oligonucleotide
gcatcagatgcaacttattggaatacgtca

SEQ ID NO: 118178 - DNA, 30 bp, Artificial Sequence
  Synthetic oligonucleotide
attacagtctagggcaacagcgctacgtca

SEQ ID NO: 118179 - DNA, 30 bp, Artificial Sequence
  Synthetic oligonucleotide
ccgacgctaacagcgtccaagtcaccgtca

SEQ ID NO: 118180 - DNA, 30 bp, Artificial Sequence
  Synthetic oligonucleotide
atcgcaaggagtcctgccaacggtccgtca

SEQ ID NO: 118181 - DNA, 30 bp, Artificial Sequence
  Synthetic oligonucleotide
actagtatgtcccagctagctggagcgtca

SEQ ID NO: 118182 - DNA, 30 bp, Artificial Sequence
  Synthetic oligonucleotide
tgccatgcatggcaagccaaatgatcgtca

SEQ ID NO: 118183 - DNA, 30 bp, Artificial Sequence
  Synthetic oligonucleotide
tagacaagtctcggaagagtagtatcgtca

SEQ ID NO: 118184 - DNA, 30 bp, Artificial Sequence
  Synthetic oligonucleotide
gtagttagtgagtagtgcataatgtcgtca

SEQ ID NO: 118185 - DNA, 30 bp, Artificial Sequence
  Synthetic oligonucleotide
gtgctcctgaaatagagggtgaccaggtca

SEQ ID NO: 118186 - DNA, 30 bp, Artificial Sequence
  Synthetic oligonucleotide
tcgaggccgggcagggtcagtggacggtca

SEQ ID NO: 118187 - DNA, 30 bp, Artificial Sequence
  Synthetic oligonucleotide
gatgaacccgcattgagactactacggtca

SEQ ID NO: 118188 - DNA, 30 bp, Artificial Sequence
  Synthetic oligonucleotide
gggaagtagccaattcaggcattgcggtca

SEQ ID NO: 118189 - DNA, 30 bp, Artificial Sequence
  Synthetic oligonucleotide
tactaagtgtaacgagcaccgtaggggtca

SEQ ID NO: 118190 - DNA, 30 bp, Artificial Sequence
  Synthetic oligonucleotide
ccccatagtgcccaccaggaccatgggtca

SEQ ID NO: 118191 - DNA, 30 bp, Artificial Sequence
  Synthetic oligonucleotide
tgcgcacagttaagttgtggcccctggtca

SEQ ID NO: 118192 - DNA, 30 bp, Artificial Sequence
  Synthetic oligonucleotide
ggtgagccggtactaaaaaaggcctggtca

SEQ ID NO: 118193 - DNA, 30 bp, Artificial Sequence
  Synthetic oligonucleotide
catcgcagtaggtattgaatgagctggtca

SEQ ID NO: 118194 - DNA, 30 bp, Artificial Sequence
  Synthetic oligonucleotide
gtgtgaagttgatgctccacgaagatgtca

SEQ ID NO: 118195 - DNA, 30 bp, Artificial Sequence
  Synthetic oligonucleotide
agtggcttccatccgtccgttcagatgtca

SEQ ID NO: 118196 - DNA, 30 bp, Artificial Sequence
  Synthetic oligonucleotide
gtcggtccagtctcaacatatatgctgtca

SEQ ID NO: 118197 - DNA, 30 bp, Artificial Sequence
  Synthetic oligonucleotide
aaacgtgagtgagcaccacgcctagtgtca

SEQ ID NO: 118198 - DNA, 30 bp, Artificial Sequence
  Synthetic oligonucleotide
agtaagggggacagcgtcccaacggtgtca

SEQ ID NO: 118199 - DNA, 30 bp, Artificial Sequence
  Synthetic oligonucleotide
gttagttcggagaacgtccagccggtgtca

SEQ ID NO: 118200 - DNA, 30 bp, Artificial Sequence
  Synthetic oligonucleotide
cgaggaaatcgggattgaacaaggttgtca

SEQ ID NO: 118201 - DNA, 30 bp, Artificial Sequence
  Synthetic oligonucleotide
ttagcgaaccctcaaccatgtagcaattca

SEQ ID NO: 118202 - DNA, 30 bp, Artificial Sequence
  Synthetic oligonucleotide
tgcggcgtggccttttgtggggtcaattca

SEQ ID NO: 118203 - DNA, 30 bp, Artificial Sequence
  Synthetic oligonucleotide
cggaagtgtcggtattagcttgcgaattca

SEQ ID NO: 118204 - DNA, 30 bp, Artificial Sequence
  Synthetic oligonucleotide
atacggtatgaagccagcgcggtgaattca

SEQ ID NO: 118205 - DNA, 30 bp, Artificial Sequence
  Synthetic oligonucleotide
ccctatattctgatcaagggacgtaattca

SEQ ID NO: 118206 - DNA, 30 bp, Artificial Sequence
  Synthetic oligonucleotide
agaccagcgcgtagagctgtcattaattca

SEQ ID NO: 118207 - DNA, 30 bp, Artificial Sequence
  Synthetic oligonucleotide
tattacgatcgccactgtcagtaacattca

SEQ ID NO: 118208 - DNA, 30 bp, Artificial Sequence
  Synthetic oligonucleotide
ccgccctagtttatatagaaaaacgattca

SEQ ID NO: 118209 - DNA, 30 bp, Artificial Sequence
  Synthetic oligonucleotide
tacctgaacaagattacagagcactattca

SEQ ID NO: 118210 - DNA, 30 bp, Artificial Sequence
  Synthetic oligonucleotide
ccttggcttaggtacagagttccaccttca

SEQ ID NO: 118211 - DNA, 30 bp, Artificial Sequence
  Synthetic oligonucleotide
acgaacagacgcgaagccattgttccttca

SEQ ID NO: 118212 - DNA, 30 bp, Artificial Sequence
  Synthetic oligonucleotide
agcacatctgtcctcgatggtttagcttca

SEQ ID NO: 118213 - DNA, 30 bp, Artificial Sequence
  Synthetic oligonucleotide
ccacatttacgaccaaaaccccctgcttca

SEQ ID NO: 118214 - DNA, 30 bp, Artificial Sequence
  Synthetic oligonucleotide
atcgatgccgcgtttagtcgggctgcttca

SEQ ID NO: 118215 - DNA, 31 bp, Artificial Sequence
  Synthetic oligonucleotide
tcgtcatactgatcttagccatattgcttca

SEQ ID NO: 118216 - DNA, 30 bp, Artificial Sequence
  Synthetic oligonucleotide
caggcgacacgttcccgaccttgatcttca

SEQ ID NO: 118217 - DNA, 30 bp, Artificial Sequence
  Synthetic oligonucleotide
agggccaggtgcggtgccactcattcttca

SEQ ID NO: 118218 - DNA, 30 bp, Artificial Sequence
  Synthetic oligonucleotide
cacaggttttcaggggcacgaccaagttca

SEQ ID NO: 118219 - DNA, 30 bp, Artificial Sequence
  Synthetic oligonucleotide
ctcatgtacaaaaacatcatcaccagttca

SEQ ID NO: 118220 - DNA, 30 bp, Artificial Sequence
  Synthetic oligonucleotide
agacttgaaaatggtacagtgcccagttca

SEQ ID NO: 118221 - DNA, 30 bp, Artificial Sequence
  Synthetic oligonucleotide
agatctccgagcagggttggtcccagttca

SEQ ID NO: 118222 - DNA, 30 bp, Artificial Sequence
  Synthetic oligonucleotide
atgggcacgcgacgccacatacggcgttca

SEQ ID NO: 118223 - DNA, 30 bp, Artificial Sequence
  Synthetic oligonucleotide
acttgagagttagtccaattgcggcgttca

SEQ ID NO: 118224 - DNA, 30 bp, Artificial Sequence
  Synthetic oligonucleotide
acgggaagacgatattaatatccaggttca

SEQ ID NO: 118225 - DNA, 30 bp, Artificial Sequence
  Synthetic oligonucleotide
agtaaaccacctgaatcattagggtgttca

SEQ ID NO: 118226 - DNA, 30 bp, Artificial Sequence
  Synthetic oligonucleotide
cgtgccaagaacgggtaacatgattgttca

SEQ ID NO: 118227 - DNA, 30 bp, Artificial Sequence
  Synthetic oligonucleotide
catgggattggaagtgtaccgtcttgttca

SEQ ID NO: 118228 - DNA, 30 bp, Artificial Sequence
  Synthetic oligonucleotide
ctacacgcgtattagtgtcagggtgtttca

SEQ ID NO: 118229 - DNA, 30 bp, Artificial Sequence
  Synthetic oligonucleotide
atgtggggtagcacaataaggtttgtttca

SEQ ID NO: 118230 - DNA, 30 bp, Artificial Sequence
  Synthetic oligonucleotide
tcgcgtcattcttaacacaggaaattttca

SEQ ID NO: 118231 - DNA, 30 bp, Artificial Sequence
  Synthetic oligonucleotide
ccctatcgaatcgaatgcgagaaaaaaaga

SEQ ID NO: 118232 - DNA, 30 bp, Artificial Sequence
  Synthetic oligonucleotide
ggcataggggctaagacggaacaaaaaaga

SEQ ID NO: 118233 - DNA, 30 bp, Artificial Sequence
  Synthetic oligonucleotide
gcgctcagatcaagtctcagcttaaaaaga

SEQ ID NO: 118234 - DNA, 30 bp, Artificial Sequence
  Synthetic oligonucleotide
ggaatgacaggatttggcggctacaaaaga

SEQ ID NO: 118235 - DNA, 30 bp, Artificial Sequence
  Synthetic oligonucleotide
ttgcatagatcattactgagcactaaaaga

SEQ ID NO: 118236 - DNA, 30 bp, Artificial Sequence
  Synthetic oligonucleotide
acttagcgggctcatctcgcgtctaaaaga

SEQ ID NO: 118237 - DNA, 30 bp, Artificial Sequence
  Synthetic oligonucleotide
cttacgatgagcgggccgcgtcaacaaaga

SEQ ID NO: 118238 - DNA, 30 bp, Artificial Sequence
  Synthetic oligonucleotide
catttgtcaagccatcagtaccagcaaaga

SEQ ID NO: 118239 - DNA, 30 bp, Artificial Sequence
  Synthetic oligonucleotide
tagggtttggtagcggatgtgagagaaaga

SEQ ID NO: 118240 - DNA, 30 bp, Artificial Sequence
  Synthetic oligonucleotide
agagtttcgcagaaggctaagatagaaaga

SEQ ID NO: 118241 - DNA, 30 bp, Artificial Sequence
  Synthetic oligonucleotide
aataaaaaggatcttgttccgttcgaaaga

SEQ ID NO: 118242 - DNA, 30 bp, Artificial Sequence
  Synthetic oligonucleotide
atccgctcggaccgctgccccagggaaaga

SEQ ID NO: 118243 - DNA, 30 bp, Artificial Sequence
  Synthetic oligonucleotide
gtgaaagttcgtcacgcatgagatgaaaga

SEQ ID NO: 118244 - DNA, 30 bp, Artificial Sequence
  Synthetic oligonucleotide
gggttctatcccattactccgtaataaaga

SEQ ID NO: 118245 - DNA, 30 bp, Artificial Sequence
  Synthetic oligonucleotide
accgaggcacccaacgtgtcactgtaaaga

SEQ ID NO: 118246 - DNA, 30 bp, Artificial Sequence
  Synthetic oligonucleotide
acatcagcatgggcacgcccacaaacaaga

SEQ ID NO: 118247 - DNA, 30 bp, Artificial Sequence
  Synthetic oligonucleotide
gggagaaaattaattgcggattggacaaga

SEQ ID NO: 118248 - DNA, 30 bp, Artificial Sequence
  Synthetic oligonucleotide
acgactcctagcagttttttactaccaaga

SEQ ID NO: 118249 - DNA, 30 bp, Artificial Sequence
  Synthetic oligonucleotide
tgggtggtttgacgatcaggaagcccaaga

SEQ ID NO: 118250 - DNA, 30 bp, Artificial Sequence
  Synthetic oligonucleotide
atgcatacctaggtaaggataacgccaaga

SEQ ID NO: 118251 - DNA, 30 bp, Artificial Sequence
  Synthetic oligonucleotide
agacagattatagcattagatactccaaga

SEQ ID NO: 118252 - DNA, 30 bp, Artificial Sequence
  Synthetic oligonucleotide
ggggtcttgtggaaatggacacaagcaaga

SEQ ID NO: 118253 - DNA, 30 bp, Artificial Sequence
  Synthetic oligonucleotide
tggggcaggattgtccacaggaaggcaaga

SEQ ID NO: 118254 - DNA, 30 bp, Artificial Sequence
  Synthetic oligonucleotide
tagagaatagatggagtatattaggcaaga

SEQ ID NO: 118255 - DNA, 30 bp, Artificial Sequence
  Synthetic oligonucleotide
acagtgtaagaggtctgggcggcatcaaga

SEQ ID NO: 118256 - DNA, 30 bp, Artificial Sequence
  Synthetic oligonucleotide
cagagaggggaacagtcgacttgcagaaga

SEQ ID NO: 118257 - DNA, 30 bp, Artificial Sequence
  Synthetic oligonucleotide
gtgttagggtttgggcattagaagagaaga

SEQ ID NO: 118258 - DNA, 30 bp, Artificial Sequence
  Synthetic oligonucleotide
agaggacgccatcattggttcaatagaaga

SEQ ID NO: 118259 - DNA, 30 bp, Artificial Sequence
  Synthetic oligonucleotide
gggaaaatccgctaatactggcaacgaaga

SEQ ID NO: 118260 - DNA, 30 bp, Artificial Sequence
  Synthetic oligonucleotide
cgcacaaataggccgtggacaagtcgaaga

SEQ ID NO: 118261 - DNA, 30 bp, Artificial Sequence
  Synthetic oligonucleotide
aaactcacgatttcagtggctaacggaaga

SEQ ID NO: 118262 - DNA, 30 bp, Artificial Sequence
  Synthetic oligonucleotide
atggcgatggtagggggcaggtacggaaga

SEQ ID NO: 118263 - DNA, 29 bp, Artificial Sequence
  Synthetic oligonucleotide
gccatagtcatacagcttccagcggaaga

SEQ ID NO: 118264 - DNA, 30 bp, Artificial Sequence
  Synthetic oligonucleotide
ggcaacctggttccaagttggtgcggaaga

SEQ ID NO: 118265 - DNA, 30 bp, Artificial Sequence
  Synthetic oligonucleotide
gtgtcaacccggcgagggtcaatcggaaga

SEQ ID NO: 118266 - DNA, 30 bp, Artificial Sequence
  Synthetic oligonucleotide
ttatgtgggcatcatgaagtgggtggaaga

SEQ ID NO: 118267 - DNA, 30 bp, Artificial Sequence
  Synthetic oligonucleotide
acgtcgcaggaatgcgtttccgtgtgaaga

SEQ ID NO: 118268 - DNA, 30 bp, Artificial Sequence
  Synthetic oligonucleotide
gaagttgttagtcgaaagagacattgaaga

SEQ ID NO: 118269 - DNA, 30 bp, Artificial Sequence
  Synthetic oligonucleotide
tatgagcctctagctgaaatcggttgaaga

SEQ ID NO: 118270 - DNA, 30 bp, Artificial Sequence
  Synthetic oligonucleotide
cagtgagttaggtccggactgagaataaga

SEQ ID NO: 118271 - DNA, 30 bp, Artificial Sequence
  Synthetic oligonucleotide
tttccagcgttaggaacaccgcgcataaga

SEQ ID NO: 118272 - DNA, 30 bp, Artificial Sequence
  Synthetic oligonucleotide
ctccatactggtgtgctgagacggataaga

SEQ ID NO: 118273 - DNA, 30 bp, Artificial Sequence
  Synthetic oligonucleotide
tggtagttgttcgatttcggtcggataaga

SEQ ID NO: 118274 - DNA, 30 bp, Artificial Sequence
  Synthetic oligonucleotide
tggaaccctgaggctttccactggataaga

SEQ ID NO: 118275 - DNA, 30 bp, Artificial Sequence
  Synthetic oligonucleotide
tatcgagtaactagagaaggcatgataaga

SEQ ID NO: 118276 - DNA, 30 bp, Artificial Sequence
  Synthetic oligonucleotide
ataccatttcggggtgcgcctatgataaga

SEQ ID NO: 118277 - DNA, 30 bp, Artificial Sequence
  Synthetic oligonucleotide
cacggcagatgacccgtgaggtttataaga

SEQ ID NO: 118278 - DNA, 30 bp, Artificial Sequence
  Synthetic oligonucleotide
gcgagagccaccacccaggccctactaaga

SEQ ID NO: 118279 - DNA, 30 bp, Artificial Sequence
  Synthetic oligonucleotide
ttggcggaacaaccttcactattactaaga

SEQ ID NO: 118280 - DNA, 30 bp, Artificial Sequence
  Synthetic oligonucleotide
gcggataatcagtacctcaggagtctaaga

SEQ ID NO: 118281 - DNA, 30 bp, Artificial Sequence
  Synthetic oligonucleotide
ggcgagtgcatctgtacccatgtagtaaga

SEQ ID NO: 118282 - DNA, 30 bp, Artificial Sequence
  Synthetic oligonucleotide
accacatggatcgacatagtagtgttaaga

SEQ ID NO: 118283 - DNA, 30 bp, Artificial Sequence
  Synthetic oligonucleotide
ggcacagccaatctataagggtgaaacaga

SEQ ID NO: 118284 - DNA, 30 bp, Artificial Sequence
  Synthetic oligonucleotide
gaaatcggaagagcaaagataacgaacaga

SEQ ID NO: 118285 - DNA, 30 bp, Artificial Sequence
  Synthetic oligonucleotide
atggtcttaaattggtataggtgacacaga

SEQ ID NO: 118286 - DNA, 30 bp, Artificial Sequence
  Synthetic oligonucleotide
ttaacacccgtgagaaaggctagtcacaga

SEQ ID NO: 118287 - DNA, 30 bp, Artificial Sequence
  Synthetic oligonucleotide
agtacctactagcccaaggaaaaagacaga

SEQ ID NO: 118288 - DNA, 30 bp, Artificial Sequence
  Synthetic oligonucleotide
cccttgtacataacatgcgagaaagacaga

SEQ ID NO: 118289 - DNA, 30 bp, Artificial Sequence
  Synthetic oligonucleotide
cctttccattggtaagatgcatgagacaga

SEQ ID NO: 118290 - DNA, 30 bp, Artificial Sequence
  Synthetic oligonucleotide
gtggtcactcggataatcttatgcgacaga

SEQ ID NO: 118291 - DNA, 30 bp, Artificial Sequence
  Synthetic oligonucleotide
cacttgtgggcgtcccgcgtatgtgacaga

SEQ ID NO: 118292 - DNA, 30 bp, Artificial Sequence
  Synthetic oligonucleotide
tttagacccttcctgggggcttgatacaga

SEQ ID NO: 118293 - DNA, 30 bp, Artificial Sequence
  Synthetic oligonucleotide
cttcggacgataggcggcgcatactacaga

SEQ ID NO: 118294 - DNA, 30 bp, Artificial Sequence
  Synthetic oligonucleotide
atgggtactatttaccagtatacctacaga

SEQ ID NO: 118295 - DNA, 30 bp, Artificial Sequence
  Synthetic oligonucleotide
gggttgacggcggtgacagcggcttacaga

SEQ ID NO: 118296 - DNA, 30 bp, Artificial Sequence
  Synthetic oligonucleotide
ggcgacaggtgggtaacgttactcaccaga

SEQ ID NO: 118297 - DNA, 30 bp, Artificial Sequence
  Synthetic oligonucleotide
cagcataaccgttgactgggtgataccaga

SEQ ID NO: 118298 - DNA, 30 bp, Artificial Sequence
  Synthetic oligonucleotide
tactatgatgtgtctgtcatcgctaccaga

SEQ ID NO: 118299 - DNA, 30 bp, Artificial Sequence
  Synthetic oligonucleotide
ctagaacgcacgggagtacagaaccccaga

SEQ ID NO: 118300 - DNA, 30 bp, Artificial Sequence
  Synthetic oligonucleotide
aaacacaggcacacagcaccgatccccaga

SEQ ID NO: 118301 - DNA, 30 bp, Artificial Sequence
  Synthetic oligonucleotide
cttcgaagcggaggccttcaaaaagccaga

SEQ ID NO: 118302 - DNA, 30 bp, Artificial Sequence
  Synthetic oligonucleotide
tggcgtacttcactacactcgcaagccaga

SEQ ID NO: 118303 - DNA, 30 bp, Artificial Sequence
  Synthetic oligonucleotide
tacgactccatcccactaggcccagccaga

SEQ ID NO: 118304 - DNA, 30 bp, Artificial Sequence
  Synthetic oligonucleotide
agttgccgcgtatacaggcaatgggccaga

SEQ ID NO: 118305 - DNA, 30 bp, Artificial Sequence
  Synthetic oligonucleotide
attactaatgttcaagatgctgaatccaga

SEQ ID NO: 118306 - DNA, 30 bp, Artificial Sequence
  Synthetic oligonucleotide
acttactagcggagtagcagaggctccaga

SEQ ID NO: 118307 - DNA, 30 bp, Artificial Sequence
  Synthetic oligonucleotide
agatacagtcgcatgacagcactctccaga

SEQ ID NO: 118308 - DNA, 30 bp, Artificial Sequence
  Synthetic oligonucleotide
gaaactccgtagcggtaaattacaagcaga

SEQ ID NO: 118309 - DNA, 30 bp, Artificial Sequence
  Synthetic oligonucleotide
taatgcgtacagcgtataggaatcagcaga

SEQ ID NO: 118310 - DNA, 30 bp, Artificial Sequence
  Synthetic oligonucleotide
tgtgtgctttgcatggacaactttagcaga

SEQ ID NO: 118311 - DNA, 30 bp, Artificial Sequence
  Synthetic oligonucleotide
ctgtgatcccttgggactcaaatgcgcaga

SEQ ID NO: 118312 - DNA, 30 bp, Artificial Sequence
  Synthetic oligonucleotide
tcaaaggctatcaagatcagagaaggcaga

SEQ ID NO: 118313 - DNA, 30 bp, Artificial Sequence
  Synthetic oligonucleotide
tcgtcgcgtgccaccgtgccggacggcaga

SEQ ID NO: 118314 - DNA, 30 bp, Artificial Sequence
  Synthetic oligonucleotide
tagcggtaggctcccgtggattacggcaga

SEQ ID NO: 118315 - DNA, 30 bp, Artificial Sequence
  Synthetic oligonucleotide
atgaatacatcagggaaaccaaccggcaga

SEQ ID NO: 118316 - DNA, 30 bp, Artificial Sequence
  Synthetic oligonucleotide
tttggagatcccgacatcaggggcggcaga

SEQ ID NO: 118317 - DNA, 30 bp, Artificial Sequence
  Synthetic oligonucleotide
cccaggtttggtagtgagtgctatggcaga

SEQ ID NO: 118318 - DNA, 30 bp, Artificial Sequence
  Synthetic oligonucleotide
agtagagccgtactttccaactgtggcaga

SEQ ID NO: 118319 - DNA, 30 bp, Artificial Sequence
  Synthetic oligonucleotide
aacgtggggagttatcataggtactgcaga

SEQ ID NO: 118320 - DNA, 30 bp, Artificial Sequence
  Synthetic oligonucleotide
ttgcttgaagctgctagtgtgggctgcaga

SEQ ID NO: 118321 - DNA, 30 bp, Artificial Sequence
  Synthetic oligonucleotide
ctggggaaggcttcccgataacaaatcaga

SEQ ID NO: 118322 - DNA, 30 bp, Artificial Sequence
  Synthetic oligonucleotide
ccctgtatccagaccgcgggtttaatcaga

SEQ ID NO: 118323 - DNA, 30 bp, Artificial Sequence
  Synthetic oligonucleotide
cttatttcttttataagtcgtttactcaga

SEQ ID NO: 118324 - DNA, 30 bp, Artificial Sequence
  Synthetic oligonucleotide
gattaatccaaggtgcaatccgggctcaga

SEQ ID NO: 118325 - DNA, 30 bp, Artificial Sequence
  Synthetic oligonucleotide
cccggtcctagggccactagaaaagtcaga

SEQ ID NO: 118326 - DNA, 30 bp, Artificial Sequence
  Synthetic oligonucleotide
aagcacaataggatgcatggatcagtcaga

SEQ ID NO: 118327 - DNA, 29 bp, Artificial Sequence
  Synthetic oligonucleotide
gctgtgaggcgaactattttagagtcaga

SEQ ID NO: 118328 - DNA, 30 bp, Artificial Sequence
  Synthetic oligonucleotide
gtccacccatctttaggatggtcggtcaga

SEQ ID NO: 118329 - DNA, 30 bp, Artificial Sequence
  Synthetic oligonucleotide
agtgaaagtagccacacctctcgtgtcaga

SEQ ID NO: 118330 - DNA, 30 bp, Artificial Sequence
  Synthetic oligonucleotide
taggatggttatggttgtgcgttcaagaga

SEQ ID NO: 118331 - DNA, 30 bp, Artificial Sequence
  Synthetic oligonucleotide
ttcgtaagtagtccgccaccatcccagaga

SEQ ID NO: 118332 - DNA, 30 bp, Artificial Sequence
  Synthetic oligonucleotide
gatattgtaaaaaatgagattacagagaga

SEQ ID NO: 118333 - DNA, 30 bp, Artificial Sequence
  Synthetic oligonucleotide
tcctgtacacaagaggatcaatcagagaga

SEQ ID NO: 118334 - DNA, 30 bp, Artificial Sequence
  Synthetic oligonucleotide
cattgaggtatccctgttggacacgagaga

SEQ ID NO: 118335 - DNA, 30 bp, Artificial Sequence
  Synthetic oligonucleotide
gaccacacgcgacagtgatattaggagaga

SEQ ID NO: 118336 - DNA, 30 bp, Artificial Sequence
  Synthetic oligonucleotide
ctagagctgctagagtaatggactgagaga

SEQ ID NO: 118337 - DNA, 30 bp, Artificial Sequence
  Synthetic oligonucleotide
ccggaggggcgacagagtgaaaggtagaga

SEQ ID NO: 118338 - DNA, 30 bp, Artificial Sequence
  Synthetic oligonucleotide
gccgggtcagttcactctcataggtagaga

SEQ ID NO: 118339 - DNA, 30 bp, Artificial Sequence
  Synthetic oligonucleotide
gtggatgggtcttgttttcccaattagaga

SEQ ID NO: 118340 - DNA, 30 bp, Artificial Sequence
  Synthetic oligonucleotide
tgtacatacagcgcaacgtaaagttagaga

SEQ ID NO: 118341 - DNA, 30 bp, Artificial Sequence
  Synthetic oligonucleotide
atcttggcacatcataccttttcgacgaga

SEQ ID NO: 118342 - DNA, 30 bp, Artificial Sequence
  Synthetic oligonucleotide
tgcgagatcatgtccgatatgatgacgaga

SEQ ID NO: 118343 - DNA, 30 bp, Artificial Sequence
  Synthetic oligonucleotide
tatgatgctgtacaataatttacaccgaga

SEQ ID NO: 118344 - DNA, 30 bp, Artificial Sequence
  Synthetic oligonucleotide
cgatacgcgggaccggtccacgcaccgaga

SEQ ID NO: 118345 - DNA, 30 bp, Artificial Sequence
  Synthetic oligonucleotide
gcgtcatgtatcgggatgtaggaagcgaga

SEQ ID NO: 118346 - DNA, 30 bp, Artificial Sequence
  Synthetic oligonucleotide
atgattagtaggcatagagacggcgcgaga

SEQ ID NO: 118347 - DNA, 30 bp, Artificial Sequence
  Synthetic oligonucleotide
gtaggtcccggtacaagaggtgcatcgaga

SEQ ID NO: 118348 - DNA, 30 bp, Artificial Sequence
  Synthetic oligonucleotide
gcgggagagaatttgctgagtaactcgaga

SEQ ID NO: 118349 - DNA, 30 bp, Artificial Sequence
  Synthetic oligonucleotide
agcttatgcaactatctaaaaacctcgaga

SEQ ID NO: 118350 - DNA, 30 bp, Artificial Sequence
  Synthetic oligonucleotide
tgatttgagagtaaaagtagagaaaggaga

SEQ ID NO: 118351 - DNA, 30 bp, Artificial Sequence
  Synthetic oligonucleotide
tactaatcagggccaagctacccacggaga

SEQ ID NO: 118352 - DNA, 31 bp, Artificial Sequence
  Synthetic oligonucleotide
gcgctacagagccctgtacaaataccggaga

SEQ ID NO: 118353 - DNA, 30 bp, Artificial Sequence
  Synthetic oligonucleotide
accatttaccgagtggaagaggcccggaga

SEQ ID NO: 118354 - DNA, 30 bp, Artificial Sequence
  Synthetic oligonucleotide
gacgatggcagggcgtttgggggtcggaga

SEQ ID NO: 118355 - DNA, 30 bp, Artificial Sequence
  Synthetic oligonucleotide
aacgtgtgcggctcagtgcatcgagggaga

SEQ ID NO: 118356 - DNA, 30 bp, Artificial Sequence
  Synthetic oligonucleotide
agtgcgtcccgaacaagttcttcatggaga

SEQ ID NO: 118357 - DNA, 30 bp, Artificial Sequence
  Synthetic oligonucleotide
ttcattacaattgagtcaatatactggaga

SEQ ID NO: 118358 - DNA, 30 bp, Artificial Sequence
  Synthetic oligonucleotide
aggccgccgcaattaagcgcagcctggaga

SEQ ID NO: 118359 - DNA, 30 bp, Artificial Sequence
  Synthetic oligonucleotide
gcataatcacgattgattagcggctggaga

SEQ ID NO: 118360 - DNA, 30 bp, Artificial Sequence
  Synthetic oligonucleotide
cgggcaagtccattaattgggtagtggaga

SEQ ID NO: 118361 - DNA, 30 bp, Artificial Sequence
  Synthetic oligonucleotide
ataaacaggcagttaccgcattagtggaga

SEQ ID NO: 118362 - DNA, 30 bp, Artificial Sequence
  Synthetic oligonucleotide
aaaggtccagttgctgaatataggtggaga

SEQ ID NO: 118363 - DNA, 30 bp, Artificial Sequence
  Synthetic oligonucleotide
taaccggcgtggtcacacgctggcatgaga

SEQ ID NO: 118364 - DNA, 30 bp, Artificial Sequence
  Synthetic oligonucleotide
acatacctgtacacgttaccgaagatgaga

SEQ ID NO: 118365 - DNA, 30 bp, Artificial Sequence
  Synthetic oligonucleotide
cggagagagtatggagtagagatgatgaga

SEQ ID NO: 118366 - DNA, 30 bp, Artificial Sequence
  Synthetic oligonucleotide
gatccacgggtatggggacgctacctgaga

SEQ ID NO: 118367 - DNA, 30 bp, Artificial Sequence
  Synthetic oligonucleotide
ccgggatctgatcgagtagtgcgtctgaga

SEQ ID NO: 118368 - DNA, 30 bp, Artificial Sequence
  Synthetic oligonucleotide
gcgtttccgtgaaggtcggcgtcagtgaga

SEQ ID NO: 118369 - DNA, 30 bp, Artificial Sequence
  Synthetic oligonucleotide
gaaactcggtggatccataactcggtgaga

SEQ ID NO: 118370 - DNA, 30 bp, Artificial Sequence
  Synthetic oligonucleotide
cagccggagtcgcatgtactgcgggtgaga

SEQ ID NO: 118371 - DNA, 30 bp, Artificial Sequence
  Synthetic oligonucleotide
acgataacctgcggaaccatgaaaaataga

SEQ ID NO: 118372 - DNA, 30 bp, Artificial Sequence
  Synthetic oligonucleotide
gaggcctcccaaggtaggtctgacaataga

SEQ ID NO: 118373 - DNA, 30 bp, Artificial Sequence
  Synthetic oligonucleotide
cggggaagatccaacgctacaaccaataga

SEQ ID NO: 118374 - DNA, 30 bp, Artificial Sequence
  Synthetic oligonucleotide
agccacccaaagattagtcggccgaataga

SEQ ID NO: 118375 - DNA, 30 bp, Artificial Sequence
  Synthetic oligonucleotide
tgagtcacgccttgcggggaatgtaataga

SEQ ID NO: 118376 - DNA, 30 bp, Artificial Sequence
  Synthetic oligonucleotide
tctcgcccggttcctgacaaacgacataga

SEQ ID NO: 118377 - DNA, 30 bp, Artificial Sequence
  Synthetic oligonucleotide
ggctggatctccgtccagaatcaagataga

SEQ ID NO: 118378 - DNA, 30 bp, Artificial Sequence
  Synthetic oligonucleotide
tggggaaaacgcgtgcgtcagcgggataga

SEQ ID NO: 118379 - DNA, 30 bp, Artificial Sequence
  Synthetic oligonucleotide
tggtctggaaacaacgacgccatggataga

SEQ ID NO: 118380 - DNA, 30 bp, Artificial Sequence
  Synthetic oligonucleotide
cgttgcccctggcctagggtagtggataga

SEQ ID NO: 118381 - DNA, 30 bp, Artificial Sequence
  Synthetic oligonucleotide
cactaggatacagaattgtacttggataga

SEQ ID NO: 118382 - DNA, 30 bp, Artificial Sequence
  Synthetic oligonucleotide
atgaagcaagaagtttcggaagacactaga

SEQ ID NO: 118383 - DNA, 30 bp, Artificial Sequence
  Synthetic oligonucleotide
tgggccactcttgggtgggacattactaga

SEQ ID NO: 118384 - DNA, 30 bp, Artificial Sequence
  Synthetic oligonucleotide
tcgtgcagatgagtatattctgcacctaga

SEQ ID NO: 118385 - DNA, 30 bp, Artificial Sequence
  Synthetic oligonucleotide
tgcgggttcgatatacgagtatcacctaga

SEQ ID NO: 118386 - DNA, 30 bp, Artificial Sequence
  Synthetic oligonucleotide
acggcaggcagtaggcgaagacaccctaga

SEQ ID NO: 118387 - DNA, 30 bp, Artificial Sequence
  Synthetic oligonucleotide
gtgtgtgggatctcaaatctcttgcctaga

SEQ ID NO: 118388 - DNA, 30 bp, Artificial Sequence
  Synthetic oligonucleotide
cctgccaaagtatgtttacggtccgctaga

SEQ ID NO: 118389 - DNA, 30 bp, Artificial Sequence
  Synthetic oligonucleotide
caaccccacatccagtacatattcgctaga

SEQ ID NO: 118390 - DNA, 30 bp, Artificial Sequence
  Synthetic oligonucleotide
agaaagcgtgattccatgggctaggctaga

SEQ ID NO: 118391 - DNA, 29 bp, Artificial Sequence
  Synthetic oligonucleotide
agtggatgcttggaaagatcacatctaga

SEQ ID NO: 118392 - DNA, 30 bp, Artificial Sequence
  Synthetic oligonucleotide
cgtgcatgcttttacggattaatatctaga

SEQ ID NO: 118393 - DNA, 30 bp, Artificial Sequence
  Synthetic oligonucleotide
ggcggcaggactaaagaggttgagtctaga

SEQ ID NO: 118394 - DNA, 30 bp, Artificial Sequence
  Synthetic oligonucleotide
catgcctctgtagatccagaccacagtaga

SEQ ID NO: 118395 - DNA, 30 bp, Artificial Sequence
  Synthetic oligonucleotide
aaccgttactccggcaaagaaatcagtaga

SEQ ID NO: 118396 - DNA, 30 bp, Artificial Sequence
  Synthetic oligonucleotide
ggctcgaacccgttcgctttcgtgagtaga

SEQ ID NO: 118397 - DNA, 30 bp, Artificial Sequence
  Synthetic oligonucleotide
cagaggattagcgtccgaacgtcacgtaga

SEQ ID NO: 118398 - DNA, 30 bp, Artificial Sequence
  Synthetic oligonucleotide
atcacgtaagcgcggtacattcgccgtaga

SEQ ID NO: 118399 - DNA, 30 bp, Artificial Sequence
  Synthetic oligonucleotide
tgtagaccctaggtggccctggcgcgtaga

SEQ ID NO: 118400 - DNA, 30 bp, Artificial Sequence
  Synthetic oligonucleotide
ggggactaaaggtaggcaaatatgggtaga

SEQ ID NO: 118401 - DNA, 30 bp, Artificial Sequence
  Synthetic oligonucleotide
ccaagatcggtaaggtgcccaaagattaga

SEQ ID NO: 118402 - DNA, 30 bp, Artificial Sequence
  Synthetic oligonucleotide
gacaagtcgtcgatcgataaactgattaga

SEQ ID NO: 118403 - DNA, 30 bp, Artificial Sequence
  Synthetic oligonucleotide
gggaatagccgtacaacttagtctattaga

SEQ ID NO: 118404 - DNA, 30 bp, Artificial Sequence
  Synthetic oligonucleotide
tagtacaagggtataggccgtgcacttaga

SEQ ID NO: 118405 - DNA, 30 bp, Artificial Sequence
  Synthetic oligonucleotide
ttaatcggcggctaaacagctaaccttaga

SEQ ID NO: 118406 - DNA, 30 bp, Artificial Sequence
  Synthetic oligonucleotide
gtggtaaataaaatctgggcccatcttaga

SEQ ID NO: 118407 - DNA, 30 bp, Artificial Sequence
  Synthetic oligonucleotide
aaccttaaatacaggagtataaccgttaga

SEQ ID NO: 118408 - DNA, 30 bp, Artificial Sequence
  Synthetic oligonucleotide
atacagggatggggcggaccttgggttaga

SEQ ID NO: 118409 - DNA, 30 bp, Artificial Sequence
  Synthetic oligonucleotide
cgtttcggagagtcaaatcgttttgttaga

SEQ ID NO: 118410 - DNA, 30 bp, Artificial Sequence
  Synthetic oligonucleotide
atcaacgacacacattgaccaatttttaga

SEQ ID NO: 118411 - DNA, 30 bp, Artificial Sequence
  Synthetic oligonucleotide
atggagtcaaggagttagcgcagcaaacga

SEQ ID NO: 118412 - DNA, 30 bp, Artificial Sequence
  Synthetic oligonucleotide
gtggagaaaggtgcgcttaaagggaaacga

SEQ ID NO: 118413 - DNA, 30 bp, Artificial Sequence
  Synthetic oligonucleotide
ggtgcgtccggagcaggtctgagacaacga

SEQ ID NO: 118414 - DNA, 30 bp, Artificial Sequence
  Synthetic oligonucleotide
tgacgacaagtccatggccccgcccaacga

SEQ ID NO: 118415 - DNA, 30 bp, Artificial Sequence
  Synthetic oligonucleotide
actcgaactactacttataccttgcaacga

SEQ ID NO: 118416 - DNA, 30 bp, Artificial Sequence
  Synthetic oligonucleotide
acttccgtcggacataaaagatgtcaacga

SEQ ID NO: 118417 - DNA, 30 bp, Artificial Sequence
  Synthetic oligonucleotide
tattagttggaacccaaagccgtagaacga

SEQ ID NO: 118418 - DNA, 30 bp, Artificial Sequence
  Synthetic oligonucleotide
cttagcctacgtaggccattaacggaacga

SEQ ID NO: 118419 - DNA, 30 bp, Artificial Sequence
  Synthetic oligonucleotide
gaccctgagtagctaactcttatggaacga

SEQ ID NO: 118420 - DNA, 30 bp, Artificial Sequence
  Synthetic oligonucleotide
tacggcttcggtgcggtgcggtgtgaacga

SEQ ID NO: 118421 - DNA, 30 bp, Artificial Sequence
  Synthetic oligonucleotide
gccgtatcgagcaggcagtctccataacga

SEQ ID NO: 118422 - DNA, 30 bp, Artificial Sequence
  Synthetic oligonucleotide
ctaacacatcaatataattttggctaacga

SEQ ID NO: 118423 - DNA, 30 bp, Artificial Sequence
  Synthetic oligonucleotide
agaaccttccatcagttgcaagtctaacga

SEQ ID NO: 118424 - DNA, 30 bp, Artificial Sequence
  Synthetic oligonucleotide
gagacataggggaatttccatgtctaacga

SEQ ID NO: 118425 - DNA, 30 bp, Artificial Sequence
  Synthetic oligonucleotide
cgcataactttcaccaagtaaaagtaacga

SEQ ID NO: 118426 - DNA, 30 bp, Artificial Sequence
  Synthetic oligonucleotide
ccataaagggcatatcactgattaacacga

SEQ ID NO: 118427 - DNA, 30 bp, Artificial Sequence
  Synthetic oligonucleotide
acttgagctcaagtcgctgtatacacacga

SEQ ID NO: 118428 - DNA, 30 bp, Artificial Sequence
  Synthetic oligonucleotide
ggcttgccggtgttatagcgtggtacacga

SEQ ID NO: 118429 - DNA, 30 bp, Artificial Sequence
  Synthetic oligonucleotide
gacaatagattcatcaaacagggcccacga

SEQ ID NO: 118430 - DNA, 30 bp, Artificial Sequence
  Synthetic oligonucleotide
aggaagttggtcgacttaccctagccacga

SEQ ID NO: 118431 - DNA, 30 bp, Artificial Sequence
  Synthetic oligonucleotide
agtaacccttcacgtgcgcaaccagcacga

SEQ ID NO: 118432 - DNA, 30 bp, Artificial Sequence
  Synthetic oligonucleotide
agcaggtcacgaaggacggatcccgcacga

SEQ ID NO: 118433 - DNA, 30 bp, Artificial Sequence
  Synthetic oligonucleotide
tggtgcagcagacagggcctacgatcacga

SEQ ID NO: 118434 - DNA, 30 bp, Artificial Sequence
  Synthetic oligonucleotide
ttacctggagggaccatcgacagttcacga

SEQ ID NO: 118435 - DNA, 30 bp, Artificial Sequence
  Synthetic oligonucleotide
cgaatgccggtggcgcagtcagagagacga

SEQ ID NO: 118436 - DNA, 30 bp, Artificial Sequence
  Synthetic oligonucleotide
atgatggggttcacggatgagatacgacga

SEQ ID NO: 118437 - DNA, 30 bp, Artificial Sequence
  Synthetic oligonucleotide
gaggaggtatagcgataagaccaccgacga

SEQ ID NO: 118438 - DNA, 30 bp, Artificial Sequence
  Synthetic oligonucleotide
gcgcgacgatgaaatcgaagaacccgacga

SEQ ID NO: 118439 - DNA, 30 bp, Artificial Sequence
  Synthetic oligonucleotide
gctgctagcaccatgtaaaatttgcgacga

SEQ ID NO: 118440 - DNA, 30 bp, Artificial Sequence
  Synthetic oligonucleotide
tagacacaaatccatgttggatgaggacga

SEQ ID NO: 118441 - DNA, 30 bp, Artificial Sequence
  Synthetic oligonucleotide
aatgtaaacctagaaggcaaaaatggacga

SEQ ID NO: 118442 - DNA, 30 bp, Artificial Sequence
  Synthetic oligonucleotide
cgcgcttaaagacgctgggcggggtgacga

SEQ ID NO: 118443 - DNA, 30 bp, Artificial Sequence
  Synthetic oligonucleotide
tgatcggcaaacgtcggttacgattgacga

SEQ ID NO: 118444 - DNA, 30 bp, Artificial Sequence
  Synthetic oligonucleotide
tgattcaaccggacccgcgtacgaatacga

SEQ ID NO: 118445 - DNA, 30 bp, Artificial Sequence
  Synthetic oligonucleotide
gcgcgatatccacgtcatctgttaatacga

SEQ ID NO: 118446 - DNA, 30 bp, Artificial Sequence
  Synthetic oligonucleotide
gtaagaagcctggtggatggtatgatacga

SEQ ID NO: 118447 - DNA, 30 bp, Artificial Sequence
  Synthetic oligonucleotide
caaccgaaatcacaagacatattgatacga

SEQ ID NO: 118448 - DNA, 30 bp, Artificial Sequence
  Synthetic oligonucleotide
aagacgatctcccctaaatgcagactacga

SEQ ID NO: 118449 - DNA, 30 bp, Artificial Sequence
  Synthetic oligonucleotide
cggttaccggtttattccagaacgctacga

SEQ ID NO: 118450 - DNA, 30 bp, Artificial Sequence
  Synthetic oligonucleotide
gatgtgactgatacacggccacgcttacga

SEQ ID NO: 118451 - DNA, 30 bp, Artificial Sequence
  Synthetic oligonucleotide
atagttctaatctagaccagataaaaccga

SEQ ID NO: 118452 - DNA, 30 bp, Artificial Sequence
  Synthetic oligonucleotide
gtcaagtctagcatcgtggcaacaaaccga

SEQ ID NO: 118453 - DNA, 30 bp, Artificial Sequence
  Synthetic oligonucleotide
accgttggtggacaacaactgggaaaccga

SEQ ID NO: 118454 - DNA, 30 bp, Artificial Sequence
  Synthetic oligonucleotide
ctggatcgcgaatagaacatgcgcaaccga

SEQ ID NO: 118455 - DNA, 30 bp, Artificial Sequence
  Synthetic oligonucleotide
aacggacttaatcgatagcgggtccaccga

SEQ ID NO: 118456 - DNA, 30 bp, Artificial Sequence
  Synthetic oligonucleotide
tggacaactagcgtttaaactgctcaccga

SEQ ID NO: 118457 - DNA, 30 bp, Artificial Sequence
  Synthetic oligonucleotide
cgtggaatcatgacgagatatgcggaccga

SEQ ID NO: 118458 - DNA, 30 bp, Artificial Sequence
  Synthetic oligonucleotide
aagacgaatggaacgcgatacggggaccga

SEQ ID NO: 118459 - DNA, 30 bp, Artificial Sequence
  Synthetic oligonucleotide
aactgaaattatgaacgacctctggaccga

SEQ ID NO: 118460 - DNA, 30 bp, Artificial Sequence
  Synthetic oligonucleotide
ggctaaacagggagcaaagtctatgaccga

SEQ ID NO: 118461 - DNA, 30 bp, Artificial Sequence
  Synthetic oligonucleotide
ccgaaagatctaggttatcgggctgaccga

SEQ ID NO: 118462 - DNA, 30 bp, Artificial Sequence
  Synthetic oligonucleotide
agaacgtcgcgctccatatacggtgaccga

SEQ ID NO: 118463 - DNA, 30 bp, Artificial Sequence
  Synthetic oligonucleotide
catagagaaagataagtggtgaagtaccga

SEQ ID NO: 118464 - DNA, 30 bp, Artificial Sequence
  Synthetic oligonucleotide
ccacggatccgatttaaccgggcgtaccga

SEQ ID NO: 118465 - DNA, 30 bp, Artificial Sequence
  Synthetic oligonucleotide
aaaggttgtgaatactcctgaagttaccga

SEQ ID NO: 118466 - DNA, 30 bp, Artificial Sequence
  Synthetic oligonucleotide
ttgctcctgccatggtaaattgtgacccga

SEQ ID NO: 118467 - DNA, 30 bp, Artificial Sequence
  Synthetic oligonucleotide
tgactcaactttaagttatcactcccccga

SEQ ID NO: 118468 - DNA, 30 bp, Artificial Sequence
  Synthetic oligonucleotide
atggacatggaatgccccggtcgtccccga

SEQ ID NO: 118469 - DNA, 30 bp, Artificial Sequence
  Synthetic oligonucleotide
tagttccctgacatgttcgcttgtccccga

SEQ ID NO: 118470 - DNA, 30 bp, Artificial Sequence
  Synthetic oligonucleotide
tcagatcgacgcaaaattgccttagcccga

SEQ ID NO: 118471 - DNA, 30 bp, Artificial Sequence
  Synthetic oligonucleotide
caagctgcctgtatgcgtgaagtggcccga

SEQ ID NO: 118472 - DNA, 30 bp, Artificial Sequence
  Synthetic oligonucleotide
ctggttgcgataacaccacgataatcccga

SEQ ID NO: 118473 - DNA, 30 bp, Artificial Sequence
  Synthetic oligonucleotide
accacagaagaatgccaccagcaaagccga

SEQ ID NO: 118474 - DNA, 30 bp, Artificial Sequence
  Synthetic oligonucleotide
acaacctcaagtcctggggattctagccga

SEQ ID NO: 118475 - DNA, 30 bp, Artificial Sequence
  Synthetic oligonucleotide
caaaggatcgcagtggccatagttagccga

SEQ ID NO: 118476 - DNA, 30 bp, Artificial Sequence
  Synthetic oligonucleotide
atcaggtgaatgcgagttttacgacgccga

SEQ ID NO: 118477 - DNA, 30 bp, Artificial Sequence
  Synthetic oligonucleotide
taagaaagcaccaggccaagatgacgccga

SEQ ID NO: 118478 - DNA, 30 bp, Artificial Sequence
  Synthetic oligonucleotide
ggaggtattacggacgcggggttacgccga

SEQ ID NO: 118479 - DNA, 30 bp, Artificial Sequence
  Synthetic oligonucleotide
gaagggataagcgtgggccagtccggccga

SEQ ID NO: 118480 - DNA, 30 bp, Artificial Sequence
  Synthetic oligonucleotide
agccactggcgcgaggaatcattgggccga

SEQ ID NO: 118481 - DNA, 30 bp, Artificial Sequence
  Synthetic oligonucleotide
acatagtccgtaggcgaaactaatggccga

SEQ ID NO: 118482 - DNA, 30 bp, Artificial Sequence
  Synthetic oligonucleotide
ctagagcggtaatactgggtcggatgccga

SEQ ID NO: 118483 - DNA, 30 bp, Artificial Sequence
  Synthetic oligonucleotide
ctcgctatgatcataccctggggctgccga

SEQ ID NO: 118484 - DNA, 30 bp, Artificial Sequence
  Synthetic oligonucleotide
agattatttgatcaaaatgtgaccatccga

SEQ ID NO: 118485 - DNA, 30 bp, Artificial Sequence
  Synthetic oligonucleotide
gcgacattcttagagtatggtaatatccga

SEQ ID NO: 118486 - DNA, 30 bp, Artificial Sequence
  Synthetic oligonucleotide
gccatgattgcgtgtaacccttgtatccga

SEQ ID NO: 118487 - DNA, 30 bp, Artificial Sequence
  Synthetic oligonucleotide
catactgcaaggtacgagtggccactccga

SEQ ID NO: 118488 - DNA, 30 bp, Artificial Sequence
  Synthetic oligonucleotide
cggatgtctcgagttcgccggatactccga

SEQ ID NO: 118489 - DNA, 30 bp, Artificial Sequence
  Synthetic oligonucleotide
tcactactaggtaatggtcggctcctccga

SEQ ID NO: 118490 - DNA, 30 bp, Artificial Sequence
  Synthetic oligonucleotide
atagaagggcttaaattctcatcgctccga

SEQ ID NO: 118491 - DNA, 30 bp, Artificial Sequence
  Synthetic oligonucleotide
gttagaacggataaggggtcgcttctccga

SEQ ID NO: 118492 - DNA, 30 bp, Artificial Sequence
  Synthetic oligonucleotide
gttaggggaagtttgtctgtgttagtccga

SEQ ID NO: 118493 - DNA, 30 bp, Artificial Sequence
  Synthetic oligonucleotide
atacgccggcgaattgagctagtcgtccga

SEQ ID NO: 118494 - DNA, 30 bp, Artificial Sequence
  Synthetic oligonucleotide
aaccggacgggctaacgaggtgaaaagcga

SEQ ID NO: 118495 - DNA, 30 bp, Artificial Sequence
  Synthetic oligonucleotide
taccacatatgctcaacctaaagcaagcga

SEQ ID NO: 118496 - DNA, 30 bp, Artificial Sequence
  Synthetic oligonucleotide
gtcacaataaactcactgggacttaagcga

SEQ ID NO: 118497 - DNA, 30 bp, Artificial Sequence
  Synthetic oligonucleotide
atattatatcgacctaacagcgaagagcga

SEQ ID NO: 118498 - DNA, 30 bp, Artificial Sequence
  Synthetic oligonucleotide
tcgttatcattagaaacgagagcatagcga

SEQ ID NO: 118499 - DNA, 30 bp, Artificial Sequence
  Synthetic oligonucleotide
cacgtaagtggtcatgctctttggtagcga

SEQ ID NO: 118500 - DNA, 30 bp, Artificial Sequence
  Synthetic oligonucleotide
cgcaagtagtgaatcgttctccccacgcga

SEQ ID NO: 118501 - DNA, 30 bp, Artificial Sequence
  Synthetic oligonucleotide
taatgctatagcaaagtaggtgtaccgcga

SEQ ID NO: 118502 - DNA, 30 bp, Artificial Sequence
  Synthetic oligonucleotide
catgacaagtgattcacctttgtaccgcga

SEQ ID NO: 118503 - DNA, 30 bp, Artificial Sequence
  Synthetic oligonucleotide
ccagacaatctattcccgctgagagcgcga

SEQ ID NO: 118504 - DNA, 30 bp, Artificial Sequence
  Synthetic oligonucleotide
catcggattatcaggtacatgtaatcgcga

SEQ ID NO: 118505 - DNA, 30 bp, Artificial Sequence
  Synthetic oligonucleotide
atcgactaagggtccgagttcatgtcgcga

SEQ ID NO: 118506 - DNA, 30 bp, Artificial Sequence
  Synthetic oligonucleotide
atcgataatccggttcgatatggttcgcga

SEQ ID NO: 118507 - DNA, 30 bp, Artificial Sequence
  Synthetic oligonucleotide
cacaatgtaccgcttaaaggacaacggcga

SEQ ID NO: 118508 - DNA, 30 bp, Artificial Sequence
  Synthetic oligonucleotide
gctatgcatgagtactattcttgacggcga

SEQ ID NO: 118509 - DNA, 30 bp, Artificial Sequence
  Synthetic oligonucleotide
ctagagtgagtactctttaaattacggcga

SEQ ID NO: 118510 - DNA, 30 bp, Artificial Sequence
  Synthetic oligonucleotide
acagggaccctataagaattgcacgggcga

SEQ ID NO: 118511 - DNA, 30 bp, Artificial Sequence
  Synthetic oligonucleotide
ttgggttcgcccgagggtattcgaatgcga

SEQ ID NO: 118512 - DNA, 30 bp, Artificial Sequence
  Synthetic oligonucleotide
cttattgtcagggaaccacgtcagctgcga

SEQ ID NO: 118513 - DNA, 30 bp, Artificial Sequence
  Synthetic oligonucleotide
ctgaatacacagcgaattgaagaagtgcga

SEQ ID NO: 118514 - DNA, 30 bp, Artificial Sequence
  Synthetic oligonucleotide
ctgtaagccttcagaaggctgggagtgcga

SEQ ID NO: 118515 - DNA, 30 bp, Artificial Sequence
  Synthetic oligonucleotide
tgtactacctgtaacagggtcacggtgcga

SEQ ID NO: 118516 - DNA, 30 bp, Artificial Sequence
  Synthetic oligonucleotide
cgtgactttagtattacgatacgattgcga

SEQ ID NO: 118517 - DNA, 30 bp, Artificial Sequence
  Synthetic oligonucleotide
cgccaatcggtctattagaatagcttgcga

SEQ ID NO: 118518 - DNA, 30 bp, Artificial Sequence
  Synthetic oligonucleotide
gtaaacatcttggcgtaagttagtttgcga

SEQ ID NO: 118519 - DNA, 30 bp, Artificial Sequence
  Synthetic oligonucleotide
gaaagacggcagcgcagctgagaaaatcga

SEQ ID NO: 118520 - DNA, 30 bp, Artificial Sequence
  Synthetic oligonucleotide
cgtcgatgctcacgacggcaaacaaatcga

SEQ ID NO: 118521 - DNA, 30 bp, Artificial Sequence
  Synthetic oligonucleotide
ccacagtacgggatgcaagatctaaatcga

SEQ ID NO: 118522 - DNA, 30 bp, Artificial Sequence
  Synthetic oligonucleotide
tcttaaacatagtcagaaccggacaatcga

SEQ ID NO: 118523 - DNA, 30 bp, Artificial Sequence
  Synthetic oligonucleotide
ccaaagagagctaaagttgcccccaatcga

SEQ ID NO: 118524 - DNA, 30 bp, Artificial Sequence
  Synthetic oligonucleotide
ttgatacaggctcccagtccgtgcaatcga

SEQ ID NO: 118525 - DNA, 30 bp, Artificial Sequence
  Synthetic oligonucleotide
catgtccagatgaccactaaccataatcga

SEQ ID NO: 118526 - DNA, 30 bp, Artificial Sequence
  Synthetic oligonucleotide
cgaaattgctaagatatcgggccagatcga

SEQ ID NO: 118527 - DNA, 31 bp, Artificial Sequence
  Synthetic oligonucleotide
atataaagaagtcgggagtggccgcgatcga

SEQ ID NO: 118528 - DNA, 30 bp, Artificial Sequence
  Synthetic oligonucleotide
atcgcgggattcacacataattagtatcga

SEQ ID NO: 118529 - DNA, 30 bp, Artificial Sequence
  Synthetic oligonucleotide
ccagaaacgcggcaggagcgctaccctcga

SEQ ID NO: 118530 - DNA, 30 bp, Artificial Sequence
  Synthetic oligonucleotide
gaggaatccaaaagtttcttgatccctcga

SEQ ID NO: 118531 - DNA, 30 bp, Artificial Sequence
  Synthetic oligonucleotide
ctatcaatgcccccagtggagtagcctcga

SEQ ID NO: 118532 - DNA, 30 bp, Artificial Sequence
  Synthetic oligonucleotide
gcctggcagattaagaatctcacctctcga

SEQ ID NO: 118533 - DNA, 30 bp, Artificial Sequence
  Synthetic oligonucleotide
ccaagtaggagttgtgggctctcgtctcga

SEQ ID NO: 118534 - DNA, 30 bp, Artificial Sequence
  Synthetic oligonucleotide
gtcctagtggctagcatgtcattttctcga

SEQ ID NO: 118535 - DNA, 30 bp, Artificial Sequence
  Synthetic oligonucleotide
cttgcgagtttagctcgttggtgaagtcga

SEQ ID NO: 118536 - DNA, 30 bp, Artificial Sequence
  Synthetic oligonucleotide
gggtcataggaagtgcagtcattaagtcga

SEQ ID NO: 118537 - DNA, 30 bp, Artificial Sequence
  Synthetic oligonucleotide
tgagaaggagcgttcaaacaggccagtcga

SEQ ID NO: 118538 - DNA, 30 bp, Artificial Sequence
  Synthetic oligonucleotide
attccggtactggatgagccatgtagtcga

SEQ ID NO: 118539 - DNA, 30 bp, Artificial Sequence
  Synthetic oligonucleotide
cgctaggtcgattcctcgtcaccccgtcga

SEQ ID NO: 118540 - DNA, 30 bp, Artificial Sequence
  Synthetic oligonucleotide
agatctcgccaaggtattcttagccgtcga

SEQ ID NO: 118541 - DNA, 30 bp, Artificial Sequence
  Synthetic oligonucleotide
tggttgcgaaggccatatcccagtcgtcga

SEQ ID NO: 118542 - DNA, 30 bp, Artificial Sequence
  Synthetic oligonucleotide
gatgaagtcaggtattctgctgggggtcga

SEQ ID NO: 118543 - DNA, 30 bp, Artificial Sequence
  Synthetic oligonucleotide
gtattgggagtgacagaggtctatggtcga

SEQ ID NO: 118544 - DNA, 30 bp, Artificial Sequence
  Synthetic oligonucleotide
taagtgaaggcatgcgcacgctctggtcga

SEQ ID NO: 118545 - DNA, 30 bp, Artificial Sequence
  Synthetic oligonucleotide
gtttaccagggatgggcactacaatgtcga

SEQ ID NO: 118546 - DNA, 30 bp, Artificial Sequence
  Synthetic oligonucleotide
tggaactggggaactgatgttacatgtcga

SEQ ID NO: 118547 - DNA, 30 bp, Artificial Sequence
  Synthetic oligonucleotide
gtgtatgctctgccccatgggaacattcga

SEQ ID NO: 118548 - DNA, 30 bp, Artificial Sequence
  Synthetic oligonucleotide
ggcgaaacgtcctcaattacattcattcga

SEQ ID NO: 118549 - DNA, 30 bp, Artificial Sequence
  Synthetic oligonucleotide
cgttcgaagagttgtcccatctagattcga

SEQ ID NO: 118550 - DNA, 30 bp, Artificial Sequence
  Synthetic oligonucleotide
gatcatcagcagagtaacgagacagttcga

SEQ ID NO: 118551 - DNA, 30 bp, Artificial Sequence
  Synthetic oligonucleotide
tgtctggacatgcgcacaacagacgttcga

SEQ ID NO: 118552 - DNA, 30 bp, Artificial Sequence
  Synthetic oligonucleotide
tcggtgagggtgctaaggtctcgggttcga

SEQ ID NO: 118553 - DNA, 30 bp, Artificial Sequence
  Synthetic oligonucleotide
tgattaggagcagtatgtgagagtgttcga

SEQ ID NO: 118554 - DNA, 30 bp, Artificial Sequence
  Synthetic oligonucleotide
tagcgtcaaagcctcacgaaccactttcga

SEQ ID NO: 118555 - DNA, 30 bp, Artificial Sequence
  Synthetic oligonucleotide
gaatgcagaaacctggcgatcatgtttcga

SEQ ID NO: 118556 - DNA, 30 bp, Artificial Sequence
  Synthetic oligonucleotide
ggaagcggcctcaagtcgatcgaaaaagga

SEQ ID NO: 118557 - DNA, 30 bp, Artificial Sequence
  Synthetic oligonucleotide
tcaggcgaatctgttcagtgcaaccaagga

SEQ ID NO: 118558 - DNA, 30 bp, Artificial Sequence
  Synthetic oligonucleotide
actacatcggttcctccgattacccaagga

SEQ ID NO: 118559 - DNA, 30 bp, Artificial Sequence
  Synthetic oligonucleotide
cacgttgaaccgtgtgggcctacgcaagga

SEQ ID NO: 118560 - DNA, 30 bp, Artificial Sequence
  Synthetic oligonucleotide
gcctccacgacatcgggacgagccgaagga

SEQ ID NO: 118561 - DNA, 30 bp, Artificial Sequence
  Synthetic oligonucleotide
gaatgggtggtcgggaaattaggggaagga

SEQ ID NO: 118562 - DNA, 30 bp, Artificial Sequence
  Synthetic oligonucleotide
tgacgctcgcaataaccggatcatgaagga

SEQ ID NO: 118563 - DNA, 30 bp, Artificial Sequence
  Synthetic oligonucleotide
gcagtacacagtagcacagtttctgaagga

SEQ ID NO: 118564 - DNA, 30 bp, Artificial Sequence
  Synthetic oligonucleotide
gagatgtaaaatgtggcgtgacgtgaagga

SEQ ID NO: 118565 - DNA, 30 bp, Artificial Sequence
  Synthetic oligonucleotide
ggctagcagtgcggtagcacgaactaagga

SEQ ID NO: 118566 - DNA, 30 bp, Artificial Sequence
  Synthetic oligonucleotide
aagctgttgaagctaacccgagattaagga

SEQ ID NO: 118567 - DNA, 30 bp, Artificial Sequence
  Synthetic oligonucleotide
agagaatatcgacgaagacacgtaacagga

SEQ ID NO: 118568 - DNA, 29 bp, Artificial Sequence
  Synthetic oligonucleotide
gcaccaacgtctcagtttaggatacagga

SEQ ID NO: 118569 - DNA, 30 bp, Artificial Sequence
  Synthetic oligonucleotide
aagcttattattgaagagtgcgttacagga

SEQ ID NO: 118570 - DNA, 30 bp, Artificial Sequence
  Synthetic oligonucleotide
agatggtgagcacaatatacacgaccagga

SEQ ID NO: 118571 - DNA, 30 bp, Artificial Sequence
  Synthetic oligonucleotide
gggaacacctcagcctagcacgagccagga

SEQ ID NO: 118572 - DNA, 30 bp, Artificial Sequence
  Synthetic oligonucleotide
gcgcgagcgagtccaactggaaatccagga

SEQ ID NO: 118573 - DNA, 30 bp, Artificial Sequence
  Synthetic oligonucleotide
cacatacaacgttttaatgccaaatcagga

SEQ ID NO: 118574 - DNA, 30 bp, Artificial Sequence
  Synthetic oligonucleotide
tggtaagccaaggttaccgtcctatcagga

SEQ ID NO: 118575 - DNA, 30 bp, Artificial Sequence
  Synthetic oligonucleotide
acctagtggccaaaaatcgtcccgtcagga

SEQ ID NO: 118576 - DNA, 30 bp, Artificial Sequence
  Synthetic oligonucleotide
gaccgcttgacgtgtaaagtctggtcagga

SEQ ID NO: 118577 - DNA, 30 bp, Artificial Sequence
  Synthetic oligonucleotide
gttgaaagccgggtggcagtatcttcagga

SEQ ID NO: 118578 - DNA, 30 bp, Artificial Sequence
  Synthetic oligonucleotide
tcattcttagtagatactggccgaagagga

SEQ ID NO: 118579 - DNA, 30 bp, Artificial Sequence
  Synthetic oligonucleotide
cgtcgctacattgagtgaactcgaagagga

SEQ ID NO: 118580 - DNA, 30 bp, Artificial Sequence
  Synthetic oligonucleotide
ggctccgatacagacctcaacggaagagga

SEQ ID NO: 118581 - DNA, 30 bp, Artificial Sequence
  Synthetic oligonucleotide
aatgaaggatgtaataggtttgcacgagga

SEQ ID NO: 118582 - DNA, 30 bp, Artificial Sequence
  Synthetic oligonucleotide
gggttctcaatttatgtagcagtacgagga

SEQ ID NO: 118583 - DNA, 30 bp, Artificial Sequence
  Synthetic oligonucleotide
ggctctgatagtgggaaggtcacccgagga

SEQ ID NO: 118584 - DNA, 30 bp, Artificial Sequence
  Synthetic oligonucleotide
ggtacccgggaggcaaggggagcaggagga

SEQ ID NO: 118585 - DNA, 30 bp, Artificial Sequence
  Synthetic oligonucleotide
tattgttgtagaataatggagggaggagga

SEQ ID NO: 118586 - DNA, 30 bp, Artificial Sequence
  Synthetic oligonucleotide
gctgagaacagacgagtttgaaagggagga

SEQ ID NO: 118587 - DNA, 30 bp, Artificial Sequence
  Synthetic oligonucleotide
cgacagtccaacgttaagcgacggggagga

SEQ ID NO: 118588 - DNA, 30 bp, Artificial Sequence
  Synthetic oligonucleotide
atatctccgcacaacgaaacatttggagga

SEQ ID NO: 118589 - DNA, 30 bp, Artificial Sequence
  Synthetic oligonucleotide
aagtacagttgaggcatcgtaacatgagga

SEQ ID NO: 118590 - DNA, 30 bp, Artificial Sequence
  Synthetic oligonucleotide
cgctggtattatgaaaaaatagtatgagga

SEQ ID NO: 118591 - DNA, 30 bp, Artificial Sequence
  Synthetic oligonucleotide
gcgcggcgcaaatccttaaaagactgagga

SEQ ID NO: 118592 - DNA, 30 bp, Artificial Sequence
  Synthetic oligonucleotide
tggtaggcataagtacaacctttctgagga

SEQ ID NO: 118593 - DNA, 30 bp, Artificial Sequence
  Synthetic oligonucleotide
tcgcccgaaatcgagccgaccgtttgagga

SEQ ID NO: 118594 - DNA, 30 bp, Artificial Sequence
  Synthetic oligonucleotide
actgccaggctagggtccagcaacatagga

SEQ ID NO: 118595 - DNA, 30 bp, Artificial Sequence
  Synthetic oligonucleotide
caaggaatacggaggcggagtaggatagga

SEQ ID NO: 118596 - DNA, 30 bp, Artificial Sequence
  Synthetic oligonucleotide
cgggcatgagtgtgaagtcttgacgtagga

SEQ ID NO: 118597 - DNA, 30 bp, Artificial Sequence
  Synthetic oligonucleotide
cgaagccatacgtcaaggattacggtagga

SEQ ID NO: 118598 - DNA, 30 bp, Artificial Sequence
  Synthetic oligonucleotide
ggacccattctgtcacagatctacaacgga

SEQ ID NO: 118599 - DNA, 30 bp, Artificial Sequence
  Synthetic oligonucleotide
ctaggcaagcatttggaatgatagaacgga

SEQ ID NO: 118600 - DNA, 30 bp, Artificial Sequence
  Synthetic oligonucleotide
gggacgggttatcgaggccacaataacgga

SEQ ID NO: 118601 - DNA, 30 bp, Artificial Sequence
  Synthetic oligonucleotide
cgcccttcggctggatcagctaaacacgga

SEQ ID NO: 118602 - DNA, 30 bp, Artificial Sequence
  Synthetic oligonucleotide
atagggaaacgccacaagacagaacacgga

SEQ ID NO: 118603 - DNA, 30 bp, Artificial Sequence
  Synthetic oligonucleotide
ctaatgcttaggaacgggtgcacgcacgga

SEQ ID NO: 118604 - DNA, 30 bp, Artificial Sequence
  Synthetic oligonucleotide
atagagtcaacggaacacattcgggacgga

SEQ ID NO: 118605 - DNA, 30 bp, Artificial Sequence
  Synthetic oligonucleotide
tcaatgggaacgggatcggagaaatacgga

SEQ ID NO: 118606 - DNA, 30 bp, Artificial Sequence
  Synthetic oligonucleotide
acgatagtttgtggatgtggatactacgga

SEQ ID NO: 118607 - DNA, 30 bp, Artificial Sequence
  Synthetic oligonucleotide
tacttagatcgctccgataggatgtacgga

SEQ ID NO: 118608 - DNA, 30 bp, Artificial Sequence
  Synthetic oligonucleotide
ggcgcaaagctgggcggatcaggtaccgga

SEQ ID NO: 118609 - DNA, 30 bp, Artificial Sequence
  Synthetic oligonucleotide
aagcttcggaatcttctcggacaagccgga

SEQ ID NO: 118610 - DNA, 30 bp, Artificial Sequence
  Synthetic oligonucleotide
gactctacacggtctcattgcatggccgga

SEQ ID NO: 118611 - DNA, 30 bp, Artificial Sequence
  Synthetic oligonucleotide
caggcggggaacgctttaacgaggtccgga

SEQ ID NO: 118612 - DNA, 30 bp, Artificial Sequence
  Synthetic oligonucleotide
gatgactcgaactgagccaccagaagcgga

SEQ ID NO: 118613 - DNA, 30 bp, Artificial Sequence
  Synthetic oligonucleotide
ctcccgtggataaatcgagccagaagcgga

SEQ ID NO: 118614 - DNA, 30 bp, Artificial Sequence
  Synthetic oligonucleotide
ctagccctaagttgagtatatatcagcgga

SEQ ID NO: 118615 - DNA, 30 bp, Artificial Sequence
  Synthetic oligonucleotide
atgcccctgagaagtagtgagcatagcgga

SEQ ID NO: 118616 - DNA, 30 bp, Artificial Sequence
  Synthetic oligonucleotide
ctgaacgcgtttggcagtgatacacgcgga

SEQ ID NO: 118617 - DNA, 30 bp, Artificial Sequence
  Synthetic oligonucleotide
gcgaatggggacatccgaggtccacgcgga

SEQ ID NO: 118618 - DNA, 30 bp, Artificial Sequence
  Synthetic oligonucleotide
gcaacgacgagatttagacccacgcgcgga

SEQ ID NO: 118619 - DNA, 30 bp, Artificial Sequence
  Synthetic oligonucleotide
gtcacaaattgctcgttaaactctcgcgga

SEQ ID NO: 118620 - DNA, 30 bp, Artificial Sequence
  Synthetic oligonucleotide
atcaggcaatcaaattgccagagtcgcgga

SEQ ID NO: 118621 - DNA, 30 bp, Artificial Sequence
  Synthetic oligonucleotide
gatcccacgaattctagtcggaggggcgga

SEQ ID NO: 118622 - DNA, 30 bp, Artificial Sequence
  Synthetic oligonucleotide
tcagtggccacctcggaggccaaatgcgga

SEQ ID NO: 118623 - DNA, 30 bp, Artificial Sequence
  Synthetic oligonucleotide
gaaaatagttagggcgattctccctgcgga

SEQ ID NO: 118624 - DNA, 30 bp, Artificial Sequence
  Synthetic oligonucleotide
tgaagagcgatagtttaactttgttgcgga

SEQ ID NO: 118625 - DNA, 29 bp, Artificial Sequence
  Synthetic oligonucleotide
ccacttcgaaggtcatcgatcgaatcgga

SEQ ID NO: 118626 - DNA, 30 bp, Artificial Sequence
  Synthetic oligonucleotide
ccgacgatgaagatatagcatcatatcgga

SEQ ID NO: 118627 - DNA, 31 bp, Artificial Sequence
  Synthetic oligonucleotide
ccgacccaatagtatgcgtcagtttatcgga

SEQ ID NO: 118628 - DNA, 30 bp, Artificial Sequence
  Synthetic oligonucleotide
ttgtacgaacgtaaaggaacaaaactcgga

SEQ ID NO: 118629 - DNA, 30 bp, Artificial Sequence
  Synthetic oligonucleotide
gcatgaatgtatgactgcctttagctcgga

SEQ ID NO: 118630 - DNA, 30 bp, Artificial Sequence
  Synthetic oligonucleotide
atcctatactggttctttgcgtggctcgga

SEQ ID NO: 118631 - DNA, 30 bp, Artificial Sequence
  Synthetic oligonucleotide
gacgagaacttgtaaacaacgaagttcgga

SEQ ID NO: 118632 - DNA, 30 bp, Artificial Sequence
  Synthetic oligonucleotide
ccacgagttccaaggaatgtatgcaaggga

SEQ ID NO: 118633 - DNA, 30 bp, Artificial Sequence
  Synthetic oligonucleotide
agactaagattcactttttggaggaaggga

SEQ ID NO: 118634 - DNA, 30 bp, Artificial Sequence
  Synthetic oligonucleotide
gcctctagtccagtgaaagacaataaggga

SEQ ID NO: 118635 - DNA, 30 bp, Artificial Sequence
  Synthetic oligonucleotide
ctggttgagtagctcgcgaattataaggga

SEQ ID NO: 118636 - DNA, 30 bp, Artificial Sequence
  Synthetic oligonucleotide
cacttgaggttgcaatggaatattaaggga

SEQ ID NO: 118637 - DNA, 30 bp, Artificial Sequence
  Synthetic oligonucleotide
tatcgcctcaacggatagcttaagcaggga

SEQ ID NO: 118638 - DNA, 30 bp, Artificial Sequence
  Synthetic oligonucleotide
gacacatgcctaggtcaatttcatcaggga

SEQ ID NO: 118639 - DNA, 30 bp, Artificial Sequence
  Synthetic oligonucleotide
ggtacactataaaaggcgggcggagaggga

SEQ ID NO: 118640 - DNA, 30 bp, Artificial Sequence
  Synthetic oligonucleotide
ctaatcatgcacacaggttagcgggaggga

SEQ ID NO: 118641 - DNA, 30 bp, Artificial Sequence
  Synthetic oligonucleotide
gggacgtggatgagacgttagggctaggga

SEQ ID NO: 118642 - DNA, 30 bp, Artificial Sequence
  Synthetic oligonucleotide
aacgtctaaaaggtataaaaaccgtaggga

SEQ ID NO: 118643 - DNA, 30 bp, Artificial Sequence
  Synthetic oligonucleotide
acggttttcacgtatgagcgatgaacggga

SEQ ID NO: 118644 - DNA, 30 bp, Artificial Sequence
  Synthetic oligonucleotide
gtaccgaaaggagcccccacaaagacggga

SEQ ID NO: 118645 - DNA, 30 bp, Artificial Sequence
  Synthetic oligonucleotide
tgcctatatggcagtccgtgggttacggga

SEQ ID NO: 118646 - DNA, 30 bp, Artificial Sequence
  Synthetic oligonucleotide
aggggattcgtatctcacgacaccccggga

SEQ ID NO: 118647 - DNA, 30 bp, Artificial Sequence
  Synthetic oligonucleotide
ctggaggacgtgtaatccgaaggcccggga

SEQ ID NO: 118648 - DNA, 30 bp, Artificial Sequence
  Synthetic oligonucleotide
acaccagttcgtaatggtgagtggccggga

SEQ ID NO: 118649 - DNA, 30 bp, Artificial Sequence
  Synthetic oligonucleotide
ttacagcatcgaatggtataccaagcggga

SEQ ID NO: 118650 - DNA, 30 bp, Artificial Sequence
  Synthetic oligonucleotide
tcgggcaactattagcgactcagagcggga

SEQ ID NO: 118651 - DNA, 30 bp, Artificial Sequence
  Synthetic oligonucleotide
catgaccggagtacaaccgagcacgcggga

SEQ ID NO: 118652 - DNA, 30 bp, Artificial Sequence
  Synthetic oligonucleotide
cgtagggtgtccgccgtaacgcgcgcggga

SEQ ID NO: 118653 - DNA, 30 bp, Artificial Sequence
  Synthetic oligonucleotide
ccaagacccgagtgattttgtgaggcggga

SEQ ID NO: 118654 - DNA, 30 bp, Artificial Sequence
  Synthetic oligonucleotide
gcagtctgacctaactagcaacttgcggga

SEQ ID NO: 118655 - DNA, 30 bp, Artificial Sequence
  Synthetic oligonucleotide
cggctagttcaagacctcgagacttcggga

SEQ ID NO: 118656 - DNA, 30 bp, Artificial Sequence
  Synthetic oligonucleotide
tcttgtgtaagagaaagcggtgccagggga

SEQ ID NO: 118657 - DNA, 30 bp, Artificial Sequence
  Synthetic oligonucleotide
ccacggacttgttggcaaagaagtagggga

SEQ ID NO: 118658 - DNA, 30 bp, Artificial Sequence
  Synthetic oligonucleotide
gaattggaccttgataatacgaaccgggga

SEQ ID NO: 118659 - DNA, 30 bp, Artificial Sequence
  Synthetic oligonucleotide
attcgcaaaactgggtgttctagccgggga

SEQ ID NO: 118660 - DNA, 30 bp, Artificial Sequence
  Synthetic oligonucleotide
tcccgtcagaacagaagggtgtctcgggga

SEQ ID NO: 118661 - DNA, 39 bp, Artificial Sequence
  Synthetic oligonucleotide
aagataatacttcatggtatggtcggggatcggggggga

SEQ ID NO: 118662 - DNA, 30 bp, Artificial Sequence
  Synthetic oligonucleotide
cgtgctacccctttgagtcgagtgggggga

SEQ ID NO: 118663 - DNA, 30 bp, Artificial Sequence
  Synthetic oligonucleotide
taatcagtcctccatcataggtaatgggga

SEQ ID NO: 118664 - DNA, 30 bp, Artificial Sequence
  Synthetic oligonucleotide
atacacgtaccgaagctacggctctgggga

SEQ ID NO: 118665 - DNA, 30 bp, Artificial Sequence
  Synthetic oligonucleotide
agacggccgaatgctttccctgagtgggga

SEQ ID NO: 118666 - DNA, 30 bp, Artificial Sequence
  Synthetic oligonucleotide
ggtgggaagcaatatcacggaacgtgggga

SEQ ID NO: 118667 - DNA, 30 bp, Artificial Sequence
  Synthetic oligonucleotide
ccgacagaaagcccaatggcgcggtgggga

SEQ ID NO: 118668 - DNA, 30 bp, Artificial Sequence
  Synthetic oligonucleotide
attctcgagggtatgactagctattgggga

SEQ ID NO: 118669 - DNA, 30 bp, Artificial Sequence
  Synthetic oligonucleotide
gccaaggaaagtatggggtttgcttgggga

SEQ ID NO: 118670 - DNA, 30 bp, Artificial Sequence
  Synthetic oligonucleotide
aacgagctcaagtcgaccttagaaatggga

SEQ ID NO: 118671 - DNA, 30 bp, Artificial Sequence
  Synthetic oligonucleotide
ggagcacttcgaccaccctcagagatggga

SEQ ID NO: 118672 - DNA, 30 bp, Artificial Sequence
  Synthetic oligonucleotide
agctcatggaagaacactgaactgctggga

SEQ ID NO: 118673 - DNA, 30 bp, Artificial Sequence
  Synthetic oligonucleotide
aggataacatcgccctgtctacctctggga

SEQ ID NO: 118674 - DNA, 30 bp, Artificial Sequence
  Synthetic oligonucleotide
ctgagtgataagtctgcaaaagaagtggga

SEQ ID NO: 118675 - DNA, 30 bp, Artificial Sequence
  Synthetic oligonucleotide
agtcaagagggggtagggctgccagtggga

SEQ ID NO: 118676 - DNA, 30 bp, Artificial Sequence
  Synthetic oligonucleotide
tcacgcgctcgaggggggccatcagtggga

SEQ ID NO: 118677 - DNA, 30 bp, Artificial Sequence
  Synthetic oligonucleotide
catcaccggaatactctgatgtgagtggga

SEQ ID NO: 118678 - DNA, 29 bp, Artificial Sequence
  Synthetic oligonucleotide
cacctaactccacaataacaatggtggga

SEQ ID NO: 118679 - DNA, 30 bp, Artificial Sequence
  Synthetic oligonucleotide
ccacgactggaatgccaagttattgtggga

SEQ ID NO: 118680 - DNA, 30 bp, Artificial Sequence
  Synthetic oligonucleotide
accggcaaggtaatagttttgtaattggga

SEQ ID NO: 118681 - DNA, 30 bp, Artificial Sequence
  Synthetic oligonucleotide
ctagtgggtgattgtgagacatagttggga

SEQ ID NO: 118682 - DNA, 30 bp, Artificial Sequence
  Synthetic oligonucleotide
cggacatacagttatcccctcgtgttggga

SEQ ID NO: 118683 - DNA, 30 bp, Artificial Sequence
  Synthetic oligonucleotide
gcttgtgtcgatggctccacgacagatgga

SEQ ID NO: 118684 - DNA, 31 bp, Artificial Sequence
  Synthetic oligonucleotide
caaaataacggtcattgcacccagagatgga

SEQ ID NO: 118685 - DNA, 30 bp, Artificial Sequence
  Synthetic oligonucleotide
attaatcgcgagggtggatttgccgatgga

SEQ ID NO: 118686 - DNA, 30 bp, Artificial Sequence
  Synthetic oligonucleotide
gcaagagtgaaatggcgcgtttctgatgga

SEQ ID NO: 118687 - DNA, 30 bp, Artificial Sequence
  Synthetic oligonucleotide
atcgtgatcgcgtcccccgcccggtatgga

SEQ ID NO: 118688 - DNA, 30 bp, Artificial Sequence
  Synthetic oligonucleotide
ggggctcaccagggggcggcgtgttatgga

SEQ ID NO: 118689 - DNA, 30 bp, Artificial Sequence
  Synthetic oligonucleotide
tcgattgggacatttcaaccttagactgga

SEQ ID NO: 118690 - DNA, 30 bp, Artificial Sequence
  Synthetic oligonucleotide
cgaaacaccgctgtagttagttaacctgga

SEQ ID NO: 118691 - DNA, 30 bp, Artificial Sequence
  Synthetic oligonucleotide
agttacctctagggtgaaccaatacctgga

SEQ ID NO: 118692 - DNA, 30 bp, Artificial Sequence
  Synthetic oligonucleotide
ttcaccagtgaggttgtagaacgcgctgga

SEQ ID NO: 118693 - DNA, 30 bp, Artificial Sequence
  Synthetic oligonucleotide
gactgggtcacggcagggcgcatcgctgga

SEQ ID NO: 118694 - DNA, 30 bp, Artificial Sequence
  Synthetic oligonucleotide
agagcgtcttgcgccagtaccagctctgga

SEQ ID NO: 118695 - DNA, 30 bp, Artificial Sequence
  Synthetic oligonucleotide
gtcgagtgtgtgatcaccggcctgtctgga

SEQ ID NO: 118696 - DNA, 30 bp, Artificial Sequence
  Synthetic oligonucleotide
ggttctaaaccgcgacaaaggagttctgga

SEQ ID NO: 118697 - DNA, 30 bp, Artificial Sequence
  Synthetic oligonucleotide
tgtggggcgggccgtcatctataaagtgga

SEQ ID NO: 118698 - DNA, 30 bp, Artificial Sequence
  Synthetic oligonucleotide
cggtctgtcactatttaataagaacgtgga

SEQ ID NO: 118699 - DNA, 30 bp, Artificial Sequence
  Synthetic oligonucleotide
tctgcctgtgatagaccaccaccacgtgga

SEQ ID NO: 118700 - DNA, 30 bp, Artificial Sequence
  Synthetic oligonucleotide
accaaggatgagcctctagactgacgtgga

SEQ ID NO: 118701 - DNA, 30 bp, Artificial Sequence
  Synthetic oligonucleotide
gcacttggagctagaaaattgaatcgtgga

SEQ ID NO: 118702 - DNA, 30 bp, Artificial Sequence
  Synthetic oligonucleotide
atgaaaccacaagtaggtactataggtgga

SEQ ID NO: 118703 - DNA, 30 bp, Artificial Sequence
  Synthetic oligonucleotide
gcagaacggtgcctaatcaggttaattgga

SEQ ID NO: 118704 - DNA, 30 bp, Artificial Sequence
  Synthetic oligonucleotide
ctagcatggatgattaggttgaccattgga

SEQ ID NO: 118705 - DNA, 30 bp, Artificial Sequence
  Synthetic oligonucleotide
cgacactacggattcagtgtcgcgcttgga

SEQ ID NO: 118706 - DNA, 30 bp, Artificial Sequence
  Synthetic oligonucleotide
gaacattcacgcgtagcgggctgagttgga

SEQ ID NO: 118707 - DNA, 30 bp, Artificial Sequence
  Synthetic oligonucleotide
tcgggatacacgccacgttgcggggttgga

SEQ ID NO: 118708 - DNA, 30 bp, Artificial Sequence
  Synthetic oligonucleotide
cgctgtgaaattggtatagggattgttgga

SEQ ID NO: 118709 - DNA, 30 bp, Artificial Sequence
  Synthetic oligonucleotide
gaggaaatacgagaaagctctgcatttgga

SEQ ID NO: 118710 - DNA, 30 bp, Artificial Sequence
  Synthetic oligonucleotide
cgggccagagacacagtcttgctcaaatga

SEQ ID NO: 118711 - DNA, 30 bp, Artificial Sequence
  Synthetic oligonucleotide
tgacaattggcgtcagctcgcttcaaatga

SEQ ID NO: 118712 - DNA, 30 bp, Artificial Sequence
  Synthetic oligonucleotide
tgactcattcaatctcccgtactgaaatga

SEQ ID NO: 118713 - DNA, 30 bp, Artificial Sequence
  Synthetic oligonucleotide
ggatagttcgatatgaggaataataaatga

SEQ ID NO: 118714 - DNA, 30 bp, Artificial Sequence
  Synthetic oligonucleotide
ctagaagtgcattcgatttctcgtaaatga

SEQ ID NO: 118715 - DNA, 30 bp, Artificial Sequence
  Synthetic oligonucleotide
aaagccctcaacatgatattaggccaatga

SEQ ID NO: 118716 - DNA, 30 bp, Artificial Sequence
  Synthetic oligonucleotide
gtgaaaagtagacggtatgctgccgaatga

SEQ ID NO: 118717 - DNA, 30 bp, Artificial Sequence
  Synthetic oligonucleotide
agcgcgtaggcggtcgctaggacggaatga

SEQ ID NO: 118718 - DNA, 30 bp, Artificial Sequence
  Synthetic oligonucleotide
gtatacgctataagtagggctcgggaatga

SEQ ID NO: 118719 - DNA, 30 bp, Artificial Sequence
  Synthetic oligonucleotide
atggggccgcctagtctagtcattgaatga

SEQ ID NO: 118720 - DNA, 30 bp, Artificial Sequence
  Synthetic oligonucleotide
aacactctcacgaaaaaaacacttgaatga

SEQ ID NO: 118721 - DNA, 30 bp, Artificial Sequence
  Synthetic oligonucleotide
aagcaaaacctccgagattcttgataatga

SEQ ID NO: 118722 - DNA, 30 bp, Artificial Sequence
  Synthetic oligonucleotide
aaaggtgcggcacacggtaagctttaatga

SEQ ID NO: 118723 - DNA, 30 bp, Artificial Sequence
  Synthetic oligonucleotide
cgcttgtggtcttaattagcatttacatga

SEQ ID NO: 118724 - DNA, 30 bp, Artificial Sequence
  Synthetic oligonucleotide
taggtgcgtaaagcacaatgctatccatga

SEQ ID NO: 118725 - DNA, 30 bp, Artificial Sequence
  Synthetic oligonucleotide
taggaaaggcatagatcggttccagcatga

SEQ ID NO: 118726 - DNA, 30 bp, Artificial Sequence
  Synthetic oligonucleotide
cgatgcgatttcctcgatgttcatgcatga

SEQ ID NO: 118727 - DNA, 30 bp, Artificial Sequence
  Synthetic oligonucleotide
gaggtgtgtaaggaaccgggcaaatcatga

SEQ ID NO: 118728 - DNA, 30 bp, Artificial Sequence
  Synthetic oligonucleotide
gcataaccgtataaccggtaagcatcatga

SEQ ID NO: 118729 - DNA, 30 bp, Artificial Sequence
  Synthetic oligonucleotide
cgagggtgtggcaaaaggttggtctcatga

SEQ ID NO: 118730 - DNA, 30 bp, Artificial Sequence
  Synthetic oligonucleotide
tctaaacacgatctcacgacctgttcatga

SEQ ID NO: 118731 - DNA, 30 bp, Artificial Sequence
  Synthetic oligonucleotide
ccggacataagggtgcgtatgataagatga

SEQ ID NO: 118732 - DNA, 30 bp, Artificial Sequence
  Synthetic oligonucleotide
tctactcggacgatcggtactgatagatga

SEQ ID NO: 118733 - DNA, 30 bp, Artificial Sequence
  Synthetic oligonucleotide
ggatcgtcaaaggatcgttcagttagatga

SEQ ID NO: 118734 - DNA, 30 bp, Artificial Sequence
  Synthetic oligonucleotide
cctcggaaaactggtgatgtgaaacgatga

SEQ ID NO: 118735 - DNA, 30 bp, Artificial Sequence
  Synthetic oligonucleotide
agttccccgagatccttgcaccgccgatga

SEQ ID NO: 118736 - DNA, 30 bp, Artificial Sequence
  Synthetic oligonucleotide
agggagcaagtggttccggctgagcgatga

SEQ ID NO: 118737 - DNA, 30 bp, Artificial Sequence
  Synthetic oligonucleotide
tgaggcgattaagcgtgttagacaggatga

SEQ ID NO: 118738 - DNA, 30 bp, Artificial Sequence
  Synthetic oligonucleotide
aaatggacacataggatataaagcggatga

SEQ ID NO: 118739 - DNA, 30 bp, Artificial Sequence
  Synthetic oligonucleotide
ggaagtgcgagttcgtccttatcatgatga

SEQ ID NO: 118740 - DNA, 30 bp, Artificial Sequence
  Synthetic oligonucleotide
aagggcaccgtgagttgatgagagtgatga

SEQ ID NO: 118741 - DNA, 30 bp, Artificial Sequence
  Synthetic oligonucleotide
gcactccaacagtcacgactctccatatga

SEQ ID NO: 118742 - DNA, 30 bp, Artificial Sequence
  Synthetic oligonucleotide
ggacgcgatacaatgtgcaatagcatatga

SEQ ID NO: 118743 - DNA, 30 bp, Artificial Sequence
  Synthetic oligonucleotide
gataacaaggctgaactacgggtactatga

SEQ ID NO: 118744 - DNA, 30 bp, Artificial Sequence
  Synthetic oligonucleotide
acgaagagattgtattggatcttactatga

SEQ ID NO: 118745 - DNA, 30 bp, Artificial Sequence
  Synthetic oligonucleotide
gtgaatcaatccagatcgttaacgctatga

SEQ ID NO: 118746 - DNA, 30 bp, Artificial Sequence
  Synthetic oligonucleotide
gtatggcggactcattgtgataaagtatga

SEQ ID NO: 118747 - DNA, 30 bp, Artificial Sequence
  Synthetic oligonucleotide
caaacagaagccgggctcacggtcgtatga

SEQ ID NO: 118748 - DNA, 30 bp, Artificial Sequence
  Synthetic oligonucleotide
cgtctatccgttaatatgttctatgtatga

SEQ ID NO: 118749 - DNA, 30 bp, Artificial Sequence
  Synthetic oligonucleotide
tgacatgtgcaggagaggaggcatttatga

SEQ ID NO: 118750 - DNA, 30 bp, Artificial Sequence
  Synthetic oligonucleotide
gcacgaagagcggcgggttctactttatga

SEQ ID NO: 118751 - DNA, 30 bp, Artificial Sequence
  Synthetic oligonucleotide
cggtcgtatacctagttagtagcccactga

SEQ ID NO: 118752 - DNA, 30 bp, Artificial Sequence
  Synthetic oligonucleotide
gaaagcactccatatacaaggtcgcactga

SEQ ID NO: 118753 - DNA, 30 bp, Artificial Sequence
  Synthetic oligonucleotide
caacttaattatgtatcacgagaggactga

SEQ ID NO: 118754 - DNA, 30 bp, Artificial Sequence
  Synthetic oligonucleotide
gctcaaaaagggatgaaagggagctactga

SEQ ID NO: 118755 - DNA, 30 bp, Artificial Sequence
  Synthetic oligonucleotide
tagaacatggtttgggacaggaagtactga

SEQ ID NO: 118756 - DNA, 30 bp, Artificial Sequence
  Synthetic oligonucleotide
ccaatggaaagattagtatccatttactga

SEQ ID NO: 118757 - DNA, 30 bp, Artificial Sequence
  Synthetic oligonucleotide
ttaacttcgaccaatgcccgattaacctga

SEQ ID NO: 118758 - DNA, 30 bp, Artificial Sequence
  Synthetic oligonucleotide
gaatgccacgtaaggttccgtaccccctga

SEQ ID NO: 118759 - DNA, 30 bp, Artificial Sequence
  Synthetic oligonucleotide
taaatgatgggactgacttgtatcccctga

SEQ ID NO: 118760 - DNA, 30 bp, Artificial Sequence
  Synthetic oligonucleotide
ggagcgaaaacacaacgtaacggtgcctga

SEQ ID NO: 118761 - DNA, 29 bp, Artificial Sequence
  Synthetic oligonucleotide
ctcgagaccaatccaaacggcgatcctga

SEQ ID NO: 118762 - DNA, 30 bp, Artificial Sequence
  Synthetic oligonucleotide
cgtctcgggttgtcggcccccaattcctga

SEQ ID NO: 118763 - DNA, 30 bp, Artificial Sequence
  Synthetic oligonucleotide
cacaatggggctggtttagtaccaagctga

SEQ ID NO: 118764 - DNA, 30 bp, Artificial Sequence
  Synthetic oligonucleotide
tagcacaaatacctcgatgttaagagctga

SEQ ID NO: 118765 - DNA, 30 bp, Artificial Sequence
  Synthetic oligonucleotide
cccgaacgggaaagaagacctgttagctga

SEQ ID NO: 118766 - DNA, 30 bp, Artificial Sequence
  Synthetic oligonucleotide
ctctattggagggggatacaggcccgctga

SEQ ID NO: 118767 - DNA, 30 bp, Artificial Sequence
  Synthetic oligonucleotide
gtagggaatgactcaatacaaaagcgctga

SEQ ID NO: 118768 - DNA, 30 bp, Artificial Sequence
  Synthetic oligonucleotide
gtacgacggactaggatgagattcggctga

SEQ ID NO: 118769 - DNA, 30 bp, Artificial Sequence
  Synthetic oligonucleotide
cgaaggcttctgtaggtgtccttcggctga

SEQ ID NO: 118770 - DNA, 30 bp, Artificial Sequence
  Synthetic oligonucleotide
gtaacaaaagcgttagagcgaaatggctga

SEQ ID NO: 118771 - DNA, 30 bp, Artificial Sequence
  Synthetic oligonucleotide
atacagcgtaacgacactaaaattggctga

SEQ ID NO: 118772 - DNA, 30 bp, Artificial Sequence
  Synthetic oligonucleotide
agagacgatacgcataagaagatgtgctga

SEQ ID NO: 118773 - DNA, 30 bp, Artificial Sequence
  Synthetic oligonucleotide
agggttgcaccagacgtcatgggttgctga

SEQ ID NO: 118774 - DNA, 30 bp, Artificial Sequence
  Synthetic oligonucleotide
gatgtacgtaggaaacgctgtacaatctga

SEQ ID NO: 118775 - DNA, 30 bp, Artificial Sequence
  Synthetic oligonucleotide
agacgtgaacttccaccgtttcgaatctga

SEQ ID NO: 118776 - DNA, 30 bp, Artificial Sequence
  Synthetic oligonucleotide
gtgtactgagtcggggaaaccgggatctga

SEQ ID NO: 118777 - DNA, 30 bp, Artificial Sequence
  Synthetic oligonucleotide
gagaagggaggattatccgcagtactctga

SEQ ID NO: 118778 - DNA, 30 bp, Artificial Sequence
  Synthetic oligonucleotide
aacaatggcgacttcgggaggtaagtctga

SEQ ID NO: 118779 - DNA, 30 bp, Artificial Sequence
  Synthetic oligonucleotide
gttaaggcaccataaaatcttctattctga

SEQ ID NO: 118780 - DNA, 30 bp, Artificial Sequence
  Synthetic oligonucleotide
tggtatccgtgagatcgagtggtgttctga

SEQ ID NO: 118781 - DNA, 30 bp, Artificial Sequence
  Synthetic oligonucleotide
gcggcgtgtggcggaggcattggaaagtga

SEQ ID NO: 118782 - DNA, 30 bp, Artificial Sequence
  Synthetic oligonucleotide
ccctctgtgcgccgatcgttactaaagtga

SEQ ID NO: 118783 - DNA, 30 bp, Artificial Sequence
  Synthetic oligonucleotide
cgaaatttcacctgaaaataggcgaagtga

SEQ ID NO: 118784 - DNA, 30 bp, Artificial Sequence
  Synthetic oligonucleotide
gtagtggtacgcgattccacccggaagtga

SEQ ID NO: 118785 - DNA, 30 bp, Artificial Sequence
  Synthetic oligonucleotide
attactcacgggttaagcacgaataagtga

SEQ ID NO: 118786 - DNA, 30 bp, Artificial Sequence
  Synthetic oligonucleotide
gccgttggatgttacgtgtagtgtaagtga

SEQ ID NO: 118787 - DNA, 30 bp, Artificial Sequence
  Synthetic oligonucleotide
gtggaaaagactataatacgaattaagtga

SEQ ID NO: 118788 - DNA, 28 bp, Artificial Sequence
  Synthetic oligonucleotide
aacaggtaggcccagacgaacacagtga

SEQ ID NO: 118789 - DNA, 30 bp, Artificial Sequence
  Synthetic oligonucleotide
agcggggtaaataccttacccgcccagtga

SEQ ID NO: 118790 - DNA, 30 bp, Artificial Sequence
  Synthetic oligonucleotide
tggtcgtacaaaaatacccaatcgcagtga

SEQ ID NO: 118791 - DNA, 30 bp, Artificial Sequence
  Synthetic oligonucleotide
cctagcaaggacactaaaaagtggcagtga

SEQ ID NO: 118792 - DNA, 30 bp, Artificial Sequence
  Synthetic oligonucleotide
agaggttggatgtatgcactttatcagtga

SEQ ID NO: 118793 - DNA, 30 bp, Artificial Sequence
  Synthetic oligonucleotide
taaaaggcacgcccttgtttcagtcagtga

SEQ ID NO: 118794 - DNA, 30 bp, Artificial Sequence
  Synthetic oligonucleotide
gcatcgacaacgctcaccattagggagtga

SEQ ID NO: 118795 - DNA, 30 bp, Artificial Sequence
  Synthetic oligonucleotide
agttatctgcggtacaaagatgtggagtga

SEQ ID NO: 118796 - DNA, 30 bp, Artificial Sequence
  Synthetic oligonucleotide
tccttaacattttttcgagcactgtagtga

SEQ ID NO: 118797 - DNA, 30 bp, Artificial Sequence
  Synthetic oligonucleotide
ccaacgtggccatatcgggacttgtagtga

SEQ ID NO: 118798 - DNA, 30 bp, Artificial Sequence
  Synthetic oligonucleotide
cggtcgggattgggttgactcaattagtga

SEQ ID NO: 118799 - DNA, 30 bp, Artificial Sequence
  Synthetic oligonucleotide
tctcaaaagcaaaatcaaaatcgttagtga

SEQ ID NO: 118800 - DNA, 30 bp, Artificial Sequence
  Synthetic oligonucleotide
aaggccgcttagataaacggccaaacgtga

SEQ ID NO: 118801 - DNA, 30 bp, Artificial Sequence
  Synthetic oligonucleotide
tatccacgggagatgcttaaacatacgtga

SEQ ID NO: 118802 - DNA, 30 bp, Artificial Sequence
  Synthetic oligonucleotide
gggtgtctgtacggtagggagcgtacgtga

SEQ ID NO: 118803 - DNA, 30 bp, Artificial Sequence
  Synthetic oligonucleotide
tcggggcaggcaattttagccgatccgtga

SEQ ID NO: 118804 - DNA, 30 bp, Artificial Sequence
  Synthetic oligonucleotide
cctgggaaacaatacggagacatagcgtga

SEQ ID NO: 118805 - DNA, 30 bp, Artificial Sequence
  Synthetic oligonucleotide
ggctccatgcgcaaggacagattagcgtga

SEQ ID NO: 118806 - DNA, 30 bp, Artificial Sequence
  Synthetic oligonucleotide
catagcgagttatgccgtatagccgcgtga

SEQ ID NO: 118807 - DNA, 30 bp, Artificial Sequence
  Synthetic oligonucleotide
actagaagcaatgacctgtgatctgcgtga

SEQ ID NO: 118808 - DNA, 30 bp, Artificial Sequence
  Synthetic oligonucleotide
gggtcttcaacaaatcggatcagctcgtga

SEQ ID NO: 118809 - DNA, 30 bp, Artificial Sequence
  Synthetic oligonucleotide
atggggccacaccggcattgtaggtcgtga

SEQ ID NO: 118810 - DNA, 30 bp, Artificial Sequence
  Synthetic oligonucleotide
taaacgaccatttgtagggttgacaggtga

SEQ ID NO: 118811 - DNA, 30 bp, Artificial Sequence
  Synthetic oligonucleotide
gtttgcaacactcgagtagtgggcaggtga

SEQ ID NO: 118812 - DNA, 30 bp, Artificial Sequence
  Synthetic oligonucleotide
agttacaacagggctcattctatcaggtga

SEQ ID NO: 118813 - DNA, 30 bp, Artificial Sequence
  Synthetic oligonucleotide
aagggccatgacctataaagcaaacggtga

SEQ ID NO: 118814 - DNA, 30 bp, Artificial Sequence
  Synthetic oligonucleotide
ctcaacgtatttaacaggctaagtcggtga

SEQ ID NO: 118815 - DNA, 30 bp, Artificial Sequence
  Synthetic oligonucleotide
gtacaaattcgcgatcattcaatcgggtga

SEQ ID NO: 118816 - DNA, 30 bp, Artificial Sequence
  Synthetic oligonucleotide
ggtaaataggaaacttggaagccggggtga

SEQ ID NO: 118817 - DNA, 30 bp, Artificial Sequence
  Synthetic oligonucleotide
gccccgagtggtctcgtcgaccgatggtga

SEQ ID NO: 118818 - DNA, 30 bp, Artificial Sequence
  Synthetic oligonucleotide
tttgcgttatacaatccgaaaggatggtga

SEQ ID NO: 118819 - DNA, 30 bp, Artificial Sequence
  Synthetic oligonucleotide
tatctacaagccagcacgaatgcctggtga

SEQ ID NO: 118820 - DNA, 30 bp, Artificial Sequence
  Synthetic oligonucleotide
acccgaaccaggcagttggcaaggtggtga

SEQ ID NO: 118821 - DNA, 30 bp, Artificial Sequence
  Synthetic oligonucleotide
ccgacacctcctagaaatcgtgtgtggtga

SEQ ID NO: 118822 - DNA, 30 bp, Artificial Sequence
  Synthetic oligonucleotide
catgtgcctgacggatatggcaaaatgtga

SEQ ID NO: 118823 - DNA, 30 bp, Artificial Sequence
  Synthetic oligonucleotide
tctggaacggaactctctatggggatgtga

SEQ ID NO: 118824 - DNA, 30 bp, Artificial Sequence
  Synthetic oligonucleotide
tcggcggcaaacgcctgagcctatatgtga

SEQ ID NO: 118825 - DNA, 30 bp, Artificial Sequence
  Synthetic oligonucleotide
agcttaggagacccgtgcgatattatgtga

SEQ ID NO: 118826 - DNA, 30 bp, Artificial Sequence
  Synthetic oligonucleotide
ttgatagaggaaatgaaaggtgcagtgtga

SEQ ID NO: 118827 - DNA, 30 bp, Artificial Sequence
  Synthetic oligonucleotide
ctcgagatttacgactttacaaacgtgtga

SEQ ID NO: 118828 - DNA, 30 bp, Artificial Sequence
  Synthetic oligonucleotide
gaatcccatgggttagtgtataacgtgtga

SEQ ID NO: 118829 - DNA, 30 bp, Artificial Sequence
  Synthetic oligonucleotide
tatgcagagtgcggaatgctgagcgtgtga

SEQ ID NO: 118830 - DNA, 30 bp, Artificial Sequence
  Synthetic oligonucleotide
ggttgaaccattttaagtccgtctgtgtga

SEQ ID NO: 118831 - DNA, 30 bp, Artificial Sequence
  Synthetic oligonucleotide
agcgtacgagggacagccaattgcttgtga

SEQ ID NO: 118832 - DNA, 30 bp, Artificial Sequence
  Synthetic oligonucleotide
ctcaggttgaacatgtgaatgaggttgtga

SEQ ID NO: 118833 - DNA, 30 bp, Artificial Sequence
  Synthetic oligonucleotide
ggcccaaaagactggggatgggtaaattga

SEQ ID NO: 118834 - DNA, 30 bp, Artificial Sequence
  Synthetic oligonucleotide
tttcgtatgaacaaaggaaactcgaattga

SEQ ID NO: 118835 - DNA, 30 bp, Artificial Sequence
  Synthetic oligonucleotide
agaggtcctgatttacactcggctaattga

SEQ ID NO: 118836 - DNA, 30 bp, Artificial Sequence
  Synthetic oligonucleotide
gcggcgacgaagtcgtttagacgtaattga

SEQ ID NO: 118837 - DNA, 30 bp, Artificial Sequence
  Synthetic oligonucleotide
taactgcaataaccgcgaagcgtacattga

SEQ ID NO: 118838 - DNA, 30 bp, Artificial Sequence
  Synthetic oligonucleotide
agagaaacctagacagcaaatggccattga

SEQ ID NO: 118839 - DNA, 30 bp, Artificial Sequence
  Synthetic oligonucleotide
atgtgagggtatcccagcgctcatcattga

SEQ ID NO: 118840 - DNA, 30 bp, Artificial Sequence
  Synthetic oligonucleotide
cgcatgttaaggttataggagcgtgattga

SEQ ID NO: 118841 - DNA, 30 bp, Artificial Sequence
  Synthetic oligonucleotide
atatagatgcagggtgccatgtcgtattga

SEQ ID NO: 118842 - DNA, 30 bp, Artificial Sequence
  Synthetic oligonucleotide
cggctgaatatatgtccgccaagttattga

SEQ ID NO: 118843 - DNA, 30 bp, Artificial Sequence
  Synthetic oligonucleotide
ctgggaaaggatatattaggatcaacttga

SEQ ID NO: 118844 - DNA, 30 bp, Artificial Sequence
  Synthetic oligonucleotide
gggacgcggtaaccacagaggtcaacttga

SEQ ID NO: 118845 - DNA, 30 bp, Artificial Sequence
  Synthetic oligonucleotide
ggggggctgtatacatgattaaacacttga

SEQ ID NO: 118846 - DNA, 30 bp, Artificial Sequence
  Synthetic oligonucleotide
aagcaccaatggtgccagtgtacgacttga

SEQ ID NO: 118847 - DNA, 30 bp, Artificial Sequence
  Synthetic oligonucleotide
atagggttgcggtcatcgcaaaagccttga

SEQ ID NO: 118848 - DNA, 30 bp, Artificial Sequence
  Synthetic oligonucleotide
caccgaccagaggtcagtacaggagcttga

SEQ ID NO: 118849 - DNA, 30 bp, Artificial Sequence
  Synthetic oligonucleotide
cgatctcagagtgggccgcagttcgcttga

SEQ ID NO: 118850 - DNA, 30 bp, Artificial Sequence
  Synthetic oligonucleotide
gagagcccgaaacgactacaccgtgcttga

SEQ ID NO: 118851 - DNA, 30 bp, Artificial Sequence
  Synthetic oligonucleotide
tgctcaatttcgctaatcggggaaagttga

SEQ ID NO: 118852 - DNA, 30 bp, Artificial Sequence
  Synthetic oligonucleotide
tggtatctcagtacggtcgggtagagttga

SEQ ID NO: 118853 - DNA, 30 bp, Artificial Sequence
  Synthetic oligonucleotide
caatgatcaagggaccctgaaaaacgttga

SEQ ID NO: 118854 - DNA, 30 bp, Artificial Sequence
  Synthetic oligonucleotide
tgagggtgggctcatcaggagttaggttga

SEQ ID NO: 118855 - DNA, 30 bp, Artificial Sequence
  Synthetic oligonucleotide
agagcatatatttgacactaccacggttga

SEQ ID NO: 118856 - DNA, 30 bp, Artificial Sequence
  Synthetic oligonucleotide
cacgtacgggccaataagtatatgggttga

SEQ ID NO: 118857 - DNA, 30 bp, Artificial Sequence
  Synthetic oligonucleotide
tttgtgaccatggtcgaaatggatggttga

SEQ ID NO: 118858 - DNA, 30 bp, Artificial Sequence
  Synthetic oligonucleotide
gacaacggacgaatggaggcgtagtgttga

SEQ ID NO: 118859 - DNA, 30 bp, Artificial Sequence
  Synthetic oligonucleotide
agcgtgttccccgtaagagcgatcctttga

SEQ ID NO: 118860 - DNA, 30 bp, Artificial Sequence
  Synthetic oligonucleotide
cgggcgaaacgaaggacgtgagagctttga

SEQ ID NO: 118861 - DNA, 30 bp, Artificial Sequence
  Synthetic oligonucleotide
gctgaaattgggtcggcctataacgtttga

SEQ ID NO: 118862 - DNA, 30 bp, Artificial Sequence
  Synthetic oligonucleotide
cacttacaggcacatggaaatccattttga

SEQ ID NO: 118863 - DNA, 30 bp, Artificial Sequence
  Synthetic oligonucleotide
gtagacgatcacatcctagaccacttttga

SEQ ID NO: 118864 - DNA, 30 bp, Artificial Sequence
  Synthetic oligonucleotide
ttaggcgtaattaggcgaaaaccgaaaata

SEQ ID NO: 118865 - DNA, 30 bp, Artificial Sequence
  Synthetic oligonucleotide
aaaaacggtaacgtataagaccgacaaata

SEQ ID NO: 118866 - DNA, 30 bp, Artificial Sequence
  Synthetic oligonucleotide
tcatctatgacaaacgtgagggtacaaata

SEQ ID NO: 118867 - DNA, 30 bp, Artificial Sequence
  Synthetic oligonucleotide
tcagacataaaacatgccagatcccaaata

SEQ ID NO: 118868 - DNA, 30 bp, Artificial Sequence
  Synthetic oligonucleotide
agatgagttcataaatacaatcttcaaata

SEQ ID NO: 118869 - DNA, 30 bp, Artificial Sequence
  Synthetic oligonucleotide
tagacgattgagtcccattaagttcaaata

SEQ ID NO: 118870 - DNA, 30 bp, Artificial Sequence
  Synthetic oligonucleotide
tcgtcaaattcgagaaggtaccgggaaata

SEQ ID NO: 118871 - DNA, 30 bp, Artificial Sequence
  Synthetic oligonucleotide
gtggcgaagaaacatgcccgaggggaaata

SEQ ID NO: 118872 - DNA, 30 bp, Artificial Sequence
  Synthetic oligonucleotide
cggccacacagtatactttaatgggaaata

SEQ ID NO: 118873 - DNA, 30 bp, Artificial Sequence
  Synthetic oligonucleotide
aataaggtcaagagtaaagcaaatgaaata

SEQ ID NO: 118874 - DNA, 30 bp, Artificial Sequence
  Synthetic oligonucleotide
tggttaatagcgacgtgagaccctgaaata

SEQ ID NO: 118875 - DNA, 30 bp, Artificial Sequence
  Synthetic oligonucleotide
actaagaagaacacataagtcaagtaaata

SEQ ID NO: 118876 - DNA, 30 bp, Artificial Sequence
  Synthetic oligonucleotide
ccgcaacaagcctagtcagggttaacaata

SEQ ID NO: 118877 - DNA, 30 bp, Artificial Sequence
  Synthetic oligonucleotide
gggaaaccactattcgtcgaagttacaata

SEQ ID NO: 118878 - DNA, 29 bp, Artificial Sequence
  Synthetic oligonucleotide
agccacgttgtagaccaccctaaccaata

SEQ ID NO: 118879 - DNA, 30 bp, Artificial Sequence
  Synthetic oligonucleotide
gcctgaagtagggcctcacggtacccaata

SEQ ID NO: 118880 - DNA, 30 bp, Artificial Sequence
  Synthetic oligonucleotide
tctctcagtacacgtttagcagaagcaata

SEQ ID NO: 118881 - DNA, 30 bp, Artificial Sequence
  Synthetic oligonucleotide
gcaactcacgcgggactatcaggagcaata

SEQ ID NO: 118882 - DNA, 30 bp, Artificial Sequence
  Synthetic oligonucleotide
agtcaaagatgcgagcagcatgtagcaata

SEQ ID NO: 118883 - DNA, 31 bp, Artificial Sequence
  Synthetic oligonucleotide
agatggaaggcggcaatagtgaccggcaata

SEQ ID NO: 118884 - DNA, 30 bp, Artificial Sequence
  Synthetic oligonucleotide
gtggggacctggcgtcaagcgaatgcaata

SEQ ID NO: 118885 - DNA, 30 bp, Artificial Sequence
  Synthetic oligonucleotide
caggcatgtcatgaagatactactgcaata

SEQ ID NO: 118886 - DNA, 30 bp, Artificial Sequence
  Synthetic oligonucleotide
ctgacatatctagaagggcgttttgcaata

SEQ ID NO: 118887 - DNA, 31 bp, Artificial Sequence
  Synthetic oligonucleotide
gggggtatgtaggtaccgttctaaatcaata

SEQ ID NO: 118888 - DNA, 30 bp, Artificial Sequence
  Synthetic oligonucleotide
ctcactaagcagggaaaacactcatcaata

SEQ ID NO: 118889 - DNA, 30 bp, Artificial Sequence
  Synthetic oligonucleotide
tagttaggcatctgaccttcgaactcaata

SEQ ID NO: 118890 - DNA, 30 bp, Artificial Sequence
  Synthetic oligonucleotide
ttcgaagcccgtgatcacttggtctcaata

SEQ ID NO: 118891 - DNA, 30 bp, Artificial Sequence
  Synthetic oligonucleotide
gaggatagttcaacgattgacacgtcaata

SEQ ID NO: 118892 - DNA, 30 bp, Artificial Sequence
  Synthetic oligonucleotide
agaccgggtgggacccgacgatattcaata

SEQ ID NO: 118893 - DNA, 30 bp, Artificial Sequence
  Synthetic oligonucleotide
cggacgatcaatatattgagcagttcaata

SEQ ID NO: 118894 - DNA, 30 bp, Artificial Sequence
  Synthetic oligonucleotide
tcggggccccatccgccaccactgagaata

SEQ ID NO: 118895 - DNA, 30 bp, Artificial Sequence
  Synthetic oligonucleotide
ataagtgtatgaacaaccgtcgtacgaata

SEQ ID NO: 118896 - DNA, 30 bp, Artificial Sequence
  Synthetic oligonucleotide
agtagtggtcttaatattagacagcgaata

SEQ ID NO: 118897 - DNA, 30 bp, Artificial Sequence
  Synthetic oligonucleotide
cccagcgaagtgatgtgtgggacgcgaata

SEQ ID NO: 118898 - DNA, 30 bp, Artificial Sequence
  Synthetic oligonucleotide
ctacctccgattaaggtgttcgaaggaata

SEQ ID NO: 118899 - DNA, 30 bp, Artificial Sequence
  Synthetic oligonucleotide
tgttagggacacgctaactaatctggaata

SEQ ID NO: 118900 - DNA, 30 bp, Artificial Sequence
  Synthetic oligonucleotide
ccctcgtgaactagacactggctgataata

SEQ ID NO: 118901 - DNA, 30 bp, Artificial Sequence
  Synthetic oligonucleotide
cgccataggaatctgtgtcaagatataata

SEQ ID NO: 118902 - DNA, 30 bp, Artificial Sequence
  Synthetic oligonucleotide
tagtgctagggttaccgaacttatataata

SEQ ID NO: 118903 - DNA, 31 bp, Artificial Sequence
  Synthetic oligonucleotide
ggtcgaacgcggcgttgcgaaggcactaata

SEQ ID NO: 118904 - DNA, 30 bp, Artificial Sequence
  Synthetic oligonucleotide
taggtaggcctacatgaaatcaaagtaata

SEQ ID NO: 118905 - DNA, 30 bp, Artificial Sequence
  Synthetic oligonucleotide
tactcatggtgacatcataaccacgtaata

SEQ ID NO: 118906 - DNA, 30 bp, Artificial Sequence
  Synthetic oligonucleotide
cagtcacgactcccatcaataacggtaata

SEQ ID NO: 118907 - DNA, 30 bp, Artificial Sequence
  Synthetic oligonucleotide
tcatagcgctatcagactgccctattaata

SEQ ID NO: 118908 - DNA, 30 bp, Artificial Sequence
  Synthetic oligonucleotide
cttagatcgagggcaaaggatgtcttaata

SEQ ID NO: 118909 - DNA, 30 bp, Artificial Sequence
  Synthetic oligonucleotide
atgatgcttccaggcgccacagtaaacata

SEQ ID NO: 118910 - DNA, 30 bp, Artificial Sequence
  Synthetic oligonucleotide
acgtctgacagtatagctaatcaccacata

SEQ ID NO: 118911 - DNA, 30 bp, Artificial Sequence
  Synthetic oligonucleotide
caaactaaacaaaatgagttactccacata

SEQ ID NO: 118912 - DNA, 30 bp, Artificial Sequence
  Synthetic oligonucleotide
cagactacgcgaaagtgtagtcggcacata

SEQ ID NO: 118913 - DNA, 30 bp, Artificial Sequence
  Synthetic oligonucleotide
ctgaagcacatctgggaaggatgcgacata

SEQ ID NO: 118914 - DNA, 30 bp, Artificial Sequence
  Synthetic oligonucleotide
ggtggactgttgtcactgaccagggacata

SEQ ID NO: 118915 - DNA, 30 bp, Artificial Sequence
  Synthetic oligonucleotide
cctgatggttgtcaaagaatgtatgacata

SEQ ID NO: 118916 - DNA, 30 bp, Artificial Sequence
  Synthetic oligonucleotide
accacaaggagggataactattgatacata

SEQ ID NO: 118917 - DNA, 30 bp, Artificial Sequence
  Synthetic oligonucleotide
ttgattgtacgagcctgccacctatacata

SEQ ID NO: 118918 - DNA, 30 bp, Artificial Sequence
  Synthetic oligonucleotide
aagtcgaatcaatatgctactacttacata

SEQ ID NO: 118919 - DNA, 30 bp, Artificial Sequence
  Synthetic oligonucleotide
ctcatacaaaattattcgtgttgaaccata

SEQ ID NO: 118920 - DNA, 30 bp, Artificial Sequence
  Synthetic oligonucleotide
cgactaaattaatcggggataagcaccata

SEQ ID NO: 118921 - DNA, 30 bp, Artificial Sequence
  Synthetic oligonucleotide
ccgagaacagcagcagacctgacacccata

SEQ ID NO: 118922 - DNA, 30 bp, Artificial Sequence
  Synthetic oligonucleotide
tcttgcctaaatacgccacaaagccccata

SEQ ID NO: 118923 - DNA, 30 bp, Artificial Sequence
  Synthetic oligonucleotide
taatggtgtaagcggtgttgcgtccccata

SEQ ID NO: 118924 - DNA, 30 bp, Artificial Sequence
  Synthetic oligonucleotide
acgcacttagcactgatcctccgtcccata

SEQ ID NO: 118925 - DNA, 30 bp, Artificial Sequence
  Synthetic oligonucleotide
tagtataggaggggcgtttcgggagccata

SEQ ID NO: 118926 - DNA, 30 bp, Artificial Sequence
  Synthetic oligonucleotide
gaaatccatggaggacgtggtgccgccata

SEQ ID NO: 118927 - DNA, 30 bp, Artificial Sequence
  Synthetic oligonucleotide
cgtcaccggtattggccctcgctcgccata

SEQ ID NO: 118928 - DNA, 30 bp, Artificial Sequence
  Synthetic oligonucleotide
actcagcctagcagaatgttcaaggccata

SEQ ID NO: 118929 - DNA, 29 bp, Artificial Sequence
  Synthetic oligonucleotide
caatcctctccatcgcatagggggccata

SEQ ID NO: 118930 - DNA, 30 bp, Artificial Sequence
  Synthetic oligonucleotide
cacgggtaacgctatcgctctcgtgccata

SEQ ID NO: 118931 - DNA, 30 bp, Artificial Sequence
  Synthetic oligonucleotide
cgtgcagagcatacgagccacgaatccata

SEQ ID NO: 118932 - DNA, 30 bp, Artificial Sequence
  Synthetic oligonucleotide
tgaacttcacttagtggaagcaagtccata

SEQ ID NO: 118933 - DNA, 30 bp, Artificial Sequence
  Synthetic oligonucleotide
ggtcaagaggtttctggtccagagtccata

SEQ ID NO: 118934 - DNA, 30 bp, Artificial Sequence
  Synthetic oligonucleotide
cagacaataagctccgcagcgtaaagcata

SEQ ID NO: 118935 - DNA, 30 bp, Artificial Sequence
  Synthetic oligonucleotide
ccatgtttggaggagctaacagctagcata

SEQ ID NO: 118936 - DNA, 30 bp, Artificial Sequence
  Synthetic oligonucleotide
aggtgtaacgggcgttttccgtctcgcata

SEQ ID NO: 118937 - DNA, 30 bp, Artificial Sequence
  Synthetic oligonucleotide
gccgatgaggatgaaagactaataggcata

SEQ ID NO: 118938 - DNA, 30 bp, Artificial Sequence
  Synthetic oligonucleotide
gtgggacgaggtgagctcttccacggcata

SEQ ID NO: 118939 - DNA, 30 bp, Artificial Sequence
  Synthetic oligonucleotide
gaacacaggcggatgaccttagagggcata

SEQ ID NO: 118940 - DNA, 30 bp, Artificial Sequence
  Synthetic oligonucleotide
aagaaagaatcccacccgaggcctggcata

SEQ ID NO: 118941 - DNA, 30 bp, Artificial Sequence
  Synthetic oligonucleotide
gaagcaatgactgctagagggcgtggcata

SEQ ID NO: 118942 - DNA, 30 bp, Artificial Sequence
  Synthetic oligonucleotide
ctgggttaagatcaaagataccgatgcata

SEQ ID NO: 118943 - DNA, 30 bp, Artificial Sequence
  Synthetic oligonucleotide
gcaactggcctaaagcccacaaattgcata

SEQ ID NO: 118944 - DNA, 30 bp, Artificial Sequence
  Synthetic oligonucleotide
tgagaaggacagacttccacaaattgcata

SEQ ID NO: 118945 - DNA, 30 bp, Artificial Sequence
  Synthetic oligonucleotide
tttcaggtgaggcttggtgttcgttgcata

SEQ ID NO: 118946 - DNA, 30 bp, Artificial Sequence
  Synthetic oligonucleotide
aaataactttatgcgaagcgaaaaatcata

SEQ ID NO: 118947 - DNA, 30 bp, Artificial Sequence
  Synthetic oligonucleotide
caggcgttagaacagattcgctaaatcata

SEQ ID NO: 118948 - DNA, 30 bp, Artificial Sequence
  Synthetic oligonucleotide
gtgcaggcggcacagcaaatagggatcata

SEQ ID NO: 118949 - DNA, 30 bp, Artificial Sequence
  Synthetic oligonucleotide
caaacggacatgcaccaacgaatgatcata

SEQ ID NO: 118950 - DNA, 30 bp, Artificial Sequence
  Synthetic oligonucleotide
ttaataggagaatggttcgcgcgtatcata

SEQ ID NO: 118951 - DNA, 30 bp, Artificial Sequence
  Synthetic oligonucleotide
catgatcgagctcaattgcatcgtatcata

SEQ ID NO: 118952 - DNA, 30 bp, Artificial Sequence
  Synthetic oligonucleotide
cgacatgaagaccgacttaggccgctcata

SEQ ID NO: 118953 - DNA, 30 bp, Artificial Sequence
  Synthetic oligonucleotide
gtggaggaaagtccggagggaatgctcata

SEQ ID NO: 118954 - DNA, 30 bp, Artificial Sequence
  Synthetic oligonucleotide
ggtgagtgatgttacgcaattcgtctcata

SEQ ID NO: 118955 - DNA, 30 bp, Artificial Sequence
  Synthetic oligonucleotide
ggtgggtggaattagaggttactagtcata

SEQ ID NO: 118956 - DNA, 30 bp, Artificial Sequence
  Synthetic oligonucleotide
ggtaggaggatgcaccctatagacgtcata

SEQ ID NO: 118957 - DNA, 30 bp, Artificial Sequence
  Synthetic oligonucleotide
agtccgagggtcgtgcgggaatacttcata

SEQ ID NO: 118958 - DNA, 30 bp, Artificial Sequence
  Synthetic oligonucleotide
cgctagagaccaaaatggctttagttcata

SEQ ID NO: 118959 - DNA, 30 bp, Artificial Sequence
  Synthetic oligonucleotide
ccatataattgcacagtgagtcggttcata

SEQ ID NO: 118960 - DNA, 30 bp, Artificial Sequence
  Synthetic oligonucleotide
aggtgaacttattacatggtttcaaagata

SEQ ID NO: 118961 - DNA, 30 bp, Artificial Sequence
  Synthetic oligonucleotide
ggtcgtcctgaaacgattctacgaaagata

SEQ ID NO: 118962 - DNA, 30 bp, Artificial Sequence
  Synthetic oligonucleotide
taaggacaagacggacatctctgcaagata

SEQ ID NO: 118963 - DNA, 30 bp, Artificial Sequence
  Synthetic oligonucleotide
tgcgtatcggctgggctcaaaatgaagata

SEQ ID NO: 118964 - DNA, 30 bp, Artificial Sequence
  Synthetic oligonucleotide
ggaagatctaacttcggaagatctaagata

SEQ ID NO: 118965 - DNA, 30 bp, Artificial Sequence
  Synthetic oligonucleotide
tacgaccctgtccccgttacaccacagata

SEQ ID NO: 118966 - DNA, 30 bp, Artificial Sequence
  Synthetic oligonucleotide
ggtccaagccaacctctgagtgggcagata

SEQ ID NO: 118967 - DNA, 30 bp, Artificial Sequence
  Synthetic oligonucleotide
attagggtgggatcggacgtgtatcagata

SEQ ID NO: 118968 - DNA, 30 bp, Artificial Sequence
  Synthetic oligonucleotide
cgggccttctagagataacgtacggagata

SEQ ID NO: 118969 - DNA, 30 bp, Artificial Sequence
  Synthetic oligonucleotide
tgcgtaaagtccagtcaacaaaaatagata

SEQ ID NO: 118970 - DNA, 30 bp, Artificial Sequence
  Synthetic oligonucleotide
aggtgggacagatattttgttcactagata

SEQ ID NO: 118971 - DNA, 30 bp, Artificial Sequence
  Synthetic oligonucleotide
tctctcagaaaaaagagtactcaaacgata

SEQ ID NO: 118972 - DNA, 30 bp, Artificial Sequence
  Synthetic oligonucleotide
tattaggtggaaaaaatcagctcaacgata

SEQ ID NO: 118973 - DNA, 30 bp, Artificial Sequence
  Synthetic oligonucleotide
ggggtacactcgcgagcaggtcacacgata

SEQ ID NO: 118974 - DNA, 30 bp, Artificial Sequence
  Synthetic oligonucleotide
ccatctggttcgtgacgaatgcccacgata

SEQ ID NO: 118975 - DNA, 30 bp, Artificial Sequence
  Synthetic oligonucleotide
tatccaccacgttgagtgcccaatacgata

SEQ ID NO: 118976 - DNA, 30 bp, Artificial Sequence
  Synthetic oligonucleotide
tctatggaaatgagggctaccattacgata

SEQ ID NO: 118977 - DNA, 30 bp, Artificial Sequence
  Synthetic oligonucleotide
aagtccatgtcaggagggttgtgaccgata

SEQ ID NO: 118978 - DNA, 30 bp, Artificial Sequence
  Synthetic oligonucleotide
ccaagttgctcgtttgagcacgtgccgata

SEQ ID NO: 118979 - DNA, 30 bp, Artificial Sequence
  Synthetic oligonucleotide
atagcgttagcaatgggacacgctccgata

SEQ ID NO: 118980 - DNA, 31 bp, Artificial Sequence
  Synthetic oligonucleotide
tctgttgccgggagatcgaagtacggcgata

SEQ ID NO: 118981 - DNA, 30 bp, Artificial Sequence
  Synthetic oligonucleotide
atagagaagctggtccgacttcctgcgata

SEQ ID NO: 118982 - DNA, 30 bp, Artificial Sequence
  Synthetic oligonucleotide
agatccaactggacaagttggtgtgcgata

SEQ ID NO: 118983 - DNA, 30 bp, Artificial Sequence
  Synthetic oligonucleotide
acaggttcgggtcaccccggaagctcgata

SEQ ID NO: 118984 - DNA, 30 bp, Artificial Sequence
  Synthetic oligonucleotide
gccaatcacccggcaaatttggtgtcgata

SEQ ID NO: 118985 - DNA, 30 bp, Artificial Sequence
  Synthetic oligonucleotide
ccccggagatcgtcccgtataaaaaggata

SEQ ID NO: 118986 - DNA, 30 bp, Artificial Sequence
  Synthetic oligonucleotide
ggggttcactgcggtttaaatgctaggata

SEQ ID NO: 118987 - DNA, 30 bp, Artificial Sequence
  Synthetic oligonucleotide
gagcaaggtgcgcgcgcttgttgacggata

SEQ ID NO: 118988 - DNA, 30 bp, Artificial Sequence
  Synthetic oligonucleotide
tctggaaggcacttcgtgctcatacggata

SEQ ID NO: 118989 - DNA, 30 bp, Artificial Sequence
  Synthetic oligonucleotide
gcgcccgaaggccagaaatcggtacggata

SEQ ID NO: 118990 - DNA, 30 bp, Artificial Sequence
  Synthetic oligonucleotide
ggatggatgaatctaggtaagtggcggata

SEQ ID NO: 118991 - DNA, 30 bp, Artificial Sequence
  Synthetic oligonucleotide
gcaaaactcagctaaagcttaagagggata

SEQ ID NO: 118992 - DNA, 30 bp, Artificial Sequence
  Synthetic oligonucleotide
ctcacaggtttggtgagcactctcgggata

SEQ ID NO: 118993 - DNA, 30 bp, Artificial Sequence
  Synthetic oligonucleotide
gtattgaaggtactaggcgaacaggggata

SEQ ID NO: 118994 - DNA, 30 bp, Artificial Sequence
  Synthetic oligonucleotide
atgcaacggcgagtctcaaaatcggggata

SEQ ID NO: 118995 - DNA, 30 bp, Artificial Sequence
  Synthetic oligonucleotide
caagtcttcacccgatgtgcgcatgggata

SEQ ID NO: 118996 - DNA, 30 bp, Artificial Sequence
  Synthetic oligonucleotide
acaataaggaggcgcactgggagtgggata

SEQ ID NO: 118997 - DNA, 30 bp, Artificial Sequence
  Synthetic oligonucleotide
cctgttgtccggcttaaaaacccatggata

SEQ ID NO: 118998 - DNA, 30 bp, Artificial Sequence
  Synthetic oligonucleotide
acacaacgttatatggctcacggctggata

SEQ ID NO: 118999 - DNA, 30 bp, Artificial Sequence
  Synthetic oligonucleotide
agcacgtgtttagaaaaggttaggtggata

SEQ ID NO: 119000 - DNA, 30 bp, Artificial Sequence
  Synthetic oligonucleotide
cagcgtagcaacaagcgttctgtgtggata

SEQ ID NO: 119001 - DNA, 30 bp, Artificial Sequence
  Synthetic oligonucleotide
cctaattcatccgtgaaattatgaatgata

SEQ ID NO: 119002 - DNA, 30 bp, Artificial Sequence
  Synthetic oligonucleotide
gctggagaaatgaatagctcggctatgata

SEQ ID NO: 119003 - DNA, 30 bp, Artificial Sequence
  Synthetic oligonucleotide
aaaacgataggtcgtgaactaagactgata

SEQ ID NO: 119004 - DNA, 30 bp, Artificial Sequence
  Synthetic oligonucleotide
gttatcacggaaccattattcgagctgata

SEQ ID NO: 119005 - DNA, 30 bp, Artificial Sequence
  Synthetic oligonucleotide
tgatgcctaaaggcagggtaggcgctgata

SEQ ID NO: 119006 - DNA, 30 bp, Artificial Sequence
  Synthetic oligonucleotide
gggtgtaagatcggacgagagtttctgata

SEQ ID NO: 119007 - DNA, 30 bp, Artificial Sequence
  Synthetic oligonucleotide
gcatcgaaacatcagaaagtccgagtgata

SEQ ID NO: 119008 - DNA, 30 bp, Artificial Sequence
  Synthetic oligonucleotide
ggacgtaaacatgggatcatcagcgtgata

SEQ ID NO: 119009 - DNA, 30 bp, Artificial Sequence
  Synthetic oligonucleotide
atagccagccatgacacgggtgaggtgata

SEQ ID NO: 119010 - DNA, 30 bp, Artificial Sequence
  Synthetic oligonucleotide
aggaaggcaagacgtagaatgaatgtgata

SEQ ID NO: 119011 - DNA, 30 bp, Artificial Sequence
  Synthetic oligonucleotide
aacagtcgaatccaccaggaaatattgata

SEQ ID NO: 119012 - DNA, 30 bp, Artificial Sequence
  Synthetic oligonucleotide
acaaaggattggtggctaagcagcttgata

SEQ ID NO: 119013 - DNA, 30 bp, Artificial Sequence
  Synthetic oligonucleotide
tgcgaagctagtaaagtggtaaggttgata

SEQ ID NO: 119014 - DNA, 30 bp, Artificial Sequence
  Synthetic oligonucleotide
gtgcacagagggtatgagcggactaatata

SEQ ID NO: 119015 - DNA, 30 bp, Artificial Sequence
  Synthetic oligonucleotide
aagtgctgtcaatgataaatgcgtaatata

SEQ ID NO: 119016 - DNA, 30 bp, Artificial Sequence
  Synthetic oligonucleotide
cgccacgtaacacatacgctggaacatata

SEQ ID NO: 119017 - DNA, 30 bp, Artificial Sequence
  Synthetic oligonucleotide
accgagcagcgcgataaaacggcccatata

SEQ ID NO: 119018 - DNA, 30 bp, Artificial Sequence
  Synthetic oligonucleotide
aaccaccgcgagacagcggaacggcatata

SEQ ID NO: 119019 - DNA, 30 bp, Artificial Sequence
  Synthetic oligonucleotide
gccggggaagcgattgtgctagccgatata

SEQ ID NO: 119020 - DNA, 30 bp, Artificial Sequence
  Synthetic oligonucleotide
aggatatgagtaaccgtttatcaggatata

SEQ ID NO: 119021 - DNA, 30 bp, Artificial Sequence
  Synthetic oligonucleotide
gctgtgcgtggtggtggtccggcatatata

SEQ ID NO: 119022 - DNA, 30 bp, Artificial Sequence
  Synthetic oligonucleotide
tggtctacggcgaaatagagtcgatatata

SEQ ID NO: 119023 - DNA, 30 bp, Artificial Sequence
  Synthetic oligonucleotide
aagcaaacaggtggagatgccaactatata

SEQ ID NO: 119024 - DNA, 30 bp, Artificial Sequence
  Synthetic oligonucleotide
gccaaggacacttaatgaatgtgctatata

SEQ ID NO: 119025 - DNA, 30 bp, Artificial Sequence
  Synthetic oligonucleotide
agggccagctatatgtggggaacgtatata

SEQ ID NO: 119026 - DNA, 31 bp, Artificial Sequence
  Synthetic oligonucleotide
gagaaatcgggcaggacactagggttatata

SEQ ID NO: 119027 - DNA, 30 bp, Artificial Sequence
  Synthetic oligonucleotide
ggaggcattctatcccaggttccaactata

SEQ ID NO: 119028 - DNA, 30 bp, Artificial Sequence
  Synthetic oligonucleotide
cgtggcagaagaccatgccccctaactata

SEQ ID NO: 119029 - DNA, 30 bp, Artificial Sequence
  Synthetic oligonucleotide
cgtagcgcgacatggagcgttgggactata

SEQ ID NO: 119030 - DNA, 30 bp, Artificial Sequence
  Synthetic oligonucleotide
tacgtaaggtcggaagaggatttccctata

SEQ ID NO: 119031 - DNA, 30 bp, Artificial Sequence
  Synthetic oligonucleotide
cgcatcaaaaccaatattcacatatctata

SEQ ID NO: 119032 - DNA, 30 bp, Artificial Sequence
  Synthetic oligonucleotide
tacaacgaaagaacgcggtgcgcaagtata

SEQ ID NO: 119033 - DNA, 30 bp, Artificial Sequence
  Synthetic oligonucleotide
cgtcaggccatgcaacatggtcagggtata

SEQ ID NO: 119034 - DNA, 30 bp, Artificial Sequence
  Synthetic oligonucleotide
gataaacaccaagctcaccaagagggtata

SEQ ID NO: 119035 - DNA, 30 bp, Artificial Sequence
  Synthetic oligonucleotide
gataatgggtctaccaaaaaccggggtata

SEQ ID NO: 119036 - DNA, 30 bp, Artificial Sequence
  Synthetic oligonucleotide
tgtgaggctaaaggaagattgaaatgtata

SEQ ID NO: 119037 - DNA, 30 bp, Artificial Sequence
  Synthetic oligonucleotide
gagaaaaatgatgccagattgagaattata

SEQ ID NO: 119038 - DNA, 30 bp, Artificial Sequence
  Synthetic oligonucleotide
taacagtcccagcaatcaaaaggaattata

SEQ ID NO: 119039 - DNA, 30 bp, Artificial Sequence
  Synthetic oligonucleotide
gtagccactcaccagcgaagttcacttata

SEQ ID NO: 119040 - DNA, 30 bp, Artificial Sequence
  Synthetic oligonucleotide
gtacatggtgcggggtaaaactaccttata

SEQ ID NO: 119041 - DNA, 30 bp, Artificial Sequence
  Synthetic oligonucleotide
tagcggcgcaaggattgcaacatcgttata

SEQ ID NO: 119042 - DNA, 30 bp, Artificial Sequence
  Synthetic oligonucleotide
agaaagacgctagatagaggggtggttata

SEQ ID NO: 119043 - DNA, 30 bp, Artificial Sequence
  Synthetic oligonucleotide
aacgttgggtaacggcctcgggccaaacta

SEQ ID NO: 119044 - DNA, 30 bp, Artificial Sequence
  Synthetic oligonucleotide
cgcatcggaggaatgcgttaaatcaaacta

SEQ ID NO: 119045 - DNA, 30 bp, Artificial Sequence
  Synthetic oligonucleotide
ccagtaaccactacgcttacttctaaacta

SEQ ID NO: 119046 - DNA, 30 bp, Artificial Sequence
  Synthetic oligonucleotide
actcctcaggttagaatgtccaaacaacta

SEQ ID NO: 119047 - DNA, 30 bp, Artificial Sequence
  Synthetic oligonucleotide
ctagctctgtatgtccggggtcgcgaacta

SEQ ID NO: 119048 - DNA, 30 bp, Artificial Sequence
  Synthetic oligonucleotide
tatccctcgggcgaggggggacatgaacta

SEQ ID NO: 119049 - DNA, 30 bp, Artificial Sequence
  Synthetic oligonucleotide
ataggacgtttgagagacgatagctaacta

SEQ ID NO: 119050 - DNA, 30 bp, Artificial Sequence
  Synthetic oligonucleotide
actaaggtgccgttgaatttaagttaacta

SEQ ID NO: 119051 - DNA, 30 bp, Artificial Sequence
  Synthetic oligonucleotide
tcattatattagtcaacataatgaacacta

SEQ ID NO: 119052 - DNA, 30 bp, Artificial Sequence
  Synthetic oligonucleotide
gcccaggggctagagtccaaactcacacta

SEQ ID NO: 119053 - DNA, 30 bp, Artificial Sequence
  Synthetic oligonucleotide
tcttacggcttcgggtgccgccttacacta

SEQ ID NO: 119054 - DNA, 30 bp, Artificial Sequence
  Synthetic oligonucleotide
cttaggaaagcagaacggatgtgaccacta

SEQ ID NO: 119055 - DNA, 30 bp, Artificial Sequence
  Synthetic oligonucleotide
cggactcaagtatggggttgcttaccacta

SEQ ID NO: 119056 - DNA, 30 bp, Artificial Sequence
  Synthetic oligonucleotide
gtaccggcgggatgtaaaatcgtcccacta

SEQ ID NO: 119057 - DNA, 30 bp, Artificial Sequence
  Synthetic oligonucleotide
tcacaatatttctaccactttactccacta

SEQ ID NO: 119058 - DNA, 30 bp, Artificial Sequence
  Synthetic oligonucleotide
ctaaggggcctaataccagagttcgcacta

SEQ ID NO: 119059 - DNA, 30 bp, Artificial Sequence
  Synthetic oligonucleotide
gatgggaacgagttcgcggcgtaggcacta

SEQ ID NO: 119060 - DNA, 30 bp, Artificial Sequence
  Synthetic oligonucleotide
ctaatgcggctaacaaaggaatgggcacta

SEQ ID NO: 119061 - DNA, 30 bp, Artificial Sequence
  Synthetic oligonucleotide
aatgcaagagcgccattgacttcatcacta

SEQ ID NO: 119062 - DNA, 30 bp, Artificial Sequence
  Synthetic oligonucleotide
acgattctaaaataaatgagccgctcacta

SEQ ID NO: 119063 - DNA, 30 bp, Artificial Sequence
  Synthetic oligonucleotide
tgaacgaacaactggtaaatcgcgtcacta

SEQ ID NO: 119064 - DNA, 30 bp, Artificial Sequence
  Synthetic oligonucleotide
ccgtcaccgggcgactcatgactttcacta

SEQ ID NO: 119065 - DNA, 30 bp, Artificial Sequence
  Synthetic oligonucleotide
gagataaggcattactttcgaactggacta

SEQ ID NO: 119066 - DNA, 30 bp, Artificial Sequence
  Synthetic oligonucleotide
ggggttaaggttgtagaacagtcatgacta

SEQ ID NO: 119067 - DNA, 30 bp, Artificial Sequence
  Synthetic oligonucleotide
cgctgacaaaaaaattagtggctatgacta

SEQ ID NO: 119068 - DNA, 30 bp, Artificial Sequence
  Synthetic oligonucleotide
acatcgaaagtaccgcgttcacagtgacta

SEQ ID NO: 119069 - DNA, 30 bp, Artificial Sequence
  Synthetic oligonucleotide
aactggacggaaggcatcgtgttaatacta

SEQ ID NO: 119070 - DNA, 30 bp, Artificial Sequence
  Synthetic oligonucleotide
aagtgacaaattacacagatcaacatacta

SEQ ID NO: 119071 - DNA, 30 bp, Artificial Sequence
  Synthetic oligonucleotide
cgaagtggctaagctgcgtcccaactacta

SEQ ID NO: 119072 - DNA, 30 bp, Artificial Sequence
  Synthetic oligonucleotide
aagagtcatacggaggtatgacgactacta

SEQ ID NO: 119073 - DNA, 30 bp, Artificial Sequence
  Synthetic oligonucleotide
accgatcaaaaagatcgtaaaagtctacta

SEQ ID NO: 119074 - DNA, 30 bp, Artificial Sequence
  Synthetic oligonucleotide
ggatcggcgggggtaattcagtgtctacta

SEQ ID NO: 119075 - DNA, 40 bp, Artificial Sequence
  Synthetic oligonucleotide
aacttaggccaaccggaacgtattggcggttccggtacta

SEQ ID NO: 119076 - DNA, 30 bp, Artificial Sequence
  Synthetic oligonucleotide
cgcgtcgatgtggactatgaccgggtacta

SEQ ID NO: 119077 - DNA, 30 bp, Artificial Sequence
  Synthetic oligonucleotide
agacctaccagtccgaatttaatggtacta

SEQ ID NO: 119078 - DNA, 30 bp, Artificial Sequence
  Synthetic oligonucleotide
tcgattggaacgcgtcctcgtgtggtacta

SEQ ID NO: 119079 - DNA, 30 bp, Artificial Sequence
  Synthetic oligonucleotide
ggggcgatgcacctccgaccaaccttacta

SEQ ID NO: 119080 - DNA, 30 bp, Artificial Sequence
  Synthetic oligonucleotide
tagagggtacatgtaaggaatcgcaaccta

SEQ ID NO: 119081 - DNA, 30 bp, Artificial Sequence
  Synthetic oligonucleotide
agggcttaatcgcaagcacggcggaaccta

SEQ ID NO: 119082 - DNA, 30 bp, Artificial Sequence
  Synthetic oligonucleotide
gatagccgggactcggactggagccaccta

SEQ ID NO: 119083 - DNA, 30 bp, Artificial Sequence
  Synthetic oligonucleotide
gctcgcaagggttggctcgagcagcaccta

SEQ ID NO: 119084 - DNA, 25 bp, Artificial Sequence
  Synthetic oligonucleotide
caggaggggggaactatcagaccta

SEQ ID NO: 119085 - DNA, 30 bp, Artificial Sequence
  Synthetic oligonucleotide
tctagggaagtcggtctatcgtggtaccta

SEQ ID NO: 119086 - DNA, 30 bp, Artificial Sequence
  Synthetic oligonucleotide
gaaaaggctaggtacaaaacggccacccta

SEQ ID NO: 119087 - DNA, 30 bp, Artificial Sequence
  Synthetic oligonucleotide
tcgtacgtacagacggacacctgcacccta

SEQ ID NO: 119088 - DNA, 30 bp, Artificial Sequence
  Synthetic oligonucleotide
acactgtgtaccgataccgcgatttcccta

SEQ ID NO: 119089 - DNA, 30 bp, Artificial Sequence
  Synthetic oligonucleotide
caccgccggtcagctctcgccagtagccta

SEQ ID NO: 119090 - DNA, 30 bp, Artificial Sequence
  Synthetic oligonucleotide
tcgaaaggggtgtcaccacgtgaacgccta

SEQ ID NO: 119091 - DNA, 30 bp, Artificial Sequence
  Synthetic oligonucleotide
gccgtcatgacgtaaaagatgagaggccta

SEQ ID NO: 119092 - DNA, 30 bp, Artificial Sequence
  Synthetic oligonucleotide
ccctgtcttatcgccatctgggactgccta

SEQ ID NO: 119093 - DNA, 30 bp, Artificial Sequence
  Synthetic oligonucleotide
taggggggggactgcttgaagatctgccta

SEQ ID NO: 119094 - DNA, 30 bp, Artificial Sequence
  Synthetic oligonucleotide
gggtaaagcaccagtgagttcgagtgccta

SEQ ID NO: 119095 - DNA, 30 bp, Artificial Sequence
  Synthetic oligonucleotide
caggaccgcgcatagtaggtcagttgccta

SEQ ID NO: 119096 - DNA, 30 bp, Artificial Sequence
  Synthetic oligonucleotide
cgatacgtaataaggcactgctgcatccta

SEQ ID NO: 119097 - DNA, 30 bp, Artificial Sequence
  Synthetic oligonucleotide
tgggtaagaaccgtcggacccgcactccta

SEQ ID NO: 119098 - DNA, 30 bp, Artificial Sequence
  Synthetic oligonucleotide
acgcggggtattggtgggtacaagctccta

SEQ ID NO: 119099 - DNA, 30 bp, Artificial Sequence
  Synthetic oligonucleotide
ggtcgcgatctagcttaagaaatgctccta

SEQ ID NO: 119100 - DNA, 30 bp, Artificial Sequence
  Synthetic oligonucleotide
tccagccaatgcgaatggtttaccgtccta

SEQ ID NO: 119101 - DNA, 30 bp, Artificial Sequence
  Synthetic oligonucleotide
cgcaggctcggaaaaggttcggatgtccta

SEQ ID NO: 119102 - DNA, 30 bp, Artificial Sequence
  Synthetic oligonucleotide
tccgaaggatgagaaagtatctttgtccta

SEQ ID NO: 119103 - DNA, 30 bp, Artificial Sequence
  Synthetic oligonucleotide
gtaggatagatacgagagaggatcttccta

SEQ ID NO: 119104 - DNA, 30 bp, Artificial Sequence
  Synthetic oligonucleotide
gtaatgggccaaccattgactgggaagcta

SEQ ID NO: 119105 - DNA, 30 bp, Artificial Sequence
  Synthetic oligonucleotide
atgcttatacgacgtgaggtccgtaagcta

SEQ ID NO: 119106 - DNA, 30 bp, Artificial Sequence
  Synthetic oligonucleotide
ccgataccgaatcacgccctcgaacagcta

SEQ ID NO: 119107 - DNA, 30 bp, Artificial Sequence
  Synthetic oligonucleotide
gagcggatgagtagtcctgtaggccagcta

SEQ ID NO: 119108 - DNA, 30 bp, Artificial Sequence
  Synthetic oligonucleotide
cagccggataaatttattaattgcgagcta

SEQ ID NO: 119109 - DNA, 31 bp, Artificial Sequence
  Synthetic oligonucleotide
gataactgaccttggagaataatgggagcta

SEQ ID NO: 119110 - DNA, 30 bp, Artificial Sequence
  Synthetic oligonucleotide
tagagaagtacaccgtaaggtctggagcta

SEQ ID NO: 119111 - DNA, 30 bp, Artificial Sequence
  Synthetic oligonucleotide
gggcgatagggccagggcgtagtatagcta

SEQ ID NO: 119112 - DNA, 30 bp, Artificial Sequence
  Synthetic oligonucleotide
acgggcgactccgcgatcatagcctagcta

SEQ ID NO: 119113 - DNA, 30 bp, Artificial Sequence
  Synthetic oligonucleotide
ggttatggcaaacatctacatctgtagcta

SEQ ID NO: 119114 - DNA, 30 bp, Artificial Sequence
  Synthetic oligonucleotide
aggcttacttcttatttacacaattagcta

SEQ ID NO: 119115 - DNA, 30 bp, Artificial Sequence
  Synthetic oligonucleotide
agatttagacgaacttgtggatattagcta

SEQ ID NO: 119116 - DNA, 30 bp, Artificial Sequence
  Synthetic oligonucleotide
tacacgtcatcggaagggtgagtttagcta

SEQ ID NO: 119117 - DNA, 30 bp, Artificial Sequence
  Synthetic oligonucleotide
tcaagctaataatacaaactcatgccgcta

SEQ ID NO: 119118 - DNA, 30 bp, Artificial Sequence
  Synthetic oligonucleotide
taccggatgaccgagtgcgtgtttccgcta

SEQ ID NO: 119119 - DNA, 30 bp, Artificial Sequence
  Synthetic oligonucleotide
agagaaaaaagcaggtatacgccatcgcta

SEQ ID NO: 119120 - DNA, 30 bp, Artificial Sequence
  Synthetic oligonucleotide
gtgagctcacggcgattaccctataggcta

SEQ ID NO: 119121 - DNA, 30 bp, Artificial Sequence
  Synthetic oligonucleotide
ttgaccactcggtgtgtctaaagacggcta

SEQ ID NO: 119122 - DNA, 30 bp, Artificial Sequence
  Synthetic oligonucleotide
ggatgtaaaccgtatccaatgagcgggcta

SEQ ID NO: 119123 - DNA, 31 bp, Artificial Sequence
  Synthetic oligonucleotide
attgatagagggacggcggaaatcatggcta

SEQ ID NO: 119124 - DNA, 30 bp, Artificial Sequence
  Synthetic oligonucleotide
aggctactatcagccaaccggagatggcta

SEQ ID NO: 119125 - DNA, 30 bp, Artificial Sequence
  Synthetic oligonucleotide
cggaaaggctctgtctccctaggttggcta

SEQ ID NO: 119126 - DNA, 30 bp, Artificial Sequence
  Synthetic oligonucleotide
gtcagcactggataacgatcccgtatgcta

SEQ ID NO: 119127 - DNA, 30 bp, Artificial Sequence
  Synthetic oligonucleotide
aggcgaatctaaacattagatggcctgcta

SEQ ID NO: 119128 - DNA, 30 bp, Artificial Sequence
  Synthetic oligonucleotide
ccgcgcgagcgctagtacccctcgctgcta

SEQ ID NO: 119129 - DNA, 30 bp, Artificial Sequence
  Synthetic oligonucleotide
agacttcaagacaggtcaaacaaagtgcta

SEQ ID NO: 119130 - DNA, 30 bp, Artificial Sequence
  Synthetic oligonucleotide
tcttccttatatgttgaaacaatgttgcta

SEQ ID NO: 119131 - DNA, 30 bp, Artificial Sequence
  Synthetic oligonucleotide
ttacgcaatatgcggccacgttacaatcta

SEQ ID NO: 119132 - DNA, 30 bp, Artificial Sequence
  Synthetic oligonucleotide
gcaatagcggaagcggtggaatggaatcta

SEQ ID NO: 119133 - DNA, 30 bp, Artificial Sequence
  Synthetic oligonucleotide
gaggatcagatcgaaaatttttagcatcta

SEQ ID NO: 119134 - DNA, 30 bp, Artificial Sequence
  Synthetic oligonucleotide
cgcatacactcgaattgtagacactatcta

SEQ ID NO: 119135 - DNA, 30 bp, Artificial Sequence
  Synthetic oligonucleotide
aggaagctagaaagactaacccactatcta

SEQ ID NO: 119136 - DNA, 30 bp, Artificial Sequence
  Synthetic oligonucleotide
tcatcgtgtgccagtcggaaccgctatcta

SEQ ID NO: 119137 - DNA, 29 bp, Artificial Sequence
  Synthetic oligonucleotide
cctgcgatcttccggcaggtcgctatcta

SEQ ID NO: 119138 - DNA, 30 bp, Artificial Sequence
  Synthetic oligonucleotide
gggggtctctattgtgctgaaggtactcta

SEQ ID NO: 119139 - DNA, 30 bp, Artificial Sequence
  Synthetic oligonucleotide
tgcgtcgatttagtacacttccaccctcta

SEQ ID NO: 119140 - DNA, 30 bp, Artificial Sequence
  Synthetic oligonucleotide
taccgcagggcccctcaagcgtgcgctcta

SEQ ID NO: 119141 - DNA, 30 bp, Artificial Sequence
  Synthetic oligonucleotide
tgaggatgacttagtctcatgacgtctcta

SEQ ID NO: 119142 - DNA, 30 bp, Artificial Sequence
  Synthetic oligonucleotide
agaatgaggaacagttcggtatcgagtcta

SEQ ID NO: 119143 - DNA, 30 bp, Artificial Sequence
  Synthetic oligonucleotide
gtgtacctacgtgcagaaaaaagtagtcta

SEQ ID NO: 119144 - DNA, 30 bp, Artificial Sequence
  Synthetic oligonucleotide
ctgacctaaagaaccgtgacaccacgtcta

SEQ ID NO: 119145 - DNA, 30 bp, Artificial Sequence
  Synthetic oligonucleotide
gaagggatcataaaaggttgtagccgtcta

SEQ ID NO: 119146 - DNA, 30 bp, Artificial Sequence
  Synthetic oligonucleotide
cgggataaaggaaaacatggcccgcgtcta

SEQ ID NO: 119147 - DNA, 30 bp, Artificial Sequence
  Synthetic oligonucleotide
gctagacaactggcgagctacgaaggtcta

SEQ ID NO: 119148 - DNA, 30 bp, Artificial Sequence
  Synthetic oligonucleotide
tacttgcttgaaaaaaccgtgtgttgtcta

SEQ ID NO: 119149 - DNA, 30 bp, Artificial Sequence
  Synthetic oligonucleotide
tcacacgtcttggcgaacggatgcattcta

SEQ ID NO: 119150 - DNA, 30 bp, Artificial Sequence
  Synthetic oligonucleotide
cggctactgagcttggtctacagtgttcta

SEQ ID NO: 119151 - DNA, 30 bp, Artificial Sequence
  Synthetic oligonucleotide
gaggtcaacacttgcttctccattgttcta

SEQ ID NO: 119152 - DNA, 30 bp, Artificial Sequence
  Synthetic oligonucleotide
tcccaggagctgtgtatgcacgtaaaagta

SEQ ID NO: 119153 - DNA, 30 bp, Artificial Sequence
  Synthetic oligonucleotide
cggtgtgaatcacgatcataggccaaagta

SEQ ID NO: 119154 - DNA, 30 bp, Artificial Sequence
  Synthetic oligonucleotide
gtgtggttcatattatggagggctaaagta

SEQ ID NO: 119155 - DNA, 30 bp, Artificial Sequence
  Synthetic oligonucleotide
cgctcgtgcattagtatatgggttaaagta

SEQ ID NO: 119156 - DNA, 31 bp, Artificial Sequence
  Synthetic oligonucleotide
agaagaacaggccgggcaactaggacaagta

SEQ ID NO: 119157 - DNA, 30 bp, Artificial Sequence
  Synthetic oligonucleotide
cgggggcccatgcacatgtataagcaagta

SEQ ID NO: 119158 - DNA, 30 bp, Artificial Sequence
  Synthetic oligonucleotide
ggtgcatgtatgtactctggtccgcaagta

SEQ ID NO: 119159 - DNA, 30 bp, Artificial Sequence
  Synthetic oligonucleotide
ttgggcgacgtcgcgtcagattaagaagta

SEQ ID NO: 119160 - DNA, 30 bp, Artificial Sequence
  Synthetic oligonucleotide
cgtaatgtactatgaggggccggagaagta

SEQ ID NO: 119161 - DNA, 30 bp, Artificial Sequence
  Synthetic oligonucleotide
tcggtcctatgccctaaggggcgcgaagta

SEQ ID NO: 119162 - DNA, 30 bp, Artificial Sequence
  Synthetic oligonucleotide
tccgccccgccccgtcaaagtctcgaagta

SEQ ID NO: 119163 - DNA, 30 bp, Artificial Sequence
  Synthetic oligonucleotide
tggtcgtgttaagacgggatctctgaagta

SEQ ID NO: 119164 - DNA, 30 bp, Artificial Sequence
  Synthetic oligonucleotide
gccaaccagagctagtgcttcgaataagta

SEQ ID NO: 119165 - DNA, 30 bp, Artificial Sequence
  Synthetic oligonucleotide
tcggttagtaatagcgaagtgttataagta

SEQ ID NO: 119166 - DNA, 30 bp, Artificial Sequence
  Synthetic oligonucleotide
ccatggcagaataccttaacacagtaagta

SEQ ID NO: 119167 - DNA, 30 bp, Artificial Sequence
  Synthetic oligonucleotide
agaaaaactgtgactgaaaacagaacagta

SEQ ID NO: 119168 - DNA, 30 bp, Artificial Sequence
  Synthetic oligonucleotide
cgatcgaacgaaagacggcatcagacagta

SEQ ID NO: 119169 - DNA, 30 bp, Artificial Sequence
  Synthetic oligonucleotide
agaggaggaattcacgcatctcagacagta

SEQ ID NO: 119170 - DNA, 30 bp, Artificial Sequence
  Synthetic oligonucleotide
tactgatgtttccgattaattgctacagta

SEQ ID NO: 119171 - DNA, 30 bp, Artificial Sequence
  Synthetic oligonucleotide
ttaatgaatcggacgggggatgttacagta

SEQ ID NO: 119172 - DNA, 30 bp, Artificial Sequence
  Synthetic oligonucleotide
gcagccaccgtgctacgattgcgaccagta

SEQ ID NO: 119173 - DNA, 30 bp, Artificial Sequence
  Synthetic oligonucleotide
agcgaaatatggtcggaatagatgccagta

SEQ ID NO: 119174 - DNA, 30 bp, Artificial Sequence
  Synthetic oligonucleotide
tgctagcttgcgttgtagttgcatccagta

SEQ ID NO: 119175 - DNA, 30 bp, Artificial Sequence
  Synthetic oligonucleotide
aaccttgacatataacagtcttctccagta

SEQ ID NO: 119176 - DNA, 30 bp, Artificial Sequence
  Synthetic oligonucleotide
gatgacataaataccttccagtgtccagta

SEQ ID NO: 119177 - DNA, 30 bp, Artificial Sequence
  Synthetic oligonucleotide
ggcgggagatcgcaggtagaagtagcagta

SEQ ID NO: 119178 - DNA, 30 bp, Artificial Sequence
  Synthetic oligonucleotide
cacggcgaaactgagttaagtttggcagta

SEQ ID NO: 119179 - DNA, 30 bp, Artificial Sequence
  Synthetic oligonucleotide
ttatcaaaagcatcgttcaacggatcagta

SEQ ID NO: 119180 - DNA, 30 bp, Artificial Sequence
  Synthetic oligonucleotide
gtagggcataagtcccgcgcagactcagta

SEQ ID NO: 119181 - DNA, 30 bp, Artificial Sequence
  Synthetic oligonucleotide
gccaagagaaactagtaggagcggtcagta

SEQ ID NO: 119182 - DNA, 30 bp, Artificial Sequence
  Synthetic oligonucleotide
ctacgaaaattgaggcaccaggggtcagta

SEQ ID NO: 119183 - DNA, 30 bp, Artificial Sequence
  Synthetic oligonucleotide
gagccgtctattacatcgttcgattcagta

SEQ ID NO: 119184 - DNA, 30 bp, Artificial Sequence
  Synthetic oligonucleotide
tgtatataaacaaagtaattaggttcagta

SEQ ID NO: 119185 - DNA, 30 bp, Artificial Sequence
  Synthetic oligonucleotide
ggagggtcttattctgaaagcggaagagta

SEQ ID NO: 119186 - DNA, 30 bp, Artificial Sequence
  Synthetic oligonucleotide
gggtaacgaggcggaaatcgtagcagagta

SEQ ID NO: 119187 - DNA, 30 bp, Artificial Sequence
  Synthetic oligonucleotide
cgaacggcatgtcgggtgtaagtcagagta

SEQ ID NO: 119188 - DNA, 30 bp, Artificial Sequence
  Synthetic oligonucleotide
caaatcaagcaggttgcgtctgatagagta

SEQ ID NO: 119189 - DNA, 30 bp, Artificial Sequence
  Synthetic oligonucleotide
accgagcgccaaagcccggattcacgagta

SEQ ID NO: 119190 - DNA, 30 bp, Artificial Sequence
  Synthetic oligonucleotide
gtaatctggcagacgatccaatagcgagta

SEQ ID NO: 119191 - DNA, 30 bp, Artificial Sequence
  Synthetic oligonucleotide
ggtagaaaattggtctaacgtgcgcgagta

SEQ ID NO: 119192 - DNA, 30 bp, Artificial Sequence
  Synthetic oligonucleotide
atttgggcgaaacaggaaggcgtgcgagta

SEQ ID NO: 119193 - DNA, 30 bp, Artificial Sequence
  Synthetic oligonucleotide
gtgctggttgtaatgggtggtgtcggagta

SEQ ID NO: 119194 - DNA, 30 bp, Artificial Sequence
  Synthetic oligonucleotide
tggcgtgattgcatgtgctacaagggagta

SEQ ID NO: 119195 - DNA, 30 bp, Artificial Sequence
  Synthetic oligonucleotide
gattaggcgcggagaagataaagtggagta

SEQ ID NO: 119196 - DNA, 30 bp, Artificial Sequence
  Synthetic oligonucleotide
cagcaattgtatcaagggtcgatctgagta

SEQ ID NO: 119197 - DNA, 30 bp, Artificial Sequence
  Synthetic oligonucleotide
ggcgcccgttgctgacctggaaattgagta

SEQ ID NO: 119198 - DNA, 30 bp, Artificial Sequence
  Synthetic oligonucleotide
catggccgatggacgtagtgcgtaatagta

SEQ ID NO: 119199 - DNA, 30 bp, Artificial Sequence
  Synthetic oligonucleotide
tcgtggggtgagagcgtaagtgtaatagta

SEQ ID NO: 119200 - DNA, 30 bp, Artificial Sequence
  Synthetic oligonucleotide
gtagaccacgataaaaggccaaacatagta

SEQ ID NO: 119201 - DNA, 30 bp, Artificial Sequence
  Synthetic oligonucleotide
gtcccacaaagtgcgacaggtcatatagta

SEQ ID NO: 119202 - DNA, 30 bp, Artificial Sequence
  Synthetic oligonucleotide
ccagcgacagtcgtcatgcgatctatagta

SEQ ID NO: 119203 - DNA, 30 bp, Artificial Sequence
  Synthetic oligonucleotide
tcgtcacccggacagaatacactagtagta

SEQ ID NO: 119204 - DNA, 30 bp, Artificial Sequence
  Synthetic oligonucleotide
ggtcggtagccgtttaggaggtatgtagta

SEQ ID NO: 119205 - DNA, 30 bp, Artificial Sequence
  Synthetic oligonucleotide
gagcgaggttgcacccgcgaacctgtagta

SEQ ID NO: 119206 - DNA, 30 bp, Artificial Sequence
  Synthetic oligonucleotide
tgccctctctaatggcacgaggaattagta

SEQ ID NO: 119207 - DNA, 30 bp, Artificial Sequence
  Synthetic oligonucleotide
cgaccgaagacgaatagtgcggcattagta

SEQ ID NO: 119208 - DNA, 30 bp, Artificial Sequence
  Synthetic oligonucleotide
aagccactgcctagaacatgcctcttagta

SEQ ID NO: 119209 - DNA, 30 bp, Artificial Sequence
  Synthetic oligonucleotide
ccggagtggtgttgccgtgggtaaaacgta

SEQ ID NO: 119210 - DNA, 31 bp, Artificial Sequence
  Synthetic oligonucleotide
taggtgttcgataggtggacaccgaaacgta

SEQ ID NO: 119211 - DNA, 30 bp, Artificial Sequence
  Synthetic oligonucleotide
ggttatgccgtatctacacagtagcacgta

SEQ ID NO: 119212 - DNA, 30 bp, Artificial Sequence
  Synthetic oligonucleotide
gtacggatcagatagtggtagaccgacgta

SEQ ID NO: 119213 - DNA, 30 bp, Artificial Sequence
  Synthetic oligonucleotide
cgggtctgctgtgaagtgcttactgacgta

SEQ ID NO: 119214 - DNA, 30 bp, Artificial Sequence
  Synthetic oligonucleotide
agcgcgaacggaatatgttacacgtacgta

SEQ ID NO: 119215 - DNA, 30 bp, Artificial Sequence
  Synthetic oligonucleotide
cactcacgataatcggcggtggcgaccgta

SEQ ID NO: 119216 - DNA, 30 bp, Artificial Sequence
  Synthetic oligonucleotide
aaccaggtagagtgattatacctgcccgta

SEQ ID NO: 119217 - DNA, 30 bp, Artificial Sequence
  Synthetic oligonucleotide
atgataaatgatcttaaccagcatcccgta

SEQ ID NO: 119218 - DNA, 30 bp, Artificial Sequence
  Synthetic oligonucleotide
aataagtcaagcgtagagctggtggccgta

SEQ ID NO: 119219 - DNA, 30 bp, Artificial Sequence
  Synthetic oligonucleotide
ttacgggtccgtctgatctcggctgccgta

SEQ ID NO: 119220 - DNA, 30 bp, Artificial Sequence
  Synthetic oligonucleotide
gcggtaaagttcggtaaaagtattgccgta

SEQ ID NO: 119221 - DNA, 30 bp, Artificial Sequence
  Synthetic oligonucleotide
cttaacgtggtagagacgtggggttccgta

SEQ ID NO: 119222 - DNA, 30 bp, Artificial Sequence
  Synthetic oligonucleotide
tatagagggcaaacagccccatagagcgta

SEQ ID NO: 119223 - DNA, 30 bp, Artificial Sequence
  Synthetic oligonucleotide
gaaccgtgagcaatcctggaggaacgcgta

SEQ ID NO: 119224 - DNA, 30 bp, Artificial Sequence
  Synthetic oligonucleotide
ttcttcgcgcatggaaggcccgaccgcgta

SEQ ID NO: 119225 - DNA, 30 bp, Artificial Sequence
  Synthetic oligonucleotide
ctagggaacacattgagtattacgcgcgta

SEQ ID NO: 119226 - DNA, 30 bp, Artificial Sequence
  Synthetic oligonucleotide
ggaaataccatggactggcgtaccggcgta

SEQ ID NO: 119227 - DNA, 30 bp, Artificial Sequence
  Synthetic oligonucleotide
agggactctacatcagcatgcgtcggcgta

SEQ ID NO: 119228 - DNA, 30 bp, Artificial Sequence
  Synthetic oligonucleotide
tatcgatgatatgagataacctatggcgta

SEQ ID NO: 119229 - DNA, 30 bp, Artificial Sequence
  Synthetic oligonucleotide
tagttagaatcactctacagttaatgcgta

SEQ ID NO: 119230 - DNA, 30 bp, Artificial Sequence
  Synthetic oligonucleotide
ccgcgaaggatagagctggccgcatgcgta

SEQ ID NO: 119231 - DNA, 30 bp, Artificial Sequence
  Synthetic oligonucleotide
cgcattggtgggtcttttcggagctgcgta

SEQ ID NO: 119232 - DNA, 30 bp, Artificial Sequence
  Synthetic oligonucleotide
caaagacgaggagtggccttaaattgcgta

SEQ ID NO: 119233 - DNA, 30 bp, Artificial Sequence
  Synthetic oligonucleotide
gcttaaaggtgtcgggaaacccgttgcgta

SEQ ID NO: 119234 - DNA, 30 bp, Artificial Sequence
  Synthetic oligonucleotide
gcgcagcagggtcagactaaattaatcgta

SEQ ID NO: 119235 - DNA, 30 bp, Artificial Sequence
  Synthetic oligonucleotide
cagcaaatagattccatcagacccatcgta

SEQ ID NO: 119236 - DNA, 30 bp, Artificial Sequence
  Synthetic oligonucleotide
cggtgaaaaaattgttcaagacggatcgta

SEQ ID NO: 119237 - DNA, 30 bp, Artificial Sequence
  Synthetic oligonucleotide
gcgatagttagtatacactaggttatcgta

SEQ ID NO: 119238 - DNA, 30 bp, Artificial Sequence
  Synthetic oligonucleotide
taggcgattatggcgtactcacaactcgta

SEQ ID NO: 119239 - DNA, 30 bp, Artificial Sequence
  Synthetic oligonucleotide
gcgtctacaatggacgatctagaactcgta

SEQ ID NO: 119240 - DNA, 30 bp, Artificial Sequence
  Synthetic oligonucleotide
tagacagcacaggaactatattcactcgta

SEQ ID NO: 119241 - DNA, 30 bp, Artificial Sequence
  Synthetic oligonucleotide
aaggagagacgtccacaagccaagctcgta

SEQ ID NO: 119242 - DNA, 30 bp, Artificial Sequence
  Synthetic oligonucleotide
ctagtttgagaaaggtctacacgggtcgta

SEQ ID NO: 119243 - DNA, 30 bp, Artificial Sequence
  Synthetic oligonucleotide
aaaagtaacggggaaatatcggtggtcgta

SEQ ID NO: 119244 - DNA, 30 bp, Artificial Sequence
  Synthetic oligonucleotide
aaaggtaccaaaccactcgttcatgtcgta

SEQ ID NO: 119245 - DNA, 30 bp, Artificial Sequence
  Synthetic oligonucleotide
gggtgctccataagtagattcaaattcgta

SEQ ID NO: 119246 - DNA, 30 bp, Artificial Sequence
  Synthetic oligonucleotide
aaataaaagccacctgaggccgaattcgta

SEQ ID NO: 119247 - DNA, 30 bp, Artificial Sequence
  Synthetic oligonucleotide
taagcccagcagaggatcccaaataaggta

SEQ ID NO: 119248 - DNA, 30 bp, Artificial Sequence
  Synthetic oligonucleotide
cctcctccagccaactcggtctgccaggta

SEQ ID NO: 119249 - DNA, 30 bp, Artificial Sequence
  Synthetic oligonucleotide
tcacagagcttacaatttgtggtagaggta

SEQ ID NO: 119250 - DNA, 30 bp, Artificial Sequence
  Synthetic oligonucleotide
aggcaattcgaaagagttggccacgaggta

SEQ ID NO: 119251 - DNA, 30 bp, Artificial Sequence
  Synthetic oligonucleotide
aggcgcgtatctcgcggttcggcataggta

SEQ ID NO: 119252 - DNA, 30 bp, Artificial Sequence
  Synthetic oligonucleotide
gcgtgttctgcggcgagtcaaggataggta

SEQ ID NO: 119253 - DNA, 30 bp, Artificial Sequence
  Synthetic oligonucleotide
aacaccggagaggaaggagaggagtaggta

SEQ ID NO: 119254 - DNA, 30 bp, Artificial Sequence
  Synthetic oligonucleotide
tcattgtccaggcatggttttatcacggta

SEQ ID NO: 119255 - DNA, 30 bp, Artificial Sequence
  Synthetic oligonucleotide
ggtggatttatgaataaggagccgacggta

SEQ ID NO: 119256 - DNA, 30 bp, Artificial Sequence
  Synthetic oligonucleotide
acataagtctcctacgagatgagtacggta

SEQ ID NO: 119257 - DNA, 30 bp, Artificial Sequence
  Synthetic oligonucleotide
gaggtgcgagtcggttcagcgagaccggta

SEQ ID NO: 119258 - DNA, 30 bp, Artificial Sequence
  Synthetic oligonucleotide
aacagggagtggtcattcgaaagcccggta

SEQ ID NO: 119259 - DNA, 30 bp, Artificial Sequence
  Synthetic oligonucleotide
tcctaaaaggcatgatcgtgacgcccggta

SEQ ID NO: 119260 - DNA, 30 bp, Artificial Sequence
  Synthetic oligonucleotide
tacatcgccccgccgactcttctcgcggta

SEQ ID NO: 119261 - DNA, 30 bp, Artificial Sequence
  Synthetic oligonucleotide
ctgttacggtaggccccggctcgttcggta

SEQ ID NO: 119262 - DNA, 30 bp, Artificial Sequence
  Synthetic oligonucleotide
tgtggataatgagtcggaaatggaagggta

SEQ ID NO: 119263 - DNA, 30 bp, Artificial Sequence
  Synthetic oligonucleotide
cttagtaggatcacgacctccgatagggta

SEQ ID NO: 119264 - DNA, 30 bp, Artificial Sequence
  Synthetic oligonucleotide
cacgtgcaagacacaaatcccctccgggta

SEQ ID NO: 119265 - DNA, 30 bp, Artificial Sequence
  Synthetic oligonucleotide
taggatgtttacgaatcgtaaaagcgggta

SEQ ID NO: 119266 - DNA, 30 bp, Artificial Sequence
  Synthetic oligonucleotide
ccactggcaatggtagcgatagggcgggta

SEQ ID NO: 119267 - DNA, 30 bp, Artificial Sequence
  Synthetic oligonucleotide
ggatctaccgcgagaaagaaccagggggta

SEQ ID NO: 119268 - DNA, 30 bp, Artificial Sequence
  Synthetic oligonucleotide
acaacatggctggcacggtacgagggggta

SEQ ID NO: 119269 - DNA, 30 bp, Artificial Sequence
  Synthetic oligonucleotide
tatgcgaaggccagctgaactcaatgggta

SEQ ID NO: 119270 - DNA, 30 bp, Artificial Sequence
  Synthetic oligonucleotide
tacgtattaatgttagcgtcgacatgggta

SEQ ID NO: 119271 - DNA, 30 bp, Artificial Sequence
  Synthetic oligonucleotide
aagcgcccctgtcacaaatgaagatgggta

SEQ ID NO: 119272 - DNA, 30 bp, Artificial Sequence
  Synthetic oligonucleotide
gggtgtaagattcgagggttcgtatgggta

SEQ ID NO: 119273 - DNA, 30 bp, Artificial Sequence
  Synthetic oligonucleotide
cgccctatcgaaaagatctgagcgctggta

SEQ ID NO: 119274 - DNA, 30 bp, Artificial Sequence
  Synthetic oligonucleotide
gcagaatcgaggacggcgttttcgctggta

SEQ ID NO: 119275 - DNA, 30 bp, Artificial Sequence
  Synthetic oligonucleotide
aacaagaccgttgcagcgttggggctggta

SEQ ID NO: 119276 - DNA, 30 bp, Artificial Sequence
  Synthetic oligonucleotide
tattgagtagagacagcaatcaaagtggta

SEQ ID NO: 119277 - DNA, 29 bp, Artificial Sequence
  Synthetic oligonucleotide
aggttcgtcaggaagcgaggtaagtggta

SEQ ID NO: 119278 - DNA, 30 bp, Artificial Sequence
  Synthetic oligonucleotide
gttgctctgcgaggcataaaggacttggta

SEQ ID NO: 119279 - DNA, 30 bp, Artificial Sequence
  Synthetic oligonucleotide
tgggcaacacaggtagtccatctaaatgta

SEQ ID NO: 119280 - DNA, 30 bp, Artificial Sequence
  Synthetic oligonucleotide
ccatggaagtgatcacaagtgtggaatgta

SEQ ID NO: 119281 - DNA, 30 bp, Artificial Sequence
  Synthetic oligonucleotide
gtaccgtagtctgagcaaccaaataatgta

SEQ ID NO: 119282 - DNA, 30 bp, Artificial Sequence
  Synthetic oligonucleotide
atgaaggtggttgggcgagagtctaatgta

SEQ ID NO: 119283 - DNA, 30 bp, Artificial Sequence
  Synthetic oligonucleotide
tcttggcattagtgcgagtggcccgatgta

SEQ ID NO: 119284 - DNA, 30 bp, Artificial Sequence
  Synthetic oligonucleotide
tagtagcatgtcaggtacggtgatgatgta

SEQ ID NO: 119285 - DNA, 30 bp, Artificial Sequence
  Synthetic oligonucleotide
aacgctctggataatatagatcgtgatgta

SEQ ID NO: 119286 - DNA, 30 bp, Artificial Sequence
  Synthetic oligonucleotide
tcaaatcgtaaccataacgggcttgatgta

SEQ ID NO: 119287 - DNA, 30 bp, Artificial Sequence
  Synthetic oligonucleotide
ccactaagggatgcactgagccgatatgta

SEQ ID NO: 119288 - DNA, 30 bp, Artificial Sequence
  Synthetic oligonucleotide
gatccactaagacatcctggggaaactgta

SEQ ID NO: 119289 - DNA, 30 bp, Artificial Sequence
  Synthetic oligonucleotide
catataagaacgcgttagggggtcactgta

SEQ ID NO: 119290 - DNA, 30 bp, Artificial Sequence
  Synthetic oligonucleotide
tttcacgtggcgataaaacacggtactgta

SEQ ID NO: 119291 - DNA, 30 bp, Artificial Sequence
  Synthetic oligonucleotide
caccagcctgtacggtgaggtgcgcctgta

SEQ ID NO: 119292 - DNA, 30 bp, Artificial Sequence
  Synthetic oligonucleotide
ggtcgcggagtattaaaaaagacagctgta

SEQ ID NO: 119293 - DNA, 30 bp, Artificial Sequence
  Synthetic oligonucleotide
cagacatataaccatgctagtgcagctgta

SEQ ID NO: 119294 - DNA, 30 bp, Artificial Sequence
  Synthetic oligonucleotide
ggcgcatgtggtaacacatgtgttgctgta

SEQ ID NO: 119295 - DNA, 30 bp, Artificial Sequence
  Synthetic oligonucleotide
cgacggccatattcatttgcatcaagtgta

SEQ ID NO: 119296 - DNA, 30 bp, Artificial Sequence
  Synthetic oligonucleotide
ataccgctcacttagttgcaaagcagtgta

SEQ ID NO: 119297 - DNA, 30 bp, Artificial Sequence
  Synthetic oligonucleotide
caacccggggggtagatgtaaaagagtgta

SEQ ID NO: 119298 - DNA, 30 bp, Artificial Sequence
  Synthetic oligonucleotide
ataacaactggacaagagtggcagagtgta

SEQ ID NO: 119299 - DNA, 30 bp, Artificial Sequence
  Synthetic oligonucleotide
gtccatggtgttctgaagggtgttagtgta

SEQ ID NO: 119300 - DNA, 30 bp, Artificial Sequence
  Synthetic oligonucleotide
gcacaggggtttgtcgggcgggcacgtgta

SEQ ID NO: 119301 - DNA, 30 bp, Artificial Sequence
  Synthetic oligonucleotide
cacgagagatctttcagctagatacgtgta

SEQ ID NO: 119302 - DNA, 30 bp, Artificial Sequence
  Synthetic oligonucleotide
ggctctaaaaagagcatgtgataccgtgta

SEQ ID NO: 119303 - DNA, 30 bp, Artificial Sequence
  Synthetic oligonucleotide
accgcatacagtgagctaactcagcgtgta

SEQ ID NO: 119304 - DNA, 30 bp, Artificial Sequence
  Synthetic oligonucleotide
agccgccggttgtccaaacgatctcgtgta

SEQ ID NO: 119305 - DNA, 30 bp, Artificial Sequence
  Synthetic oligonucleotide
ggcacacgaggggtcctgttatacggtgta

SEQ ID NO: 119306 - DNA, 30 bp, Artificial Sequence
  Synthetic oligonucleotide
gcctggaaccggtactaactgaagtgtgta

SEQ ID NO: 119307 - DNA, 30 bp, Artificial Sequence
  Synthetic oligonucleotide
cacaaatagtctggtagagcaatgtgtgta

SEQ ID NO: 119308 - DNA, 30 bp, Artificial Sequence
  Synthetic oligonucleotide
cgtgaggggacggaagacgctttgtgtgta

SEQ ID NO: 119309 - DNA, 30 bp, Artificial Sequence
  Synthetic oligonucleotide
cagaacgttacgaggatgggcccacttgta

SEQ ID NO: 119310 - DNA, 30 bp, Artificial Sequence
  Synthetic oligonucleotide
acggctcgagggatatagcgttcacttgta

SEQ ID NO: 119311 - DNA, 30 bp, Artificial Sequence
  Synthetic oligonucleotide
gtctacccagatagtgacgaatcccttgta

SEQ ID NO: 119312 - DNA, 30 bp, Artificial Sequence
  Synthetic oligonucleotide
ttcagactcgaggttaaaaaagatcttgta

SEQ ID NO: 119313 - DNA, 30 bp, Artificial Sequence
  Synthetic oligonucleotide
ataaggaacccatgcgggtggagggttgta

SEQ ID NO: 119314 - DNA, 30 bp, Artificial Sequence
  Synthetic oligonucleotide
aggaacaacgcctgttctgtcactgttgta

SEQ ID NO: 119315 - DNA, 30 bp, Artificial Sequence
  Synthetic oligonucleotide
acctacaacgtgtaggtatagatgtttgta

SEQ ID NO: 119316 - DNA, 30 bp, Artificial Sequence
  Synthetic oligonucleotide
tttggtgcgaactgtggttaagcttttgta

SEQ ID NO: 119317 - DNA, 30 bp, Artificial Sequence
  Synthetic oligonucleotide
tcttgttacacctggtggagactgaaatta

SEQ ID NO: 119318 - DNA, 30 bp, Artificial Sequence
  Synthetic oligonucleotide
gcacgtgtgatatgcgtatcagttcaatta

SEQ ID NO: 119319 - DNA, 30 bp, Artificial Sequence
  Synthetic oligonucleotide
cactccagcgaataaacaaagggagaatta

SEQ ID NO: 119320 - DNA, 30 bp, Artificial Sequence
  Synthetic oligonucleotide
atggggccgcacgagaacactagcgaatta

SEQ ID NO: 119321 - DNA, 30 bp, Artificial Sequence
  Synthetic oligonucleotide
gcctggttctgcaatgttgtgatggaatta

SEQ ID NO: 119322 - DNA, 30 bp, Artificial Sequence
  Synthetic oligonucleotide
ccaaattgtaatttcaatgccgactaatta

SEQ ID NO: 119323 - DNA, 30 bp, Artificial Sequence
  Synthetic oligonucleotide
tgatcgcgagtggaactatggggctaatta

SEQ ID NO: 119324 - DNA, 30 bp, Artificial Sequence
  Synthetic oligonucleotide
atagaggagtactacagcggcatgtaatta

SEQ ID NO: 119325 - DNA, 30 bp, Artificial Sequence
  Synthetic oligonucleotide
gagaagaaaccgtggtccgttagttaatta

SEQ ID NO: 119326 - DNA, 31 bp, Artificial Sequence
  Synthetic oligonucleotide
gcgtgctaaactaagggtggttggttaatta

SEQ ID NO: 119327 - DNA, 30 bp, Artificial Sequence
  Synthetic oligonucleotide
tgctacactggggacttatccgaaacatta

SEQ ID NO: 119328 - DNA, 30 bp, Artificial Sequence
  Synthetic oligonucleotide
acctaagacccgatggctgaaacgacatta

SEQ ID NO: 119329 - DNA, 30 bp, Artificial Sequence
  Synthetic oligonucleotide
agataacgccgtaagccgtctaccccatta

SEQ ID NO: 119330 - DNA, 30 bp, Artificial Sequence
  Synthetic oligonucleotide
actaatcgactgtgatgagtgagtccatta

SEQ ID NO: 119331 - DNA, 30 bp, Artificial Sequence
  Synthetic oligonucleotide
cggtatagcccacgttaaaactcagcatta

SEQ ID NO: 119332 - DNA, 30 bp, Artificial Sequence
  Synthetic oligonucleotide
cggggaaacactcaaaatacaaacgcatta

SEQ ID NO: 119333 - DNA, 30 bp, Artificial Sequence
  Synthetic oligonucleotide
tagggagagggtgcctcagtaggcgcatta

SEQ ID NO: 119334 - DNA, 30 bp, Artificial Sequence
  Synthetic oligonucleotide
attacggtgctgattgtgcaccatgcatta

SEQ ID NO: 119335 - DNA, 30 bp, Artificial Sequence
  Synthetic oligonucleotide
gagaccaggtcgggatcaactggatcatta

SEQ ID NO: 119336 - DNA, 30 bp, Artificial Sequence
  Synthetic oligonucleotide
cgcagtgtcgggggccaaagatcctcatta

SEQ ID NO: 119337 - DNA, 30 bp, Artificial Sequence
  Synthetic oligonucleotide
caataatagtgactgccatacgagtcatta

SEQ ID NO: 119338 - DNA, 30 bp, Artificial Sequence
  Synthetic oligonucleotide
ggactcagtgggcgtacattctacagatta

SEQ ID NO: 119339 - DNA, 30 bp, Artificial Sequence
  Synthetic oligonucleotide
taagtgccagactataggaccaagagatta

SEQ ID NO: 119340 - DNA, 30 bp, Artificial Sequence
  Synthetic oligonucleotide
cttccaaggcctacaggaattcaccgatta

SEQ ID NO: 119341 - DNA, 30 bp, Artificial Sequence
  Synthetic oligonucleotide
aagtgcttacggtcaactcctccccgatta

SEQ ID NO: 119342 - DNA, 30 bp, Artificial Sequence
  Synthetic oligonucleotide
gaaaccagcgtcaaaggtgggttgcgatta

SEQ ID NO: 119343 - DNA, 30 bp, Artificial Sequence
  Synthetic oligonucleotide
caccgtcgaaggccaaggcacccaggatta

SEQ ID NO: 119344 - DNA, 30 bp, Artificial Sequence
  Synthetic oligonucleotide
acgagttcaaccgtcaatgaggcaggatta

SEQ ID NO: 119345 - DNA, 30 bp, Artificial Sequence
  Synthetic oligonucleotide
agcaaccctagatcttgtgttcgaggatta

SEQ ID NO: 119346 - DNA, 30 bp, Artificial Sequence
  Synthetic oligonucleotide
acgaattgcaactgtacttgcgtcggatta

SEQ ID NO: 119347 - DNA, 30 bp, Artificial Sequence
  Synthetic oligonucleotide
ggtgaccctgaattgcggagttggggatta

SEQ ID NO: 119348 - DNA, 30 bp, Artificial Sequence
  Synthetic oligonucleotide
tcgggccaagagccccccggttggtgatta

SEQ ID NO: 119349 - DNA, 30 bp, Artificial Sequence
  Synthetic oligonucleotide
gtttgctggaacaatccacactgtatatta

SEQ ID NO: 119350 - DNA, 30 bp, Artificial Sequence
  Synthetic oligonucleotide
agttagctgaccaattgctaccgactatta

SEQ ID NO: 119351 - DNA, 30 bp, Artificial Sequence
  Synthetic oligonucleotide
caaaccggagagacggatttctaagtatta

SEQ ID NO: 119352 - DNA, 30 bp, Artificial Sequence
  Synthetic oligonucleotide
atgcgatgaagtttcatacggaatgtatta

SEQ ID NO: 119353 - DNA, 31 bp, Artificial Sequence
  Synthetic oligonucleotide
atcaagccacagcagcagaggtttgttatta

SEQ ID NO: 119354 - DNA, 30 bp, Artificial Sequence
  Synthetic oligonucleotide
agtggcggaaaccgggaaaggtataactta

SEQ ID NO: 119355 - DNA, 30 bp, Artificial Sequence
  Synthetic oligonucleotide
ccgatatgaggatcaaggggtcctaactta

SEQ ID NO: 119356 - DNA, 30 bp, Artificial Sequence
  Synthetic oligonucleotide
taggagcatgctatttgagttaagcactta

SEQ ID NO: 119357 - DNA, 30 bp, Artificial Sequence
  Synthetic oligonucleotide
acccaacgagcagtaacttagggagactta

SEQ ID NO: 119358 - DNA, 30 bp, Artificial Sequence
  Synthetic oligonucleotide
ggtgtcaggcagactatttcgtgggactta

SEQ ID NO: 119359 - DNA, 30 bp, Artificial Sequence
  Synthetic oligonucleotide
aacacatataaacacatatatcgctactta

SEQ ID NO: 119360 - DNA, 30 bp, Artificial Sequence
  Synthetic oligonucleotide
tcggatggaagacgttaatagacgtactta

SEQ ID NO: 119361 - DNA, 30 bp, Artificial Sequence
  Synthetic oligonucleotide
ctaagaaaatatctctcattgttaacctta

SEQ ID NO: 119362 - DNA, 30 bp, Artificial Sequence
  Synthetic oligonucleotide
agcgtcgggctgtccatgagcaacacctta

SEQ ID NO: 119363 - DNA, 30 bp, Artificial Sequence
  Synthetic oligonucleotide
aggggagacggaccagctgtcagagcctta

SEQ ID NO: 119364 - DNA, 30 bp, Artificial Sequence
  Synthetic oligonucleotide
cgtaggctatagaggtagatcacggcctta

SEQ ID NO: 119365 - DNA, 30 bp, Artificial Sequence
  Synthetic oligonucleotide
agagttacgcattcacgccggtcgtcctta

SEQ ID NO: 119366 - DNA, 30 bp, Artificial Sequence
  Synthetic oligonucleotide
cggtcccttgaaccctatagcaacagctta

SEQ ID NO: 119367 - DNA, 30 bp, Artificial Sequence
  Synthetic oligonucleotide
agtgccagatacgttgggcctaatagctta

SEQ ID NO: 119368 - DNA, 30 bp, Artificial Sequence
  Synthetic oligonucleotide
ccagggaattatgttagatcggatagctta

SEQ ID NO: 119369 - DNA, 30 bp, Artificial Sequence
  Synthetic oligonucleotide
agtaatcgagctaggggtgttgggcgctta

SEQ ID NO: 119370 - DNA, 30 bp, Artificial Sequence
  Synthetic oligonucleotide
ctgacatggcccttagagatcagcggctta

SEQ ID NO: 119371 - DNA, 30 bp, Artificial Sequence
  Synthetic oligonucleotide
aacgaaatcttgtgggatggtaatatctta

SEQ ID NO: 119372 - DNA, 30 bp, Artificial Sequence
  Synthetic oligonucleotide
agcccaaaaaacatgcacactgatatctta

SEQ ID NO: 119373 - DNA, 30 bp, Artificial Sequence
  Synthetic oligonucleotide
gtcgggcgttggatcatcatttcactctta

SEQ ID NO: 119374 - DNA, 30 bp, Artificial Sequence
  Synthetic oligonucleotide
gtccacaggcggtgtagatagaccctctta

SEQ ID NO: 119375 - DNA, 30 bp, Artificial Sequence
  Synthetic oligonucleotide
agcaactcgggacgggggtctgagctctta

SEQ ID NO: 119376 - DNA, 30 bp, Artificial Sequence
  Synthetic oligonucleotide
tgggtgagagagtcggcgagataagtctta

SEQ ID NO: 119377 - DNA, 30 bp, Artificial Sequence
  Synthetic oligonucleotide
gaacagtatgagatcgacacccggttctta

SEQ ID NO: 119378 - DNA, 30 bp, Artificial Sequence
  Synthetic oligonucleotide
ggggacacccaccttggcacgacaaagtta

SEQ ID NO: 119379 - DNA, 30 bp, Artificial Sequence
  Synthetic oligonucleotide
ggtactgaaacttatattgccgtaaagtta

SEQ ID NO: 119380 - DNA, 30 bp, Artificial Sequence
  Synthetic oligonucleotide
actagaatcgcagggcctgcatataagtta

SEQ ID NO: 119381 - DNA, 30 bp, Artificial Sequence
  Synthetic oligonucleotide
atccacaaagtccaggaagggcaacagtta

SEQ ID NO: 119382 - DNA, 30 bp, Artificial Sequence
  Synthetic oligonucleotide
taatggcacgaccgtaaaggaccccagtta

SEQ ID NO: 119383 - DNA, 30 bp, Artificial Sequence
  Synthetic oligonucleotide
ccgagaacgcctatagctattaagcagtta

SEQ ID NO: 119384 - DNA, 30 bp, Artificial Sequence
  Synthetic oligonucleotide
tagcggctgaagctccctgaagggcagtta

SEQ ID NO: 119385 - DNA, 30 bp, Artificial Sequence
  Synthetic oligonucleotide
gttctcacgggagaggcactgggtcagtta

SEQ ID NO: 119386 - DNA, 30 bp, Artificial Sequence
  Synthetic oligonucleotide
aaagaaatgcgcggcacagacaaggagtta

SEQ ID NO: 119387 - DNA, 30 bp, Artificial Sequence
  Synthetic oligonucleotide
caccgtctcgaataaggcgaacgtgagtta

SEQ ID NO: 119388 - DNA, 30 bp, Artificial Sequence
  Synthetic oligonucleotide
actatggttgagaaaaatgagttatagtta

SEQ ID NO: 119389 - DNA, 30 bp, Artificial Sequence
  Synthetic oligonucleotide
cgagaagataggaataaaatcaagtagtta

SEQ ID NO: 119390 - DNA, 30 bp, Artificial Sequence
  Synthetic oligonucleotide
tcaggtatccatgctggaatagagtagtta

SEQ ID NO: 119391 - DNA, 30 bp, Artificial Sequence
  Synthetic oligonucleotide
caatagatgattttcgtctatgattagtta

SEQ ID NO: 119392 - DNA, 30 bp, Artificial Sequence
  Synthetic oligonucleotide
ccgggtggtatctacaacaagcgttagtta

SEQ ID NO: 119393 - DNA, 30 bp, Artificial Sequence
  Synthetic oligonucleotide
ggtacgatgtctaaaccggagagaccgtta

SEQ ID NO: 119394 - DNA, 30 bp, Artificial Sequence
  Synthetic oligonucleotide
ccagtgagctgatcctctgttagcgcgtta

SEQ ID NO: 119395 - DNA, 30 bp, Artificial Sequence
  Synthetic oligonucleotide
aagttaccataagagtatgtggctgcgtta

SEQ ID NO: 119396 - DNA, 30 bp, Artificial Sequence
  Synthetic oligonucleotide
agcgctactgggccatgacgtgcgtcgtta

SEQ ID NO: 119397 - DNA, 30 bp, Artificial Sequence
  Synthetic oligonucleotide
acatggaatagtggaaggaatgaaaggtta

SEQ ID NO: 119398 - DNA, 30 bp, Artificial Sequence
  Synthetic oligonucleotide
atggcccttggcaattaaaaggtaaggtta

SEQ ID NO: 119399 - DNA, 30 bp, Artificial Sequence
  Synthetic oligonucleotide
agggaccctccagcgatgttgttaaggtta

SEQ ID NO: 119400 - DNA, 30 bp, Artificial Sequence
  Synthetic oligonucleotide
cgaaaccagctgagagcggacgacaggtta

SEQ ID NO: 119401 - DNA, 30 bp, Artificial Sequence
  Synthetic oligonucleotide
acgggattactagaggtgcacttcaggtta

SEQ ID NO: 119402 - DNA, 30 bp, Artificial Sequence
  Synthetic oligonucleotide
ccaggcgtatatgatcgaacacaacggtta

SEQ ID NO: 119403 - DNA, 30 bp, Artificial Sequence
  Synthetic oligonucleotide
tgtacggatcacgcaagcgaggcacggtta

SEQ ID NO: 119404 - DNA, 30 bp, Artificial Sequence
  Synthetic oligonucleotide
gagattcacgtgacaagaggggtcgggtta

SEQ ID NO: 119405 - DNA, 30 bp, Artificial Sequence
  Synthetic oligonucleotide
tgtgaagaaggtggggaacagtaggggtta

SEQ ID NO: 119406 - DNA, 30 bp, Artificial Sequence
  Synthetic oligonucleotide
ccgttcgtgatccgatggtagagggggtta

SEQ ID NO: 119407 - DNA, 30 bp, Artificial Sequence
  Synthetic oligonucleotide
gcatactcacttgagacacgtagggggtta

SEQ ID NO: 119408 - DNA, 30 bp, Artificial Sequence
  Synthetic oligonucleotide
cgtaaaatatgtcaatagtgacttgggtta

SEQ ID NO: 119409 - DNA, 30 bp, Artificial Sequence
  Synthetic oligonucleotide
agggatctaagccaagaaaaaaaatggtta

SEQ ID NO: 119410 - DNA, 30 bp, Artificial Sequence
  Synthetic oligonucleotide
ccgcgtgtctatctcgaagttcaatggtta

SEQ ID NO: 119411 - DNA, 30 bp, Artificial Sequence
  Synthetic oligonucleotide
aaggtaaccggacgaatcatgtgctggtta

SEQ ID NO: 119412 - DNA, 30 bp, Artificial Sequence
  Synthetic oligonucleotide
agcaatcgggtgggctatacgtagtggtta

SEQ ID NO: 119413 - DNA, 30 bp, Artificial Sequence
  Synthetic oligonucleotide
agagtaattcgcgagggtttgctgtggtta

SEQ ID NO: 119414 - DNA, 31 bp, Artificial Sequence
  Synthetic oligonucleotide
gggcgcaccgggaacctatcgaaacatgtta

SEQ ID NO: 119415 - DNA, 30 bp, Artificial Sequence
  Synthetic oligonucleotide
acagatgccttacgtatattagccatgtta

SEQ ID NO: 119416 - DNA, 30 bp, Artificial Sequence
  Synthetic oligonucleotide
taacggtatacactgtgcatggggatgtta

SEQ ID NO: 119417 - DNA, 30 bp, Artificial Sequence
  Synthetic oligonucleotide
ccctagaatataatccctacagaactgtta

SEQ ID NO: 119418 - DNA, 30 bp, Artificial Sequence
  Synthetic oligonucleotide
tgaacaccaacgattcgagtaggactgtta

SEQ ID NO: 119419 - DNA, 30 bp, Artificial Sequence
  Synthetic oligonucleotide
acggacccttgagccaacctcgcgctgtta

SEQ ID NO: 119420 - DNA, 30 bp, Artificial Sequence
  Synthetic oligonucleotide
gtgggcttcctgttgtgaccttgcgtgtta

SEQ ID NO: 119421 - DNA, 30 bp, Artificial Sequence
  Synthetic oligonucleotide
aggcaatagacgtataactaacccaattta

SEQ ID NO: 119422 - DNA, 30 bp, Artificial Sequence
  Synthetic oligonucleotide
gctctgtaggaggggctcagtttcaattta

SEQ ID NO: 119423 - DNA, 30 bp, Artificial Sequence
  Synthetic oligonucleotide
gaaagcaaaaacacggaacaccggaattta

SEQ ID NO: 119424 - DNA, 30 bp, Artificial Sequence
  Synthetic oligonucleotide
cgagaataagatcgcgcaaccgtgcattta

SEQ ID NO: 119425 - DNA, 30 bp, Artificial Sequence
  Synthetic oligonucleotide
acgaatagtccctttacccatgtatattta

SEQ ID NO: 119426 - DNA, 30 bp, Artificial Sequence
  Synthetic oligonucleotide
tggtcgtggacccaaactgatcactattta

SEQ ID NO: 119427 - DNA, 30 bp, Artificial Sequence
  Synthetic oligonucleotide
ggaccgattagaccatcgaaagtctcttta

SEQ ID NO: 119428 - DNA, 30 bp, Artificial Sequence
  Synthetic oligonucleotide
gctcacgatcaaaggtaccacgcccgttta

SEQ ID NO: 119429 - DNA, 30 bp, Artificial Sequence
  Synthetic oligonucleotide
gctagctgcctggacctaacaaccggttta

SEQ ID NO: 119430 - DNA, 30 bp, Artificial Sequence
  Synthetic oligonucleotide
aacgcattgtatgaggagaaccgtggttta

SEQ ID NO: 119431 - DNA, 30 bp, Artificial Sequence
  Synthetic oligonucleotide
gtggcattttcagaacagcagtgtggttta

SEQ ID NO: 119432 - DNA, 30 bp, Artificial Sequence
  Synthetic oligonucleotide
agactgggttcgtgtaggatgggatgttta

SEQ ID NO: 119433 - DNA, 30 bp, Artificial Sequence
  Synthetic oligonucleotide
cacaggagaaactatgcaggtgggtgttta

SEQ ID NO: 119434 - DNA, 30 bp, Artificial Sequence
  Synthetic oligonucleotide
ccaccgggagtagcaatcgggtgggtttta

SEQ ID NO: 119435 - DNA, 30 bp, Artificial Sequence
  Synthetic oligonucleotide
tagggggtatggaaggctggctaaaaaaac

SEQ ID NO: 119436 - DNA, 30 bp, Artificial Sequence
  Synthetic oligonucleotide
cgtaggctaaggagagtgggaacgaaaaac

SEQ ID NO: 119437 - DNA, 30 bp, Artificial Sequence
  Synthetic oligonucleotide
acgatatagaagctcaaacccgtgaaaaac

SEQ ID NO: 119438 - DNA, 30 bp, Artificial Sequence
  Synthetic oligonucleotide
atgttcacacatcgagctgagcttaaaaac

SEQ ID NO: 119439 - DNA, 30 bp, Artificial Sequence
  Synthetic oligonucleotide
acatcagaagggggccctggatttaaaaac

SEQ ID NO: 119440 - DNA, 30 bp, Artificial Sequence
  Synthetic oligonucleotide
cgtttcggacggacgaatgcctttaaaaac

SEQ ID NO: 119441 - DNA, 30 bp, Artificial Sequence
  Synthetic oligonucleotide
gggtgaggagtgttcactgtaggacaaaac

SEQ ID NO: 119442 - DNA, 30 bp, Artificial Sequence
  Synthetic oligonucleotide
cagagtcctaggttgaatcgggaagaaaac

SEQ ID NO: 119443 - DNA, 30 bp, Artificial Sequence
  Synthetic oligonucleotide
tccgaacctttagcggtggtggacgaaaac

SEQ ID NO: 119444 - DNA, 30 bp, Artificial Sequence
  Synthetic oligonucleotide
aactcaactgggaaacggtagtgtgaaaac

SEQ ID NO: 119445 - DNA, 30 bp, Artificial Sequence
  Synthetic oligonucleotide
agaaggccctgcatctgcaagccataaaac

SEQ ID NO: 119446 - DNA, 30 bp, Artificial Sequence
  Synthetic oligonucleotide
ggggcgggcaagagggatgttaattaaaac

SEQ ID NO: 119447 - DNA, 30 bp, Artificial Sequence
  Synthetic oligonucleotide
ggtgttgacagggctatggaacgtacaaac

SEQ ID NO: 119448 - DNA, 30 bp, Artificial Sequence
  Synthetic oligonucleotide
tcgattgaaatgtggcgaaggttaccaaac

SEQ ID NO: 119449 - DNA, 30 bp, Artificial Sequence
  Synthetic oligonucleotide
tggtaggccaatttgcgtcacgagccaaac

SEQ ID NO: 119450 - DNA, 30 bp, Artificial Sequence
  Synthetic oligonucleotide
agggcaaactgtccagtgggtgatgcaaac

SEQ ID NO: 119451 - DNA, 30 bp, Artificial Sequence
  Synthetic oligonucleotide
ggcacatttgtactcaaagtaccgtcaaac

SEQ ID NO: 119452 - DNA, 30 bp, Artificial Sequence
  Synthetic oligonucleotide
aggcgggattcatacgttaacagcagaaac

SEQ ID NO: 119453 - DNA, 30 bp, Artificial Sequence
  Synthetic oligonucleotide
cgtacgggcgatgttatgcggacgagaaac

SEQ ID NO: 119454 - DNA, 30 bp, Artificial Sequence
  Synthetic oligonucleotide
gaaccgtatgacagaaagtctgatcgaaac

SEQ ID NO: 119455 - DNA, 30 bp, Artificial Sequence
  Synthetic oligonucleotide
accacatgggtaatatcaggttgtcgaaac

SEQ ID NO: 119456 - DNA, 30 bp, Artificial Sequence
  Synthetic oligonucleotide
gacggaatccaaagtgcaggtcctggaaac

SEQ ID NO: 119457 - DNA, 30 bp, Artificial Sequence
  Synthetic oligonucleotide
atgagtccagaacatcccagttacataaac

SEQ ID NO: 119458 - DNA, 30 bp, Artificial Sequence
  Synthetic oligonucleotide
cgcggagactagcattaccatcggataaac

SEQ ID NO: 119459 - DNA, 30 bp, Artificial Sequence
  Synthetic oligonucleotide
ccaaccaggtcaaatgaaacgagtataaac

SEQ ID NO: 119460 - DNA, 30 bp, Artificial Sequence
  Synthetic oligonucleotide
tgcttcagacaataactgcatccactaaac

SEQ ID NO: 119461 - DNA, 30 bp, Artificial Sequence
  Synthetic oligonucleotide
acgcgtaaacagagcggtgttccagtaaac

SEQ ID NO: 119462 - DNA, 30 bp, Artificial Sequence
  Synthetic oligonucleotide
accccttagatgagcgaaggaaccgtaaac

SEQ ID NO: 119463 - DNA, 30 bp, Artificial Sequence
  Synthetic oligonucleotide
agctaggcccgaaaggaccttagcgtaaac

SEQ ID NO: 119464 - DNA, 30 bp, Artificial Sequence
  Synthetic oligonucleotide
atgaactttcagagtattaggtcggtaaac

SEQ ID NO: 119465 - DNA, 30 bp, Artificial Sequence
  Synthetic oligonucleotide
accaaggggtatagcgaaaaatgtgtaaac

SEQ ID NO: 119466 - DNA, 30 bp, Artificial Sequence
  Synthetic oligonucleotide
ggtccgttgcacaaggttgtcacgttaaac

SEQ ID NO: 119467 - DNA, 30 bp, Artificial Sequence
  Synthetic oligonucleotide
gtcgaggtccgattctacgggactttaaac

SEQ ID NO: 119468 - DNA, 30 bp, Artificial Sequence
  Synthetic oligonucleotide
tccctcgggcgttggaggcgaaacaacaac

SEQ ID NO: 119469 - DNA, 30 bp, Artificial Sequence
  Synthetic oligonucleotide
tcttgggtacagtaccagttccgcaacaac

SEQ ID NO: 119470 - DNA, 30 bp, Artificial Sequence
  Synthetic oligonucleotide
cacgaacttggttgtgtagaagggaacaac

SEQ ID NO: 119471 - DNA, 29 bp, Artificial Sequence
  Synthetic oligonucleotide
ccgtcactgataaaggggccattaacaac

SEQ ID NO: 119472 - DNA, 30 bp, Artificial Sequence
  Synthetic oligonucleotide
acaatacaagacattacactccgccacaac

SEQ ID NO: 119473 - DNA, 30 bp, Artificial Sequence
  Synthetic oligonucleotide
ctagacgcgatgcgcgatcttgtccacaac

SEQ ID NO: 119474 - DNA, 30 bp, Artificial Sequence
  Synthetic oligonucleotide
tgtaacatatgcttatccaccttgcacaac

SEQ ID NO: 119475 - DNA, 30 bp, Artificial Sequence
  Synthetic oligonucleotide
catcggatataaggttaccaggttcacaac

SEQ ID NO: 119476 - DNA, 30 bp, Artificial Sequence
  Synthetic oligonucleotide
cacggaagatcaaatattctccaagacaac

SEQ ID NO: 119477 - DNA, 30 bp, Artificial Sequence
  Synthetic oligonucleotide
tacaggccatacgtctgaaggcaagacaac

SEQ ID NO: 119478 - DNA, 30 bp, Artificial Sequence
  Synthetic oligonucleotide
atgcagttggggaaaggttagccggacaac

SEQ ID NO: 119479 - DNA, 30 bp, Artificial Sequence
  Synthetic oligonucleotide
ctgtttagggcaagccacatcggtgacaac

SEQ ID NO: 119480 - DNA, 30 bp, Artificial Sequence
  Synthetic oligonucleotide
agtgtaggatcctataccaatgcatacaac

SEQ ID NO: 119481 - DNA, 30 bp, Artificial Sequence
  Synthetic oligonucleotide
acagcagctcggaacgaattcatcaccaac

SEQ ID NO: 119482 - DNA, 30 bp, Artificial Sequence
  Synthetic oligonucleotide
agttgcgtgccattgcatgccgggaccaac

SEQ ID NO: 119483 - DNA, 30 bp, Artificial Sequence
  Synthetic oligonucleotide
cgtgtggcaaagaacgctctgcgtaccaac

SEQ ID NO: 119484 - DNA, 30 bp, Artificial Sequence
  Synthetic oligonucleotide
tctcgatcttttacgaataggcgacccaac

SEQ ID NO: 119485 - DNA, 30 bp, Artificial Sequence
  Synthetic oligonucleotide
actactttcaacaacaaggtgggagccaac

SEQ ID NO: 119486 - DNA, 30 bp, Artificial Sequence
  Synthetic oligonucleotide
gggacgggaattcggtatgagaacgccaac

SEQ ID NO: 119487 - DNA, 30 bp, Artificial Sequence
  Synthetic oligonucleotide
tgatgacgtctaggaccaaaccgcgccaac

SEQ ID NO: 119488 - DNA, 30 bp, Artificial Sequence
  Synthetic oligonucleotide
agggtagtcctgaacaccggtcgcgccaac

SEQ ID NO: 119489 - DNA, 30 bp, Artificial Sequence
  Synthetic oligonucleotide
acacacgttcggaacacctgagcctccaac

SEQ ID NO: 119490 - DNA, 30 bp, Artificial Sequence
  Synthetic oligonucleotide
agggggtacgccatcacgatataaagcaac

SEQ ID NO: 119491 - DNA, 30 bp, Artificial Sequence
  Synthetic oligonucleotide
acaatctgagttccacctcctgacagcaac

SEQ ID NO: 119492 - DNA, 30 bp, Artificial Sequence
  Synthetic oligonucleotide
tagtgttcagaacggatagagggcagcaac

SEQ ID NO: 119493 - DNA, 30 bp, Artificial Sequence
  Synthetic oligonucleotide
gtaatgggtgcgcggtataatactagcaac

SEQ ID NO: 119494 - DNA, 30 bp, Artificial Sequence
  Synthetic oligonucleotide
aggaaagaacccatgtgtcttaggcgcaac

SEQ ID NO: 119495 - DNA, 30 bp, Artificial Sequence
  Synthetic oligonucleotide
agagggatgttcagtgggggtctaggcaac

SEQ ID NO: 119496 - DNA, 30 bp, Artificial Sequence
  Synthetic oligonucleotide
gttggccaacgcgagccaccttacggcaac

SEQ ID NO: 119497 - DNA, 30 bp, Artificial Sequence
  Synthetic oligonucleotide
caccatattgctaaattaagagatggcaac

SEQ ID NO: 119498 - DNA, 30 bp, Artificial Sequence
  Synthetic oligonucleotide
tgagctaccgaattcaggtctataaagaac

SEQ ID NO: 119499 - DNA, 30 bp, Artificial Sequence
  Synthetic oligonucleotide
ctgccccgggaatattgtaggtacaagaac

SEQ ID NO: 119500 - DNA, 30 bp, Artificial Sequence
  Synthetic oligonucleotide
caaatagtagcatatgagccagggaagaac

SEQ ID NO: 119501 - DNA, 30 bp, Artificial Sequence
  Synthetic oligonucleotide
atcacaaggtgcaaaaacgtgctgcagaac

SEQ ID NO: 119502 - DNA, 30 bp, Artificial Sequence
  Synthetic oligonucleotide
cctggaggcctccggctagcgaactagaac

SEQ ID NO: 119503 - DNA, 30 bp, Artificial Sequence
  Synthetic oligonucleotide
agtagaaaacattaagtgtcgacctagaac

SEQ ID NO: 119504 - DNA, 30 bp, Artificial Sequence
  Synthetic oligonucleotide
ttgggcaggccaagactgaggttttagaac

SEQ ID NO: 119505 - DNA, 30 bp, Artificial Sequence
  Synthetic oligonucleotide
gggattagcattgcttttctcataacgaac

SEQ ID NO: 119506 - DNA, 30 bp, Artificial Sequence
  Synthetic oligonucleotide
agccgcctgccgatacttccgcgcacgaac

SEQ ID NO: 119507 - DNA, 30 bp, Artificial Sequence
  Synthetic oligonucleotide
taagaaaacgggggacagcccgtgacgaac

SEQ ID NO: 119508 - DNA, 30 bp, Artificial Sequence
  Synthetic oligonucleotide
gaaataagtagtaccctttatgacccgaac

SEQ ID NO: 119509 - DNA, 30 bp, Artificial Sequence
  Synthetic oligonucleotide
tgtaaggtgagtgacttagggtacgcgaac

SEQ ID NO: 119510 - DNA, 30 bp, Artificial Sequence
  Synthetic oligonucleotide
ctagataagcaggataggaggagatcgaac

SEQ ID NO: 119511 - DNA, 30 bp, Artificial Sequence
  Synthetic oligonucleotide
aagcggttgttgaagacatataattcgaac

SEQ ID NO: 119512 - DNA, 30 bp, Artificial Sequence
  Synthetic oligonucleotide
aataagatcactgatcgtcagtaaaggaac

SEQ ID NO: 119513 - DNA, 30 bp, Artificial Sequence
  Synthetic oligonucleotide
taacaggagggcaaagcccgttgcaggaac

SEQ ID NO: 119514 - DNA, 30 bp, Artificial Sequence
  Synthetic oligonucleotide
ttaatacgaacggacttagggcataggaac

SEQ ID NO: 119515 - DNA, 30 bp, Artificial Sequence
  Synthetic oligonucleotide
cgtcagacaacatcgttgttcacacggaac

SEQ ID NO: 119516 - DNA, 30 bp, Artificial Sequence
  Synthetic oligonucleotide
tctggagtaatcacggctgcaaagcggaac

SEQ ID NO: 119517 - DNA, 30 bp, Artificial Sequence
  Synthetic oligonucleotide
cagaatgaggtgtgcaccgtaaggcggaac

SEQ ID NO: 119518 - DNA, 30 bp, Artificial Sequence
  Synthetic oligonucleotide
aggctaagggcgttggaggtgaggcggaac

SEQ ID NO: 119519 - DNA, 30 bp, Artificial Sequence
  Synthetic oligonucleotide
cgaatctgagccgaagggattggagggaac

SEQ ID NO: 119520 - DNA, 30 bp, Artificial Sequence
  Synthetic oligonucleotide
atagtgcacttgggggtactatgcgggaac

SEQ ID NO: 119521 - DNA, 30 bp, Artificial Sequence
  Synthetic oligonucleotide
taatgatcagcgataatcgcggtcgggaac

SEQ ID NO: 119522 - DNA, 30 bp, Artificial Sequence
  Synthetic oligonucleotide
ccagtacacgagtcgggataaacggggaac

SEQ ID NO: 119523 - DNA, 30 bp, Artificial Sequence
  Synthetic oligonucleotide
taagggcttccggaccaacttgcggggaac

SEQ ID NO: 119524 - DNA, 30 bp, Artificial Sequence
  Synthetic oligonucleotide
gcactaaacaatggttgattacgggggaac

SEQ ID NO: 119525 - DNA, 30 bp, Artificial Sequence
  Synthetic oligonucleotide
cagcaagggtcgatgacacaatatgggaac

SEQ ID NO: 119526 - DNA, 30 bp, Artificial Sequence
  Synthetic oligonucleotide
acagtgggacgccatccacgaggtgggaac

SEQ ID NO: 119527 - DNA, 30 bp, Artificial Sequence
  Synthetic oligonucleotide
cgggggttacgttcttggccattctggaac

SEQ ID NO: 119528 - DNA, 30 bp, Artificial Sequence
  Synthetic oligonucleotide
tggtaagcctgatactcgtcagcttggaac

SEQ ID NO: 119529 - DNA, 30 bp, Artificial Sequence
  Synthetic oligonucleotide
agtgaatggtgataacggcaaggttggaac

SEQ ID NO: 119530 - DNA, 30 bp, Artificial Sequence
  Synthetic oligonucleotide
gcagctctaagcctagatcagttcatgaac

SEQ ID NO: 119531 - DNA, 30 bp, Artificial Sequence
  Synthetic oligonucleotide
ggttcgaaggtgtctagtgggggtatgaac

SEQ ID NO: 119532 - DNA, 30 bp, Artificial Sequence
  Synthetic oligonucleotide
ggcctgctgaagggtcgaggcattatgaac

SEQ ID NO: 119533 - DNA, 30 bp, Artificial Sequence
  Synthetic oligonucleotide
aaagtcactccttacatcgtatggctgaac

SEQ ID NO: 119534 - DNA, 30 bp, Artificial Sequence
  Synthetic oligonucleotide
agtatcggatcgtaaacctgcatagtgaac

SEQ ID NO: 119535 - DNA, 30 bp, Artificial Sequence
  Synthetic oligonucleotide
tataaaagtaaccacttgcgctacgtgaac

SEQ ID NO: 119536 - DNA, 30 bp, Artificial Sequence
  Synthetic oligonucleotide
ctcgccgtcacagggtaggaacaggtgaac

SEQ ID NO: 119537 - DNA, 30 bp, Artificial Sequence
  Synthetic oligonucleotide
ctactagcatcattactatatcgggtgaac

SEQ ID NO: 119538 - DNA, 30 bp, Artificial Sequence
  Synthetic oligonucleotide
cccgaaaagtgttgtggctaaagattgaac

SEQ ID NO: 119539 - DNA, 30 bp, Artificial Sequence
  Synthetic oligonucleotide
acgggaataccatagttgtctacgttgaac

SEQ ID NO: 119540 - DNA, 30 bp, Artificial Sequence
  Synthetic oligonucleotide
cgtacgtgcttgggagtttggttgttgaac

SEQ ID NO: 119541 - DNA, 30 bp, Artificial Sequence
  Synthetic oligonucleotide
taaagcaagacgtgagtatctagtttgaac

SEQ ID NO: 119542 - DNA, 30 bp, Artificial Sequence
  Synthetic oligonucleotide
acacggcacttcatatatatcggtttgaac

SEQ ID NO: 119543 - DNA, 30 bp, Artificial Sequence
  Synthetic oligonucleotide
gtgacaacagagcgtattttctaaaataac

SEQ ID NO: 119544 - DNA, 30 bp, Artificial Sequence
  Synthetic oligonucleotide
gcgatattctcgtgggggataatcaataac

SEQ ID NO: 119545 - DNA, 30 bp, Artificial Sequence
  Synthetic oligonucleotide
cggccgtaatctagactcaaagggaataac

SEQ ID NO: 119546 - DNA, 30 bp, Artificial Sequence
  Synthetic oligonucleotide
cccagaggctatgccatagtcggacataac

SEQ ID NO: 119547 - DNA, 30 bp, Artificial Sequence
  Synthetic oligonucleotide
taacgctgacgcacatcagctatccataac

SEQ ID NO: 119548 - DNA, 30 bp, Artificial Sequence
  Synthetic oligonucleotide
ctagcggaagagtggaaggatcggcataac

SEQ ID NO: 119549 - DNA, 30 bp, Artificial Sequence
  Synthetic oligonucleotide
gggaactggaaaaacgcatgcatgcataac

SEQ ID NO: 119550 - DNA, 30 bp, Artificial Sequence
  Synthetic oligonucleotide
taacctcgcgataaactaaaacatcataac

SEQ ID NO: 119551 - DNA, 30 bp, Artificial Sequence
  Synthetic oligonucleotide
tcgtaaagctagcgatccgtccgtcataac

SEQ ID NO: 119552 - DNA, 30 bp, Artificial Sequence
  Synthetic oligonucleotide
ccgagttaaccctagtagacgacatataac

SEQ ID NO: 119553 - DNA, 30 bp, Artificial Sequence
  Synthetic oligonucleotide
cgtctagtgactccgagcatatcctataac

SEQ ID NO: 119554 - DNA, 30 bp, Artificial Sequence
  Synthetic oligonucleotide
aacgtagtctgggacatagttgcttataac

SEQ ID NO: 119555 - DNA, 30 bp, Artificial Sequence
  Synthetic oligonucleotide
gcggggtctagatcaaagtatgtgactaac

SEQ ID NO: 119556 - DNA, 30 bp, Artificial Sequence
  Synthetic oligonucleotide
ggaacgtattaaacgaggtgtgtgcctaac

SEQ ID NO: 119557 - DNA, 30 bp, Artificial Sequence
  Synthetic oligonucleotide
ggcggatggcacgtccgctcagctcctaac

SEQ ID NO: 119558 - DNA, 30 bp, Artificial Sequence
  Synthetic oligonucleotide
aacgggaacagtattccttcgatcgctaac

SEQ ID NO: 119559 - DNA, 30 bp, Artificial Sequence
  Synthetic oligonucleotide
taatatgcagatcagcaggaccgggctaac

SEQ ID NO: 119560 - DNA, 30 bp, Artificial Sequence
  Synthetic oligonucleotide
ttgcactcccgagcccccttgcctgctaac

SEQ ID NO: 119561 - DNA, 30 bp, Artificial Sequence
  Synthetic oligonucleotide
gcaatcctttcttccaaggccacatctaac

SEQ ID NO: 119562 - DNA, 30 bp, Artificial Sequence
  Synthetic oligonucleotide
ctcgtaatccacaatgaatggatatctaac

SEQ ID NO: 119563 - DNA, 30 bp, Artificial Sequence
  Synthetic oligonucleotide
caaaggtcgtaatcatcgatcttgagtaac

SEQ ID NO: 119564 - DNA, 30 bp, Artificial Sequence
  Synthetic oligonucleotide
acagtgaaggcagtgaagaggtatagtaac

SEQ ID NO: 119565 - DNA, 30 bp, Artificial Sequence
  Synthetic oligonucleotide
ataggtacgtactactgtaaagcgcgtaac

SEQ ID NO: 119566 - DNA, 30 bp, Artificial Sequence
  Synthetic oligonucleotide
cagacaaatatattttaaacaagaggtaac

SEQ ID NO: 119567 - DNA, 30 bp, Artificial Sequence
  Synthetic oligonucleotide
cgtattcgccgtggggaatgttagggtaac

SEQ ID NO: 119568 - DNA, 30 bp, Artificial Sequence
  Synthetic oligonucleotide
ggaatatggggaatgttagaatatggtaac

SEQ ID NO: 119569 - DNA, 30 bp, Artificial Sequence
  Synthetic oligonucleotide
tcgcatacgaacttcaggcggcgtggtaac

SEQ ID NO: 119570 - DNA, 30 bp, Artificial Sequence
  Synthetic oligonucleotide
aatcggcctacgacgacaaccgcatgtaac

SEQ ID NO: 119571 - DNA, 30 bp, Artificial Sequence
  Synthetic oligonucleotide
actggaccaggccagggcattcaaattaac

SEQ ID NO: 119572 - DNA, 30 bp, Artificial Sequence
  Synthetic oligonucleotide
agattagcattgcttcaagtccacattaac

SEQ ID NO: 119573 - DNA, 30 bp, Artificial Sequence
  Synthetic oligonucleotide
catatacgtgccggggaacaaccgattaac

SEQ ID NO: 119574 - DNA, 30 bp, Artificial Sequence
  Synthetic oligonucleotide
aaaggaggtcgtataccgggacatattaac

SEQ ID NO: 119575 - DNA, 30 bp, Artificial Sequence
  Synthetic oligonucleotide
gcggcgtgaaacgactagggatatcttaac

SEQ ID NO: 119576 - DNA, 30 bp, Artificial Sequence
  Synthetic oligonucleotide
tcattgagaagctagtaggtgtgagttaac

SEQ ID NO: 119577 - DNA, 30 bp, Artificial Sequence
  Synthetic oligonucleotide
ggggcatgggtgtccaatggtacggttaac

SEQ ID NO: 119578 - DNA, 30 bp, Artificial Sequence
  Synthetic oligonucleotide
ccatatggttagagagaaagcagggttaac

SEQ ID NO: 119579 - DNA, 30 bp, Artificial Sequence
  Synthetic oligonucleotide
tcgtatagtggcgggtcattccatgttaac

SEQ ID NO: 119580 - DNA, 30 bp, Artificial Sequence
  Synthetic oligonucleotide
cggcgactacgtaagaagggtaaatttaac

SEQ ID NO: 119581 - DNA, 30 bp, Artificial Sequence
  Synthetic oligonucleotide
tcggaataatagtatcatgtggcatttaac

SEQ ID NO: 119582 - DNA, 30 bp, Artificial Sequence
  Synthetic oligonucleotide
gcacaaattgtcgtggggaatacctttaac

SEQ ID NO: 119583 - DNA, 30 bp, Artificial Sequence
  Synthetic oligonucleotide
ccaaaagttgatacggaaggccagtttaac

SEQ ID NO: 119584 - DNA, 30 bp, Artificial Sequence
  Synthetic oligonucleotide
caaagcttatatcagactgtttgaaaacac

SEQ ID NO: 119585 - DNA, 30 bp, Artificial Sequence
  Synthetic oligonucleotide
cggccgagctcacgatggctcttaaaacac

SEQ ID NO: 119586 - DNA, 30 bp, Artificial Sequence
  Synthetic oligonucleotide
gaggaaatgtattactacaccgataaacac

SEQ ID NO: 119587 - DNA, 30 bp, Artificial Sequence
  Synthetic oligonucleotide
caagcggactagctaaacggtattaaacac

SEQ ID NO: 119588 - DNA, 30 bp, Artificial Sequence
  Synthetic oligonucleotide
tcaggctacgatagtatgtgggtacaacac

SEQ ID NO: 119589 - DNA, 30 bp, Artificial Sequence
  Synthetic oligonucleotide
tggccatcggaggtttgcaacgaagaacac

SEQ ID NO: 119590 - DNA, 30 bp, Artificial Sequence
  Synthetic oligonucleotide
acatcttagactactggcagtccagaacac

SEQ ID NO: 119591 - DNA, 30 bp, Artificial Sequence
  Synthetic oligonucleotide
acgggcgaaacgtacatcggcacggaacac

SEQ ID NO: 119592 - DNA, 30 bp, Artificial Sequence
  Synthetic oligonucleotide
cggcgttggagaatccagagactgtaacac

SEQ ID NO: 119593 - DNA, 30 bp, Artificial Sequence
  Synthetic oligonucleotide
ggcgtgacacggggtaaacatgttacacac

SEQ ID NO: 119594 - DNA, 30 bp, Artificial Sequence
  Synthetic oligonucleotide
gaagggggtacagattgacgcaaaccacac

SEQ ID NO: 119595 - DNA, 30 bp, Artificial Sequence
  Synthetic oligonucleotide
tagttcggaaccgggcttccttgagcacac

SEQ ID NO: 119596 - DNA, 30 bp, Artificial Sequence
  Synthetic oligonucleotide
tgaactgtgagtaattgtaaaagggcacac

SEQ ID NO: 119597 - DNA, 30 bp, Artificial Sequence
  Synthetic oligonucleotide
gaggaacgaacttttcttcaatgtgcacac

SEQ ID NO: 119598 - DNA, 30 bp, Artificial Sequence
  Synthetic oligonucleotide
gcaaaatcgtgcgagtcaaccgcatcacac

SEQ ID NO: 119599 - DNA, 30 bp, Artificial Sequence
  Synthetic oligonucleotide
caccgttggtcgtattgccgatcatcacac

SEQ ID NO: 119600 - DNA, 30 bp, Artificial Sequence
  Synthetic oligonucleotide
ctcgatatagtaaagggagtcgtatcacac

SEQ ID NO: 119601 - DNA, 30 bp, Artificial Sequence
  Synthetic oligonucleotide
agggggtggtggaaagttatggcctcacac

SEQ ID NO: 119602 - DNA, 30 bp, Artificial Sequence
  Synthetic oligonucleotide
tgagggcttccagcgagaattgcttcacac

SEQ ID NO: 119603 - DNA, 30 bp, Artificial Sequence
  Synthetic oligonucleotide
agatgtagatccgccaatcgctacagacac

SEQ ID NO: 119604 - DNA, 30 bp, Artificial Sequence
  Synthetic oligonucleotide
caggatactgaaaggtgtcgacagagacac

SEQ ID NO: 119605 - DNA, 30 bp, Artificial Sequence
  Synthetic oligonucleotide
ggcgtggcggtaatgaagtaggcgagacac

SEQ ID NO: 119606 - DNA, 30 bp, Artificial Sequence
  Synthetic oligonucleotide
ttaggagtagtggacagcaatgctagacac

SEQ ID NO: 119607 - DNA, 30 bp, Artificial Sequence
  Synthetic oligonucleotide
ttgagctggggtaaggctacagcacgacac

SEQ ID NO: 119608 - DNA, 30 bp, Artificial Sequence
  Synthetic oligonucleotide
tgcatgggccaagcatgatggtaaggacac

SEQ ID NO: 119609 - DNA, 30 bp, Artificial Sequence
  Synthetic oligonucleotide
ccgcgacagaataacaaattcagaggacac

SEQ ID NO: 119610 - DNA, 30 bp, Artificial Sequence
  Synthetic oligonucleotide
cgcatttaccagacgtcgaggagaggacac

SEQ ID NO: 119611 - DNA, 30 bp, Artificial Sequence
  Synthetic oligonucleotide
tgtacggcgaaaatgggttcaaaaatacac

SEQ ID NO: 119612 - DNA, 30 bp, Artificial Sequence
  Synthetic oligonucleotide
aacagcaacaaccagcgctatcaaatacac

SEQ ID NO: 119613 - DNA, 30 bp, Artificial Sequence
  Synthetic oligonucleotide
ccatagctatgtccgcgaatgaatatacac

SEQ ID NO: 119614 - DNA, 30 bp, Artificial Sequence
  Synthetic oligonucleotide
tcgtaaataccaccggtcaaaagtctacac

SEQ ID NO: 119615 - DNA, 30 bp, Artificial Sequence
  Synthetic oligonucleotide
tgggctggtgaagaaggagggtcagtacac

SEQ ID NO: 119616 - DNA, 30 bp, Artificial Sequence
  Synthetic oligonucleotide
acatagatggtgataatagtaggcgtacac

SEQ ID NO: 119617 - DNA, 30 bp, Artificial Sequence
  Synthetic oligonucleotide
tggcagaaaatcgtggtgggcgatgtacac

SEQ ID NO: 119618 - DNA, 30 bp, Artificial Sequence
  Synthetic oligonucleotide
agcagaaggtgtgaatgaatggacttacac

SEQ ID NO: 119619 - DNA, 30 bp, Artificial Sequence
  Synthetic oligonucleotide
ctggaatgtgcgataaagcctacacaccac

SEQ ID NO: 119620 - DNA, 30 bp, Artificial Sequence
  Synthetic oligonucleotide
tagcaggcgtgcctggataggagacaccac

SEQ ID NO: 119621 - DNA, 30 bp, Artificial Sequence
  Synthetic oligonucleotide
ctaacgttatgataaacagcaacggaccac

SEQ ID NO: 119622 - DNA, 30 bp, Artificial Sequence
  Synthetic oligonucleotide
tacgaggctatcctttgtccttccccccac

SEQ ID NO: 119623 - DNA, 30 bp, Artificial Sequence
  Synthetic oligonucleotide
attacatgtaccccccaagtgatcgcccac

SEQ ID NO: 119624 - DNA, 30 bp, Artificial Sequence
  Synthetic oligonucleotide
gatcccaacaaatgaggtatcagggcccac

SEQ ID NO: 119625 - DNA, 30 bp, Artificial Sequence
  Synthetic oligonucleotide
gaagtcttgggtggcgtggggcatagccac

SEQ ID NO: 119626 - DNA, 30 bp, Artificial Sequence
  Synthetic oligonucleotide
ttatgagtgaggacgtccctacgacgccac

SEQ ID NO: 119627 - DNA, 30 bp, Artificial Sequence
  Synthetic oligonucleotide
cgcgttgcacgagcttgagctaatcgccac

SEQ ID NO: 119628 - DNA, 30 bp, Artificial Sequence
  Synthetic oligonucleotide
tacacaggcgggcaatgcctctccggccac

SEQ ID NO: 119629 - DNA, 30 bp, Artificial Sequence
  Synthetic oligonucleotide
gatgtccgtcaccaccgcccgtcatgccac

SEQ ID NO: 119630 - DNA, 30 bp, Artificial Sequence
  Synthetic oligonucleotide
ctcgaatgtggcatgggtacgcaaatccac

SEQ ID NO: 119631 - DNA, 30 bp, Artificial Sequence
  Synthetic oligonucleotide
ttgtcacgccattacgtcccttcgatccac

SEQ ID NO: 119632 - DNA, 30 bp, Artificial Sequence
  Synthetic oligonucleotide
taccgcctgggagccaaaggggggatccac

SEQ ID NO: 119633 - DNA, 30 bp, Artificial Sequence
  Synthetic oligonucleotide
aggacttatgcatgaccgaaaatcctccac

SEQ ID NO: 119634 - DNA, 30 bp, Artificial Sequence
  Synthetic oligonucleotide
cgttatatcatggtgtacagactagtccac

SEQ ID NO: 119635 - DNA, 30 bp, Artificial Sequence
  Synthetic oligonucleotide
gaagagagcagacgccctgctaaggtccac

SEQ ID NO: 119636 - DNA, 30 bp, Artificial Sequence
  Synthetic oligonucleotide
gctcgagggggttgtgatatcatggtccac

SEQ ID NO: 119637 - DNA, 30 bp, Artificial Sequence
  Synthetic oligonucleotide
ccaagggcaatttgtaagacggccttccac

SEQ ID NO: 119638 - DNA, 30 bp, Artificial Sequence
  Synthetic oligonucleotide
accgaaactgttctgaaagatttcttccac

SEQ ID NO: 119639 - DNA, 30 bp, Artificial Sequence
  Synthetic oligonucleotide
tattgttggtcatactgagtgtcgttccac

SEQ ID NO: 119640 - DNA, 30 bp, Artificial Sequence
  Synthetic oligonucleotide
aggctatggtgtagtttcgggataaagcac

SEQ ID NO: 119641 - DNA, 30 bp, Artificial Sequence
  Synthetic oligonucleotide
tcgcgccgattactatccagggagaagcac

SEQ ID NO: 119642 - DNA, 30 bp, Artificial Sequence
  Synthetic oligonucleotide
caccgttgtcaggcaactcggaataagcac

SEQ ID NO: 119643 - DNA, 30 bp, Artificial Sequence
  Synthetic oligonucleotide
gatcgtgtatgggccttacacagtaagcac

SEQ ID NO: 119644 - DNA, 30 bp, Artificial Sequence
  Synthetic oligonucleotide
ggttacaagaatatgggatcgggtaagcac

SEQ ID NO: 119645 - DNA, 30 bp, Artificial Sequence
  Synthetic oligonucleotide
aggggattaacattttaacagagccagcac

SEQ ID NO: 119646 - DNA, 30 bp, Artificial Sequence
  Synthetic oligonucleotide
gtccgacggacaggaagggtaactcagcac

SEQ ID NO: 119647 - DNA, 30 bp, Artificial Sequence
  Synthetic oligonucleotide
ctaactgtcatggatttgaaacctcagcac

SEQ ID NO: 119648 - DNA, 30 bp, Artificial Sequence
  Synthetic oligonucleotide
tacgatcaagtatactctattctagagcac

SEQ ID NO: 119649 - DNA, 30 bp, Artificial Sequence
  Synthetic oligonucleotide
gtacgcgggatcatcctaaacccctagcac

SEQ ID NO: 119650 - DNA, 30 bp, Artificial Sequence
  Synthetic oligonucleotide
tatgcagacgtagaggacgtctcctagcac

SEQ ID NO: 119651 - DNA, 30 bp, Artificial Sequence
  Synthetic oligonucleotide
atcaatcctagcaagagacgtaagacgcac

SEQ ID NO: 119652 - DNA, 30 bp, Artificial Sequence
  Synthetic oligonucleotide
acaaggggccaggcgaaggtagctacgcac

SEQ ID NO: 119653 - DNA, 30 bp, Artificial Sequence
  Synthetic oligonucleotide
gtagagaggttacgaatttcaaggccgcac

SEQ ID NO: 119654 - DNA, 30 bp, Artificial Sequence
  Synthetic oligonucleotide
tatgggttgtgatacgaatgagatccgcac

SEQ ID NO: 119655 - DNA, 30 bp, Artificial Sequence
  Synthetic oligonucleotide
cccatgacaacgttgtgggagactccgcac

SEQ ID NO: 119656 - DNA, 30 bp, Artificial Sequence
  Synthetic oligonucleotide
ctggtcagcataatgaatctaccggcgcac

SEQ ID NO: 119657 - DNA, 30 bp, Artificial Sequence
  Synthetic oligonucleotide
acggactggttgtccatgacttgatcgcac

SEQ ID NO: 119658 - DNA, 30 bp, Artificial Sequence
  Synthetic oligonucleotide
cggactggatgtatgaacgcaaactcgcac

SEQ ID NO: 119659 - DNA, 30 bp, Artificial Sequence
  Synthetic oligonucleotide
gaagagggagtctttagtaagggctcgcac

SEQ ID NO: 119660 - DNA, 30 bp, Artificial Sequence
  Synthetic oligonucleotide
caaaccggaagtccgtatcacgtgaggcac

SEQ ID NO: 119661 - DNA, 30 bp, Artificial Sequence
  Synthetic oligonucleotide
tcgcacgcgtaatccatgtcagcacggcac

SEQ ID NO: 119662 - DNA, 30 bp, Artificial Sequence
  Synthetic oligonucleotide
cgaattgagctcgtcaaagttgcacggcac

SEQ ID NO: 119663 - DNA, 30 bp, Artificial Sequence
  Synthetic oligonucleotide
catgacacattactagtaccgtggcggcac

SEQ ID NO: 119664 - DNA, 30 bp, Artificial Sequence
  Synthetic oligonucleotide
ggttgctaagtgcaacgcatgaaagggcac

SEQ ID NO: 119665 - DNA, 30 bp, Artificial Sequence
  Synthetic oligonucleotide
ataaagaagcagtgggttgggtacgggcac

SEQ ID NO: 119666 - DNA, 30 bp, Artificial Sequence
  Synthetic oligonucleotide
tacccccgacatcagggcgccaccgggcac

SEQ ID NO: 119667 - DNA, 30 bp, Artificial Sequence
  Synthetic oligonucleotide
ttctccagagcgggatagatatactggcac

SEQ ID NO: 119668 - DNA, 30 bp, Artificial Sequence
  Synthetic oligonucleotide
gggacctcgttacgtcaatagaaaatgcac

SEQ ID NO: 119669 - DNA, 30 bp, Artificial Sequence
  Synthetic oligonucleotide
agggccacttaggctcttgtgaaaatgcac

SEQ ID NO: 119670 - DNA, 30 bp, Artificial Sequence
  Synthetic oligonucleotide
agcatgtaggagcacgggaataggatgcac

SEQ ID NO: 119671 - DNA, 30 bp, Artificial Sequence
  Synthetic oligonucleotide
tcaagtccgttcgtcggtcataggatgcac

SEQ ID NO: 119672 - DNA, 30 bp, Artificial Sequence
  Synthetic oligonucleotide
ccataaagttccccgggttcaatagtgcac

SEQ ID NO: 119673 - DNA, 30 bp, Artificial Sequence
  Synthetic oligonucleotide
aagcaccgaagaacgggcgactacgtgcac

SEQ ID NO: 119674 - DNA, 30 bp, Artificial Sequence
  Synthetic oligonucleotide
cccgatcaatcctccaccactagcgtgcac

SEQ ID NO: 119675 - DNA, 30 bp, Artificial Sequence
  Synthetic oligonucleotide
catgggaaagtcgagcaaagtagtgtgcac

SEQ ID NO: 119676 - DNA, 30 bp, Artificial Sequence
  Synthetic oligonucleotide
aaagttaggcttcgggatacaagaaatcac

SEQ ID NO: 119677 - DNA, 30 bp, Artificial Sequence
  Synthetic oligonucleotide
gatgttgagatgagtgcctaacgtaatcac

SEQ ID NO: 119678 - DNA, 30 bp, Artificial Sequence
  Synthetic oligonucleotide
ggtcggtgccgttaaaaggtaggcgatcac

SEQ ID NO: 119679 - DNA, 30 bp, Artificial Sequence
  Synthetic oligonucleotide
cgtagtgctgtctggaacgtttgggatcac

SEQ ID NO: 119680 - DNA, 30 bp, Artificial Sequence
  Synthetic oligonucleotide
cgggatcggtccaagattagttaatatcac

SEQ ID NO: 119681 - DNA, 30 bp, Artificial Sequence
  Synthetic oligonucleotide
gagcaggcaagcaagacaacgctctatcac

SEQ ID NO: 119682 - DNA, 30 bp, Artificial Sequence
  Synthetic oligonucleotide
actaagacaaaccctagcggtgaaactcac

SEQ ID NO: 119683 - DNA, 30 bp, Artificial Sequence
  Synthetic oligonucleotide
tggacaggggaacctgaacgctacactcac

SEQ ID NO: 119684 - DNA, 30 bp, Artificial Sequence
  Synthetic oligonucleotide
gacagggaccgtaggattccgatcactcac

SEQ ID NO: 119685 - DNA, 30 bp, Artificial Sequence
  Synthetic oligonucleotide
caaggaatttgctaatcaccgaatcctcac

SEQ ID NO: 119686 - DNA, 30 bp, Artificial Sequence
  Synthetic oligonucleotide
gcacatcgccataggcgtcgtacagctcac

SEQ ID NO: 119687 - DNA, 30 bp, Artificial Sequence
  Synthetic oligonucleotide
cttctgtacgtgagaagcaagctagctcac

SEQ ID NO: 119688 - DNA, 30 bp, Artificial Sequence
  Synthetic oligonucleotide
aatacggccttgcagtaataggcatctcac

SEQ ID NO: 119689 - DNA, 30 bp, Artificial Sequence
  Synthetic oligonucleotide
aaacgtgcttccattagcggcgagtctcac

SEQ ID NO: 119690 - DNA, 30 bp, Artificial Sequence
  Synthetic oligonucleotide
gtgcgggttacccggaaagctgcttctcac

SEQ ID NO: 119691 - DNA, 30 bp, Artificial Sequence
  Synthetic oligonucleotide
tcacgggatttacgtccagagctccgtcac

SEQ ID NO: 119692 - DNA, 30 bp, Artificial Sequence
  Synthetic oligonucleotide
ggaagcccagtgcctatggaaaagcgtcac

SEQ ID NO: 119693 - DNA, 30 bp, Artificial Sequence
  Synthetic oligonucleotide
atcaccacagttcaaaaagctcggcgtcac

SEQ ID NO: 119694 - DNA, 30 bp, Artificial Sequence
  Synthetic oligonucleotide
taaagggagtgccttgcgcctgatcgtcac

SEQ ID NO: 119695 - DNA, 30 bp, Artificial Sequence
  Synthetic oligonucleotide
ggatcactactgggggggcaagttcgtcac

SEQ ID NO: 119696 - DNA, 30 bp, Artificial Sequence
  Synthetic oligonucleotide
cgagagagtgtacagtccgtctcatgtcac

SEQ ID NO: 119697 - DNA, 30 bp, Artificial Sequence
  Synthetic oligonucleotide
gcctgctacagggacagacggttgtgtcac

SEQ ID NO: 119698 - DNA, 30 bp, Artificial Sequence
  Synthetic oligonucleotide
atggacgtgaggcacgtgcgcgtttgtcac

SEQ ID NO: 119699 - DNA, 30 bp, Artificial Sequence
  Synthetic oligonucleotide
gcgacacgagaaagacggcattgaattcac

SEQ ID NO: 119700 - DNA, 30 bp, Artificial Sequence
  Synthetic oligonucleotide
gcgcctggaaggaggagatcagtaattcac

SEQ ID NO: 119701 - DNA, 30 bp, Artificial Sequence
  Synthetic oligonucleotide
acgtagaagcggcattgatgtatcattcac

SEQ ID NO: 119702 - DNA, 30 bp, Artificial Sequence
  Synthetic oligonucleotide
cacgcaatatctcgaactagcggggttcac

SEQ ID NO: 119703 - DNA, 30 bp, Artificial Sequence
  Synthetic oligonucleotide
tgaagaaggaaccaggttatcgtatttcac

SEQ ID NO: 119704 - DNA, 30 bp, Artificial Sequence
  Synthetic oligonucleotide
gtgcatgcacaacgttatcagcgaaaagac

SEQ ID NO: 119705 - DNA, 30 bp, Artificial Sequence
  Synthetic oligonucleotide
ttgcgcgaagtagttgagacaggaaaagac

SEQ ID NO: 119706 - DNA, 30 bp, Artificial Sequence
  Synthetic oligonucleotide
gccgaaccattgacggcgttatggaaagac

SEQ ID NO: 119707 - DNA, 30 bp, Artificial Sequence
  Synthetic oligonucleotide
caatgttctagtcgtgacagcgctaaagac

SEQ ID NO: 119708 - DNA, 30 bp, Artificial Sequence
  Synthetic oligonucleotide
acggagataatcgcatgagagtaacaagac

SEQ ID NO: 119709 - DNA, 30 bp, Artificial Sequence
  Synthetic oligonucleotide
acacccgctgtgaagcttcaacctcaagac

SEQ ID NO: 119710 - DNA, 30 bp, Artificial Sequence
  Synthetic oligonucleotide
ttggggttgctcgtgcgctgtgacgaagac

SEQ ID NO: 119711 - DNA, 30 bp, Artificial Sequence
  Synthetic oligonucleotide
ctagtgtctagcttaccatgcggcgaagac

SEQ ID NO: 119712 - DNA, 30 bp, Artificial Sequence
  Synthetic oligonucleotide
aaccgctcacgagggctaagccgggaagac

SEQ ID NO: 119713 - DNA, 30 bp, Artificial Sequence
  Synthetic oligonucleotide
agccaattggaacgggattgtgtggaagac

SEQ ID NO: 119714 - DNA, 30 bp, Artificial Sequence
  Synthetic oligonucleotide
attaaggccggcggttgggaaagtgaagac

SEQ ID NO: 119715 - DNA, 30 bp, Artificial Sequence
  Synthetic oligonucleotide
cgtaaaagcgttgttgccatggttgaagac

SEQ ID NO: 119716 - DNA, 31 bp, Artificial Sequence
  Synthetic oligonucleotide
ggcgcacatcctgacgggcgtagggtaagac

SEQ ID NO: 119717 - DNA, 30 bp, Artificial Sequence
  Synthetic oligonucleotide
gacatataaggactatgcactaacacagac

SEQ ID NO: 119718 - DNA, 30 bp, Artificial Sequence
  Synthetic oligonucleotide
gatagacttctgtgacagcattcgacagac

SEQ ID NO: 119719 - DNA, 30 bp, Artificial Sequence
  Synthetic oligonucleotide
gtctgggtctacacgaccaagggaccagac

SEQ ID NO: 119720 - DNA, 30 bp, Artificial Sequence
  Synthetic oligonucleotide
gtgtacgcaggacacgaaatgagtccagac

SEQ ID NO: 119721 - DNA, 30 bp, Artificial Sequence
  Synthetic oligonucleotide
cccttaagacgttgggccttcttagcagac

SEQ ID NO: 119722 - DNA, 30 bp, Artificial Sequence
  Synthetic oligonucleotide
ccggttaggggtgcaacagaggcatcagac

SEQ ID NO: 119723 - DNA, 30 bp, Artificial Sequence
  Synthetic oligonucleotide
aggagtgcctataacgaggactcatcagac

SEQ ID NO: 119724 - DNA, 30 bp, Artificial Sequence
  Synthetic oligonucleotide
tactgttaagtgtgcataaaaatctcagac

SEQ ID NO: 119725 - DNA, 31 bp, Artificial Sequence
  Synthetic oligonucleotide
atcatcctgcaacgtcctataattctcagac

SEQ ID NO: 119726 - DNA, 30 bp, Artificial Sequence
  Synthetic oligonucleotide
caagataatatcgagagcttttcgtcagac

SEQ ID NO: 119727 - DNA, 30 bp, Artificial Sequence
  Synthetic oligonucleotide
cgacgatgtggagggccatgatggtcagac

SEQ ID NO: 119728 - DNA, 30 bp, Artificial Sequence
  Synthetic oligonucleotide
cagatacctaaccacgtgtggctttcagac

SEQ ID NO: 119729 - DNA, 30 bp, Artificial Sequence
  Synthetic oligonucleotide
ttgcacactagtatgcatgcgtaaagagac

SEQ ID NO: 119730 - DNA, 30 bp, Artificial Sequence
  Synthetic oligonucleotide
atagactgaatacgtggcgcgaaccgagac

SEQ ID NO: 119731 - DNA, 30 bp, Artificial Sequence
  Synthetic oligonucleotide
cgagaggtattcgtgcattggggaggagac

SEQ ID NO: 119732 - DNA, 30 bp, Artificial Sequence
  Synthetic oligonucleotide
atcagacaatatgcgtccgactgtggagac

SEQ ID NO: 119733 - DNA, 30 bp, Artificial Sequence
  Synthetic oligonucleotide
accaaagactcaaataaagtaacgtgagac

SEQ ID NO: 119734 - DNA, 30 bp, Artificial Sequence
  Synthetic oligonucleotide
acgtgagacgctgccacccatccgatagac

SEQ ID NO: 119735 - DNA, 30 bp, Artificial Sequence
  Synthetic oligonucleotide
taagggtcactccattcggtaaaactagac

SEQ ID NO: 119736 - DNA, 30 bp, Artificial Sequence
  Synthetic oligonucleotide
gcagggtaacggcgtacgttagagctagac

SEQ ID NO: 119737 - DNA, 30 bp, Artificial Sequence
  Synthetic oligonucleotide
tgacccgcactaaaaatacgcaggctagac

SEQ ID NO: 119738 - DNA, 30 bp, Artificial Sequence
  Synthetic oligonucleotide
cgggagtactagaggtaaaccgaagtagac

SEQ ID NO: 119739 - DNA, 30 bp, Artificial Sequence
  Synthetic oligonucleotide
ggacacctttagtcccttgatcccgtagac

SEQ ID NO: 119740 - DNA, 30 bp, Artificial Sequence
  Synthetic oligonucleotide
gggcgcctaatgtattcgcccagggtagac

SEQ ID NO: 119741 - DNA, 30 bp, Artificial Sequence
  Synthetic oligonucleotide
tgagtcagaagagtctgggcatcgttagac

SEQ ID NO: 119742 - DNA, 30 bp, Artificial Sequence
  Synthetic oligonucleotide
ttccagaacatggtattatgatgtttagac

SEQ ID NO: 119743 - DNA, 30 bp, Artificial Sequence
  Synthetic oligonucleotide
cctgaaagcgggcctacctcgggcaacgac

SEQ ID NO: 119744 - DNA, 30 bp, Artificial Sequence
  Synthetic oligonucleotide
aatgaagtttgcaggttagaaggtaacgac

SEQ ID NO: 119745 - DNA, 30 bp, Artificial Sequence
  Synthetic oligonucleotide
atgaattccaaggacgttgaaacccacgac

SEQ ID NO: 119746 - DNA, 30 bp, Artificial Sequence
  Synthetic oligonucleotide
caagagttagctcgggtcacctcccacgac

SEQ ID NO: 119747 - DNA, 30 bp, Artificial Sequence
  Synthetic oligonucleotide
tatgcgagtcacagcaacaggaggcacgac

SEQ ID NO: 119748 - DNA, 30 bp, Artificial Sequence
  Synthetic oligonucleotide
gctggggaacggctgacacagttgcacgac

SEQ ID NO: 119749 - DNA, 30 bp, Artificial Sequence
  Synthetic oligonucleotide
gcatcaatctgaggtgggctatttcacgac

SEQ ID NO: 119750 - DNA, 30 bp, Artificial Sequence
  Synthetic oligonucleotide
tacctcgacgtgacatatcattgtgacgac

SEQ ID NO: 119751 - DNA, 30 bp, Artificial Sequence
  Synthetic oligonucleotide
cctaaggacgacgggtgcgtgcgatacgac

SEQ ID NO: 119752 - DNA, 30 bp, Artificial Sequence
  Synthetic oligonucleotide
tctaggaaaagaggatcttgaccgaccgac

SEQ ID NO: 119753 - DNA, 30 bp, Artificial Sequence
  Synthetic oligonucleotide
atccaggtagatccagtaccttaccccgac

SEQ ID NO: 119754 - DNA, 30 bp, Artificial Sequence
  Synthetic oligonucleotide
aaacggaagcgtgtccacagcacccccgac

SEQ ID NO: 119755 - DNA, 30 bp, Artificial Sequence
  Synthetic oligonucleotide
ggaataggggctcgataccgcgatcccgac

SEQ ID NO: 119756 - DNA, 30 bp, Artificial Sequence
  Synthetic oligonucleotide
tggcagatcagcatccgattgtaagccgac

SEQ ID NO: 119757 - DNA, 30 bp, Artificial Sequence
  Synthetic oligonucleotide
aaggtgtgctcaagtggatgaggagccgac

SEQ ID NO: 119758 - DNA, 30 bp, Artificial Sequence
  Synthetic oligonucleotide
agattggacaggtacttgccgggtgccgac

SEQ ID NO: 119759 - DNA, 30 bp, Artificial Sequence
  Synthetic oligonucleotide
cgagtctccagtggcggagaaccatccgac

SEQ ID NO: 119760 - DNA, 30 bp, Artificial Sequence
  Synthetic oligonucleotide
ggaaggtgtagacaatcttcgatctccgac

SEQ ID NO: 119761 - DNA, 30 bp, Artificial Sequence
  Synthetic oligonucleotide
ctgtaggagaatggcattgcgaacagcgac

SEQ ID NO: 119762 - DNA, 31 bp, Artificial Sequence
  Synthetic oligonucleotide
taattatggacctgaacagactaccagcgac

SEQ ID NO: 119763 - DNA, 30 bp, Artificial Sequence
  Synthetic oligonucleotide
tacacggcgaagcaagttcaggagcgcgac

SEQ ID NO: 119764 - DNA, 30 bp, Artificial Sequence
  Synthetic oligonucleotide
agagcgcttcggatagatccgcttcgcgac

SEQ ID NO: 119765 - DNA, 30 bp, Artificial Sequence
  Synthetic oligonucleotide
gcgttcattaaatgccactatccgtgcgac

SEQ ID NO: 119766 - DNA, 30 bp, Artificial Sequence
  Synthetic oligonucleotide
tagagaacaggaggcctcgtttgttgcgac

SEQ ID NO: 119767 - DNA, 30 bp, Artificial Sequence
  Synthetic oligonucleotide
aacattcctctgcgatagggcacgatcgac

SEQ ID NO: 119768 - DNA, 30 bp, Artificial Sequence
  Synthetic oligonucleotide
atgtgtagacaacccgtgcaacgtatcgac

SEQ ID NO: 119769 - DNA, 30 bp, Artificial Sequence
  Synthetic oligonucleotide
gaaaaaagcggtgttacacctcaactcgac

SEQ ID NO: 119770 - DNA, 30 bp, Artificial Sequence
  Synthetic oligonucleotide
gttagatggacgattaaggcctcactcgac

SEQ ID NO: 119771 - DNA, 30 bp, Artificial Sequence
  Synthetic oligonucleotide
accgaacctgaacaaggttcgcgactcgac

SEQ ID NO: 119772 - DNA, 30 bp, Artificial Sequence
  Synthetic oligonucleotide
gcctcaatataactatgcgggagcctcgac

SEQ ID NO: 119773 - DNA, 30 bp, Artificial Sequence
  Synthetic oligonucleotide
cgcggagagcgtatataaacgccggtcgac

SEQ ID NO: 119774 - DNA, 30 bp, Artificial Sequence
  Synthetic oligonucleotide
taaaaactggaattaggctgccgggtcgac

SEQ ID NO: 119775 - DNA, 31 bp, Artificial Sequence
  Synthetic oligonucleotide
gcccacatataggctccattaacttgtcgac

SEQ ID NO: 119776 - DNA, 30 bp, Artificial Sequence
  Synthetic oligonucleotide
tcctgggggcttaagatccagctcttcgac

SEQ ID NO: 119777 - DNA, 30 bp, Artificial Sequence
  Synthetic oligonucleotide
gctccggtataaggcctaaattcgttcgac

SEQ ID NO: 119778 - DNA, 30 bp, Artificial Sequence
  Synthetic oligonucleotide
ccgcggcgagcgattaatcagcgaaaggac

SEQ ID NO: 119779 - DNA, 30 bp, Artificial Sequence
  Synthetic oligonucleotide
tgttatccacgaagaatctgcagtcaggac

SEQ ID NO: 119780 - DNA, 30 bp, Artificial Sequence
  Synthetic oligonucleotide
catcaccatactaaattaaagcaagaggac

SEQ ID NO: 119781 - DNA, 30 bp, Artificial Sequence
  Synthetic oligonucleotide
tccacatagatgacatccctgtacgaggac

SEQ ID NO: 119782 - DNA, 30 bp, Artificial Sequence
  Synthetic oligonucleotide
tagtgatctaagtggaggggtgcggaggac

SEQ ID NO: 119783 - DNA, 30 bp, Artificial Sequence
  Synthetic oligonucleotide
gggcatttctcttccctcggagactaggac

SEQ ID NO: 119784 - DNA, 30 bp, Artificial Sequence
  Synthetic oligonucleotide
gcactacgagaaaggacttcttcgtaggac

SEQ ID NO: 119785 - DNA, 30 bp, Artificial Sequence
  Synthetic oligonucleotide
cagataccaacgataagcatgatgtaggac

SEQ ID NO: 119786 - DNA, 30 bp, Artificial Sequence
  Synthetic oligonucleotide
aagggtaaggagttacaggaatagacggac

SEQ ID NO: 119787 - DNA, 30 bp, Artificial Sequence
  Synthetic oligonucleotide
aacagaggaaggtattcgatcgcgacggac

SEQ ID NO: 119788 - DNA, 30 bp, Artificial Sequence
  Synthetic oligonucleotide
caagctccactactgtacaaccggacggac

SEQ ID NO: 119789 - DNA, 30 bp, Artificial Sequence
  Synthetic oligonucleotide
ttagcctcgtagacccaaggggaatcggac

SEQ ID NO: 119790 - DNA, 30 bp, Artificial Sequence
  Synthetic oligonucleotide
actgtcataaacatgatgctcaagtcggac

SEQ ID NO: 119791 - DNA, 30 bp, Artificial Sequence
  Synthetic oligonucleotide
agaggaagacccacggagtttaattcggac

SEQ ID NO: 119792 - DNA, 30 bp, Artificial Sequence
  Synthetic oligonucleotide
gtgtcaccggtagctgggtaagtttcggac

SEQ ID NO: 119793 - DNA, 30 bp, Artificial Sequence
  Synthetic oligonucleotide
aaatcgtgacacatagggggcctcagggac

SEQ ID NO: 119794 - DNA, 30 bp, Artificial Sequence
  Synthetic oligonucleotide
atatgaatttggggacagaaccaacgggac

SEQ ID NO: 119795 - DNA, 30 bp, Artificial Sequence
  Synthetic oligonucleotide
acggtagtcgagtacggtgtagtacgggac

SEQ ID NO: 119796 - DNA, 30 bp, Artificial Sequence
  Synthetic oligonucleotide
aatgataagcaactgaccaagtaccgggac

SEQ ID NO: 119797 - DNA, 30 bp, Artificial Sequence
  Synthetic oligonucleotide
tggctacagcctactacataggaaggggac

SEQ ID NO: 119798 - DNA, 30 bp, Artificial Sequence
  Synthetic oligonucleotide
agatacacaagctgtcttgagagaggggac

SEQ ID NO: 119799 - DNA, 30 bp, Artificial Sequence
  Synthetic oligonucleotide
tatcccgcgctcagcgtgagtgtatgggac

SEQ ID NO: 119800 - DNA, 30 bp, Artificial Sequence
  Synthetic oligonucleotide
caactccgtgataaaggctggtactgggac

SEQ ID NO: 119801 - DNA, 30 bp, Artificial Sequence
  Synthetic oligonucleotide
caatccgcaagttatgagggcacctgggac

SEQ ID NO: 119802 - DNA, 30 bp, Artificial Sequence
  Synthetic oligonucleotide
agcttgtactacacacgagacaggtgggac

SEQ ID NO: 119803 - DNA, 30 bp, Artificial Sequence
  Synthetic oligonucleotide
atcaggacatgtaacggatgcagtatggac

SEQ ID NO: 119804 - DNA, 30 bp, Artificial Sequence
  Synthetic oligonucleotide
ggtctcggtcagtgaagccacagcctggac

SEQ ID NO: 119805 - DNA, 30 bp, Artificial Sequence
  Synthetic oligonucleotide
ccatgggtgacatgcaatataaatctggac

SEQ ID NO: 119806 - DNA, 30 bp, Artificial Sequence
  Synthetic oligonucleotide
cgcgatatgtaaacgagcagttgggtggac

SEQ ID NO: 119807 - DNA, 30 bp, Artificial Sequence
  Synthetic oligonucleotide
acacggtgagtgtacgtgatcgatgtggac

SEQ ID NO: 119808 - DNA, 30 bp, Artificial Sequence
  Synthetic oligonucleotide
atggggagaagagccggccgtgatgtggac

SEQ ID NO: 119809 - DNA, 30 bp, Artificial Sequence
  Synthetic oligonucleotide
gggcaggaagggttcgtgaccgctttggac

SEQ ID NO: 119810 - DNA, 30 bp, Artificial Sequence
  Synthetic oligonucleotide
cggcgacaatccttaggtactgctttggac

SEQ ID NO: 119811 - DNA, 30 bp, Artificial Sequence
  Synthetic oligonucleotide
ggcagagctttacgcgcaggatacaatgac

SEQ ID NO: 119812 - DNA, 30 bp, Artificial Sequence
  Synthetic oligonucleotide
atgccctaaagggtgcgaataaccaatgac

SEQ ID NO: 119813 - DNA, 30 bp, Artificial Sequence
  Synthetic oligonucleotide
tgcgtatctatatcatatggtgaccatgac

SEQ ID NO: 119814 - DNA, 30 bp, Artificial Sequence
  Synthetic oligonucleotide
actggtcggaggatgactaccacgcatgac

SEQ ID NO: 119815 - DNA, 30 bp, Artificial Sequence
  Synthetic oligonucleotide
agcacagctgaatgatcgtccgggcatgac

SEQ ID NO: 119816 - DNA, 30 bp, Artificial Sequence
  Synthetic oligonucleotide
gcggagtaacccgaccaggtcggtcatgac

SEQ ID NO: 119817 - DNA, 30 bp, Artificial Sequence
  Synthetic oligonucleotide
gttacctggcgaggtccccaaatagatgac

SEQ ID NO: 119818 - DNA, 30 bp, Artificial Sequence
  Synthetic oligonucleotide
cttgtatgggtcgtgaataggaaatatgac

SEQ ID NO: 119819 - DNA, 30 bp, Artificial Sequence
  Synthetic oligonucleotide
tgcgcaaggtactacaagcgtgagtatgac

SEQ ID NO: 119820 - DNA, 30 bp, Artificial Sequence
  Synthetic oligonucleotide
aacggcttcgtaaattataattagtatgac

SEQ ID NO: 119821 - DNA, 30 bp, Artificial Sequence
  Synthetic oligonucleotide
tggacctccacaatgtggtcggtgtatgac

SEQ ID NO: 119822 - DNA, 30 bp, Artificial Sequence
  Synthetic oligonucleotide
tcagggcttagcgcaattacctggactgac

SEQ ID NO: 119823 - DNA, 30 bp, Artificial Sequence
  Synthetic oligonucleotide
caggagagatcagattaaacatatactgac

SEQ ID NO: 119824 - DNA, 30 bp, Artificial Sequence
  Synthetic oligonucleotide
taagagatccaagagctagtcgttcctgac

SEQ ID NO: 119825 - DNA, 30 bp, Artificial Sequence
  Synthetic oligonucleotide
gaatacgccagggacatcggggccgctgac

SEQ ID NO: 119826 - DNA, 30 bp, Artificial Sequence
  Synthetic oligonucleotide
ggaactgggccctctagggatgcgtctgac

SEQ ID NO: 119827 - DNA, 30 bp, Artificial Sequence
  Synthetic oligonucleotide
tcggatgcatcatcgtgggtgtaaagtgac

SEQ ID NO: 119828 - DNA, 30 bp, Artificial Sequence
  Synthetic oligonucleotide
gtatgtgcatcaatgcacagtatcagtgac

SEQ ID NO: 119829 - DNA, 30 bp, Artificial Sequence
  Synthetic oligonucleotide
gtaaccgcttggagtagttggccacgtgac

SEQ ID NO: 119830 - DNA, 30 bp, Artificial Sequence
  Synthetic oligonucleotide
aaattagctgagtgagccttgcatcgtgac

SEQ ID NO: 119831 - DNA, 30 bp, Artificial Sequence
  Synthetic oligonucleotide
tcccggaaccctagccgactgggtcgtgac

SEQ ID NO: 119832 - DNA, 30 bp, Artificial Sequence
  Synthetic oligonucleotide
cgcccatagcataatagcgcgatcggtgac

SEQ ID NO: 119833 - DNA, 30 bp, Artificial Sequence
  Synthetic oligonucleotide
atcgatagataacccggcagctagggtgac

SEQ ID NO: 119834 - DNA, 40 bp, Artificial Sequence
  Synthetic oligonucleotide
attattcagtattatcaagactgggcatttccctggtgac

SEQ ID NO: 119835 - DNA, 30 bp, Artificial Sequence
  Synthetic oligonucleotide
ggtaataacaagaccggccattaatgtgac

SEQ ID NO: 119836 - DNA, 30 bp, Artificial Sequence
  Synthetic oligonucleotide
agattattgagttggactgcctacattgac

SEQ ID NO: 119837 - DNA, 30 bp, Artificial Sequence
  Synthetic oligonucleotide
ttaactgcctcttcacgggaaaagattgac

SEQ ID NO: 119838 - DNA, 30 bp, Artificial Sequence
  Synthetic oligonucleotide
ttgtagaattccgtgtggggtacgattgac

SEQ ID NO: 119839 - DNA, 30 bp, Artificial Sequence
  Synthetic oligonucleotide
ggggtacaagctaatgcgtgccggattgac

SEQ ID NO: 119840 - DNA, 30 bp, Artificial Sequence
  Synthetic oligonucleotide
gccaaagagtggattggtccgagacaatac

SEQ ID NO: 119841 - DNA, 30 bp, Artificial Sequence
  Synthetic oligonucleotide
agcggcgttatcactgggaacttacaatac

SEQ ID NO: 119842 - DNA, 30 bp, Artificial Sequence
  Synthetic oligonucleotide
ttagagcgcgactaccgccagtcccaatac

SEQ ID NO: 119843 - DNA, 30 bp, Artificial Sequence
  Synthetic oligonucleotide
aggaagaaggaccaccgctaatgccaatac

SEQ ID NO: 119844 - DNA, 30 bp, Artificial Sequence
  Synthetic oligonucleotide
gggaagtgactaaatcctctgggtcaatac

SEQ ID NO: 119845 - DNA, 30 bp, Artificial Sequence
  Synthetic oligonucleotide
atcgaatcataaggagagttatcggaatac

SEQ ID NO: 119846 - DNA, 30 bp, Artificial Sequence
  Synthetic oligonucleotide
agaccggtacagacagcaacgacataatac

SEQ ID NO: 119847 - DNA, 30 bp, Artificial Sequence
  Synthetic oligonucleotide
gcgccagaaaatgatacctcgaacacatac

SEQ ID NO: 119848 - DNA, 30 bp, Artificial Sequence
  Synthetic oligonucleotide
agccgagaggcaacaccgttccacacatac

SEQ ID NO: 119849 - DNA, 30 bp, Artificial Sequence
  Synthetic oligonucleotide
aagattggaacgaaaacaactaggacatac

SEQ ID NO: 119850 - DNA, 30 bp, Artificial Sequence
  Synthetic oligonucleotide
gactattagaggtaaaaaaatatgacatac

SEQ ID NO: 119851 - DNA, 30 bp, Artificial Sequence
  Synthetic oligonucleotide
acggtcgtggatcacatataacacccatac

SEQ ID NO: 119852 - DNA, 30 bp, Artificial Sequence
  Synthetic oligonucleotide
ggtcgccaatgagactaaatcatcccatac

SEQ ID NO: 119853 - DNA, 30 bp, Artificial Sequence
  Synthetic oligonucleotide
ctaaacttcgggacgaatggataagcatac

SEQ ID NO: 119854 - DNA, 30 bp, Artificial Sequence
  Synthetic oligonucleotide
agattcccggtccgagtacaaacagcatac

SEQ ID NO: 119855 - DNA, 30 bp, Artificial Sequence
  Synthetic oligonucleotide
gtacggcgtacagaacaacctgtagcatac

SEQ ID NO: 119856 - DNA, 30 bp, Artificial Sequence
  Synthetic oligonucleotide
agctacgatctatagcgcgttttagcatac

SEQ ID NO: 119857 - DNA, 30 bp, Artificial Sequence
  Synthetic oligonucleotide
tgatctccctgtacggaaaacagggcatac

SEQ ID NO: 119858 - DNA, 30 bp, Artificial Sequence
  Synthetic oligonucleotide
tgcggggatttaacatagcgcggggcatac

SEQ ID NO: 119859 - DNA, 30 bp, Artificial Sequence
  Synthetic oligonucleotide
tgtcataggaccaaaaagggttaatcatac

SEQ ID NO: 119860 - DNA, 30 bp, Artificial Sequence
  Synthetic oligonucleotide
cagtggacaactaggattgttgcctcatac

SEQ ID NO: 119861 - DNA, 30 bp, Artificial Sequence
  Synthetic oligonucleotide
tgaatgggggtgagatcactggtctcatac

SEQ ID NO: 119862 - DNA, 30 bp, Artificial Sequence
  Synthetic oligonucleotide
tctgtggcaattgggaatcccgtgtcatac

SEQ ID NO: 119863 - DNA, 30 bp, Artificial Sequence
  Synthetic oligonucleotide
acatgacagatgtgaccgtggtcaagatac

SEQ ID NO: 119864 - DNA, 30 bp, Artificial Sequence
  Synthetic oligonucleotide
accgcaaaaggaagaactaatcgcagatac

SEQ ID NO: 119865 - DNA, 30 bp, Artificial Sequence
  Synthetic oligonucleotide
aaactaaacccgtaatagggctcgagatac

SEQ ID NO: 119866 - DNA, 30 bp, Artificial Sequence
  Synthetic oligonucleotide
tttcgagactcacaaaagtatgcgcgatac

SEQ ID NO: 119867 - DNA, 30 bp, Artificial Sequence
  Synthetic oligonucleotide
gcatcgatttttgaacaaggacggcgatac

SEQ ID NO: 119868 - DNA, 30 bp, Artificial Sequence
  Synthetic oligonucleotide
gaaagggatagggtctaattcaaatgatac

SEQ ID NO: 119869 - DNA, 30 bp, Artificial Sequence
  Synthetic oligonucleotide
cgggtagctgtccggtcatggatctgatac

SEQ ID NO: 119870 - DNA, 30 bp, Artificial Sequence
  Synthetic oligonucleotide
cggagcaggatagtgtcgcagttctgatac

SEQ ID NO: 119871 - DNA, 30 bp, Artificial Sequence
  Synthetic oligonucleotide
agatcaccgttagcctgccaccacatatac

SEQ ID NO: 119872 - DNA, 30 bp, Artificial Sequence
  Synthetic oligonucleotide
agcatgatatagcgaagtgagacgatatac

SEQ ID NO: 119873 - DNA, 30 bp, Artificial Sequence
  Synthetic oligonucleotide
tggaggaaactgaatctgatgcccctatac

SEQ ID NO: 119874 - DNA, 30 bp, Artificial Sequence
  Synthetic oligonucleotide
cccgaccatgcgcataaaagatccctatac

SEQ ID NO: 119875 - DNA, 30 bp, Artificial Sequence
  Synthetic oligonucleotide
cgacagagttcgcatggagcttatgtatac

SEQ ID NO: 119876 - DNA, 30 bp, Artificial Sequence
  Synthetic oligonucleotide
acctcgttcctgagagggcaaggcttatac

SEQ ID NO: 119877 - DNA, 30 bp, Artificial Sequence
  Synthetic oligonucleotide
attggaaggaacgccacagtggccaactac

SEQ ID NO: 119878 - DNA, 30 bp, Artificial Sequence
  Synthetic oligonucleotide
tgtgtaaagtagaggatgataaagaactac

SEQ ID NO: 119879 - DNA, 30 bp, Artificial Sequence
  Synthetic oligonucleotide
gaagttgcggggccacgagacaaagactac

SEQ ID NO: 119880 - DNA, 30 bp, Artificial Sequence
  Synthetic oligonucleotide
gggagtccaagaaattgctacgtagactac

SEQ ID NO: 119881 - DNA, 30 bp, Artificial Sequence
  Synthetic oligonucleotide
gctcggcgaattatcctaccacgggactac

SEQ ID NO: 119882 - DNA, 30 bp, Artificial Sequence
  Synthetic oligonucleotide
aggcgtgctgtatagactgtgagatactac

SEQ ID NO: 119883 - DNA, 30 bp, Artificial Sequence
  Synthetic oligonucleotide
acgttgagtttccggaggcacgcttactac

SEQ ID NO: 119884 - DNA, 30 bp, Artificial Sequence
  Synthetic oligonucleotide
ctaatcgcgaagcaccccgagtacacctac

SEQ ID NO: 119885 - DNA, 30 bp, Artificial Sequence
  Synthetic oligonucleotide
aggttccgatcttcgctaaagcgcccctac

SEQ ID NO: 119886 - DNA, 30 bp, Artificial Sequence
  Synthetic oligonucleotide
ctgtacggggcgtccccagctactccctac

SEQ ID NO: 119887 - DNA, 30 bp, Artificial Sequence
  Synthetic oligonucleotide
tgggcatgggctcagacgtcaatatcctac

SEQ ID NO: 119888 - DNA, 30 bp, Artificial Sequence
  Synthetic oligonucleotide
gcagggaggcaacgttccaagtactcctac

SEQ ID NO: 119889 - DNA, 30 bp, Artificial Sequence
  Synthetic oligonucleotide
tccaggcagatgtcgccgactaaaagctac

SEQ ID NO: 119890 - DNA, 30 bp, Artificial Sequence
  Synthetic oligonucleotide
gcaattccctaccataagcgaacaagctac

SEQ ID NO: 119891 - DNA, 30 bp, Artificial Sequence
  Synthetic oligonucleotide
cagaatgaggcaagaagcgcctcgagctac

SEQ ID NO: 119892 - DNA, 30 bp, Artificial Sequence
  Synthetic oligonucleotide
aggttggcttggcatgaggtgcgtagctac

SEQ ID NO: 119893 - DNA, 30 bp, Artificial Sequence
  Synthetic oligonucleotide
tatcagcatgtggaggggttaattagctac

SEQ ID NO: 119894 - DNA, 30 bp, Artificial Sequence
  Synthetic oligonucleotide
aacagagatgacgatacagggtagcgctac

SEQ ID NO: 119895 - DNA, 30 bp, Artificial Sequence
  Synthetic oligonucleotide
caacggtctaatgttatgctcattcgctac

SEQ ID NO: 119896 - DNA, 30 bp, Artificial Sequence
  Synthetic oligonucleotide
tcgaaacgtttggaagtgaatgccggctac

SEQ ID NO: 119897 - DNA, 30 bp, Artificial Sequence
  Synthetic oligonucleotide
tgtaaaatgactagagcgggtaagggctac

SEQ ID NO: 119898 - DNA, 30 bp, Artificial Sequence
  Synthetic oligonucleotide
ggcacatgggctaactacactacgggctac

SEQ ID NO: 119899 - DNA, 30 bp, Artificial Sequence
  Synthetic oligonucleotide
attcgacacacttaaccgagataaatctac

SEQ ID NO: 119900 - DNA, 30 bp, Artificial Sequence
  Synthetic oligonucleotide
ctcaaatggagttcgaaatagggcatctac

SEQ ID NO: 119901 - DNA, 30 bp, Artificial Sequence
  Synthetic oligonucleotide
agggtggggcccggacaaagagtcatctac

SEQ ID NO: 119902 - DNA, 30 bp, Artificial Sequence
  Synthetic oligonucleotide
atcggagagaagtcggttgtgtagctctac

SEQ ID NO: 119903 - DNA, 30 bp, Artificial Sequence
  Synthetic oligonucleotide
aatgcgatgcaaatacaggcatatctctac

SEQ ID NO: 119904 - DNA, 30 bp, Artificial Sequence
  Synthetic oligonucleotide
ctaacagtggaaccctgctgaagagtctac

SEQ ID NO: 119905 - DNA, 30 bp, Artificial Sequence
  Synthetic oligonucleotide
ggtcaaaaatcgagcgtaggcttagtctac

SEQ ID NO: 119906 - DNA, 30 bp, Artificial Sequence
  Synthetic oligonucleotide
acgaggggataatttcatagaagcgtctac

SEQ ID NO: 119907 - DNA, 30 bp, Artificial Sequence
  Synthetic oligonucleotide
gctaggaaacttcatgaaaggggcgtctac

SEQ ID NO: 119908 - DNA, 30 bp, Artificial Sequence
  Synthetic oligonucleotide
gtcatgagacggtagtactgaggtgtctac

SEQ ID NO: 119909 - DNA, 30 bp, Artificial Sequence
  Synthetic oligonucleotide
cagacaacagggcaagagggtaggttctac

SEQ ID NO: 119910 - DNA, 30 bp, Artificial Sequence
  Synthetic oligonucleotide
tcgagacggactacgaggaccctgttctac

SEQ ID NO: 119911 - DNA, 30 bp, Artificial Sequence
  Synthetic oligonucleotide
ctggcacgtgcgatagtgagtgcaaagtac

SEQ ID NO: 119912 - DNA, 30 bp, Artificial Sequence
  Synthetic oligonucleotide
atatgccataatccagcaaccgacaagtac

SEQ ID NO: 119913 - DNA, 30 bp, Artificial Sequence
  Synthetic oligonucleotide
taacggcctaagacaacaatagccaagtac

SEQ ID NO: 119914 - DNA, 30 bp, Artificial Sequence
  Synthetic oligonucleotide
tcgccgggtgacaagaggagcagcaagtac

SEQ ID NO: 119915 - DNA, 30 bp, Artificial Sequence
  Synthetic oligonucleotide
tctagcgagtgtgcgtacctaccgaagtac

SEQ ID NO: 119916 - DNA, 30 bp, Artificial Sequence
  Synthetic oligonucleotide
caacactatatgttgtggtagatacagtac

SEQ ID NO: 119917 - DNA, 30 bp, Artificial Sequence
  Synthetic oligonucleotide
ggccacgtggatatctggcgcgaccagtac

SEQ ID NO: 119918 - DNA, 30 bp, Artificial Sequence
  Synthetic oligonucleotide
cggcatgctgcgaatttagcgaccgagtac

SEQ ID NO: 119919 - DNA, 30 bp, Artificial Sequence
  Synthetic oligonucleotide
ctgaaagaaactccaaacgcagccgagtac

SEQ ID NO: 119920 - DNA, 30 bp, Artificial Sequence
  Synthetic oligonucleotide
ccatggggtcggatgaacgcgagcgagtac

SEQ ID NO: 119921 - DNA, 30 bp, Artificial Sequence
  Synthetic oligonucleotide
tcctaaattaacacaacagttgctgagtac

SEQ ID NO: 119922 - DNA, 30 bp, Artificial Sequence
  Synthetic oligonucleotide
accgtgagaagtggaggcatgaattagtac

SEQ ID NO: 119923 - DNA, 30 bp, Artificial Sequence
  Synthetic oligonucleotide
ataaggtatgcggtcttctccagttagtac

SEQ ID NO: 119924 - DNA, 30 bp, Artificial Sequence
  Synthetic oligonucleotide
aggacagtcttttctgaagtgctttagtac

SEQ ID NO: 119925 - DNA, 30 bp, Artificial Sequence
  Synthetic oligonucleotide
ggtagtgcatagaaaacgcaaacaacgtac

SEQ ID NO: 119926 - DNA, 30 bp, Artificial Sequence
  Synthetic oligonucleotide
cttatgaccgaggcgaaagcgtgaacgtac

SEQ ID NO: 119927 - DNA, 30 bp, Artificial Sequence
  Synthetic oligonucleotide
cagtgcatttacagacggagtctaacgtac

SEQ ID NO: 119928 - DNA, 31 bp, Artificial Sequence
  Synthetic oligonucleotide
aaaccgagggcttatctcatggtaaccgtac

SEQ ID NO: 119929 - DNA, 30 bp, Artificial Sequence
  Synthetic oligonucleotide
ggaggggtggcatgtatcgcgacgccgtac

SEQ ID NO: 119930 - DNA, 30 bp, Artificial Sequence
  Synthetic oligonucleotide
tgaaaggcagggagatggaaagggccgtac

SEQ ID NO: 119931 - DNA, 30 bp, Artificial Sequence
  Synthetic oligonucleotide
catccaaccaaggtagcagttggtccgtac

SEQ ID NO: 119932 - DNA, 30 bp, Artificial Sequence
  Synthetic oligonucleotide
ctcaatgctactaataaatacctggcgtac

SEQ ID NO: 119933 - DNA, 30 bp, Artificial Sequence
  Synthetic oligonucleotide
agcgagggagcagcatgagtaggcaggtac

SEQ ID NO: 119934 - DNA, 30 bp, Artificial Sequence
  Synthetic oligonucleotide
cgcatatacgcgatatatgtcgagaggtac

SEQ ID NO: 119935 - DNA, 30 bp, Artificial Sequence
  Synthetic oligonucleotide
gcttaagccggacccttcgaaccgaggtac

SEQ ID NO: 119936 - DNA, 30 bp, Artificial Sequence
  Synthetic oligonucleotide
aatgcatatctcaagattgccagccggtac

SEQ ID NO: 119937 - DNA, 30 bp, Artificial Sequence
  Synthetic oligonucleotide
tcatcagcaagccagggcgactctcggtac

SEQ ID NO: 119938 - DNA, 30 bp, Artificial Sequence
  Synthetic oligonucleotide
tggacaggagcttttcaggttggtcggtac

SEQ ID NO: 119939 - DNA, 30 bp, Artificial Sequence
  Synthetic oligonucleotide
cagtaatgtgaccctagggtatttcggtac

SEQ ID NO: 119940 - DNA, 30 bp, Artificial Sequence
  Synthetic oligonucleotide
atgcatggttaactcgtgagccaagggtac

SEQ ID NO: 119941 - DNA, 30 bp, Artificial Sequence
  Synthetic oligonucleotide
agtaggaaaaaatactaaaacccagggtac

SEQ ID NO: 119942 - DNA, 30 bp, Artificial Sequence
  Synthetic oligonucleotide
gtaggaagtaatcgcaaaaccgtagggtac

SEQ ID NO: 119943 - DNA, 30 bp, Artificial Sequence
  Synthetic oligonucleotide
cccagaactaaacaaccaagaagcgggtac

SEQ ID NO: 119944 - DNA, 30 bp, Artificial Sequence
  Synthetic oligonucleotide
tagatacggcgttaactatatagcgggtac

SEQ ID NO: 119945 - DNA, 30 bp, Artificial Sequence
  Synthetic oligonucleotide
acttggagatgttgaccgggtgctgggtac

SEQ ID NO: 119946 - DNA, 30 bp, Artificial Sequence
  Synthetic oligonucleotide
cggggagtcccaggcacatactggtggtac

SEQ ID NO: 119947 - DNA, 30 bp, Artificial Sequence
  Synthetic oligonucleotide
caggcatactatggagtatgacattggtac

SEQ ID NO: 119948 - DNA, 30 bp, Artificial Sequence
  Synthetic oligonucleotide
cccagcggggtattcaagagtgtcatgtac

SEQ ID NO: 119949 - DNA, 30 bp, Artificial Sequence
  Synthetic oligonucleotide
gactcgagaggaattaaaacactgatgtac

SEQ ID NO: 119950 - DNA, 30 bp, Artificial Sequence
  Synthetic oligonucleotide
catgaggaacctgggtcgcgttccgtgtac

SEQ ID NO: 119951 - DNA, 30 bp, Artificial Sequence
  Synthetic oligonucleotide
ggatcaccactggcgcttaaaccggtgtac

SEQ ID NO: 119952 - DNA, 30 bp, Artificial Sequence
  Synthetic oligonucleotide
tgggagacccaacaggagctcagtaattac

SEQ ID NO: 119953 - DNA, 30 bp, Artificial Sequence
  Synthetic oligonucleotide
gaccacaagaggttcgcccgaggacattac

SEQ ID NO: 119954 - DNA, 30 bp, Artificial Sequence
  Synthetic oligonucleotide
aacaaacttcacacatatatccagcattac

SEQ ID NO: 119955 - DNA, 30 bp, Artificial Sequence
  Synthetic oligonucleotide
ggggtaagttagggtaatgtaaaagattac

SEQ ID NO: 119956 - DNA, 30 bp, Artificial Sequence
  Synthetic oligonucleotide
attacacgtccactaatacccagagattac

SEQ ID NO: 119957 - DNA, 30 bp, Artificial Sequence
  Synthetic oligonucleotide
tcgaaagtaaaaacatagtgtatggattac

SEQ ID NO: 119958 - DNA, 30 bp, Artificial Sequence
  Synthetic oligonucleotide
cgggtgaagtaaatatagcgagcgtattac

SEQ ID NO: 119959 - DNA, 30 bp, Artificial Sequence
  Synthetic oligonucleotide
cgccattatcccattctcccgggcacttac

SEQ ID NO: 119960 - DNA, 30 bp, Artificial Sequence
  Synthetic oligonucleotide
gcgtacaatgaacacacgacaacgacttac

SEQ ID NO: 119961 - DNA, 30 bp, Artificial Sequence
  Synthetic oligonucleotide
gtcgaaggtgaacgccgtcatgggacttac

SEQ ID NO: 119962 - DNA, 30 bp, Artificial Sequence
  Synthetic oligonucleotide
acgaacgccgataacatccgaagaccttac

SEQ ID NO: 119963 - DNA, 30 bp, Artificial Sequence
  Synthetic oligonucleotide
gggaatagctcaaacgacatgcgagcttac

SEQ ID NO: 119964 - DNA, 30 bp, Artificial Sequence
  Synthetic oligonucleotide
gtcgcgacgacttgagatgatcgagcttac

SEQ ID NO: 119965 - DNA, 30 bp, Artificial Sequence
  Synthetic oligonucleotide
aagtccatataaatcagaggatctgcttac

SEQ ID NO: 119966 - DNA, 30 bp, Artificial Sequence
  Synthetic oligonucleotide
ccgtggaaggggctgatcttgcgatcttac

SEQ ID NO: 119967 - DNA, 30 bp, Artificial Sequence
  Synthetic oligonucleotide
ggatggaactgttgacatgctctacgttac

SEQ ID NO: 119968 - DNA, 30 bp, Artificial Sequence
  Synthetic oligonucleotide
catataaaattcgatcagtagaggggttac

SEQ ID NO: 119969 - DNA, 30 bp, Artificial Sequence
  Synthetic oligonucleotide
acgtctaccaatcgaactttcacctgttac

SEQ ID NO: 119970 - DNA, 30 bp, Artificial Sequence
  Synthetic oligonucleotide
acgtcattgtatcagatacgtccaatttac

SEQ ID NO: 119971 - DNA, 30 bp, Artificial Sequence
  Synthetic oligonucleotide
ggcgttagccgccgacgtctcggaatttac

SEQ ID NO: 119972 - DNA, 30 bp, Artificial Sequence
  Synthetic oligonucleotide
ggtaaggactcaccatacgacattatttac

SEQ ID NO: 119973 - DNA, 30 bp, Artificial Sequence
  Synthetic oligonucleotide
tggtcacgaaacactgtacgttaactttac

SEQ ID NO: 119974 - DNA, 30 bp, Artificial Sequence
  Synthetic oligonucleotide
ggggcttgaatgaacaaacagtgcctttac

SEQ ID NO: 119975 - DNA, 30 bp, Artificial Sequence
  Synthetic oligonucleotide
ctaagcgatgtgcagggggttcaagtttac

SEQ ID NO: 119976 - DNA, 30 bp, Artificial Sequence
  Synthetic oligonucleotide
cgtcataaacgatcagttcaataggtttac

SEQ ID NO: 119977 - DNA, 30 bp, Artificial Sequence
  Synthetic oligonucleotide
ccacgtactgctaccgatcggttaaaaacc

SEQ ID NO: 119978 - DNA, 30 bp, Artificial Sequence
  Synthetic oligonucleotide
atgatggccgcaaagacttctccacaaacc

SEQ ID NO: 119979 - DNA, 30 bp, Artificial Sequence
  Synthetic oligonucleotide
tacttcgcatgagagattcatggataaacc

SEQ ID NO: 119980 - DNA, 30 bp, Artificial Sequence
  Synthetic oligonucleotide
ggcaacaaaagtggataactcttataaacc

SEQ ID NO: 119981 - DNA, 30 bp, Artificial Sequence
  Synthetic oligonucleotide
tggacctttggcaacaatgcggattaaacc

SEQ ID NO: 119982 - DNA, 30 bp, Artificial Sequence
  Synthetic oligonucleotide
ttcctgaacaactgcatatctcgaacaacc

SEQ ID NO: 119983 - DNA, 30 bp, Artificial Sequence
  Synthetic oligonucleotide
aagcgactataagggtgcgcgatcacaacc

SEQ ID NO: 119984 - DNA, 30 bp, Artificial Sequence
  Synthetic oligonucleotide
gctgcgctacggtcagcgcaagcaccaacc

SEQ ID NO: 119985 - DNA, 30 bp, Artificial Sequence
  Synthetic oligonucleotide
agcgacagacctcggtaacttgtcccaacc

SEQ ID NO: 119986 - DNA, 30 bp, Artificial Sequence
  Synthetic oligonucleotide
ggcaagtggtcaaggcccatcgcgccaacc

SEQ ID NO: 119987 - DNA, 30 bp, Artificial Sequence
  Synthetic oligonucleotide
aatagcaatacatgggtaaagatagcaacc

SEQ ID NO: 119988 - DNA, 31 bp, Artificial Sequence
  Synthetic oligonucleotide
agcgtgtacacgcgtgctggagagatcaacc

SEQ ID NO: 119989 - DNA, 30 bp, Artificial Sequence
  Synthetic oligonucleotide
cggatgtaaaccctcggaagagaaagaacc

SEQ ID NO: 119990 - DNA, 30 bp, Artificial Sequence
  Synthetic oligonucleotide
ttggatgcgaacaatgggcccagtagaacc

SEQ ID NO: 119991 - DNA, 30 bp, Artificial Sequence
  Synthetic oligonucleotide
caagcggccacgaaaccgggttcgcgaacc

SEQ ID NO: 119992 - DNA, 30 bp, Artificial Sequence
  Synthetic oligonucleotide
ggaaccagcacgcggatgctcgtaggaacc

SEQ ID NO: 119993 - DNA, 30 bp, Artificial Sequence
  Synthetic oligonucleotide
ggaccgtatataagttggatgttaggaacc

SEQ ID NO: 119994 - DNA, 30 bp, Artificial Sequence
  Synthetic oligonucleotide
gggggcgcccccagccttgtcgtcggaacc

SEQ ID NO: 119995 - DNA, 30 bp, Artificial Sequence
  Synthetic oligonucleotide
ggcccgtacaaacagccgtgtagtggaacc

SEQ ID NO: 119996 - DNA, 30 bp, Artificial Sequence
  Synthetic oligonucleotide
cattgggtcacgaatcctctggagtgaacc

SEQ ID NO: 119997 - DNA, 30 bp, Artificial Sequence
  Synthetic oligonucleotide
tagatcagttcaagcatacattccataacc

SEQ ID NO: 119998 - DNA, 30 bp, Artificial Sequence
  Synthetic oligonucleotide
ggaggtgagtgaagtgaacggacgataacc

SEQ ID NO: 119999 - DNA, 30 bp, Artificial Sequence
  Synthetic oligonucleotide
ggctaaagaacacatcgtagcgttataacc

SEQ ID NO: 120000 - DNA, 30 bp, Artificial Sequence
  Synthetic oligonucleotide
ctttgggaaaggaccaatcgatatctaacc

SEQ ID NO: 120001 - DNA, 30 bp, Artificial Sequence
  Synthetic oligonucleotide
agtgtcacggtcattgggcagcaagtaacc

SEQ ID NO: 120002 - DNA, 30 bp, Artificial Sequence
  Synthetic oligonucleotide
atcggatctacctagtccactctcgtaacc

SEQ ID NO: 120003 - DNA, 30 bp, Artificial Sequence
  Synthetic oligonucleotide
acatggtggaggcacagtgtaggcttaacc

SEQ ID NO: 120004 - DNA, 30 bp, Artificial Sequence
  Synthetic oligonucleotide
aacgcgagcgaagtatatacccggttaacc

SEQ ID NO: 120005 - DNA, 30 bp, Artificial Sequence
  Synthetic oligonucleotide
tgcgttgcgcgagaggcgatggcgaacacc

SEQ ID NO: 120006 - DNA, 30 bp, Artificial Sequence
  Synthetic oligonucleotide
agaggagaaggccccctcgatcttaacacc

SEQ ID NO: 120007 - DNA, 30 bp, Artificial Sequence
  Synthetic oligonucleotide
acgaggggacggtgtcggcctcaccacacc

SEQ ID NO: 120008 - DNA, 30 bp, Artificial Sequence
  Synthetic oligonucleotide
cgttgaacgttgcataaaacatcgcacacc

SEQ ID NO: 120009 - DNA, 30 bp, Artificial Sequence
  Synthetic oligonucleotide
ctattggatcgacgtctctatgctcacacc

SEQ ID NO: 120010 - DNA, 30 bp, Artificial Sequence
  Synthetic oligonucleotide
gtgcttattatacacttacgagccgacacc

SEQ ID NO: 120011 - DNA, 30 bp, Artificial Sequence
  Synthetic oligonucleotide
gatgcgggaagaggagtagctagcgacacc

SEQ ID NO: 120012 - DNA, 30 bp, Artificial Sequence
  Synthetic oligonucleotide
cgtatctgcgtatctcggtcgtcgaccacc

SEQ ID NO: 120013 - DNA, 30 bp, Artificial Sequence
  Synthetic oligonucleotide
tatacgggcgaagctaaacaacatcccacc

SEQ ID NO: 120014 - DNA, 30 bp, Artificial Sequence
  Synthetic oligonucleotide
gcgtaggtgatgctagagataggagccacc

SEQ ID NO: 120015 - DNA, 30 bp, Artificial Sequence
  Synthetic oligonucleotide
tctatcagagggcaaactggaagcgccacc

SEQ ID NO: 120016 - DNA, 30 bp, Artificial Sequence
  Synthetic oligonucleotide
aagcgacggtatgtgttgaagggcgccacc

SEQ ID NO: 120017 - DNA, 30 bp, Artificial Sequence
  Synthetic oligonucleotide
ctaaagggttagtaaaagggaggctccacc

SEQ ID NO: 120018 - DNA, 30 bp, Artificial Sequence
  Synthetic oligonucleotide
acttcgaagagaatgaacagcttctccacc

SEQ ID NO: 120019 - DNA, 30 bp, Artificial Sequence
  Synthetic oligonucleotide
aaccagacttccagacaaggatcgagcacc

SEQ ID NO: 120020 - DNA, 30 bp, Artificial Sequence
  Synthetic oligonucleotide
cgtcgcgggctggtcccaggcgaacgcacc

SEQ ID NO: 120021 - DNA, 30 bp, Artificial Sequence
  Synthetic oligonucleotide
gtctaggatagtaaaaaggatcgccgcacc

SEQ ID NO: 120022 - DNA, 30 bp, Artificial Sequence
  Synthetic oligonucleotide
agtgatgtaccagaaaaaaacgacggcacc

SEQ ID NO: 120023 - DNA, 30 bp, Artificial Sequence
  Synthetic oligonucleotide
aaaaacgacaagaggatgtaagactgcacc

SEQ ID NO: 120024 - DNA, 30 bp, Artificial Sequence
  Synthetic oligonucleotide
aggttggcgttcgctaaggaatactgcacc

SEQ ID NO: 120025 - DNA, 30 bp, Artificial Sequence
  Synthetic oligonucleotide
tcagctgcgcaataaatatccttctgcacc

SEQ ID NO: 120026 - DNA, 30 bp, Artificial Sequence
  Synthetic oligonucleotide
tcggactgggaccccagcagcttcatcacc

SEQ ID NO: 120027 - DNA, 30 bp, Artificial Sequence
  Synthetic oligonucleotide
ggctaaacagttatcgggcgagttctcacc

SEQ ID NO: 120028 - DNA, 30 bp, Artificial Sequence
  Synthetic oligonucleotide
cggaatgctcgccttacggggacggtcacc

SEQ ID NO: 120029 - DNA, 30 bp, Artificial Sequence
  Synthetic oligonucleotide
aggacaaccctcgggccatacgttgtcacc

SEQ ID NO: 120030 - DNA, 30 bp, Artificial Sequence
  Synthetic oligonucleotide
cgggtaacatcaaacggtgttcagttcacc

SEQ ID NO: 120031 - DNA, 30 bp, Artificial Sequence
  Synthetic oligonucleotide
gtgcaaacccaacggtggaaagatttcacc

SEQ ID NO: 120032 - DNA, 30 bp, Artificial Sequence
  Synthetic oligonucleotide
gctataagcaaagtcattacagagaagacc

SEQ ID NO: 120033 - DNA, 30 bp, Artificial Sequence
  Synthetic oligonucleotide
tacgatgtccaaagtcaatagatgaagacc

SEQ ID NO: 120034 - DNA, 30 bp, Artificial Sequence
  Synthetic oligonucleotide
ttgctaaccagacacctagccctgaagacc

SEQ ID NO: 120035 - DNA, 30 bp, Artificial Sequence
  Synthetic oligonucleotide
acggtgacaattgttgctcacggccagacc

SEQ ID NO: 120036 - DNA, 30 bp, Artificial Sequence
  Synthetic oligonucleotide
tcggttagcaggccacatgcaaagcagacc

SEQ ID NO: 120037 - DNA, 30 bp, Artificial Sequence
  Synthetic oligonucleotide
taatacccacgtcaattgatggctcagacc

SEQ ID NO: 120038 - DNA, 30 bp, Artificial Sequence
  Synthetic oligonucleotide
ggaacgattcaagcgatacttaaggagacc

SEQ ID NO: 120039 - DNA, 30 bp, Artificial Sequence
  Synthetic oligonucleotide
agctagcgatacaaagaggaatatgagacc

SEQ ID NO: 120040 - DNA, 30 bp, Artificial Sequence
  Synthetic oligonucleotide
caacgcgggcataacacgccgcaatagacc

SEQ ID NO: 120041 - DNA, 30 bp, Artificial Sequence
  Synthetic oligonucleotide
ggcacaatgcacttcctcctatcctagacc

SEQ ID NO: 120042 - DNA, 30 bp, Artificial Sequence
  Synthetic oligonucleotide
aattcgtcatgtggcgaatgttcgtagacc

SEQ ID NO: 120043 - DNA, 30 bp, Artificial Sequence
  Synthetic oligonucleotide
gacaaaagtgacaatcttatcgccgcgacc

SEQ ID NO: 120044 - DNA, 30 bp, Artificial Sequence
  Synthetic oligonucleotide
atagcaatgtttaattggtatggtgcgacc

SEQ ID NO: 120045 - DNA, 30 bp, Artificial Sequence
  Synthetic oligonucleotide
gagaacgggaattagataaacgaatcgacc

SEQ ID NO: 120046 - DNA, 30 bp, Artificial Sequence
  Synthetic oligonucleotide
aagggtgtttggttagtaaggaagtcgacc

SEQ ID NO: 120047 - DNA, 30 bp, Artificial Sequence
  Synthetic oligonucleotide
cagccaagggaagctgtcatgaattcgacc

SEQ ID NO: 120048 - DNA, 30 bp, Artificial Sequence
  Synthetic oligonucleotide
ccaagcagacggtagacgccactgaggacc

SEQ ID NO: 120049 - DNA, 30 bp, Artificial Sequence
  Synthetic oligonucleotide
ggcaaacactagggtcagaaatagcggacc

SEQ ID NO: 120050 - DNA, 30 bp, Artificial Sequence
  Synthetic oligonucleotide
tcgaccacaatgaccatcaagtttcggacc

SEQ ID NO: 120051 - DNA, 30 bp, Artificial Sequence
  Synthetic oligonucleotide
atcttaggacatgggggtgttaccgggacc

SEQ ID NO: 120052 - DNA, 30 bp, Artificial Sequence
  Synthetic oligonucleotide
atatctataacatgggaccgagttgggacc

SEQ ID NO: 120053 - DNA, 30 bp, Artificial Sequence
  Synthetic oligonucleotide
gtgctcagtgggcatggctgtgcatggacc

SEQ ID NO: 120054 - DNA, 30 bp, Artificial Sequence
  Synthetic oligonucleotide
tgtcgacgggatggcccgtagatctggacc

SEQ ID NO: 120055 - DNA, 30 bp, Artificial Sequence
  Synthetic oligonucleotide
tcgcaaaccgaaatttaaaaggcgtggacc

SEQ ID NO: 120056 - DNA, 30 bp, Artificial Sequence
  Synthetic oligonucleotide
acatgtatgtgggctccttccacaatgacc

SEQ ID NO: 120057 - DNA, 30 bp, Artificial Sequence
  Synthetic oligonucleotide
caagggggcatgacacacctaggcctgacc

SEQ ID NO: 120058 - DNA, 30 bp, Artificial Sequence
  Synthetic oligonucleotide
aagtgagtggctctcaatgttaggctgacc

SEQ ID NO: 120059 - DNA, 30 bp, Artificial Sequence
  Synthetic oligonucleotide
caacctgcatctaggaacaaaggagtgacc

SEQ ID NO: 120060 - DNA, 30 bp, Artificial Sequence
  Synthetic oligonucleotide
tatctcgcgaagtgaaatcccgccgtgacc

SEQ ID NO: 120061 - DNA, 30 bp, Artificial Sequence
  Synthetic oligonucleotide
acacagcagttggacaaaagcgaggtgacc

SEQ ID NO: 120062 - DNA, 30 bp, Artificial Sequence
  Synthetic oligonucleotide
gaaaaatacattagagaagcgttggtgacc

SEQ ID NO: 120063 - DNA, 30 bp, Artificial Sequence
  Synthetic oligonucleotide
agccatcgggttacactagcagacaatacc

SEQ ID NO: 120064 - DNA, 30 bp, Artificial Sequence
  Synthetic oligonucleotide
gggaagataaggacgtgttcttgtaatacc

SEQ ID NO: 120065 - DNA, 30 bp, Artificial Sequence
  Synthetic oligonucleotide
acgccttcgcggggcgaggaaggacatacc

SEQ ID NO: 120066 - DNA, 30 bp, Artificial Sequence
  Synthetic oligonucleotide
ccgtaagtatagatcgagaactttcatacc

SEQ ID NO: 120067 - DNA, 30 bp, Artificial Sequence
  Synthetic oligonucleotide
accaggttggcgtttcagctagtaactacc

SEQ ID NO: 120068 - DNA, 30 bp, Artificial Sequence
  Synthetic oligonucleotide
cagagtgccgtcacgttctaccggactacc

SEQ ID NO: 120069 - DNA, 30 bp, Artificial Sequence
  Synthetic oligonucleotide
tcggctataatcaattagcctagcgctacc

SEQ ID NO: 120070 - DNA, 30 bp, Artificial Sequence
  Synthetic oligonucleotide
cgatgtacagcggactaataggaatctacc

SEQ ID NO: 120071 - DNA, 30 bp, Artificial Sequence
  Synthetic oligonucleotide
tcgtcgttggaaaagaaacatgcttctacc

SEQ ID NO: 120072 - DNA, 30 bp, Artificial Sequence
  Synthetic oligonucleotide
gcgcttttcggaaaacaagtgtggagtacc

SEQ ID NO: 120073 - DNA, 30 bp, Artificial Sequence
  Synthetic oligonucleotide
gtggtgcactgacagggtacgcatagtacc

SEQ ID NO: 120074 - DNA, 30 bp, Artificial Sequence
  Synthetic oligonucleotide
aacgttattacagcactaacggaacgtacc

SEQ ID NO: 120075 - DNA, 30 bp, Artificial Sequence
  Synthetic oligonucleotide
ctggctgcgtctcccaacatttaacgtacc

SEQ ID NO: 120076 - DNA, 30 bp, Artificial Sequence
  Synthetic oligonucleotide
aagacttttagcaagaccgaatcacgtacc

SEQ ID NO: 120077 - DNA, 30 bp, Artificial Sequence
  Synthetic oligonucleotide
agtcaagggtgttcgcgtgaacggcgtacc

SEQ ID NO: 120078 - DNA, 30 bp, Artificial Sequence
  Synthetic oligonucleotide
ctgcaaacatacttctgaacctgcggtacc

SEQ ID NO: 120079 - DNA, 30 bp, Artificial Sequence
  Synthetic oligonucleotide
caggtcgtaccggtgtaagcggctggtacc

SEQ ID NO: 120080 - DNA, 30 bp, Artificial Sequence
  Synthetic oligonucleotide
aggatagtgaataggtccgtctgttgtacc

SEQ ID NO: 120081 - DNA, 30 bp, Artificial Sequence
  Synthetic oligonucleotide
aggatgtgaaaggttcagtgacacattacc

SEQ ID NO: 120082 - DNA, 30 bp, Artificial Sequence
  Synthetic oligonucleotide
cgctcgagtgagaccgggtgagagattacc

SEQ ID NO: 120083 - DNA, 30 bp, Artificial Sequence
  Synthetic oligonucleotide
gcgttaaaacatgggcgatcgatccaaccc

SEQ ID NO: 120084 - DNA, 30 bp, Artificial Sequence
  Synthetic oligonucleotide
aggccttgaggtcaaatgaaccgcgcaccc

SEQ ID NO: 120085 - DNA, 30 bp, Artificial Sequence
  Synthetic oligonucleotide
gaatgcccggtccaaaaacccgagtcaccc

SEQ ID NO: 120086 - DNA, 30 bp, Artificial Sequence
  Synthetic oligonucleotide
ttgaagaaacaggttctagccgattcaccc

SEQ ID NO: 120087 - DNA, 30 bp, Artificial Sequence
  Synthetic oligonucleotide
cgttagaagggcgtcaccctgatttcaccc

SEQ ID NO: 120088 - DNA, 30 bp, Artificial Sequence
  Synthetic oligonucleotide
acaccataagagtttgtcgaaagtagaccc

SEQ ID NO: 120089 - DNA, 30 bp, Artificial Sequence
  Synthetic oligonucleotide
accaatgggcggttcgaatggactcgaccc

SEQ ID NO: 120090 - DNA, 30 bp, Artificial Sequence
  Synthetic oligonucleotide
ccgatgtaaacttgaatcatgcatataccc

SEQ ID NO: 120091 - DNA, 30 bp, Artificial Sequence
  Synthetic oligonucleotide
acacaatactacgacgactacgcgctaccc

SEQ ID NO: 120092 - DNA, 30 bp, Artificial Sequence
  Synthetic oligonucleotide
aaggtcagtaggctgggcataagcgtaccc

SEQ ID NO: 120093 - DNA, 27 bp, Artificial Sequence
  Synthetic oligonucleotide
tcatgcgtcttcttgggagtggtaccc

SEQ ID NO: 120094 - DNA, 30 bp, Artificial Sequence
  Synthetic oligonucleotide
attagacatatcagaccatcctccttaccc

SEQ ID NO: 120095 - DNA, 30 bp, Artificial Sequence
  Synthetic oligonucleotide
ccctacacaccagttacggtaaaaaacccc

SEQ ID NO: 120096 - DNA, 30 bp, Artificial Sequence
  Synthetic oligonucleotide
tggtacaggaggacgaataggcaacacccc

SEQ ID NO: 120097 - DNA, 30 bp, Artificial Sequence
  Synthetic oligonucleotide
cgttgtggaccaggtatcactttccacccc

SEQ ID NO: 120098 - DNA, 30 bp, Artificial Sequence
  Synthetic oligonucleotide
gacgccccaccgaaaatcattccgcacccc

SEQ ID NO: 120099 - DNA, 30 bp, Artificial Sequence
  Synthetic oligonucleotide
gactcgaagcgcaaaacctcgagggacccc

SEQ ID NO: 120100 - DNA, 30 bp, Artificial Sequence
  Synthetic oligonucleotide
aggtaataataaggagaagcaacatacccc

SEQ ID NO: 120101 - DNA, 30 bp, Artificial Sequence
  Synthetic oligonucleotide
ggaagcagactcactttacactacaccccc

SEQ ID NO: 120102 - DNA, 30 bp, Artificial Sequence
  Synthetic oligonucleotide
tgatgaatatgggactgagataaacccccc

SEQ ID NO: 120103 - DNA, 30 bp, Artificial Sequence
  Synthetic oligonucleotide
aggttgggtacggtgatatagggacccccc

SEQ ID NO: 120104 - DNA, 30 bp, Artificial Sequence
  Synthetic oligonucleotide
ataagatcgactacgaagcctacgcccccc

SEQ ID NO: 120105 - DNA, 30 bp, Artificial Sequence
  Synthetic oligonucleotide
tcctagagggtgtgcgttgaaattcccccc

SEQ ID NO: 120106 - DNA, 30 bp, Artificial Sequence
  Synthetic oligonucleotide
ccgttgagcgttctatagtcgttatgcccc

SEQ ID NO: 120107 - DNA, 30 bp, Artificial Sequence
  Synthetic oligonucleotide
gggtctgtataaccgggatagagttgcccc

SEQ ID NO: 120108 - DNA, 30 bp, Artificial Sequence
  Synthetic oligonucleotide
agaatcgaggagagatcgtcaacagtcccc

SEQ ID NO: 120109 - DNA, 30 bp, Artificial Sequence
  Synthetic oligonucleotide
tcgaagtccctggcacggtcaggcgtcccc

SEQ ID NO: 120110 - DNA, 30 bp, Artificial Sequence
  Synthetic oligonucleotide
tcgcaaaaagagctcatcatggaaaagccc

SEQ ID NO: 120111 - DNA, 30 bp, Artificial Sequence
  Synthetic oligonucleotide
agagttgtaagaaattgatgttaaaagccc

SEQ ID NO: 120112 - DNA, 30 bp, Artificial Sequence
  Synthetic oligonucleotide
cagagaatggtgcaaacaccccagaagccc

SEQ ID NO: 120113 - DNA, 30 bp, Artificial Sequence
  Synthetic oligonucleotide
tctattcacgcgatttcgtgcggccagccc

SEQ ID NO: 120114 - DNA, 30 bp, Artificial Sequence
  Synthetic oligonucleotide
aaaaaactgtggctacggagaaaagagccc

SEQ ID NO: 120115 - DNA, 30 bp, Artificial Sequence
  Synthetic oligonucleotide
acttcagcgcacccacggagtgcggagccc

SEQ ID NO: 120116 - DNA, 30 bp, Artificial Sequence
  Synthetic oligonucleotide
tgccgaggtaacgactagtggagtgagccc

SEQ ID NO: 120117 - DNA, 30 bp, Artificial Sequence
  Synthetic oligonucleotide
ccgtgacataaattaacctagtgaacgccc

SEQ ID NO: 120118 - DNA, 30 bp, Artificial Sequence
  Synthetic oligonucleotide
acaagtgggggcctgatagattgaacgccc

SEQ ID NO: 120119 - DNA, 30 bp, Artificial Sequence
  Synthetic oligonucleotide
ccgcataagatttactagaattatacgccc

SEQ ID NO: 120120 - DNA, 30 bp, Artificial Sequence
  Synthetic oligonucleotide
tgccaactgagatttcctacttccgcgccc

SEQ ID NO: 120121 - DNA, 30 bp, Artificial Sequence
  Synthetic oligonucleotide
gacgactctaggatcacgaacttatcgccc

SEQ ID NO: 120122 - DNA, 30 bp, Artificial Sequence
  Synthetic oligonucleotide
attgggagaatgtaggtttgctgttcgccc

SEQ ID NO: 120123 - DNA, 30 bp, Artificial Sequence
  Synthetic oligonucleotide
tatagagagacaatgggaatacgaaggccc

SEQ ID NO: 120124 - DNA, 30 bp, Artificial Sequence
  Synthetic oligonucleotide
atgcgttttggaacactttaagagcggccc

SEQ ID NO: 120125 - DNA, 30 bp, Artificial Sequence
  Synthetic oligonucleotide
tgatacaagcgcacgatcgcacccgggccc

SEQ ID NO: 120126 - DNA, 30 bp, Artificial Sequence
  Synthetic oligonucleotide
tagcgtgtgtccctggtatggtaatggccc

SEQ ID NO: 120127 - DNA, 30 bp, Artificial Sequence
  Synthetic oligonucleotide
agaccaaggtttgggctagcgatatggccc

SEQ ID NO: 120128 - DNA, 30 bp, Artificial Sequence
  Synthetic oligonucleotide
gaacgggatgcatatcgcggcacaatgccc

SEQ ID NO: 120129 - DNA, 30 bp, Artificial Sequence
  Synthetic oligonucleotide
tcgctccacactgggtaacgaaacatgccc

SEQ ID NO: 120130 - DNA, 30 bp, Artificial Sequence
  Synthetic oligonucleotide
cacccatgtccgcttagaaatcggatgccc

SEQ ID NO: 120131 - DNA, 30 bp, Artificial Sequence
  Synthetic oligonucleotide
gcctctgcgtcatggtggtatagagtgccc

SEQ ID NO: 120132 - DNA, 30 bp, Artificial Sequence
  Synthetic oligonucleotide
aggggccgggtcgtcccgacacacaatccc

SEQ ID NO: 120133 - DNA, 30 bp, Artificial Sequence
  Synthetic oligonucleotide
cacagaaccgttactgacacaaaacatccc

SEQ ID NO: 120134 - DNA, 30 bp, Artificial Sequence
  Synthetic oligonucleotide
tgaaaacggacagaagcgaggtcccatccc

SEQ ID NO: 120135 - DNA, 30 bp, Artificial Sequence
  Synthetic oligonucleotide
aggtatgacaaggaacagagccctcatccc

SEQ ID NO: 120136 - DNA, 30 bp, Artificial Sequence
  Synthetic oligonucleotide
cctaacactcaaatatctcgtcacactccc

SEQ ID NO: 120137 - DNA, 30 bp, Artificial Sequence
  Synthetic oligonucleotide
ctagatactttagggcacgtgaagactccc

SEQ ID NO: 120138 - DNA, 30 bp, Artificial Sequence
  Synthetic oligonucleotide
cagggacgaacgtgacttcacactactccc

SEQ ID NO: 120139 - DNA, 30 bp, Artificial Sequence
  Synthetic oligonucleotide
cctcacctagcgagcatagtagcccctccc

SEQ ID NO: 120140 - DNA, 31 bp, Artificial Sequence
  Synthetic oligonucleotide
cgtcgaaagacggcgatgctcatcgcctccc

SEQ ID NO: 120141 - DNA, 30 bp, Artificial Sequence
  Synthetic oligonucleotide
agttaacacagagggttaggaaatgctccc

SEQ ID NO: 120142 - DNA, 30 bp, Artificial Sequence
  Synthetic oligonucleotide
cgacggggcctgtagttagggacaagtccc

SEQ ID NO: 120143 - DNA, 30 bp, Artificial Sequence
  Synthetic oligonucleotide
actgatcaccttactcgtgcgaggagtccc

SEQ ID NO: 120144 - DNA, 30 bp, Artificial Sequence
  Synthetic oligonucleotide
gagcgtccgtatcgtatataggctagtccc

SEQ ID NO: 120145 - DNA, 30 bp, Artificial Sequence
  Synthetic oligonucleotide
aggcgaaaatgagttaacgaaaaacgtccc

SEQ ID NO: 120146 - DNA, 30 bp, Artificial Sequence
  Synthetic oligonucleotide
taaggagtttgggttactataccgcgtccc

SEQ ID NO: 120147 - DNA, 30 bp, Artificial Sequence
  Synthetic oligonucleotide
cagaaccacccgagagggagccctcgtccc

SEQ ID NO: 120148 - DNA, 30 bp, Artificial Sequence
  Synthetic oligonucleotide
catagctgagtgagtcgttttattcgtccc

SEQ ID NO: 120149 - DNA, 30 bp, Artificial Sequence
  Synthetic oligonucleotide
accgtggatcctttagccgaagggggtccc

SEQ ID NO: 120150 - DNA, 30 bp, Artificial Sequence
  Synthetic oligonucleotide
attgtacgaggggattgttgcaggtgtccc

SEQ ID NO: 120151 - DNA, 30 bp, Artificial Sequence
  Synthetic oligonucleotide
tcttgcatactaactagtatcttgtgtccc

SEQ ID NO: 120152 - DNA, 30 bp, Artificial Sequence
  Synthetic oligonucleotide
agtaacgagatctcggtccatgtcattccc

SEQ ID NO: 120153 - DNA, 30 bp, Artificial Sequence
  Synthetic oligonucleotide
acagcaatccgggagacattgggacttccc

SEQ ID NO: 120154 - DNA, 30 bp, Artificial Sequence
  Synthetic oligonucleotide
tcgatagcccggaatcgattgttgcaagcc

SEQ ID NO: 120155 - DNA, 30 bp, Artificial Sequence
  Synthetic oligonucleotide
tcgggtagttcacacaaggtttaggaagcc

SEQ ID NO: 120156 - DNA, 30 bp, Artificial Sequence
  Synthetic oligonucleotide
acatcgagtagtgtggagatattataagcc

SEQ ID NO: 120157 - DNA, 30 bp, Artificial Sequence
  Synthetic oligonucleotide
gactaaacggtgtacagatcacgctaagcc

SEQ ID NO: 120158 - DNA, 30 bp, Artificial Sequence
  Synthetic oligonucleotide
acgtgacaggggaattattttggttaagcc

SEQ ID NO: 120159 - DNA, 30 bp, Artificial Sequence
  Synthetic oligonucleotide
acggtcacactggcgccaagtttttaagcc

SEQ ID NO: 120160 - DNA, 30 bp, Artificial Sequence
  Synthetic oligonucleotide
aatcgaccaataaaccacgtggcaacagcc

SEQ ID NO: 120161 - DNA, 30 bp, Artificial Sequence
  Synthetic oligonucleotide
gtccgattcccagaccaagactacacagcc

SEQ ID NO: 120162 - DNA, 30 bp, Artificial Sequence
  Synthetic oligonucleotide
tcatagggtatggctggcgataatacagcc

SEQ ID NO: 120163 - DNA, 30 bp, Artificial Sequence
  Synthetic oligonucleotide
ggcgtcattttatcagtaggagctacagcc

SEQ ID NO: 120164 - DNA, 30 bp, Artificial Sequence
  Synthetic oligonucleotide
taggtgcaccattagtgggaacggccagcc

SEQ ID NO: 120165 - DNA, 30 bp, Artificial Sequence
  Synthetic oligonucleotide
ggcatgacatatttaacctgacaagcagcc

SEQ ID NO: 120166 - DNA, 30 bp, Artificial Sequence
  Synthetic oligonucleotide
cccaaaatttgcaagaaggccaccgcagcc

SEQ ID NO: 120167 - DNA, 30 bp, Artificial Sequence
  Synthetic oligonucleotide
tcgagccgtctggagtcatccgcggcagcc

SEQ ID NO: 120168 - DNA, 30 bp, Artificial Sequence
  Synthetic oligonucleotide
tgtacgagagaaccattgccacgttcagcc

SEQ ID NO: 120169 - DNA, 30 bp, Artificial Sequence
  Synthetic oligonucleotide
tagtcaacggcaatccgctcatgcagagcc

SEQ ID NO: 120170 - DNA, 30 bp, Artificial Sequence
  Synthetic oligonucleotide
ataatcggacaattgtcattcttcagagcc

SEQ ID NO: 120171 - DNA, 30 bp, Artificial Sequence
  Synthetic oligonucleotide
gggccagtaaatattagcggaagacgagcc

SEQ ID NO: 120172 - DNA, 30 bp, Artificial Sequence
  Synthetic oligonucleotide
ctaggaacgcttccacgtgcaccgcgagcc

SEQ ID NO: 120173 - DNA, 30 bp, Artificial Sequence
  Synthetic oligonucleotide
cagtatagaatacgtctcagaccgcgagcc

SEQ ID NO: 120174 - DNA, 30 bp, Artificial Sequence
  Synthetic oligonucleotide
cgggtttatacctggaccaaccatcgagcc

SEQ ID NO: 120175 - DNA, 30 bp, Artificial Sequence
  Synthetic oligonucleotide
acgaaggattctctcatcaatgctcgagcc

SEQ ID NO: 120176 - DNA, 30 bp, Artificial Sequence
  Synthetic oligonucleotide
acgcaaacacggaatgtcggcacgtgagcc

SEQ ID NO: 120177 - DNA, 30 bp, Artificial Sequence
  Synthetic oligonucleotide
tggctcagatcgtaccaatactaaatagcc

SEQ ID NO: 120178 - DNA, 30 bp, Artificial Sequence
  Synthetic oligonucleotide
ttaagtggatggtaagatggtgcaatagcc

SEQ ID NO: 120179 - DNA, 30 bp, Artificial Sequence
  Synthetic oligonucleotide
tggcatcgcgtttgtacggactatatagcc

SEQ ID NO: 120180 - DNA, 30 bp, Artificial Sequence
  Synthetic oligonucleotide
tgaaactggcttggcgattgaacactagcc

SEQ ID NO: 120181 - DNA, 30 bp, Artificial Sequence
  Synthetic oligonucleotide
ttgggcccagccaaacagcgaagcctagcc

SEQ ID NO: 120182 - DNA, 30 bp, Artificial Sequence
  Synthetic oligonucleotide
cgtattcggcggggcactgtatggctagcc

SEQ ID NO: 120183 - DNA, 30 bp, Artificial Sequence
  Synthetic oligonucleotide
cacagctacccacgatacagccacgtagcc

SEQ ID NO: 120184 - DNA, 30 bp, Artificial Sequence
  Synthetic oligonucleotide
caagactctcaagcatttggtgacttagcc

SEQ ID NO: 120185 - DNA, 30 bp, Artificial Sequence
  Synthetic oligonucleotide
gttagagaaccagggactcgtaagttagcc

SEQ ID NO: 120186 - DNA, 30 bp, Artificial Sequence
  Synthetic oligonucleotide
atactctgcgaaataggatggtatttagcc

SEQ ID NO: 120187 - DNA, 30 bp, Artificial Sequence
  Synthetic oligonucleotide
actacccatgaccgaccactaggcaacgcc

SEQ ID NO: 120188 - DNA, 30 bp, Artificial Sequence
  Synthetic oligonucleotide
ccagagcgagtatctagtacgacgaacgcc

SEQ ID NO: 120189 - DNA, 30 bp, Artificial Sequence
  Synthetic oligonucleotide
ccaccggtctaggtcataggtcgtaacgcc

SEQ ID NO: 120190 - DNA, 30 bp, Artificial Sequence
  Synthetic oligonucleotide
aagcactgcctaacggtgaatccccacgcc

SEQ ID NO: 120191 - DNA, 30 bp, Artificial Sequence
  Synthetic oligonucleotide
tggttcgcgtatagtaaaagggcccacgcc

SEQ ID NO: 120192 - DNA, 30 bp, Artificial Sequence
  Synthetic oligonucleotide
acgtgaggaatcgcggaggagttagacgcc

SEQ ID NO: 120193 - DNA, 30 bp, Artificial Sequence
  Synthetic oligonucleotide
tcaaaccaggtctgccagttctaatacgcc

SEQ ID NO: 120194 - DNA, 30 bp, Artificial Sequence
  Synthetic oligonucleotide
cgacggggggtttggcatgaattgtacgcc

SEQ ID NO: 120195 - DNA, 30 bp, Artificial Sequence
  Synthetic oligonucleotide
atggtcagatcacagatgactatttacgcc

SEQ ID NO: 120196 - DNA, 30 bp, Artificial Sequence
  Synthetic oligonucleotide
acgaaagacatcatgatgtaattttacgcc

SEQ ID NO: 120197 - DNA, 30 bp, Artificial Sequence
  Synthetic oligonucleotide
cggcaaacagggacccccgtttttaccgcc

SEQ ID NO: 120198 - DNA, 30 bp, Artificial Sequence
  Synthetic oligonucleotide
gcttcggggagtaaatcagttctacccgcc

SEQ ID NO: 120199 - DNA, 30 bp, Artificial Sequence
  Synthetic oligonucleotide
gcgttcagcaaatcttaaggtctggccgcc

SEQ ID NO: 120200 - DNA, 30 bp, Artificial Sequence
  Synthetic oligonucleotide
gtaagtaaaccgtagtgataggttgccgcc

SEQ ID NO: 120201 - DNA, 30 bp, Artificial Sequence
  Synthetic oligonucleotide
gcatttatcaaacagggaattcaatccgcc

SEQ ID NO: 120202 - DNA, 30 bp, Artificial Sequence
  Synthetic oligonucleotide
gaagggggaaagggaacctaaccctccgcc

SEQ ID NO: 120203 - DNA, 30 bp, Artificial Sequence
  Synthetic oligonucleotide
cgtgtacttatcaaaggatttgcgtccgcc

SEQ ID NO: 120204 - DNA, 30 bp, Artificial Sequence
  Synthetic oligonucleotide
cctcagaccgaccatgagaatctgtccgcc

SEQ ID NO: 120205 - DNA, 30 bp, Artificial Sequence
  Synthetic oligonucleotide
catgcggcaactttggggagtagaagcgcc

SEQ ID NO: 120206 - DNA, 30 bp, Artificial Sequence
  Synthetic oligonucleotide
aaaccaccaccgatgttcgctcaacgcgcc

SEQ ID NO: 120207 - DNA, 30 bp, Artificial Sequence
  Synthetic oligonucleotide
tctgggaaaatgctaaacctggctcgcgcc

SEQ ID NO: 120208 - DNA, 30 bp, Artificial Sequence
  Synthetic oligonucleotide
acaaacagtagggaggcacagaccatcgcc

SEQ ID NO: 120209 - DNA, 30 bp, Artificial Sequence
  Synthetic oligonucleotide
tcaggaaaatgcgattcttaacccatcgcc

SEQ ID NO: 120210 - DNA, 30 bp, Artificial Sequence
  Synthetic oligonucleotide
acatcgagcaaactagtttgccaactcgcc

SEQ ID NO: 120211 - DNA, 30 bp, Artificial Sequence
  Synthetic oligonucleotide
ggtacataaccggacctactccacctcgcc

SEQ ID NO: 120212 - DNA, 30 bp, Artificial Sequence
  Synthetic oligonucleotide
gataggtgtctcgctgccgattacaaggcc

SEQ ID NO: 120213 - DNA, 30 bp, Artificial Sequence
  Synthetic oligonucleotide
gagatacgtcgactaactagtaataaggcc

SEQ ID NO: 120214 - DNA, 30 bp, Artificial Sequence
  Synthetic oligonucleotide
cgtcgtcaccaaaactgggccggacaggcc

SEQ ID NO: 120215 - DNA, 30 bp, Artificial Sequence
  Synthetic oligonucleotide
ccctcacaggtgaaaaatgtcatcgaggcc

SEQ ID NO: 120216 - DNA, 30 bp, Artificial Sequence
  Synthetic oligonucleotide
aataagagtacaggatgtgaccgggaggcc

SEQ ID NO: 120217 - DNA, 31 bp, Artificial Sequence
  Synthetic oligonucleotide
acgaactttgaccaaagatatgcatacggcc

SEQ ID NO: 120218 - DNA, 30 bp, Artificial Sequence
  Synthetic oligonucleotide
caagtgcagcctgtgatcgcgattacggcc

SEQ ID NO: 120219 - DNA, 30 bp, Artificial Sequence
  Synthetic oligonucleotide
gagaacatctcgtaaaggatatccccggcc

SEQ ID NO: 120220 - DNA, 30 bp, Artificial Sequence
  Synthetic oligonucleotide
aacgatttccgtcagcttgtatagccggcc

SEQ ID NO: 120221 - DNA, 30 bp, Artificial Sequence
  Synthetic oligonucleotide
gcgcaactcgcgccagagcatgggccggcc

SEQ ID NO: 120222 - DNA, 30 bp, Artificial Sequence
  Synthetic oligonucleotide
tattaggcatggtgaaatgcatgagcggcc

SEQ ID NO: 120223 - DNA, 30 bp, Artificial Sequence
  Synthetic oligonucleotide
cacttgctcgtgtacataataagcgcggcc

SEQ ID NO: 120224 - DNA, 30 bp, Artificial Sequence
  Synthetic oligonucleotide
cggtacgataacaagattcccgtggcggcc

SEQ ID NO: 120225 - DNA, 30 bp, Artificial Sequence
  Synthetic oligonucleotide
caatacctggttcgagagcggggctcggcc

SEQ ID NO: 120226 - DNA, 30 bp, Artificial Sequence
  Synthetic oligonucleotide
cagcaactggaggataacatatcaagggcc

SEQ ID NO: 120227 - DNA, 30 bp, Artificial Sequence
  Synthetic oligonucleotide
ggtgcaacggaaagcgcgtaggcgagggcc

SEQ ID NO: 120228 - DNA, 30 bp, Artificial Sequence
  Synthetic oligonucleotide
atatgcataagcgtagcaattccgcgggcc

SEQ ID NO: 120229 - DNA, 30 bp, Artificial Sequence
  Synthetic oligonucleotide
atctccgaaggaaacatactgatgcgggcc

SEQ ID NO: 120230 - DNA, 30 bp, Artificial Sequence
  Synthetic oligonucleotide
aaggttacgtgatgtacgatgcatcgggcc

SEQ ID NO: 120231 - DNA, 30 bp, Artificial Sequence
  Synthetic oligonucleotide
ttaagaaagagatcgttcaacgtaggggcc

SEQ ID NO: 120232 - DNA, 30 bp, Artificial Sequence
  Synthetic oligonucleotide
tacacagtgtgacagagacgttggtgggcc

SEQ ID NO: 120233 - DNA, 30 bp, Artificial Sequence
  Synthetic oligonucleotide
ggatatggggaagctaccaaaagttgggcc

SEQ ID NO: 120234 - DNA, 29 bp, Artificial Sequence
  Synthetic oligonucleotide
tcgaccggccggtaaaagtaaggatggcc

SEQ ID NO: 120235 - DNA, 29 bp, Artificial Sequence
  Synthetic oligonucleotide
aggaaggcatattgcgatttacagtggcc

SEQ ID NO: 120236 - DNA, 30 bp, Artificial Sequence
  Synthetic oligonucleotide
cagggggaactcaagttttgtagcttggcc

SEQ ID NO: 120237 - DNA, 30 bp, Artificial Sequence
  Synthetic oligonucleotide
aaggaaagagagacgtacgtcgttttggcc

SEQ ID NO: 120238 - DNA, 30 bp, Artificial Sequence
  Synthetic oligonucleotide
gttgtacaggtaaaataagttaggaatgcc

SEQ ID NO: 120239 - DNA, 30 bp, Artificial Sequence
  Synthetic oligonucleotide
gctgtggtaaaaaagcatcacgtacatgcc

SEQ ID NO: 120240 - DNA, 30 bp, Artificial Sequence
  Synthetic oligonucleotide
caaaggctccgtcactgattaaagcatgcc

SEQ ID NO: 120241 - DNA, 30 bp, Artificial Sequence
  Synthetic oligonucleotide
cgggttacctagggtaaaaaaacatatgcc

SEQ ID NO: 120242 - DNA, 30 bp, Artificial Sequence
  Synthetic oligonucleotide
actgcacaccatacatataaaacatatgcc

SEQ ID NO: 120243 - DNA, 30 bp, Artificial Sequence
  Synthetic oligonucleotide
cgccgtttgcacatttccgtccactatgcc

SEQ ID NO: 120244 - DNA, 30 bp, Artificial Sequence
  Synthetic oligonucleotide
ctagcggtatgcacaaataactagactgcc

SEQ ID NO: 120245 - DNA, 30 bp, Artificial Sequence
  Synthetic oligonucleotide
gcgattcgtagtgtcgggaaaactcctgcc

SEQ ID NO: 120246 - DNA, 30 bp, Artificial Sequence
  Synthetic oligonucleotide
taacgtgagctgggcgaatgcaaggctgcc

SEQ ID NO: 120247 - DNA, 30 bp, Artificial Sequence
  Synthetic oligonucleotide
gacatagtgtacttagcaattggtgctgcc

SEQ ID NO: 120248 - DNA, 30 bp, Artificial Sequence
  Synthetic oligonucleotide
gtgagaccttttcaccctccaaccagtgcc

SEQ ID NO: 120249 - DNA, 30 bp, Artificial Sequence
  Synthetic oligonucleotide
aaggtgtcaagtggctggtacataggtgcc

SEQ ID NO: 120250 - DNA, 30 bp, Artificial Sequence
  Synthetic oligonucleotide
aatgtgcgtgagaatacccgattgtgtgcc

SEQ ID NO: 120251 - DNA, 30 bp, Artificial Sequence
  Synthetic oligonucleotide
ggtaggtaacctggcccatagttgtgtgcc

SEQ ID NO: 120252 - DNA, 30 bp, Artificial Sequence
  Synthetic oligonucleotide
agattaatcagtggtaaacgtcgttgtgcc

SEQ ID NO: 120253 - DNA, 30 bp, Artificial Sequence
  Synthetic oligonucleotide
tcacagcccgaggcctccagtctcattgcc

SEQ ID NO: 120254 - DNA, 30 bp, Artificial Sequence
  Synthetic oligonucleotide
ggtcctgtgtacagacagtacccacttgcc

SEQ ID NO: 120255 - DNA, 30 bp, Artificial Sequence
  Synthetic oligonucleotide
tggaaagggtaattatagaacatccttgcc

SEQ ID NO: 120256 - DNA, 30 bp, Artificial Sequence
  Synthetic oligonucleotide
cgccgattgagaactgatatgtcatttgcc

SEQ ID NO: 120257 - DNA, 30 bp, Artificial Sequence
  Synthetic oligonucleotide
tcttccaacagcccaggcgaggtaaaatcc

SEQ ID NO: 120258 - DNA, 30 bp, Artificial Sequence
  Synthetic oligonucleotide
aagggctccttgaaggcactataacaatcc

SEQ ID NO: 120259 - DNA, 30 bp, Artificial Sequence
  Synthetic oligonucleotide
gatatcggcttgaatactatgagacaatcc

SEQ ID NO: 120260 - DNA, 30 bp, Artificial Sequence
  Synthetic oligonucleotide
accagacaggctagtaatagttaccaatcc

SEQ ID NO: 120261 - DNA, 30 bp, Artificial Sequence
  Synthetic oligonucleotide
agaacccaagttccaaggaacggtcaatcc

SEQ ID NO: 120262 - DNA, 30 bp, Artificial Sequence
  Synthetic oligonucleotide
caaggtcacacttgcgaagtggcagaatcc

SEQ ID NO: 120263 - DNA, 30 bp, Artificial Sequence
  Synthetic oligonucleotide
acttacaaccgtacacaaatctgaccatcc

SEQ ID NO: 120264 - DNA, 30 bp, Artificial Sequence
  Synthetic oligonucleotide
ctgggcataaactacacccggctaccatcc

SEQ ID NO: 120265 - DNA, 30 bp, Artificial Sequence
  Synthetic oligonucleotide
tggacagagtatcacggggaatatccatcc

SEQ ID NO: 120266 - DNA, 30 bp, Artificial Sequence
  Synthetic oligonucleotide
tacgttaagagacgactgtcatgtccatcc

SEQ ID NO: 120267 - DNA, 30 bp, Artificial Sequence
  Synthetic oligonucleotide
aaactgggaacgacaagaacggcgtcatcc

SEQ ID NO: 120268 - DNA, 30 bp, Artificial Sequence
  Synthetic oligonucleotide
gcgttagctcattaggatacaatcagatcc

SEQ ID NO: 120269 - DNA, 30 bp, Artificial Sequence
  Synthetic oligonucleotide
ccgttaaactctccaatctcgaagagatcc

SEQ ID NO: 120270 - DNA, 30 bp, Artificial Sequence
  Synthetic oligonucleotide
aggttaacgtaggcaagttgatgacgatcc

SEQ ID NO: 120271 - DNA, 30 bp, Artificial Sequence
  Synthetic oligonucleotide
tagtcccgctagggtcgaagtatacgatcc

SEQ ID NO: 120272 - DNA, 30 bp, Artificial Sequence
  Synthetic oligonucleotide
atatcgtggttggaagtttcggcatgatcc

SEQ ID NO: 120273 - DNA, 30 bp, Artificial Sequence
  Synthetic oligonucleotide
agaattcgaactgacgggtgaggctgatcc

SEQ ID NO: 120274 - DNA, 30 bp, Artificial Sequence
  Synthetic oligonucleotide
cggctgcggtcaaaggtcttatcgtgatcc

SEQ ID NO: 120275 - DNA, 30 bp, Artificial Sequence
  Synthetic oligonucleotide
tcggtcacagcacacctctgcatgtgatcc

SEQ ID NO: 120276 - DNA, 31 bp, Artificial Sequence
  Synthetic oligonucleotide
cgacagcgcccgcaatcacaacaaaatatcc

SEQ ID NO: 120277 - DNA, 30 bp, Artificial Sequence
  Synthetic oligonucleotide
gccgtctgaataggggagcgacaaatatcc

SEQ ID NO: 120278 - DNA, 30 bp, Artificial Sequence
  Synthetic oligonucleotide
tcgtcccactcaaagacgtaagggatatcc

SEQ ID NO: 120279 - DNA, 30 bp, Artificial Sequence
  Synthetic oligonucleotide
gcgagcgatggattagtaacacacctatcc

SEQ ID NO: 120280 - DNA, 30 bp, Artificial Sequence
  Synthetic oligonucleotide
cgagacccgcggtatcaagtaagattatcc

SEQ ID NO: 120281 - DNA, 30 bp, Artificial Sequence
  Synthetic oligonucleotide
cgttccacctactaatcggtacctttatcc

SEQ ID NO: 120282 - DNA, 30 bp, Artificial Sequence
  Synthetic oligonucleotide
actataagacaggatgtaaatagcaactcc

SEQ ID NO: 120283 - DNA, 30 bp, Artificial Sequence
  Synthetic oligonucleotide
gatcgagccacagggcgagtatcgaactcc

SEQ ID NO: 120284 - DNA, 30 bp, Artificial Sequence
  Synthetic oligonucleotide
acattgtgccacaagctctagaataactcc

SEQ ID NO: 120285 - DNA, 30 bp, Artificial Sequence
  Synthetic oligonucleotide
acctgtaccattcagggttagagccactcc

SEQ ID NO: 120286 - DNA, 30 bp, Artificial Sequence
  Synthetic oligonucleotide
atctaagtcagggatattctttacgactcc

SEQ ID NO: 120287 - DNA, 30 bp, Artificial Sequence
  Synthetic oligonucleotide
gtaccgaaagttgagggtccacactactcc

SEQ ID NO: 120288 - DNA, 30 bp, Artificial Sequence
  Synthetic oligonucleotide
gaccttcaaacggaatcgacggattactcc

SEQ ID NO: 120289 - DNA, 30 bp, Artificial Sequence
  Synthetic oligonucleotide
ccaggcggtggcgggaaacaccacacctcc

SEQ ID NO: 120290 - DNA, 30 bp, Artificial Sequence
  Synthetic oligonucleotide
tgtaagactaacgagaattgaacgacctcc

SEQ ID NO: 120291 - DNA, 30 bp, Artificial Sequence
  Synthetic oligonucleotide
gggatgatcggtgtgccacaccatacctcc

SEQ ID NO: 120292 - DNA, 30 bp, Artificial Sequence
  Synthetic oligonucleotide
gatgaaaattcctgggattagattacctcc

SEQ ID NO: 120293 - DNA, 30 bp, Artificial Sequence
  Synthetic oligonucleotide
aggccagtcgtaggattttgggtgccctcc

SEQ ID NO: 120294 - DNA, 30 bp, Artificial Sequence
  Synthetic oligonucleotide
catatagcctatggattaataagcgcctcc

SEQ ID NO: 120295 - DNA, 30 bp, Artificial Sequence
  Synthetic oligonucleotide
tgaactcttgtctatgtggagtgtgcctcc

SEQ ID NO: 120296 - DNA, 30 bp, Artificial Sequence
  Synthetic oligonucleotide
cagtgcgtatgtctgctgaatccttcctcc

SEQ ID NO: 120297 - DNA, 30 bp, Artificial Sequence
  Synthetic oligonucleotide
cgttacggaggttatcgcatggacggctcc

SEQ ID NO: 120298 - DNA, 30 bp, Artificial Sequence
  Synthetic oligonucleotide
ggcgactttcgtctccgggttaagggctcc

SEQ ID NO: 120299 - DNA, 30 bp, Artificial Sequence
  Synthetic oligonucleotide
ggagtcttgatcaggctaaagtatggctcc

SEQ ID NO: 120300 - DNA, 30 bp, Artificial Sequence
  Synthetic oligonucleotide
tattcgaaagaggtcacgtttgactgctcc

SEQ ID NO: 120301 - DNA, 30 bp, Artificial Sequence
  Synthetic oligonucleotide
cacacgcaatagcaccggcccaaactctcc

SEQ ID NO: 120302 - DNA, 30 bp, Artificial Sequence
  Synthetic oligonucleotide
ggtgaactggcggctatctatcgtctctcc

SEQ ID NO: 120303 - DNA, 30 bp, Artificial Sequence
  Synthetic oligonucleotide
tgtcagagctccataaggtcgtcagtctcc

SEQ ID NO: 120304 - DNA, 30 bp, Artificial Sequence
  Synthetic oligonucleotide
agtaatcgggatctttacaactgagtctcc

SEQ ID NO: 120305 - DNA, 30 bp, Artificial Sequence
  Synthetic oligonucleotide
atacccgcaacgtaacctggtgcggtctcc

SEQ ID NO: 120306 - DNA, 30 bp, Artificial Sequence
  Synthetic oligonucleotide
ggggctgtgtttacgagcaactaaaagtcc

SEQ ID NO: 120307 - DNA, 30 bp, Artificial Sequence
  Synthetic oligonucleotide
gagacgtagtacaaaccaggagtaaagtcc

SEQ ID NO: 120308 - DNA, 30 bp, Artificial Sequence
  Synthetic oligonucleotide
cgtgattgaacgtggaaccaggaggagtcc

SEQ ID NO: 120309 - DNA, 30 bp, Artificial Sequence
  Synthetic oligonucleotide
gactcatgaaccatggataaatcatagtcc

SEQ ID NO: 120310 - DNA, 30 bp, Artificial Sequence
  Synthetic oligonucleotide
tataaaggccgagggtcgcagggttagtcc

SEQ ID NO: 120311 - DNA, 30 bp, Artificial Sequence
  Synthetic oligonucleotide
catacacaggtagtatagcagactacgtcc

SEQ ID NO: 120312 - DNA, 30 bp, Artificial Sequence
  Synthetic oligonucleotide
ctaggcaggatcctttacacatctacgtcc

SEQ ID NO: 120313 - DNA, 30 bp, Artificial Sequence
  Synthetic oligonucleotide
gtaatatacatctcgtctaactcaccgtcc

SEQ ID NO: 120314 - DNA, 30 bp, Artificial Sequence
  Synthetic oligonucleotide
aggggggttcaaagcattgcagccgcgtcc

SEQ ID NO: 120315 - DNA, 30 bp, Artificial Sequence
  Synthetic oligonucleotide
ttcaggtgcgtttcgtatccagcggcgtcc

SEQ ID NO: 120316 - DNA, 30 bp, Artificial Sequence
  Synthetic oligonucleotide
ctccccagaacaaatgttgcaaatgcgtcc

SEQ ID NO: 120317 - DNA, 30 bp, Artificial Sequence
  Synthetic oligonucleotide
agtacctaaaaacaaaggccagcatcgtcc

SEQ ID NO: 120318 - DNA, 30 bp, Artificial Sequence
  Synthetic oligonucleotide
ggaaaggcgtctgaacggtgcgattcgtcc

SEQ ID NO: 120319 - DNA, 30 bp, Artificial Sequence
  Synthetic oligonucleotide
ccgtagatattatcgtattcgaacaggtcc

SEQ ID NO: 120320 - DNA, 30 bp, Artificial Sequence
  Synthetic oligonucleotide
cgaccaccggtcgacttggtgatgaggtcc

SEQ ID NO: 120321 - DNA, 30 bp, Artificial Sequence
  Synthetic oligonucleotide
aagcagcttgatggatgtggcacacggtcc

SEQ ID NO: 120322 - DNA, 30 bp, Artificial Sequence
  Synthetic oligonucleotide
accggtagtggggactggggatgccggtcc

SEQ ID NO: 120323 - DNA, 30 bp, Artificial Sequence
  Synthetic oligonucleotide
caacgtcatcggtcttgttttctagggtcc

SEQ ID NO: 120324 - DNA, 30 bp, Artificial Sequence
  Synthetic oligonucleotide
tacgaaactgctagaagacatttagggtcc

SEQ ID NO: 120325 - DNA, 30 bp, Artificial Sequence
  Synthetic oligonucleotide
tagacgaagagccaatagcccaaggggtcc

SEQ ID NO: 120326 - DNA, 30 bp, Artificial Sequence
  Synthetic oligonucleotide
ttggtcgttagagcgcatgagacgtggtcc

SEQ ID NO: 120327 - DNA, 30 bp, Artificial Sequence
  Synthetic oligonucleotide
aggccggcgtgtagcgcatataattggtcc

SEQ ID NO: 120328 - DNA, 30 bp, Artificial Sequence
  Synthetic oligonucleotide
tcctgcatgatagaatgcgagttaatgtcc

SEQ ID NO: 120329 - DNA, 30 bp, Artificial Sequence
  Synthetic oligonucleotide
cgttcgagtaccaatgttattgtcatgtcc

SEQ ID NO: 120330 - DNA, 30 bp, Artificial Sequence
  Synthetic oligonucleotide
cgcgtaacagaggagagcgtatctatgtcc

SEQ ID NO: 120331 - DNA, 30 bp, Artificial Sequence
  Synthetic oligonucleotide
aagggataagtttgcataatctgactgtcc

SEQ ID NO: 120332 - DNA, 30 bp, Artificial Sequence
  Synthetic oligonucleotide
tccagagccgcaaaaataataagcctgtcc

SEQ ID NO: 120333 - DNA, 30 bp, Artificial Sequence
  Synthetic oligonucleotide
cccagtgcgatcgaacgggcatccaattcc

SEQ ID NO: 120334 - DNA, 30 bp, Artificial Sequence
  Synthetic oligonucleotide
acggtcctgttctgcgactacgtgaattcc

SEQ ID NO: 120335 - DNA, 30 bp, Artificial Sequence
  Synthetic oligonucleotide
ggaagctcgtagggtggcaacagccattcc

SEQ ID NO: 120336 - DNA, 30 bp, Artificial Sequence
  Synthetic oligonucleotide
ataatagacgtataaccccattatcattcc

SEQ ID NO: 120337 - DNA, 30 bp, Artificial Sequence
  Synthetic oligonucleotide
cgaccagtacgttagggcatcgttgattcc

SEQ ID NO: 120338 - DNA, 30 bp, Artificial Sequence
  Synthetic oligonucleotide
ggaaaaacgcgataacatttgtcatattcc

SEQ ID NO: 120339 - DNA, 30 bp, Artificial Sequence
  Synthetic oligonucleotide
aatcatgggtacgtcagataagcgtattcc

SEQ ID NO: 120340 - DNA, 30 bp, Artificial Sequence
  Synthetic oligonucleotide
caggtgaaaaaggaagctgtagtgtattcc

SEQ ID NO: 120341 - DNA, 30 bp, Artificial Sequence
  Synthetic oligonucleotide
cgcgttcgttacgaccagggcaatacttcc

SEQ ID NO: 120342 - DNA, 30 bp, Artificial Sequence
  Synthetic oligonucleotide
cggcacaaaactctgcggtacatcccttcc

SEQ ID NO: 120343 - DNA, 30 bp, Artificial Sequence
  Synthetic oligonucleotide
agacgtacccttatacaaaatagggcttcc

SEQ ID NO: 120344 - DNA, 30 bp, Artificial Sequence
  Synthetic oligonucleotide
tctttatgatggggtagacgaatgagttcc

SEQ ID NO: 120345 - DNA, 30 bp, Artificial Sequence
  Synthetic oligonucleotide
aaggacagtgatccaccgaattcacgttcc

SEQ ID NO: 120346 - DNA, 30 bp, Artificial Sequence
  Synthetic oligonucleotide
ggcgaggagctgtagtctgtaaattgttcc

SEQ ID NO: 120347 - DNA, 30 bp, Artificial Sequence
  Synthetic oligonucleotide
gatgcaaatcgatagagccagtcttgttcc

SEQ ID NO: 120348 - DNA, 30 bp, Artificial Sequence
  Synthetic oligonucleotide
tcaggacgtgtgcaacagttgctcatttcc

SEQ ID NO: 120349 - DNA, 30 bp, Artificial Sequence
  Synthetic oligonucleotide
tcgaacatagggactgccaaagtcatttcc

SEQ ID NO: 120350 - DNA, 30 bp, Artificial Sequence
  Synthetic oligonucleotide
cccgatcaagaccaccacaaacgtctttcc

SEQ ID NO: 120351 - DNA, 30 bp, Artificial Sequence
  Synthetic oligonucleotide
actaaaatagcacggcacacgccacaaagc

SEQ ID NO: 120352 - DNA, 30 bp, Artificial Sequence
  Synthetic oligonucleotide
tccaaacagcgtagcatctgggaccaaagc

SEQ ID NO: 120353 - DNA, 30 bp, Artificial Sequence
  Synthetic oligonucleotide
attggcgaacctacgagggctcctcaaagc

SEQ ID NO: 120354 - DNA, 30 bp, Artificial Sequence
  Synthetic oligonucleotide
cttggataaagtctgtgcaatacataaagc

SEQ ID NO: 120355 - DNA, 30 bp, Artificial Sequence
  Synthetic oligonucleotide
ccgggctcgtaaatcaaaccctcataaagc

SEQ ID NO: 120356 - DNA, 30 bp, Artificial Sequence
  Synthetic oligonucleotide
agaccagatgactttaaatcgtcgtaaagc

SEQ ID NO: 120357 - DNA, 30 bp, Artificial Sequence
  Synthetic oligonucleotide
cgatgctagttaaacattgtaccaacaagc

SEQ ID NO: 120358 - DNA, 30 bp, Artificial Sequence
  Synthetic oligonucleotide
gacggtatgaccgcctaaacgagaacaagc

SEQ ID NO: 120359 - DNA, 30 bp, Artificial Sequence
  Synthetic oligonucleotide
tgtccagggaccctgatcggagtcacaagc

SEQ ID NO: 120360 - DNA, 30 bp, Artificial Sequence
  Synthetic oligonucleotide
tctgcaaaggcgtccatctcacgtacaagc

SEQ ID NO: 120361 - DNA, 30 bp, Artificial Sequence
  Synthetic oligonucleotide
gccaaacatgggatcggacaataagcaagc

SEQ ID NO: 120362 - DNA, 30 bp, Artificial Sequence
  Synthetic oligonucleotide
gaaaaataaagaaataacccagcagcaagc

SEQ ID NO: 120363 - DNA, 30 bp, Artificial Sequence
  Synthetic oligonucleotide
ccattacgtagctcgaatagtagggcaagc

SEQ ID NO: 120364 - DNA, 30 bp, Artificial Sequence
  Synthetic oligonucleotide
cgagaccggattttacccggagattcaagc

SEQ ID NO: 120365 - DNA, 30 bp, Artificial Sequence
  Synthetic oligonucleotide
ggaagaggagccgtgacctctgattcaagc

SEQ ID NO: 120366 - DNA, 30 bp, Artificial Sequence
  Synthetic oligonucleotide
actggaaggtcgttgttgtgcaggagaagc

SEQ ID NO: 120367 - DNA, 30 bp, Artificial Sequence
  Synthetic oligonucleotide
agcgcaccgcgttcggcacgagatagaagc

SEQ ID NO: 120368 - DNA, 30 bp, Artificial Sequence
  Synthetic oligonucleotide
cagttcccgccgatcaaagaaactagaagc

SEQ ID NO: 120369 - DNA, 30 bp, Artificial Sequence
  Synthetic oligonucleotide
tgggcaccacgtaaaagcatacttagaagc

SEQ ID NO: 120370 - DNA, 30 bp, Artificial Sequence
  Synthetic oligonucleotide
tcgccacgacgggctagaaataaaggaagc

SEQ ID NO: 120371 - DNA, 30 bp, Artificial Sequence
  Synthetic oligonucleotide
aaatgtggaggaagcgcgctacgaggaagc

SEQ ID NO: 120372 - DNA, 30 bp, Artificial Sequence
  Synthetic oligonucleotide
aaggtaaagagtatcttctgtggtggaagc

SEQ ID NO: 120373 - DNA, 30 bp, Artificial Sequence
  Synthetic oligonucleotide
catcaccccgtaaagacagcaagatgaagc

SEQ ID NO: 120374 - DNA, 30 bp, Artificial Sequence
  Synthetic oligonucleotide
agtcaaaaaaacgtacatttagtatgaagc

SEQ ID NO: 120375 - DNA, 30 bp, Artificial Sequence
  Synthetic oligonucleotide
tgcggttcccaaggtaacggcaaaataagc

SEQ ID NO: 120376 - DNA, 30 bp, Artificial Sequence
  Synthetic oligonucleotide
ggtacaccgtattagcatagcctgataagc

SEQ ID NO: 120377 - DNA, 30 bp, Artificial Sequence
  Synthetic oligonucleotide
gttaagcgtctgagggacgtagatataagc

SEQ ID NO: 120378 - DNA, 30 bp, Artificial Sequence
  Synthetic oligonucleotide
ccaaacaaaatcatcgcaaattatataagc

SEQ ID NO: 120379 - DNA, 30 bp, Artificial Sequence
  Synthetic oligonucleotide
gagcaaagtctaagtggagtagaactaagc

SEQ ID NO: 120380 - DNA, 30 bp, Artificial Sequence
  Synthetic oligonucleotide
gaccggctgaggacagaaccgagcctaagc

SEQ ID NO: 120381 - DNA, 30 bp, Artificial Sequence
  Synthetic oligonucleotide
gaatgccgtgggaaacctccggagctaagc

SEQ ID NO: 120382 - DNA, 30 bp, Artificial Sequence
  Synthetic oligonucleotide
gtgagagactgctagagccgcttagtaagc

SEQ ID NO: 120383 - DNA, 30 bp, Artificial Sequence
  Synthetic oligonucleotide
taaatgtgagagaaataaagatccgtaagc

SEQ ID NO: 120384 - DNA, 30 bp, Artificial Sequence
  Synthetic oligonucleotide
aaaggcgtctccacaaggtaggaggtaagc

SEQ ID NO: 120385 - DNA, 30 bp, Artificial Sequence
  Synthetic oligonucleotide
tatatcggcaaggtctgaagtacggtaagc

SEQ ID NO: 120386 - DNA, 30 bp, Artificial Sequence
  Synthetic oligonucleotide
gtgatctggtagactagggtaagggtaagc

SEQ ID NO: 120387 - DNA, 30 bp, Artificial Sequence
  Synthetic oligonucleotide
gaatgtcaggttctcaacagcggggtaagc

SEQ ID NO: 120388 - DNA, 30 bp, Artificial Sequence
  Synthetic oligonucleotide
gtaaactatagggacgtcggaaatgtaagc

SEQ ID NO: 120389 - DNA, 30 bp, Artificial Sequence
  Synthetic oligonucleotide
acggaccggcagtgcctaacggctgtaagc

SEQ ID NO: 120390 - DNA, 30 bp, Artificial Sequence
  Synthetic oligonucleotide
cctggacgacatggccaattaatcttaagc

SEQ ID NO: 120391 - DNA, 30 bp, Artificial Sequence
  Synthetic oligonucleotide
tagattccagagcgccaatggaggttaagc

SEQ ID NO: 120392 - DNA, 30 bp, Artificial Sequence
  Synthetic oligonucleotide
caggagtctgcgcgtggtggttgaaacagc

SEQ ID NO: 120393 - DNA, 30 bp, Artificial Sequence
  Synthetic oligonucleotide
acttagtagaaatgcgaattagtaaacagc

SEQ ID NO: 120394 - DNA, 30 bp, Artificial Sequence
  Synthetic oligonucleotide
tcacaatgcaccgtgattaactcgcacagc

SEQ ID NO: 120395 - DNA, 30 bp, Artificial Sequence
  Synthetic oligonucleotide
acaggtacaccttgatcccgaaggcacagc

SEQ ID NO: 120396 - DNA, 30 bp, Artificial Sequence
  Synthetic oligonucleotide
atagaagagcactcccaggcacgcgacagc

SEQ ID NO: 120397 - DNA, 30 bp, Artificial Sequence
  Synthetic oligonucleotide
ggatggtcaaacgggttcaaatgggacagc

SEQ ID NO: 120398 - DNA, 30 bp, Artificial Sequence
  Synthetic oligonucleotide
atgtccttccctccagcagatgatgacagc

SEQ ID NO: 120399 - DNA, 30 bp, Artificial Sequence
  Synthetic oligonucleotide
aatggaccgggattggcaaggaaatacagc

SEQ ID NO: 120400 - DNA, 30 bp, Artificial Sequence
  Synthetic oligonucleotide
ctgtgtagctagatgataatgagatacagc

SEQ ID NO: 120401 - DNA, 30 bp, Artificial Sequence
  Synthetic oligonucleotide
gtctgagggcatgatattgtgcgttacagc

SEQ ID NO: 120402 - DNA, 30 bp, Artificial Sequence
  Synthetic oligonucleotide
actccaaacgacggctctaaatgttacagc

SEQ ID NO: 120403 - DNA, 31 bp, Artificial Sequence
  Synthetic oligonucleotide
gagaacggcgcaaaatttttaaaagaccagc

SEQ ID NO: 120404 - DNA, 30 bp, Artificial Sequence
  Synthetic oligonucleotide
accagggactgatcgacaggcctgaccagc

SEQ ID NO: 120405 - DNA, 30 bp, Artificial Sequence
  Synthetic oligonucleotide
ggacaattacgaatgcagttggtgaccagc

SEQ ID NO: 120406 - DNA, 30 bp, Artificial Sequence
  Synthetic oligonucleotide
gcggtcgggccttctcgtaggaaacccagc

SEQ ID NO: 120407 - DNA, 30 bp, Artificial Sequence
  Synthetic oligonucleotide
cgttgtagtccttcaaggagatacgccagc

SEQ ID NO: 120408 - DNA, 30 bp, Artificial Sequence
  Synthetic oligonucleotide
atggggattgtacagaggaaatgtgccagc

SEQ ID NO: 120409 - DNA, 30 bp, Artificial Sequence
  Synthetic oligonucleotide
gtatacggctgaaaaatcgattggtccagc

SEQ ID NO: 120410 - DNA, 30 bp, Artificial Sequence
  Synthetic oligonucleotide
gatcagtcagggaagcggtaccattccagc

SEQ ID NO: 120411 - DNA, 30 bp, Artificial Sequence
  Synthetic oligonucleotide
catagatcaaatgatcgttgtcaccgcagc

SEQ ID NO: 120412 - DNA, 30 bp, Artificial Sequence
  Synthetic oligonucleotide
agacaatttttactccatggctagcgcagc

SEQ ID NO: 120413 - DNA, 30 bp, Artificial Sequence
  Synthetic oligonucleotide
gggccatgcaatcggagcccgcaaggcagc

SEQ ID NO: 120414 - DNA, 30 bp, Artificial Sequence
  Synthetic oligonucleotide
gaggctgaactgaatgtgcctcagggcagc

SEQ ID NO: 120415 - DNA, 30 bp, Artificial Sequence
  Synthetic oligonucleotide
tctacgcatacggtcatgggagaatgcagc

SEQ ID NO: 120416 - DNA, 30 bp, Artificial Sequence
  Synthetic oligonucleotide
cacgagttatgcttcgttgagcgtatcagc

SEQ ID NO: 120417 - DNA, 30 bp, Artificial Sequence
  Synthetic oligonucleotide
tcgcattaaaacgggggagtacatgtcagc

SEQ ID NO: 120418 - DNA, 30 bp, Artificial Sequence
  Synthetic oligonucleotide
tgttagctacattggtcaagggcattcagc

SEQ ID NO: 120419 - DNA, 30 bp, Artificial Sequence
  Synthetic oligonucleotide
accttggtattatgggcgcctagcttcagc

SEQ ID NO: 120420 - DNA, 29 bp, Artificial Sequence
  Synthetic oligonucleotide
tggatggaactctgcatatccctttcagc

SEQ ID NO: 120421 - DNA, 30 bp, Artificial Sequence
  Synthetic oligonucleotide
actaacgcgtggggacggcacctaaagagc

SEQ ID NO: 120422 - DNA, 30 bp, Artificial Sequence
  Synthetic oligonucleotide
taaaagggatcttgagatgcgcacaagagc

SEQ ID NO: 120423 - DNA, 30 bp, Artificial Sequence
  Synthetic oligonucleotide
gaggtatatgtgcacattcagacgaagagc

SEQ ID NO: 120424 - DNA, 30 bp, Artificial Sequence
  Synthetic oligonucleotide
caccacggtgaggaacaagctcggaagagc

SEQ ID NO: 120425 - DNA, 30 bp, Artificial Sequence
  Synthetic oligonucleotide
tccaacgacaattaaatcggttggaagagc

SEQ ID NO: 120426 - DNA, 30 bp, Artificial Sequence
  Synthetic oligonucleotide
cctcggagtgaatggctaagtcaacagagc

SEQ ID NO: 120427 - DNA, 30 bp, Artificial Sequence
  Synthetic oligonucleotide
ataagtaacgcgatcggttaggaacagagc

SEQ ID NO: 120428 - DNA, 30 bp, Artificial Sequence
  Synthetic oligonucleotide
cgtgggatacaggtaactagttgtcagagc

SEQ ID NO: 120429 - DNA, 30 bp, Artificial Sequence
  Synthetic oligonucleotide
gatacaagacgactcaagttgcttcagagc

SEQ ID NO: 120430 - DNA, 30 bp, Artificial Sequence
  Synthetic oligonucleotide
ttaacccgttagtcacccattgttcagagc

SEQ ID NO: 120431 - DNA, 30 bp, Artificial Sequence
  Synthetic oligonucleotide
ccggctcggctttaatgaggtccagagagc

SEQ ID NO: 120432 - DNA, 30 bp, Artificial Sequence
  Synthetic oligonucleotide
gggctcgcaaaaactaaagcacccgagagc

SEQ ID NO: 120433 - DNA, 30 bp, Artificial Sequence
  Synthetic oligonucleotide
ggttgccgctcagagaactgcagggagagc

SEQ ID NO: 120434 - DNA, 30 bp, Artificial Sequence
  Synthetic oligonucleotide
tcaggcaaacccaccggctcgggctagagc

SEQ ID NO: 120435 - DNA, 30 bp, Artificial Sequence
  Synthetic oligonucleotide
gggagttcttcattggacaaattgtagagc

SEQ ID NO: 120436 - DNA, 30 bp, Artificial Sequence
  Synthetic oligonucleotide
cagccgaggagtgagactagtagtacgagc

SEQ ID NO: 120437 - DNA, 30 bp, Artificial Sequence
  Synthetic oligonucleotide
gggtgtgttagtcgaatacgagttacgagc

SEQ ID NO: 120438 - DNA, 30 bp, Artificial Sequence
  Synthetic oligonucleotide
atcactggtcgaaccacggggttaccgagc

SEQ ID NO: 120439 - DNA, 30 bp, Artificial Sequence
  Synthetic oligonucleotide
atctaacgtagtagtaaacattacccgagc

SEQ ID NO: 120440 - DNA, 30 bp, Artificial Sequence
  Synthetic oligonucleotide
aatgggacgtgtagggttttaaagccgagc

SEQ ID NO: 120441 - DNA, 30 bp, Artificial Sequence
  Synthetic oligonucleotide
tcgggaggggaagttgggtcgaccgcgagc

SEQ ID NO: 120442 - DNA, 30 bp, Artificial Sequence
  Synthetic oligonucleotide
gtgtatgctgacgagcaaacgagggcgagc

SEQ ID NO: 120443 - DNA, 30 bp, Artificial Sequence
  Synthetic oligonucleotide
gctacacactcctcctgcgtttcctcgagc

SEQ ID NO: 120444 - DNA, 30 bp, Artificial Sequence
  Synthetic oligonucleotide
ggaggtacaagtggggggagccgaaggagc

SEQ ID NO: 120445 - DNA, 30 bp, Artificial Sequence
  Synthetic oligonucleotide
ccatgcaaccgccagtggaggctcaggagc

SEQ ID NO: 120446 - DNA, 30 bp, Artificial Sequence
  Synthetic oligonucleotide
ataaataacaaaactataagtatgaggagc

SEQ ID NO: 120447 - DNA, 30 bp, Artificial Sequence
  Synthetic oligonucleotide
attccttcaacacatcacatcatacggagc

SEQ ID NO: 120448 - DNA, 30 bp, Artificial Sequence
  Synthetic oligonucleotide
agaagtatggggcttacatatcgccggagc

SEQ ID NO: 120449 - DNA, 30 bp, Artificial Sequence
  Synthetic oligonucleotide
tggcgagaagatgcgaccgcgatgcggagc

SEQ ID NO: 120450 - DNA, 30 bp, Artificial Sequence
  Synthetic oligonucleotide
agtgttacgaatcaggtcactaatgggagc

SEQ ID NO: 120451 - DNA, 30 bp, Artificial Sequence
  Synthetic oligonucleotide
gacggaagtgccctctagttctctgggagc

SEQ ID NO: 120452 - DNA, 30 bp, Artificial Sequence
  Synthetic oligonucleotide
tacattgggttccatcacggtgaatggagc

SEQ ID NO: 120453 - DNA, 30 bp, Artificial Sequence
  Synthetic oligonucleotide
tgtggatcacaaattgccagtgactggagc

SEQ ID NO: 120454 - DNA, 30 bp, Artificial Sequence
  Synthetic oligonucleotide
ggaatgtgggtccccacctacgggtggagc

SEQ ID NO: 120455 - DNA, 30 bp, Artificial Sequence
  Synthetic oligonucleotide
aaacaaagcccgaaactgtacaattggagc

SEQ ID NO: 120456 - DNA, 30 bp, Artificial Sequence
  Synthetic oligonucleotide
cgctccatgcagggcataacgctttggagc

SEQ ID NO: 120457 - DNA, 30 bp, Artificial Sequence
  Synthetic oligonucleotide
gcgcgtgtacagcggttgaccggtatgagc

SEQ ID NO: 120458 - DNA, 30 bp, Artificial Sequence
  Synthetic oligonucleotide
tccacgtgggtgctggtattacgactgagc

SEQ ID NO: 120459 - DNA, 30 bp, Artificial Sequence
  Synthetic oligonucleotide
gcaacctacgttcagccgaaaaagctgagc

SEQ ID NO: 120460 - DNA, 30 bp, Artificial Sequence
  Synthetic oligonucleotide
ataacataaaggtcatgtactccattgagc

SEQ ID NO: 120461 - DNA, 30 bp, Artificial Sequence
  Synthetic oligonucleotide
ctctccaggtccgttaccagtgacttgagc

SEQ ID NO: 120462 - DNA, 30 bp, Artificial Sequence
  Synthetic oligonucleotide
gcagtacggctgcaatgtgtacgaaatagc

SEQ ID NO: 120463 - DNA, 30 bp, Artificial Sequence
  Synthetic oligonucleotide
agggcatcggccggcaaggataagaatagc

SEQ ID NO: 120464 - DNA, 30 bp, Artificial Sequence
  Synthetic oligonucleotide
cgtgaacccgagggccgagtcaataatagc

SEQ ID NO: 120465 - DNA, 30 bp, Artificial Sequence
  Synthetic oligonucleotide
aattagcgattacgatggcagtgacatagc

SEQ ID NO: 120466 - DNA, 30 bp, Artificial Sequence
  Synthetic oligonucleotide
ccgagggccctagggtgtacccgtcatagc

SEQ ID NO: 120467 - DNA, 30 bp, Artificial Sequence
  Synthetic oligonucleotide
gcgtcggggattttcgtgtgtaaagatagc

SEQ ID NO: 120468 - DNA, 30 bp, Artificial Sequence
  Synthetic oligonucleotide
tcgaggatcagttaacgcacatgagatagc

SEQ ID NO: 120469 - DNA, 30 bp, Artificial Sequence
  Synthetic oligonucleotide
tagcaatccgaggtaactgtatccgatagc

SEQ ID NO: 120470 - DNA, 30 bp, Artificial Sequence
  Synthetic oligonucleotide
ggggatactcgtaactcaatgtaggatagc

SEQ ID NO: 120471 - DNA, 30 bp, Artificial Sequence
  Synthetic oligonucleotide
ggtacacaacaagtaaagactgtggatagc

SEQ ID NO: 120472 - DNA, 30 bp, Artificial Sequence
  Synthetic oligonucleotide
cgtaaaaggaatagcctagcgttttatagc

SEQ ID NO: 120473 - DNA, 30 bp, Artificial Sequence
  Synthetic oligonucleotide
gttcgagcaacgaatcctcatacaactagc

SEQ ID NO: 120474 - DNA, 30 bp, Artificial Sequence
  Synthetic oligonucleotide
ttgatggctacgccaaaataacttactagc

SEQ ID NO: 120475 - DNA, 30 bp, Artificial Sequence
  Synthetic oligonucleotide
gaattggcacactaaattatagaacctagc

SEQ ID NO: 120476 - DNA, 30 bp, Artificial Sequence
  Synthetic oligonucleotide
ctgtttactgcaccaaaggttcaagctagc

SEQ ID NO: 120477 - DNA, 30 bp, Artificial Sequence
  Synthetic oligonucleotide
cgacatccgacatctcgtttgggggctagc

SEQ ID NO: 120478 - DNA, 30 bp, Artificial Sequence
  Synthetic oligonucleotide
gtaatcacacctatccttactattgctagc

SEQ ID NO: 120479 - DNA, 30 bp, Artificial Sequence
  Synthetic oligonucleotide
tgcatgtagctggtcaggatacttgctagc

SEQ ID NO: 120480 - DNA, 30 bp, Artificial Sequence
  Synthetic oligonucleotide
tgatcagtgtgcattagacaggcatctagc

SEQ ID NO: 120481 - DNA, 30 bp, Artificial Sequence
  Synthetic oligonucleotide
tagtatagcgttcacgtaaaactaagtagc

SEQ ID NO: 120482 - DNA, 30 bp, Artificial Sequence
  Synthetic oligonucleotide
cgggacatgaaagtggtttgacacagtagc

SEQ ID NO: 120483 - DNA, 30 bp, Artificial Sequence
  Synthetic oligonucleotide
gctagattttaattaggtaagcaccgtagc

SEQ ID NO: 120484 - DNA, 30 bp, Artificial Sequence
  Synthetic oligonucleotide
cacccgggttgcagacctcataggcgtagc

SEQ ID NO: 120485 - DNA, 30 bp, Artificial Sequence
  Synthetic oligonucleotide
caacatccagtgtatggacaatgaggtagc

SEQ ID NO: 120486 - DNA, 30 bp, Artificial Sequence
  Synthetic oligonucleotide
caggccataatgccgattcatgatggtagc

SEQ ID NO: 120487 - DNA, 30 bp, Artificial Sequence
  Synthetic oligonucleotide
gtagtgtatagatgattggatcgtggtagc

SEQ ID NO: 120488 - DNA, 30 bp, Artificial Sequence
  Synthetic oligonucleotide
cagttaaagtagcctggtacgccatgtagc

SEQ ID NO: 120489 - DNA, 30 bp, Artificial Sequence
  Synthetic oligonucleotide
aattgccccagccataaatagtagtgtagc

SEQ ID NO: 120490 - DNA, 30 bp, Artificial Sequence
  Synthetic oligonucleotide
caccagttcaacccgcgtaaacaaattagc

SEQ ID NO: 120491 - DNA, 30 bp, Artificial Sequence
  Synthetic oligonucleotide
caccgggcttaggttgagatgtccattagc

SEQ ID NO: 120492 - DNA, 30 bp, Artificial Sequence
  Synthetic oligonucleotide
cgatacaggggtcattggtctgttattagc

SEQ ID NO: 120493 - DNA, 30 bp, Artificial Sequence
  Synthetic oligonucleotide
tcaatgagacaagggagtatggaccttagc

SEQ ID NO: 120494 - DNA, 30 bp, Artificial Sequence
  Synthetic oligonucleotide
tcaacctgattaagggacgatgagcttagc

SEQ ID NO: 120495 - DNA, 30 bp, Artificial Sequence
  Synthetic oligonucleotide
cgttgaatgcatgagtgaacgattcttagc

SEQ ID NO: 120496 - DNA, 30 bp, Artificial Sequence
  Synthetic oligonucleotide
ctgggaccggggaccatacacagatttagc

SEQ ID NO: 120497 - DNA, 30 bp, Artificial Sequence
  Synthetic oligonucleotide
cggtcatcgagtatgaacgagagcaaacgc

SEQ ID NO: 120498 - DNA, 30 bp, Artificial Sequence
  Synthetic oligonucleotide
tcggtgatgtgctacatgaaagcgaaacgc

SEQ ID NO: 120499 - DNA, 30 bp, Artificial Sequence
  Synthetic oligonucleotide
gattaaccacacgaagagtattaacaacgc

SEQ ID NO: 120500 - DNA, 30 bp, Artificial Sequence
  Synthetic oligonucleotide
ccctctggataacggagggccacgcaacgc

SEQ ID NO: 120501 - DNA, 30 bp, Artificial Sequence
  Synthetic oligonucleotide
ttaccgttagactgttcggagaaagaacgc

SEQ ID NO: 120502 - DNA, 30 bp, Artificial Sequence
  Synthetic oligonucleotide
cagtcggtcgttgataaatcgggagaacgc

SEQ ID NO: 120503 - DNA, 30 bp, Artificial Sequence
  Synthetic oligonucleotide
cgtgagttcaaggaagtcggctgggaacgc

SEQ ID NO: 120504 - DNA, 30 bp, Artificial Sequence
  Synthetic oligonucleotide
ttgcaccctggggatgaaggttaataacgc

SEQ ID NO: 120505 - DNA, 30 bp, Artificial Sequence
  Synthetic oligonucleotide
accctatagtcactagagtcaagataacgc

SEQ ID NO: 120506 - DNA, 40 bp, Artificial Sequence
  Synthetic oligonucleotide
agcttcattccctacttcattgatcacatccctataacgc

SEQ ID NO: 120507 - DNA, 30 bp, Artificial Sequence
  Synthetic oligonucleotide
ccatcagtgggcgacgtacaagtctaacgc

SEQ ID NO: 120508 - DNA, 30 bp, Artificial Sequence
  Synthetic oligonucleotide
ggtttaaggctacttgagatgtaaacacgc

SEQ ID NO: 120509 - DNA, 30 bp, Artificial Sequence
  Synthetic oligonucleotide
agtttagccagacaattttagataacacgc

SEQ ID NO: 120510 - DNA, 30 bp, Artificial Sequence
  Synthetic oligonucleotide
catggacacttaaaggtttaatgcacacgc

SEQ ID NO: 120511 - DNA, 30 bp, Artificial Sequence
  Synthetic oligonucleotide
tcttcaactgagaggagataactgacacgc

SEQ ID NO: 120512 - DNA, 30 bp, Artificial Sequence
  Synthetic oligonucleotide
aagtcaagttggggggaggatcacccacgc

SEQ ID NO: 120513 - DNA, 30 bp, Artificial Sequence
  Synthetic oligonucleotide
atccggcttgggggggaaataagcgcacgc

SEQ ID NO: 120514 - DNA, 30 bp, Artificial Sequence
  Synthetic oligonucleotide
aagggggtaattgataagttccgggcacgc

SEQ ID NO: 120515 - DNA, 30 bp, Artificial Sequence
  Synthetic oligonucleotide
cgtggcaataagaggaagattatatcacgc

SEQ ID NO: 120516 - DNA, 30 bp, Artificial Sequence
  Synthetic oligonucleotide
gaacagaatgccccggcaacgaagtcacgc

SEQ ID NO: 120517 - DNA, 30 bp, Artificial Sequence
  Synthetic oligonucleotide
agtagccacttgaggtaagaccgaatacgc

SEQ ID NO: 120518 - DNA, 30 bp, Artificial Sequence
  Synthetic oligonucleotide
acacaaatccaaaaatggccaaacatacgc

SEQ ID NO: 120519 - DNA, 30 bp, Artificial Sequence
  Synthetic oligonucleotide
ggctgcacgataagaggtcggcgtctacgc

SEQ ID NO: 120520 - DNA, 30 bp, Artificial Sequence
  Synthetic oligonucleotide
acgctttgagcggtgggttaggaagtacgc

SEQ ID NO: 120521 - DNA, 30 bp, Artificial Sequence
  Synthetic oligonucleotide
ggataagacccttgaagtcagacattacgc

SEQ ID NO: 120522 - DNA, 30 bp, Artificial Sequence
  Synthetic oligonucleotide
tcgtggaggaacttgcaaaagagcttacgc

SEQ ID NO: 120523 - DNA, 30 bp, Artificial Sequence
  Synthetic oligonucleotide
gtaatgagtacggtgatgataaagttacgc

SEQ ID NO: 120524 - DNA, 30 bp, Artificial Sequence
  Synthetic oligonucleotide
agacgtgggagagtggctcctctgaaccgc

SEQ ID NO: 120525 - DNA, 30 bp, Artificial Sequence
  Synthetic oligonucleotide
gtgtgttaaaggttttagatacttcaccgc

SEQ ID NO: 120526 - DNA, 30 bp, Artificial Sequence
  Synthetic oligonucleotide
aatgcgtaacagagagaccgtggtgcccgc

SEQ ID NO: 120527 - DNA, 30 bp, Artificial Sequence
  Synthetic oligonucleotide
gtggatgggtattcttttaggaaatcccgc

SEQ ID NO: 120528 - DNA, 30 bp, Artificial Sequence
  Synthetic oligonucleotide
gacggcagttacgattaggaacactcccgc

SEQ ID NO: 120529 - DNA, 30 bp, Artificial Sequence
  Synthetic oligonucleotide
atagcgcaattagtccacttttgctcccgc

SEQ ID NO: 120530 - DNA, 30 bp, Artificial Sequence
  Synthetic oligonucleotide
gagaccgtactggtaaggagtacgtcccgc

SEQ ID NO: 120531 - DNA, 30 bp, Artificial Sequence
  Synthetic oligonucleotide
tgcattaggcgaagcatcctccccagccgc

SEQ ID NO: 120532 - DNA, 30 bp, Artificial Sequence
  Synthetic oligonucleotide
ttgtacctaaggtctcccgcgcagagccgc

SEQ ID NO: 120533 - DNA, 30 bp, Artificial Sequence
  Synthetic oligonucleotide
gtagaagtctcgcgagaagctgagagccgc

SEQ ID NO: 120534 - DNA, 30 bp, Artificial Sequence
  Synthetic oligonucleotide
ccagggttaataagggttgactcccgccgc

SEQ ID NO: 120535 - DNA, 30 bp, Artificial Sequence
  Synthetic oligonucleotide
gtcaatgtgggtacacaggtcgctctccgc

SEQ ID NO: 120536 - DNA, 30 bp, Artificial Sequence
  Synthetic oligonucleotide
actgacggcgaggaattgttaccagtccgc

SEQ ID NO: 120537 - DNA, 30 bp, Artificial Sequence
  Synthetic oligonucleotide
tggcaagcaatgagcacggttgcagtccgc

SEQ ID NO: 120538 - DNA, 30 bp, Artificial Sequence
  Synthetic oligonucleotide
tagaggattagacatcacggtctgttccgc

SEQ ID NO: 120539 - DNA, 30 bp, Artificial Sequence
  Synthetic oligonucleotide
gatgctaaagcaaggccgaccgatttccgc

SEQ ID NO: 120540 - DNA, 30 bp, Artificial Sequence
  Synthetic oligonucleotide
actttaacatgctgacatcactatttccgc

SEQ ID NO: 120541 - DNA, 30 bp, Artificial Sequence
  Synthetic oligonucleotide
taaggccgttagttgaatacccaccagcgc

SEQ ID NO: 120542 - DNA, 30 bp, Artificial Sequence
  Synthetic oligonucleotide
ttggtatataggatcagacatcgccagcgc

SEQ ID NO: 120543 - DNA, 30 bp, Artificial Sequence
  Synthetic oligonucleotide
ctcaacaacaagcagctagtttcagagcgc

SEQ ID NO: 120544 - DNA, 30 bp, Artificial Sequence
  Synthetic oligonucleotide
gggggtattggtaacaagggccaggagcgc

SEQ ID NO: 120545 - DNA, 30 bp, Artificial Sequence
  Synthetic oligonucleotide
tggcaaagcttgaagaacacgttggagcgc

SEQ ID NO: 120546 - DNA, 30 bp, Artificial Sequence
  Synthetic oligonucleotide
agccaacattggaggagtcccagatagcgc

SEQ ID NO: 120547 - DNA, 30 bp, Artificial Sequence
  Synthetic oligonucleotide
taaatcatcgaaaagaagagcggaacgcgc

SEQ ID NO: 120548 - DNA, 30 bp, Artificial Sequence
  Synthetic oligonucleotide
gatcgttatttaacttgtaagcatccgcgc

SEQ ID NO: 120549 - DNA, 35 bp, Artificial Sequence
  Synthetic oligonucleotide
taagctagaaaggactaggtaaagccgacgggcgc

SEQ ID NO: 120550 - DNA, 30 bp, Artificial Sequence
  Synthetic oligonucleotide
cggaatagtgcaaaaggcgcacgggggcgc

SEQ ID NO: 120551 - DNA, 30 bp, Artificial Sequence
  Synthetic oligonucleotide
acactagcaagacttaagggttaatggcgc

SEQ ID NO: 120552 - DNA, 30 bp, Artificial Sequence
  Synthetic oligonucleotide
ccttgtgataagaaataaactgtcatgcgc

SEQ ID NO: 120553 - DNA, 30 bp, Artificial Sequence
  Synthetic oligonucleotide
caatcggatcatgagcttcagggtatgcgc

SEQ ID NO: 120554 - DNA, 30 bp, Artificial Sequence
  Synthetic oligonucleotide
acagacgagtggtgcggagtcatactgcgc

SEQ ID NO: 120555 - DNA, 30 bp, Artificial Sequence
  Synthetic oligonucleotide
tgcgaggcgaagtgattagagcgtctgcgc

SEQ ID NO: 120556 - DNA, 30 bp, Artificial Sequence
  Synthetic oligonucleotide
cctcgaaggacagagacgccaggagtgcgc

SEQ ID NO: 120557 - DNA, 30 bp, Artificial Sequence
  Synthetic oligonucleotide
agcacggatttgataaacagttctgtgcgc

SEQ ID NO: 120558 - DNA, 30 bp, Artificial Sequence
  Synthetic oligonucleotide
cagtcggcaatgggtttgggtccaaatcgc

SEQ ID NO: 120559 - DNA, 30 bp, Artificial Sequence
  Synthetic oligonucleotide
tgtaatcatcaagaaccaaaccgcaatcgc

SEQ ID NO: 120560 - DNA, 30 bp, Artificial Sequence
  Synthetic oligonucleotide
cgccacacacaaagtgtaattctcaatcgc

SEQ ID NO: 120561 - DNA, 30 bp, Artificial Sequence
  Synthetic oligonucleotide
ggtttgtgaggtgcaactcagttgaatcgc

SEQ ID NO: 120562 - DNA, 30 bp, Artificial Sequence
  Synthetic oligonucleotide
tcgagaatcaccgtacgtatcagtaatcgc

SEQ ID NO: 120563 - DNA, 30 bp, Artificial Sequence
  Synthetic oligonucleotide
tagcgtcgagctcatccgatcacagatcgc

SEQ ID NO: 120564 - DNA, 30 bp, Artificial Sequence
  Synthetic oligonucleotide
tcacagactcggcggaacgggaagtatcgc

SEQ ID NO: 120565 - DNA, 30 bp, Artificial Sequence
  Synthetic oligonucleotide
acctggagtatgcggaagaaatagtatcgc

SEQ ID NO: 120566 - DNA, 30 bp, Artificial Sequence
  Synthetic oligonucleotide
agaaataagatatcgcgatctcattatcgc

SEQ ID NO: 120567 - DNA, 30 bp, Artificial Sequence
  Synthetic oligonucleotide
gggtcagaggattaggcgggaaaaactcgc

SEQ ID NO: 120568 - DNA, 30 bp, Artificial Sequence
  Synthetic oligonucleotide
ccgcacatgtgtgtcaattaagaaactcgc

SEQ ID NO: 120569 - DNA, 30 bp, Artificial Sequence
  Synthetic oligonucleotide
ccgcaaagaagggcagtaaatgtaactcgc

SEQ ID NO: 120570 - DNA, 30 bp, Artificial Sequence
  Synthetic oligonucleotide
tgaagttctagattaggacaggccactcgc

SEQ ID NO: 120571 - DNA, 30 bp, Artificial Sequence
  Synthetic oligonucleotide
taccgttatacaaatagccctttcgctcgc

SEQ ID NO: 120572 - DNA, 30 bp, Artificial Sequence
  Synthetic oligonucleotide
cggaagggaatatgtcgcacatgctctcgc

SEQ ID NO: 120573 - DNA, 30 bp, Artificial Sequence
  Synthetic oligonucleotide
tgtgggccaaaatgcacaggttaaagtcgc

SEQ ID NO: 120574 - DNA, 30 bp, Artificial Sequence
  Synthetic oligonucleotide
agggaggtgggcaaataaggaaatagtcgc

SEQ ID NO: 120575 - DNA, 30 bp, Artificial Sequence
  Synthetic oligonucleotide
cctgtaaaaatagcagtgcgttaccgtcgc

SEQ ID NO: 120576 - DNA, 30 bp, Artificial Sequence
  Synthetic oligonucleotide
gcatctaataaacccgccaatctgcgtcgc

SEQ ID NO: 120577 - DNA, 30 bp, Artificial Sequence
  Synthetic oligonucleotide
catataatattccgatgccgggacggtcgc

SEQ ID NO: 120578 - DNA, 30 bp, Artificial Sequence
  Synthetic oligonucleotide
gcgttagcaccttcatggacagggggtcgc

SEQ ID NO: 120579 - DNA, 30 bp, Artificial Sequence
  Synthetic oligonucleotide
gtcataaggtccacgcacatggctggtcgc

SEQ ID NO: 120580 - DNA, 30 bp, Artificial Sequence
  Synthetic oligonucleotide
tcacactagataaagcgtgcaaggtgtcgc

SEQ ID NO: 120581 - DNA, 30 bp, Artificial Sequence
  Synthetic oligonucleotide
atgtgcccttctttcaatgaagattgtcgc

SEQ ID NO: 120582 - DNA, 30 bp, Artificial Sequence
  Synthetic oligonucleotide
gtcgtgaccgcatattgaggaactattcgc

SEQ ID NO: 120583 - DNA, 30 bp, Artificial Sequence
  Synthetic oligonucleotide
agtccataggttagttatgatattattcgc

SEQ ID NO: 120584 - DNA, 30 bp, Artificial Sequence
  Synthetic oligonucleotide
aaatagattccgagaatgaggagacttcgc

SEQ ID NO: 120585 - DNA, 30 bp, Artificial Sequence
  Synthetic oligonucleotide
accatcattagagaggttaacaagcttcgc

SEQ ID NO: 120586 - DNA, 30 bp, Artificial Sequence
  Synthetic oligonucleotide
gtctcggggcatcaccggcaagggcttcgc

SEQ ID NO: 120587 - DNA, 30 bp, Artificial Sequence
  Synthetic oligonucleotide
gcaatcaattggtcggggacgtgtgttcgc

SEQ ID NO: 120588 - DNA, 30 bp, Artificial Sequence
  Synthetic oligonucleotide
gaacgtcccagaacttcccagtcaaaaggc

SEQ ID NO: 120589 - DNA, 30 bp, Artificial Sequence
  Synthetic oligonucleotide
gcttggacggtcccatgaaatctacaaggc

SEQ ID NO: 120590 - DNA, 30 bp, Artificial Sequence
  Synthetic oligonucleotide
aaacaccactccccattgcaggagcaaggc

SEQ ID NO: 120591 - DNA, 30 bp, Artificial Sequence
  Synthetic oligonucleotide
atggttctaagtattagaacttggcaaggc

SEQ ID NO: 120592 - DNA, 30 bp, Artificial Sequence
  Synthetic oligonucleotide
ttgaaacgactccgaagatcaaaagaaggc

SEQ ID NO: 120593 - DNA, 31 bp, Artificial Sequence
  Synthetic oligonucleotide
gtggcgcccaagtcttgactcactcgaaggc

SEQ ID NO: 120594 - DNA, 30 bp, Artificial Sequence
  Synthetic oligonucleotide
agccggcccggagactagtcatcataaggc

SEQ ID NO: 120595 - DNA, 30 bp, Artificial Sequence
  Synthetic oligonucleotide
ttacgaacaatggctcgagcggtataaggc

SEQ ID NO: 120596 - DNA, 30 bp, Artificial Sequence
  Synthetic oligonucleotide
tagtaaaagaacattcttcagaattaaggc

SEQ ID NO: 120597 - DNA, 30 bp, Artificial Sequence
  Synthetic oligonucleotide
tcgaagtgagatactccatagagaacaggc

SEQ ID NO: 120598 - DNA, 30 bp, Artificial Sequence
  Synthetic oligonucleotide
gaagcagagcacgctaagagggatacaggc

SEQ ID NO: 120599 - DNA, 30 bp, Artificial Sequence
  Synthetic oligonucleotide
ccatataccatcatgttcgtaggtacaggc

SEQ ID NO: 120600 - DNA, 30 bp, Artificial Sequence
  Synthetic oligonucleotide
cagccaaagcacagtgcagtcgggccaggc

SEQ ID NO: 120601 - DNA, 30 bp, Artificial Sequence
  Synthetic oligonucleotide
cagtaaggtggcaagcagctgtagtcaggc

SEQ ID NO: 120602 - DNA, 30 bp, Artificial Sequence
  Synthetic oligonucleotide
gatgggatacgtaatctactaccgtcaggc

SEQ ID NO: 120603 - DNA, 30 bp, Artificial Sequence
  Synthetic oligonucleotide
ttatttgaagtgaagagcacaccaagaggc

SEQ ID NO: 120604 - DNA, 30 bp, Artificial Sequence
  Synthetic oligonucleotide
agtaaatgcaggtccagcgcaaaccgaggc

SEQ ID NO: 120605 - DNA, 30 bp, Artificial Sequence
  Synthetic oligonucleotide
cttgcccatggagggtctgatccaggaggc

SEQ ID NO: 120606 - DNA, 30 bp, Artificial Sequence
  Synthetic oligonucleotide
gatctagagggcgagaatgttggcggaggc

SEQ ID NO: 120607 - DNA, 30 bp, Artificial Sequence
  Synthetic oligonucleotide
aagaagatcgaaacaggtatctggggaggc

SEQ ID NO: 120608 - DNA, 30 bp, Artificial Sequence
  Synthetic oligonucleotide
atgaaagatctaacacaatgaacatgaggc

SEQ ID NO: 120609 - DNA, 30 bp, Artificial Sequence
  Synthetic oligonucleotide
catctggtcaacagcgccaagagatgaggc

SEQ ID NO: 120610 - DNA, 30 bp, Artificial Sequence
  Synthetic oligonucleotide
caacggatacaaaagctaactgtatgaggc

SEQ ID NO: 120611 - DNA, 30 bp, Artificial Sequence
  Synthetic oligonucleotide
atccaaatgttcctaagacaacagtgaggc

SEQ ID NO: 120612 - DNA, 30 bp, Artificial Sequence
  Synthetic oligonucleotide
cgagtttctatatagcagaaagcgtgaggc

SEQ ID NO: 120613 - DNA, 30 bp, Artificial Sequence
  Synthetic oligonucleotide
ttgaggagaagtaagcgcaagcatgtaggc

SEQ ID NO: 120614 - DNA, 30 bp, Artificial Sequence
  Synthetic oligonucleotide
ctgggtgcgtcccgtggtgattgcttaggc

SEQ ID NO: 120615 - DNA, 30 bp, Artificial Sequence
  Synthetic oligonucleotide
aagaatagtaagcggaccagtgcgttaggc

SEQ ID NO: 120616 - DNA, 30 bp, Artificial Sequence
  Synthetic oligonucleotide
ttgatcataggtctgcgaaagctcaacggc

SEQ ID NO: 120617 - DNA, 30 bp, Artificial Sequence
  Synthetic oligonucleotide
cgcgttacggaggtaagagtaattaacggc

SEQ ID NO: 120618 - DNA, 30 bp, Artificial Sequence
  Synthetic oligonucleotide
agcgagtaaaggatccttactcgcgacggc

SEQ ID NO: 120619 - DNA, 30 bp, Artificial Sequence
  Synthetic oligonucleotide
tcaccgttggtgcgtaggggccatgacggc

SEQ ID NO: 120620 - DNA, 30 bp, Artificial Sequence
  Synthetic oligonucleotide
taccttgcactaattgtgtgatcaaccggc

SEQ ID NO: 120621 - DNA, 30 bp, Artificial Sequence
  Synthetic oligonucleotide
aggtaatttcatttgagtaattaggccggc

SEQ ID NO: 120622 - DNA, 30 bp, Artificial Sequence
  Synthetic oligonucleotide
ggtcgcggatagttataatttgatgccggc

SEQ ID NO: 120623 - DNA, 30 bp, Artificial Sequence
  Synthetic oligonucleotide
aattgcgcttcaatgagatcagctgccggc

SEQ ID NO: 120624 - DNA, 30 bp, Artificial Sequence
  Synthetic oligonucleotide
tcgcaatcacaggtttaagtcgtgtccggc

SEQ ID NO: 120625 - DNA, 30 bp, Artificial Sequence
  Synthetic oligonucleotide
ggttagtctgcgagtgcggcggtgtccggc

SEQ ID NO: 120626 - DNA, 30 bp, Artificial Sequence
  Synthetic oligonucleotide
aatactacacccagaggatggaggagcggc

SEQ ID NO: 120627 - DNA, 30 bp, Artificial Sequence
  Synthetic oligonucleotide
ggccgataccgagtccattccacgcgcggc

SEQ ID NO: 120628 - DNA, 28 bp, Artificial Sequence
  Synthetic oligonucleotide
gattggaacaagaattatgcatcgcggc

SEQ ID NO: 120629 - DNA, 30 bp, Artificial Sequence
  Synthetic oligonucleotide
gtccgttccaattagtgaggacatatcggc

SEQ ID NO: 120630 - DNA, 30 bp, Artificial Sequence
  Synthetic oligonucleotide
cctgcgaacgagactctccacttactcggc

SEQ ID NO: 120631 - DNA, 30 bp, Artificial Sequence
  Synthetic oligonucleotide
cgtggagagcccagcggatgaatcctcggc

SEQ ID NO: 120632 - DNA, 30 bp, Artificial Sequence
  Synthetic oligonucleotide
tacggaacatgcgggagagagaggctcggc

SEQ ID NO: 120633 - DNA, 30 bp, Artificial Sequence
  Synthetic oligonucleotide
aagtgaaagagtcgggttatgtcagtcggc

SEQ ID NO: 120634 - DNA, 30 bp, Artificial Sequence
  Synthetic oligonucleotide
ggtgttctgtagcgagatcacatcgtcggc

SEQ ID NO: 120635 - DNA, 30 bp, Artificial Sequence
  Synthetic oligonucleotide
actccgattattcgcaaagaacggttcggc

SEQ ID NO: 120636 - DNA, 30 bp, Artificial Sequence
  Synthetic oligonucleotide
cccggaccccataccaggtaatagaagggc

SEQ ID NO: 120637 - DNA, 30 bp, Artificial Sequence
  Synthetic oligonucleotide
attgcccacgctacggtgcgattacagggc

SEQ ID NO: 120638 - DNA, 30 bp, Artificial Sequence
  Synthetic oligonucleotide
gtggtcgtaggaaacgtacacccccagggc

SEQ ID NO: 120639 - DNA, 30 bp, Artificial Sequence
  Synthetic oligonucleotide
tcgtggccgttcgaggagtatacgcagggc

SEQ ID NO: 120640 - DNA, 30 bp, Artificial Sequence
  Synthetic oligonucleotide
agcaaccgacaatgcgcgactatcgagggc

SEQ ID NO: 120641 - DNA, 30 bp, Artificial Sequence
  Synthetic oligonucleotide
aagactcggatcgggttggtcctcgagggc

SEQ ID NO: 120642 - DNA, 30 bp, Artificial Sequence
  Synthetic oligonucleotide
tagcatcaatccaacttatcgcgggagggc

SEQ ID NO: 120643 - DNA, 30 bp, Artificial Sequence
  Synthetic oligonucleotide
tgcgtcacagatatcgtctttgtggagggc

SEQ ID NO: 120644 - DNA, 30 bp, Artificial Sequence
  Synthetic oligonucleotide
ggcatctagtgaattaaatgcggtgagggc

SEQ ID NO: 120645 - DNA, 30 bp, Artificial Sequence
  Synthetic oligonucleotide
cgccaggggaggaactgtgatgtatagggc

SEQ ID NO: 120646 - DNA, 30 bp, Artificial Sequence
  Synthetic oligonucleotide
ggtagagtagtagtgccctgtttgtagggc

SEQ ID NO: 120647 - DNA, 30 bp, Artificial Sequence
  Synthetic oligonucleotide
actaaattaccacagtcatggggcacgggc

SEQ ID NO: 120648 - DNA, 30 bp, Artificial Sequence
  Synthetic oligonucleotide
atagggacaatgcattcacaaggtccgggc

SEQ ID NO: 120649 - DNA, 30 bp, Artificial Sequence
  Synthetic oligonucleotide
acccacttttgccaggaaaggagcgcgggc

SEQ ID NO: 120650 - DNA, 30 bp, Artificial Sequence
  Synthetic oligonucleotide
cgacttgccacagtaaatgacggggcgggc

SEQ ID NO: 120651 - DNA, 30 bp, Artificial Sequence
  Synthetic oligonucleotide
ggagaccgtaatggtgagagtccatcgggc

SEQ ID NO: 120652 - DNA, 30 bp, Artificial Sequence
  Synthetic oligonucleotide
gtcggaactcaggctaggcacatatcgggc

SEQ ID NO: 120653 - DNA, 30 bp, Artificial Sequence
  Synthetic oligonucleotide
gcctacgcgagggtacgggtaatttcgggc

SEQ ID NO: 120654 - DNA, 30 bp, Artificial Sequence
  Synthetic oligonucleotide
gaacccccatacgaggacggataaaggggc

SEQ ID NO: 120655 - DNA, 30 bp, Artificial Sequence
  Synthetic oligonucleotide
gagatgtcttagacagatgaacagaggggc

SEQ ID NO: 120656 - DNA, 30 bp, Artificial Sequence
  Synthetic oligonucleotide
gcgtacgtacaagctcctcgtcgacggggc

SEQ ID NO: 120657 - DNA, 30 bp, Artificial Sequence
  Synthetic oligonucleotide
gtgttggaagcgcgatacaggcaccggggc

SEQ ID NO: 120658 - DNA, 30 bp, Artificial Sequence
  Synthetic oligonucleotide
gtcagagtagctcgcatgaggtggcggggc

SEQ ID NO: 120659 - DNA, 30 bp, Artificial Sequence
  Synthetic oligonucleotide
gtgtacaggttccgcgggtaacaagggggc

SEQ ID NO: 120660 - DNA, 30 bp, Artificial Sequence
  Synthetic oligonucleotide
tgacgggttatttagttatcgacatggggc

SEQ ID NO: 120661 - DNA, 30 bp, Artificial Sequence
  Synthetic oligonucleotide
gtcagggctcacatcgggaccgttatgggc

SEQ ID NO: 120662 - DNA, 30 bp, Artificial Sequence
  Synthetic oligonucleotide
tacagccacaagcagcgcatcatcctgggc

SEQ ID NO: 120663 - DNA, 29 bp, Artificial Sequence
  Synthetic oligonucleotide
ggctgggtacggcattacactagctgggc

SEQ ID NO: 120664 - DNA, 30 bp, Artificial Sequence
  Synthetic oligonucleotide
tctgcaccctacgtttgctgctgagtgggc

SEQ ID NO: 120665 - DNA, 30 bp, Artificial Sequence
  Synthetic oligonucleotide
cgccgactatgtcacgttgagatagtgggc

SEQ ID NO: 120666 - DNA, 30 bp, Artificial Sequence
  Synthetic oligonucleotide
gcagtatagctagagattacactattgggc

SEQ ID NO: 120667 - DNA, 30 bp, Artificial Sequence
  Synthetic oligonucleotide
tggatcacaaatactgtaaaaggcttgggc

SEQ ID NO: 120668 - DNA, 30 bp, Artificial Sequence
  Synthetic oligonucleotide
ccatacaggcaagtaagttcgttgttgggc

SEQ ID NO: 120669 - DNA, 30 bp, Artificial Sequence
  Synthetic oligonucleotide
atatgggtcaaggaaaaaggcagaaatggc

SEQ ID NO: 120670 - DNA, 30 bp, Artificial Sequence
  Synthetic oligonucleotide
aagagtcggactgactaacgaaataatggc

SEQ ID NO: 120671 - DNA, 30 bp, Artificial Sequence
  Synthetic oligonucleotide
ctacgacccggaggatttcgaactaatggc

SEQ ID NO: 120672 - DNA, 30 bp, Artificial Sequence
  Synthetic oligonucleotide
ctttgtgagagctcatgccgaagtaatggc

SEQ ID NO: 120673 - DNA, 30 bp, Artificial Sequence
  Synthetic oligonucleotide
gctgacgaggtcagccgtggtcgtaatggc

SEQ ID NO: 120674 - DNA, 30 bp, Artificial Sequence
  Synthetic oligonucleotide
aaagtgaagcggaggtcacacactcatggc

SEQ ID NO: 120675 - DNA, 30 bp, Artificial Sequence
  Synthetic oligonucleotide
agggactcatgcactataactttggatggc

SEQ ID NO: 120676 - DNA, 30 bp, Artificial Sequence
  Synthetic oligonucleotide
cagtccgaatctgtctaagataatgatggc

SEQ ID NO: 120677 - DNA, 30 bp, Artificial Sequence
  Synthetic oligonucleotide
cttgcgtatgccaagtacagtaatgatggc

SEQ ID NO: 120678 - DNA, 30 bp, Artificial Sequence
  Synthetic oligonucleotide
gtccgtgcaataagaaaaacgggtgatggc

SEQ ID NO: 120679 - DNA, 30 bp, Artificial Sequence
  Synthetic oligonucleotide
gctgtgacatgactctggtttacttatggc

SEQ ID NO: 120680 - DNA, 30 bp, Artificial Sequence
  Synthetic oligonucleotide
aaacagacggattcttaacatatttatggc

SEQ ID NO: 120681 - DNA, 30 bp, Artificial Sequence
  Synthetic oligonucleotide
cttgggacactaataaactagctaactggc

SEQ ID NO: 120682 - DNA, 30 bp, Artificial Sequence
  Synthetic oligonucleotide
ttaggtagtatatggtacgtcaacactggc

SEQ ID NO: 120683 - DNA, 30 bp, Artificial Sequence
  Synthetic oligonucleotide
taaactccaaacgcgagtggcgaaagtggc

SEQ ID NO: 120684 - DNA, 30 bp, Artificial Sequence
  Synthetic oligonucleotide
atggtagacggtcgttatcctcgcagtggc

SEQ ID NO: 120685 - DNA, 30 bp, Artificial Sequence
  Synthetic oligonucleotide
gcacaaccaggtgtacgcggttctagtggc

SEQ ID NO: 120686 - DNA, 30 bp, Artificial Sequence
  Synthetic oligonucleotide
cacatgaatgcacgctcgccgacgcgtggc

SEQ ID NO: 120687 - DNA, 30 bp, Artificial Sequence
  Synthetic oligonucleotide
cgctaaatgcacatatcaacttttcgtggc

SEQ ID NO: 120688 - DNA, 30 bp, Artificial Sequence
  Synthetic oligonucleotide
catggtgctaatgcgctgaatagtggtggc

SEQ ID NO: 120689 - DNA, 30 bp, Artificial Sequence
  Synthetic oligonucleotide
gacgttccgggtggtcaaagcggctgtggc

SEQ ID NO: 120690 - DNA, 30 bp, Artificial Sequence
  Synthetic oligonucleotide
aaaacgtagattgtcgctgagggctgtggc

SEQ ID NO: 120691 - DNA, 30 bp, Artificial Sequence
  Synthetic oligonucleotide
aacagctgtggccggattcaactcattggc

SEQ ID NO: 120692 - DNA, 30 bp, Artificial Sequence
  Synthetic oligonucleotide
ggccagtgtccgaaccaagaagatattggc

SEQ ID NO: 120693 - DNA, 30 bp, Artificial Sequence
  Synthetic oligonucleotide
aatcgcgggttagacctactttgtcttggc

SEQ ID NO: 120694 - DNA, 30 bp, Artificial Sequence
  Synthetic oligonucleotide
ggaagtaaaacctgtcagtgcttatttggc

SEQ ID NO: 120695 - DNA, 30 bp, Artificial Sequence
  Synthetic oligonucleotide
atcgtgccaattcctaagtactactttggc

SEQ ID NO: 120696 - DNA, 30 bp, Artificial Sequence
  Synthetic oligonucleotide
ccaggtacggggtgatgcgtccattttggc

SEQ ID NO: 120697 - DNA, 30 bp, Artificial Sequence
  Synthetic oligonucleotide
tcacgaccgcgggcaagttctatcaaatgc

SEQ ID NO: 120698 - DNA, 30 bp, Artificial Sequence
  Synthetic oligonucleotide
caccgattttaagaaggtagaacgaaatgc

SEQ ID NO: 120699 - DNA, 30 bp, Artificial Sequence
  Synthetic oligonucleotide
ggataaagtattgggatagacacgaaatgc

SEQ ID NO: 120700 - DNA, 30 bp, Artificial Sequence
  Synthetic oligonucleotide
gggttggaggatcatggctatgtgaaatgc

SEQ ID NO: 120701 - DNA, 30 bp, Artificial Sequence
  Synthetic oligonucleotide
cgccgtccggatgtttaggtctataaatgc

SEQ ID NO: 120702 - DNA, 30 bp, Artificial Sequence
  Synthetic oligonucleotide
gctgtggcagggagtaagagaagtaaatgc

SEQ ID NO: 120703 - DNA, 30 bp, Artificial Sequence
  Synthetic oligonucleotide
atcaggataaaggatatgaattggcaatgc

SEQ ID NO: 120704 - DNA, 30 bp, Artificial Sequence
  Synthetic oligonucleotide
catcgcgtagctaaatagtgttttcaatgc

SEQ ID NO: 120705 - DNA, 30 bp, Artificial Sequence
  Synthetic oligonucleotide
cgaaaggcatagtatccgggcagggaatgc

SEQ ID NO: 120706 - DNA, 30 bp, Artificial Sequence
  Synthetic oligonucleotide
caatgatatgtcgactgcggaaaataatgc

SEQ ID NO: 120707 - DNA, 30 bp, Artificial Sequence
  Synthetic oligonucleotide
ccgcgtagacagatcacctagcggtaatgc

SEQ ID NO: 120708 - DNA, 30 bp, Artificial Sequence
  Synthetic oligonucleotide
tagtaacttgctgactaagtataaacatgc

SEQ ID NO: 120709 - DNA, 30 bp, Artificial Sequence
  Synthetic oligonucleotide
gtcgtactgaagtgacgattgtggacatgc

SEQ ID NO: 120710 - DNA, 30 bp, Artificial Sequence
  Synthetic oligonucleotide
cagaccccattggtggaaatccagccatgc

SEQ ID NO: 120711 - DNA, 30 bp, Artificial Sequence
  Synthetic oligonucleotide
gtaatgtgagtaaagcgtagtttagcatgc

SEQ ID NO: 120712 - DNA, 30 bp, Artificial Sequence
  Synthetic oligonucleotide
tagcaggggtgtgagggacaatacgcatgc

SEQ ID NO: 120713 - DNA, 30 bp, Artificial Sequence
  Synthetic oligonucleotide
aaacgaagtctagcgggacatctggcatgc

SEQ ID NO: 120714 - DNA, 30 bp, Artificial Sequence
  Synthetic oligonucleotide
gtaaggcctactgaataggacttggcatgc

SEQ ID NO: 120715 - DNA, 30 bp, Artificial Sequence
  Synthetic oligonucleotide
acaaacatgtccatcggtgcgaatgcatgc

SEQ ID NO: 120716 - DNA, 30 bp, Artificial Sequence
  Synthetic oligonucleotide
gattgaactgagtcccctcgtcggtcatgc

SEQ ID NO: 120717 - DNA, 30 bp, Artificial Sequence
  Synthetic oligonucleotide
tcaaggtttcctagggactgacattcatgc

SEQ ID NO: 120718 - DNA, 30 bp, Artificial Sequence
  Synthetic oligonucleotide
tccataagatcactagagaaatgcagatgc

SEQ ID NO: 120719 - DNA, 30 bp, Artificial Sequence
  Synthetic oligonucleotide
gggcgaaatgtagtgtcttttatcagatgc

SEQ ID NO: 120720 - DNA, 30 bp, Artificial Sequence
  Synthetic oligonucleotide
cttgggaaagttaaaatctaagagcgatgc

SEQ ID NO: 120721 - DNA, 30 bp, Artificial Sequence
  Synthetic oligonucleotide
tggacgaataacgtcgccggggggggatgc

SEQ ID NO: 120722 - DNA, 30 bp, Artificial Sequence
  Synthetic oligonucleotide
tgtctctggggaaaacgtacctggtgatgc

SEQ ID NO: 120723 - DNA, 30 bp, Artificial Sequence
  Synthetic oligonucleotide
aatgagatctcggctctaagaagcatatgc

SEQ ID NO: 120724 - DNA, 30 bp, Artificial Sequence
  Synthetic oligonucleotide
agatgataagttaaatcgcgacctctatgc

SEQ ID NO: 120725 - DNA, 30 bp, Artificial Sequence
  Synthetic oligonucleotide
gagcattagcagaatacccggtacgtatgc

SEQ ID NO: 120726 - DNA, 30 bp, Artificial Sequence
  Synthetic oligonucleotide
ctgaagaggtggatcgagtgtcttttatgc

SEQ ID NO: 120727 - DNA, 30 bp, Artificial Sequence
  Synthetic oligonucleotide
gtctaagcaaagcccccaagcaagcactgc

SEQ ID NO: 120728 - DNA, 30 bp, Artificial Sequence
  Synthetic oligonucleotide
acgatcgcttttggaaagtggatgcactgc

SEQ ID NO: 120729 - DNA, 30 bp, Artificial Sequence
  Synthetic oligonucleotide
gaggtatgcggaggggatagtattcactgc

SEQ ID NO: 120730 - DNA, 31 bp, Artificial Sequence
  Synthetic oligonucleotide
tgaaattaactaatggggcgcgagttactgc

SEQ ID NO: 120731 - DNA, 30 bp, Artificial Sequence
  Synthetic oligonucleotide
accccagtaagatcctacaaaggttactgc

SEQ ID NO: 120732 - DNA, 30 bp, Artificial Sequence
  Synthetic oligonucleotide
aaaggacgtaggtactcagctaacacctgc

SEQ ID NO: 120733 - DNA, 30 bp, Artificial Sequence
  Synthetic oligonucleotide
gcttagtaacgaatggttgggagcacctgc

SEQ ID NO: 120734 - DNA, 30 bp, Artificial Sequence
  Synthetic oligonucleotide
agcgaccaataactttgctctaccccctgc

SEQ ID NO: 120735 - DNA, 30 bp, Artificial Sequence
  Synthetic oligonucleotide
tggaagcctgtgtcgcgggggtgcccctgc

SEQ ID NO: 120736 - DNA, 30 bp, Artificial Sequence
  Synthetic oligonucleotide
gcgggtgagatcgcacctggaacgccctgc

SEQ ID NO: 120737 - DNA, 30 bp, Artificial Sequence
  Synthetic oligonucleotide
aggaaatcggcggtttatgctggggcctgc

SEQ ID NO: 120738 - DNA, 31 bp, Artificial Sequence
  Synthetic oligonucleotide
ttcgtaggagtaagaattatgtggctcctgc

SEQ ID NO: 120739 - DNA, 30 bp, Artificial Sequence
  Synthetic oligonucleotide
cacgttcgatctgtgggcttgagacgctgc

SEQ ID NO: 120740 - DNA, 30 bp, Artificial Sequence
  Synthetic oligonucleotide
gcgactgctagaggaggtccgggacgctgc

SEQ ID NO: 120741 - DNA, 30 bp, Artificial Sequence
  Synthetic oligonucleotide
tgtcgagcgagtgaccccgatacgcgctgc

SEQ ID NO: 120742 - DNA, 30 bp, Artificial Sequence
  Synthetic oligonucleotide
ttacgtaacaaaggtcattgttatcgctgc

SEQ ID NO: 120743 - DNA, 30 bp, Artificial Sequence
  Synthetic oligonucleotide
cgacgtgctctcattttcagttccggctgc

SEQ ID NO: 120744 - DNA, 30 bp, Artificial Sequence
  Synthetic oligonucleotide
cttggttactgggattaatatgagggctgc

SEQ ID NO: 120745 - DNA, 30 bp, Artificial Sequence
  Synthetic oligonucleotide
ctgatcatagactattgggccgaatgctgc

SEQ ID NO: 120746 - DNA, 30 bp, Artificial Sequence
  Synthetic oligonucleotide
cgcgaaactgcacacagatagtaatgctgc

SEQ ID NO: 120747 - DNA, 30 bp, Artificial Sequence
  Synthetic oligonucleotide
cggactgtgcactttcgggttcggtgctgc

SEQ ID NO: 120748 - DNA, 30 bp, Artificial Sequence
  Synthetic oligonucleotide
gcaatgaggctcctgatgacgtcttgctgc

SEQ ID NO: 120749 - DNA, 30 bp, Artificial Sequence
  Synthetic oligonucleotide
aggcgagggggtaaggatttttcttgctgc

SEQ ID NO: 120750 - DNA, 30 bp, Artificial Sequence
  Synthetic oligonucleotide
ggctccgttgtggactcgttgtgaatctgc

SEQ ID NO: 120751 - DNA, 30 bp, Artificial Sequence
  Synthetic oligonucleotide
gtgcaatcatgttgtaagcgtataatctgc

SEQ ID NO: 120752 - DNA, 30 bp, Artificial Sequence
  Synthetic oligonucleotide
cgttgcactctcaatattttacgcctctgc

SEQ ID NO: 120753 - DNA, 30 bp, Artificial Sequence
  Synthetic oligonucleotide
gcacgttatgccctaactctctgagtctgc

SEQ ID NO: 120754 - DNA, 30 bp, Artificial Sequence
  Synthetic oligonucleotide
tgatgcccagcatatcgatccgaacagtgc

SEQ ID NO: 120755 - DNA, 30 bp, Artificial Sequence
  Synthetic oligonucleotide
ttggatccggtgatacctgcgcaccagtgc

SEQ ID NO: 120756 - DNA, 30 bp, Artificial Sequence
  Synthetic oligonucleotide
tggtgccgattcaaccgccatgcgcagtgc

SEQ ID NO: 120757 - DNA, 30 bp, Artificial Sequence
  Synthetic oligonucleotide
gaaagggaacaccgacagacgggtcagtgc

SEQ ID NO: 120758 - DNA, 30 bp, Artificial Sequence
  Synthetic oligonucleotide
tacgccccatatagagctactggatagtgc

SEQ ID NO: 120759 - DNA, 30 bp, Artificial Sequence
  Synthetic oligonucleotide
ttgttatgggtacgagagcttctcacgtgc

SEQ ID NO: 120760 - DNA, 30 bp, Artificial Sequence
  Synthetic oligonucleotide
accgggtggaaatctcaccaatgaccgtgc

SEQ ID NO: 120761 - DNA, 30 bp, Artificial Sequence
  Synthetic oligonucleotide
aataacagagtaggagagtgttgaccgtgc

SEQ ID NO: 120762 - DNA, 31 bp, Artificial Sequence
  Synthetic oligonucleotide
agtgcagacttagtagcgtgtgctaccgtgc

SEQ ID NO: 120763 - DNA, 30 bp, Artificial Sequence
  Synthetic oligonucleotide
agtattccagttcaggtggcaacgccgtgc

SEQ ID NO: 120764 - DNA, 30 bp, Artificial Sequence
  Synthetic oligonucleotide
cgcgtaagtgactatatacttagcgcgtgc

SEQ ID NO: 120765 - DNA, 30 bp, Artificial Sequence
  Synthetic oligonucleotide
tgtcagatccacactctatggccggcgtgc

SEQ ID NO: 120766 - DNA, 30 bp, Artificial Sequence
  Synthetic oligonucleotide
cgtgtactaaaaatccccatgagtgcgtgc

SEQ ID NO: 120767 - DNA, 30 bp, Artificial Sequence
  Synthetic oligonucleotide
ttattcctagcggatggaagaggtgcgtgc

SEQ ID NO: 120768 - DNA, 30 bp, Artificial Sequence
  Synthetic oligonucleotide
ttactgagccgtaaaactgtgtgatcgtgc

SEQ ID NO: 120769 - DNA, 29 bp, Artificial Sequence
  Synthetic oligonucleotide
gatatcacggttcgttatgtccgtcgtgc

SEQ ID NO: 120770 - DNA, 30 bp, Artificial Sequence
  Synthetic oligonucleotide
acgttcaagagcagtactgttgaaaggtgc

SEQ ID NO: 120771 - DNA, 30 bp, Artificial Sequence
  Synthetic oligonucleotide
tagagtcgaagtaccatctaattacggtgc

SEQ ID NO: 120772 - DNA, 30 bp, Artificial Sequence
  Synthetic oligonucleotide
ccagagtacagtcaatgaacaaggtggtgc

SEQ ID NO: 120773 - DNA, 30 bp, Artificial Sequence
  Synthetic oligonucleotide
tgagaaataacaccttggggcacttggtgc

SEQ ID NO: 120774 - DNA, 30 bp, Artificial Sequence
  Synthetic oligonucleotide
gaggaaagtaactaggaccatcccatgtgc

SEQ ID NO: 120775 - DNA, 30 bp, Artificial Sequence
  Synthetic oligonucleotide
ggtagggctcagttagtgctcctgatgtgc

SEQ ID NO: 120776 - DNA, 30 bp, Artificial Sequence
  Synthetic oligonucleotide
caacggggtgtgtttgcctccactatgtgc

SEQ ID NO: 120777 - DNA, 30 bp, Artificial Sequence
  Synthetic oligonucleotide
gagcaagatcgtaaatcgtaccccctgtgc

SEQ ID NO: 120778 - DNA, 30 bp, Artificial Sequence
  Synthetic oligonucleotide
acagtatggtaaaatttcgaactgctgtgc

SEQ ID NO: 120779 - DNA, 30 bp, Artificial Sequence
  Synthetic oligonucleotide
aacgcctataagaaaaaagtggcggtgtgc

SEQ ID NO: 120780 - DNA, 30 bp, Artificial Sequence
  Synthetic oligonucleotide
cgtctgcgattgggaacaacacgggtgtgc

SEQ ID NO: 120781 - DNA, 30 bp, Artificial Sequence
  Synthetic oligonucleotide
tacgcacgggatcttcatcctcacaattgc

SEQ ID NO: 120782 - DNA, 30 bp, Artificial Sequence
  Synthetic oligonucleotide
acgactgtcacttgccgaattctcgattgc

SEQ ID NO: 120783 - DNA, 30 bp, Artificial Sequence
  Synthetic oligonucleotide
atgacagagatcgtccggactttggattgc

SEQ ID NO: 120784 - DNA, 30 bp, Artificial Sequence
  Synthetic oligonucleotide
gagcctaaagcactacttaaagaatattgc

SEQ ID NO: 120785 - DNA, 30 bp, Artificial Sequence
  Synthetic oligonucleotide
gtagacagaacgaaatggtttctctattgc

SEQ ID NO: 120786 - DNA, 30 bp, Artificial Sequence
  Synthetic oligonucleotide
tctcggtactcctatttagggataacttgc

SEQ ID NO: 120787 - DNA, 30 bp, Artificial Sequence
  Synthetic oligonucleotide
acatgcacatcatagtattggacaccttgc

SEQ ID NO: 120788 - DNA, 30 bp, Artificial Sequence
  Synthetic oligonucleotide
ggactcgtgctaaccggcaagctagcttgc

SEQ ID NO: 120789 - DNA, 30 bp, Artificial Sequence
  Synthetic oligonucleotide
tcggggcgggcactcctcaaaagggcttgc

SEQ ID NO: 120790 - DNA, 30 bp, Artificial Sequence
  Synthetic oligonucleotide
agccagccgtacaaagcgagagatgcttgc

SEQ ID NO: 120791 - DNA, 30 bp, Artificial Sequence
  Synthetic oligonucleotide
ggcatctcctcgaggagacaaccaagttgc

SEQ ID NO: 120792 - DNA, 30 bp, Artificial Sequence
  Synthetic oligonucleotide
atgcacatggggcaatcttccgcacgttgc

SEQ ID NO: 120793 - DNA, 30 bp, Artificial Sequence
  Synthetic oligonucleotide
ttggtaagggtgttaagtcataagcgttgc

SEQ ID NO: 120794 - DNA, 30 bp, Artificial Sequence
  Synthetic oligonucleotide
actcatgcggtcgggtaattcgctcgttgc

SEQ ID NO: 120795 - DNA, 30 bp, Artificial Sequence
  Synthetic oligonucleotide
tataccaaaaggacctgtaaggacggttgc

SEQ ID NO: 120796 - DNA, 30 bp, Artificial Sequence
  Synthetic oligonucleotide
agttagtcaagtggctgcgtggtatgttgc

SEQ ID NO: 120797 - DNA, 30 bp, Artificial Sequence
  Synthetic oligonucleotide
ggggcaaacattcgggcgtcagcgtgttgc

SEQ ID NO: 120798 - DNA, 31 bp, Artificial Sequence
  Synthetic oligonucleotide
aacgtggtgggtaatcacggggtgttgttgc

SEQ ID NO: 120799 - DNA, 30 bp, Artificial Sequence
  Synthetic oligonucleotide
ctcacgggacaagttcaggcataaatttgc

SEQ ID NO: 120800 - DNA, 30 bp, Artificial Sequence
  Synthetic oligonucleotide
gcagcagtggcagacggcagaaacatttgc

SEQ ID NO: 120801 - DNA, 30 bp, Artificial Sequence
  Synthetic oligonucleotide
cgtttgtaccaaacatacgggcacatttgc

SEQ ID NO: 120802 - DNA, 30 bp, Artificial Sequence
  Synthetic oligonucleotide
gtgcgcgtaacgaattcgcttcttatttgc

SEQ ID NO: 120803 - DNA, 30 bp, Artificial Sequence
  Synthetic oligonucleotide
cacgttctaatcggactgtgcggactttgc

SEQ ID NO: 120804 - DNA, 30 bp, Artificial Sequence
  Synthetic oligonucleotide
gtccaggaaacgaggtaagcgatcgtttgc

SEQ ID NO: 120805 - DNA, 30 bp, Artificial Sequence
  Synthetic oligonucleotide
tcacccaaggtaggacttaatctggtttgc

SEQ ID NO: 120806 - DNA, 30 bp, Artificial Sequence
  Synthetic oligonucleotide
accaaagtggtcatagcgtaagagttttgc

SEQ ID NO: 120807 - DNA, 30 bp, Artificial Sequence
  Synthetic oligonucleotide
gttggcagaagccggaagatggcaaaaatc

SEQ ID NO: 120808 - DNA, 30 bp, Artificial Sequence
  Synthetic oligonucleotide
ccgtcatgcaaaaaatactttttcaaaatc

SEQ ID NO: 120809 - DNA, 30 bp, Artificial Sequence
  Synthetic oligonucleotide
taatccgacacatcttggagcaaacaaatc

SEQ ID NO: 120810 - DNA, 30 bp, Artificial Sequence
  Synthetic oligonucleotide
atatcaactgatgaagtttgtcagcaaatc

SEQ ID NO: 120811 - DNA, 30 bp, Artificial Sequence
  Synthetic oligonucleotide
aaaactcgggaggagaggagcatgcaaatc

SEQ ID NO: 120812 - DNA, 30 bp, Artificial Sequence
  Synthetic oligonucleotide
agtgtttaaggggcatgtgacctggaaatc

SEQ ID NO: 120813 - DNA, 30 bp, Artificial Sequence
  Synthetic oligonucleotide
catgatattgtatggggtaaaaactaaatc

SEQ ID NO: 120814 - DNA, 30 bp, Artificial Sequence
  Synthetic oligonucleotide
taacgaaggccatagtacgtttagtaaatc

SEQ ID NO: 120815 - DNA, 30 bp, Artificial Sequence
  Synthetic oligonucleotide
gggcccgtgtcatacacacctgatccaatc

SEQ ID NO: 120816 - DNA, 30 bp, Artificial Sequence
  Synthetic oligonucleotide
tgtaaccaaggcggcatcacagctccaatc

SEQ ID NO: 120817 - DNA, 30 bp, Artificial Sequence
  Synthetic oligonucleotide
cttaattatcagtggtccagggctccaatc

SEQ ID NO: 120818 - DNA, 30 bp, Artificial Sequence
  Synthetic oligonucleotide
ggaataaccagatagtcatgcgccgcaatc

SEQ ID NO: 120819 - DNA, 30 bp, Artificial Sequence
  Synthetic oligonucleotide
accttatatacatcaatacaccgggcaatc

SEQ ID NO: 120820 - DNA, 30 bp, Artificial Sequence
  Synthetic oligonucleotide
ctggttgtacaaattctagctactgcaatc

SEQ ID NO: 120821 - DNA, 30 bp, Artificial Sequence
  Synthetic oligonucleotide
ccaatggaagtaaaaacttggtaatcaatc

SEQ ID NO: 120822 - DNA, 30 bp, Artificial Sequence
  Synthetic oligonucleotide
ccatatacattacctctaagcaagtcaatc

SEQ ID NO: 120823 - DNA, 30 bp, Artificial Sequence
  Synthetic oligonucleotide
tcgaaaatacgtagttcccagtaaagaatc

SEQ ID NO: 120824 - DNA, 30 bp, Artificial Sequence
  Synthetic oligonucleotide
tcctaaaacgtctctgcttgcttaagaatc

SEQ ID NO: 120825 - DNA, 30 bp, Artificial Sequence
  Synthetic oligonucleotide
catgattaaagtaaagaggactttcgaatc

SEQ ID NO: 120826 - DNA, 30 bp, Artificial Sequence
  Synthetic oligonucleotide
agtcaagtgattgggacgcataacggaatc

SEQ ID NO: 120827 - DNA, 30 bp, Artificial Sequence
  Synthetic oligonucleotide
cctagcgaagacgggcgcaatgccataatc

SEQ ID NO: 120828 - DNA, 30 bp, Artificial Sequence
  Synthetic oligonucleotide
ccgcaatattgcattaggtgttgcataatc

SEQ ID NO: 120829 - DNA, 30 bp, Artificial Sequence
  Synthetic oligonucleotide
accgcgcatttccaagcatgttgtataatc

SEQ ID NO: 120830 - DNA, 30 bp, Artificial Sequence
  Synthetic oligonucleotide
cgcatgacacgttgcaagcccctcctaatc

SEQ ID NO: 120831 - DNA, 30 bp, Artificial Sequence
  Synthetic oligonucleotide
gtgttaacaccgatcatcactatagtaatc

SEQ ID NO: 120832 - DNA, 30 bp, Artificial Sequence
  Synthetic oligonucleotide
ctgtggccacgaaagaagacacacgtaatc

SEQ ID NO: 120833 - DNA, 30 bp, Artificial Sequence
  Synthetic oligonucleotide
tagggtgccggtcgcaattcctacgtaatc

SEQ ID NO: 120834 - DNA, 30 bp, Artificial Sequence
  Synthetic oligonucleotide
ggtcagaggatcacaggctgcttggtaatc

SEQ ID NO: 120835 - DNA, 30 bp, Artificial Sequence
  Synthetic oligonucleotide
accaggaacggccacctacttgcgttaatc

SEQ ID NO: 120836 - DNA, 30 bp, Artificial Sequence
  Synthetic oligonucleotide
tagtgcgtaatgcgctggcatagacacatc

SEQ ID NO: 120837 - DNA, 30 bp, Artificial Sequence
  Synthetic oligonucleotide
gcgccgacgacccgggtgccgtgtcacatc

SEQ ID NO: 120838 - DNA, 30 bp, Artificial Sequence
  Synthetic oligonucleotide
cgttggggtggccaacacatggacgacatc

SEQ ID NO: 120839 - DNA, 30 bp, Artificial Sequence
  Synthetic oligonucleotide
tctcaatttaacggggtcaatatcgacatc

SEQ ID NO: 120840 - DNA, 30 bp, Artificial Sequence
  Synthetic oligonucleotide
gttacggaagtcggacactgggtgaccatc

SEQ ID NO: 120841 - DNA, 30 bp, Artificial Sequence
  Synthetic oligonucleotide
taagagaagagggaatatgtgtaacccatc

SEQ ID NO: 120842 - DNA, 30 bp, Artificial Sequence
  Synthetic oligonucleotide
gcgctgcggagcgttagagtagcgcccatc

SEQ ID NO: 120843 - DNA, 30 bp, Artificial Sequence
  Synthetic oligonucleotide
gtcaagaatgctggttataccattcccatc

SEQ ID NO: 120844 - DNA, 30 bp, Artificial Sequence
  Synthetic oligonucleotide
tgtactcagacatcgacccacacaagcatc

SEQ ID NO: 120845 - DNA, 30 bp, Artificial Sequence
  Synthetic oligonucleotide
tgagattacgttgcttctcgacatcgcatc

SEQ ID NO: 120846 - DNA, 30 bp, Artificial Sequence
  Synthetic oligonucleotide
gtaatgaatattacagcagtgactcgcatc

SEQ ID NO: 120847 - DNA, 30 bp, Artificial Sequence
  Synthetic oligonucleotide
atggcatgggtgcgcctccccagtcgcatc

SEQ ID NO: 120848 - DNA, 30 bp, Artificial Sequence
  Synthetic oligonucleotide
atgaaagcacgaatacgcgtgataggcatc

SEQ ID NO: 120849 - DNA, 30 bp, Artificial Sequence
  Synthetic oligonucleotide
cagccacatgcgttacacaggccgggcatc

SEQ ID NO: 120850 - DNA, 30 bp, Artificial Sequence
  Synthetic oligonucleotide
gccatagggggacagggacacttcatcatc

SEQ ID NO: 120851 - DNA, 30 bp, Artificial Sequence
  Synthetic oligonucleotide
cagcacatccgagggtaggacgagctcatc

SEQ ID NO: 120852 - DNA, 30 bp, Artificial Sequence
  Synthetic oligonucleotide
ttcgtgaggcccacgaacattacagtcatc

SEQ ID NO: 120853 - DNA, 30 bp, Artificial Sequence
  Synthetic oligonucleotide
actgaatgacttgacgccgacgcattcatc

SEQ ID NO: 120854 - DNA, 30 bp, Artificial Sequence
  Synthetic oligonucleotide
gtgtcctaaaaatgtcttggcgtcttcatc

SEQ ID NO: 120855 - DNA, 30 bp, Artificial Sequence
  Synthetic oligonucleotide
tcaccgaattaatcaatccctcggttcatc

SEQ ID NO: 120856 - DNA, 30 bp, Artificial Sequence
  Synthetic oligonucleotide
agctttcgttaaaagcatgtacatttcatc

SEQ ID NO: 120857 - DNA, 30 bp, Artificial Sequence
  Synthetic oligonucleotide
taatcgcacccgagtctacaatagaagatc

SEQ ID NO: 120858 - DNA, 30 bp, Artificial Sequence
  Synthetic oligonucleotide
gggtagggctctgactgctcgcctcagatc

SEQ ID NO: 120859 - DNA, 30 bp, Artificial Sequence
  Synthetic oligonucleotide
gactaatgcaatggttcagtccaagagatc

SEQ ID NO: 120860 - DNA, 30 bp, Artificial Sequence
  Synthetic oligonucleotide
tcgaggtagggacaggtgtaggcagagatc

SEQ ID NO: 120861 - DNA, 30 bp, Artificial Sequence
  Synthetic oligonucleotide
gtagacgacgagccccatcgagtagagatc

SEQ ID NO: 120862 - DNA, 30 bp, Artificial Sequence
  Synthetic oligonucleotide
tacagggctatcggaggtaacttagagatc

SEQ ID NO: 120863 - DNA, 30 bp, Artificial Sequence
  Synthetic oligonucleotide
gggacgcgtgagaggtaatccgaggagatc

SEQ ID NO: 120864 - DNA, 30 bp, Artificial Sequence
  Synthetic oligonucleotide
aggaatgtctaaatataaattggtgagatc

SEQ ID NO: 120865 - DNA, 30 bp, Artificial Sequence
  Synthetic oligonucleotide
aggggaaagcgatattgttgttaatagatc

SEQ ID NO: 120866 - DNA, 30 bp, Artificial Sequence
  Synthetic oligonucleotide
ttggtgggtacaggtccataaatatagatc

SEQ ID NO: 120867 - DNA, 30 bp, Artificial Sequence
  Synthetic oligonucleotide
gcaacgccgggaccatacccgcaaacgatc

SEQ ID NO: 120868 - DNA, 30 bp, Artificial Sequence
  Synthetic oligonucleotide
tgcggctccggataactagcaagaacgatc

SEQ ID NO: 120869 - DNA, 30 bp, Artificial Sequence
  Synthetic oligonucleotide
acgacacagatcagctggcccgtgacgatc

SEQ ID NO: 120870 - DNA, 30 bp, Artificial Sequence
  Synthetic oligonucleotide
ttataaattgggatggtgataaaagcgatc

SEQ ID NO: 120871 - DNA, 30 bp, Artificial Sequence
  Synthetic oligonucleotide
acactcctcattaaccggtgcaaggcgatc

SEQ ID NO: 120872 - DNA, 30 bp, Artificial Sequence
  Synthetic oligonucleotide
gcaggaaacccactcttccggtatgcgatc

SEQ ID NO: 120873 - DNA, 30 bp, Artificial Sequence
  Synthetic oligonucleotide
ccttacgttacgtggtttattctatcgatc

SEQ ID NO: 120874 - DNA, 30 bp, Artificial Sequence
  Synthetic oligonucleotide
caggcctgcactcggaatatccggtcgatc

SEQ ID NO: 120875 - DNA, 30 bp, Artificial Sequence
  Synthetic oligonucleotide
aaggtcatgtctatagcgttgggtaggatc

SEQ ID NO: 120876 - DNA, 30 bp, Artificial Sequence
  Synthetic oligonucleotide
aggatgagaaaaaagggttaatcgcggatc

SEQ ID NO: 120877 - DNA, 30 bp, Artificial Sequence
  Synthetic oligonucleotide
tattgcttaggattggaagatccactgatc

SEQ ID NO: 120878 - DNA, 30 bp, Artificial Sequence
  Synthetic oligonucleotide
ttggagtctgtcgttaagggacatctgatc

SEQ ID NO: 120879 - DNA, 30 bp, Artificial Sequence
  Synthetic oligonucleotide
cataaagtgcgcgaaccaacaaccttgatc

SEQ ID NO: 120880 - DNA, 30 bp, Artificial Sequence
  Synthetic oligonucleotide
taacgtgaccacgacggtacaaaacatatc

SEQ ID NO: 120881 - DNA, 30 bp, Artificial Sequence
  Synthetic oligonucleotide
cctgaaacgagtagtaacggaggccatatc

SEQ ID NO: 120882 - DNA, 30 bp, Artificial Sequence
  Synthetic oligonucleotide
cagactgtaaaaggttagcgcgccgatatc

SEQ ID NO: 120883 - DNA, 30 bp, Artificial Sequence
  Synthetic oligonucleotide
agacagccggttaggcacacaggcgatatc

SEQ ID NO: 120884 - DNA, 30 bp, Artificial Sequence
  Synthetic oligonucleotide
gtaataagagtagcatcggagctcgatatc

SEQ ID NO: 120885 - DNA, 30 bp, Artificial Sequence
  Synthetic oligonucleotide
ggaggatagagttctcaaactaggtatatc

SEQ ID NO: 120886 - DNA, 30 bp, Artificial Sequence
  Synthetic oligonucleotide
gataggtacaattcgtcttagtgttatatc

SEQ ID NO: 120887 - DNA, 30 bp, Artificial Sequence
  Synthetic oligonucleotide
ctcaacatgacactgagtgcatccactatc

SEQ ID NO: 120888 - DNA, 30 bp, Artificial Sequence
  Synthetic oligonucleotide
acacgctagggggcgtacgcttgggctatc

SEQ ID NO: 120889 - DNA, 30 bp, Artificial Sequence
  Synthetic oligonucleotide
atccatcctcggcgggtagagaaatctatc

SEQ ID NO: 120890 - DNA, 30 bp, Artificial Sequence
  Synthetic oligonucleotide
cattgaagatctggtaacgtactccgtatc

SEQ ID NO: 120891 - DNA, 30 bp, Artificial Sequence
  Synthetic oligonucleotide
ggtcgtggcgccgtggtgtaaagtcgtatc

SEQ ID NO: 120892 - DNA, 30 bp, Artificial Sequence
  Synthetic oligonucleotide
taacaccgacgtacgtttatggccggtatc

SEQ ID NO: 120893 - DNA, 30 bp, Artificial Sequence
  Synthetic oligonucleotide
cttcctcagcataagaaacgtgggtgtatc

SEQ ID NO: 120894 - DNA, 30 bp, Artificial Sequence
  Synthetic oligonucleotide
ggtccgggcttaaagctaccaagttgtatc

SEQ ID NO: 120895 - DNA, 30 bp, Artificial Sequence
  Synthetic oligonucleotide
gtaaaacaagatgaccgtccatccattatc

SEQ ID NO: 120896 - DNA, 30 bp, Artificial Sequence
  Synthetic oligonucleotide
cgaggggaggtgacattctagtatattatc

SEQ ID NO: 120897 - DNA, 30 bp, Artificial Sequence
  Synthetic oligonucleotide
atggtagtggcccagatgagtcaccttatc

SEQ ID NO: 120898 - DNA, 30 bp, Artificial Sequence
  Synthetic oligonucleotide
gaacgacgggttcccctgctaattcttatc

SEQ ID NO: 120899 - DNA, 30 bp, Artificial Sequence
  Synthetic oligonucleotide
tatgcaacgagttataatctgtaggttatc

SEQ ID NO: 120900 - DNA, 30 bp, Artificial Sequence
  Synthetic oligonucleotide
gtctgtaccccctttaacatcgacaaactc

SEQ ID NO: 120901 - DNA, 30 bp, Artificial Sequence
  Synthetic oligonucleotide
aactagcgttaagaagtgtcgccgaaactc

SEQ ID NO: 120902 - DNA, 30 bp, Artificial Sequence
  Synthetic oligonucleotide
cttaagcccatagatatcatcgttaaactc

SEQ ID NO: 120903 - DNA, 30 bp, Artificial Sequence
  Synthetic oligonucleotide
aaaggtcacggtattcacaggaagcaactc

SEQ ID NO: 120904 - DNA, 30 bp, Artificial Sequence
  Synthetic oligonucleotide
gaggggtaatgtgcatgacaatcgcaactc

SEQ ID NO: 120905 - DNA, 30 bp, Artificial Sequence
  Synthetic oligonucleotide
cgaattgccctatgcacccagtatgaactc

SEQ ID NO: 120906 - DNA, 30 bp, Artificial Sequence
  Synthetic oligonucleotide
ccgttcgaaaacacgtgtaaccaataactc

SEQ ID NO: 120907 - DNA, 30 bp, Artificial Sequence
  Synthetic oligonucleotide
agcctaaactcaagtaacaagaattaactc

SEQ ID NO: 120908 - DNA, 30 bp, Artificial Sequence
  Synthetic oligonucleotide
gcggcttacgtctaaaccgatcatacactc

SEQ ID NO: 120909 - DNA, 30 bp, Artificial Sequence
  Synthetic oligonucleotide
ggtaggagggttttgcttcaaaaagcactc

SEQ ID NO: 120910 - DNA, 30 bp, Artificial Sequence
  Synthetic oligonucleotide
gccgcaatcgcggggaaagctcacgcactc

SEQ ID NO: 120911 - DNA, 30 bp, Artificial Sequence
  Synthetic oligonucleotide
tcgaatgcgtttgacaggggtgccgcactc

SEQ ID NO: 120912 - DNA, 31 bp, Artificial Sequence
  Synthetic oligonucleotide
aggacgacacgccgagtatgtgagtgcactc

SEQ ID NO: 120913 - DNA, 30 bp, Artificial Sequence
  Synthetic oligonucleotide
cgggtgaaaccccgcaagccaaccagactc

SEQ ID NO: 120914 - DNA, 30 bp, Artificial Sequence
  Synthetic oligonucleotide
gacgatttcgtcaggatacacatcagactc

SEQ ID NO: 120915 - DNA, 30 bp, Artificial Sequence
  Synthetic oligonucleotide
cgttagggtgcgcagacataagcacgactc

SEQ ID NO: 120916 - DNA, 30 bp, Artificial Sequence
  Synthetic oligonucleotide
ttcggtgaaagagttgtgcactcacgactc

SEQ ID NO: 120917 - DNA, 30 bp, Artificial Sequence
  Synthetic oligonucleotide
tcgtgttataccatgctcaagtaaggactc

SEQ ID NO: 120918 - DNA, 30 bp, Artificial Sequence
  Synthetic oligonucleotide
ggagtcgatatatcgacattagcaggactc

SEQ ID NO: 120919 - DNA, 31 bp, Artificial Sequence
  Synthetic oligonucleotide
gcatccagcactagatagacaatccggactc

SEQ ID NO: 120920 - DNA, 30 bp, Artificial Sequence
  Synthetic oligonucleotide
tcgggttcctaaatagtgccaactggactc

SEQ ID NO: 120921 - DNA, 31 bp, Artificial Sequence
  Synthetic oligonucleotide
gttcgaccgctagaaccgatgatagtgactc

SEQ ID NO: 120922 - DNA, 30 bp, Artificial Sequence
  Synthetic oligonucleotide
tcaaaggagtaacgaaagcaatacatactc

SEQ ID NO: 120923 - DNA, 30 bp, Artificial Sequence
  Synthetic oligonucleotide
acgaactcgcatccaatcgtacggatactc

SEQ ID NO: 120924 - DNA, 30 bp, Artificial Sequence
  Synthetic oligonucleotide
caatagcgcagtcccagagagactatactc

SEQ ID NO: 120925 - DNA, 30 bp, Artificial Sequence
  Synthetic oligonucleotide
cgaacttgtcaccttagggatactatactc

SEQ ID NO: 120926 - DNA, 31 bp, Artificial Sequence
  Synthetic oligonucleotide
ttgagttcatgctaagtagaaataggtactc

SEQ ID NO: 120927 - DNA, 30 bp, Artificial Sequence
  Synthetic oligonucleotide
agtaggagccagtcgtgaagctaggtactc

SEQ ID NO: 120928 - DNA, 30 bp, Artificial Sequence
  Synthetic oligonucleotide
gtcggtatatccgaaaacgcgggggtactc

SEQ ID NO: 120929 - DNA, 30 bp, Artificial Sequence
  Synthetic oligonucleotide
gtgcccgcactaaatgattcatagttactc

SEQ ID NO: 120930 - DNA, 30 bp, Artificial Sequence
  Synthetic oligonucleotide
tgtaagaaagcactcaccgatggtaacctc

SEQ ID NO: 120931 - DNA, 30 bp, Artificial Sequence
  Synthetic oligonucleotide
gatgagaagttgacagggtaacaagacctc

SEQ ID NO: 120932 - DNA, 30 bp, Artificial Sequence
  Synthetic oligonucleotide
gcgaccgataggtttgggcgaagtcccctc

SEQ ID NO: 120933 - DNA, 30 bp, Artificial Sequence
  Synthetic oligonucleotide
aacgcactaaggtgatttaataacgccctc

SEQ ID NO: 120934 - DNA, 30 bp, Artificial Sequence
  Synthetic oligonucleotide
agttaaaaagagagaacgtatagggccctc

SEQ ID NO: 120935 - DNA, 30 bp, Artificial Sequence
  Synthetic oligonucleotide
accgtaaggagcactacgggtagcagcctc

SEQ ID NO: 120936 - DNA, 30 bp, Artificial Sequence
  Synthetic oligonucleotide
tagtgcgaaaacaagcggtaattacgcctc

SEQ ID NO: 120937 - DNA, 30 bp, Artificial Sequence
  Synthetic oligonucleotide
agacgaatacccccgctagaaggccgcctc

SEQ ID NO: 120938 - DNA, 30 bp, Artificial Sequence
  Synthetic oligonucleotide
tatgatcgacgtcgtgaacccacaggcctc

SEQ ID NO: 120939 - DNA, 30 bp, Artificial Sequence
  Synthetic oligonucleotide
ttacgtgatagaccataaggaccgggcctc

SEQ ID NO: 120940 - DNA, 30 bp, Artificial Sequence
  Synthetic oligonucleotide
gccgcctacctgaagaaggagaggggcctc

SEQ ID NO: 120941 - DNA, 30 bp, Artificial Sequence
  Synthetic oligonucleotide
acgtcctagctaattgtgtatttgggcctc

SEQ ID NO: 120942 - DNA, 30 bp, Artificial Sequence
  Synthetic oligonucleotide
gatgtattggatcaacagactgactgcctc

SEQ ID NO: 120943 - DNA, 30 bp, Artificial Sequence
  Synthetic oligonucleotide
agagaggtccaattagtaactttcatcctc

SEQ ID NO: 120944 - DNA, 30 bp, Artificial Sequence
  Synthetic oligonucleotide
ccggcgagctgtcttgggcaattcctcctc

SEQ ID NO: 120945 - DNA, 30 bp, Artificial Sequence
  Synthetic oligonucleotide
atgcgtatgcggtggccgtctcgtctcctc

SEQ ID NO: 120946 - DNA, 30 bp, Artificial Sequence
  Synthetic oligonucleotide
ggtaggaggaagagggcagactttctcctc

SEQ ID NO: 120947 - DNA, 30 bp, Artificial Sequence
  Synthetic oligonucleotide
gcgaatgtgtaggggcatcatatcttcctc

SEQ ID NO: 120948 - DNA, 30 bp, Artificial Sequence
  Synthetic oligonucleotide
tacgtaataattgtggatcataatttcctc

SEQ ID NO: 120949 - DNA, 30 bp, Artificial Sequence
  Synthetic oligonucleotide
agctgcaagaaatcattccgccccaagctc

SEQ ID NO: 120950 - DNA, 30 bp, Artificial Sequence
  Synthetic oligonucleotide
accgggtactgatgacaaacatagaagctc

SEQ ID NO: 120951 - DNA, 30 bp, Artificial Sequence
  Synthetic oligonucleotide
cggtaaggattctactcgcgctgacagctc

SEQ ID NO: 120952 - DNA, 30 bp, Artificial Sequence
  Synthetic oligonucleotide
atgttacatccaagaggagaacaccagctc

SEQ ID NO: 120953 - DNA, 30 bp, Artificial Sequence
  Synthetic oligonucleotide
tgttaggttcgtaggctcaatttgcagctc

SEQ ID NO: 120954 - DNA, 30 bp, Artificial Sequence
  Synthetic oligonucleotide
acttggtaaatgggaccgagggtagagctc

SEQ ID NO: 120955 - DNA, 30 bp, Artificial Sequence
  Synthetic oligonucleotide
tcgtgcactatgcataaacaaggggagctc

SEQ ID NO: 120956 - DNA, 30 bp, Artificial Sequence
  Synthetic oligonucleotide
accggctgcagttcgcaacacggtgagctc

SEQ ID NO: 120957 - DNA, 30 bp, Artificial Sequence
  Synthetic oligonucleotide
gccaactgagagcgcaaaacatactagctc

SEQ ID NO: 120958 - DNA, 30 bp, Artificial Sequence
  Synthetic oligonucleotide
gcgagatatgaagataggtaagcctagctc

SEQ ID NO: 120959 - DNA, 30 bp, Artificial Sequence
  Synthetic oligonucleotide
ctgacagttatatcttgcaagcagtagctc

SEQ ID NO: 120960 - DNA, 30 bp, Artificial Sequence
  Synthetic oligonucleotide
acacggggcagactgcggaatttcacgctc

SEQ ID NO: 120961 - DNA, 30 bp, Artificial Sequence
  Synthetic oligonucleotide
aacttgaaaagtgaaagaaaggtagcgctc

SEQ ID NO: 120962 - DNA, 30 bp, Artificial Sequence
  Synthetic oligonucleotide
gtggtgcagtggtatagatctacggcgctc

SEQ ID NO: 120963 - DNA, 30 bp, Artificial Sequence
  Synthetic oligonucleotide
tcgtataatacgtataacaaataaaggctc

SEQ ID NO: 120964 - DNA, 30 bp, Artificial Sequence
  Synthetic oligonucleotide
cgttcacatgaagtattaaaggacaggctc

SEQ ID NO: 120965 - DNA, 30 bp, Artificial Sequence
  Synthetic oligonucleotide
ccacagacacaaatgtgaaaagtagggctc

SEQ ID NO: 120966 - DNA, 30 bp, Artificial Sequence
  Synthetic oligonucleotide
cggattggttacaaaggcaaatatgggctc

SEQ ID NO: 120967 - DNA, 30 bp, Artificial Sequence
  Synthetic oligonucleotide
taagacccgatgattcagctgcgatggctc

SEQ ID NO: 120968 - DNA, 30 bp, Artificial Sequence
  Synthetic oligonucleotide
aggaatggtcttcgcatttcggggtggctc

SEQ ID NO: 120969 - DNA, 30 bp, Artificial Sequence
  Synthetic oligonucleotide
tcagattagttatgatcttaataaatgctc

SEQ ID NO: 120970 - DNA, 30 bp, Artificial Sequence
  Synthetic oligonucleotide
agagcgggtgtagggtggtggaccatgctc

SEQ ID NO: 120971 - DNA, 30 bp, Artificial Sequence
  Synthetic oligonucleotide
caacctaattcttccaaggcgattatgctc

SEQ ID NO: 120972 - DNA, 30 bp, Artificial Sequence
  Synthetic oligonucleotide
cttcgggcggatcatctatattcactgctc

SEQ ID NO: 120973 - DNA, 30 bp, Artificial Sequence
  Synthetic oligonucleotide
cataccaaacggggtggtgaagttctgctc

SEQ ID NO: 120974 - DNA, 30 bp, Artificial Sequence
  Synthetic oligonucleotide
tcactcggtggtaaagtcatctttgtgctc

SEQ ID NO: 120975 - DNA, 30 bp, Artificial Sequence
  Synthetic oligonucleotide
tcatccataacctgggattgtccacatctc

SEQ ID NO: 120976 - DNA, 31 bp, Artificial Sequence
  Synthetic oligonucleotide
atgcatgcgatttggaaagcgtgtgcatctc

SEQ ID NO: 120977 - DNA, 30 bp, Artificial Sequence
  Synthetic oligonucleotide
cgtgttcaggaaattaacacgtattatctc

SEQ ID NO: 120978 - DNA, 30 bp, Artificial Sequence
  Synthetic oligonucleotide
gcgcatatctcaattgaatttatcactctc

SEQ ID NO: 120979 - DNA, 30 bp, Artificial Sequence
  Synthetic oligonucleotide
acacgtggcgcgaccacgtgcgcgactctc

SEQ ID NO: 120980 - DNA, 30 bp, Artificial Sequence
  Synthetic oligonucleotide
atgcccctatggacaagaggtgtgactctc

SEQ ID NO: 120981 - DNA, 30 bp, Artificial Sequence
  Synthetic oligonucleotide
gcgaaaccacgcgtcaattctgcgcctctc

SEQ ID NO: 120982 - DNA, 30 bp, Artificial Sequence
  Synthetic oligonucleotide
tgggaaggggggctggaacgcaaagctctc

SEQ ID NO: 120983 - DNA, 30 bp, Artificial Sequence
  Synthetic oligonucleotide
aggataacctcgtaccgtccttgcgctctc

SEQ ID NO: 120984 - DNA, 30 bp, Artificial Sequence
  Synthetic oligonucleotide
gggcagtcaactattcacaccaatgctctc

SEQ ID NO: 120985 - DNA, 30 bp, Artificial Sequence
  Synthetic oligonucleotide
catttaggccaagcaaaggtgctcagtctc

SEQ ID NO: 120986 - DNA, 30 bp, Artificial Sequence
  Synthetic oligonucleotide
cactaataaaagagggtaccaaatagtctc

SEQ ID NO: 120987 - DNA, 30 bp, Artificial Sequence
  Synthetic oligonucleotide
aggttcaaactaaggtcaagactcggtctc

SEQ ID NO: 120988 - DNA, 30 bp, Artificial Sequence
  Synthetic oligonucleotide
agcgaggagttgctcacctgtaggggtctc

SEQ ID NO: 120989 - DNA, 30 bp, Artificial Sequence
  Synthetic oligonucleotide
acggctataaggcgtgtcctagatcttctc

SEQ ID NO: 120990 - DNA, 30 bp, Artificial Sequence
  Synthetic oligonucleotide
agcacctcagaggggccggtggtagttctc

SEQ ID NO: 120991 - DNA, 30 bp, Artificial Sequence
  Synthetic oligonucleotide
cgaggataggcaaaggcttgttgtgttctc

SEQ ID NO: 120992 - DNA, 30 bp, Artificial Sequence
  Synthetic oligonucleotide
aggcagacatgtagttgaaggaaaaaagtc

SEQ ID NO: 120993 - DNA, 30 bp, Artificial Sequence
  Synthetic oligonucleotide
cgggaagcgctacccgaggcacccaaagtc

SEQ ID NO: 120994 - DNA, 30 bp, Artificial Sequence
  Synthetic oligonucleotide
atccccaacgtcggaaccacgtccaaagtc

SEQ ID NO: 120995 - DNA, 30 bp, Artificial Sequence
  Synthetic oligonucleotide
aacctcggtcttacggtcgcgaagaaagtc

SEQ ID NO: 120996 - DNA, 30 bp, Artificial Sequence
  Synthetic oligonucleotide
actccctagtaagtacatgcgaaacaagtc

SEQ ID NO: 120997 - DNA, 30 bp, Artificial Sequence
  Synthetic oligonucleotide
acttacgtagggtaacaataccgggaagtc

SEQ ID NO: 120998 - DNA, 30 bp, Artificial Sequence
  Synthetic oligonucleotide
cctgggccatagatagtgctgcatgaagtc

SEQ ID NO: 120999 - DNA, 30 bp, Artificial Sequence
  Synthetic oligonucleotide
gaaacttagcgtgaaaattgggcataagtc

SEQ ID NO: 121000 - DNA, 30 bp, Artificial Sequence
  Synthetic oligonucleotide
ggttgggggcgctatacagagtgataagtc

SEQ ID NO: 121001 - DNA, 30 bp, Artificial Sequence
  Synthetic oligonucleotide
gggtaacacttcgtaggcaaagcctaagtc

SEQ ID NO: 121002 - DNA, 30 bp, Artificial Sequence
  Synthetic oligonucleotide
cctctgtcaaaggatacgtcgagctaagtc

SEQ ID NO: 121003 - DNA, 30 bp, Artificial Sequence
  Synthetic oligonucleotide
tcaatcggtcaagctgaatgaccttaagtc

SEQ ID NO: 121004 - DNA, 30 bp, Artificial Sequence
  Synthetic oligonucleotide
ccataccagcaagggtttgcgtcttaagtc

SEQ ID NO: 121005 - DNA, 30 bp, Artificial Sequence
  Synthetic oligonucleotide
acgtaatgacgctaccagaaccacacagtc

SEQ ID NO: 121006 - DNA, 30 bp, Artificial Sequence
  Synthetic oligonucleotide
tacatcgtgtgtaaagttcagagcacagtc

SEQ ID NO: 121007 - DNA, 31 bp, Artificial Sequence
  Synthetic oligonucleotide
cacacgagtagaagcgatttgtgtagcagtc

SEQ ID NO: 121008 - DNA, 30 bp, Artificial Sequence
  Synthetic oligonucleotide
tgggttagaaagttaaaacagcagtcagtc

SEQ ID NO: 121009 - DNA, 29 bp, Artificial Sequence
  Synthetic oligonucleotide
agatattgagtatggctagaacgtcagtc

SEQ ID NO: 121010 - DNA, 30 bp, Artificial Sequence
  Synthetic oligonucleotide
cgggcggattctacgaaatctccgtcagtc

SEQ ID NO: 121011 - DNA, 30 bp, Artificial Sequence
  Synthetic oligonucleotide
tcctcccggtgaacagcgctctattcagtc

SEQ ID NO: 121012 - DNA, 30 bp, Artificial Sequence
  Synthetic oligonucleotide
atcctgagtgccagcgttataagttcagtc

SEQ ID NO: 121013 - DNA, 30 bp, Artificial Sequence
  Synthetic oligonucleotide
aaaatataggagaggtgggaaggttcagtc

SEQ ID NO: 121014 - DNA, 30 bp, Artificial Sequence
  Synthetic oligonucleotide
aactaggtgccggaggatcatggttcagtc

SEQ ID NO: 121015 - DNA, 30 bp, Artificial Sequence
  Synthetic oligonucleotide
cctccggggtagctaggctcatgttcagtc

SEQ ID NO: 121016 - DNA, 30 bp, Artificial Sequence
  Synthetic oligonucleotide
atctacgggacaccggagttgtgaagagtc

SEQ ID NO: 121017 - DNA, 30 bp, Artificial Sequence
  Synthetic oligonucleotide
gcaggtcgggatcggcggtcgaccagagtc

SEQ ID NO: 121018 - DNA, 30 bp, Artificial Sequence
  Synthetic oligonucleotide
acagaggtgagttcgtgacagtcacgagtc

SEQ ID NO: 121019 - DNA, 30 bp, Artificial Sequence
  Synthetic oligonucleotide
atagagaggtcacggggtgcgtcacgagtc

SEQ ID NO: 121020 - DNA, 30 bp, Artificial Sequence
  Synthetic oligonucleotide
atgggggcaattcctccgtccaatcgagtc

SEQ ID NO: 121021 - DNA, 30 bp, Artificial Sequence
  Synthetic oligonucleotide
ggcacgttcctgcaaggcatccagggagtc

SEQ ID NO: 121022 - DNA, 30 bp, Artificial Sequence
  Synthetic oligonucleotide
cggttcgggaccggtacaagcggatgagtc

SEQ ID NO: 121023 - DNA, 30 bp, Artificial Sequence
  Synthetic oligonucleotide
ctcatacggacgtcaactcgaggctgagtc

SEQ ID NO: 121024 - DNA, 30 bp, Artificial Sequence
  Synthetic oligonucleotide
aacttaggtgtgcgactagtaacttgagtc

SEQ ID NO: 121025 - DNA, 30 bp, Artificial Sequence
  Synthetic oligonucleotide
acattggtcacagggatgatcgcaatagtc

SEQ ID NO: 121026 - DNA, 30 bp, Artificial Sequence
  Synthetic oligonucleotide
tccgacaatttaactgttttcgcgatagtc

SEQ ID NO: 121027 - DNA, 30 bp, Artificial Sequence
  Synthetic oligonucleotide
gctgtagtgggtaactcatataatatagtc

SEQ ID NO: 121028 - DNA, 30 bp, Artificial Sequence
  Synthetic oligonucleotide
gcggtgagagtactctcgtagttcctagtc

SEQ ID NO: 121029 - DNA, 30 bp, Artificial Sequence
  Synthetic oligonucleotide
ccaccgccgtaggatccagcgatgctagtc

SEQ ID NO: 121030 - DNA, 30 bp, Artificial Sequence
  Synthetic oligonucleotide
ctaggctggattcctctgacttatctagtc

SEQ ID NO: 121031 - DNA, 30 bp, Artificial Sequence
  Synthetic oligonucleotide
taggagccggaggtggggtccattctagtc

SEQ ID NO: 121032 - DNA, 30 bp, Artificial Sequence
  Synthetic oligonucleotide
gaacgtaacgatagtccgacaggcgtagtc

SEQ ID NO: 121033 - DNA, 30 bp, Artificial Sequence
  Synthetic oligonucleotide
aagacaaataaaaatccgggacaggtagtc

SEQ ID NO: 121034 - DNA, 30 bp, Artificial Sequence
  Synthetic oligonucleotide
gagggcccatatttaggcatttcggtagtc

SEQ ID NO: 121035 - DNA, 30 bp, Artificial Sequence
  Synthetic oligonucleotide
catgaatggataacatttgaactggtagtc

SEQ ID NO: 121036 - DNA, 30 bp, Artificial Sequence
  Synthetic oligonucleotide
ataaagagtgtgttcattaggtatgtagtc

SEQ ID NO: 121037 - DNA, 30 bp, Artificial Sequence
  Synthetic oligonucleotide
gcaacgctaagaaggaccagtaaattagtc

SEQ ID NO: 121038 - DNA, 30 bp, Artificial Sequence
  Synthetic oligonucleotide
gtggggatacatagaattagggggcacgtc

SEQ ID NO: 121039 - DNA, 30 bp, Artificial Sequence
  Synthetic oligonucleotide
cagggaatatcgtcctttgacaaagacgtc

SEQ ID NO: 121040 - DNA, 30 bp, Artificial Sequence
  Synthetic oligonucleotide
atttagaggaaacgtaaaaagccggacgtc

SEQ ID NO: 121041 - DNA, 30 bp, Artificial Sequence
  Synthetic oligonucleotide
tgcatcggatgcgttgtttacccatacgtc

SEQ ID NO: 121042 - DNA, 30 bp, Artificial Sequence
  Synthetic oligonucleotide
gagaagtcaggatatgcacagaggtacgtc

SEQ ID NO: 121043 - DNA, 30 bp, Artificial Sequence
  Synthetic oligonucleotide
tgagcgtcacctgcaactcggcattacgtc

SEQ ID NO: 121044 - DNA, 30 bp, Artificial Sequence
  Synthetic oligonucleotide
gaagagcgtgttagcattcattacaccgtc

SEQ ID NO: 121045 - DNA, 30 bp, Artificial Sequence
  Synthetic oligonucleotide
tcaagcaggattgagaaggcacagaccgtc

SEQ ID NO: 121046 - DNA, 30 bp, Artificial Sequence
  Synthetic oligonucleotide
tggctacctttaaacatggcatggaccgtc

SEQ ID NO: 121047 - DNA, 30 bp, Artificial Sequence
  Synthetic oligonucleotide
agccaagattctgccacggaccttgccgtc

SEQ ID NO: 121048 - DNA, 30 bp, Artificial Sequence
  Synthetic oligonucleotide
cactgaccctgtactggacaattatccgtc

SEQ ID NO: 121049 - DNA, 30 bp, Artificial Sequence
  Synthetic oligonucleotide
gtcgtgaaggcatgccatggatgttccgtc

SEQ ID NO: 121050 - DNA, 30 bp, Artificial Sequence
  Synthetic oligonucleotide
tatccagccagatttcatagacatcgcgtc

SEQ ID NO: 121051 - DNA, 30 bp, Artificial Sequence
  Synthetic oligonucleotide
aaaccagggctaataacaagggtcggcgtc

SEQ ID NO: 121052 - DNA, 30 bp, Artificial Sequence
  Synthetic oligonucleotide
ttccaccgtgagggggtaattaagggcgtc

SEQ ID NO: 121053 - DNA, 30 bp, Artificial Sequence
  Synthetic oligonucleotide
ctataagcaaaactttataaggtgggcgtc

SEQ ID NO: 121054 - DNA, 30 bp, Artificial Sequence
  Synthetic oligonucleotide
ggtccatgaagaccgtatcgggtgggcgtc

SEQ ID NO: 121055 - DNA, 30 bp, Artificial Sequence
  Synthetic oligonucleotide
catttaaaagggtggcatgagtactgcgtc

SEQ ID NO: 121056 - DNA, 30 bp, Artificial Sequence
  Synthetic oligonucleotide
tcaagtacgtcttgcggacaaccgtgcgtc

SEQ ID NO: 121057 - DNA, 30 bp, Artificial Sequence
  Synthetic oligonucleotide
ggtagaccgcccctccgtgaatccatcgtc

SEQ ID NO: 121058 - DNA, 30 bp, Artificial Sequence
  Synthetic oligonucleotide
aggggcttgaattcaactgtcgggatcgtc

SEQ ID NO: 121059 - DNA, 30 bp, Artificial Sequence
  Synthetic oligonucleotide
gcaatccacgcaagcgagagcacagtcgtc

SEQ ID NO: 121060 - DNA, 30 bp, Artificial Sequence
  Synthetic oligonucleotide
gactctgactccattgtgagaacggtcgtc

SEQ ID NO: 121061 - DNA, 30 bp, Artificial Sequence
  Synthetic oligonucleotide
cacaagggacgaagcgttttgactgtcgtc

SEQ ID NO: 121062 - DNA, 30 bp, Artificial Sequence
  Synthetic oligonucleotide
gagaaaattacgatatttgggcctgtcgtc

SEQ ID NO: 121063 - DNA, 30 bp, Artificial Sequence
  Synthetic oligonucleotide
tcgttctgatggttgtcaagtggcttcgtc

SEQ ID NO: 121064 - DNA, 30 bp, Artificial Sequence
  Synthetic oligonucleotide
agtaaaatgaagggggtatgctacaaggtc

SEQ ID NO: 121065 - DNA, 30 bp, Artificial Sequence
  Synthetic oligonucleotide
gaaggtcacaaattgagacggcagaaggtc

SEQ ID NO: 121066 - DNA, 30 bp, Artificial Sequence
  Synthetic oligonucleotide
aacagggaaagatgggtgccgcggaaggtc

SEQ ID NO: 121067 - DNA, 30 bp, Artificial Sequence
  Synthetic oligonucleotide
tgcgagtttgtgggagcgggctataaggtc

SEQ ID NO: 121068 - DNA, 30 bp, Artificial Sequence
  Synthetic oligonucleotide
atgagagacgtgagtcgggcagtctaggtc

SEQ ID NO: 121069 - DNA, 30 bp, Artificial Sequence
  Synthetic oligonucleotide
atcaaacgtacaggggcgttgttgtaggtc

SEQ ID NO: 121070 - DNA, 31 bp, Artificial Sequence
  Synthetic oligonucleotide
gaaacattccacttcgaggccgggaacggtc

SEQ ID NO: 121071 - DNA, 30 bp, Artificial Sequence
  Synthetic oligonucleotide
cgatatagtatccattggtccaccccggtc

SEQ ID NO: 121072 - DNA, 30 bp, Artificial Sequence
  Synthetic oligonucleotide
aggggtccagggtctaaagccagcgcggtc

SEQ ID NO: 121073 - DNA, 30 bp, Artificial Sequence
  Synthetic oligonucleotide
ctgaccaagtcgttctaaagtaccagggtc

SEQ ID NO: 121074 - DNA, 30 bp, Artificial Sequence
  Synthetic oligonucleotide
gagatataatgcctgtagaagactagggtc

SEQ ID NO: 121075 - DNA, 30 bp, Artificial Sequence
  Synthetic oligonucleotide
tcggtccccctcgcttaccgttcacgggtc

SEQ ID NO: 121076 - DNA, 31 bp, Artificial Sequence
  Synthetic oligonucleotide
gtaaataacggatcatgtctactacggggtc

SEQ ID NO: 121077 - DNA, 30 bp, Artificial Sequence
  Synthetic oligonucleotide
gacggacgacgggtgggaccgcgatgggtc

SEQ ID NO: 121078 - DNA, 30 bp, Artificial Sequence
  Synthetic oligonucleotide
agcaggtacatcatgggcgagagctgggtc

SEQ ID NO: 121079 - DNA, 30 bp, Artificial Sequence
  Synthetic oligonucleotide
ataatcgctaaaattctgtgagggtgggtc

SEQ ID NO: 121080 - DNA, 30 bp, Artificial Sequence
  Synthetic oligonucleotide
agattcagttattacgactagttgtgggtc

SEQ ID NO: 121081 - DNA, 30 bp, Artificial Sequence
  Synthetic oligonucleotide
taatacaaacatttggtgctctgactggtc

SEQ ID NO: 121082 - DNA, 30 bp, Artificial Sequence
  Synthetic oligonucleotide
tcgccggagggcgagcgatataacctggtc

SEQ ID NO: 121083 - DNA, 30 bp, Artificial Sequence
  Synthetic oligonucleotide
cacgtccgcaattatcaatttaatctggtc

SEQ ID NO: 121084 - DNA, 30 bp, Artificial Sequence
  Synthetic oligonucleotide
ttacatttcagataaaataagagtgtggtc

SEQ ID NO: 121085 - DNA, 30 bp, Artificial Sequence
  Synthetic oligonucleotide
gacataagccgccttgcactgagtgtggtc

SEQ ID NO: 121086 - DNA, 30 bp, Artificial Sequence
  Synthetic oligonucleotide
gacagcgagatagatcactggtagaatgtc

SEQ ID NO: 121087 - DNA, 30 bp, Artificial Sequence
  Synthetic oligonucleotide
ggtgccaatgagccaggtcggtggaatgtc

SEQ ID NO: 121088 - DNA, 30 bp, Artificial Sequence
  Synthetic oligonucleotide
cacgagttcgcaagatttgggggtaatgtc

SEQ ID NO: 121089 - DNA, 30 bp, Artificial Sequence
  Synthetic oligonucleotide
ccatcgtcataaacaaataagtggcatgtc

SEQ ID NO: 121090 - DNA, 30 bp, Artificial Sequence
  Synthetic oligonucleotide
gaacctcaaagatgaataatggttcatgtc

SEQ ID NO: 121091 - DNA, 30 bp, Artificial Sequence
  Synthetic oligonucleotide
aacagcatcagcggggattacatcgatgtc

SEQ ID NO: 121092 - DNA, 30 bp, Artificial Sequence
  Synthetic oligonucleotide
tctaaccggccgaccgatcgagcggatgtc

SEQ ID NO: 121093 - DNA, 30 bp, Artificial Sequence
  Synthetic oligonucleotide
ttggtcgttttgtctccgtgttactatgtc

SEQ ID NO: 121094 - DNA, 30 bp, Artificial Sequence
  Synthetic oligonucleotide
cgttccagtcgcaatcaagccggctatgtc

SEQ ID NO: 121095 - DNA, 30 bp, Artificial Sequence
  Synthetic oligonucleotide
attatcaagtcaggacagcgtggttatgtc

SEQ ID NO: 121096 - DNA, 30 bp, Artificial Sequence
  Synthetic oligonucleotide
tgagcgtcgctaccaccaaggttttatgtc

SEQ ID NO: 121097 - DNA, 30 bp, Artificial Sequence
  Synthetic oligonucleotide
ggcttattaagggtgtcgcttctaactgtc

SEQ ID NO: 121098 - DNA, 30 bp, Artificial Sequence
  Synthetic oligonucleotide
aaaaaaaagtctgggcgcactaagcctgtc

SEQ ID NO: 121099 - DNA, 30 bp, Artificial Sequence
  Synthetic oligonucleotide
ggtaggtgttgggcaacaaccttgcctgtc

SEQ ID NO: 121100 - DNA, 30 bp, Artificial Sequence
  Synthetic oligonucleotide
gtcctgagtgggttatgatgcgaggctgtc

SEQ ID NO: 121101 - DNA, 30 bp, Artificial Sequence
  Synthetic oligonucleotide
tgctagcagtaataaaaatgcggggctgtc

SEQ ID NO: 121102 - DNA, 30 bp, Artificial Sequence
  Synthetic oligonucleotide
ggtttcgagcccaccatcaatctatctgtc

SEQ ID NO: 121103 - DNA, 30 bp, Artificial Sequence
  Synthetic oligonucleotide
gaagtcagcgaaacgagcatatggtctgtc

SEQ ID NO: 121104 - DNA, 30 bp, Artificial Sequence
  Synthetic oligonucleotide
cctgtgaggttgagtttcaccgattctgtc

SEQ ID NO: 121105 - DNA, 30 bp, Artificial Sequence
  Synthetic oligonucleotide
agacacatgggtagctctccagaaagtgtc

SEQ ID NO: 121106 - DNA, 30 bp, Artificial Sequence
  Synthetic oligonucleotide
aacgtacgactcgtgaacgggacaagtgtc

SEQ ID NO: 121107 - DNA, 30 bp, Artificial Sequence
  Synthetic oligonucleotide
acactctaccttagggtcggggggagtgtc

SEQ ID NO: 121108 - DNA, 30 bp, Artificial Sequence
  Synthetic oligonucleotide
gccgatcagccaatgtttcgttggagtgtc

SEQ ID NO: 121109 - DNA, 30 bp, Artificial Sequence
  Synthetic oligonucleotide
taactgactacgaatgtctaggtacgtgtc

SEQ ID NO: 121110 - DNA, 30 bp, Artificial Sequence
  Synthetic oligonucleotide
atatcgcgtttagaacgtgtagatcgtgtc

SEQ ID NO: 121111 - DNA, 30 bp, Artificial Sequence
  Synthetic oligonucleotide
tatcacgatatagtgcggactcccggtgtc

SEQ ID NO: 121112 - DNA, 30 bp, Artificial Sequence
  Synthetic oligonucleotide
ataagggttaacggattataacttggtgtc

SEQ ID NO: 121113 - DNA, 30 bp, Artificial Sequence
  Synthetic oligonucleotide
tcagtgcagatcaatctagcataatgtgtc

SEQ ID NO: 121114 - DNA, 30 bp, Artificial Sequence
  Synthetic oligonucleotide
aggttggtgcggctatgacgggcatgtgtc

SEQ ID NO: 121115 - DNA, 30 bp, Artificial Sequence
  Synthetic oligonucleotide
agcagtaccgtagggccaactcagtgtgtc

SEQ ID NO: 121116 - DNA, 30 bp, Artificial Sequence
  Synthetic oligonucleotide
ttctaggtttgtaatactcgaggttgtgtc

SEQ ID NO: 121117 - DNA, 30 bp, Artificial Sequence
  Synthetic oligonucleotide
cacacgcagggagatgaggatcaaattgtc

SEQ ID NO: 121118 - DNA, 30 bp, Artificial Sequence
  Synthetic oligonucleotide
gcgttcaacacagacactagcgtaattgtc

SEQ ID NO: 121119 - DNA, 30 bp, Artificial Sequence
  Synthetic oligonucleotide
ctaacatgctctccgagtgaagacattgtc

SEQ ID NO: 121120 - DNA, 30 bp, Artificial Sequence
  Synthetic oligonucleotide
acaatgtgatgttatctgcgtggacttgtc

SEQ ID NO: 121121 - DNA, 30 bp, Artificial Sequence
  Synthetic oligonucleotide
gcagaggaggcttcaccctgccgatttgtc

SEQ ID NO: 121122 - DNA, 30 bp, Artificial Sequence
  Synthetic oligonucleotide
atgtactcgctcgtcgttccagtcaaattc

SEQ ID NO: 121123 - DNA, 30 bp, Artificial Sequence
  Synthetic oligonucleotide
tgctgaagatgcccaaaaaaacgtaaattc

SEQ ID NO: 121124 - DNA, 30 bp, Artificial Sequence
  Synthetic oligonucleotide
acgtcaaggagccgctccactaaacaattc

SEQ ID NO: 121125 - DNA, 30 bp, Artificial Sequence
  Synthetic oligonucleotide
cggaaagggatcggtgaataacaccaattc

SEQ ID NO: 121126 - DNA, 30 bp, Artificial Sequence
  Synthetic oligonucleotide
agcacgacttgttagcacacctagcaattc

SEQ ID NO: 121127 - DNA, 30 bp, Artificial Sequence
  Synthetic oligonucleotide
aacaatccgccggctggcaatgaagaattc

SEQ ID NO: 121128 - DNA, 30 bp, Artificial Sequence
  Synthetic oligonucleotide
cggtacaaggtgatttgaggactggaattc

SEQ ID NO: 121129 - DNA, 30 bp, Artificial Sequence
  Synthetic oligonucleotide
tagggtcgaatacgcaaacatgtggaattc

SEQ ID NO: 121130 - DNA, 30 bp, Artificial Sequence
  Synthetic oligonucleotide
gatgagtagtaagacatcacgtcgtaattc

SEQ ID NO: 121131 - DNA, 30 bp, Artificial Sequence
  Synthetic oligonucleotide
acgactgtagatgactaaaggaggtaattc

SEQ ID NO: 121132 - DNA, 30 bp, Artificial Sequence
  Synthetic oligonucleotide
agggtgcgtacttgcctactaaattaattc

SEQ ID NO: 121133 - DNA, 30 bp, Artificial Sequence
  Synthetic oligonucleotide
taccatgctagtcttccacgattcacattc

SEQ ID NO: 121134 - DNA, 30 bp, Artificial Sequence
  Synthetic oligonucleotide
caggcgtagatgccctatacttaagcattc

SEQ ID NO: 121135 - DNA, 30 bp, Artificial Sequence
  Synthetic oligonucleotide
tgggaaacttacaatttaccctattcattc

SEQ ID NO: 121136 - DNA, 30 bp, Artificial Sequence
  Synthetic oligonucleotide
caggtaagccgccacgagtaaacttcattc

SEQ ID NO: 121137 - DNA, 30 bp, Artificial Sequence
  Synthetic oligonucleotide
ggaagcatgtactgtgtcgccaagagattc

SEQ ID NO: 121138 - DNA, 30 bp, Artificial Sequence
  Synthetic oligonucleotide
gtaaaagagtccatatagccttagcgattc

SEQ ID NO: 121139 - DNA, 30 bp, Artificial Sequence
  Synthetic oligonucleotide
gtgcctgagagcgggtatacgatgcgattc

SEQ ID NO: 121140 - DNA, 30 bp, Artificial Sequence
  Synthetic oligonucleotide
cagtaacgaacgatgccagtggcgggattc

SEQ ID NO: 121141 - DNA, 30 bp, Artificial Sequence
  Synthetic oligonucleotide
gcaatgtggcaactcgcgtacaaatgattc

SEQ ID NO: 121142 - DNA, 30 bp, Artificial Sequence
  Synthetic oligonucleotide
tgctacaggagtagaaaaggagcatgattc

SEQ ID NO: 121143 - DNA, 30 bp, Artificial Sequence
  Synthetic oligonucleotide
taagagggacccaatcaaacggagtgattc

SEQ ID NO: 121144 - DNA, 30 bp, Artificial Sequence
  Synthetic oligonucleotide
aagtaaggtgtcaatatgacagtaatattc

SEQ ID NO: 121145 - DNA, 30 bp, Artificial Sequence
  Synthetic oligonucleotide
cgccgtaacaactgacacgaaccgctattc

SEQ ID NO: 121146 - DNA, 30 bp, Artificial Sequence
  Synthetic oligonucleotide
gtgcagtggatccgatcctgaacattattc

SEQ ID NO: 121147 - DNA, 30 bp, Artificial Sequence
  Synthetic oligonucleotide
acaaggtgctaatcggggatcatcttattc

SEQ ID NO: 121148 - DNA, 30 bp, Artificial Sequence
  Synthetic oligonucleotide
attcattgcggggagagggagcacgacttc

SEQ ID NO: 121149 - DNA, 28 bp, Artificial Sequence
  Synthetic oligonucleotide
aaggcttacagaaagcaataaggacttc

SEQ ID NO: 121150 - DNA, 30 bp, Artificial Sequence
  Synthetic oligonucleotide
tcatagtgggtggacggttattgggacttc

SEQ ID NO: 121151 - DNA, 30 bp, Artificial Sequence
  Synthetic oligonucleotide
actaggcagtacgggggacagtcctacttc

SEQ ID NO: 121152 - DNA, 30 bp, Artificial Sequence
  Synthetic oligonucleotide
ggtgttggtaagaatgttggagaaggcttc

SEQ ID NO: 121153 - DNA, 29 bp, Artificial Sequence
  Synthetic oligonucleotide
catctgtgtgctcggttataatcgtcttc

SEQ ID NO: 121154 - DNA, 30 bp, Artificial Sequence
  Synthetic oligonucleotide
tatgctatatcaacaggtctgcttgtcttc

SEQ ID NO: 121155 - DNA, 30 bp, Artificial Sequence
  Synthetic oligonucleotide
gcggataagccacgggaaagagaattcttc

SEQ ID NO: 121156 - DNA, 30 bp, Artificial Sequence
  Synthetic oligonucleotide
agcgaacggattacccacccgagcttcttc

SEQ ID NO: 121157 - DNA, 30 bp, Artificial Sequence
  Synthetic oligonucleotide
aacgggaacgatcccccatttaggcagttc

SEQ ID NO: 121158 - DNA, 30 bp, Artificial Sequence
  Synthetic oligonucleotide
tagccgtggaggttaagtagtagatagttc

SEQ ID NO: 121159 - DNA, 30 bp, Artificial Sequence
  Synthetic oligonucleotide
cgaatgtccagctcgataaacttctagttc

SEQ ID NO: 121160 - DNA, 30 bp, Artificial Sequence
  Synthetic oligonucleotide
gcgagggagtacaatcgcatgttctagttc

SEQ ID NO: 121161 - DNA, 30 bp, Artificial Sequence
  Synthetic oligonucleotide
agggcgtacagtgtccattgacaaacgttc

SEQ ID NO: 121162 - DNA, 30 bp, Artificial Sequence
  Synthetic oligonucleotide
gtggggcctacatcgtccgagctaacgttc

SEQ ID NO: 121163 - DNA, 30 bp, Artificial Sequence
  Synthetic oligonucleotide
tacgaaagacactaagttgccaatacgttc

SEQ ID NO: 121164 - DNA, 30 bp, Artificial Sequence
  Synthetic oligonucleotide
tgcaggctaggaagggtgaactccgcgttc

SEQ ID NO: 121165 - DNA, 30 bp, Artificial Sequence
  Synthetic oligonucleotide
cgtgcgttcctatctaaacgggcggcgttc

SEQ ID NO: 121166 - DNA, 30 bp, Artificial Sequence
  Synthetic oligonucleotide
gcaggtcggactcgttttgatgcttcgttc

SEQ ID NO: 121167 - DNA, 30 bp, Artificial Sequence
  Synthetic oligonucleotide
cgttgtactagggtcagagcaacaaggttc

SEQ ID NO: 121168 - DNA, 30 bp, Artificial Sequence
  Synthetic oligonucleotide
tcactccaactttgttaatgcgtaaggttc

SEQ ID NO: 121169 - DNA, 30 bp, Artificial Sequence
  Synthetic oligonucleotide
tgccgatgggaaagtaggatagcagggttc

SEQ ID NO: 121170 - DNA, 30 bp, Artificial Sequence
  Synthetic oligonucleotide
aacaagccctgacgactctgtatggggttc

SEQ ID NO: 121171 - DNA, 30 bp, Artificial Sequence
  Synthetic oligonucleotide
ttggtctgctaggaagaaatggctgggttc

SEQ ID NO: 121172 - DNA, 30 bp, Artificial Sequence
  Synthetic oligonucleotide
agtcgtgggaacgaagcatactgatggttc

SEQ ID NO: 121173 - DNA, 30 bp, Artificial Sequence
  Synthetic oligonucleotide
cgagatgcgggcggcccgataagtatgttc

SEQ ID NO: 121174 - DNA, 30 bp, Artificial Sequence
  Synthetic oligonucleotide
tgcgaactacatattcttgctaaactgttc

SEQ ID NO: 121175 - DNA, 30 bp, Artificial Sequence
  Synthetic oligonucleotide
aagttcgtgctaggcgtcgacaaggtgttc

SEQ ID NO: 121176 - DNA, 30 bp, Artificial Sequence
  Synthetic oligonucleotide
agggtcccgtaaatgctgataaatgtgttc

SEQ ID NO: 121177 - DNA, 32 bp, Artificial Sequence
  Synthetic oligonucleotide
tgccagagcatcaaagcaatctgcgtaatttc

SEQ ID NO: 121178 - DNA, 30 bp, Artificial Sequence
  Synthetic oligonucleotide
agaacctccgaataaccctacttccatttc

SEQ ID NO: 121179 - DNA, 30 bp, Artificial Sequence
  Synthetic oligonucleotide
tgaaaccgcctggtataggtgtggcatttc

SEQ ID NO: 121180 - DNA, 30 bp, Artificial Sequence
  Synthetic oligonucleotide
gggtagagagacagcgaagatagagatttc

SEQ ID NO: 121181 - DNA, 30 bp, Artificial Sequence
  Synthetic oligonucleotide
acatgtagtatatatgttaagaacgatttc

SEQ ID NO: 121182 - DNA, 30 bp, Artificial Sequence
  Synthetic oligonucleotide
ggcatacggatagaactgtcgtctgatttc

SEQ ID NO: 121183 - DNA, 30 bp, Artificial Sequence
  Synthetic oligonucleotide
aggattctgggcaggtaagccgggtatttc

SEQ ID NO: 121184 - DNA, 30 bp, Artificial Sequence
  Synthetic oligonucleotide
agtcgcaacttggaatagcacgtttatttc

SEQ ID NO: 121185 - DNA, 30 bp, Artificial Sequence
  Synthetic oligonucleotide
aagcgatgagggtcgtatctcaggactttc

SEQ ID NO: 121186 - DNA, 31 bp, Artificial Sequence
  Synthetic oligonucleotide
ccaggggcaggtgacaccattgtgagctttc

SEQ ID NO: 121187 - DNA, 30 bp, Artificial Sequence
  Synthetic oligonucleotide
aagacttaggcgttagttgggcgaagtttc

SEQ ID NO: 121188 - DNA, 30 bp, Artificial Sequence
  Synthetic oligonucleotide
cacgtatatttacaacatcctcctagtttc

SEQ ID NO: 121189 - DNA, 30 bp, Artificial Sequence
  Synthetic oligonucleotide
aaagactagacgacattagtctaatgtttc

SEQ ID NO: 121190 - DNA, 27 bp, Artificial Sequence
  Synthetic oligonucleotide
ggctgggaacagcagtaggccattttc

SEQ ID NO: 121191 - DNA, 30 bp, Artificial Sequence
  Synthetic oligonucleotide
gggggttaaggctggatgatttctcttttc

SEQ ID NO: 121192 - DNA, 30 bp, Artificial Sequence
  Synthetic oligonucleotide
acgcggtacgaaagtgactctacagttttc

SEQ ID NO: 121193 - DNA, 30 bp, Artificial Sequence
  Synthetic oligonucleotide
tcttatggccgtctactgcggtgtgttttc

SEQ ID NO: 121194 - DNA, 30 bp, Artificial Sequence
  Synthetic oligonucleotide
ccacttgagatcgtaagaccgcaaaaaaag

SEQ ID NO: 121195 - DNA, 30 bp, Artificial Sequence
  Synthetic oligonucleotide
ctgtatcattaaaattacgcaaccaaaaag

SEQ ID NO: 121196 - DNA, 30 bp, Artificial Sequence
  Synthetic oligonucleotide
cctggggttcgcgggcacaaaggcaaaaag

SEQ ID NO: 121197 - DNA, 30 bp, Artificial Sequence
  Synthetic oligonucleotide
gcttgctctaataatgaaacagagaaaaag

SEQ ID NO: 121198 - DNA, 30 bp, Artificial Sequence
  Synthetic oligonucleotide
ccggatacgattgcataccacgagaaaaag

SEQ ID NO: 121199 - DNA, 30 bp, Artificial Sequence
  Synthetic oligonucleotide
tgcgccagatgatggtgttttatgaaaaag

SEQ ID NO: 121200 - DNA, 30 bp, Artificial Sequence
  Synthetic oligonucleotide
ccgatacgagtcgagccataatataaaaag

SEQ ID NO: 121201 - DNA, 29 bp, Artificial Sequence
  Synthetic oligonucleotide
tagtataggtgatccagactgctaaaaag

SEQ ID NO: 121202 - DNA, 30 bp, Artificial Sequence
  Synthetic oligonucleotide
tggaggcttagccgtcgctggggacaaaag

SEQ ID NO: 121203 - DNA, 30 bp, Artificial Sequence
  Synthetic oligonucleotide
gcgtgaataagagtcgatcttggccaaaag

SEQ ID NO: 121204 - DNA, 30 bp, Artificial Sequence
  Synthetic oligonucleotide
ggcaaatggctccgaggttccttccaaaag

SEQ ID NO: 121205 - DNA, 30 bp, Artificial Sequence
  Synthetic oligonucleotide
caggagccggatgcggggatacaagaaaag

SEQ ID NO: 121206 - DNA, 30 bp, Artificial Sequence
  Synthetic oligonucleotide
ctggccggctaaatagtatttggtgaaaag

SEQ ID NO: 121207 - DNA, 30 bp, Artificial Sequence
  Synthetic oligonucleotide
cacggggctggggttatcggttaataaaag

SEQ ID NO: 121208 - DNA, 30 bp, Artificial Sequence
  Synthetic oligonucleotide
tcaaaagaaacattagtagaatcataaaag

SEQ ID NO: 121209 - DNA, 30 bp, Artificial Sequence
  Synthetic oligonucleotide
gcgtggtcgcgcaagtagtctatataaaag

SEQ ID NO: 121210 - DNA, 30 bp, Artificial Sequence
  Synthetic oligonucleotide
aagcccaattatcagatggtaagctaaaag

SEQ ID NO: 121211 - DNA, 30 bp, Artificial Sequence
  Synthetic oligonucleotide
cctggacagcttcactcacagtcgtaaaag

SEQ ID NO: 121212 - DNA, 30 bp, Artificial Sequence
  Synthetic oligonucleotide
ggttggcgtgaggttgagttagggtaaaag

SEQ ID NO: 121213 - DNA, 30 bp, Artificial Sequence
  Synthetic oligonucleotide
aagtctgattactttcggataatgtaaaag

SEQ ID NO: 121214 - DNA, 30 bp, Artificial Sequence
  Synthetic oligonucleotide
acggttcgccgcagagggctagtgtaaaag

SEQ ID NO: 121215 - DNA, 30 bp, Artificial Sequence
  Synthetic oligonucleotide
ggcggggctcacccgctaaactaaacaaag

SEQ ID NO: 121216 - DNA, 30 bp, Artificial Sequence
  Synthetic oligonucleotide
cgctaatacactagatacgtacgcacaaag

SEQ ID NO: 121217 - DNA, 31 bp, Artificial Sequence
  Synthetic oligonucleotide
cagcgtcctgacgtatcagaaccgcacaaag

SEQ ID NO: 121218 - DNA, 30 bp, Artificial Sequence
  Synthetic oligonucleotide
gaataaaatggatcccacggtgtagcaaag

SEQ ID NO: 121219 - DNA, 30 bp, Artificial Sequence
  Synthetic oligonucleotide
cgtccgtcatatgcctatcttggggcaaag

SEQ ID NO: 121220 - DNA, 30 bp, Artificial Sequence
  Synthetic oligonucleotide
atgcttagcgtcggtgcgataattgcaaag

SEQ ID NO: 121221 - DNA, 30 bp, Artificial Sequence
  Synthetic oligonucleotide
attggcaggacggagagcaaatcatcaaag

SEQ ID NO: 121222 - DNA, 30 bp, Artificial Sequence
  Synthetic oligonucleotide
gtacattccccattgcattatgtgtcaaag

SEQ ID NO: 121223 - DNA, 30 bp, Artificial Sequence
  Synthetic oligonucleotide
acataatcttgtcgtgtgatagtttcaaag

SEQ ID NO: 121224 - DNA, 30 bp, Artificial Sequence
  Synthetic oligonucleotide
ccccgtgggcagtgctgtccagtaagaaag

SEQ ID NO: 121225 - DNA, 30 bp, Artificial Sequence
  Synthetic oligonucleotide
ggagagggagttggaaccgcggtaagaaag

SEQ ID NO: 121226 - DNA, 30 bp, Artificial Sequence
  Synthetic oligonucleotide
actggtactaactaatctagaacgagaaag

SEQ ID NO: 121227 - DNA, 30 bp, Artificial Sequence
  Synthetic oligonucleotide
gggtgcgtcgactagagcacaccgagaaag

SEQ ID NO: 121228 - DNA, 30 bp, Artificial Sequence
  Synthetic oligonucleotide
gtgatggaaccaagcgaaaagccacgaaag

SEQ ID NO: 121229 - DNA, 30 bp, Artificial Sequence
  Synthetic oligonucleotide
taaatacattcggagtagacccaaggaaag

SEQ ID NO: 121230 - DNA, 30 bp, Artificial Sequence
  Synthetic oligonucleotide
acaattcagggtctagcttggacgggaaag

SEQ ID NO: 121231 - DNA, 30 bp, Artificial Sequence
  Synthetic oligonucleotide
gtcggtatcgaatgtaggcgttcgggaaag

SEQ ID NO: 121232 - DNA, 30 bp, Artificial Sequence
  Synthetic oligonucleotide
agattgaacatataatgtgacaggggaaag

SEQ ID NO: 121233 - DNA, 30 bp, Artificial Sequence
  Synthetic oligonucleotide
ggtcagcaacgtctaggaacctggggaaag

SEQ ID NO: 121234 - DNA, 30 bp, Artificial Sequence
  Synthetic oligonucleotide
gcggcgtgcagaaaatgtcatactggaaag

SEQ ID NO: 121235 - DNA, 30 bp, Artificial Sequence
  Synthetic oligonucleotide
aggggggggatggttggggactgtggaaag

SEQ ID NO: 121236 - DNA, 30 bp, Artificial Sequence
  Synthetic oligonucleotide
tacgtgtaggtccatgttgggccatgaaag

SEQ ID NO: 121237 - DNA, 30 bp, Artificial Sequence
  Synthetic oligonucleotide
tgaaccgcccccggcgctgcgagctgaaag

SEQ ID NO: 121238 - DNA, 30 bp, Artificial Sequence
  Synthetic oligonucleotide
cgaagggtactacttttaccacagtgaaag

SEQ ID NO: 121239 - DNA, 30 bp, Artificial Sequence
  Synthetic oligonucleotide
agaaacacggtttagttgctagcgtgaaag

SEQ ID NO: 121240 - DNA, 30 bp, Artificial Sequence
  Synthetic oligonucleotide
ttgcaaacttgcaagggcaatataataaag

SEQ ID NO: 121241 - DNA, 30 bp, Artificial Sequence
  Synthetic oligonucleotide
gtgagtccggcgaaaattgtgctaataaag

SEQ ID NO: 121242 - DNA, 30 bp, Artificial Sequence
  Synthetic oligonucleotide
agcgctctacagagtttatgcccgataaag

SEQ ID NO: 121243 - DNA, 30 bp, Artificial Sequence
  Synthetic oligonucleotide
ccacgatcgacggcggatcatctgataaag

SEQ ID NO: 121244 - DNA, 30 bp, Artificial Sequence
  Synthetic oligonucleotide
agaggacggggttgctagtcaaaactaaag

SEQ ID NO: 121245 - DNA, 30 bp, Artificial Sequence
  Synthetic oligonucleotide
gtacagtcgcggcgaaatgccgagctaaag

SEQ ID NO: 121246 - DNA, 30 bp, Artificial Sequence
  Synthetic oligonucleotide
tgggagttcaacgatataggtctagtaaag

SEQ ID NO: 121247 - DNA, 30 bp, Artificial Sequence
  Synthetic oligonucleotide
gcggcatagcgcgttagtgctggcgtaaag

SEQ ID NO: 121248 - DNA, 30 bp, Artificial Sequence
  Synthetic oligonucleotide
tagtaaggtctcggtagtatagctgtaaag

SEQ ID NO: 121249 - DNA, 30 bp, Artificial Sequence
  Synthetic oligonucleotide
attgcggaagaaggtcttccatcattaaag

SEQ ID NO: 121250 - DNA, 30 bp, Artificial Sequence
  Synthetic oligonucleotide
cggggtcaccgtgtaagcgcccacttaaag

SEQ ID NO: 121251 - DNA, 30 bp, Artificial Sequence
  Synthetic oligonucleotide
ctgcagtcaaagaatcagtcaccgttaaag

SEQ ID NO: 121252 - DNA, 30 bp, Artificial Sequence
  Synthetic oligonucleotide
tccagtattggcatagaattattgttaaag

SEQ ID NO: 121253 - DNA, 30 bp, Artificial Sequence
  Synthetic oligonucleotide
gtatatgctaaaaaattagtacttttaaag

SEQ ID NO: 121254 - DNA, 30 bp, Artificial Sequence
  Synthetic oligonucleotide
gagattagaaatggcgaacacgcaaacaag

SEQ ID NO: 121255 - DNA, 30 bp, Artificial Sequence
  Synthetic oligonucleotide
cagataggttaagctgcaatggcacacaag

SEQ ID NO: 121256 - DNA, 30 bp, Artificial Sequence
  Synthetic oligonucleotide
ttgctagtagggcgccacacacgccacaag

SEQ ID NO: 121257 - DNA, 30 bp, Artificial Sequence
  Synthetic oligonucleotide
tggaatgaaagcaaccaatgcacgcacaag

SEQ ID NO: 121258 - DNA, 30 bp, Artificial Sequence
  Synthetic oligonucleotide
ggtcagagcagctatcttgagtcgcacaag

SEQ ID NO: 121259 - DNA, 30 bp, Artificial Sequence
  Synthetic oligonucleotide
gcggcgaagcggtgctgtacggggcacaag

SEQ ID NO: 121260 - DNA, 30 bp, Artificial Sequence
  Synthetic oligonucleotide
gttaccaatcgaaaccgtattagtcacaag

SEQ ID NO: 121261 - DNA, 30 bp, Artificial Sequence
  Synthetic oligonucleotide
atgtatggcctgcacgtaccacgtcacaag

SEQ ID NO: 121262 - DNA, 30 bp, Artificial Sequence
  Synthetic oligonucleotide
tcattcaccaaaccagtcaacgcggacaag

SEQ ID NO: 121263 - DNA, 32 bp, Artificial Sequence
  Synthetic oligonucleotide
gggcttcaggaaattgtgttaaaggtgacaag

SEQ ID NO: 121264 - DNA, 30 bp, Artificial Sequence
  Synthetic oligonucleotide
tggacaccgattgtctacagtatatacaag

SEQ ID NO: 121265 - DNA, 30 bp, Artificial Sequence
  Synthetic oligonucleotide
tccatagaatttaaacgatccgactacaag

SEQ ID NO: 121266 - DNA, 30 bp, Artificial Sequence
  Synthetic oligonucleotide
tctactacgaaaggtacttgaatctacaag

SEQ ID NO: 121267 - DNA, 30 bp, Artificial Sequence
  Synthetic oligonucleotide
aaatccgcaaacacggcaaccgattacaag

SEQ ID NO: 121268 - DNA, 30 bp, Artificial Sequence
  Synthetic oligonucleotide
acgtttctatgactttggcatacttacaag

SEQ ID NO: 121269 - DNA, 30 bp, Artificial Sequence
  Synthetic oligonucleotide
ggggggggctgagagaccccgttcaccaag

SEQ ID NO: 121270 - DNA, 30 bp, Artificial Sequence
  Synthetic oligonucleotide
acccgtgaatctcccttcaacaagaccaag

SEQ ID NO: 121271 - DNA, 30 bp, Artificial Sequence
  Synthetic oligonucleotide
tttgagcttcggaagcgagttattaccaag

SEQ ID NO: 121272 - DNA, 30 bp, Artificial Sequence
  Synthetic oligonucleotide
actcgggtaagcgtttcaaatatccccaag

SEQ ID NO: 121273 - DNA, 30 bp, Artificial Sequence
  Synthetic oligonucleotide
gtgaacagtgcagcatacagtcggcccaag

SEQ ID NO: 121274 - DNA, 30 bp, Artificial Sequence
  Synthetic oligonucleotide
cgttgtgaatgctaggaacggcacgccaag

SEQ ID NO: 121275 - DNA, 30 bp, Artificial Sequence
  Synthetic oligonucleotide
cgctggggattttcggatttctacgccaag

SEQ ID NO: 121276 - DNA, 30 bp, Artificial Sequence
  Synthetic oligonucleotide
tttgcaattacgataggaaagtaggccaag

SEQ ID NO: 121277 - DNA, 30 bp, Artificial Sequence
  Synthetic oligonucleotide
gcatgaagttagacaagacgagcctccaag

SEQ ID NO: 121278 - DNA, 29 bp, Artificial Sequence
  Synthetic oligonucleotide
ttgatcctgtgtgaggtgcgtaaagcaag

SEQ ID NO: 121279 - DNA, 30 bp, Artificial Sequence
  Synthetic oligonucleotide
agtgcttcgagcgaaggagtattcagcaag

SEQ ID NO: 121280 - DNA, 30 bp, Artificial Sequence
  Synthetic oligonucleotide
agctctggaaaaatccttatctggagcaag

SEQ ID NO: 121281 - DNA, 30 bp, Artificial Sequence
  Synthetic oligonucleotide
gaaggggcttattgttggggattccgcaag

SEQ ID NO: 121282 - DNA, 30 bp, Artificial Sequence
  Synthetic oligonucleotide
gagaagggccctaattggctacctcgcaag

SEQ ID NO: 121283 - DNA, 30 bp, Artificial Sequence
  Synthetic oligonucleotide
aacggacgggcagcgacctagcccggcaag

SEQ ID NO: 121284 - DNA, 30 bp, Artificial Sequence
  Synthetic oligonucleotide
gatagctacacagtgtattagaggggcaag

SEQ ID NO: 121285 - DNA, 30 bp, Artificial Sequence
  Synthetic oligonucleotide
cgggatacgttactaagggtcctatgcaag

SEQ ID NO: 121286 - DNA, 30 bp, Artificial Sequence
  Synthetic oligonucleotide
cacccgaagcgatataagttgttatgcaag

SEQ ID NO: 121287 - DNA, 30 bp, Artificial Sequence
  Synthetic oligonucleotide
aatcaagaactggctgataatcactgcaag

SEQ ID NO: 121288 - DNA, 30 bp, Artificial Sequence
  Synthetic oligonucleotide
acacggtacgtccgggtatatcactgcaag

SEQ ID NO: 121289 - DNA, 30 bp, Artificial Sequence
  Synthetic oligonucleotide
ctcttagctcgactggataaggcctgcaag

SEQ ID NO: 121290 - DNA, 30 bp, Artificial Sequence
  Synthetic oligonucleotide
ggcttatcgtgttggcatggttaaatcaag

SEQ ID NO: 121291 - DNA, 30 bp, Artificial Sequence
  Synthetic oligonucleotide
gtgctggccaaaggatcctttacactcaag

SEQ ID NO: 121292 - DNA, 30 bp, Artificial Sequence
  Synthetic oligonucleotide
tgtaattatccacacaccaccccgctcaag

SEQ ID NO: 121293 - DNA, 30 bp, Artificial Sequence
  Synthetic oligonucleotide
acattacagtataactggtaagcgctcaag

SEQ ID NO: 121294 - DNA, 30 bp, Artificial Sequence
  Synthetic oligonucleotide
atgaaaagtcgttgcccagtaagtctcaag

SEQ ID NO: 121295 - DNA, 30 bp, Artificial Sequence
  Synthetic oligonucleotide
aatgcaaaagcagacccggttgaagtcaag

SEQ ID NO: 121296 - DNA, 30 bp, Artificial Sequence
  Synthetic oligonucleotide
ggtcattcactaagaggatggccagtcaag

SEQ ID NO: 121297 - DNA, 30 bp, Artificial Sequence
  Synthetic oligonucleotide
gccttaatggcgacagtaggcatcgtcaag

SEQ ID NO: 121298 - DNA, 30 bp, Artificial Sequence
  Synthetic oligonucleotide
ccctcttaaaagcggtcaagtggtgtcaag

SEQ ID NO: 121299 - DNA, 30 bp, Artificial Sequence
  Synthetic oligonucleotide
aaagtcatgggtgtaacgaagagattcaag

SEQ ID NO: 121300 - DNA, 30 bp, Artificial Sequence
  Synthetic oligonucleotide
atggtcacatcaaacttgcgttcaaagaag

SEQ ID NO: 121301 - DNA, 30 bp, Artificial Sequence
  Synthetic oligonucleotide
tgagggtcatgtaacatcatacagaagaag

SEQ ID NO: 121302 - DNA, 30 bp, Artificial Sequence
  Synthetic oligonucleotide
tggtagggcgccagcataggggcgaagaag

SEQ ID NO: 121303 - DNA, 30 bp, Artificial Sequence
  Synthetic oligonucleotide
ccggtgacaattgtgctggcaaggaagaag

SEQ ID NO: 121304 - DNA, 30 bp, Artificial Sequence
  Synthetic oligonucleotide
ggatttgcggtggcgacgatgagtaagaag

SEQ ID NO: 121305 - DNA, 30 bp, Artificial Sequence
  Synthetic oligonucleotide
cacatgttaatgggccaaccgtcacagaag

SEQ ID NO: 121306 - DNA, 30 bp, Artificial Sequence
  Synthetic oligonucleotide
gattattgcgggtacaagggcttccagaag

SEQ ID NO: 121307 - DNA, 30 bp, Artificial Sequence
  Synthetic oligonucleotide
gacgattataatgtgtaatctcggcagaag

SEQ ID NO: 121308 - DNA, 30 bp, Artificial Sequence
  Synthetic oligonucleotide
aaatatgctagttacctggaaggtcagaag

SEQ ID NO: 121309 - DNA, 30 bp, Artificial Sequence
  Synthetic oligonucleotide
atcaaccgaaaccacattaaataagagaag

SEQ ID NO: 121310 - DNA, 30 bp, Artificial Sequence
  Synthetic oligonucleotide
tggacttatcgaatacgtcgtggagagaag

SEQ ID NO: 121311 - DNA, 30 bp, Artificial Sequence
  Synthetic oligonucleotide
aatcagtgtctgacgagagggaacgagaag

SEQ ID NO: 121312 - DNA, 30 bp, Artificial Sequence
  Synthetic oligonucleotide
tgattggagagatagcaagggggggagaag

SEQ ID NO: 121313 - DNA, 30 bp, Artificial Sequence
  Synthetic oligonucleotide
agagtgaatcactaggcctggccatagaag

SEQ ID NO: 121314 - DNA, 30 bp, Artificial Sequence
  Synthetic oligonucleotide
ggattccaattgcgatcaaccagatagaag

SEQ ID NO: 121315 - DNA, 30 bp, Artificial Sequence
  Synthetic oligonucleotide
gtcggtgcttaagttataatccagtagaag

SEQ ID NO: 121316 - DNA, 30 bp, Artificial Sequence
  Synthetic oligonucleotide
tgatgtctaacgaaaagtgccccgtagaag

SEQ ID NO: 121317 - DNA, 30 bp, Artificial Sequence
  Synthetic oligonucleotide
gtctgatagaggatgtgcgccatttagaag

SEQ ID NO: 121318 - DNA, 30 bp, Artificial Sequence
  Synthetic oligonucleotide
tgcgtcaggcggacgtcaggtttttagaag

SEQ ID NO: 121319 - DNA, 30 bp, Artificial Sequence
  Synthetic oligonucleotide
ggtccttgcaaaaccggggtcgtcacgaag

SEQ ID NO: 121320 - DNA, 30 bp, Artificial Sequence
  Synthetic oligonucleotide
ataacccaaagtcaagaacaggttacgaag

SEQ ID NO: 121321 - DNA, 30 bp, Artificial Sequence
  Synthetic oligonucleotide
cgccttacaggcagatgtagtcagccgaag

SEQ ID NO: 121322 - DNA, 30 bp, Artificial Sequence
  Synthetic oligonucleotide
ctaatgcattactaaatcgataaagcgaag

SEQ ID NO: 121323 - DNA, 30 bp, Artificial Sequence
  Synthetic oligonucleotide
gcacgccccgagacccagggttaagcgaag

SEQ ID NO: 121324 - DNA, 30 bp, Artificial Sequence
  Synthetic oligonucleotide
tctggccatgaagttgctacggtagcgaag

SEQ ID NO: 121325 - DNA, 30 bp, Artificial Sequence
  Synthetic oligonucleotide
cgagatgcagaggtagcggaacaggcgaag

SEQ ID NO: 121326 - DNA, 30 bp, Artificial Sequence
  Synthetic oligonucleotide
gccgagtcttcaacgtaagcggaggcgaag

SEQ ID NO: 121327 - DNA, 30 bp, Artificial Sequence
  Synthetic oligonucleotide
actgtatgcgctcatgaaggaacggcgaag

SEQ ID NO: 121328 - DNA, 30 bp, Artificial Sequence
  Synthetic oligonucleotide
cttgcgggtgtcaattagttacgggcgaag

SEQ ID NO: 121329 - DNA, 30 bp, Artificial Sequence
  Synthetic oligonucleotide
gcgctaacggatccaaagcgcatggcgaag

SEQ ID NO: 121330 - DNA, 30 bp, Artificial Sequence
  Synthetic oligonucleotide
tcccgcttcacactggtaaaggatgcgaag

SEQ ID NO: 121331 - DNA, 30 bp, Artificial Sequence
  Synthetic oligonucleotide
aacaggtaaacgctataacggagtgcgaag

SEQ ID NO: 121332 - DNA, 30 bp, Artificial Sequence
  Synthetic oligonucleotide
agtaacttgtactgggggaacggtgcgaag

SEQ ID NO: 121333 - DNA, 30 bp, Artificial Sequence
  Synthetic oligonucleotide
cgaagcgccatatattcaaccaaatcgaag

SEQ ID NO: 121334 - DNA, 30 bp, Artificial Sequence
  Synthetic oligonucleotide
tccggtcctgtgtgcccattgaaatcgaag

SEQ ID NO: 121335 - DNA, 30 bp, Artificial Sequence
  Synthetic oligonucleotide
aaactggttgcgtactaattggcgtcgaag

SEQ ID NO: 121336 - DNA, 30 bp, Artificial Sequence
  Synthetic oligonucleotide
agggggccggtgcgcaaggtagggtcgaag

SEQ ID NO: 121337 - DNA, 30 bp, Artificial Sequence
  Synthetic oligonucleotide
tgaatacatgagcataaactaatgtcgaag

SEQ ID NO: 121338 - DNA, 30 bp, Artificial Sequence
  Synthetic oligonucleotide
atagtggcactggagggtcagcaaaggaag

SEQ ID NO: 121339 - DNA, 30 bp, Artificial Sequence
  Synthetic oligonucleotide
gccggttacgatgccggggcaacaaggaag

SEQ ID NO: 121340 - DNA, 30 bp, Artificial Sequence
  Synthetic oligonucleotide
agctagctctacgaaaatataattaggaag

SEQ ID NO: 121341 - DNA, 30 bp, Artificial Sequence
  Synthetic oligonucleotide
atgtgtgcgtggccgggaattacacggaag

SEQ ID NO: 121342 - DNA, 30 bp, Artificial Sequence
  Synthetic oligonucleotide
cgccaaagaggggtcttgtatagacggaag

SEQ ID NO: 121343 - DNA, 30 bp, Artificial Sequence
  Synthetic oligonucleotide
gaaagcatcatgaagtggaatgatcggaag

SEQ ID NO: 121344 - DNA, 30 bp, Artificial Sequence
  Synthetic oligonucleotide
tggtctgtattcggacaaagcagtcggaag

SEQ ID NO: 121345 - DNA, 30 bp, Artificial Sequence
  Synthetic oligonucleotide
ggatacggacctagatactcaattcggaag

SEQ ID NO: 121346 - DNA, 30 bp, Artificial Sequence
  Synthetic oligonucleotide
aaccggcgatgggaactaacagtcgggaag

SEQ ID NO: 121347 - DNA, 30 bp, Artificial Sequence
  Synthetic oligonucleotide
tagaagaaactcgcgcgtcaaacggggaag

SEQ ID NO: 121348 - DNA, 30 bp, Artificial Sequence
  Synthetic oligonucleotide
accaggtttataaagtccggatcggggaag

SEQ ID NO: 121349 - DNA, 30 bp, Artificial Sequence
  Synthetic oligonucleotide
gtgaacaatcttcgaggatctcctgggaag

SEQ ID NO: 121350 - DNA, 30 bp, Artificial Sequence
  Synthetic oligonucleotide
ggggaaaatgtgcttcccttgagatggaag

SEQ ID NO: 121351 - DNA, 30 bp, Artificial Sequence
  Synthetic oligonucleotide
cctttaaaaacaaagaagaattactggaag

SEQ ID NO: 121352 - DNA, 30 bp, Artificial Sequence
  Synthetic oligonucleotide
agcggtgcaagcggagtaaaatcgtggaag

SEQ ID NO: 121353 - DNA, 30 bp, Artificial Sequence
  Synthetic oligonucleotide
gttactgtagggtatcgataaaattggaag

SEQ ID NO: 121354 - DNA, 30 bp, Artificial Sequence
  Synthetic oligonucleotide
gtaatagcggttcgacagcaagcttggaag

SEQ ID NO: 121355 - DNA, 30 bp, Artificial Sequence
  Synthetic oligonucleotide
agcgacatggtaagaagtccccgttggaag

SEQ ID NO: 121356 - DNA, 30 bp, Artificial Sequence
  Synthetic oligonucleotide
gccaattcttcccagtgtcagtgcatgaag

SEQ ID NO: 121357 - DNA, 30 bp, Artificial Sequence
  Synthetic oligonucleotide
cggcctataggtatcttggccaatatgaag

SEQ ID NO: 121358 - DNA, 30 bp, Artificial Sequence
  Synthetic oligonucleotide
ctctccagagtgcctattgtcaaactgaag

SEQ ID NO: 121359 - DNA, 30 bp, Artificial Sequence
  Synthetic oligonucleotide
attgcggaaatttatcccagcgaactgaag

SEQ ID NO: 121360 - DNA, 30 bp, Artificial Sequence
  Synthetic oligonucleotide
gtataaatagcttgtgggcttgggctgaag

SEQ ID NO: 121361 - DNA, 30 bp, Artificial Sequence
  Synthetic oligonucleotide
cacggaacttgtacattcattcttctgaag

SEQ ID NO: 121362 - DNA, 30 bp, Artificial Sequence
  Synthetic oligonucleotide
acaggaccgtaaaagttcggttttctgaag

SEQ ID NO: 121363 - DNA, 30 bp, Artificial Sequence
  Synthetic oligonucleotide
caaactgtagcgagagtaggtctagtgaag

SEQ ID NO: 121364 - DNA, 30 bp, Artificial Sequence
  Synthetic oligonucleotide
tgaagtgtggactcaagaccattagtgaag

SEQ ID NO: 121365 - DNA, 30 bp, Artificial Sequence
  Synthetic oligonucleotide
ttcgcaagactttttcatggtccggtgaag

SEQ ID NO: 121366 - DNA, 30 bp, Artificial Sequence
  Synthetic oligonucleotide
gaaacgaccgtgtaacgaagttcattgaag

SEQ ID NO: 121367 - DNA, 30 bp, Artificial Sequence
  Synthetic oligonucleotide
gcacagaggtgtcaggcaattgtcttgaag

SEQ ID NO: 121368 - DNA, 30 bp, Artificial Sequence
  Synthetic oligonucleotide
tcgtttaaaacgctgtagagaaacaataag

SEQ ID NO: 121369 - DNA, 30 bp, Artificial Sequence
  Synthetic oligonucleotide
ggatgatcaatcacgactattacgaataag

SEQ ID NO: 121370 - DNA, 30 bp, Artificial Sequence
  Synthetic oligonucleotide
cggccctagatacgtacgtgtcttaataag

SEQ ID NO: 121371 - DNA, 30 bp, Artificial Sequence
  Synthetic oligonucleotide
ggtccgtcgcatacaattttgtttaataag

SEQ ID NO: 121372 - DNA, 30 bp, Artificial Sequence
  Synthetic oligonucleotide
caacccgagtgcggctaattatcacataag

SEQ ID NO: 121373 - DNA, 30 bp, Artificial Sequence
  Synthetic oligonucleotide
gtggtaggcgctgagcctatcttccataag

SEQ ID NO: 121374 - DNA, 30 bp, Artificial Sequence
  Synthetic oligonucleotide
agaatgctatctactcgctagtagcataag

SEQ ID NO: 121375 - DNA, 30 bp, Artificial Sequence
  Synthetic oligonucleotide
tctaaaccgttgaggcatttgtgagataag

SEQ ID NO: 121376 - DNA, 30 bp, Artificial Sequence
  Synthetic oligonucleotide
ctagcggaggagtcgctagttgacgataag

SEQ ID NO: 121377 - DNA, 30 bp, Artificial Sequence
  Synthetic oligonucleotide
aagctcggaggcccccattctgcggataag

SEQ ID NO: 121378 - DNA, 30 bp, Artificial Sequence
  Synthetic oligonucleotide
tgaccagccgcaaaattcgatgatgataag

SEQ ID NO: 121379 - DNA, 30 bp, Artificial Sequence
  Synthetic oligonucleotide
cgcggacggtagctcgttcgataatataag

SEQ ID NO: 121380 - DNA, 30 bp, Artificial Sequence
  Synthetic oligonucleotide
aacgtcgagaaaatgttaaataggtataag

SEQ ID NO: 121381 - DNA, 30 bp, Artificial Sequence
  Synthetic oligonucleotide
agagagagctaactggttcttggttataag

SEQ ID NO: 121382 - DNA, 30 bp, Artificial Sequence
  Synthetic oligonucleotide
gtccgaggggatcttgcccaacccactaag

SEQ ID NO: 121383 - DNA, 30 bp, Artificial Sequence
  Synthetic oligonucleotide
cacgctcctaaggcatagtgtaaacctaag

SEQ ID NO: 121384 - DNA, 30 bp, Artificial Sequence
  Synthetic oligonucleotide
gtataggccgtagaacaaacatggcctaag

SEQ ID NO: 121385 - DNA, 30 bp, Artificial Sequence
  Synthetic oligonucleotide
acaagagtcttcattggcttaggtcctaag

SEQ ID NO: 121386 - DNA, 30 bp, Artificial Sequence
  Synthetic oligonucleotide
tcaggtcaactaaccgcatgacttcctaag

SEQ ID NO: 121387 - DNA, 30 bp, Artificial Sequence
  Synthetic oligonucleotide
cagtattagggtctggatatccttcctaag

SEQ ID NO: 121388 - DNA, 30 bp, Artificial Sequence
  Synthetic oligonucleotide
acgatatgagttgtaagtggaggagctaag

SEQ ID NO: 121389 - DNA, 30 bp, Artificial Sequence
  Synthetic oligonucleotide
ccaaccggtcggggtgcgttaacatctaag

SEQ ID NO: 121390 - DNA, 30 bp, Artificial Sequence
  Synthetic oligonucleotide
ggtttgatgcttggctggtctggctctaag

SEQ ID NO: 121391 - DNA, 30 bp, Artificial Sequence
  Synthetic oligonucleotide
tgcacgaatatgtttaaatttttgtctaag

SEQ ID NO: 121392 - DNA, 30 bp, Artificial Sequence
  Synthetic oligonucleotide
ttgagtctctaacgagattgagccagtaag

SEQ ID NO: 121393 - DNA, 30 bp, Artificial Sequence
  Synthetic oligonucleotide
aagataaaattttaggtccgttccagtaag

SEQ ID NO: 121394 - DNA, 30 bp, Artificial Sequence
  Synthetic oligonucleotide
ccttctagcggaaaaatcagttggagtaag

SEQ ID NO: 121395 - DNA, 30 bp, Artificial Sequence
  Synthetic oligonucleotide
tgtggggaaggagaccgacaggatagtaag

SEQ ID NO: 121396 - DNA, 30 bp, Artificial Sequence
  Synthetic oligonucleotide
gctacttggccagacatcttcagacgtaag

SEQ ID NO: 121397 - DNA, 30 bp, Artificial Sequence
  Synthetic oligonucleotide
ccactagtattcgttagccaagagcgtaag

SEQ ID NO: 121398 - DNA, 30 bp, Artificial Sequence
  Synthetic oligonucleotide
acgatacgacgaagtcagatccctcgtaag

SEQ ID NO: 121399 - DNA, 30 bp, Artificial Sequence
  Synthetic oligonucleotide
caatccataagcaaaagcaccagaggtaag

SEQ ID NO: 121400 - DNA, 30 bp, Artificial Sequence
  Synthetic oligonucleotide
acatcactaacggaccagaggtgaggtaag

SEQ ID NO: 121401 - DNA, 30 bp, Artificial Sequence
  Synthetic oligonucleotide
tgataccaagggcatccctttgggggtaag

SEQ ID NO: 121402 - DNA, 30 bp, Artificial Sequence
  Synthetic oligonucleotide
gaccgattaataggtataagatatggtaag

SEQ ID NO: 121403 - DNA, 30 bp, Artificial Sequence
  Synthetic oligonucleotide
cacatcgaatttcgtaggaggtttggtaag

SEQ ID NO: 121404 - DNA, 30 bp, Artificial Sequence
  Synthetic oligonucleotide
caggtgaagatgcatagcattagttgtaag

SEQ ID NO: 121405 - DNA, 30 bp, Artificial Sequence
  Synthetic oligonucleotide
cacgttaacaaacagtgtggcaagattaag

SEQ ID NO: 121406 - DNA, 30 bp, Artificial Sequence
  Synthetic oligonucleotide
tttggagagaggaacaacgttgtacttaag

SEQ ID NO: 121407 - DNA, 30 bp, Artificial Sequence
  Synthetic oligonucleotide
gctaaaaaggcgggggcgtctcaagttaag

SEQ ID NO: 121408 - DNA, 30 bp, Artificial Sequence
  Synthetic oligonucleotide
taggttggatacgggattacgtctgttaag

SEQ ID NO: 121409 - DNA, 30 bp, Artificial Sequence
  Synthetic oligonucleotide
ccatagttcatggaagacaacagtgttaag

SEQ ID NO: 121410 - DNA, 30 bp, Artificial Sequence
  Synthetic oligonucleotide
ggatcgggcgtcgtgggatctacgtttaag

SEQ ID NO: 121411 - DNA, 30 bp, Artificial Sequence
  Synthetic oligonucleotide
ggacctcgatggcgtcatctgcggtttaag

SEQ ID NO: 121412 - DNA, 30 bp, Artificial Sequence
  Synthetic oligonucleotide
agataactcatggggaagatttggtttaag

SEQ ID NO: 121413 - DNA, 30 bp, Artificial Sequence
  Synthetic oligonucleotide
tagtcaacttgtgaaaaaagatcttttaag

SEQ ID NO: 121414 - DNA, 30 bp, Artificial Sequence
  Synthetic oligonucleotide
aacactagcgaagatccctagcacaaacag

SEQ ID NO: 121415 - DNA, 30 bp, Artificial Sequence
  Synthetic oligonucleotide
atctgaagtataccccaccgattcaaacag

SEQ ID NO: 121416 - DNA, 30 bp, Artificial Sequence
  Synthetic oligonucleotide
tgagaggtagctattgaattatggaaacag

SEQ ID NO: 121417 - DNA, 30 bp, Artificial Sequence
  Synthetic oligonucleotide
tttaaaacatatggaaaggagctgaaacag

SEQ ID NO: 121418 - DNA, 30 bp, Artificial Sequence
  Synthetic oligonucleotide
caacagacgtaggcaacgcgtgataaacag

SEQ ID NO: 121419 - DNA, 30 bp, Artificial Sequence
  Synthetic oligonucleotide
tacgtgtaagtagatcaggaatataaacag

SEQ ID NO: 121420 - DNA, 30 bp, Artificial Sequence
  Synthetic oligonucleotide
agtggtaaagcagaagtataagttaaacag

SEQ ID NO: 121421 - DNA, 30 bp, Artificial Sequence
  Synthetic oligonucleotide
gagggagagccactccctttatagcaacag

SEQ ID NO: 121422 - DNA, 30 bp, Artificial Sequence
  Synthetic oligonucleotide
tggtgacgtggggaacgcaatgcagaacag

SEQ ID NO: 121423 - DNA, 30 bp, Artificial Sequence
  Synthetic oligonucleotide
ctcggcctcgtctatctataaagcgaacag

SEQ ID NO: 121424 - DNA, 30 bp, Artificial Sequence
  Synthetic oligonucleotide
aagtcatgaataattctggtcagataacag

SEQ ID NO: 121425 - DNA, 30 bp, Artificial Sequence
  Synthetic oligonucleotide
atgacgtatacttcggtagtatgataacag

SEQ ID NO: 121426 - DNA, 31 bp, Artificial Sequence
  Synthetic oligonucleotide
ctcgaacaccagttcgagtgacttgtaacag

SEQ ID NO: 121427 - DNA, 30 bp, Artificial Sequence
  Synthetic oligonucleotide
aacgcaagcctatgggacgtggcttaacag

SEQ ID NO: 121428 - DNA, 30 bp, Artificial Sequence
  Synthetic oligonucleotide
acaagctcagcgattcgaggcgtaacacag

SEQ ID NO: 121429 - DNA, 30 bp, Artificial Sequence
  Synthetic oligonucleotide
ataaatcactgtaccctccggcacacacag

SEQ ID NO: 121430 - DNA, 30 bp, Artificial Sequence
  Synthetic oligonucleotide
agcgccggctcaaagcatacaagcacacag

SEQ ID NO: 121431 - DNA, 30 bp, Artificial Sequence
  Synthetic oligonucleotide
ggtttcaagtactcagataagaagacacag

SEQ ID NO: 121432 - DNA, 30 bp, Artificial Sequence
  Synthetic oligonucleotide
agtgggaaaggagctaacgtacggacacag

SEQ ID NO: 121433 - DNA, 30 bp, Artificial Sequence
  Synthetic oligonucleotide
agagtaggggcggagcgcgcgctgacacag

SEQ ID NO: 121434 - DNA, 30 bp, Artificial Sequence
  Synthetic oligonucleotide
agttaaagattcaaaagagcagccgcacag

SEQ ID NO: 121435 - DNA, 30 bp, Artificial Sequence
  Synthetic oligonucleotide
ggtgtaatgacctaagggttgagctcacag

SEQ ID NO: 121436 - DNA, 30 bp, Artificial Sequence
  Synthetic oligonucleotide
atcagtcatcatgttagacatcagtcacag

SEQ ID NO: 121437 - DNA, 30 bp, Artificial Sequence
  Synthetic oligonucleotide
agatattgggagcatcggctgtagtcacag

SEQ ID NO: 121438 - DNA, 30 bp, Artificial Sequence
  Synthetic oligonucleotide
gcgtcgcgtaaaggccgtggtatgtcacag

SEQ ID NO: 121439 - DNA, 30 bp, Artificial Sequence
  Synthetic oligonucleotide
aggaactggccgtgggtaccatcttcacag

SEQ ID NO: 121440 - DNA, 30 bp, Artificial Sequence
  Synthetic oligonucleotide
aatggaccgcccgagttcattggttcacag

SEQ ID NO: 121441 - DNA, 30 bp, Artificial Sequence
  Synthetic oligonucleotide
acaattgcgattgcaatccctacaagacag

SEQ ID NO: 121442 - DNA, 30 bp, Artificial Sequence
  Synthetic oligonucleotide
aatgggctacaacttttgtgttcaagacag

SEQ ID NO: 121443 - DNA, 30 bp, Artificial Sequence
  Synthetic oligonucleotide
tccaacgtgcgtagttcggtcagaagacag

SEQ ID NO: 121444 - DNA, 30 bp, Artificial Sequence
  Synthetic oligonucleotide
ttcgcgtaatcattcgtgacgtacagacag

SEQ ID NO: 121445 - DNA, 30 bp, Artificial Sequence
  Synthetic oligonucleotide
gtgcacatacagagcagaccgagcagacag

SEQ ID NO: 121446 - DNA, 30 bp, Artificial Sequence
  Synthetic oligonucleotide
ccgaacgcctgggtttcggcgagtagacag

SEQ ID NO: 121447 - DNA, 30 bp, Artificial Sequence
  Synthetic oligonucleotide
attaagggaaagctttaatgaggtagacag

SEQ ID NO: 121448 - DNA, 30 bp, Artificial Sequence
  Synthetic oligonucleotide
gtatgtattacagatgtccccgaccgacag

SEQ ID NO: 121449 - DNA, 31 bp, Artificial Sequence
  Synthetic oligonucleotide
tttggtggcaatccggaggtgctaccgacag

SEQ ID NO: 121450 - DNA, 30 bp, Artificial Sequence
  Synthetic oligonucleotide
agggaggggaacaaacacaacccccgacag

SEQ ID NO: 121451 - DNA, 30 bp, Artificial Sequence
  Synthetic oligonucleotide
acaccgatgaaactccgcgagttaggacag

SEQ ID NO: 121452 - DNA, 30 bp, Artificial Sequence
  Synthetic oligonucleotide
ggagactcgggagtaagcaggggcggacag

SEQ ID NO: 121453 - DNA, 30 bp, Artificial Sequence
  Synthetic oligonucleotide
catcatgttgttcggcattccgcatgacag

SEQ ID NO: 121454 - DNA, 30 bp, Artificial Sequence
  Synthetic oligonucleotide
atgctgtcgaataaccaactttcctgacag

SEQ ID NO: 121455 - DNA, 28 bp, Artificial Sequence
  Synthetic oligonucleotide
gataactattgccgagcaaagctgacag

SEQ ID NO: 121456 - DNA, 30 bp, Artificial Sequence
  Synthetic oligonucleotide
caaaacgcgtttcgtagtggcatgtgacag

SEQ ID NO: 121457 - DNA, 30 bp, Artificial Sequence
  Synthetic oligonucleotide
gctctggaacagggcgtgccaccttgacag

SEQ ID NO: 121458 - DNA, 30 bp, Artificial Sequence
  Synthetic oligonucleotide
gtgaggctatagtaggcatctatttgacag

SEQ ID NO: 121459 - DNA, 30 bp, Artificial Sequence
  Synthetic oligonucleotide
acttgggtccaggtctgttggaaaatacag

SEQ ID NO: 121460 - DNA, 30 bp, Artificial Sequence
  Synthetic oligonucleotide
ccgggaaaccgagagccacctccaatacag

SEQ ID NO: 121461 - DNA, 29 bp, Artificial Sequence
  Synthetic oligonucleotide
gaagacagcggagctattaacccatacag

SEQ ID NO: 121462 - DNA, 30 bp, Artificial Sequence
  Synthetic oligonucleotide
gtatagattccttacccaatatcgatacag

SEQ ID NO: 121463 - DNA, 31 bp, Artificial Sequence
  Synthetic oligonucleotide
agaaattatggccccaaattgcgggatacag

SEQ ID NO: 121464 - DNA, 30 bp, Artificial Sequence
  Synthetic oligonucleotide
attctggaaacatgatcgatcgctatacag

SEQ ID NO: 121465 - DNA, 30 bp, Artificial Sequence
  Synthetic oligonucleotide
gtactgggcgtgtcaaaaccggacctacag

SEQ ID NO: 121466 - DNA, 30 bp, Artificial Sequence
  Synthetic oligonucleotide
tggtaatttaattcgcaccatcatctacag

SEQ ID NO: 121467 - DNA, 30 bp, Artificial Sequence
  Synthetic oligonucleotide
tagaagcaggctcgcgtataaagattacag

SEQ ID NO: 121468 - DNA, 30 bp, Artificial Sequence
  Synthetic oligonucleotide
cagcttgagccagtgaaagtggacaaccag

SEQ ID NO: 121469 - DNA, 30 bp, Artificial Sequence
  Synthetic oligonucleotide
cacctatacgaatgccggggaaaacaccag

SEQ ID NO: 121470 - DNA, 30 bp, Artificial Sequence
  Synthetic oligonucleotide
tcgcggaagattccggaaaggaaccaccag

SEQ ID NO: 121471 - DNA, 30 bp, Artificial Sequence
  Synthetic oligonucleotide
tgcccgattcgctatttccgctaccaccag

SEQ ID NO: 121472 - DNA, 30 bp, Artificial Sequence
  Synthetic oligonucleotide
gaccgaggcaggattaggtcggggcaccag

SEQ ID NO: 121473 - DNA, 30 bp, Artificial Sequence
  Synthetic oligonucleotide
cagggacttacggcaggacgtcccgaccag

SEQ ID NO: 121474 - DNA, 30 bp, Artificial Sequence
  Synthetic oligonucleotide
ttgagggctcaaggtctacgtacataccag

SEQ ID NO: 121475 - DNA, 30 bp, Artificial Sequence
  Synthetic oligonucleotide
acgtaaccattgtgatttggcatataccag

SEQ ID NO: 121476 - DNA, 30 bp, Artificial Sequence
  Synthetic oligonucleotide
tcacgggccgcgccattgcgcccctaccag

SEQ ID NO: 121477 - DNA, 30 bp, Artificial Sequence
  Synthetic oligonucleotide
agggcggtccgggaaaatgatggctaccag

SEQ ID NO: 121478 - DNA, 30 bp, Artificial Sequence
  Synthetic oligonucleotide
ttacaggcataaacttcttggaagtaccag

SEQ ID NO: 121479 - DNA, 29 bp, Artificial Sequence
  Synthetic oligonucleotide
aaagcaaagcagtgtcgcagagcacccag

SEQ ID NO: 121480 - DNA, 30 bp, Artificial Sequence
  Synthetic oligonucleotide
atcgcggggtatgaagagcactacccccag

SEQ ID NO: 121481 - DNA, 30 bp, Artificial Sequence
  Synthetic oligonucleotide
gggagggatgtgagcgagatccccccccag

SEQ ID NO: 121482 - DNA, 30 bp, Artificial Sequence
  Synthetic oligonucleotide
cacatagaaacggagcattttctcgcccag

SEQ ID NO: 121483 - DNA, 30 bp, Artificial Sequence
  Synthetic oligonucleotide
accgagccccgtcactctgaccgggcccag

SEQ ID NO: 121484 - DNA, 30 bp, Artificial Sequence
  Synthetic oligonucleotide
gttggaaggaatgcgtcagtccgatcccag

SEQ ID NO: 121485 - DNA, 30 bp, Artificial Sequence
  Synthetic oligonucleotide
tcttaacacgactctccttcctgaagccag

SEQ ID NO: 121486 - DNA, 30 bp, Artificial Sequence
  Synthetic oligonucleotide
acaagccacattactaccaataacagccag

SEQ ID NO: 121487 - DNA, 30 bp, Artificial Sequence
  Synthetic oligonucleotide
gtactaggcacaaagggcgtcgctagccag

SEQ ID NO: 121488 - DNA, 30 bp, Artificial Sequence
  Synthetic oligonucleotide
caaacgaggcaacggcgaacaaagcgccag

SEQ ID NO: 121489 - DNA, 30 bp, Artificial Sequence
  Synthetic oligonucleotide
ttcgaactttggatcctaatgcacggccag

SEQ ID NO: 121490 - DNA, 30 bp, Artificial Sequence
  Synthetic oligonucleotide
ggctgtgaaccaacgctagaaggcggccag

SEQ ID NO: 121491 - DNA, 30 bp, Artificial Sequence
  Synthetic oligonucleotide
atatgaacgttatagagggccgagatccag

SEQ ID NO: 121492 - DNA, 30 bp, Artificial Sequence
  Synthetic oligonucleotide
acacctgacatcgggtaagatcatatccag

SEQ ID NO: 121493 - DNA, 30 bp, Artificial Sequence
  Synthetic oligonucleotide
gaaggtttccccacctgctcccagctccag

SEQ ID NO: 121494 - DNA, 30 bp, Artificial Sequence
  Synthetic oligonucleotide
ctcaggagccagggctttaagatattccag

SEQ ID NO: 121495 - DNA, 30 bp, Artificial Sequence
  Synthetic oligonucleotide
tgacgggtgagctgggtaaaatacttccag

SEQ ID NO: 121496 - DNA, 30 bp, Artificial Sequence
  Synthetic oligonucleotide
tagtgtaagatccccctcccccatttccag

SEQ ID NO: 121497 - DNA, 30 bp, Artificial Sequence
  Synthetic oligonucleotide
caggtaattccgtcaaagactgctttccag

SEQ ID NO: 121498 - DNA, 30 bp, Artificial Sequence
  Synthetic oligonucleotide
aggtgatccgggcaggtgccacaaaagcag

SEQ ID NO: 121499 - DNA, 30 bp, Artificial Sequence
  Synthetic oligonucleotide
ttctgtagccacattcgatgtctaaagcag

SEQ ID NO: 121500 - DNA, 30 bp, Artificial Sequence
  Synthetic oligonucleotide
aaactcgctcgatataaagctgacaagcag

SEQ ID NO: 121501 - DNA, 30 bp, Artificial Sequence
  Synthetic oligonucleotide
ggccatgtaccaagcttgttagtgaagcag

SEQ ID NO: 121502 - DNA, 30 bp, Artificial Sequence
  Synthetic oligonucleotide
caatttgcgacgtacgaaaaggctaagcag

SEQ ID NO: 121503 - DNA, 30 bp, Artificial Sequence
  Synthetic oligonucleotide
gacctgggagcatcaatggccagacagcag

SEQ ID NO: 121504 - DNA, 30 bp, Artificial Sequence
  Synthetic oligonucleotide
caagcggcttaaaacacatagttagagcag

SEQ ID NO: 121505 - DNA, 30 bp, Artificial Sequence
  Synthetic oligonucleotide
ttggatggaaaggtggaagcaaacgagcag

SEQ ID NO: 121506 - DNA, 30 bp, Artificial Sequence
  Synthetic oligonucleotide
tcaagtgcaagattccttgccctggagcag

SEQ ID NO: 121507 - DNA, 30 bp, Artificial Sequence
  Synthetic oligonucleotide
aagggtcgaacctggacttgcgttgagcag

SEQ ID NO: 121508 - DNA, 30 bp, Artificial Sequence
  Synthetic oligonucleotide
aagtgctgtttgtgattaataaagtagcag

SEQ ID NO: 121509 - DNA, 30 bp, Artificial Sequence
  Synthetic oligonucleotide
ctttgggcaacttgtatacagagaacgcag

SEQ ID NO: 121510 - DNA, 30 bp, Artificial Sequence
  Synthetic oligonucleotide
agcaataatcaaaagtgggggtgaacgcag

SEQ ID NO: 121511 - DNA, 30 bp, Artificial Sequence
  Synthetic oligonucleotide
gccgcacagaagaggaataaatacacgcag

SEQ ID NO: 121512 - DNA, 30 bp, Artificial Sequence
  Synthetic oligonucleotide
caagggtcgactctcggcgagaatacgcag

SEQ ID NO: 121513 - DNA, 30 bp, Artificial Sequence
  Synthetic oligonucleotide
taagagggatcgctcccgagatacccgcag

SEQ ID NO: 121514 - DNA, 30 bp, Artificial Sequence
  Synthetic oligonucleotide
gtggacgcaaacggagccaagtcgccgcag

SEQ ID NO: 121515 - DNA, 30 bp, Artificial Sequence
  Synthetic oligonucleotide
tgatgtacgagcctcatcgtaggggcgcag

SEQ ID NO: 121516 - DNA, 30 bp, Artificial Sequence
  Synthetic oligonucleotide
gtctcagcttcagcgtgcgtaacctcgcag

SEQ ID NO: 121517 - DNA, 30 bp, Artificial Sequence
  Synthetic oligonucleotide
gggacagtttgggtctcagggcacaggcag

SEQ ID NO: 121518 - DNA, 30 bp, Artificial Sequence
  Synthetic oligonucleotide
tctgctaaggtccacaccgcgatacggcag

SEQ ID NO: 121519 - DNA, 30 bp, Artificial Sequence
  Synthetic oligonucleotide
cttccatctatgtgcgaaacggtacggcag

SEQ ID NO: 121520 - DNA, 30 bp, Artificial Sequence
  Synthetic oligonucleotide
atgagtccggacatcggttaatcccggcag

SEQ ID NO: 121521 - DNA, 30 bp, Artificial Sequence
  Synthetic oligonucleotide
ttcagtggcacaattaggccgtgagggcag

SEQ ID NO: 121522 - DNA, 30 bp, Artificial Sequence
  Synthetic oligonucleotide
cgacacggacatgttaaaggccacgggcag

SEQ ID NO: 121523 - DNA, 30 bp, Artificial Sequence
  Synthetic oligonucleotide
aagtatacgatgcgtataacggtcgggcag

SEQ ID NO: 121524 - DNA, 30 bp, Artificial Sequence
  Synthetic oligonucleotide
gacagcgatacaaggcacgaagtggggcag

SEQ ID NO: 121525 - DNA, 30 bp, Artificial Sequence
  Synthetic oligonucleotide
actcgatctgtattgacagctaatgggcag

SEQ ID NO: 121526 - DNA, 30 bp, Artificial Sequence
  Synthetic oligonucleotide
aacaggagattagccccctaatagtggcag

SEQ ID NO: 121527 - DNA, 30 bp, Artificial Sequence
  Synthetic oligonucleotide
ttgctgagcaaaaaaaaaacgtggtggcag

SEQ ID NO: 121528 - DNA, 30 bp, Artificial Sequence
  Synthetic oligonucleotide
aaaaaaagcagaacagagtggatgtggcag

SEQ ID NO: 121529 - DNA, 30 bp, Artificial Sequence
  Synthetic oligonucleotide
cgggcgggtcatgggccaaacgggatgcag

SEQ ID NO: 121530 - DNA, 30 bp, Artificial Sequence
  Synthetic oligonucleotide
cgggagagcctcttcgccaagctgatgcag

SEQ ID NO: 121531 - DNA, 30 bp, Artificial Sequence
  Synthetic oligonucleotide
gctcaaagtaataagatgctgcccctgcag

SEQ ID NO: 121532 - DNA, 30 bp, Artificial Sequence
  Synthetic oligonucleotide
acaagagggaattcaatgctcttgctgcag

SEQ ID NO: 121533 - DNA, 30 bp, Artificial Sequence
  Synthetic oligonucleotide
ctgatcttgtactcgttcacacctctgcag

SEQ ID NO: 121534 - DNA, 30 bp, Artificial Sequence
  Synthetic oligonucleotide
agcgagtgtttccagcggggccaagtgcag

SEQ ID NO: 121535 - DNA, 30 bp, Artificial Sequence
  Synthetic oligonucleotide
aggacaattcagtgactgccgacagtgcag

SEQ ID NO: 121536 - DNA, 30 bp, Artificial Sequence
  Synthetic oligonucleotide
ctacgggtttggacagtattgcacgtgcag

SEQ ID NO: 121537 - DNA, 30 bp, Artificial Sequence
  Synthetic oligonucleotide
atgagtccgaacaaaagacgagcggtgcag

SEQ ID NO: 121538 - DNA, 30 bp, Artificial Sequence
  Synthetic oligonucleotide
gggagttcgtgaacaactgtgtgggtgcag

SEQ ID NO: 121539 - DNA, 30 bp, Artificial Sequence
  Synthetic oligonucleotide
gacgtcggtccttttagcgcgtccttgcag

SEQ ID NO: 121540 - DNA, 30 bp, Artificial Sequence
  Synthetic oligonucleotide
gtgatccagtgaaccgtgtaatctttgcag

SEQ ID NO: 121541 - DNA, 30 bp, Artificial Sequence
  Synthetic oligonucleotide
cgacagaattagcagagggcacgaaatcag

SEQ ID NO: 121542 - DNA, 30 bp, Artificial Sequence
  Synthetic oligonucleotide
acgatacttaatttgatcttagtaaatcag

SEQ ID NO: 121543 - DNA, 30 bp, Artificial Sequence
  Synthetic oligonucleotide
cgaaatcggtttccgggttaagggaatcag

SEQ ID NO: 121544 - DNA, 30 bp, Artificial Sequence
  Synthetic oligonucleotide
ggtgttgaaaataaacggtgtcaacatcag

SEQ ID NO: 121545 - DNA, 30 bp, Artificial Sequence
  Synthetic oligonucleotide
atgctatgtgcgttgggccctcgccatcag

SEQ ID NO: 121546 - DNA, 30 bp, Artificial Sequence
  Synthetic oligonucleotide
atcgattatatgtgccaaacgggccatcag

SEQ ID NO: 121547 - DNA, 30 bp, Artificial Sequence
  Synthetic oligonucleotide
tccggcagatcgttgggttcactccatcag

SEQ ID NO: 121548 - DNA, 30 bp, Artificial Sequence
  Synthetic oligonucleotide
acaagccaccgcctatttgccttccatcag

SEQ ID NO: 121549 - DNA, 30 bp, Artificial Sequence
  Synthetic oligonucleotide
cccgatagtgaatactgggataagcatcag

SEQ ID NO: 121550 - DNA, 30 bp, Artificial Sequence
  Synthetic oligonucleotide
agcgatgagcgccgatcaggtggtcatcag

SEQ ID NO: 121551 - DNA, 30 bp, Artificial Sequence
  Synthetic oligonucleotide
tgggggatgcctattgtctgacaggatcag

SEQ ID NO: 121552 - DNA, 30 bp, Artificial Sequence
  Synthetic oligonucleotide
cttcggcagagccactgcgggtgtgatcag

SEQ ID NO: 121553 - DNA, 30 bp, Artificial Sequence
  Synthetic oligonucleotide
actaagggggcgggtacggtatagtatcag

SEQ ID NO: 121554 - DNA, 30 bp, Artificial Sequence
  Synthetic oligonucleotide
ttcaggcacatacagttaccaccaactcag

SEQ ID NO: 121555 - DNA, 30 bp, Artificial Sequence
  Synthetic oligonucleotide
tgtggacagaatgtttgaaatataactcag

SEQ ID NO: 121556 - DNA, 30 bp, Artificial Sequence
  Synthetic oligonucleotide
caggggcgctcgccaatcgcattcactcag

SEQ ID NO: 121557 - DNA, 30 bp, Artificial Sequence
  Synthetic oligonucleotide
ccacgatattcggaagtgacacagactcag

SEQ ID NO: 121558 - DNA, 30 bp, Artificial Sequence
  Synthetic oligonucleotide
gttaagggaggtatttagtgtaggactcag

SEQ ID NO: 121559 - DNA, 30 bp, Artificial Sequence
  Synthetic oligonucleotide
gaacgctaaaaagtatagtaagttactcag

SEQ ID NO: 121560 - DNA, 30 bp, Artificial Sequence
  Synthetic oligonucleotide
ctccgaccttgtaccaccgatttggctcag

SEQ ID NO: 121561 - DNA, 30 bp, Artificial Sequence
  Synthetic oligonucleotide
tatgaagtcggagattagtcaaaatctcag

SEQ ID NO: 121562 - DNA, 30 bp, Artificial Sequence
  Synthetic oligonucleotide
ttgcaggcggggcacggttaaacatctcag

SEQ ID NO: 121563 - DNA, 30 bp, Artificial Sequence
  Synthetic oligonucleotide
ccaagatcagctagggaggttacatctcag

SEQ ID NO: 121564 - DNA, 30 bp, Artificial Sequence
  Synthetic oligonucleotide
tcgcaattgtaatacgtctagaactctcag

SEQ ID NO: 121565 - DNA, 31 bp, Artificial Sequence
  Synthetic oligonucleotide
agaaaggagttgccaccgcaacggttctcag

SEQ ID NO: 121566 - DNA, 30 bp, Artificial Sequence
  Synthetic oligonucleotide
ggggttcattagaagcaatagggttctcag

SEQ ID NO: 121567 - DNA, 30 bp, Artificial Sequence
  Synthetic oligonucleotide
gccgtccgcataggtacaggccaaagtcag

SEQ ID NO: 121568 - DNA, 30 bp, Artificial Sequence
  Synthetic oligonucleotide
ggtggtttgaggggtaccacggggcgtcag

SEQ ID NO: 121569 - DNA, 30 bp, Artificial Sequence
  Synthetic oligonucleotide
gcgaagctatcggtgaacagtgaaggtcag

SEQ ID NO: 121570 - DNA, 30 bp, Artificial Sequence
  Synthetic oligonucleotide
aaccttgaaagagcggtattgtgaggtcag

SEQ ID NO: 121571 - DNA, 30 bp, Artificial Sequence
  Synthetic oligonucleotide
tggatgactgggtgatatagcttaggtcag

SEQ ID NO: 121572 - DNA, 30 bp, Artificial Sequence
  Synthetic oligonucleotide
gagagcaacctgctttaatcccatggtcag

SEQ ID NO: 121573 - DNA, 30 bp, Artificial Sequence
  Synthetic oligonucleotide
tcatcgaagaaaatgtctttggttggtcag

SEQ ID NO: 121574 - DNA, 30 bp, Artificial Sequence
  Synthetic oligonucleotide
tcgtgtgttgttacgctcgttgttggtcag

SEQ ID NO: 121575 - DNA, 30 bp, Artificial Sequence
  Synthetic oligonucleotide
agtaacaccaaattagggcgctcatgtcag

SEQ ID NO: 121576 - DNA, 30 bp, Artificial Sequence
  Synthetic oligonucleotide
atgtcggtcgtatcaggcgggttatgtcag

SEQ ID NO: 121577 - DNA, 30 bp, Artificial Sequence
  Synthetic oligonucleotide
ctgtgtacacgaaagatacaaatttgtcag

SEQ ID NO: 121578 - DNA, 31 bp, Artificial Sequence
  Synthetic oligonucleotide
cgtagcacccagtacccgacagaagattcag

SEQ ID NO: 121579 - DNA, 30 bp, Artificial Sequence
  Synthetic oligonucleotide
acttactcaaagttgttcggtgtgattcag

SEQ ID NO: 121580 - DNA, 30 bp, Artificial Sequence
  Synthetic oligonucleotide
aagtgaccgcatggaatgtacacacttcag

SEQ ID NO: 121581 - DNA, 30 bp, Artificial Sequence
  Synthetic oligonucleotide
aagcttgcgtgcgagtacttatcacttcag

SEQ ID NO: 121582 - DNA, 30 bp, Artificial Sequence
  Synthetic oligonucleotide
ccagatggcttctaccttatttgccttcag

SEQ ID NO: 121583 - DNA, 30 bp, Artificial Sequence
  Synthetic oligonucleotide
gcgcatccggagataagctccctagttcag

SEQ ID NO: 121584 - DNA, 30 bp, Artificial Sequence
  Synthetic oligonucleotide
gcatctaggtgtggcgtaagaccggttcag

SEQ ID NO: 121585 - DNA, 30 bp, Artificial Sequence
  Synthetic oligonucleotide
ccggcccacgcgagcgtgctattggttcag

SEQ ID NO: 121586 - DNA, 30 bp, Artificial Sequence
  Synthetic oligonucleotide
gctcccggaccggcaccagcgggtgttcag

SEQ ID NO: 121587 - DNA, 30 bp, Artificial Sequence
  Synthetic oligonucleotide
acggggttgtcagcaatttgagtctttcag

SEQ ID NO: 121588 - DNA, 30 bp, Artificial Sequence
  Synthetic oligonucleotide
agcggtgtaatccctgatgtgtggtttcag

SEQ ID NO: 121589 - DNA, 30 bp, Artificial Sequence
  Synthetic oligonucleotide
ggcaagtgtattcaatgattattttttcag

SEQ ID NO: 121590 - DNA, 30 bp, Artificial Sequence
  Synthetic oligonucleotide
tgatggatgtaaagccacagtataaaagag

SEQ ID NO: 121591 - DNA, 30 bp, Artificial Sequence
  Synthetic oligonucleotide
gacgggttggaatacaggttaaccaaagag

SEQ ID NO: 121592 - DNA, 30 bp, Artificial Sequence
  Synthetic oligonucleotide
caatgacaacgagatgggcatgctaaagag

SEQ ID NO: 121593 - DNA, 30 bp, Artificial Sequence
  Synthetic oligonucleotide
gatcaagaataccaagtgaacaaccaagag

SEQ ID NO: 121594 - DNA, 30 bp, Artificial Sequence
  Synthetic oligonucleotide
gcggctgaaaggcgctcacctaaagaagag

SEQ ID NO: 121595 - DNA, 30 bp, Artificial Sequence
  Synthetic oligonucleotide
atatccgggggggacggacggcgagaagag

SEQ ID NO: 121596 - DNA, 30 bp, Artificial Sequence
  Synthetic oligonucleotide
cgcactgtcatggccaatgttactgaagag

SEQ ID NO: 121597 - DNA, 30 bp, Artificial Sequence
  Synthetic oligonucleotide
gacgggaagcactggggcgtcgctgaagag

SEQ ID NO: 121598 - DNA, 30 bp, Artificial Sequence
  Synthetic oligonucleotide
tattcactatcagtcatgagcagtgaagag

SEQ ID NO: 121599 - DNA, 30 bp, Artificial Sequence
  Synthetic oligonucleotide
acacgatcgggtgttggccgatcctaagag

SEQ ID NO: 121600 - DNA, 30 bp, Artificial Sequence
  Synthetic oligonucleotide
atcggtgaccaggacaaatattggtaagag

SEQ ID NO: 121601 - DNA, 30 bp, Artificial Sequence
  Synthetic oligonucleotide
aaagttctatacgtaattacaggaacagag

SEQ ID NO: 121602 - DNA, 30 bp, Artificial Sequence
  Synthetic oligonucleotide
agtgtgtttaggagatgttagtgaacagag

SEQ ID NO: 121603 - DNA, 30 bp, Artificial Sequence
  Synthetic oligonucleotide
tcagtcttttgcgcgacaggcataacagag

SEQ ID NO: 121604 - DNA, 30 bp, Artificial Sequence
  Synthetic oligonucleotide
ttacgactaaggacggattgcatcacagag

SEQ ID NO: 121605 - DNA, 30 bp, Artificial Sequence
  Synthetic oligonucleotide
tcgacgggtgtcaagaaaaaagagacagag

SEQ ID NO: 121606 - DNA, 30 bp, Artificial Sequence
  Synthetic oligonucleotide
ggcccggttagatagtacgtctggacagag

SEQ ID NO: 121607 - DNA, 30 bp, Artificial Sequence
  Synthetic oligonucleotide
ctgcgtgttggttccatagaccatacagag

SEQ ID NO: 121608 - DNA, 30 bp, Artificial Sequence
  Synthetic oligonucleotide
agagttgtaggtgtcatagattaagcagag

SEQ ID NO: 121609 - DNA, 30 bp, Artificial Sequence
  Synthetic oligonucleotide
agatcgcctacgtagccggatacagcagag

SEQ ID NO: 121610 - DNA, 30 bp, Artificial Sequence
  Synthetic oligonucleotide
cttacggtaaagtaacttgtcatagcagag

SEQ ID NO: 121611 - DNA, 30 bp, Artificial Sequence
  Synthetic oligonucleotide
gctgaacaggcccggattctcttagcagag

SEQ ID NO: 121612 - DNA, 30 bp, Artificial Sequence
  Synthetic oligonucleotide
tcctggtgtagagtagtcagcatcgcagag

SEQ ID NO: 121613 - DNA, 30 bp, Artificial Sequence
  Synthetic oligonucleotide
actaagccgccttacccagaactcgcagag

SEQ ID NO: 121614 - DNA, 30 bp, Artificial Sequence
  Synthetic oligonucleotide
tgttagagaagggggttctctcaggcagag

SEQ ID NO: 121615 - DNA, 30 bp, Artificial Sequence
  Synthetic oligonucleotide
tgatatccttaagagtcacgagttgcagag

SEQ ID NO: 121616 - DNA, 30 bp, Artificial Sequence
  Synthetic oligonucleotide
acacatgtgctgcatatatgttcgtcagag

SEQ ID NO: 121617 - DNA, 30 bp, Artificial Sequence
  Synthetic oligonucleotide
gcccatggtataatagatcatctttcagag

SEQ ID NO: 121618 - DNA, 30 bp, Artificial Sequence
  Synthetic oligonucleotide
gtgtgtggatggtattttagagaaagagag

SEQ ID NO: 121619 - DNA, 30 bp, Artificial Sequence
  Synthetic oligonucleotide
tggtctcgtctggactcagtaccaagagag

SEQ ID NO: 121620 - DNA, 30 bp, Artificial Sequence
  Synthetic oligonucleotide
tgtattaatgggtggtagggatatagagag

SEQ ID NO: 121621 - DNA, 30 bp, Artificial Sequence
  Synthetic oligonucleotide
tttactcggcgtcatttaaaagaacgagag

SEQ ID NO: 121622 - DNA, 30 bp, Artificial Sequence
  Synthetic oligonucleotide
ggtgctaccactcccactatataacgagag

SEQ ID NO: 121623 - DNA, 30 bp, Artificial Sequence
  Synthetic oligonucleotide
ggactaaccacttctgacccgtcccgagag

SEQ ID NO: 121624 - DNA, 30 bp, Artificial Sequence
  Synthetic oligonucleotide
aatggcgatattcgtttggacttgcgagag

SEQ ID NO: 121625 - DNA, 30 bp, Artificial Sequence
  Synthetic oligonucleotide
aacgcctgcagagtcgaaggttctcgagag

SEQ ID NO: 121626 - DNA, 30 bp, Artificial Sequence
  Synthetic oligonucleotide
ggcatctcatacctgcgtcagggcggagag

SEQ ID NO: 121627 - DNA, 30 bp, Artificial Sequence
  Synthetic oligonucleotide
agccttaagttatgacttaggcggggagag

SEQ ID NO: 121628 - DNA, 30 bp, Artificial Sequence
  Synthetic oligonucleotide
gtcccggcctacaccgcattaggtggagag

SEQ ID NO: 121629 - DNA, 30 bp, Artificial Sequence
  Synthetic oligonucleotide
taatgcgagctatgggcccacaaatgagag

SEQ ID NO: 121630 - DNA, 30 bp, Artificial Sequence
  Synthetic oligonucleotide
agctgatggcttcaaggattttcgtgagag

SEQ ID NO: 121631 - DNA, 30 bp, Artificial Sequence
  Synthetic oligonucleotide
gacctgaaaccacgtgaatgggcttgagag

SEQ ID NO: 121632 - DNA, 30 bp, Artificial Sequence
  Synthetic oligonucleotide
gggcagatgaagcgggccattagttgagag

SEQ ID NO: 121633 - DNA, 30 bp, Artificial Sequence
  Synthetic oligonucleotide
ttatgcagaatgcgttttatgctttgagag

SEQ ID NO: 121634 - DNA, 30 bp, Artificial Sequence
  Synthetic oligonucleotide
caggatgtgagaatagggtcatcaatagag

SEQ ID NO: 121635 - DNA, 30 bp, Artificial Sequence
  Synthetic oligonucleotide
atgccgcggagggtgttacaagtaatagag

SEQ ID NO: 121636 - DNA, 30 bp, Artificial Sequence
  Synthetic oligonucleotide
ctggttcgacagaaccgcgaacacatagag

SEQ ID NO: 121637 - DNA, 30 bp, Artificial Sequence
  Synthetic oligonucleotide
taccctatctataggagaaacgtcatagag

SEQ ID NO: 121638 - DNA, 30 bp, Artificial Sequence
  Synthetic oligonucleotide
atgaggtcgggttactaccggaggatagag

SEQ ID NO: 121639 - DNA, 30 bp, Artificial Sequence
  Synthetic oligonucleotide
tcctcagagtaagttcctcaagctatagag

SEQ ID NO: 121640 - DNA, 30 bp, Artificial Sequence
  Synthetic oligonucleotide
ccggttaatcttgtgtccgcccgtatagag

SEQ ID NO: 121641 - DNA, 30 bp, Artificial Sequence
  Synthetic oligonucleotide
cggtctggccagacaaccattcttatagag

SEQ ID NO: 121642 - DNA, 30 bp, Artificial Sequence
  Synthetic oligonucleotide
accggaaaggttaataaagctagactagag

SEQ ID NO: 121643 - DNA, 30 bp, Artificial Sequence
  Synthetic oligonucleotide
ggactaggtaacgcccataatttgctagag

SEQ ID NO: 121644 - DNA, 30 bp, Artificial Sequence
  Synthetic oligonucleotide
atttaagcaaggcatcaatcgtcagtagag

SEQ ID NO: 121645 - DNA, 30 bp, Artificial Sequence
  Synthetic oligonucleotide
gcagtgattatattagagtggcacgtagag

SEQ ID NO: 121646 - DNA, 30 bp, Artificial Sequence
  Synthetic oligonucleotide
cataaaaacaggagggacctaatcgtagag

SEQ ID NO: 121647 - DNA, 30 bp, Artificial Sequence
  Synthetic oligonucleotide
tatatctaagcagataccataaatgtagag

SEQ ID NO: 121648 - DNA, 30 bp, Artificial Sequence
  Synthetic oligonucleotide
ccgccaagatcccggtgctgaaaattagag

SEQ ID NO: 121649 - DNA, 30 bp, Artificial Sequence
  Synthetic oligonucleotide
gactgcaagtggcccgaaaaatacttagag

SEQ ID NO: 121650 - DNA, 30 bp, Artificial Sequence
  Synthetic oligonucleotide
ttggggcatctttcaccatgatgcttagag

SEQ ID NO: 121651 - DNA, 30 bp, Artificial Sequence
  Synthetic oligonucleotide
ccctatgtgaccgctcaagtcaagttagag

SEQ ID NO: 121652 - DNA, 30 bp, Artificial Sequence
  Synthetic oligonucleotide
ggacctaagagatcaggggtaaggttagag

SEQ ID NO: 121653 - DNA, 30 bp, Artificial Sequence
  Synthetic oligonucleotide
gcggatcgttcaatatgatcgactttagag

SEQ ID NO: 121654 - DNA, 30 bp, Artificial Sequence
  Synthetic oligonucleotide
ttgaccacttttagcactacatgaaacgag

SEQ ID NO: 121655 - DNA, 30 bp, Artificial Sequence
  Synthetic oligonucleotide
gttaatggtcgagtagtgcgtaagaacgag

SEQ ID NO: 121656 - DNA, 30 bp, Artificial Sequence
  Synthetic oligonucleotide
acgggtttacgtttaggtcatattaacgag

SEQ ID NO: 121657 - DNA, 30 bp, Artificial Sequence
  Synthetic oligonucleotide
tccggacgccgttacgcgcgtgaccacgag

SEQ ID NO: 121658 - DNA, 30 bp, Artificial Sequence
  Synthetic oligonucleotide
aaaccagaggggcgtttcaattaccacgag

SEQ ID NO: 121659 - DNA, 30 bp, Artificial Sequence
  Synthetic oligonucleotide
cacaatatagagtaagagcgtttgcacgag

SEQ ID NO: 121660 - DNA, 30 bp, Artificial Sequence
  Synthetic oligonucleotide
gaatgtacactaagggaactttcagacgag

SEQ ID NO: 121661 - DNA, 30 bp, Artificial Sequence
  Synthetic oligonucleotide
tactgttaggctttcagcggtagggacgag

SEQ ID NO: 121662 - DNA, 30 bp, Artificial Sequence
  Synthetic oligonucleotide
agggaagagggtatatcggtctgatacgag

SEQ ID NO: 121663 - DNA, 30 bp, Artificial Sequence
  Synthetic oligonucleotide
ccttttgctccccctaggtccacaaccgag

SEQ ID NO: 121664 - DNA, 30 bp, Artificial Sequence
  Synthetic oligonucleotide
gtagctcccacggtagcataatataccgag

SEQ ID NO: 121665 - DNA, 30 bp, Artificial Sequence
  Synthetic oligonucleotide
ggataggtaggactgcagtggggtaccgag

SEQ ID NO: 121666 - DNA, 30 bp, Artificial Sequence
  Synthetic oligonucleotide
ttggataggtgtatatacacccttaccgag

SEQ ID NO: 121667 - DNA, 30 bp, Artificial Sequence
  Synthetic oligonucleotide
gtaatcggtctagggtagccactgcccgag

SEQ ID NO: 121668 - DNA, 30 bp, Artificial Sequence
  Synthetic oligonucleotide
gatcggagttgctggtgccacattgccgag

SEQ ID NO: 121669 - DNA, 30 bp, Artificial Sequence
  Synthetic oligonucleotide
accacccggaatcgtggctgcaattccgag

SEQ ID NO: 121670 - DNA, 30 bp, Artificial Sequence
  Synthetic oligonucleotide
gagaagctggattgtttaggcacttccgag

SEQ ID NO: 121671 - DNA, 30 bp, Artificial Sequence
  Synthetic oligonucleotide
tatccgggtggcgatgatctatgaagcgag

SEQ ID NO: 121672 - DNA, 30 bp, Artificial Sequence
  Synthetic oligonucleotide
gacagtctgtacccgtgtacattaagcgag

SEQ ID NO: 121673 - DNA, 30 bp, Artificial Sequence
  Synthetic oligonucleotide
gggctattgtccaactgcggcgatagcgag

SEQ ID NO: 121674 - DNA, 30 bp, Artificial Sequence
  Synthetic oligonucleotide
caatgcactttggtctaatattgtagcgag

SEQ ID NO: 121675 - DNA, 30 bp, Artificial Sequence
  Synthetic oligonucleotide
atgtactccccctccccttcaattagcgag

SEQ ID NO: 121676 - DNA, 30 bp, Artificial Sequence
  Synthetic oligonucleotide
tggcagtttccgaaatttatataacgcgag

SEQ ID NO: 121677 - DNA, 30 bp, Artificial Sequence
  Synthetic oligonucleotide
aacggacgtcctcttcgtgtcacccgcgag

SEQ ID NO: 121678 - DNA, 30 bp, Artificial Sequence
  Synthetic oligonucleotide
tacgcggaccaagaggcattgcttcgcgag

SEQ ID NO: 121679 - DNA, 30 bp, Artificial Sequence
  Synthetic oligonucleotide
cctagagtagagggcgtctctaccggcgag

SEQ ID NO: 121680 - DNA, 30 bp, Artificial Sequence
  Synthetic oligonucleotide
cgcatgagattcttgtaaggaatcggcgag

SEQ ID NO: 121681 - DNA, 30 bp, Artificial Sequence
  Synthetic oligonucleotide
ccgtggcgtgaagattggtgggagggcgag

SEQ ID NO: 121682 - DNA, 30 bp, Artificial Sequence
  Synthetic oligonucleotide
tatttggaataatgcgtgacggaatgcgag

SEQ ID NO: 121683 - DNA, 30 bp, Artificial Sequence
  Synthetic oligonucleotide
ctggcacattgatcctcttttagatgcgag

SEQ ID NO: 121684 - DNA, 30 bp, Artificial Sequence
  Synthetic oligonucleotide
gggagtgccttaggccctcagccctgcgag

SEQ ID NO: 121685 - DNA, 30 bp, Artificial Sequence
  Synthetic oligonucleotide
ggtgaagtaaagaagcagatcgggtgcgag

SEQ ID NO: 121686 - DNA, 30 bp, Artificial Sequence
  Synthetic oligonucleotide
gtaaattgtcttggagctgtcagaatcgag

SEQ ID NO: 121687 - DNA, 30 bp, Artificial Sequence
  Synthetic oligonucleotide
gtagtctaaagcgcaggaccatgaatcgag

SEQ ID NO: 121688 - DNA, 30 bp, Artificial Sequence
  Synthetic oligonucleotide
atatagtcctgacactctccaagcatcgag

SEQ ID NO: 121689 - DNA, 30 bp, Artificial Sequence
  Synthetic oligonucleotide
gctaaagtagccgccacgatgacgatcgag

SEQ ID NO: 121690 - DNA, 30 bp, Artificial Sequence
  Synthetic oligonucleotide
ttacgtacttgaggtcaaccgcttatcgag

SEQ ID NO: 121691 - DNA, 30 bp, Artificial Sequence
  Synthetic oligonucleotide
aacgcgcaccgaataggacattcactcgag

SEQ ID NO: 121692 - DNA, 30 bp, Artificial Sequence
  Synthetic oligonucleotide
atgtaaagccataagggatcatgcctcgag

SEQ ID NO: 121693 - DNA, 30 bp, Artificial Sequence
  Synthetic oligonucleotide
acaccgagtcatatttcgtgtgtcctcgag

SEQ ID NO: 121694 - DNA, 30 bp, Artificial Sequence
  Synthetic oligonucleotide
atagattcatatgccccggccgtgctcgag

SEQ ID NO: 121695 - DNA, 30 bp, Artificial Sequence
  Synthetic oligonucleotide
catcagctcgtctgatgacaccgtctcgag

SEQ ID NO: 121696 - DNA, 30 bp, Artificial Sequence
  Synthetic oligonucleotide
gagactagatcgccactgccgtttctcgag

SEQ ID NO: 121697 - DNA, 30 bp, Artificial Sequence
  Synthetic oligonucleotide
tggctcaagttccaacggtaccgagtcgag

SEQ ID NO: 121698 - DNA, 30 bp, Artificial Sequence
  Synthetic oligonucleotide
ggtgtcaatttctggttcgaaagattcgag

SEQ ID NO: 121699 - DNA, 30 bp, Artificial Sequence
  Synthetic oligonucleotide
cggaacccacttgaaatgataggattcgag

SEQ ID NO: 121700 - DNA, 30 bp, Artificial Sequence
  Synthetic oligonucleotide
tataaagtagtcctaagcatattgttcgag

SEQ ID NO: 121701 - DNA, 30 bp, Artificial Sequence
  Synthetic oligonucleotide
tcgaattgttatggacgagtcgatttcgag

SEQ ID NO: 121702 - DNA, 30 bp, Artificial Sequence
  Synthetic oligonucleotide
ggtggatggtaccctatgtttccaaaggag

SEQ ID NO: 121703 - DNA, 30 bp, Artificial Sequence
  Synthetic oligonucleotide
gctctggacccgcacttgtaaataaaggag

SEQ ID NO: 121704 - DNA, 30 bp, Artificial Sequence
  Synthetic oligonucleotide
atacaccacccagagattgggcagaaggag

SEQ ID NO: 121705 - DNA, 30 bp, Artificial Sequence
  Synthetic oligonucleotide
atcatcccggatgtaccctgtaataaggag

SEQ ID NO: 121706 - DNA, 30 bp, Artificial Sequence
  Synthetic oligonucleotide
cacccgatgtctcgtcatagtactaaggag

SEQ ID NO: 121707 - DNA, 30 bp, Artificial Sequence
  Synthetic oligonucleotide
actgacatgagcacggacgcacttaaggag

SEQ ID NO: 121708 - DNA, 30 bp, Artificial Sequence
  Synthetic oligonucleotide
aagctaatagtctagttccctcaccaggag

SEQ ID NO: 121709 - DNA, 30 bp, Artificial Sequence
  Synthetic oligonucleotide
ggactgtaggtgatccaccttggccaggag

SEQ ID NO: 121710 - DNA, 30 bp, Artificial Sequence
  Synthetic oligonucleotide
actccccattaaccacggcctgtagaggag

SEQ ID NO: 121711 - DNA, 30 bp, Artificial Sequence
  Synthetic oligonucleotide
tgcatagccaaaggccgtcataacgaggag

SEQ ID NO: 121712 - DNA, 30 bp, Artificial Sequence
  Synthetic oligonucleotide
tcgtggataggataacgctacaccgaggag

SEQ ID NO: 121713 - DNA, 30 bp, Artificial Sequence
  Synthetic oligonucleotide
gcagtcataggtccgccgggactcgaggag

SEQ ID NO: 121714 - DNA, 30 bp, Artificial Sequence
  Synthetic oligonucleotide
tcgtacggtcctaacgtataattggaggag

SEQ ID NO: 121715 - DNA, 30 bp, Artificial Sequence
  Synthetic oligonucleotide
accggaatcaccccacagcagggtgaggag

SEQ ID NO: 121716 - DNA, 30 bp, Artificial Sequence
  Synthetic oligonucleotide
tccgccctcaagtgggttcacaattaggag

SEQ ID NO: 121717 - DNA, 30 bp, Artificial Sequence
  Synthetic oligonucleotide
gtgtggcttatacgtcaacaattaccggag

SEQ ID NO: 121718 - DNA, 30 bp, Artificial Sequence
  Synthetic oligonucleotide
agcgacctctagcgcgtttacgccccggag

SEQ ID NO: 121719 - DNA, 30 bp, Artificial Sequence
  Synthetic oligonucleotide
ccgaaattccagccgtttgcgttgccggag

SEQ ID NO: 121720 - DNA, 30 bp, Artificial Sequence
  Synthetic oligonucleotide
atgggtccgattagaaacaatcatccggag

SEQ ID NO: 121721 - DNA, 30 bp, Artificial Sequence
  Synthetic oligonucleotide
gggttcggagcgtgaataggaggtccggag

SEQ ID NO: 121722 - DNA, 30 bp, Artificial Sequence
  Synthetic oligonucleotide
gccgtgtcgatggtctgatcaccggcggag

SEQ ID NO: 121723 - DNA, 30 bp, Artificial Sequence
  Synthetic oligonucleotide
tgagcaggccacggcaccgttaatgcggag

SEQ ID NO: 121724 - DNA, 30 bp, Artificial Sequence
  Synthetic oligonucleotide
tcgtgatgaggtatggcggaaggtgcggag

SEQ ID NO: 121725 - DNA, 30 bp, Artificial Sequence
  Synthetic oligonucleotide
aattgcgcattacgaactcaataatcggag

SEQ ID NO: 121726 - DNA, 30 bp, Artificial Sequence
  Synthetic oligonucleotide
ggagcgacgatgatgctacgtccatcggag

SEQ ID NO: 121727 - DNA, 30 bp, Artificial Sequence
  Synthetic oligonucleotide
tctgtcggcaacctcacccccatctcggag

SEQ ID NO: 121728 - DNA, 30 bp, Artificial Sequence
  Synthetic oligonucleotide
ttggattagtcgtgagtgtctgtgtcggag

SEQ ID NO: 121729 - DNA, 30 bp, Artificial Sequence
  Synthetic oligonucleotide
aatttcgtattcggtaatacgaaaagggag

SEQ ID NO: 121730 - DNA, 30 bp, Artificial Sequence
  Synthetic oligonucleotide
gagaccgtttcaagttcctgtcaaagggag

SEQ ID NO: 121731 - DNA, 30 bp, Artificial Sequence
  Synthetic oligonucleotide
gccacagatcacaagcggccatcaagggag

SEQ ID NO: 121732 - DNA, 30 bp, Artificial Sequence
  Synthetic oligonucleotide
tttaaggaaggggaacacgttaccagggag

SEQ ID NO: 121733 - DNA, 30 bp, Artificial Sequence
  Synthetic oligonucleotide
gtcggtatatcgactaaaacagccagggag

SEQ ID NO: 121734 - DNA, 30 bp, Artificial Sequence
  Synthetic oligonucleotide
ggtcccaccaattacgatctgaatagggag

SEQ ID NO: 121735 - DNA, 30 bp, Artificial Sequence
  Synthetic oligonucleotide
aggagattgcccttccagcagactagggag

SEQ ID NO: 121736 - DNA, 30 bp, Artificial Sequence
  Synthetic oligonucleotide
ccctccttcatctctgagaggtgtagggag

SEQ ID NO: 121737 - DNA, 30 bp, Artificial Sequence
  Synthetic oligonucleotide
ctaggaatgcgcagggtatattaccgggag

SEQ ID NO: 121738 - DNA, 30 bp, Artificial Sequence
  Synthetic oligonucleotide
aagtttctttggttcgaactgaaaggggag

SEQ ID NO: 121739 - DNA, 30 bp, Artificial Sequence
  Synthetic oligonucleotide
gcggtccgcccacggacccgtagaggggag

SEQ ID NO: 121740 - DNA, 30 bp, Artificial Sequence
  Synthetic oligonucleotide
ggccgagcagtaggcgggttagacggggag

SEQ ID NO: 121741 - DNA, 30 bp, Artificial Sequence
  Synthetic oligonucleotide
tcgtccctaggtatccttgtactcggggag

SEQ ID NO: 121742 - DNA, 30 bp, Artificial Sequence
  Synthetic oligonucleotide
tcttaatgaaattcccgaaacttgggggag

SEQ ID NO: 121743 - DNA, 30 bp, Artificial Sequence
  Synthetic oligonucleotide
cgagcgtcgctcgggtaacagggtggggag

SEQ ID NO: 121744 - DNA, 30 bp, Artificial Sequence
  Synthetic oligonucleotide
cgagcttgggacgggattttagggtgggag

SEQ ID NO: 121745 - DNA, 30 bp, Artificial Sequence
  Synthetic oligonucleotide
caagagcttgtaattgtggtcttttgggag

SEQ ID NO: 121746 - DNA, 30 bp, Artificial Sequence
  Synthetic oligonucleotide
tcgaaagccgggataggcacgacaatggag

SEQ ID NO: 121747 - DNA, 30 bp, Artificial Sequence
  Synthetic oligonucleotide
ggccatcgttcatgtggggttatgctggag

SEQ ID NO: 121748 - DNA, 30 bp, Artificial Sequence
  Synthetic oligonucleotide
tttacggctcgacattccaaacgcgtggag

SEQ ID NO: 121749 - DNA, 30 bp, Artificial Sequence
  Synthetic oligonucleotide
cgacttgagatcttggttcggcgcgtggag

SEQ ID NO: 121750 - DNA, 30 bp, Artificial Sequence
  Synthetic oligonucleotide
aaaaatcaaacaagggcatcatcggtggag

SEQ ID NO: 121751 - DNA, 30 bp, Artificial Sequence
  Synthetic oligonucleotide
agcgacttacttggggagagacatgtggag

SEQ ID NO: 121752 - DNA, 30 bp, Artificial Sequence
  Synthetic oligonucleotide
atcacaaggctctgccgagcaatcttggag

SEQ ID NO: 121753 - DNA, 30 bp, Artificial Sequence
  Synthetic oligonucleotide
aaaaaaccatgttgatgaatcaagttggag

SEQ ID NO: 121754 - DNA, 30 bp, Artificial Sequence
  Synthetic oligonucleotide
tctgtcctcaaggccgcgtttacgttggag

SEQ ID NO: 121755 - DNA, 30 bp, Artificial Sequence
  Synthetic oligonucleotide
tgcccccgttatcagccgaagacaaatgag

SEQ ID NO: 121756 - DNA, 30 bp, Artificial Sequence
  Synthetic oligonucleotide
tcatgaatatctgtgagcctcgacaatgag

SEQ ID NO: 121757 - DNA, 30 bp, Artificial Sequence
  Synthetic oligonucleotide
acgcatgcgatgagatggaataggaatgag

SEQ ID NO: 121758 - DNA, 30 bp, Artificial Sequence
  Synthetic oligonucleotide
cgtccgggcatgttgccccagcataatgag

SEQ ID NO: 121759 - DNA, 30 bp, Artificial Sequence
  Synthetic oligonucleotide
ccattgggtgaacctatttctgctaatgag

SEQ ID NO: 121760 - DNA, 30 bp, Artificial Sequence
  Synthetic oligonucleotide
tcctagttacagcaacacggaatacatgag

SEQ ID NO: 121761 - DNA, 30 bp, Artificial Sequence
  Synthetic oligonucleotide
ttcaggatctgacaattaaaacaccatgag

SEQ ID NO: 121762 - DNA, 30 bp, Artificial Sequence
  Synthetic oligonucleotide
cccaggaagtattcggaccgtcaccatgag

SEQ ID NO: 121763 - DNA, 30 bp, Artificial Sequence
  Synthetic oligonucleotide
cggtgatatatatacaagtatggtgatgag

SEQ ID NO: 121764 - DNA, 30 bp, Artificial Sequence
  Synthetic oligonucleotide
taacatgctgactcgcctcccgcatatgag

SEQ ID NO: 121765 - DNA, 31 bp, Artificial Sequence
  Synthetic oligonucleotide
tccataacttacgtgggatgcacggtatgag

SEQ ID NO: 121766 - DNA, 30 bp, Artificial Sequence
  Synthetic oligonucleotide
tgggtctctgagagtagtatgagttatgag

SEQ ID NO: 121767 - DNA, 30 bp, Artificial Sequence
  Synthetic oligonucleotide
tggacttttgctgtacagaaactaactgag

SEQ ID NO: 121768 - DNA, 30 bp, Artificial Sequence
  Synthetic oligonucleotide
catgtgtggctcatgattagagacactgag

SEQ ID NO: 121769 - DNA, 30 bp, Artificial Sequence
  Synthetic oligonucleotide
atggactaaggggagcatacattcactgag

SEQ ID NO: 121770 - DNA, 30 bp, Artificial Sequence
  Synthetic oligonucleotide
caactccttcgttgatggtgaaagactgag

SEQ ID NO: 121771 - DNA, 30 bp, Artificial Sequence
  Synthetic oligonucleotide
ctgcatgccagtgcataaacaaggactgag

SEQ ID NO: 121772 - DNA, 30 bp, Artificial Sequence
  Synthetic oligonucleotide
aaactatcaggcaattttcacatgactgag

SEQ ID NO: 121773 - DNA, 30 bp, Artificial Sequence
  Synthetic oligonucleotide
aggccgccgaccatggactcaagccctgag

SEQ ID NO: 121774 - DNA, 30 bp, Artificial Sequence
  Synthetic oligonucleotide
ccgggatggctcagcgagcaaccagctgag

SEQ ID NO: 121775 - DNA, 30 bp, Artificial Sequence
  Synthetic oligonucleotide
cgggacaatggtcgttccctcagagctgag

SEQ ID NO: 121776 - DNA, 30 bp, Artificial Sequence
  Synthetic oligonucleotide
aacggcacgggtaaaatgcgtattgctgag

SEQ ID NO: 121777 - DNA, 30 bp, Artificial Sequence
  Synthetic oligonucleotide
gtgcggaagaaactcacgtgtagatctgag

SEQ ID NO: 121778 - DNA, 30 bp, Artificial Sequence
  Synthetic oligonucleotide
aaacaccgatgacatgataaccagtctgag

SEQ ID NO: 121779 - DNA, 30 bp, Artificial Sequence
  Synthetic oligonucleotide
aacctggctggtagggatctcgcaagtgag

SEQ ID NO: 121780 - DNA, 30 bp, Artificial Sequence
  Synthetic oligonucleotide
aactcgagtcgtgagtcactatccagtgag

SEQ ID NO: 121781 - DNA, 30 bp, Artificial Sequence
  Synthetic oligonucleotide
taaaagcgggattgtttatttcaacgtgag

SEQ ID NO: 121782 - DNA, 30 bp, Artificial Sequence
  Synthetic oligonucleotide
tccagtcagcagtatagtacttcacgtgag

SEQ ID NO: 121783 - DNA, 30 bp, Artificial Sequence
  Synthetic oligonucleotide
tatgacacgagaattgagtcacgacgtgag

SEQ ID NO: 121784 - DNA, 30 bp, Artificial Sequence
  Synthetic oligonucleotide
agttcggatcggaaagatgtagtacgtgag

SEQ ID NO: 121785 - DNA, 30 bp, Artificial Sequence
  Synthetic oligonucleotide
ggcgtaccgtcgaaacagggtggccgtgag

SEQ ID NO: 121786 - DNA, 30 bp, Artificial Sequence
  Synthetic oligonucleotide
tggaatgcacggctcagggtatagcgtgag

SEQ ID NO: 121787 - DNA, 30 bp, Artificial Sequence
  Synthetic oligonucleotide
aatagatcttgtctataaaataaaggtgag

SEQ ID NO: 121788 - DNA, 30 bp, Artificial Sequence
  Synthetic oligonucleotide
atgcgttagaccagtgcgcattacggtgag

SEQ ID NO: 121789 - DNA, 30 bp, Artificial Sequence
  Synthetic oligonucleotide
ctgtcttgcatgagaacaaaacggggtgag

SEQ ID NO: 121790 - DNA, 30 bp, Artificial Sequence
  Synthetic oligonucleotide
cgacggggtgactgacgcaagtttggtgag

SEQ ID NO: 121791 - DNA, 30 bp, Artificial Sequence
  Synthetic oligonucleotide
acatattcgcggtgagcgtagccatgtgag

SEQ ID NO: 121792 - DNA, 30 bp, Artificial Sequence
  Synthetic oligonucleotide
cgccgaggcgtcaaggtgaattactgtgag

SEQ ID NO: 121793 - DNA, 30 bp, Artificial Sequence
  Synthetic oligonucleotide
agtaaacgtgtaaccacgccaagtattgag

SEQ ID NO: 121794 - DNA, 30 bp, Artificial Sequence
  Synthetic oligonucleotide
tgattgcagaagttcacgtcgtgtattgag

SEQ ID NO: 121795 - DNA, 30 bp, Artificial Sequence
  Synthetic oligonucleotide
gtcaatgggcctgagtggtcttagcttgag

SEQ ID NO: 121796 - DNA, 30 bp, Artificial Sequence
  Synthetic oligonucleotide
cggatgtagacgggccgctaaaaagttgag

SEQ ID NO: 121797 - DNA, 30 bp, Artificial Sequence
  Synthetic oligonucleotide
ctatcgagctcgcgggtcaggcacgttgag

SEQ ID NO: 121798 - DNA, 30 bp, Artificial Sequence
  Synthetic oligonucleotide
tgacaccagcctggcctgtacgacgttgag

SEQ ID NO: 121799 - DNA, 30 bp, Artificial Sequence
  Synthetic oligonucleotide
aggatagccacagacgctatttgcgttgag

SEQ ID NO: 121800 - DNA, 30 bp, Artificial Sequence
  Synthetic oligonucleotide
ttgggagaaaaaggcccgattaaggttgag

SEQ ID NO: 121801 - DNA, 30 bp, Artificial Sequence
  Synthetic oligonucleotide
acacacctcagacgtgtcagttttgttgag

SEQ ID NO: 121802 - DNA, 30 bp, Artificial Sequence
  Synthetic oligonucleotide
tgaggctcctcgttattggcgccatttgag

SEQ ID NO: 121803 - DNA, 30 bp, Artificial Sequence
  Synthetic oligonucleotide
tggtatcccctgtgaggcgaccgctttgag

SEQ ID NO: 121804 - DNA, 30 bp, Artificial Sequence
  Synthetic oligonucleotide
cgtcattttaaaaggaatattgacaaatag

SEQ ID NO: 121805 - DNA, 30 bp, Artificial Sequence
  Synthetic oligonucleotide
agtgcagtctgagggaacggtttcaaatag

SEQ ID NO: 121806 - DNA, 30 bp, Artificial Sequence
  Synthetic oligonucleotide
gagtagttacatggggggctgcctaaatag

SEQ ID NO: 121807 - DNA, 30 bp, Artificial Sequence
  Synthetic oligonucleotide
cggtccctgcatatcattggcattaaatag

SEQ ID NO: 121808 - DNA, 30 bp, Artificial Sequence
  Synthetic oligonucleotide
gtcgcgtacatagtggtctagatacaatag

SEQ ID NO: 121809 - DNA, 30 bp, Artificial Sequence
  Synthetic oligonucleotide
tctgggatcgtgatctccgggcaccaatag

SEQ ID NO: 121810 - DNA, 30 bp, Artificial Sequence
  Synthetic oligonucleotide
ggagatcccttgccctagcttcagcaatag

SEQ ID NO: 121811 - DNA, 30 bp, Artificial Sequence
  Synthetic oligonucleotide
taggaccatctgctcgggtgcgggcaatag

SEQ ID NO: 121812 - DNA, 30 bp, Artificial Sequence
  Synthetic oligonucleotide
ctctgtgtgcgaagggttaggcatcaatag

SEQ ID NO: 121813 - DNA, 30 bp, Artificial Sequence
  Synthetic oligonucleotide
aacgtaacaaggcacgcgagccgagaatag

SEQ ID NO: 121814 - DNA, 30 bp, Artificial Sequence
  Synthetic oligonucleotide
catatcgggcataggtcaccctttgaatag

SEQ ID NO: 121815 - DNA, 30 bp, Artificial Sequence
  Synthetic oligonucleotide
agaggtaagggaatattattagcaacatag

SEQ ID NO: 121816 - DNA, 30 bp, Artificial Sequence
  Synthetic oligonucleotide
tttcggtccacattaaagggacgaacatag

SEQ ID NO: 121817 - DNA, 30 bp, Artificial Sequence
  Synthetic oligonucleotide
cgggggggtcaccaaacttagctaacatag

SEQ ID NO: 121818 - DNA, 30 bp, Artificial Sequence
  Synthetic oligonucleotide
gtgtgagggtctgaacgttctctaacatag

SEQ ID NO: 121819 - DNA, 30 bp, Artificial Sequence
  Synthetic oligonucleotide
cgacacattgacggatgaccctggacatag

SEQ ID NO: 121820 - DNA, 30 bp, Artificial Sequence
  Synthetic oligonucleotide
atatcgaggcgtgacttaaagattacatag

SEQ ID NO: 121821 - DNA, 30 bp, Artificial Sequence
  Synthetic oligonucleotide
acagatcgcgggtgtttagcggttacatag

SEQ ID NO: 121822 - DNA, 30 bp, Artificial Sequence
  Synthetic oligonucleotide
tcggggtgaaacaggatcgcagtaccatag

SEQ ID NO: 121823 - DNA, 30 bp, Artificial Sequence
  Synthetic oligonucleotide
ggcagccaaatcacactcctagttccatag

SEQ ID NO: 121824 - DNA, 30 bp, Artificial Sequence
  Synthetic oligonucleotide
ccacagtaaatggagtgcaaccgatcatag

SEQ ID NO: 121825 - DNA, 30 bp, Artificial Sequence
  Synthetic oligonucleotide
aaatacgtgaagacggtaaatcactcatag

SEQ ID NO: 121826 - DNA, 30 bp, Artificial Sequence
  Synthetic oligonucleotide
gtgataccgtaggcactaggctgctcatag

SEQ ID NO: 121827 - DNA, 30 bp, Artificial Sequence
  Synthetic oligonucleotide
atacaaagatacctctcacaaaagtcatag

SEQ ID NO: 121828 - DNA, 30 bp, Artificial Sequence
  Synthetic oligonucleotide
tcctacggggcccaaataaacggaagatag

SEQ ID NO: 121829 - DNA, 30 bp, Artificial Sequence
  Synthetic oligonucleotide
tttccgtgcagacatgaagttgtaagatag

SEQ ID NO: 121830 - DNA, 30 bp, Artificial Sequence
  Synthetic oligonucleotide
ggtaaagaagaatgtggctgcaccagatag

SEQ ID NO: 121831 - DNA, 30 bp, Artificial Sequence
  Synthetic oligonucleotide
tccgagtcctgcggtcctaaccaaggatag

SEQ ID NO: 121832 - DNA, 30 bp, Artificial Sequence
  Synthetic oligonucleotide
ccaaagcccattcgtcgagaatcaggatag

SEQ ID NO: 121833 - DNA, 30 bp, Artificial Sequence
  Synthetic oligonucleotide
ggcacgtgaaagacgggctgcttcggatag

SEQ ID NO: 121834 - DNA, 30 bp, Artificial Sequence
  Synthetic oligonucleotide
ggcaatgtgtgaaggggttctaggggatag

SEQ ID NO: 121835 - DNA, 30 bp, Artificial Sequence
  Synthetic oligonucleotide
ctttgacccgcagagaaagtagggggatag

SEQ ID NO: 121836 - DNA, 29 bp, Artificial Sequence
  Synthetic oligonucleotide
ggacacgagatgccagcgtacatggatag

SEQ ID NO: 121837 - DNA, 30 bp, Artificial Sequence
  Synthetic oligonucleotide
ctgatgttggaaaactaatggtgtggatag

SEQ ID NO: 121838 - DNA, 30 bp, Artificial Sequence
  Synthetic oligonucleotide
tctgttgtttcagaacccgctaactgatag

SEQ ID NO: 121839 - DNA, 30 bp, Artificial Sequence
  Synthetic oligonucleotide
gtggtacaggaagggtctgatcagtgatag

SEQ ID NO: 121840 - DNA, 30 bp, Artificial Sequence
  Synthetic oligonucleotide
taattgcaaatcgcattccctgtaatatag

SEQ ID NO: 121841 - DNA, 30 bp, Artificial Sequence
  Synthetic oligonucleotide
tccgggaggggaaatctacacgatatatag

SEQ ID NO: 121842 - DNA, 30 bp, Artificial Sequence
  Synthetic oligonucleotide
agcaccaaggtgttacagtcaaaactatag

SEQ ID NO: 121843 - DNA, 30 bp, Artificial Sequence
  Synthetic oligonucleotide
tcgtccaagtctaaaataggcaggctatag

SEQ ID NO: 121844 - DNA, 30 bp, Artificial Sequence
  Synthetic oligonucleotide
ggatggtgttagttttacaagtaagtatag

SEQ ID NO: 121845 - DNA, 30 bp, Artificial Sequence
  Synthetic oligonucleotide
cgtacgcatactaagtttaaaggagtatag

SEQ ID NO: 121846 - DNA, 30 bp, Artificial Sequence
  Synthetic oligonucleotide
aaggctcaaatcgagacgcgagatgtatag

SEQ ID NO: 121847 - DNA, 30 bp, Artificial Sequence
  Synthetic oligonucleotide
caagagcatagtgtgacacttcccttatag

SEQ ID NO: 121848 - DNA, 30 bp, Artificial Sequence
  Synthetic oligonucleotide
ttgcgcgatacaatacttagaccgttatag

SEQ ID NO: 121849 - DNA, 30 bp, Artificial Sequence
  Synthetic oligonucleotide
aaatgcgtgaataaatcgaggaggttatag

SEQ ID NO: 121850 - DNA, 30 bp, Artificial Sequence
  Synthetic oligonucleotide
gataagaatgtgatagttagtgggttatag

SEQ ID NO: 121851 - DNA, 30 bp, Artificial Sequence
  Synthetic oligonucleotide
gagactcggccgaggcaacgcgtaaactag

SEQ ID NO: 121852 - DNA, 30 bp, Artificial Sequence
  Synthetic oligonucleotide
taattggcacccagtaatcttatcaactag

SEQ ID NO: 121853 - DNA, 30 bp, Artificial Sequence
  Synthetic oligonucleotide
actaccacgaaaagtcactgcctcaactag

SEQ ID NO: 121854 - DNA, 30 bp, Artificial Sequence
  Synthetic oligonucleotide
tgccttgaaaagaaacgtttcgcgaactag

SEQ ID NO: 121855 - DNA, 30 bp, Artificial Sequence
  Synthetic oligonucleotide
actagggcgttacctatcaagcgtaactag

SEQ ID NO: 121856 - DNA, 29 bp, Artificial Sequence
  Synthetic oligonucleotide
caaaacagagtcgcgcagatacccactag

SEQ ID NO: 121857 - DNA, 30 bp, Artificial Sequence
  Synthetic oligonucleotide
agttaactagtgtaaatccataaagactag

SEQ ID NO: 121858 - DNA, 30 bp, Artificial Sequence
  Synthetic oligonucleotide
aagcttcatggaggggcaacgtaaacctag

SEQ ID NO: 121859 - DNA, 30 bp, Artificial Sequence
  Synthetic oligonucleotide
acgagtgaaaacatcacctgttggacctag

SEQ ID NO: 121860 - DNA, 30 bp, Artificial Sequence
  Synthetic oligonucleotide
gctcatgtagagccataagaacctccctag

SEQ ID NO: 121861 - DNA, 30 bp, Artificial Sequence
  Synthetic oligonucleotide
ctgcaattagacatatcttggcttccctag

SEQ ID NO: 121862 - DNA, 30 bp, Artificial Sequence
  Synthetic oligonucleotide
taaaggatgccgtcggctttaatagcctag

SEQ ID NO: 121863 - DNA, 30 bp, Artificial Sequence
  Synthetic oligonucleotide
atgagttattgggacaggagctgcgcctag

SEQ ID NO: 121864 - DNA, 30 bp, Artificial Sequence
  Synthetic oligonucleotide
tggtctgccaccacttctttatgggcctag

SEQ ID NO: 121865 - DNA, 30 bp, Artificial Sequence
  Synthetic oligonucleotide
cacaggacattgtcctagttctctgcctag

SEQ ID NO: 121866 - DNA, 30 bp, Artificial Sequence
  Synthetic oligonucleotide
tatgcttcgttctagagttgagaatcctag

SEQ ID NO: 121867 - DNA, 30 bp, Artificial Sequence
  Synthetic oligonucleotide
ccacggacccccagtaggtctgagtcctag

SEQ ID NO: 121868 - DNA, 30 bp, Artificial Sequence
  Synthetic oligonucleotide
ggaaggtctcacgcctctcctaggtcctag

SEQ ID NO: 121869 - DNA, 30 bp, Artificial Sequence
  Synthetic oligonucleotide
gaaccagtgactcaggtatggttcagctag

SEQ ID NO: 121870 - DNA, 30 bp, Artificial Sequence
  Synthetic oligonucleotide
ctcacagaatgaatggctcacgtccgctag

SEQ ID NO: 121871 - DNA, 30 bp, Artificial Sequence
  Synthetic oligonucleotide
ggtaatcagatacgtcttaatatgcgctag

SEQ ID NO: 121872 - DNA, 30 bp, Artificial Sequence
  Synthetic oligonucleotide
catgaccgaacttgtgaggcagaaggctag

SEQ ID NO: 121873 - DNA, 30 bp, Artificial Sequence
  Synthetic oligonucleotide
tgactttgtgagcaggagtctgtcggctag

SEQ ID NO: 121874 - DNA, 30 bp, Artificial Sequence
  Synthetic oligonucleotide
atggcaattaaaattccactacagggctag

SEQ ID NO: 121875 - DNA, 30 bp, Artificial Sequence
  Synthetic oligonucleotide
cccaccggagatggtcgataaatgtgctag

SEQ ID NO: 121876 - DNA, 30 bp, Artificial Sequence
  Synthetic oligonucleotide
agcgtcacccagggtccaagagcttgctag

SEQ ID NO: 121877 - DNA, 30 bp, Artificial Sequence
  Synthetic oligonucleotide
ccgtctgatgtactcgaaggtcatgtctag

SEQ ID NO: 121878 - DNA, 30 bp, Artificial Sequence
  Synthetic oligonucleotide
agtcaaaatgcgtgcttgttaagtgtctag

SEQ ID NO: 121879 - DNA, 30 bp, Artificial Sequence
  Synthetic oligonucleotide
tacgcggctatgcggatctggggtgtctag

SEQ ID NO: 121880 - DNA, 30 bp, Artificial Sequence
  Synthetic oligonucleotide
tcggatctgtaccaccctgtctcattctag

SEQ ID NO: 121881 - DNA, 30 bp, Artificial Sequence
  Synthetic oligonucleotide
gaagggcactcgatgtgagggagcttctag

SEQ ID NO: 121882 - DNA, 30 bp, Artificial Sequence
  Synthetic oligonucleotide
aaggctccatggaagcgggcaaccaagtag

SEQ ID NO: 121883 - DNA, 30 bp, Artificial Sequence
  Synthetic oligonucleotide
gtattatgaatgtcaacaacgaggaagtag

SEQ ID NO: 121884 - DNA, 30 bp, Artificial Sequence
  Synthetic oligonucleotide
attctcaagcatctcgctcgcgataagtag

SEQ ID NO: 121885 - DNA, 30 bp, Artificial Sequence
  Synthetic oligonucleotide
tacaaactcaagttccatccgacacagtag

SEQ ID NO: 121886 - DNA, 30 bp, Artificial Sequence
  Synthetic oligonucleotide
tggtgttatggcctagttcgtcagcagtag

SEQ ID NO: 121887 - DNA, 30 bp, Artificial Sequence
  Synthetic oligonucleotide
ggggatgaagagatcagctgggctcagtag

SEQ ID NO: 121888 - DNA, 30 bp, Artificial Sequence
  Synthetic oligonucleotide
gacatgtattctcactatgcatctcagtag

SEQ ID NO: 121889 - DNA, 30 bp, Artificial Sequence
  Synthetic oligonucleotide
ggtcgactatttactaagtcatcagagtag

SEQ ID NO: 121890 - DNA, 30 bp, Artificial Sequence
  Synthetic oligonucleotide
atctgattttgggaactgacgggagagtag

SEQ ID NO: 121891 - DNA, 30 bp, Artificial Sequence
  Synthetic oligonucleotide
acacaggatatgccataaagaaactagtag

SEQ ID NO: 121892 - DNA, 30 bp, Artificial Sequence
  Synthetic oligonucleotide
ataaccgattgggtctcaactttctagtag

SEQ ID NO: 121893 - DNA, 30 bp, Artificial Sequence
  Synthetic oligonucleotide
ggacgccagattcgtcctgtcagttagtag

SEQ ID NO: 121894 - DNA, 30 bp, Artificial Sequence
  Synthetic oligonucleotide
ccgaatgctgccctgttcatccgttagtag

SEQ ID NO: 121895 - DNA, 30 bp, Artificial Sequence
  Synthetic oligonucleotide
gtcaccacagtccgtgggatatcaacgtag

SEQ ID NO: 121896 - DNA, 30 bp, Artificial Sequence
  Synthetic oligonucleotide
agtatctgaacgttactgggcatgccgtag

SEQ ID NO: 121897 - DNA, 30 bp, Artificial Sequence
  Synthetic oligonucleotide
caacgtaatctactggcaggagtgccgtag

SEQ ID NO: 121898 - DNA, 30 bp, Artificial Sequence
  Synthetic oligonucleotide
caacgagaactcattccaactgaagcgtag

SEQ ID NO: 121899 - DNA, 30 bp, Artificial Sequence
  Synthetic oligonucleotide
atttcacacccacgtaacgtataggcgtag

SEQ ID NO: 121900 - DNA, 30 bp, Artificial Sequence
  Synthetic oligonucleotide
actctgcattgaagggtaaacagggcgtag

SEQ ID NO: 121901 - DNA, 30 bp, Artificial Sequence
  Synthetic oligonucleotide
atagccctgtgccccccaggttaatcgtag

SEQ ID NO: 121902 - DNA, 30 bp, Artificial Sequence
  Synthetic oligonucleotide
cgcataactgtggaataatggatatcgtag

SEQ ID NO: 121903 - DNA, 28 bp, Artificial Sequence
  Synthetic oligonucleotide
ttccagaggtaaaggctgggactcgtag

SEQ ID NO: 121904 - DNA, 30 bp, Artificial Sequence
  Synthetic oligonucleotide
ggtcccgtcatccggggtagggcaaggtag

SEQ ID NO: 121905 - DNA, 30 bp, Artificial Sequence
  Synthetic oligonucleotide
tgcaagtggcctgcaatttctaagaggtag

SEQ ID NO: 121906 - DNA, 30 bp, Artificial Sequence
  Synthetic oligonucleotide
tgcccgttcatgataacaaatacgaggtag

SEQ ID NO: 121907 - DNA, 30 bp, Artificial Sequence
  Synthetic oligonucleotide
ctgatgtgttgaagaaacacagtgcggtag

SEQ ID NO: 121908 - DNA, 30 bp, Artificial Sequence
  Synthetic oligonucleotide
ccccgaggagttggacgaaacaatcggtag

SEQ ID NO: 121909 - DNA, 30 bp, Artificial Sequence
  Synthetic oligonucleotide
aagcgatacagttggtaggctcttcggtag

SEQ ID NO: 121910 - DNA, 30 bp, Artificial Sequence
  Synthetic oligonucleotide
gaggaaacagatggattcaaaggagggtag

SEQ ID NO: 121911 - DNA, 30 bp, Artificial Sequence
  Synthetic oligonucleotide
tctcttgtaacgcgtggggagtgggggtag

SEQ ID NO: 121912 - DNA, 30 bp, Artificial Sequence
  Synthetic oligonucleotide
cacggttcggaacaatggcgggaatggtag

SEQ ID NO: 121913 - DNA, 30 bp, Artificial Sequence
  Synthetic oligonucleotide
catgggctacaccgactcgtaccgtggtag

SEQ ID NO: 121914 - DNA, 30 bp, Artificial Sequence
  Synthetic oligonucleotide
cgggtgctaaaagtgtaagctaggtggtag

SEQ ID NO: 121915 - DNA, 30 bp, Artificial Sequence
  Synthetic oligonucleotide
tccgaacgcattgggtggattaggtggtag

SEQ ID NO: 121916 - DNA, 30 bp, Artificial Sequence
  Synthetic oligonucleotide
acaaaagaagcataccgtatgacttggtag

SEQ ID NO: 121917 - DNA, 30 bp, Artificial Sequence
  Synthetic oligonucleotide
cgatcagggttcggggaaaaacaaatgtag

SEQ ID NO: 121918 - DNA, 30 bp, Artificial Sequence
  Synthetic oligonucleotide
ggcagtcttgggtttgagcttacaatgtag

SEQ ID NO: 121919 - DNA, 30 bp, Artificial Sequence
  Synthetic oligonucleotide
ctggtttagcaaagtgaacgaataatgtag

SEQ ID NO: 121920 - DNA, 30 bp, Artificial Sequence
  Synthetic oligonucleotide
gcgcctgtgagtccgccgaaggcgatgtag

SEQ ID NO: 121921 - DNA, 30 bp, Artificial Sequence
  Synthetic oligonucleotide
gaagaacagaggtatggcgctaaactgtag

SEQ ID NO: 121922 - DNA, 30 bp, Artificial Sequence
  Synthetic oligonucleotide
ccaaacaagttgaaaaggtagcatctgtag

SEQ ID NO: 121923 - DNA, 30 bp, Artificial Sequence
  Synthetic oligonucleotide
cgccgagtgagttcgtaagttgttctgtag

SEQ ID NO: 121924 - DNA, 30 bp, Artificial Sequence
  Synthetic oligonucleotide
atatgatctcgcgcgtgagattccgtgtag

SEQ ID NO: 121925 - DNA, 30 bp, Artificial Sequence
  Synthetic oligonucleotide
atgtaatgatataatcgagaaagcgtgtag

SEQ ID NO: 121926 - DNA, 30 bp, Artificial Sequence
  Synthetic oligonucleotide
catggccccggccgaacgaggcgcgtgtag

SEQ ID NO: 121927 - DNA, 30 bp, Artificial Sequence
  Synthetic oligonucleotide
tattgccgggtaagttaggatacggtgtag

SEQ ID NO: 121928 - DNA, 30 bp, Artificial Sequence
  Synthetic oligonucleotide
tgctgctatagttagtagtagcctgtgtag

SEQ ID NO: 121929 - DNA, 30 bp, Artificial Sequence
  Synthetic oligonucleotide
cgtcacgcgttcttgtattattaattgtag

SEQ ID NO: 121930 - DNA, 30 bp, Artificial Sequence
  Synthetic oligonucleotide
tcagatagatgtcacgaacggaacttgtag

SEQ ID NO: 121931 - DNA, 30 bp, Artificial Sequence
  Synthetic oligonucleotide
cgcttgggggcgggccgattttggttgtag

SEQ ID NO: 121932 - DNA, 30 bp, Artificial Sequence
  Synthetic oligonucleotide
atgatgaacgtccgaaatttggaaaattag

SEQ ID NO: 121933 - DNA, 30 bp, Artificial Sequence
  Synthetic oligonucleotide
acgataccgcaatcacattagtatcattag

SEQ ID NO: 121934 - DNA, 30 bp, Artificial Sequence
  Synthetic oligonucleotide
ggtcaaggacatgcgagtggtagtcattag

SEQ ID NO: 121935 - DNA, 30 bp, Artificial Sequence
  Synthetic oligonucleotide
acaatgggtagacaccgactttcagattag

SEQ ID NO: 121936 - DNA, 30 bp, Artificial Sequence
  Synthetic oligonucleotide
cacgcatgaatatcctagtatggagattag

SEQ ID NO: 121937 - DNA, 30 bp, Artificial Sequence
  Synthetic oligonucleotide
ttggatccacgcaggagtccgagcgattag

SEQ ID NO: 121938 - DNA, 30 bp, Artificial Sequence
  Synthetic oligonucleotide
gttgtacctggaattagacaccgcgattag

SEQ ID NO: 121939 - DNA, 30 bp, Artificial Sequence
  Synthetic oligonucleotide
cacggtcgatgtatcgtttaaacatattag

SEQ ID NO: 121940 - DNA, 30 bp, Artificial Sequence
  Synthetic oligonucleotide
ggctgtggaatatcttttctgtgatattag

SEQ ID NO: 121941 - DNA, 30 bp, Artificial Sequence
  Synthetic oligonucleotide
atggtccgctagattctcaggccctattag

SEQ ID NO: 121942 - DNA, 30 bp, Artificial Sequence
  Synthetic oligonucleotide
gcggcgcacgcatgcaaaggattctattag

SEQ ID NO: 121943 - DNA, 30 bp, Artificial Sequence
  Synthetic oligonucleotide
tgttggtgtatacctgaaactcattattag

SEQ ID NO: 121944 - DNA, 31 bp, Artificial Sequence
  Synthetic oligonucleotide
atagcaaaagattaagatgtaaatttattag

SEQ ID NO: 121945 - DNA, 30 bp, Artificial Sequence
  Synthetic oligonucleotide
tcggaatacatctaggtggattgtacttag

SEQ ID NO: 121946 - DNA, 30 bp, Artificial Sequence
  Synthetic oligonucleotide
ccctccgaacattgagcattgcctccttag

SEQ ID NO: 121947 - DNA, 30 bp, Artificial Sequence
  Synthetic oligonucleotide
aaccaagataaaaggtggacaaaagcttag

SEQ ID NO: 121948 - DNA, 30 bp, Artificial Sequence
  Synthetic oligonucleotide
gtggtggctcggataatgaatccagcttag

SEQ ID NO: 121949 - DNA, 30 bp, Artificial Sequence
  Synthetic oligonucleotide
atagcgtcaaggcggatattttccgcttag

SEQ ID NO: 121950 - DNA, 30 bp, Artificial Sequence
  Synthetic oligonucleotide
ccttagcggttccggcatgtcattgcttag

SEQ ID NO: 121951 - DNA, 30 bp, Artificial Sequence
  Synthetic oligonucleotide
ccggtgttgtgatagcccgagtactcttag

SEQ ID NO: 121952 - DNA, 30 bp, Artificial Sequence
  Synthetic oligonucleotide
cgaggctaaaaacccgcggtcttgtcttag

SEQ ID NO: 121953 - DNA, 30 bp, Artificial Sequence
  Synthetic oligonucleotide
tgtgagcagggctggaggcggcgcagttag

SEQ ID NO: 121954 - DNA, 30 bp, Artificial Sequence
  Synthetic oligonucleotide
gtggtatcgcggaaaagcatgatgagttag

SEQ ID NO: 121955 - DNA, 30 bp, Artificial Sequence
  Synthetic oligonucleotide
tcttgacggatctaggagccttttagttag

SEQ ID NO: 121956 - DNA, 30 bp, Artificial Sequence
  Synthetic oligonucleotide
attgcggtaatgcatcaacatacgcgttag

SEQ ID NO: 121957 - DNA, 31 bp, Artificial Sequence
  Synthetic oligonucleotide
ggaggtttagtataaggggatacggcgttag

SEQ ID NO: 121958 - DNA, 30 bp, Artificial Sequence
  Synthetic oligonucleotide
aatctacaggaacaataaaaatttcgttag

SEQ ID NO: 121959 - DNA, 30 bp, Artificial Sequence
  Synthetic oligonucleotide
caggccaaattgtaaatggattttcgttag

SEQ ID NO: 121960 - DNA, 30 bp, Artificial Sequence
  Synthetic oligonucleotide
gttactctgaccgctacaagaaaaggttag

SEQ ID NO: 121961 - DNA, 30 bp, Artificial Sequence
  Synthetic oligonucleotide
caccgagtcgaagccaaggttgtcggttag

SEQ ID NO: 121962 - DNA, 30 bp, Artificial Sequence
  Synthetic oligonucleotide
tgatatgagcagagatatcggattggttag

SEQ ID NO: 121963 - DNA, 30 bp, Artificial Sequence
  Synthetic oligonucleotide
taaatgccggccttggtatgctttggttag

SEQ ID NO: 121964 - DNA, 30 bp, Artificial Sequence
  Synthetic oligonucleotide
accttggaccggcctagcaccatctgttag

SEQ ID NO: 121965 - DNA, 30 bp, Artificial Sequence
  Synthetic oligonucleotide
aagtgtaaaataggacatgaaaagtgttag

SEQ ID NO: 121966 - DNA, 30 bp, Artificial Sequence
  Synthetic oligonucleotide
accaaggcatatcaaggtccgtagtgttag

SEQ ID NO: 121967 - DNA, 30 bp, Artificial Sequence
  Synthetic oligonucleotide
ccggagaaagctcagataaagcggtgttag

SEQ ID NO: 121968 - DNA, 30 bp, Artificial Sequence
  Synthetic oligonucleotide
ggagtgctagtgggcacatttataatttag

SEQ ID NO: 121969 - DNA, 30 bp, Artificial Sequence
  Synthetic oligonucleotide
agactgatccgagcaagagcggtaatttag

SEQ ID NO: 121970 - DNA, 30 bp, Artificial Sequence
  Synthetic oligonucleotide
gtggtacgagtggaaacccgaatcatttag

SEQ ID NO: 121971 - DNA, 30 bp, Artificial Sequence
  Synthetic oligonucleotide
tacagctggaagactcgattgggtatttag

SEQ ID NO: 121972 - DNA, 30 bp, Artificial Sequence
  Synthetic oligonucleotide
taaaaaggcaccggagcggcttgtctttag

SEQ ID NO: 121973 - DNA, 30 bp, Artificial Sequence
  Synthetic oligonucleotide
gctgtataacagggcggacgacaagtttag

SEQ ID NO: 121974 - DNA, 30 bp, Artificial Sequence
  Synthetic oligonucleotide
acagccacgagctgtcgtgtgtcagtttag

SEQ ID NO: 121975 - DNA, 30 bp, Artificial Sequence
  Synthetic oligonucleotide
agtcctgagcttgtttgcccccgggtttag

SEQ ID NO: 121976 - DNA, 30 bp, Artificial Sequence
  Synthetic oligonucleotide
tggcaagccgggtcgatgggcaaattttag

SEQ ID NO: 121977 - DNA, 30 bp, Artificial Sequence
  Synthetic oligonucleotide
tgcgtgtcccagagcacgtcccgattttag

SEQ ID NO: 121978 - DNA, 30 bp, Artificial Sequence
  Synthetic oligonucleotide
cagacagtagacatatttttggagttttag

SEQ ID NO: 121979 - DNA, 30 bp, Artificial Sequence
  Synthetic oligonucleotide
agtattacggcaaacactaagtagttttag

SEQ ID NO: 121980 - DNA, 30 bp, Artificial Sequence
  Synthetic oligonucleotide
ccggagaggcaagtctctttgagtttttag

SEQ ID NO: 121981 - DNA, 30 bp, Artificial Sequence
  Synthetic oligonucleotide
tggggctcctggccaagagttctcaaaacg

SEQ ID NO: 121982 - DNA, 30 bp, Artificial Sequence
  Synthetic oligonucleotide
gaaagcttggcatgctaaaggtctaaaacg

SEQ ID NO: 121983 - DNA, 30 bp, Artificial Sequence
  Synthetic oligonucleotide
ggtagtcgtcttcgttggggctcacaaacg

SEQ ID NO: 121984 - DNA, 30 bp, Artificial Sequence
  Synthetic oligonucleotide
caccgacaaaagcccactacgcgccaaacg

SEQ ID NO: 121985 - DNA, 30 bp, Artificial Sequence
  Synthetic oligonucleotide
tattacagttaaagtgacaccatctaaacg

SEQ ID NO: 121986 - DNA, 30 bp, Artificial Sequence
  Synthetic oligonucleotide
gtataaatatcccaacaaattacaccaacg

SEQ ID NO: 121987 - DNA, 30 bp, Artificial Sequence
  Synthetic oligonucleotide
gtcatctagaactttcaaacccgtccaacg

SEQ ID NO: 121988 - DNA, 30 bp, Artificial Sequence
  Synthetic oligonucleotide
aagggcgaagtcctttaatatcaagcaacg

SEQ ID NO: 121989 - DNA, 30 bp, Artificial Sequence
  Synthetic oligonucleotide
tctagaaagtccgtatgacttcgatcaacg

SEQ ID NO: 121990 - DNA, 30 bp, Artificial Sequence
  Synthetic oligonucleotide
aaaaacggaatcccagccatcgtatcaacg

SEQ ID NO: 121991 - DNA, 30 bp, Artificial Sequence
  Synthetic oligonucleotide
accaatctgggagatagggcggtatcaacg

SEQ ID NO: 121992 - DNA, 30 bp, Artificial Sequence
  Synthetic oligonucleotide
caggagtcatgtcgggaggttacctcaacg

SEQ ID NO: 121993 - DNA, 30 bp, Artificial Sequence
  Synthetic oligonucleotide
gatcgcgtcctactcaccatgcagagaacg

SEQ ID NO: 121994 - DNA, 30 bp, Artificial Sequence
  Synthetic oligonucleotide
atgcatgaacagcagaaacaaccgagaacg

SEQ ID NO: 121995 - DNA, 30 bp, Artificial Sequence
  Synthetic oligonucleotide
ctgagtggtctgactcatgttcggagaacg

SEQ ID NO: 121996 - DNA, 30 bp, Artificial Sequence
  Synthetic oligonucleotide
tgtagtcagctttcggttgaagaacgaacg

SEQ ID NO: 121997 - DNA, 30 bp, Artificial Sequence
  Synthetic oligonucleotide
ttgcgtctaacaagactaataagccgaacg

SEQ ID NO: 121998 - DNA, 30 bp, Artificial Sequence
  Synthetic oligonucleotide
cggcggggtgccgcaagatagggccgaacg

SEQ ID NO: 121999 - DNA, 30 bp, Artificial Sequence
  Synthetic oligonucleotide
aaggcctcaaccgtatataatattcgaacg

SEQ ID NO: 122000 - DNA, 30 bp, Artificial Sequence
  Synthetic oligonucleotide
ttgcctccagagcttcgggcctagggaacg

SEQ ID NO: 122001 - DNA, 30 bp, Artificial Sequence
  Synthetic oligonucleotide
ttactagccaatgagcctaaccgctgaacg

SEQ ID NO: 122002 - DNA, 30 bp, Artificial Sequence
  Synthetic oligonucleotide
gcctctacagtatgcatgaaaaggtgaacg

SEQ ID NO: 122003 - DNA, 30 bp, Artificial Sequence
  Synthetic oligonucleotide
gtgtacgtgcgagatgtattattgtgaacg

SEQ ID NO: 122004 - DNA, 30 bp, Artificial Sequence
  Synthetic oligonucleotide
tatgaggaccatcactcgcgtccttgaacg

SEQ ID NO: 122005 - DNA, 30 bp, Artificial Sequence
  Synthetic oligonucleotide
cgtgttgtagtttagagtgtcgacataacg

SEQ ID NO: 122006 - DNA, 30 bp, Artificial Sequence
  Synthetic oligonucleotide
caattaggtcaaggactgcgtccactaacg

SEQ ID NO: 122007 - DNA, 30 bp, Artificial Sequence
  Synthetic oligonucleotide
attacgtctgggtaagatgacctactaacg

SEQ ID NO: 122008 - DNA, 30 bp, Artificial Sequence
  Synthetic oligonucleotide
taggtctagtcaatcctagattcgctaacg

SEQ ID NO: 122009 - DNA, 30 bp, Artificial Sequence
  Synthetic oligonucleotide
ataatgataggtggcacagccctgctaacg

SEQ ID NO: 122010 - DNA, 30 bp, Artificial Sequence
  Synthetic oligonucleotide
tcacataatgtgtgaatccaggtagtaacg

SEQ ID NO: 122011 - DNA, 30 bp, Artificial Sequence
  Synthetic oligonucleotide
tcactggtcctgctattggagctcgtaacg

SEQ ID NO: 122012 - DNA, 30 bp, Artificial Sequence
  Synthetic oligonucleotide
cggattatggggtcgagcatcttggtaacg

SEQ ID NO: 122013 - DNA, 30 bp, Artificial Sequence
  Synthetic oligonucleotide
tataaactgagtctagcctagcgtgtaacg

SEQ ID NO: 122014 - DNA, 30 bp, Artificial Sequence
  Synthetic oligonucleotide
taaaggtctgagtgaccatagcgcttaacg

SEQ ID NO: 122015 - DNA, 30 bp, Artificial Sequence
  Synthetic oligonucleotide
cacatctccgttagtaggaacaagttaacg

SEQ ID NO: 122016 - DNA, 30 bp, Artificial Sequence
  Synthetic oligonucleotide
acgcgattagttctgcgggaggggttaacg

SEQ ID NO: 122017 - DNA, 30 bp, Artificial Sequence
  Synthetic oligonucleotide
ttgcatgcttcactaccagttgctttaacg

SEQ ID NO: 122018 - DNA, 30 bp, Artificial Sequence
  Synthetic oligonucleotide
aagtgtagtctgataagcagtgaaaacacg

SEQ ID NO: 122019 - DNA, 30 bp, Artificial Sequence
  Synthetic oligonucleotide
ccattgccaacggccaaatagggaaacacg

SEQ ID NO: 122020 - DNA, 30 bp, Artificial Sequence
  Synthetic oligonucleotide
ccgatagcattttaaacgtttgtgaacacg

SEQ ID NO: 122021 - DNA, 30 bp, Artificial Sequence
  Synthetic oligonucleotide
aatagatgatatttatctttacgtaacacg

SEQ ID NO: 122022 - DNA, 30 bp, Artificial Sequence
  Synthetic oligonucleotide
aacgacctatccaggagtcgaggacacacg

SEQ ID NO: 122023 - DNA, 30 bp, Artificial Sequence
  Synthetic oligonucleotide
acctcgaggaacgggttgctataccacacg

SEQ ID NO: 122024 - DNA, 30 bp, Artificial Sequence
  Synthetic oligonucleotide
catatgctatacccgcgtcggaatcacacg

SEQ ID NO: 122025 - DNA, 30 bp, Artificial Sequence
  Synthetic oligonucleotide
caatagtaataagccaagacataagacacg

SEQ ID NO: 122026 - DNA, 30 bp, Artificial Sequence
  Synthetic oligonucleotide
gaagcttcggttaactccgcaagcgacacg

SEQ ID NO: 122027 - DNA, 30 bp, Artificial Sequence
  Synthetic oligonucleotide
cttacattgaatcggagtagacttgacacg

SEQ ID NO: 122028 - DNA, 30 bp, Artificial Sequence
  Synthetic oligonucleotide
ccctggcagcttcgcaacggcaaatacacg

SEQ ID NO: 122029 - DNA, 30 bp, Artificial Sequence
  Synthetic oligonucleotide
ggagatctcaaggttgggccgtgctacacg

SEQ ID NO: 122030 - DNA, 30 bp, Artificial Sequence
  Synthetic oligonucleotide
gcttgaataggacctattggcacgtacacg

SEQ ID NO: 122031 - DNA, 30 bp, Artificial Sequence
  Synthetic oligonucleotide
gcggccacacggcgagcccctgcaaccacg

SEQ ID NO: 122032 - DNA, 30 bp, Artificial Sequence
  Synthetic oligonucleotide
ccaatgggttattaagtccatctaaccacg

SEQ ID NO: 122033 - DNA, 30 bp, Artificial Sequence
  Synthetic oligonucleotide
acgcgaaaccacaccgggctgttaaccacg

SEQ ID NO: 122034 - DNA, 30 bp, Artificial Sequence
  Synthetic oligonucleotide
ggtataccattctcgactacctttaccacg

SEQ ID NO: 122035 - DNA, 30 bp, Artificial Sequence
  Synthetic oligonucleotide
aatactgctcgtcgattaagtccagccacg

SEQ ID NO: 122036 - DNA, 30 bp, Artificial Sequence
  Synthetic oligonucleotide
agtaatgtaagcgaatgaaaccttgccacg

SEQ ID NO: 122037 - DNA, 30 bp, Artificial Sequence
  Synthetic oligonucleotide
aagtaacgacacgaaggttcgctatccacg

SEQ ID NO: 122038 - DNA, 30 bp, Artificial Sequence
  Synthetic oligonucleotide
atgttcggctgtaagtagacggtatccacg

SEQ ID NO: 122039 - DNA, 30 bp, Artificial Sequence
  Synthetic oligonucleotide
ggacaatccaaacgattaggaaactccacg

SEQ ID NO: 122040 - DNA, 30 bp, Artificial Sequence
  Synthetic oligonucleotide
ggatctaacaagtgcaaagctttgtccacg

SEQ ID NO: 122041 - DNA, 30 bp, Artificial Sequence
  Synthetic oligonucleotide
gatcaaccccaattggtgggggattccacg

SEQ ID NO: 122042 - DNA, 30 bp, Artificial Sequence
  Synthetic oligonucleotide
gggagggtacagcccggttgaagttccacg

SEQ ID NO: 122043 - DNA, 30 bp, Artificial Sequence
  Synthetic oligonucleotide
caaactggataacaaagtccgagttccacg

SEQ ID NO: 122044 - DNA, 30 bp, Artificial Sequence
  Synthetic oligonucleotide
agtaggtcgactaagccaacgaccagcacg

SEQ ID NO: 122045 - DNA, 30 bp, Artificial Sequence
  Synthetic oligonucleotide
aacggactgatagccgacgtcacccgcacg

SEQ ID NO: 122046 - DNA, 30 bp, Artificial Sequence
  Synthetic oligonucleotide
cgtatttgcaactagtgaggcatgcgcacg

SEQ ID NO: 122047 - DNA, 30 bp, Artificial Sequence
  Synthetic oligonucleotide
agtctagataaccaatgcaccttcggcacg

SEQ ID NO: 122048 - DNA, 30 bp, Artificial Sequence
  Synthetic oligonucleotide
cccttgggagttccgctaactgcgggcacg

SEQ ID NO: 122049 - DNA, 30 bp, Artificial Sequence
  Synthetic oligonucleotide
atggtggattggtgttcgcgatcgggcacg

SEQ ID NO: 122050 - DNA, 30 bp, Artificial Sequence
  Synthetic oligonucleotide
ccggcgtgtacatgcgccagccgatgcacg

SEQ ID NO: 122051 - DNA, 30 bp, Artificial Sequence
  Synthetic oligonucleotide
ccagtataggatagaaaactcctatgcacg

SEQ ID NO: 122052 - DNA, 30 bp, Artificial Sequence
  Synthetic oligonucleotide
ctggcaaattttgtgggctcatcctgcacg

SEQ ID NO: 122053 - DNA, 30 bp, Artificial Sequence
  Synthetic oligonucleotide
ctgtctaaagacggtggggaaccaatcacg

SEQ ID NO: 122054 - DNA, 30 bp, Artificial Sequence
  Synthetic oligonucleotide
tcgaccaagggcgggatacctgcagtcacg

SEQ ID NO: 122055 - DNA, 29 bp, Artificial Sequence
  Synthetic oligonucleotide
gctcgcgtcgcacgggggcaaccgtcacg

SEQ ID NO: 122056 - DNA, 30 bp, Artificial Sequence
  Synthetic oligonucleotide
caattgtggccaattcccaaacccgtcacg

SEQ ID NO: 122057 - DNA, 30 bp, Artificial Sequence
  Synthetic oligonucleotide
cagcatgtgggaacggaggactgggtcacg

SEQ ID NO: 122058 - DNA, 30 bp, Artificial Sequence
  Synthetic oligonucleotide
gtaaacaaagcacgcctatgatggttcacg

SEQ ID NO: 122059 - DNA, 30 bp, Artificial Sequence
  Synthetic oligonucleotide
cgtgatccagtacgctggcaaaaaaagacg

SEQ ID NO: 122060 - DNA, 30 bp, Artificial Sequence
  Synthetic oligonucleotide
caaggttggtagatccggggacaaaagacg

SEQ ID NO: 122061 - DNA, 30 bp, Artificial Sequence
  Synthetic oligonucleotide
atgttcggcatgttagattggcataagacg

SEQ ID NO: 122062 - DNA, 30 bp, Artificial Sequence
  Synthetic oligonucleotide
agcaattagagaccttagttgtctaagacg

SEQ ID NO: 122063 - DNA, 30 bp, Artificial Sequence
  Synthetic oligonucleotide
gcctaacagcgctaggtccaaagtcagacg

SEQ ID NO: 122064 - DNA, 30 bp, Artificial Sequence
  Synthetic oligonucleotide
taacactctaccagcaccgtaagtcagacg

SEQ ID NO: 122065 - DNA, 30 bp, Artificial Sequence
  Synthetic oligonucleotide
gcaccgaacaagtaatgactacgtcagacg

SEQ ID NO: 122066 - DNA, 30 bp, Artificial Sequence
  Synthetic oligonucleotide
tattcgccatagcgactggcacggtagacg

SEQ ID NO: 122067 - DNA, 30 bp, Artificial Sequence
  Synthetic oligonucleotide
acggcaatagatcggctcctcgattagacg

SEQ ID NO: 122068 - DNA, 30 bp, Artificial Sequence
  Synthetic oligonucleotide
acgctaaatacagaaactaggcaaacgacg

SEQ ID NO: 122069 - DNA, 30 bp, Artificial Sequence
  Synthetic oligonucleotide
tagaaactacaaagcggtgtataaacgacg

SEQ ID NO: 122070 - DNA, 30 bp, Artificial Sequence
  Synthetic oligonucleotide
gtcaatctggtgtggtgaaggctaacgacg

SEQ ID NO: 122071 - DNA, 30 bp, Artificial Sequence
  Synthetic oligonucleotide
gtggcggtaggtgggggatgtttgacgacg

SEQ ID NO: 122072 - DNA, 30 bp, Artificial Sequence
  Synthetic oligonucleotide
tgtagtggagaacccactggacacccgacg

SEQ ID NO: 122073 - DNA, 30 bp, Artificial Sequence
  Synthetic oligonucleotide
tcatattgacacgtgcaacaaaccccgacg

SEQ ID NO: 122074 - DNA, 31 bp, Artificial Sequence
  Synthetic oligonucleotide
cgaggagtaatcgcctgcgagctggccgacg

SEQ ID NO: 122075 - DNA, 30 bp, Artificial Sequence
  Synthetic oligonucleotide
atgcactcctgatctaacggatatccgacg

SEQ ID NO: 122076 - DNA, 30 bp, Artificial Sequence
  Synthetic oligonucleotide
ctacagggggcacgagtattttatccgacg

SEQ ID NO: 122077 - DNA, 30 bp, Artificial Sequence
  Synthetic oligonucleotide
taggcccgggataagggcaataaagcgacg

SEQ ID NO: 122078 - DNA, 30 bp, Artificial Sequence
  Synthetic oligonucleotide
aagaaagcttgggcgagttgctcggcgacg

SEQ ID NO: 122079 - DNA, 30 bp, Artificial Sequence
  Synthetic oligonucleotide
ggttcgcgatatacatctgaatgggcgacg

SEQ ID NO: 122080 - DNA, 30 bp, Artificial Sequence
  Synthetic oligonucleotide
actacactcgcgtcgatgccaattgcgacg

SEQ ID NO: 122081 - DNA, 30 bp, Artificial Sequence
  Synthetic oligonucleotide
agggctatccgttaacatgctaaatcgacg

SEQ ID NO: 122082 - DNA, 30 bp, Artificial Sequence
  Synthetic oligonucleotide
tcaagagtagtaaatgatcggtgctcgacg

SEQ ID NO: 122083 - DNA, 30 bp, Artificial Sequence
  Synthetic oligonucleotide
aagaactagtaatcataagtatctaggacg

SEQ ID NO: 122084 - DNA, 30 bp, Artificial Sequence
  Synthetic oligonucleotide
gtaggactcactaattgtagacctcggacg

SEQ ID NO: 122085 - DNA, 30 bp, Artificial Sequence
  Synthetic oligonucleotide
cattatttccgctgatcacatcgagggacg

SEQ ID NO: 122086 - DNA, 30 bp, Artificial Sequence
  Synthetic oligonucleotide
ggtgagcgacaaacgccggttaacgggacg

SEQ ID NO: 122087 - DNA, 30 bp, Artificial Sequence
  Synthetic oligonucleotide
taaccatgagaccggtatgtggttgggacg

SEQ ID NO: 122088 - DNA, 30 bp, Artificial Sequence
  Synthetic oligonucleotide
acagctatcagcttgaatcaaaaatggacg

SEQ ID NO: 122089 - DNA, 30 bp, Artificial Sequence
  Synthetic oligonucleotide
aggcatggctattgctagtagaactggacg

SEQ ID NO: 122090 - DNA, 30 bp, Artificial Sequence
  Synthetic oligonucleotide
tcatatgataaacaacagcgtatctggacg

SEQ ID NO: 122091 - DNA, 30 bp, Artificial Sequence
  Synthetic oligonucleotide
caagcatatcgagcatcccgggtgtggacg

SEQ ID NO: 122092 - DNA, 30 bp, Artificial Sequence
  Synthetic oligonucleotide
agcattggcgttggtagaggaataatgacg

SEQ ID NO: 122093 - DNA, 30 bp, Artificial Sequence
  Synthetic oligonucleotide
ggatatacgggaatggtaactcacatgacg

SEQ ID NO: 122094 - DNA, 30 bp, Artificial Sequence
  Synthetic oligonucleotide
gaagtgaggtgacaacgcaggctcatgacg

SEQ ID NO: 122095 - DNA, 30 bp, Artificial Sequence
  Synthetic oligonucleotide
cgaaaggcttggccgactgcagtgatgacg

SEQ ID NO: 122096 - DNA, 29 bp, Artificial Sequence
  Synthetic oligonucleotide
agaggggatgttaagagcaccatatgacg

SEQ ID NO: 122097 - DNA, 30 bp, Artificial Sequence
  Synthetic oligonucleotide
cccattagtgtctaaggggtcggactgacg

SEQ ID NO: 122098 - DNA, 30 bp, Artificial Sequence
  Synthetic oligonucleotide
ttgagagttagcaagggaagtgatgtgacg

SEQ ID NO: 122099 - DNA, 30 bp, Artificial Sequence
  Synthetic oligonucleotide
ggtccgggtagacataattttgctgtgacg

SEQ ID NO: 122100 - DNA, 30 bp, Artificial Sequence
  Synthetic oligonucleotide
gtaggacgaaaatatcgtaccgttttgacg

SEQ ID NO: 122101 - DNA, 30 bp, Artificial Sequence
  Synthetic oligonucleotide
tctggactagagatatgataaaggaatacg

SEQ ID NO: 122102 - DNA, 30 bp, Artificial Sequence
  Synthetic oligonucleotide
acatcgggagactttgatgcggggaatacg

SEQ ID NO: 122103 - DNA, 30 bp, Artificial Sequence
  Synthetic oligonucleotide
tcacacgactatggttcgattggtaatacg

SEQ ID NO: 122104 - DNA, 30 bp, Artificial Sequence
  Synthetic oligonucleotide
atatgcgcataacaacggagtagacatacg

SEQ ID NO: 122105 - DNA, 30 bp, Artificial Sequence
  Synthetic oligonucleotide
gggctatgtatagtgaagcgattacatacg

SEQ ID NO: 122106 - DNA, 30 bp, Artificial Sequence
  Synthetic oligonucleotide
ccgaatgtccgagagtagtacatccatacg

SEQ ID NO: 122107 - DNA, 30 bp, Artificial Sequence
  Synthetic oligonucleotide
ttgcctagctccttatagacctgagatacg

SEQ ID NO: 122108 - DNA, 30 bp, Artificial Sequence
  Synthetic oligonucleotide
ggctgactcggatagcgtcctgacgatacg

SEQ ID NO: 122109 - DNA, 30 bp, Artificial Sequence
  Synthetic oligonucleotide
acgaagcagcttgtcatgcaaatcgatacg

SEQ ID NO: 122110 - DNA, 30 bp, Artificial Sequence
  Synthetic oligonucleotide
ttgaagacaagaggggaatgaccatatacg

SEQ ID NO: 122111 - DNA, 30 bp, Artificial Sequence
  Synthetic oligonucleotide
cgtccgctctggaaaggtggcttgtatacg

SEQ ID NO: 122112 - DNA, 30 bp, Artificial Sequence
  Synthetic oligonucleotide
gcccacggaaccggatgaattccttatacg

SEQ ID NO: 122113 - DNA, 30 bp, Artificial Sequence
  Synthetic oligonucleotide
cacggggaggcgtgcgactacgcttatacg

SEQ ID NO: 122114 - DNA, 30 bp, Artificial Sequence
  Synthetic oligonucleotide
cggctgtggtgctatttagtaagttatacg

SEQ ID NO: 122115 - DNA, 30 bp, Artificial Sequence
  Synthetic oligonucleotide
ccacttgatgagagtagagtatgtcctacg

SEQ ID NO: 122116 - DNA, 30 bp, Artificial Sequence
  Synthetic oligonucleotide
atatacccccgctagtctcagcaggctacg

SEQ ID NO: 122117 - DNA, 30 bp, Artificial Sequence
  Synthetic oligonucleotide
aacgcgaaaccgtggtcctattcggctacg

SEQ ID NO: 122118 - DNA, 30 bp, Artificial Sequence
  Synthetic oligonucleotide
atcaactccaggatccagtctcgggctacg

SEQ ID NO: 122119 - DNA, 30 bp, Artificial Sequence
  Synthetic oligonucleotide
tacatgcacggattactttccactgctacg

SEQ ID NO: 122120 - DNA, 30 bp, Artificial Sequence
  Synthetic oligonucleotide
gaaaatgagatagaattcctagagtctacg

SEQ ID NO: 122121 - DNA, 30 bp, Artificial Sequence
  Synthetic oligonucleotide
tctggagcactagatgtatgtccgtctacg

SEQ ID NO: 122122 - DNA, 30 bp, Artificial Sequence
  Synthetic oligonucleotide
tctcgtttgtaatgggtggaaaaaagtacg

SEQ ID NO: 122123 - DNA, 30 bp, Artificial Sequence
  Synthetic oligonucleotide
gataggctcccaagtgcgcagaaaagtacg

SEQ ID NO: 122124 - DNA, 30 bp, Artificial Sequence
  Synthetic oligonucleotide
aagggttggaacccgatatgtaaaagtacg

SEQ ID NO: 122125 - DNA, 30 bp, Artificial Sequence
  Synthetic oligonucleotide
gcatagagaaaatcggccggacccagtacg

SEQ ID NO: 122126 - DNA, 30 bp, Artificial Sequence
  Synthetic oligonucleotide
gccatctggctagggtggcaattgagtacg

SEQ ID NO: 122127 - DNA, 30 bp, Artificial Sequence
  Synthetic oligonucleotide
atagtttcccgtagtggtagtaaacgtacg

SEQ ID NO: 122128 - DNA, 30 bp, Artificial Sequence
  Synthetic oligonucleotide
tgtggtatgtatatgataaattgccgtacg

SEQ ID NO: 122129 - DNA, 30 bp, Artificial Sequence
  Synthetic oligonucleotide
taatctcggaggttaaagtagttgcgtacg

SEQ ID NO: 122130 - DNA, 30 bp, Artificial Sequence
  Synthetic oligonucleotide
acaaatcttccccccgacgggcagggtacg

SEQ ID NO: 122131 - DNA, 30 bp, Artificial Sequence
  Synthetic oligonucleotide
agatatatgataatggcagctccatgtacg

SEQ ID NO: 122132 - DNA, 30 bp, Artificial Sequence
  Synthetic oligonucleotide
agtgggttttaaggtgtcaacacctgtacg

SEQ ID NO: 122133 - DNA, 30 bp, Artificial Sequence
  Synthetic oligonucleotide
ttgtagattaagtcacaaagaacaattacg

SEQ ID NO: 122134 - DNA, 30 bp, Artificial Sequence
  Synthetic oligonucleotide
cacgctaccaggataaatggtgtcattacg

SEQ ID NO: 122135 - DNA, 30 bp, Artificial Sequence
  Synthetic oligonucleotide
tgggtgtataaggctcacaaattcattacg

SEQ ID NO: 122136 - DNA, 30 bp, Artificial Sequence
  Synthetic oligonucleotide
ggaatctgaccaacgatcaactagattacg

SEQ ID NO: 122137 - DNA, 30 bp, Artificial Sequence
  Synthetic oligonucleotide
aaggattactatcgtgaggcttatattacg

SEQ ID NO: 122138 - DNA, 30 bp, Artificial Sequence
  Synthetic oligonucleotide
gaaacacaggttgtataacttcgtattacg

SEQ ID NO: 122139 - DNA, 30 bp, Artificial Sequence
  Synthetic oligonucleotide
ataaagcgtcagaacaatccaaagcttacg

SEQ ID NO: 122140 - DNA, 30 bp, Artificial Sequence
  Synthetic oligonucleotide
caccagtagaggacgccaggtaggcttacg

SEQ ID NO: 122141 - DNA, 30 bp, Artificial Sequence
  Synthetic oligonucleotide
tagcgaaccatcgtccccaaggatcttacg

SEQ ID NO: 122142 - DNA, 30 bp, Artificial Sequence
  Synthetic oligonucleotide
cgtacgatccatcaacgaatacctcttacg

SEQ ID NO: 122143 - DNA, 30 bp, Artificial Sequence
  Synthetic oligonucleotide
tactaaacacaacgatctataggagttacg

SEQ ID NO: 122144 - DNA, 30 bp, Artificial Sequence
  Synthetic oligonucleotide
ggtgggggtaccccagtcataggctttacg

SEQ ID NO: 122145 - DNA, 30 bp, Artificial Sequence
  Synthetic oligonucleotide
gcgtagctaggttccagccaggccaaaccg

SEQ ID NO: 122146 - DNA, 30 bp, Artificial Sequence
  Synthetic oligonucleotide
cactggttaacaaggggcgcttagaaaccg

SEQ ID NO: 122147 - DNA, 30 bp, Artificial Sequence
  Synthetic oligonucleotide
ggacgttgctgataggacggtgcgaaaccg

SEQ ID NO: 122148 - DNA, 30 bp, Artificial Sequence
  Synthetic oligonucleotide
atcaagcggctcggaggcatgggacaaccg

SEQ ID NO: 122149 - DNA, 30 bp, Artificial Sequence
  Synthetic oligonucleotide
tggcgagtgtgttataatggagtacaaccg

SEQ ID NO: 122150 - DNA, 30 bp, Artificial Sequence
  Synthetic oligonucleotide
gaggcagactatgacgggtacgaccaaccg

SEQ ID NO: 122151 - DNA, 30 bp, Artificial Sequence
  Synthetic oligonucleotide
gtatctaatctgctaaggctacgccaaccg

SEQ ID NO: 122152 - DNA, 31 bp, Artificial Sequence
  Synthetic oligonucleotide
gtcctgagatttctatgggaggggccaaccg

SEQ ID NO: 122153 - DNA, 30 bp, Artificial Sequence
  Synthetic oligonucleotide
taacgatctgattgttagtccgagcaaccg

SEQ ID NO: 122154 - DNA, 30 bp, Artificial Sequence
  Synthetic oligonucleotide
ttgcgggggacaaccttggactgtcaaccg

SEQ ID NO: 122155 - DNA, 30 bp, Artificial Sequence
  Synthetic oligonucleotide
tgtgttatatccgattacacaacagaaccg

SEQ ID NO: 122156 - DNA, 30 bp, Artificial Sequence
  Synthetic oligonucleotide
tatgggattatagacaggcctagcgaaccg

SEQ ID NO: 122157 - DNA, 30 bp, Artificial Sequence
  Synthetic oligonucleotide
gctggacccactatggaccggtgcgaaccg

SEQ ID NO: 122158 - DNA, 30 bp, Artificial Sequence
  Synthetic oligonucleotide
agatcagaactcaccgtgcagagggaaccg

SEQ ID NO: 122159 - DNA, 30 bp, Artificial Sequence
  Synthetic oligonucleotide
ccctggacaaaagatggtccgtcgtaaccg

SEQ ID NO: 122160 - DNA, 30 bp, Artificial Sequence
  Synthetic oligonucleotide
ttaagctgctatatagcgaagaaaacaccg

SEQ ID NO: 122161 - DNA, 30 bp, Artificial Sequence
  Synthetic oligonucleotide
aggtacgcgtattgagatccaaccacaccg

SEQ ID NO: 122162 - DNA, 30 bp, Artificial Sequence
  Synthetic oligonucleotide
cagcgtacactcccaagtcccggcacaccg

SEQ ID NO: 122163 - DNA, 30 bp, Artificial Sequence
  Synthetic oligonucleotide
taggctgggggtgtttgtttcttcacaccg

SEQ ID NO: 122164 - DNA, 30 bp, Artificial Sequence
  Synthetic oligonucleotide
agaatctcgccaagagatatccatacaccg

SEQ ID NO: 122165 - DNA, 30 bp, Artificial Sequence
  Synthetic oligonucleotide
aagactcggcattagctgtaccgcccaccg

SEQ ID NO: 122166 - DNA, 30 bp, Artificial Sequence
  Synthetic oligonucleotide
gtattctaagtgcaccagcattcgccaccg

SEQ ID NO: 122167 - DNA, 30 bp, Artificial Sequence
  Synthetic oligonucleotide
aacttcccgatcaaggacccgatggcaccg

SEQ ID NO: 122168 - DNA, 30 bp, Artificial Sequence
  Synthetic oligonucleotide
cgatcgtattatccggatcatacatcaccg

SEQ ID NO: 122169 - DNA, 30 bp, Artificial Sequence
  Synthetic oligonucleotide
tagtgcagggctgatctggctacatcaccg

SEQ ID NO: 122170 - DNA, 30 bp, Artificial Sequence
  Synthetic oligonucleotide
taaacgaagcaaatggtagcgaaaagaccg

SEQ ID NO: 122171 - DNA, 30 bp, Artificial Sequence
  Synthetic oligonucleotide
ccaacggggctgtctcgacggatcagaccg

SEQ ID NO: 122172 - DNA, 30 bp, Artificial Sequence
  Synthetic oligonucleotide
agcgttccacaccctcgcgctatcagaccg

SEQ ID NO: 122173 - DNA, 30 bp, Artificial Sequence
  Synthetic oligonucleotide
cgctctttgtagagaatgactcagagaccg

SEQ ID NO: 122174 - DNA, 30 bp, Artificial Sequence
  Synthetic oligonucleotide
taggttatattatgccagtcgactagaccg

SEQ ID NO: 122175 - DNA, 30 bp, Artificial Sequence
  Synthetic oligonucleotide
actcgtccgggggtctactggcttagaccg

SEQ ID NO: 122176 - DNA, 30 bp, Artificial Sequence
  Synthetic oligonucleotide
atgtgatacgcggaggcgcgggcaggaccg

SEQ ID NO: 122177 - DNA, 30 bp, Artificial Sequence
  Synthetic oligonucleotide
cggttggtgtcaattatcccatgaggaccg

SEQ ID NO: 122178 - DNA, 30 bp, Artificial Sequence
  Synthetic oligonucleotide
gccaaacattccgtacggaaattaggaccg

SEQ ID NO: 122179 - DNA, 30 bp, Artificial Sequence
  Synthetic oligonucleotide
taatttgagcgggggccacccgtcggaccg

SEQ ID NO: 122180 - DNA, 30 bp, Artificial Sequence
  Synthetic oligonucleotide
catacacacgatcataatagggatggaccg

SEQ ID NO: 122181 - DNA, 30 bp, Artificial Sequence
  Synthetic oligonucleotide
ggggttgcaggagttgcaagccttggaccg

SEQ ID NO: 122182 - DNA, 30 bp, Artificial Sequence
  Synthetic oligonucleotide
gtcaccaccgcaaagaaatcaaaaataccg

SEQ ID NO: 122183 - DNA, 30 bp, Artificial Sequence
  Synthetic oligonucleotide
agtcgaaaacagagaactcccccaataccg

SEQ ID NO: 122184 - DNA, 30 bp, Artificial Sequence
  Synthetic oligonucleotide
cgtgtaagtggatcgcgagcagctataccg

SEQ ID NO: 122185 - DNA, 30 bp, Artificial Sequence
  Synthetic oligonucleotide
gtgctagctcgaaccactaagggtataccg

SEQ ID NO: 122186 - DNA, 30 bp, Artificial Sequence
  Synthetic oligonucleotide
gtccttaagctccgggcggacaacctaccg

SEQ ID NO: 122187 - DNA, 30 bp, Artificial Sequence
  Synthetic oligonucleotide
acaaaattcgttgcagaaagcaagctaccg

SEQ ID NO: 122188 - DNA, 30 bp, Artificial Sequence
  Synthetic oligonucleotide
aaattgcgtcaggcaacgtgcaatctaccg

SEQ ID NO: 122189 - DNA, 30 bp, Artificial Sequence
  Synthetic oligonucleotide
ctatgggtcggactgactaatgttctaccg

SEQ ID NO: 122190 - DNA, 30 bp, Artificial Sequence
  Synthetic oligonucleotide
ggcgccagaggcagtgggcgtcgcgtaccg

SEQ ID NO: 122191 - DNA, 30 bp, Artificial Sequence
  Synthetic oligonucleotide
gcgcagacagggaaaagatgtgtgaacccg

SEQ ID NO: 122192 - DNA, 30 bp, Artificial Sequence
  Synthetic oligonucleotide
agtcccttacaagtactcaaatataacccg

SEQ ID NO: 122193 - DNA, 30 bp, Artificial Sequence
  Synthetic oligonucleotide
actaatccgtcgccaaggctacaacacccg

SEQ ID NO: 122194 - DNA, 30 bp, Artificial Sequence
  Synthetic oligonucleotide
aagggttgcagcctttaggacaaccacccg

SEQ ID NO: 122195 - DNA, 30 bp, Artificial Sequence
  Synthetic oligonucleotide
tcaatccttgagatcgaatcaaggcacccg

SEQ ID NO: 122196 - DNA, 30 bp, Artificial Sequence
  Synthetic oligonucleotide
gataaacgtgcataagtgttgctgcacccg

SEQ ID NO: 122197 - DNA, 30 bp, Artificial Sequence
  Synthetic oligonucleotide
tacgagccaacagtatggaaataagacccg

SEQ ID NO: 122198 - DNA, 30 bp, Artificial Sequence
  Synthetic oligonucleotide
aatacagcggactggtaaaagaaggacccg

SEQ ID NO: 122199 - DNA, 30 bp, Artificial Sequence
  Synthetic oligonucleotide
cactaaaacaatggacttaacgtggacccg

SEQ ID NO: 122200 - DNA, 30 bp, Artificial Sequence
  Synthetic oligonucleotide
gttggttagatttgtagaccgggtgacccg

SEQ ID NO: 122201 - DNA, 30 bp, Artificial Sequence
  Synthetic oligonucleotide
gtcacgagacaaggtccctttgcttacccg

SEQ ID NO: 122202 - DNA, 30 bp, Artificial Sequence
  Synthetic oligonucleotide
agggtcagtgccaaccaagggttaaccccg

SEQ ID NO: 122203 - DNA, 30 bp, Artificial Sequence
  Synthetic oligonucleotide
acgtgcgctacgcgagaactagtcaccccg

SEQ ID NO: 122204 - DNA, 30 bp, Artificial Sequence
  Synthetic oligonucleotide
gcttctctctaagagagcaccgaagccccg

SEQ ID NO: 122205 - DNA, 30 bp, Artificial Sequence
  Synthetic oligonucleotide
agattctccaagcgccagcgcccggccccg

SEQ ID NO: 122206 - DNA, 30 bp, Artificial Sequence
  Synthetic oligonucleotide
gtaatggggagtcgagtaacatggagcccg

SEQ ID NO: 122207 - DNA, 30 bp, Artificial Sequence
  Synthetic oligonucleotide
gttaattagctcttgaccgaaatgagcccg

SEQ ID NO: 122208 - DNA, 30 bp, Artificial Sequence
  Synthetic oligonucleotide
catctacgagacgactcccgcttgagcccg

SEQ ID NO: 122209 - DNA, 30 bp, Artificial Sequence
  Synthetic oligonucleotide
atcagtgggcaatagactcgtcgtcgcccg

SEQ ID NO: 122210 - DNA, 30 bp, Artificial Sequence
  Synthetic oligonucleotide
agttaagtgatatgctggctcgatggcccg

SEQ ID NO: 122211 - DNA, 30 bp, Artificial Sequence
  Synthetic oligonucleotide
gtctgggtgcacgtgtaacaatggtgcccg

SEQ ID NO: 122212 - DNA, 30 bp, Artificial Sequence
  Synthetic oligonucleotide
cgccgattcgtgaagcgcataaacatcccg

SEQ ID NO: 122213 - DNA, 30 bp, Artificial Sequence
  Synthetic oligonucleotide
tggcatacacgtaaatcccagagcatcccg

SEQ ID NO: 122214 - DNA, 30 bp, Artificial Sequence
  Synthetic oligonucleotide
cattcatgcctcaaggctaagctcatcccg

SEQ ID NO: 122215 - DNA, 30 bp, Artificial Sequence
  Synthetic oligonucleotide
aatgtgccaacacacatgtggtcgatcccg

SEQ ID NO: 122216 - DNA, 30 bp, Artificial Sequence
  Synthetic oligonucleotide
ccattgaatggttcgatatctcatatcccg

SEQ ID NO: 122217 - DNA, 30 bp, Artificial Sequence
  Synthetic oligonucleotide
acccaagtgaagtcatgctcgggagtcccg

SEQ ID NO: 122218 - DNA, 30 bp, Artificial Sequence
  Synthetic oligonucleotide
gggaatcgtgcaacggcagggtgcgtcccg

SEQ ID NO: 122219 - DNA, 30 bp, Artificial Sequence
  Synthetic oligonucleotide
caggacaagcccagggatatattcgtcccg

SEQ ID NO: 122220 - DNA, 30 bp, Artificial Sequence
  Synthetic oligonucleotide
atacggaagaaatacttggcgagtttcccg

SEQ ID NO: 122221 - DNA, 30 bp, Artificial Sequence
  Synthetic oligonucleotide
tagatctcgtgaagttggtttggtttcccg

SEQ ID NO: 122222 - DNA, 30 bp, Artificial Sequence
  Synthetic oligonucleotide
ggtctacgagagtatagagtggtacagccg

SEQ ID NO: 122223 - DNA, 30 bp, Artificial Sequence
  Synthetic oligonucleotide
caaataaacccttaagcggacagccagccg

SEQ ID NO: 122224 - DNA, 30 bp, Artificial Sequence
  Synthetic oligonucleotide
gacaactccccaggacagcgaaagcagccg

SEQ ID NO: 122225 - DNA, 30 bp, Artificial Sequence
  Synthetic oligonucleotide
ggagaatattacaattcagccctcgagccg

SEQ ID NO: 122226 - DNA, 30 bp, Artificial Sequence
  Synthetic oligonucleotide
ctgctttggacgacatggataaatgagccg

SEQ ID NO: 122227 - DNA, 30 bp, Artificial Sequence
  Synthetic oligonucleotide
tcgcaataaggaatattaagcaaatagccg

SEQ ID NO: 122228 - DNA, 30 bp, Artificial Sequence
  Synthetic oligonucleotide
gaaagagaaagcgttagctcacgatagccg

SEQ ID NO: 122229 - DNA, 30 bp, Artificial Sequence
  Synthetic oligonucleotide
aatggtccctaactgtgataacactagccg

SEQ ID NO: 122230 - DNA, 29 bp, Artificial Sequence
  Synthetic oligonucleotide
tcgagctacttgaatcggttcactagccg

SEQ ID NO: 122231 - DNA, 30 bp, Artificial Sequence
  Synthetic oligonucleotide
tatcgtaggtactcgaattaacggtagccg

SEQ ID NO: 122232 - DNA, 30 bp, Artificial Sequence
  Synthetic oligonucleotide
gcctaaatataagtctgaacaacttagccg

SEQ ID NO: 122233 - DNA, 30 bp, Artificial Sequence
  Synthetic oligonucleotide
cgaagtggctgacgcggatacttaacgccg

SEQ ID NO: 122234 - DNA, 30 bp, Artificial Sequence
  Synthetic oligonucleotide
tacgtaggtctgggtctcggagacacgccg

SEQ ID NO: 122235 - DNA, 30 bp, Artificial Sequence
  Synthetic oligonucleotide
gtgtcatgcgagccggatggcgcgacgccg

SEQ ID NO: 122236 - DNA, 30 bp, Artificial Sequence
  Synthetic oligonucleotide
ggtgtaggtctgtcgaggcctgttacgccg

SEQ ID NO: 122237 - DNA, 30 bp, Artificial Sequence
  Synthetic oligonucleotide
acgaggcccacggggacaagatttccgccg

SEQ ID NO: 122238 - DNA, 30 bp, Artificial Sequence
  Synthetic oligonucleotide
gggaaccgaaagggaatttcctaagcgccg

SEQ ID NO: 122239 - DNA, 30 bp, Artificial Sequence
  Synthetic oligonucleotide
ggttacgaggccaaggtgtaagtagcgccg

SEQ ID NO: 122240 - DNA, 30 bp, Artificial Sequence
  Synthetic oligonucleotide
caaattgcctaggatcacgttgtcgcgccg

SEQ ID NO: 122241 - DNA, 30 bp, Artificial Sequence
  Synthetic oligonucleotide
accgaggtggggtctgagagccttgcgccg

SEQ ID NO: 122242 - DNA, 30 bp, Artificial Sequence
  Synthetic oligonucleotide
cctgccgagtcccaccgcgcacaaaggccg

SEQ ID NO: 122243 - DNA, 30 bp, Artificial Sequence
  Synthetic oligonucleotide
cacttttggcgactttatgcaatcaggccg

SEQ ID NO: 122244 - DNA, 30 bp, Artificial Sequence
  Synthetic oligonucleotide
acggcagatgatatttactgagttcggccg

SEQ ID NO: 122245 - DNA, 30 bp, Artificial Sequence
  Synthetic oligonucleotide
ggcgtctaaggtgaagtatagcgagggccg

SEQ ID NO: 122246 - DNA, 30 bp, Artificial Sequence
  Synthetic oligonucleotide
agcggttgatcctacgaattgtggtggccg

SEQ ID NO: 122247 - DNA, 30 bp, Artificial Sequence
  Synthetic oligonucleotide
acgacttgagtcggcaagttttcttggccg

SEQ ID NO: 122248 - DNA, 30 bp, Artificial Sequence
  Synthetic oligonucleotide
agcataattcgcggtataggactactgccg

SEQ ID NO: 122249 - DNA, 30 bp, Artificial Sequence
  Synthetic oligonucleotide
attgcacgagggggaaaacgggctctgccg

SEQ ID NO: 122250 - DNA, 30 bp, Artificial Sequence
  Synthetic oligonucleotide
ctgagaccgagtaccgtattcggtctgccg

SEQ ID NO: 122251 - DNA, 30 bp, Artificial Sequence
  Synthetic oligonucleotide
gaacgcgcataaatagtctctatagtgccg

SEQ ID NO: 122252 - DNA, 30 bp, Artificial Sequence
  Synthetic oligonucleotide
gcgaactgaacatgtgtgcaacaggtgccg

SEQ ID NO: 122253 - DNA, 30 bp, Artificial Sequence
  Synthetic oligonucleotide
attacatgctgcaaacaagtgaaccatccg

SEQ ID NO: 122254 - DNA, 30 bp, Artificial Sequence
  Synthetic oligonucleotide
gagcctgaaatgtaatgaaccaggcatccg

SEQ ID NO: 122255 - DNA, 30 bp, Artificial Sequence
  Synthetic oligonucleotide
aatttcacagatcgtatcgggggatatccg

SEQ ID NO: 122256 - DNA, 30 bp, Artificial Sequence
  Synthetic oligonucleotide
aaggtcactacgtgattcgggcaacctccg

SEQ ID NO: 122257 - DNA, 30 bp, Artificial Sequence
  Synthetic oligonucleotide
gggtacggagaagctcacttatcacctccg

SEQ ID NO: 122258 - DNA, 30 bp, Artificial Sequence
  Synthetic oligonucleotide
gcggtttagaaggtgactttgcgagctccg

SEQ ID NO: 122259 - DNA, 30 bp, Artificial Sequence
  Synthetic oligonucleotide
gaccactatcgatacgttctacctgctccg

SEQ ID NO: 122260 - DNA, 30 bp, Artificial Sequence
  Synthetic oligonucleotide
ccttccagctaaacggataacggaagtccg

SEQ ID NO: 122261 - DNA, 30 bp, Artificial Sequence
  Synthetic oligonucleotide
cgtatatctttagtagcatatgagagtccg

SEQ ID NO: 122262 - DNA, 30 bp, Artificial Sequence
  Synthetic oligonucleotide
atcctcaagccttgtcgggaccggagtccg

SEQ ID NO: 122263 - DNA, 30 bp, Artificial Sequence
  Synthetic oligonucleotide
agctaagataagaccgatgaagtgagtccg

SEQ ID NO: 122264 - DNA, 30 bp, Artificial Sequence
  Synthetic oligonucleotide
gtccaaggagcgcggatgcacaatagtccg

SEQ ID NO: 122265 - DNA, 30 bp, Artificial Sequence
  Synthetic oligonucleotide
tagaattactgacttgggctagagcgtccg

SEQ ID NO: 122266 - DNA, 30 bp, Artificial Sequence
  Synthetic oligonucleotide
gtgttctgctaatgtgacaatggaggtccg

SEQ ID NO: 122267 - DNA, 30 bp, Artificial Sequence
  Synthetic oligonucleotide
ataacaatagcaagccagaacacgggtccg

SEQ ID NO: 122268 - DNA, 30 bp, Artificial Sequence
  Synthetic oligonucleotide
cacacgtgacctagacggggggtgggtccg

SEQ ID NO: 122269 - DNA, 30 bp, Artificial Sequence
  Synthetic oligonucleotide
tccgtagacagatggtacggcattggtccg

SEQ ID NO: 122270 - DNA, 30 bp, Artificial Sequence
  Synthetic oligonucleotide
gaccaaggggggcgaggcagtcttggtccg

SEQ ID NO: 122271 - DNA, 30 bp, Artificial Sequence
  Synthetic oligonucleotide
atagtgattaagccaattggcgaaattccg

SEQ ID NO: 122272 - DNA, 30 bp, Artificial Sequence
  Synthetic oligonucleotide
gaaaccactctatcggtaaagtaaattccg

SEQ ID NO: 122273 - DNA, 30 bp, Artificial Sequence
  Synthetic oligonucleotide
tcactcgcacgacaggttcccgggattccg

SEQ ID NO: 122274 - DNA, 30 bp, Artificial Sequence
  Synthetic oligonucleotide
taagcaagcggtactgatctacctattccg

SEQ ID NO: 122275 - DNA, 30 bp, Artificial Sequence
  Synthetic oligonucleotide
gtcttctagcaccctacaacatctattccg

SEQ ID NO: 122276 - DNA, 30 bp, Artificial Sequence
  Synthetic oligonucleotide
gatagacgtgtagatagcagaagtattccg

SEQ ID NO: 122277 - DNA, 30 bp, Artificial Sequence
  Synthetic oligonucleotide
ctgcgaggaacgttctcttaatatcttccg

SEQ ID NO: 122278 - DNA, 30 bp, Artificial Sequence
  Synthetic oligonucleotide
ctttccgagctcgccataaatttagttccg

SEQ ID NO: 122279 - DNA, 30 bp, Artificial Sequence
  Synthetic oligonucleotide
ccttagcctcagggattggcagtatttccg

SEQ ID NO: 122280 - DNA, 30 bp, Artificial Sequence
  Synthetic oligonucleotide
aatgcaactactgtcctgatcctttttccg

SEQ ID NO: 122281 - DNA, 30 bp, Artificial Sequence
  Synthetic oligonucleotide
gcaccatctgaccggactaaacaaaaagcg

SEQ ID NO: 122282 - DNA, 30 bp, Artificial Sequence
  Synthetic oligonucleotide
agggtcaagtgggcgttctttaacaaagcg

SEQ ID NO: 122283 - DNA, 30 bp, Artificial Sequence
  Synthetic oligonucleotide
gtcgagtgtttcatgagcactgtacaagcg

SEQ ID NO: 122284 - DNA, 30 bp, Artificial Sequence
  Synthetic oligonucleotide
caatgatctacaggtctttgtgtacaagcg

SEQ ID NO: 122285 - DNA, 30 bp, Artificial Sequence
  Synthetic oligonucleotide
tcacgccgccacagggcggtttgccaagcg

SEQ ID NO: 122286 - DNA, 30 bp, Artificial Sequence
  Synthetic oligonucleotide
tgcgggatgagttgatagtaaatgcaagcg

SEQ ID NO: 122287 - DNA, 30 bp, Artificial Sequence
  Synthetic oligonucleotide
ttagagaatttggcgtatcctcaagaagcg

SEQ ID NO: 122288 - DNA, 30 bp, Artificial Sequence
  Synthetic oligonucleotide
cgaaaagcgccgatgcgaagtgcagaagcg

SEQ ID NO: 122289 - DNA, 30 bp, Artificial Sequence
  Synthetic oligonucleotide
acgaccttaggccacctggagtcagaagcg

SEQ ID NO: 122290 - DNA, 30 bp, Artificial Sequence
  Synthetic oligonucleotide
gtgcagctccaggaaagtggttcagaagcg

SEQ ID NO: 122291 - DNA, 30 bp, Artificial Sequence
  Synthetic oligonucleotide
tcaagatatgtcgatccaagcagagaagcg

SEQ ID NO: 122292 - DNA, 30 bp, Artificial Sequence
  Synthetic oligonucleotide
aacgacgcgccataaatagagtgtgaagcg

SEQ ID NO: 122293 - DNA, 30 bp, Artificial Sequence
  Synthetic oligonucleotide
agacccggaagtagagtaaaaattgaagcg

SEQ ID NO: 122294 - DNA, 30 bp, Artificial Sequence
  Synthetic oligonucleotide
cgtggtgctcagacccactcataataagcg

SEQ ID NO: 122295 - DNA, 30 bp, Artificial Sequence
  Synthetic oligonucleotide
tcgggaatctatccggacgaacgctaagcg

SEQ ID NO: 122296 - DNA, 30 bp, Artificial Sequence
  Synthetic oligonucleotide
ttagtgaatgtgaagtattgtatgtaagcg

SEQ ID NO: 122297 - DNA, 30 bp, Artificial Sequence
  Synthetic oligonucleotide
caaactctacgtcaaaatgaggattaagcg

SEQ ID NO: 122298 - DNA, 30 bp, Artificial Sequence
  Synthetic oligonucleotide
cgttgtatatacccacatgcttaaacagcg

SEQ ID NO: 122299 - DNA, 30 bp, Artificial Sequence
  Synthetic oligonucleotide
tgccttgagagggtggcggtctaaccagcg

SEQ ID NO: 122300 - DNA, 30 bp, Artificial Sequence
  Synthetic oligonucleotide
taacaccctagcaggtctctagcaccagcg

SEQ ID NO: 122301 - DNA, 30 bp, Artificial Sequence
  Synthetic oligonucleotide
aaccttcgttaacagtggtttcgaccagcg

SEQ ID NO: 122302 - DNA, 30 bp, Artificial Sequence
  Synthetic oligonucleotide
agagcgtaggtgatacgatggggaccagcg

SEQ ID NO: 122303 - DNA, 30 bp, Artificial Sequence
  Synthetic oligonucleotide
tgcagaatggttgggcggtcgctaccagcg

SEQ ID NO: 122304 - DNA, 30 bp, Artificial Sequence
  Synthetic oligonucleotide
ctaatacgggcatgagcatcttggccagcg

SEQ ID NO: 122305 - DNA, 30 bp, Artificial Sequence
  Synthetic oligonucleotide
aactacagaaagcctgttgcagctccagcg

SEQ ID NO: 122306 - DNA, 30 bp, Artificial Sequence
  Synthetic oligonucleotide
aaaaccaaacggggtatgttaagggcagcg

SEQ ID NO: 122307 - DNA, 30 bp, Artificial Sequence
  Synthetic oligonucleotide
ccaatgagtcgtggtaaaaactgatcagcg

SEQ ID NO: 122308 - DNA, 30 bp, Artificial Sequence
  Synthetic oligonucleotide
gtggaggttgaacacaatctacgctcagcg

SEQ ID NO: 122309 - DNA, 30 bp, Artificial Sequence
  Synthetic oligonucleotide
ttcagctccatagccgacactctcagagcg

SEQ ID NO: 122310 - DNA, 30 bp, Artificial Sequence
  Synthetic oligonucleotide
taatatggattggttggcaccatgagagcg

SEQ ID NO: 122311 - DNA, 30 bp, Artificial Sequence
  Synthetic oligonucleotide
agctaagtttgcgtaagttacaaccgagcg

SEQ ID NO: 122312 - DNA, 30 bp, Artificial Sequence
  Synthetic oligonucleotide
gcagtggacgcatagtttgcatcgcgagcg

SEQ ID NO: 122313 - DNA, 30 bp, Artificial Sequence
  Synthetic oligonucleotide
ccttatctaaagggcatgtcttggcgagcg

SEQ ID NO: 122314 - DNA, 30 bp, Artificial Sequence
  Synthetic oligonucleotide
accagttgaaagatagcggtgtttcgagcg

SEQ ID NO: 122315 - DNA, 30 bp, Artificial Sequence
  Synthetic oligonucleotide
gttgatttgaacggtcaatatgcgggagcg

SEQ ID NO: 122316 - DNA, 30 bp, Artificial Sequence
  Synthetic oligonucleotide
gtggcagtatgacccagtggtgactgagcg

SEQ ID NO: 122317 - DNA, 30 bp, Artificial Sequence
  Synthetic oligonucleotide
cccggcgcggtatagaaactactgtgagcg

SEQ ID NO: 122318 - DNA, 30 bp, Artificial Sequence
  Synthetic oligonucleotide
gttacttaaaatggctcggtgtagatagcg

SEQ ID NO: 122319 - DNA, 30 bp, Artificial Sequence
  Synthetic oligonucleotide
aaagagatgatgtgatttgcgatgatagcg

SEQ ID NO: 122320 - DNA, 30 bp, Artificial Sequence
  Synthetic oligonucleotide
tcacccatccatagagcaaccggtatagcg

SEQ ID NO: 122321 - DNA, 30 bp, Artificial Sequence
  Synthetic oligonucleotide
gacgatggttccatgtgtggcattatagcg

SEQ ID NO: 122322 - DNA, 30 bp, Artificial Sequence
  Synthetic oligonucleotide
ccatcattatcaggtcgaccttgactagcg

SEQ ID NO: 122323 - DNA, 30 bp, Artificial Sequence
  Synthetic oligonucleotide
gtattgactttctaggtaagcaaggtagcg

SEQ ID NO: 122324 - DNA, 30 bp, Artificial Sequence
  Synthetic oligonucleotide
tcaagtcataaggggacaagtaaggtagcg

SEQ ID NO: 122325 - DNA, 30 bp, Artificial Sequence
  Synthetic oligonucleotide
acgatggggacagtttgctggtatgtagcg

SEQ ID NO: 122326 - DNA, 30 bp, Artificial Sequence
  Synthetic oligonucleotide
ggacgaacgcactgcccagaaattgtagcg

SEQ ID NO: 122327 - DNA, 30 bp, Artificial Sequence
  Synthetic oligonucleotide
cgggggatactaggagcgaaaggattagcg

SEQ ID NO: 122328 - DNA, 30 bp, Artificial Sequence
  Synthetic oligonucleotide
gcttggagataacacgtttctaatttagcg

SEQ ID NO: 122329 - DNA, 30 bp, Artificial Sequence
  Synthetic oligonucleotide
aagcggcagcgcctaatgcaagctaacgcg

SEQ ID NO: 122330 - DNA, 30 bp, Artificial Sequence
  Synthetic oligonucleotide
aggagcgtaaggtcgggggtgtgacacgcg

SEQ ID NO: 122331 - DNA, 30 bp, Artificial Sequence
  Synthetic oligonucleotide
tggactaagtcaaccgactatacccacgcg

SEQ ID NO: 122332 - DNA, 30 bp, Artificial Sequence
  Synthetic oligonucleotide
ataggcacttagccattcggttgatacgcg

SEQ ID NO: 122333 - DNA, 30 bp, Artificial Sequence
  Synthetic oligonucleotide
cctgaggaggttgcgtgcaaatacaccgcg

SEQ ID NO: 122334 - DNA, 30 bp, Artificial Sequence
  Synthetic oligonucleotide
gctaaaggcctttgatgcggtcaacccgcg

SEQ ID NO: 122335 - DNA, 30 bp, Artificial Sequence
  Synthetic oligonucleotide
actgctacgacacgtatccgcaacgccgcg

SEQ ID NO: 122336 - DNA, 30 bp, Artificial Sequence
  Synthetic oligonucleotide
gttagaggctgatgtcgtgctgaggccgcg

SEQ ID NO: 122337 - DNA, 30 bp, Artificial Sequence
  Synthetic oligonucleotide
taggctggctaatctaccgggtgatccgcg

SEQ ID NO: 122338 - DNA, 30 bp, Artificial Sequence
  Synthetic oligonucleotide
gtggcatggacgaacttaggagtatccgcg

SEQ ID NO: 122339 - DNA, 30 bp, Artificial Sequence
  Synthetic oligonucleotide
caactgtagttaacaaaaattaggagcgcg

SEQ ID NO: 122340 - DNA, 30 bp, Artificial Sequence
  Synthetic oligonucleotide
gggcaagatcataactatcacgtgagcgcg

SEQ ID NO: 122341 - DNA, 30 bp, Artificial Sequence
  Synthetic oligonucleotide
atactagtggtaagaaaagggtcgcgcgcg

SEQ ID NO: 122342 - DNA, 30 bp, Artificial Sequence
  Synthetic oligonucleotide
ttggtccggagggatatccacatgggcgcg

SEQ ID NO: 122343 - DNA, 30 bp, Artificial Sequence
  Synthetic oligonucleotide
cgcccttgtctgaccgtatataagtgcgcg

SEQ ID NO: 122344 - DNA, 30 bp, Artificial Sequence
  Synthetic oligonucleotide
cttcacgtaacttgcgggtagatgtgcgcg

SEQ ID NO: 122345 - DNA, 30 bp, Artificial Sequence
  Synthetic oligonucleotide
ggaagtaagatttttgtcccgccttgcgcg

SEQ ID NO: 122346 - DNA, 30 bp, Artificial Sequence
  Synthetic oligonucleotide
agaaccgatgggcgggactggtgttgcgcg

SEQ ID NO: 122347 - DNA, 30 bp, Artificial Sequence
  Synthetic oligonucleotide
gggtaaatttgtgctttggtaaccatcgcg

SEQ ID NO: 122348 - DNA, 30 bp, Artificial Sequence
  Synthetic oligonucleotide
aagacatgattcaaacctgggaccatcgcg

SEQ ID NO: 122349 - DNA, 30 bp, Artificial Sequence
  Synthetic oligonucleotide
tgagtatacccaaaggatcgagtcatcgcg

SEQ ID NO: 122350 - DNA, 30 bp, Artificial Sequence
  Synthetic oligonucleotide
caacgtatggcatacgaagaggtactcgcg

SEQ ID NO: 122351 - DNA, 30 bp, Artificial Sequence
  Synthetic oligonucleotide
cgcggttaatatagtactctagttctcgcg

SEQ ID NO: 122352 - DNA, 30 bp, Artificial Sequence
  Synthetic oligonucleotide
gaacggaggtggaaatcgcgaccagtcgcg

SEQ ID NO: 122353 - DNA, 30 bp, Artificial Sequence
  Synthetic oligonucleotide
tgctaagcaaaccgggtttaacgtgtcgcg

SEQ ID NO: 122354 - DNA, 30 bp, Artificial Sequence
  Synthetic oligonucleotide
gagcatggttactgaatggataagttcgcg

SEQ ID NO: 122355 - DNA, 30 bp, Artificial Sequence
  Synthetic oligonucleotide
agcggttatatttgggatacaaaaaaggcg

SEQ ID NO: 122356 - DNA, 30 bp, Artificial Sequence
  Synthetic oligonucleotide
agaaccgttatcgtaatggactcaaaggcg

SEQ ID NO: 122357 - DNA, 30 bp, Artificial Sequence
  Synthetic oligonucleotide
gaacaaaaaaagtcggtagcctccaaggcg

SEQ ID NO: 122358 - DNA, 30 bp, Artificial Sequence
  Synthetic oligonucleotide
cccgggttcaactgtaagcattagaaggcg

SEQ ID NO: 122359 - DNA, 31 bp, Artificial Sequence
  Synthetic oligonucleotide
cttgtgatctcggatctcagccacgaaggcg

SEQ ID NO: 122360 - DNA, 30 bp, Artificial Sequence
  Synthetic oligonucleotide
ggtatacagcttacaatactatggaaggcg

SEQ ID NO: 122361 - DNA, 30 bp, Artificial Sequence
  Synthetic oligonucleotide
atccaatcgaggcttgtctacattaaggcg

SEQ ID NO: 122362 - DNA, 30 bp, Artificial Sequence
  Synthetic oligonucleotide
tagctgataggagtgtaagactaccaggcg

SEQ ID NO: 122363 - DNA, 30 bp, Artificial Sequence
  Synthetic oligonucleotide
actcatccggcagggaccaggtaggaggcg

SEQ ID NO: 122364 - DNA, 30 bp, Artificial Sequence
  Synthetic oligonucleotide
gctccccaatgctagcccggcgcggaggcg

SEQ ID NO: 122365 - DNA, 30 bp, Artificial Sequence
  Synthetic oligonucleotide
agggctgcactggggtcgcgttgataggcg

SEQ ID NO: 122366 - DNA, 30 bp, Artificial Sequence
  Synthetic oligonucleotide
cgtcaaagttttaagtgaaacgcttaggcg

SEQ ID NO: 122367 - DNA, 30 bp, Artificial Sequence
  Synthetic oligonucleotide
atctccagagtcttctcgagtgcttaggcg

SEQ ID NO: 122368 - DNA, 30 bp, Artificial Sequence
  Synthetic oligonucleotide
cgcactcttagtacataatgcggttaggcg

SEQ ID NO: 122369 - DNA, 30 bp, Artificial Sequence
  Synthetic oligonucleotide
tagtaatcgtcggatctcactttaacggcg

SEQ ID NO: 122370 - DNA, 30 bp, Artificial Sequence
  Synthetic oligonucleotide
gcgtcttaaaacctagaggaaaatacggcg

SEQ ID NO: 122371 - DNA, 30 bp, Artificial Sequence
  Synthetic oligonucleotide
gaaagaattctgtatatgaagattacggcg

SEQ ID NO: 122372 - DNA, 30 bp, Artificial Sequence
  Synthetic oligonucleotide
acgacgcgtctgggttttaagtcgccggcg

SEQ ID NO: 122373 - DNA, 30 bp, Artificial Sequence
  Synthetic oligonucleotide
ccgacgcttggttcaaggagtattccggcg

SEQ ID NO: 122374 - DNA, 30 bp, Artificial Sequence
  Synthetic oligonucleotide
ttacattggacggcttcggatagagcggcg

SEQ ID NO: 122375 - DNA, 30 bp, Artificial Sequence
  Synthetic oligonucleotide
cgcctcactgaggaagggtagcttgcggcg

SEQ ID NO: 122376 - DNA, 30 bp, Artificial Sequence
  Synthetic oligonucleotide
gggttcgcaggaggtcagagggttgcggcg

SEQ ID NO: 122377 - DNA, 30 bp, Artificial Sequence
  Synthetic oligonucleotide
acggccatatagttaagtgagacatcggcg

SEQ ID NO: 122378 - DNA, 30 bp, Artificial Sequence
  Synthetic oligonucleotide
gtgaacaaaaagtgacataagcactcggcg

SEQ ID NO: 122379 - DNA, 30 bp, Artificial Sequence
  Synthetic oligonucleotide
aatgaggcctacatatgaaatttctcggcg

SEQ ID NO: 122380 - DNA, 30 bp, Artificial Sequence
  Synthetic oligonucleotide
caaatgtgtgcgcttgtactcacgagggcg

SEQ ID NO: 122381 - DNA, 30 bp, Artificial Sequence
  Synthetic oligonucleotide
tcacaagatgacaccatgccgcggagggcg

SEQ ID NO: 122382 - DNA, 30 bp, Artificial Sequence
  Synthetic oligonucleotide
aaaaatgagaaccaacgatcgctgagggcg

SEQ ID NO: 122383 - DNA, 31 bp, Artificial Sequence
  Synthetic oligonucleotide
actggagacgataattgcgatctgtagggcg

SEQ ID NO: 122384 - DNA, 30 bp, Artificial Sequence
  Synthetic oligonucleotide
agcgtaatcgctaaacttcagaagcgggcg

SEQ ID NO: 122385 - DNA, 30 bp, Artificial Sequence
  Synthetic oligonucleotide
atggtgctaaaaactatgacaagcggggcg

SEQ ID NO: 122386 - DNA, 30 bp, Artificial Sequence
  Synthetic oligonucleotide
gggtaaacgtgtttaggccccgtttgggcg

SEQ ID NO: 122387 - DNA, 30 bp, Artificial Sequence
  Synthetic oligonucleotide
acgttaaaacgtgaatgctgcttttgggcg

SEQ ID NO: 122388 - DNA, 30 bp, Artificial Sequence
  Synthetic oligonucleotide
ctctcaagtggtacaaagcgaccaatggcg

SEQ ID NO: 122389 - DNA, 30 bp, Artificial Sequence
  Synthetic oligonucleotide
ataagggttacgtcacaaactggcatggcg

SEQ ID NO: 122390 - DNA, 30 bp, Artificial Sequence
  Synthetic oligonucleotide
tcacaacgacctacaagtgtcctcatggcg

SEQ ID NO: 122391 - DNA, 30 bp, Artificial Sequence
  Synthetic oligonucleotide
cccgggtaccaaggacccgcaaatatggcg

SEQ ID NO: 122392 - DNA, 30 bp, Artificial Sequence
  Synthetic oligonucleotide
agaattggccaactctgatatatcctggcg

SEQ ID NO: 122393 - DNA, 30 bp, Artificial Sequence
  Synthetic oligonucleotide
gagcttcaggacaagtctcgtcatctggcg

SEQ ID NO: 122394 - DNA, 30 bp, Artificial Sequence
  Synthetic oligonucleotide
atctataggtcattgcaacgatgcgtggcg

SEQ ID NO: 122395 - DNA, 30 bp, Artificial Sequence
  Synthetic oligonucleotide
ccgaaaggactctgcatgttgaaggtggcg

SEQ ID NO: 122396 - DNA, 30 bp, Artificial Sequence
  Synthetic oligonucleotide
cgggtgttgttctcatgtaacagggtggcg

SEQ ID NO: 122397 - DNA, 30 bp, Artificial Sequence
  Synthetic oligonucleotide
ataaacagcagaccacggctggatgtggcg

SEQ ID NO: 122398 - DNA, 30 bp, Artificial Sequence
  Synthetic oligonucleotide
tcgggaaaacgcgttctgcaaattgtggcg

SEQ ID NO: 122399 - DNA, 30 bp, Artificial Sequence
  Synthetic oligonucleotide
gacggtagggttcataactaccgcaatgcg

SEQ ID NO: 122400 - DNA, 30 bp, Artificial Sequence
  Synthetic oligonucleotide
atgcccacattcaatgaaaccaataatgcg

SEQ ID NO: 122401 - DNA, 30 bp, Artificial Sequence
  Synthetic oligonucleotide
cagttcggtcccaggttcccccgacatgcg

SEQ ID NO: 122402 - DNA, 30 bp, Artificial Sequence
  Synthetic oligonucleotide
actcgacattgggtctacatgaaccatgcg

SEQ ID NO: 122403 - DNA, 30 bp, Artificial Sequence
  Synthetic oligonucleotide
ctggaacaatattaccgcgccctccatgcg

SEQ ID NO: 122404 - DNA, 30 bp, Artificial Sequence
  Synthetic oligonucleotide
aacaagaagggtgcaccggttgcgcatgcg

SEQ ID NO: 122405 - DNA, 30 bp, Artificial Sequence
  Synthetic oligonucleotide
agttgagatggtgtgcctgggttgcatgcg

SEQ ID NO: 122406 - DNA, 30 bp, Artificial Sequence
  Synthetic oligonucleotide
agacgggcgggtcagtcgggagttcatgcg

SEQ ID NO: 122407 - DNA, 30 bp, Artificial Sequence
  Synthetic oligonucleotide
tctttaacactacgaatcagtggggatgcg

SEQ ID NO: 122408 - DNA, 30 bp, Artificial Sequence
  Synthetic oligonucleotide
atgactatactatcggatagggtggatgcg

SEQ ID NO: 122409 - DNA, 30 bp, Artificial Sequence
  Synthetic oligonucleotide
agtaagctcacgggcgctgatgatgatgcg

SEQ ID NO: 122410 - DNA, 30 bp, Artificial Sequence
  Synthetic oligonucleotide
taggagcctattgccaaaatccaatatgcg

SEQ ID NO: 122411 - DNA, 30 bp, Artificial Sequence
  Synthetic oligonucleotide
tctatcgagggggtccaaaatcgctatgcg

SEQ ID NO: 122412 - DNA, 31 bp, Artificial Sequence
  Synthetic oligonucleotide
gcgcgctcgagacaatattaacgaaactgcg

SEQ ID NO: 122413 - DNA, 30 bp, Artificial Sequence
  Synthetic oligonucleotide
atataggtactaacaatccgcgcaactgcg

SEQ ID NO: 122414 - DNA, 30 bp, Artificial Sequence
  Synthetic oligonucleotide
taaccatgttctgagcaaatatgccctgcg

SEQ ID NO: 122415 - DNA, 30 bp, Artificial Sequence
  Synthetic oligonucleotide
gctgagactaaaaacatactattccctgcg

SEQ ID NO: 122416 - DNA, 30 bp, Artificial Sequence
  Synthetic oligonucleotide
cgtttgctcagtctttgggctaaagctgcg

SEQ ID NO: 122417 - DNA, 30 bp, Artificial Sequence
  Synthetic oligonucleotide
atagcgcattagaagaaagacgtggctgcg

SEQ ID NO: 122418 - DNA, 30 bp, Artificial Sequence
  Synthetic oligonucleotide
atgagctagtggttcgacagaacttctgcg

SEQ ID NO: 122419 - DNA, 30 bp, Artificial Sequence
  Synthetic oligonucleotide
ggatggcaaggagcgacgagactttctgcg

SEQ ID NO: 122420 - DNA, 30 bp, Artificial Sequence
  Synthetic oligonucleotide
gttcgtaacactagatataacgacagtgcg

SEQ ID NO: 122421 - DNA, 30 bp, Artificial Sequence
  Synthetic oligonucleotide
gacagtcaattcgattgcgcattcagtgcg

SEQ ID NO: 122422 - DNA, 30 bp, Artificial Sequence
  Synthetic oligonucleotide
ctctagtgtgcatcatcaggcttgagtgcg

SEQ ID NO: 122423 - DNA, 30 bp, Artificial Sequence
  Synthetic oligonucleotide
agacaaaacagacgaggggcaacacgtgcg

SEQ ID NO: 122424 - DNA, 30 bp, Artificial Sequence
  Synthetic oligonucleotide
ctggatgataaagtataagcaaaccgtgcg

SEQ ID NO: 122425 - DNA, 30 bp, Artificial Sequence
  Synthetic oligonucleotide
tatcagggcgaaacgataaagtatcgtgcg

SEQ ID NO: 122426 - DNA, 30 bp, Artificial Sequence
  Synthetic oligonucleotide
ggcattcgaaatgtttgatatcccggtgcg

SEQ ID NO: 122427 - DNA, 35 bp, Artificial Sequence
  Synthetic oligonucleotide
gggagtcgcgggttagttgtaggtaggggggtgcg

SEQ ID NO: 122428 - DNA, 30 bp, Artificial Sequence
  Synthetic oligonucleotide
cagtggttttatgtctgtacgatatgtgcg

SEQ ID NO: 122429 - DNA, 30 bp, Artificial Sequence
  Synthetic oligonucleotide
agatgaatcaagctgaggttctcctgtgcg

SEQ ID NO: 122430 - DNA, 30 bp, Artificial Sequence
  Synthetic oligonucleotide
ggctgcgcaaaacaaggccgcccgtgtgcg

SEQ ID NO: 122431 - DNA, 30 bp, Artificial Sequence
  Synthetic oligonucleotide
tgcatagaagtgattggtatggattgtgcg

SEQ ID NO: 122432 - DNA, 30 bp, Artificial Sequence
  Synthetic oligonucleotide
gcggcgacaggtaagcagtttgattgtgcg

SEQ ID NO: 122433 - DNA, 30 bp, Artificial Sequence
  Synthetic oligonucleotide
ccgtcctaaatagtgaagaggaaaattgcg

SEQ ID NO: 122434 - DNA, 30 bp, Artificial Sequence
  Synthetic oligonucleotide
ccgggtcccccgttatgggagtgaattgcg

SEQ ID NO: 122435 - DNA, 30 bp, Artificial Sequence
  Synthetic oligonucleotide
ataaggtgtcaacctcgatatcacattgcg

SEQ ID NO: 122436 - DNA, 30 bp, Artificial Sequence
  Synthetic oligonucleotide
tctatcccaaggtgtaaggcctccattgcg

SEQ ID NO: 122437 - DNA, 30 bp, Artificial Sequence
  Synthetic oligonucleotide
acctcagcatgttcttgtaatagccttgcg

SEQ ID NO: 122438 - DNA, 30 bp, Artificial Sequence
  Synthetic oligonucleotide
ggggggctgggacgatgtcggcaatttgcg

SEQ ID NO: 122439 - DNA, 30 bp, Artificial Sequence
  Synthetic oligonucleotide
ctgcagctgcacacgtgcttgcgaaaatcg

SEQ ID NO: 122440 - DNA, 30 bp, Artificial Sequence
  Synthetic oligonucleotide
acggtcgtcctcacgcgactaataaaatcg

SEQ ID NO: 122441 - DNA, 31 bp, Artificial Sequence
  Synthetic oligonucleotide
cacagcaagtaggttggaagggcagaaatcg

SEQ ID NO: 122442 - DNA, 30 bp, Artificial Sequence
  Synthetic oligonucleotide
cagttaacggcatcaagggtagcacaatcg

SEQ ID NO: 122443 - DNA, 30 bp, Artificial Sequence
  Synthetic oligonucleotide
taactccagaacaagtcaaggtgacaatcg

SEQ ID NO: 122444 - DNA, 30 bp, Artificial Sequence
  Synthetic oligonucleotide
gagcgtgacacattatattaagcgcaatcg

SEQ ID NO: 122445 - DNA, 30 bp, Artificial Sequence
  Synthetic oligonucleotide
ctgcaaacttctggaggtactaacgaatcg

SEQ ID NO: 122446 - DNA, 31 bp, Artificial Sequence
  Synthetic oligonucleotide
gatttataaagttagaattaccgacgaatcg

SEQ ID NO: 122447 - DNA, 30 bp, Artificial Sequence
  Synthetic oligonucleotide
cgaaataaggtgcactgggacttcgaatcg

SEQ ID NO: 122448 - DNA, 30 bp, Artificial Sequence
  Synthetic oligonucleotide
gcaataagttcctccaaaccagtggaatcg

SEQ ID NO: 122449 - DNA, 30 bp, Artificial Sequence
  Synthetic oligonucleotide
ggagaggcgacatggtgatttgactaatcg

SEQ ID NO: 122450 - DNA, 30 bp, Artificial Sequence
  Synthetic oligonucleotide
gggtagcaactaaagttatacctaacatcg

SEQ ID NO: 122451 - DNA, 30 bp, Artificial Sequence
  Synthetic oligonucleotide
ctttgtgggaagataccatagtacacatcg

SEQ ID NO: 122452 - DNA, 30 bp, Artificial Sequence
  Synthetic oligonucleotide
ctgtgggtgtaaaactcgcaattcacatcg

SEQ ID NO: 122453 - DNA, 30 bp, Artificial Sequence
  Synthetic oligonucleotide
agagcagctaacctggatataggaccatcg

SEQ ID NO: 122454 - DNA, 30 bp, Artificial Sequence
  Synthetic oligonucleotide
cgaacttaccttgagaagtcgaggccatcg

SEQ ID NO: 122455 - DNA, 30 bp, Artificial Sequence
  Synthetic oligonucleotide
taacacgggcgaatggtcacacgagcatcg

SEQ ID NO: 122456 - DNA, 30 bp, Artificial Sequence
  Synthetic oligonucleotide
tcagggagtgagaaagcgtggcgcgcatcg

SEQ ID NO: 122457 - DNA, 30 bp, Artificial Sequence
  Synthetic oligonucleotide
tcgggtagtgggataggcttcggcgcatcg

SEQ ID NO: 122458 - DNA, 30 bp, Artificial Sequence
  Synthetic oligonucleotide
tgaaactccgacccctcctgtgaatcatcg

SEQ ID NO: 122459 - DNA, 30 bp, Artificial Sequence
  Synthetic oligonucleotide
acggcgtggtaccacgggactggatcatcg

SEQ ID NO: 122460 - DNA, 30 bp, Artificial Sequence
  Synthetic oligonucleotide
atcaatgtataacccgtgtaatgatcatcg

SEQ ID NO: 122461 - DNA, 30 bp, Artificial Sequence
  Synthetic oligonucleotide
tgcgggtaggaggttcgtgctgggtcatcg

SEQ ID NO: 122462 - DNA, 30 bp, Artificial Sequence
  Synthetic oligonucleotide
gcaggggggggataccaacatagaagatcg

SEQ ID NO: 122463 - DNA, 29 bp, Artificial Sequence
  Synthetic oligonucleotide
gtggggcatcatcagcaccgtggagatcg

SEQ ID NO: 122464 - DNA, 30 bp, Artificial Sequence
  Synthetic oligonucleotide
acggggtttttaccatagataagtcgatcg

SEQ ID NO: 122465 - DNA, 30 bp, Artificial Sequence
  Synthetic oligonucleotide
actacggacgatccagatttacgtcgatcg

SEQ ID NO: 122466 - DNA, 30 bp, Artificial Sequence
  Synthetic oligonucleotide
ccaatggtttgcgacatcggaagcggatcg

SEQ ID NO: 122467 - DNA, 30 bp, Artificial Sequence
  Synthetic oligonucleotide
ctactcacagcaaacataagtcagggatcg

SEQ ID NO: 122468 - DNA, 30 bp, Artificial Sequence
  Synthetic oligonucleotide
cggcatcggagctcctgccagatgggatcg

SEQ ID NO: 122469 - DNA, 30 bp, Artificial Sequence
  Synthetic oligonucleotide
atcgaaccgttcgggcatagtcggtgatcg

SEQ ID NO: 122470 - DNA, 30 bp, Artificial Sequence
  Synthetic oligonucleotide
agctccgtgttcgaaagtagccattgatcg

SEQ ID NO: 122471 - DNA, 30 bp, Artificial Sequence
  Synthetic oligonucleotide
accgatgccggtaacagctaattttgatcg

SEQ ID NO: 122472 - DNA, 30 bp, Artificial Sequence
  Synthetic oligonucleotide
gaacaggggctggacatatgggcaatatcg

SEQ ID NO: 122473 - DNA, 30 bp, Artificial Sequence
  Synthetic oligonucleotide
gggaataaccttccactcgctgtgatatcg

SEQ ID NO: 122474 - DNA, 30 bp, Artificial Sequence
  Synthetic oligonucleotide
aaatgtgcacctgcatggtccttgatatcg

SEQ ID NO: 122475 - DNA, 30 bp, Artificial Sequence
  Synthetic oligonucleotide
tcacggcatgcgaaggactgtttgatatcg

SEQ ID NO: 122476 - DNA, 30 bp, Artificial Sequence
  Synthetic oligonucleotide
agtgtagtcgtctacgcgactgcactatcg

SEQ ID NO: 122477 - DNA, 30 bp, Artificial Sequence
  Synthetic oligonucleotide
cccgaatggcatttcgaaaaattcctatcg

SEQ ID NO: 122478 - DNA, 30 bp, Artificial Sequence
  Synthetic oligonucleotide
gtaagcgggagtagtcttgcaactctatcg

SEQ ID NO: 122479 - DNA, 30 bp, Artificial Sequence
  Synthetic oligonucleotide
cccctgcgctgtacctggaagaccgtatcg

SEQ ID NO: 122480 - DNA, 30 bp, Artificial Sequence
  Synthetic oligonucleotide
ttaaggcatttagggctaaggtgattatcg

SEQ ID NO: 122481 - DNA, 30 bp, Artificial Sequence
  Synthetic oligonucleotide
gtggtctaataagattcctacatattatcg

SEQ ID NO: 122482 - DNA, 30 bp, Artificial Sequence
  Synthetic oligonucleotide
tcgacgtcgggacgccgatctttcttatcg

SEQ ID NO: 122483 - DNA, 30 bp, Artificial Sequence
  Synthetic oligonucleotide
tctgtcgaacggttatctgtgtatttatcg

SEQ ID NO: 122484 - DNA, 30 bp, Artificial Sequence
  Synthetic oligonucleotide
cgtatcctttctattaccgtgagcaactcg

SEQ ID NO: 122485 - DNA, 30 bp, Artificial Sequence
  Synthetic oligonucleotide
gtagagttaggcaaatgaaacgttcactcg

SEQ ID NO: 122486 - DNA, 30 bp, Artificial Sequence
  Synthetic oligonucleotide
cccgttagcaacggaggggtgggatactcg

SEQ ID NO: 122487 - DNA, 30 bp, Artificial Sequence
  Synthetic oligonucleotide
ccaatgtaaaacgagccagtagagtactcg

SEQ ID NO: 122488 - DNA, 30 bp, Artificial Sequence
  Synthetic oligonucleotide
gcatcaccgaacacagttgtcctttactcg

SEQ ID NO: 122489 - DNA, 30 bp, Artificial Sequence
  Synthetic oligonucleotide
ctacaagagtttaaaggtctcacaacctcg

SEQ ID NO: 122490 - DNA, 30 bp, Artificial Sequence
  Synthetic oligonucleotide
gcttaatgcgtgcgcggtggacgaacctcg

SEQ ID NO: 122491 - DNA, 30 bp, Artificial Sequence
  Synthetic oligonucleotide
ggacaataagacattttacacgccacctcg

SEQ ID NO: 122492 - DNA, 30 bp, Artificial Sequence
  Synthetic oligonucleotide
agtatacccctggagacagaatccacctcg

SEQ ID NO: 122493 - DNA, 30 bp, Artificial Sequence
  Synthetic oligonucleotide
cattcgccaaggggggcgcataaggcctcg

SEQ ID NO: 122494 - DNA, 30 bp, Artificial Sequence
  Synthetic oligonucleotide
taacaaacgtgcgaggatacctcatcctcg

SEQ ID NO: 122495 - DNA, 30 bp, Artificial Sequence
  Synthetic oligonucleotide
tgcagagtcgcgcgagacaatcactcctcg

SEQ ID NO: 122496 - DNA, 30 bp, Artificial Sequence
  Synthetic oligonucleotide
atggaacccaaagtacaccaggactcctcg

SEQ ID NO: 122497 - DNA, 30 bp, Artificial Sequence
  Synthetic oligonucleotide
ttggggactgcaagtcagatgaattcctcg

SEQ ID NO: 122498 - DNA, 30 bp, Artificial Sequence
  Synthetic oligonucleotide
tatgccaagagtagcgaatgcgaaagctcg

SEQ ID NO: 122499 - DNA, 30 bp, Artificial Sequence
  Synthetic oligonucleotide
aatacatcctggagtagtagcgagagctcg

SEQ ID NO: 122500 - DNA, 30 bp, Artificial Sequence
  Synthetic oligonucleotide
ttgaacaacccgcctcaaacttaacgctcg

SEQ ID NO: 122501 - DNA, 30 bp, Artificial Sequence
  Synthetic oligonucleotide
gttgtagagaatttttctacaatacgctcg

SEQ ID NO: 122502 - DNA, 30 bp, Artificial Sequence
  Synthetic oligonucleotide
tcacacagaagtgagctctgtatgatctcg

SEQ ID NO: 122503 - DNA, 30 bp, Artificial Sequence
  Synthetic oligonucleotide
aaggcgaataccgtcgtgaaaagactctcg

SEQ ID NO: 122504 - DNA, 30 bp, Artificial Sequence
  Synthetic oligonucleotide
tagaatgggtggtcataccacgatctctcg

SEQ ID NO: 122505 - DNA, 30 bp, Artificial Sequence
  Synthetic oligonucleotide
gagcagattgtagcggccgccaaagtctcg

SEQ ID NO: 122506 - DNA, 30 bp, Artificial Sequence
  Synthetic oligonucleotide
tagtttcgattcataaactttctggtctcg

SEQ ID NO: 122507 - DNA, 30 bp, Artificial Sequence
  Synthetic oligonucleotide
tgtcttggttcataacttgaatcattctcg

SEQ ID NO: 122508 - DNA, 30 bp, Artificial Sequence
  Synthetic oligonucleotide
cacgaagaacgtcacgggacggacttctcg

SEQ ID NO: 122509 - DNA, 30 bp, Artificial Sequence
  Synthetic oligonucleotide
tgaggtgcggtgtactaagggtctttctcg

SEQ ID NO: 122510 - DNA, 30 bp, Artificial Sequence
  Synthetic oligonucleotide
tctaagtagacggtacttcatgcaaagtcg

SEQ ID NO: 122511 - DNA, 30 bp, Artificial Sequence
  Synthetic oligonucleotide
gcccaggatatgtaggtaacggagaagtcg

SEQ ID NO: 122512 - DNA, 30 bp, Artificial Sequence
  Synthetic oligonucleotide
aggcgtagcggcgggttaaggtctaagtcg

SEQ ID NO: 122513 - DNA, 30 bp, Artificial Sequence
  Synthetic oligonucleotide
gggtaggatgattacgaattcaaccagtcg

SEQ ID NO: 122514 - DNA, 30 bp, Artificial Sequence
  Synthetic oligonucleotide
atacgatagcggagcgtgcttgatcagtcg

SEQ ID NO: 122515 - DNA, 30 bp, Artificial Sequence
  Synthetic oligonucleotide
gtaagtgtattgtcgcatattagagagtcg

SEQ ID NO: 122516 - DNA, 30 bp, Artificial Sequence
  Synthetic oligonucleotide
agcctggtcccaaacactcaaagggagtcg

SEQ ID NO: 122517 - DNA, 30 bp, Artificial Sequence
  Synthetic oligonucleotide
caggggcgatttacagtcctggatgagtcg

SEQ ID NO: 122518 - DNA, 30 bp, Artificial Sequence
  Synthetic oligonucleotide
tgaggtggtaccaacgcggaggttgagtcg

SEQ ID NO: 122519 - DNA, 30 bp, Artificial Sequence
  Synthetic oligonucleotide
ggcaaggatgatttttgatgggtgtagtcg

SEQ ID NO: 122520 - DNA, 30 bp, Artificial Sequence
  Synthetic oligonucleotide
aacgcgttagtgtataagctggggacgtcg

SEQ ID NO: 122521 - DNA, 30 bp, Artificial Sequence
  Synthetic oligonucleotide
cgtatggaggttgtgtcttgatccccgtcg

SEQ ID NO: 122522 - DNA, 30 bp, Artificial Sequence
  Synthetic oligonucleotide
tcatagcccgtatatctcaaacatccgtcg

SEQ ID NO: 122523 - DNA, 30 bp, Artificial Sequence
  Synthetic oligonucleotide
tcgccagaggacctcctaaaagcagcgtcg

SEQ ID NO: 122524 - DNA, 30 bp, Artificial Sequence
  Synthetic oligonucleotide
tgttgaaggcgcatagcgggagcagcgtcg

SEQ ID NO: 122525 - DNA, 30 bp, Artificial Sequence
  Synthetic oligonucleotide
tcccgcggtcagagcaatacattggcgtcg

SEQ ID NO: 122526 - DNA, 30 bp, Artificial Sequence
  Synthetic oligonucleotide
cttacctccaccggcctatacggtgcgtcg

SEQ ID NO: 122527 - DNA, 31 bp, Artificial Sequence
  Synthetic oligonucleotide
ctacccggtgtgtacatacgaagaatcgtcg

SEQ ID NO: 122528 - DNA, 30 bp, Artificial Sequence
  Synthetic oligonucleotide
ctgaatggagcttgccacagcccatcgtcg

SEQ ID NO: 122529 - DNA, 30 bp, Artificial Sequence
  Synthetic oligonucleotide
ccacggcctcagaacacttcaatttcgtcg

SEQ ID NO: 122530 - DNA, 31 bp, Artificial Sequence
  Synthetic oligonucleotide
ggcattagaataagacctatgggttaggtcg

SEQ ID NO: 122531 - DNA, 30 bp, Artificial Sequence
  Synthetic oligonucleotide
cgttagcggttccatcgacattaccggtcg

SEQ ID NO: 122532 - DNA, 30 bp, Artificial Sequence
  Synthetic oligonucleotide
tcggcggagaccaggtccttatagcggtcg

SEQ ID NO: 122533 - DNA, 30 bp, Artificial Sequence
  Synthetic oligonucleotide
ccgataggataaataacactagttcggtcg

SEQ ID NO: 122534 - DNA, 30 bp, Artificial Sequence
  Synthetic oligonucleotide
cagcgtccgggaaaatgggctcgggggtcg

SEQ ID NO: 122535 - DNA, 30 bp, Artificial Sequence
  Synthetic oligonucleotide
aataggtaatccaacataacgaattggtcg

SEQ ID NO: 122536 - DNA, 30 bp, Artificial Sequence
  Synthetic oligonucleotide
tagccccggcaacccagtggggccatgtcg

SEQ ID NO: 122537 - DNA, 30 bp, Artificial Sequence
  Synthetic oligonucleotide
tgggtagtactggagggagtttccatgtcg

SEQ ID NO: 122538 - DNA, 30 bp, Artificial Sequence
  Synthetic oligonucleotide
tccccaacgcggggtagtgaactcatgtcg

SEQ ID NO: 122539 - DNA, 30 bp, Artificial Sequence
  Synthetic oligonucleotide
agggctccgacggagatctgggtcatgtcg

SEQ ID NO: 122540 - DNA, 30 bp, Artificial Sequence
  Synthetic oligonucleotide
tggggaggtacgtcggacatcggactgtcg

SEQ ID NO: 122541 - DNA, 30 bp, Artificial Sequence
  Synthetic oligonucleotide
caggaagtatagacagatcatctcctgtcg

SEQ ID NO: 122542 - DNA, 30 bp, Artificial Sequence
  Synthetic oligonucleotide
aaaaaaaaaggaagactatgttagctgtcg

SEQ ID NO: 122543 - DNA, 31 bp, Artificial Sequence
  Synthetic oligonucleotide
gtaattcgaagaatattgccgagtgctgtcg

SEQ ID NO: 122544 - DNA, 30 bp, Artificial Sequence
  Synthetic oligonucleotide
ccagaggttctgactttagtaagtctgtcg

SEQ ID NO: 122545 - DNA, 30 bp, Artificial Sequence
  Synthetic oligonucleotide
gttgcaagatctgctagcagcgcagtgtcg

SEQ ID NO: 122546 - DNA, 30 bp, Artificial Sequence
  Synthetic oligonucleotide
aatgaccatgagtgttgctttcaggtgtcg

SEQ ID NO: 122547 - DNA, 30 bp, Artificial Sequence
  Synthetic oligonucleotide
gccagacctcaattatagtgtcctgtgtcg

SEQ ID NO: 122548 - DNA, 30 bp, Artificial Sequence
  Synthetic oligonucleotide
gaatagacctctttattcactcgattgtcg

SEQ ID NO: 122549 - DNA, 30 bp, Artificial Sequence
  Synthetic oligonucleotide
ctcacaactagtttaacattcgaaaattcg

SEQ ID NO: 122550 - DNA, 30 bp, Artificial Sequence
  Synthetic oligonucleotide
tcgatgagacacttgtattgcagtaattcg

SEQ ID NO: 122551 - DNA, 30 bp, Artificial Sequence
  Synthetic oligonucleotide
ctccgactccgaaggatatagaaacattcg

SEQ ID NO: 122552 - DNA, 30 bp, Artificial Sequence
  Synthetic oligonucleotide
atcaaaggcatatatattaccaggcattcg

SEQ ID NO: 122553 - DNA, 30 bp, Artificial Sequence
  Synthetic oligonucleotide
ggcgtttcataaagcctccaagttcattcg

SEQ ID NO: 122554 - DNA, 30 bp, Artificial Sequence
  Synthetic oligonucleotide
cctgagctcatgtcgacaggtcaagattcg

SEQ ID NO: 122555 - DNA, 30 bp, Artificial Sequence
  Synthetic oligonucleotide
tatgtttacatattggtatccagagattcg

SEQ ID NO: 122556 - DNA, 30 bp, Artificial Sequence
  Synthetic oligonucleotide
gttagctactggtaagcgattgttgattcg

SEQ ID NO: 122557 - DNA, 30 bp, Artificial Sequence
  Synthetic oligonucleotide
gcatctaattgaagactagtcgagtattcg

SEQ ID NO: 122558 - DNA, 30 bp, Artificial Sequence
  Synthetic oligonucleotide
gctgaaacacacagagctgcggacacttcg

SEQ ID NO: 122559 - DNA, 30 bp, Artificial Sequence
  Synthetic oligonucleotide
tcggtgggccgtcaccagcatagaccttcg

SEQ ID NO: 122560 - DNA, 30 bp, Artificial Sequence
  Synthetic oligonucleotide
gccgataccaaactgtacaatttgccttcg

SEQ ID NO: 122561 - DNA, 30 bp, Artificial Sequence
  Synthetic oligonucleotide
caccgacaatggtttagacttggatcttcg

SEQ ID NO: 122562 - DNA, 30 bp, Artificial Sequence
  Synthetic oligonucleotide
gggtgcatcatcgaatcgccttactcttcg

SEQ ID NO: 122563 - DNA, 30 bp, Artificial Sequence
  Synthetic oligonucleotide
taagataatgtcactgaaagtgattcttcg

SEQ ID NO: 122564 - DNA, 30 bp, Artificial Sequence
  Synthetic oligonucleotide
gccggggttgtataattagctgcccgttcg

SEQ ID NO: 122565 - DNA, 30 bp, Artificial Sequence
  Synthetic oligonucleotide
tcgtgtgtgtctgtatctgactcaggttcg

SEQ ID NO: 122566 - DNA, 30 bp, Artificial Sequence
  Synthetic oligonucleotide
ggtggactggatttcacacgcccaatttcg

SEQ ID NO: 122567 - DNA, 30 bp, Artificial Sequence
  Synthetic oligonucleotide
gtcggcagtaggttccgtggcgcaatttcg

SEQ ID NO: 122568 - DNA, 30 bp, Artificial Sequence
  Synthetic oligonucleotide
caccactcatgcatgggtggcatactttcg

SEQ ID NO: 122569 - DNA, 30 bp, Artificial Sequence
  Synthetic oligonucleotide
cacgggcatacgcatgggttcgccctttcg

SEQ ID NO: 122570 - DNA, 30 bp, Artificial Sequence
  Synthetic oligonucleotide
ccctatgttcaccgtcattgttatctttcg

SEQ ID NO: 122571 - DNA, 30 bp, Artificial Sequence
  Synthetic oligonucleotide
ggcagggaaaccgttgctgttttagtttcg

SEQ ID NO: 122572 - DNA, 30 bp, Artificial Sequence
  Synthetic oligonucleotide
cccgaggagttaaggaggctggacgtttcg

SEQ ID NO: 122573 - DNA, 30 bp, Artificial Sequence
  Synthetic oligonucleotide
ctcggtttaggttacatgataatggtttcg

SEQ ID NO: 122574 - DNA, 30 bp, Artificial Sequence
  Synthetic oligonucleotide
ggtatgcagtaactcgctcgccaaaaaagg

SEQ ID NO: 122575 - DNA, 30 bp, Artificial Sequence
  Synthetic oligonucleotide
tcgatccttggtgctgagaggcctaaaagg

SEQ ID NO: 122576 - DNA, 30 bp, Artificial Sequence
  Synthetic oligonucleotide
gatggtaataagagaataaacgtacaaagg

SEQ ID NO: 122577 - DNA, 31 bp, Artificial Sequence
  Synthetic oligonucleotide
tcggtcgcggcgccattctagccaccaaagg

SEQ ID NO: 122578 - DNA, 30 bp, Artificial Sequence
  Synthetic oligonucleotide
gtcacctgagacggataggggtcgcaaagg

SEQ ID NO: 122579 - DNA, 30 bp, Artificial Sequence
  Synthetic oligonucleotide
gatcgcgactcggatgccgaggggcaaagg

SEQ ID NO: 122580 - DNA, 30 bp, Artificial Sequence
  Synthetic oligonucleotide
gatgcgcagtgaattggaatctggcaaagg

SEQ ID NO: 122581 - DNA, 30 bp, Artificial Sequence
  Synthetic oligonucleotide
cgtgcccttaccattgatattatgcaaagg

SEQ ID NO: 122582 - DNA, 30 bp, Artificial Sequence
  Synthetic oligonucleotide
tagttgtcgtgtcaaggcaaagctcaaagg

SEQ ID NO: 122583 - DNA, 30 bp, Artificial Sequence
  Synthetic oligonucleotide
ctgtcgatgtagtgagtattaaaagaaagg

SEQ ID NO: 122584 - DNA, 30 bp, Artificial Sequence
  Synthetic oligonucleotide
acgggcgcattaggacgcaattaagaaagg

SEQ ID NO: 122585 - DNA, 30 bp, Artificial Sequence
  Synthetic oligonucleotide
cagggcttgcccacctcacttgcagaaagg

SEQ ID NO: 122586 - DNA, 30 bp, Artificial Sequence
  Synthetic oligonucleotide
ggtggtctttagaaggtggaaggcgaaagg

SEQ ID NO: 122587 - DNA, 30 bp, Artificial Sequence
  Synthetic oligonucleotide
tgtaactggaattgaggaagtgtggaaagg

SEQ ID NO: 122588 - DNA, 30 bp, Artificial Sequence
  Synthetic oligonucleotide
cgaactctgctgggcgacgaagctgaaagg

SEQ ID NO: 122589 - DNA, 30 bp, Artificial Sequence
  Synthetic oligonucleotide
gcttatatcgagaagtatgttggtgaaagg

SEQ ID NO: 122590 - DNA, 30 bp, Artificial Sequence
  Synthetic oligonucleotide
tcgagagagccacgggcagatacataaagg

SEQ ID NO: 122591 - DNA, 30 bp, Artificial Sequence
  Synthetic oligonucleotide
aaatcagttctaggtacggccatctaaagg

SEQ ID NO: 122592 - DNA, 30 bp, Artificial Sequence
  Synthetic oligonucleotide
agagaacccgcaacactataaacgtaaagg

SEQ ID NO: 122593 - DNA, 30 bp, Artificial Sequence
  Synthetic oligonucleotide
gtacaggatgtcgggtgaatcaggtaaagg

SEQ ID NO: 122594 - DNA, 30 bp, Artificial Sequence
  Synthetic oligonucleotide
gacttaggaggcgtctaatatcaaacaagg

SEQ ID NO: 122595 - DNA, 30 bp, Artificial Sequence
  Synthetic oligonucleotide
agaccgacgtgcatcgatttggctacaagg

SEQ ID NO: 122596 - DNA, 30 bp, Artificial Sequence
  Synthetic oligonucleotide
catggtacggccattttcgaaacaccaagg

SEQ ID NO: 122597 - DNA, 30 bp, Artificial Sequence
  Synthetic oligonucleotide
gaagcccattggcgtggtactagaccaagg

SEQ ID NO: 122598 - DNA, 30 bp, Artificial Sequence
  Synthetic oligonucleotide
tcataacatgaaatatcaagcgacccaagg

SEQ ID NO: 122599 - DNA, 30 bp, Artificial Sequence
  Synthetic oligonucleotide
tactcctcctgcatgagcctacggccaagg

SEQ ID NO: 122600 - DNA, 30 bp, Artificial Sequence
  Synthetic oligonucleotide
tacgttcaaacgtttccaagacctgcaagg

SEQ ID NO: 122601 - DNA, 30 bp, Artificial Sequence
  Synthetic oligonucleotide
tgccagcgatgtagagcagacggctcaagg

SEQ ID NO: 122602 - DNA, 30 bp, Artificial Sequence
  Synthetic oligonucleotide
acataccatagaaggaatgagtggagaagg

SEQ ID NO: 122603 - DNA, 30 bp, Artificial Sequence
  Synthetic oligonucleotide
aacctcagaagcccgaggaggcgtagaagg

SEQ ID NO: 122604 - DNA, 30 bp, Artificial Sequence
  Synthetic oligonucleotide
cagggcttaataaccagagctatacgaagg

SEQ ID NO: 122605 - DNA, 30 bp, Artificial Sequence
  Synthetic oligonucleotide
gcttattttcgatagggcggagagcgaagg

SEQ ID NO: 122606 - DNA, 30 bp, Artificial Sequence
  Synthetic oligonucleotide
gttagtattgtcaccaacttagtgcgaagg

SEQ ID NO: 122607 - DNA, 30 bp, Artificial Sequence
  Synthetic oligonucleotide
ttatctagtattggggagtggtctcgaagg

SEQ ID NO: 122608 - DNA, 30 bp, Artificial Sequence
  Synthetic oligonucleotide
tacgcacggaagtggacgtaccaaggaagg

SEQ ID NO: 122609 - DNA, 30 bp, Artificial Sequence
  Synthetic oligonucleotide
ctctgctacaaggcggaacaaataggaagg

SEQ ID NO: 122610 - DNA, 30 bp, Artificial Sequence
  Synthetic oligonucleotide
atggggagcaactgcgtacttgcgggaagg

SEQ ID NO: 122611 - DNA, 30 bp, Artificial Sequence
  Synthetic oligonucleotide
tcaagcatcctctcatgtaccgtgggaagg

SEQ ID NO: 122612 - DNA, 30 bp, Artificial Sequence
  Synthetic oligonucleotide
tgccaacttgagtatgcttctcgtggaagg

SEQ ID NO: 122613 - DNA, 30 bp, Artificial Sequence
  Synthetic oligonucleotide
tcatagccctaggaggggacacaatgaagg

SEQ ID NO: 122614 - DNA, 30 bp, Artificial Sequence
  Synthetic oligonucleotide
cgggaactaatacaagtacgaacctgaagg

SEQ ID NO: 122615 - DNA, 30 bp, Artificial Sequence
  Synthetic oligonucleotide
agtgcttacagtgcatttacgatctgaagg

SEQ ID NO: 122616 - DNA, 30 bp, Artificial Sequence
  Synthetic oligonucleotide
gccaactaataacgggtcccaaagtgaagg

SEQ ID NO: 122617 - DNA, 30 bp, Artificial Sequence
  Synthetic oligonucleotide
ttacacctgcagaagagagacgagtgaagg

SEQ ID NO: 122618 - DNA, 30 bp, Artificial Sequence
  Synthetic oligonucleotide
gttagcgaaatgcatatattgaattgaagg

SEQ ID NO: 122619 - DNA, 30 bp, Artificial Sequence
  Synthetic oligonucleotide
ggactatgcgcgactgcctgaacttgaagg

SEQ ID NO: 122620 - DNA, 30 bp, Artificial Sequence
  Synthetic oligonucleotide
acaacctccacgtttagcaggggttgaagg

SEQ ID NO: 122621 - DNA, 30 bp, Artificial Sequence
  Synthetic oligonucleotide
aattcaaggatcatataaacttaactaagg

SEQ ID NO: 122622 - DNA, 30 bp, Artificial Sequence
  Synthetic oligonucleotide
tcgccatggcgtaaaattttgtagctaagg

SEQ ID NO: 122623 - DNA, 30 bp, Artificial Sequence
  Synthetic oligonucleotide
acagagatatgagttcgatcgcggctaagg

SEQ ID NO: 122624 - DNA, 30 bp, Artificial Sequence
  Synthetic oligonucleotide
ctgaaaaggcttggaccagttcctctaagg

SEQ ID NO: 122625 - DNA, 30 bp, Artificial Sequence
  Synthetic oligonucleotide
ccggcgtccgttgctgacaaatgggtaagg

SEQ ID NO: 122626 - DNA, 30 bp, Artificial Sequence
  Synthetic oligonucleotide
tcataacaatacctatgcaccgttgtaagg

SEQ ID NO: 122627 - DNA, 30 bp, Artificial Sequence
  Synthetic oligonucleotide
cctagaataacaagcagtagttttgtaagg

SEQ ID NO: 122628 - DNA, 30 bp, Artificial Sequence
  Synthetic oligonucleotide
gcataagctatctcaaataaattattaagg

SEQ ID NO: 122629 - DNA, 30 bp, Artificial Sequence
  Synthetic oligonucleotide
tccaaggggaatgcgggtaccaggttaagg

SEQ ID NO: 122630 - DNA, 30 bp, Artificial Sequence
  Synthetic oligonucleotide
ggagccatccaggatgataccgatttaagg

SEQ ID NO: 122631 - DNA, 30 bp, Artificial Sequence
  Synthetic oligonucleotide
acatgaactttgtgttcgcgataaaacagg

SEQ ID NO: 122632 - DNA, 30 bp, Artificial Sequence
  Synthetic oligonucleotide
cggcgtgagactgtctcaccctaaaacagg

SEQ ID NO: 122633 - DNA, 30 bp, Artificial Sequence
  Synthetic oligonucleotide
gccgcaaaagtggagtacggcacaaacagg

SEQ ID NO: 122634 - DNA, 30 bp, Artificial Sequence
  Synthetic oligonucleotide
cccacacgggtacacacccccgcgaacagg

SEQ ID NO: 122635 - DNA, 30 bp, Artificial Sequence
  Synthetic oligonucleotide
ttgtctatcgaagttaaattgtcgaacagg

SEQ ID NO: 122636 - DNA, 30 bp, Artificial Sequence
  Synthetic oligonucleotide
aacgcaagtaggcagaatgactttaacagg

SEQ ID NO: 122637 - DNA, 30 bp, Artificial Sequence
  Synthetic oligonucleotide
actggcctcacgttttcttacacacacagg

SEQ ID NO: 122638 - DNA, 30 bp, Artificial Sequence
  Synthetic oligonucleotide
cggctcgacaagccggcatatgcacacagg

SEQ ID NO: 122639 - DNA, 30 bp, Artificial Sequence
  Synthetic oligonucleotide
ggtttcccgggagctgcgggtaatcacagg

SEQ ID NO: 122640 - DNA, 30 bp, Artificial Sequence
  Synthetic oligonucleotide
gatttaagaccagacaagggccatcacagg

SEQ ID NO: 122641 - DNA, 30 bp, Artificial Sequence
  Synthetic oligonucleotide
agtcgatgttggtagttaacacaagacagg

SEQ ID NO: 122642 - DNA, 30 bp, Artificial Sequence
  Synthetic oligonucleotide
tcaaggcagcgctaaactgtaaaggacagg

SEQ ID NO: 122643 - DNA, 30 bp, Artificial Sequence
  Synthetic oligonucleotide
tgagattaggaggatagtctacatgacagg

SEQ ID NO: 122644 - DNA, 30 bp, Artificial Sequence
  Synthetic oligonucleotide
gttcgggaggttcaggtatagtatgacagg

SEQ ID NO: 122645 - DNA, 30 bp, Artificial Sequence
  Synthetic oligonucleotide
tacagtgttacgtactatacatttgacagg

SEQ ID NO: 122646 - DNA, 30 bp, Artificial Sequence
  Synthetic oligonucleotide
aagtagtggttaataagttgttgatacagg

SEQ ID NO: 122647 - DNA, 30 bp, Artificial Sequence
  Synthetic oligonucleotide
ttggatctcgggcagtgggtaaactacagg

SEQ ID NO: 122648 - DNA, 30 bp, Artificial Sequence
  Synthetic oligonucleotide
ggaaacagctggatatacaaatcctacagg

SEQ ID NO: 122649 - DNA, 30 bp, Artificial Sequence
  Synthetic oligonucleotide
gcatgtagcatgtgacaggttccgtacagg

SEQ ID NO: 122650 - DNA, 30 bp, Artificial Sequence
  Synthetic oligonucleotide
ttcccacgggtagaattaatattgtacagg

SEQ ID NO: 122651 - DNA, 30 bp, Artificial Sequence
  Synthetic oligonucleotide
caccttattcagggggggtacacaaccagg

SEQ ID NO: 122652 - DNA, 30 bp, Artificial Sequence
  Synthetic oligonucleotide
agctaatagtcggtgactagcaaacccagg

SEQ ID NO: 122653 - DNA, 30 bp, Artificial Sequence
  Synthetic oligonucleotide
cacgatcattacgggaaatcccaccccagg

SEQ ID NO: 122654 - DNA, 30 bp, Artificial Sequence
  Synthetic oligonucleotide
ctgatacacagtcgcgtcaatattcccagg

SEQ ID NO: 122655 - DNA, 30 bp, Artificial Sequence
  Synthetic oligonucleotide
tgaaaatcggtatgtggtctcatcgccagg

SEQ ID NO: 122656 - DNA, 30 bp, Artificial Sequence
  Synthetic oligonucleotide
gactttattaccgaaggtgcgtatgccagg

SEQ ID NO: 122657 - DNA, 30 bp, Artificial Sequence
  Synthetic oligonucleotide
gatgagtggggcataattgggtatgccagg

SEQ ID NO: 122658 - DNA, 30 bp, Artificial Sequence
  Synthetic oligonucleotide
gcatgggcgcagtatgtatgccgctccagg

SEQ ID NO: 122659 - DNA, 30 bp, Artificial Sequence
  Synthetic oligonucleotide
ctttaaaacatccatcgcataaagtccagg

SEQ ID NO: 122660 - DNA, 30 bp, Artificial Sequence
  Synthetic oligonucleotide
agccgtatggcgtacgatccggattccagg

SEQ ID NO: 122661 - DNA, 30 bp, Artificial Sequence
  Synthetic oligonucleotide
agttaaagtcgtgatacgtgggtttccagg

SEQ ID NO: 122662 - DNA, 30 bp, Artificial Sequence
  Synthetic oligonucleotide
ccccggggacccggcgtgaagagaagcagg

SEQ ID NO: 122663 - DNA, 30 bp, Artificial Sequence
  Synthetic oligonucleotide
actagatagtccttaaaacgccacagcagg

SEQ ID NO: 122664 - DNA, 30 bp, Artificial Sequence
  Synthetic oligonucleotide
gctcaatgggttaatagaggatgcagcagg

SEQ ID NO: 122665 - DNA, 30 bp, Artificial Sequence
  Synthetic oligonucleotide
cttgtggactaggtcccactgtagagcagg

SEQ ID NO: 122666 - DNA, 30 bp, Artificial Sequence
  Synthetic oligonucleotide
aagaaacgtcaagtggagagggcacgcagg

SEQ ID NO: 122667 - DNA, 30 bp, Artificial Sequence
  Synthetic oligonucleotide
actgagaatactgggatggtatctcgcagg

SEQ ID NO: 122668 - DNA, 30 bp, Artificial Sequence
  Synthetic oligonucleotide
ggtggggattccaacctatcctccggcagg

SEQ ID NO: 122669 - DNA, 30 bp, Artificial Sequence
  Synthetic oligonucleotide
tgtgttgccctctgattacacagcggcagg

SEQ ID NO: 122670 - DNA, 30 bp, Artificial Sequence
  Synthetic oligonucleotide
tggacctgcgtcatgtgtggtttgggcagg

SEQ ID NO: 122671 - DNA, 30 bp, Artificial Sequence
  Synthetic oligonucleotide
cggctacgggccagcggtttaacatgcagg

SEQ ID NO: 122672 - DNA, 30 bp, Artificial Sequence
  Synthetic oligonucleotide
gtgaggcggtgaaatcacagtcggtgcagg

SEQ ID NO: 122673 - DNA, 30 bp, Artificial Sequence
  Synthetic oligonucleotide
aacgcgtctgcatcatgctgaagaatcagg

SEQ ID NO: 122674 - DNA, 30 bp, Artificial Sequence
  Synthetic oligonucleotide
tgtcaaggatggcaaggttcttgtatcagg

SEQ ID NO: 122675 - DNA, 30 bp, Artificial Sequence
  Synthetic oligonucleotide
ctgtggtaaaattacacttgttacctcagg

SEQ ID NO: 122676 - DNA, 30 bp, Artificial Sequence
  Synthetic oligonucleotide
ctcagcgggggcctgaactggcagctcagg

SEQ ID NO: 122677 - DNA, 30 bp, Artificial Sequence
  Synthetic oligonucleotide
taggtaaactgtcccacccctgggctcagg

SEQ ID NO: 122678 - DNA, 30 bp, Artificial Sequence
  Synthetic oligonucleotide
gagaggatcgggatcattaggattctcagg

SEQ ID NO: 122679 - DNA, 30 bp, Artificial Sequence
  Synthetic oligonucleotide
tgaacttattccataagcgaaggagtcagg

SEQ ID NO: 122680 - DNA, 30 bp, Artificial Sequence
  Synthetic oligonucleotide
agtggtgggaggaacagtcgggtcgtcagg

SEQ ID NO: 122681 - DNA, 30 bp, Artificial Sequence
  Synthetic oligonucleotide
aaatggcagtcagaaagtgatagggtcagg

SEQ ID NO: 122682 - DNA, 30 bp, Artificial Sequence
  Synthetic oligonucleotide
tcacgtatgggtgcaaggcggtacttcagg

SEQ ID NO: 122683 - DNA, 30 bp, Artificial Sequence
  Synthetic oligonucleotide
gtagtgtcacagggctatcattggttcagg

SEQ ID NO: 122684 - DNA, 30 bp, Artificial Sequence
  Synthetic oligonucleotide
aggcaataagttatggacactcttttcagg

SEQ ID NO: 122685 - DNA, 30 bp, Artificial Sequence
  Synthetic oligonucleotide
cagactaaatctgctcctcccgttttcagg

SEQ ID NO: 122686 - DNA, 30 bp, Artificial Sequence
  Synthetic oligonucleotide
taaccaacgtctttgctctctctaaagagg

SEQ ID NO: 122687 - DNA, 30 bp, Artificial Sequence
  Synthetic oligonucleotide
cgttctgtatttgccccgtgatcgaagagg

SEQ ID NO: 122688 - DNA, 30 bp, Artificial Sequence
  Synthetic oligonucleotide
aggagtataggagagggatacgataagagg

SEQ ID NO: 122689 - DNA, 30 bp, Artificial Sequence
  Synthetic oligonucleotide
tcttaagctcatgctttgttagctaagagg

SEQ ID NO: 122690 - DNA, 30 bp, Artificial Sequence
  Synthetic oligonucleotide
cggggacacatacaagaggtaagtaagagg

SEQ ID NO: 122691 - DNA, 30 bp, Artificial Sequence
  Synthetic oligonucleotide
atttacggatgtctgaaccgtgcgcagagg

SEQ ID NO: 122692 - DNA, 30 bp, Artificial Sequence
  Synthetic oligonucleotide
agacatgtggcatcataagggtttcagagg

SEQ ID NO: 122693 - DNA, 30 bp, Artificial Sequence
  Synthetic oligonucleotide
tgcttatgctgaagttcgcgatgcgagagg

SEQ ID NO: 122694 - DNA, 30 bp, Artificial Sequence
  Synthetic oligonucleotide
ttgagctaggaaatgtgtgatcctgagagg

SEQ ID NO: 122695 - DNA, 30 bp, Artificial Sequence
  Synthetic oligonucleotide
tccaacgtcgattgggacggcccatagagg

SEQ ID NO: 122696 - DNA, 30 bp, Artificial Sequence
  Synthetic oligonucleotide
attcgggcacgaagaaggcacatgtagagg

SEQ ID NO: 122697 - DNA, 30 bp, Artificial Sequence
  Synthetic oligonucleotide
agatcgacaggcacagcgaaaccttagagg

SEQ ID NO: 122698 - DNA, 30 bp, Artificial Sequence
  Synthetic oligonucleotide
tcgacacaaagggagagaacgagttagagg

SEQ ID NO: 122699 - DNA, 30 bp, Artificial Sequence
  Synthetic oligonucleotide
gtaaggaaagtcaggtggcgatacacgagg

SEQ ID NO: 122700 - DNA, 30 bp, Artificial Sequence
  Synthetic oligonucleotide
gcacgaatgcaaaataggtttcccacgagg

SEQ ID NO: 122701 - DNA, 30 bp, Artificial Sequence
  Synthetic oligonucleotide
ttatcgtttacgatgacaacgtccacgagg

SEQ ID NO: 122702 - DNA, 30 bp, Artificial Sequence
  Synthetic oligonucleotide
tccataaacatctccctacctgggacgagg

SEQ ID NO: 122703 - DNA, 30 bp, Artificial Sequence
  Synthetic oligonucleotide
cttattcaagctccaccatataatacgagg

SEQ ID NO: 122704 - DNA, 30 bp, Artificial Sequence
  Synthetic oligonucleotide
ctgaagcgcagtgcgtcaccccctccgagg

SEQ ID NO: 122705 - DNA, 30 bp, Artificial Sequence
  Synthetic oligonucleotide
gagtggacatgatgctaaacaagagcgagg

SEQ ID NO: 122706 - DNA, 30 bp, Artificial Sequence
  Synthetic oligonucleotide
atacgcgagcagaatattataaaggcgagg

SEQ ID NO: 122707 - DNA, 30 bp, Artificial Sequence
  Synthetic oligonucleotide
cgttagtcacgtcaggcgtatgatgcgagg

SEQ ID NO: 122708 - DNA, 30 bp, Artificial Sequence
  Synthetic oligonucleotide
aaccaataaggcaccaggggcagtgcgagg

SEQ ID NO: 122709 - DNA, 30 bp, Artificial Sequence
  Synthetic oligonucleotide
ggttcaccaccgttgtgggtaccctcgagg

SEQ ID NO: 122710 - DNA, 30 bp, Artificial Sequence
  Synthetic oligonucleotide
cgacttgtcgtacatgggtggccaaggagg

SEQ ID NO: 122711 - DNA, 30 bp, Artificial Sequence
  Synthetic oligonucleotide
cagctgcagacgtgcttgaaaaacaggagg

SEQ ID NO: 122712 - DNA, 30 bp, Artificial Sequence
  Synthetic oligonucleotide
tggggctttatcaccccggcaaagaggagg

SEQ ID NO: 122713 - DNA, 30 bp, Artificial Sequence
  Synthetic oligonucleotide
cgttacgcaagagatactctgtggaggagg

SEQ ID NO: 122714 - DNA, 30 bp, Artificial Sequence
  Synthetic oligonucleotide
tatacaagagggtgctgtcaaaaacggagg

SEQ ID NO: 122715 - DNA, 30 bp, Artificial Sequence
  Synthetic oligonucleotide
gtacgtgggtcctgcgggaaagtacggagg

SEQ ID NO: 122716 - DNA, 30 bp, Artificial Sequence
  Synthetic oligonucleotide
gttaagccggcttgattgatagagcggagg

SEQ ID NO: 122717 - DNA, 30 bp, Artificial Sequence
  Synthetic oligonucleotide
aatagcgtagcaccaaaatactggcggagg

SEQ ID NO: 122718 - DNA, 30 bp, Artificial Sequence
  Synthetic oligonucleotide
tatcgcccgaaaatatccacgccagggagg

SEQ ID NO: 122719 - DNA, 30 bp, Artificial Sequence
  Synthetic oligonucleotide
gtaggagggattgagaattgtgtggggagg

SEQ ID NO: 122720 - DNA, 30 bp, Artificial Sequence
  Synthetic oligonucleotide
tgatcgcgacggtcttttgaagctgggagg

SEQ ID NO: 122721 - DNA, 30 bp, Artificial Sequence
  Synthetic oligonucleotide
aaaccgcatagggcccaggtatcctggagg

SEQ ID NO: 122722 - DNA, 30 bp, Artificial Sequence
  Synthetic oligonucleotide
gagtaggtgccgacgagagttggctggagg

SEQ ID NO: 122723 - DNA, 30 bp, Artificial Sequence
  Synthetic oligonucleotide
ccactcggcgttaggccggacgacatgagg

SEQ ID NO: 122724 - DNA, 31 bp, Artificial Sequence
  Synthetic oligonucleotide
cggcaattacacgtgacgtgcccggatgagg

SEQ ID NO: 122725 - DNA, 30 bp, Artificial Sequence
  Synthetic oligonucleotide
atactataggtccgctcgtcccatatgagg

SEQ ID NO: 122726 - DNA, 30 bp, Artificial Sequence
  Synthetic oligonucleotide
gagttggagccgaatgggatttgactgagg

SEQ ID NO: 122727 - DNA, 30 bp, Artificial Sequence
  Synthetic oligonucleotide
gtaaactacgtagtgaaccaccacctgagg

SEQ ID NO: 122728 - DNA, 30 bp, Artificial Sequence
  Synthetic oligonucleotide
ttactacagaacgttggtgacgacctgagg

SEQ ID NO: 122729 - DNA, 30 bp, Artificial Sequence
  Synthetic oligonucleotide
gcttatgaccatacaggtggcgccctgagg

SEQ ID NO: 122730 - DNA, 30 bp, Artificial Sequence
  Synthetic oligonucleotide
tgctcttcataacgattagaatcgctgagg

SEQ ID NO: 122731 - DNA, 30 bp, Artificial Sequence
  Synthetic oligonucleotide
aatccaaaggaacggcatttccaagtgagg

SEQ ID NO: 122732 - DNA, 30 bp, Artificial Sequence
  Synthetic oligonucleotide
tggcagtgtcgctttcataacaaggtgagg

SEQ ID NO: 122733 - DNA, 30 bp, Artificial Sequence
  Synthetic oligonucleotide
atgcgcaaatgttgtgtcccggtggtgagg

SEQ ID NO: 122734 - DNA, 30 bp, Artificial Sequence
  Synthetic oligonucleotide
accgaccagtgactaactaaacttgtgagg

SEQ ID NO: 122735 - DNA, 30 bp, Artificial Sequence
  Synthetic oligonucleotide
ggtacgtttaatggtgaacattccttgagg

SEQ ID NO: 122736 - DNA, 30 bp, Artificial Sequence
  Synthetic oligonucleotide
ttaagtagctcgattgaaccgacaaatagg

SEQ ID NO: 122737 - DNA, 30 bp, Artificial Sequence
  Synthetic oligonucleotide
gaccaccgggaaggtgcaataataaatagg

SEQ ID NO: 122738 - DNA, 30 bp, Artificial Sequence
  Synthetic oligonucleotide
aacatgaccttgtgataaaggagcaatagg

SEQ ID NO: 122739 - DNA, 30 bp, Artificial Sequence
  Synthetic oligonucleotide
gatagtgtccgaagtgtcagatcgaatagg

SEQ ID NO: 122740 - DNA, 30 bp, Artificial Sequence
  Synthetic oligonucleotide
acccgtatgcccacatttaacgggaatagg

SEQ ID NO: 122741 - DNA, 30 bp, Artificial Sequence
  Synthetic oligonucleotide
aagagatctgataccaactagtataatagg

SEQ ID NO: 122742 - DNA, 30 bp, Artificial Sequence
  Synthetic oligonucleotide
ttttggacctcaaccagagtgggtaatagg

SEQ ID NO: 122743 - DNA, 30 bp, Artificial Sequence
  Synthetic oligonucleotide
aattcaatgacagtggttggataacatagg

SEQ ID NO: 122744 - DNA, 30 bp, Artificial Sequence
  Synthetic oligonucleotide
ttctaaagtataaatgtgtcatgccatagg

SEQ ID NO: 122745 - DNA, 30 bp, Artificial Sequence
  Synthetic oligonucleotide
gcactttcgaggtatgggcgagaagatagg

SEQ ID NO: 122746 - DNA, 30 bp, Artificial Sequence
  Synthetic oligonucleotide
actacggagcacaaagattgcacagatagg

SEQ ID NO: 122747 - DNA, 30 bp, Artificial Sequence
  Synthetic oligonucleotide
agttgagacacactaagatttcaggatagg

SEQ ID NO: 122748 - DNA, 30 bp, Artificial Sequence
  Synthetic oligonucleotide
taagtcgaaccgtacactaccgtggatagg

SEQ ID NO: 122749 - DNA, 30 bp, Artificial Sequence
  Synthetic oligonucleotide
gaggatgagtaacgatgcgttagatatagg

SEQ ID NO: 122750 - DNA, 30 bp, Artificial Sequence
  Synthetic oligonucleotide
tcatgcctactcccttcccaattatatagg

SEQ ID NO: 122751 - DNA, 30 bp, Artificial Sequence
  Synthetic oligonucleotide
tggtagggacccgcaggtgatgcgtatagg

SEQ ID NO: 122752 - DNA, 30 bp, Artificial Sequence
  Synthetic oligonucleotide
gtgggctttggaacgataggtgcaactagg

SEQ ID NO: 122753 - DNA, 30 bp, Artificial Sequence
  Synthetic oligonucleotide
gtgcttccaaggtagagatgaaacactagg

SEQ ID NO: 122754 - DNA, 30 bp, Artificial Sequence
  Synthetic oligonucleotide
gtgagcagggtatggggtgataagactagg

SEQ ID NO: 122755 - DNA, 30 bp, Artificial Sequence
  Synthetic oligonucleotide
acttcaatttgggccacgtgcgagactagg

SEQ ID NO: 122756 - DNA, 30 bp, Artificial Sequence
  Synthetic oligonucleotide
tgccttgcctaagtaagcgctagacctagg

SEQ ID NO: 122757 - DNA, 30 bp, Artificial Sequence
  Synthetic oligonucleotide
cttgctcggattcgtactagaccgcctagg

SEQ ID NO: 122758 - DNA, 30 bp, Artificial Sequence
  Synthetic oligonucleotide
aaccgacagagtgaagtatgggggcctagg

SEQ ID NO: 122759 - DNA, 30 bp, Artificial Sequence
  Synthetic oligonucleotide
agagtgcgatccgggtgattttcagctagg

SEQ ID NO: 122760 - DNA, 30 bp, Artificial Sequence
  Synthetic oligonucleotide
ggtccggaccagagattaggcgactctagg

SEQ ID NO: 122761 - DNA, 30 bp, Artificial Sequence
  Synthetic oligonucleotide
gggtgaacgggacgacgataagtgtctagg

SEQ ID NO: 122762 - DNA, 30 bp, Artificial Sequence
  Synthetic oligonucleotide
tataacgagcgatcagggggcgcttctagg

SEQ ID NO: 122763 - DNA, 30 bp, Artificial Sequence
  Synthetic oligonucleotide
gcatcgatgtacattagagacttttctagg

SEQ ID NO: 122764 - DNA, 30 bp, Artificial Sequence
  Synthetic oligonucleotide
ataggactgtgcttaggactaacaagtagg

SEQ ID NO: 122765 - DNA, 30 bp, Artificial Sequence
  Synthetic oligonucleotide
ggttgggttaagctcacacagcgaagtagg

SEQ ID NO: 122766 - DNA, 30 bp, Artificial Sequence
  Synthetic oligonucleotide
cacgagttttacgagttgtctgccagtagg

SEQ ID NO: 122767 - DNA, 30 bp, Artificial Sequence
  Synthetic oligonucleotide
cgaaatattacgcgcaggcggttcagtagg

SEQ ID NO: 122768 - DNA, 30 bp, Artificial Sequence
  Synthetic oligonucleotide
gaacgttagagtaacttctctccacgtagg

SEQ ID NO: 122769 - DNA, 30 bp, Artificial Sequence
  Synthetic oligonucleotide
gctacacaagtaggtcgcggaatacgtagg

SEQ ID NO: 122770 - DNA, 30 bp, Artificial Sequence
  Synthetic oligonucleotide
aagaaactaatgtcggggcataggcgtagg

SEQ ID NO: 122771 - DNA, 30 bp, Artificial Sequence
  Synthetic oligonucleotide
aattggtagtaggtgaaaacgactcgtagg

SEQ ID NO: 122772 - DNA, 30 bp, Artificial Sequence
  Synthetic oligonucleotide
ggcctacatcgacaccatgagacaggtagg

SEQ ID NO: 122773 - DNA, 30 bp, Artificial Sequence
  Synthetic oligonucleotide
aaagagccaagacaagaaaatagaggtagg

SEQ ID NO: 122774 - DNA, 30 bp, Artificial Sequence
  Synthetic oligonucleotide
tcatcatgacggatttattgatacggtagg

SEQ ID NO: 122775 - DNA, 30 bp, Artificial Sequence
  Synthetic oligonucleotide
tgcaattagaggggttcaagagtcggtagg

SEQ ID NO: 122776 - DNA, 30 bp, Artificial Sequence
  Synthetic oligonucleotide
tgacaaactaacaatattggtatgggtagg

SEQ ID NO: 122777 - DNA, 30 bp, Artificial Sequence
  Synthetic oligonucleotide
gagacttgaatcaggatacgtgtgggtagg

SEQ ID NO: 122778 - DNA, 30 bp, Artificial Sequence
  Synthetic oligonucleotide
taacgatatgtttttggtggccaatgtagg

SEQ ID NO: 122779 - DNA, 30 bp, Artificial Sequence
  Synthetic oligonucleotide
ctgttaggatcgcgcgtctgtaggattagg

SEQ ID NO: 122780 - DNA, 30 bp, Artificial Sequence
  Synthetic oligonucleotide
ccatcatcggataatcggggagagcttagg

SEQ ID NO: 122781 - DNA, 30 bp, Artificial Sequence
  Synthetic oligonucleotide
ttatcggggaaaacagaggtgtttcttagg

SEQ ID NO: 122782 - DNA, 30 bp, Artificial Sequence
  Synthetic oligonucleotide
accagtaggattgtccaagaaacagttagg

SEQ ID NO: 122783 - DNA, 30 bp, Artificial Sequence
  Synthetic oligonucleotide
aacgaatgcttctgcttttcgggcgttagg

SEQ ID NO: 122784 - DNA, 30 bp, Artificial Sequence
  Synthetic oligonucleotide
acgtaacatgacgggatctgcatatttagg

SEQ ID NO: 122785 - DNA, 30 bp, Artificial Sequence
  Synthetic oligonucleotide
tgacgagtgacctataaagaacattttagg

SEQ ID NO: 122786 - DNA, 30 bp, Artificial Sequence
  Synthetic oligonucleotide
gcgagcaaagagtcgaggtcccgaaaacgg

SEQ ID NO: 122787 - DNA, 30 bp, Artificial Sequence
  Synthetic oligonucleotide
tcctggaagatgagcatagatgacaaacgg

SEQ ID NO: 122788 - DNA, 30 bp, Artificial Sequence
  Synthetic oligonucleotide
agccggatggctgtctatacaattaaacgg

SEQ ID NO: 122789 - DNA, 30 bp, Artificial Sequence
  Synthetic oligonucleotide
ttcgtgcacggtatgacctatccccaacgg

SEQ ID NO: 122790 - DNA, 31 bp, Artificial Sequence
  Synthetic oligonucleotide
catcaatcgctaactgagtctcaggcaacgg

SEQ ID NO: 122791 - DNA, 30 bp, Artificial Sequence
  Synthetic oligonucleotide
ggcaaattggcctatgaggctttgcaacgg

SEQ ID NO: 122792 - DNA, 30 bp, Artificial Sequence
  Synthetic oligonucleotide
gtgaaactatttccgcaaattctcgaacgg

SEQ ID NO: 122793 - DNA, 30 bp, Artificial Sequence
  Synthetic oligonucleotide
actagtatatcctaagcttaaagtgaacgg

SEQ ID NO: 122794 - DNA, 30 bp, Artificial Sequence
  Synthetic oligonucleotide
accttcatgatcaacacactcgggtaacgg

SEQ ID NO: 122795 - DNA, 30 bp, Artificial Sequence
  Synthetic oligonucleotide
tatcgagtgtgattcacggcaaattaacgg

SEQ ID NO: 122796 - DNA, 30 bp, Artificial Sequence
  Synthetic oligonucleotide
actaccacgtacagtgtcgcaattacacgg

SEQ ID NO: 122797 - DNA, 30 bp, Artificial Sequence
  Synthetic oligonucleotide
taatgcgatttaggtttctataaaccacgg

SEQ ID NO: 122798 - DNA, 30 bp, Artificial Sequence
  Synthetic oligonucleotide
gacacctgattaagttaacacctaccacgg

SEQ ID NO: 122799 - DNA, 30 bp, Artificial Sequence
  Synthetic oligonucleotide
taccacaaacatcctgcagcactcccacgg

SEQ ID NO: 122800 - DNA, 30 bp, Artificial Sequence
  Synthetic oligonucleotide
agtcgtagacgattcactaacctgccacgg

SEQ ID NO: 122801 - DNA, 30 bp, Artificial Sequence
  Synthetic oligonucleotide
agtaagcagagtccactaaccgaatcacgg

SEQ ID NO: 122802 - DNA, 30 bp, Artificial Sequence
  Synthetic oligonucleotide
gtatgagcttagagggggtgaccatcacgg

SEQ ID NO: 122803 - DNA, 30 bp, Artificial Sequence
  Synthetic oligonucleotide
ttacagcaactacagacatgagcctcacgg

SEQ ID NO: 122804 - DNA, 30 bp, Artificial Sequence
  Synthetic oligonucleotide
cgatttacgtgtcgaactggcggctcacgg

SEQ ID NO: 122805 - DNA, 30 bp, Artificial Sequence
  Synthetic oligonucleotide
catgccgtagcttacagaaccagaagacgg

SEQ ID NO: 122806 - DNA, 30 bp, Artificial Sequence
  Synthetic oligonucleotide
ggaacatatgaagagatgctaacgagacgg

SEQ ID NO: 122807 - DNA, 30 bp, Artificial Sequence
  Synthetic oligonucleotide
ctgatattaattcacgaaagggcgagacgg

SEQ ID NO: 122808 - DNA, 30 bp, Artificial Sequence
  Synthetic oligonucleotide
cgcggacaatcgagtcttgtgcaacgacgg

SEQ ID NO: 122809 - DNA, 30 bp, Artificial Sequence
  Synthetic oligonucleotide
gcgcatccggcaactgctaatgagcgacgg

SEQ ID NO: 122810 - DNA, 30 bp, Artificial Sequence
  Synthetic oligonucleotide
tccagagactcgattggggcatcgcgacgg

SEQ ID NO: 122811 - DNA, 30 bp, Artificial Sequence
  Synthetic oligonucleotide
agacccacgagtttcgctgggcacggacgg

SEQ ID NO: 122812 - DNA, 30 bp, Artificial Sequence
  Synthetic oligonucleotide
tcgtaggaagacatatgctgcatgggacgg

SEQ ID NO: 122813 - DNA, 30 bp, Artificial Sequence
  Synthetic oligonucleotide
atgatgtggaaaagcgaatacatatgacgg

SEQ ID NO: 122814 - DNA, 30 bp, Artificial Sequence
  Synthetic oligonucleotide
gagcatcatcagagggcaacagtcatacgg

SEQ ID NO: 122815 - DNA, 30 bp, Artificial Sequence
  Synthetic oligonucleotide
ccaacacaacaccgacgagcgttgatacgg

SEQ ID NO: 122816 - DNA, 30 bp, Artificial Sequence
  Synthetic oligonucleotide
ctagaagatgtcaaagtaacgattatacgg

SEQ ID NO: 122817 - DNA, 30 bp, Artificial Sequence
  Synthetic oligonucleotide
atgaaaggacgcacagaaatggcactacgg

SEQ ID NO: 122818 - DNA, 30 bp, Artificial Sequence
  Synthetic oligonucleotide
atcatggagcaaacacaaaatttactacgg

SEQ ID NO: 122819 - DNA, 30 bp, Artificial Sequence
  Synthetic oligonucleotide
attgtccgaactagagcggtgaacctacgg

SEQ ID NO: 122820 - DNA, 30 bp, Artificial Sequence
  Synthetic oligonucleotide
gtggcgagaggctccgaaaataagctacgg

SEQ ID NO: 122821 - DNA, 30 bp, Artificial Sequence
  Synthetic oligonucleotide
gaaagcaaggatggccgccaggtgctacgg

SEQ ID NO: 122822 - DNA, 30 bp, Artificial Sequence
  Synthetic oligonucleotide
tctaatacgggtactaatggtgccgtacgg

SEQ ID NO: 122823 - DNA, 30 bp, Artificial Sequence
  Synthetic oligonucleotide
aaagcagttcaccgaagtatcttcgtacgg

SEQ ID NO: 122824 - DNA, 30 bp, Artificial Sequence
  Synthetic oligonucleotide
gtaagttacttgcagatgagcgcggtacgg

SEQ ID NO: 122825 - DNA, 30 bp, Artificial Sequence
  Synthetic oligonucleotide
acaattagggcgatgctgtcctcggtacgg

SEQ ID NO: 122826 - DNA, 30 bp, Artificial Sequence
  Synthetic oligonucleotide
aagtggcggaggataacatagcgggtacgg

SEQ ID NO: 122827 - DNA, 30 bp, Artificial Sequence
  Synthetic oligonucleotide
ccgttcgggaataagattcgatttgtacgg

SEQ ID NO: 122828 - DNA, 30 bp, Artificial Sequence
  Synthetic oligonucleotide
gataaagatttgatggaaaaaacattacgg

SEQ ID NO: 122829 - DNA, 30 bp, Artificial Sequence
  Synthetic oligonucleotide
tgccgatggacttaagagattctgttacgg

SEQ ID NO: 122830 - DNA, 30 bp, Artificial Sequence
  Synthetic oligonucleotide
cagtaggatctactaatggaagttttacgg

SEQ ID NO: 122831 - DNA, 30 bp, Artificial Sequence
  Synthetic oligonucleotide
aaggaactaccattccccactggcaaccgg

SEQ ID NO: 122832 - DNA, 30 bp, Artificial Sequence
  Synthetic oligonucleotide
gtcatgtcagtatagtgtcgcattaaccgg

SEQ ID NO: 122833 - DNA, 30 bp, Artificial Sequence
  Synthetic oligonucleotide
tgggcagcactaactagagaggttaaccgg

SEQ ID NO: 122834 - DNA, 30 bp, Artificial Sequence
  Synthetic oligonucleotide
aaacgcgcagtctttcgaagcgcccaccgg

SEQ ID NO: 122835 - DNA, 30 bp, Artificial Sequence
  Synthetic oligonucleotide
tgcatggaaaaagcttgttgagtccaccgg

SEQ ID NO: 122836 - DNA, 30 bp, Artificial Sequence
  Synthetic oligonucleotide
actcctcgtatacaaacaattaggcaccgg

SEQ ID NO: 122837 - DNA, 30 bp, Artificial Sequence
  Synthetic oligonucleotide
gggctaacagacaatcattgagtgcaccgg

SEQ ID NO: 122838 - DNA, 30 bp, Artificial Sequence
  Synthetic oligonucleotide
caacattcgttaacagatgctgaagaccgg

SEQ ID NO: 122839 - DNA, 30 bp, Artificial Sequence
  Synthetic oligonucleotide
tcttggacaaacgaagtgatcagagaccgg

SEQ ID NO: 122840 - DNA, 30 bp, Artificial Sequence
  Synthetic oligonucleotide
ggacgactgctgaaaacaaagagcgaccgg

SEQ ID NO: 122841 - DNA, 30 bp, Artificial Sequence
  Synthetic oligonucleotide
caaaggaaacgtaacgtttatcgcgaccgg

SEQ ID NO: 122842 - DNA, 30 bp, Artificial Sequence
  Synthetic oligonucleotide
gcaagaaattgagaacgggtataggaccgg

SEQ ID NO: 122843 - DNA, 30 bp, Artificial Sequence
  Synthetic oligonucleotide
tcttgtgggtcaaaatataaaagtgaccgg

SEQ ID NO: 122844 - DNA, 30 bp, Artificial Sequence
  Synthetic oligonucleotide
ttacgaggtattccgaacgtgttataccgg

SEQ ID NO: 122845 - DNA, 30 bp, Artificial Sequence
  Synthetic oligonucleotide
aagctgggttagggctactacaattaccgg

SEQ ID NO: 122846 - DNA, 30 bp, Artificial Sequence
  Synthetic oligonucleotide
catgagccttgggtaaaaaacaaaacccgg

SEQ ID NO: 122847 - DNA, 30 bp, Artificial Sequence
  Synthetic oligonucleotide
ctaccgtacgcgtgtcttgttgcaacccgg

SEQ ID NO: 122848 - DNA, 30 bp, Artificial Sequence
  Synthetic oligonucleotide
acacttagtgaggtaatgagtggaacccgg

SEQ ID NO: 122849 - DNA, 30 bp, Artificial Sequence
  Synthetic oligonucleotide
gcctacgcatggaaagcttccatcacccgg

SEQ ID NO: 122850 - DNA, 30 bp, Artificial Sequence
  Synthetic oligonucleotide
taaggcgatcagttggatggggacccccgg

SEQ ID NO: 122851 - DNA, 30 bp, Artificial Sequence
  Synthetic oligonucleotide
agccacccgtacggtatcgtggtgccccgg

SEQ ID NO: 122852 - DNA, 30 bp, Artificial Sequence
  Synthetic oligonucleotide
tgctacggttacgggtgaatcgaggcccgg

SEQ ID NO: 122853 - DNA, 30 bp, Artificial Sequence
  Synthetic oligonucleotide
ccgacgaagttacgcaagctgggaagccgg

SEQ ID NO: 122854 - DNA, 30 bp, Artificial Sequence
  Synthetic oligonucleotide
caacgtttttcgtctaaaaatggcagccgg

SEQ ID NO: 122855 - DNA, 30 bp, Artificial Sequence
  Synthetic oligonucleotide
caagtcttgattacccctcgagttagccgg

SEQ ID NO: 122856 - DNA, 30 bp, Artificial Sequence
  Synthetic oligonucleotide
ttcatttgactgcaggaaagaaggcgccgg

SEQ ID NO: 122857 - DNA, 30 bp, Artificial Sequence
  Synthetic oligonucleotide
ataggagtaattacaacgagcccaggccgg

SEQ ID NO: 122858 - DNA, 30 bp, Artificial Sequence
  Synthetic oligonucleotide
aaaaaaggtccttaagcctgattcggccgg

SEQ ID NO: 122859 - DNA, 30 bp, Artificial Sequence
  Synthetic oligonucleotide
accacgacaaacgaagcatctagtggccgg

SEQ ID NO: 122860 - DNA, 30 bp, Artificial Sequence
  Synthetic oligonucleotide
tcaatgtccatgtagagagaagtcatccgg

SEQ ID NO: 122861 - DNA, 30 bp, Artificial Sequence
  Synthetic oligonucleotide
caatcacatgtcgggacatcgttcatccgg

SEQ ID NO: 122862 - DNA, 30 bp, Artificial Sequence
  Synthetic oligonucleotide
aatgaaattgccaacatgactttcgtccgg

SEQ ID NO: 122863 - DNA, 30 bp, Artificial Sequence
  Synthetic oligonucleotide
cacagaacagggcgaacttattccaagcgg

SEQ ID NO: 122864 - DNA, 30 bp, Artificial Sequence
  Synthetic oligonucleotide
tcactcttttgttaaaacatataccagcgg

SEQ ID NO: 122865 - DNA, 30 bp, Artificial Sequence
  Synthetic oligonucleotide
cgtgtgtacccataggtctccttccagcgg

SEQ ID NO: 122866 - DNA, 30 bp, Artificial Sequence
  Synthetic oligonucleotide
tggcttcagggtatgatggttagtgagcgg

SEQ ID NO: 122867 - DNA, 30 bp, Artificial Sequence
  Synthetic oligonucleotide
ttaggaacgatagctcactttccatagcgg

SEQ ID NO: 122868 - DNA, 30 bp, Artificial Sequence
  Synthetic oligonucleotide
caatataaaaaaccaacattgtaaacgcgg

SEQ ID NO: 122869 - DNA, 30 bp, Artificial Sequence
  Synthetic oligonucleotide
cgttgcgtttagttataccagtgtacgcgg

SEQ ID NO: 122870 - DNA, 30 bp, Artificial Sequence
  Synthetic oligonucleotide
agttacggcatgtaattgcgggccccgcgg

SEQ ID NO: 122871 - DNA, 30 bp, Artificial Sequence
  Synthetic oligonucleotide
gcgacaagataggtaaatattggtccgcgg

SEQ ID NO: 122872 - DNA, 30 bp, Artificial Sequence
  Synthetic oligonucleotide
gtagtgcacagaacgggtggtacaaggcgg

SEQ ID NO: 122873 - DNA, 30 bp, Artificial Sequence
  Synthetic oligonucleotide
cgatcaataatacagtcaggcgataggcgg

SEQ ID NO: 122874 - DNA, 30 bp, Artificial Sequence
  Synthetic oligonucleotide
gggggaactatagagaaggcacttcggcgg

SEQ ID NO: 122875 - DNA, 30 bp, Artificial Sequence
  Synthetic oligonucleotide
gacgtaggcgagaatatcccgtacgggcgg

SEQ ID NO: 122876 - DNA, 30 bp, Artificial Sequence
  Synthetic oligonucleotide
aaacgtcaagcggtatgaccagtcgggcgg

SEQ ID NO: 122877 - DNA, 30 bp, Artificial Sequence
  Synthetic oligonucleotide
agccgtaatgataatgcatttcgggggcgg

SEQ ID NO: 122878 - DNA, 30 bp, Artificial Sequence
  Synthetic oligonucleotide
tggtgcacgatcgtggagctggatgggcgg

SEQ ID NO: 122879 - DNA, 30 bp, Artificial Sequence
  Synthetic oligonucleotide
acccctaacctcaatacattcatctggcgg

SEQ ID NO: 122880 - DNA, 30 bp, Artificial Sequence
  Synthetic oligonucleotide
acccagcaggaccagggtctgcgaatgcgg

SEQ ID NO: 122881 - DNA, 30 bp, Artificial Sequence
  Synthetic oligonucleotide
atcatggggcgtaatcgtaatcacatgcgg

SEQ ID NO: 122882 - DNA, 30 bp, Artificial Sequence
  Synthetic oligonucleotide
gcagccagaatatatacgggggagatgcgg

SEQ ID NO: 122883 - DNA, 30 bp, Artificial Sequence
  Synthetic oligonucleotide
tgcaagatgcttcgagagcacaaactgcgg

SEQ ID NO: 122884 - DNA, 30 bp, Artificial Sequence
  Synthetic oligonucleotide
cacccggtaaaaggctgaaatatactgcgg

SEQ ID NO: 122885 - DNA, 30 bp, Artificial Sequence
  Synthetic oligonucleotide
taacgagatacaaagagactatgggtgcgg

SEQ ID NO: 122886 - DNA, 30 bp, Artificial Sequence
  Synthetic oligonucleotide
gaccctatggatcatttcccgagtgtgcgg

SEQ ID NO: 122887 - DNA, 30 bp, Artificial Sequence
  Synthetic oligonucleotide
ggttatcaccacaacagatctgttgtgcgg

SEQ ID NO: 122888 - DNA, 30 bp, Artificial Sequence
  Synthetic oligonucleotide
tcatctactgcccctttcggcgacttgcgg

SEQ ID NO: 122889 - DNA, 30 bp, Artificial Sequence
  Synthetic oligonucleotide
ccccggaggtggatgcaaaagaccttgcgg

SEQ ID NO: 122890 - DNA, 30 bp, Artificial Sequence
  Synthetic oligonucleotide
tcatgttcgttcaacaagacaattttgcgg

SEQ ID NO: 122891 - DNA, 30 bp, Artificial Sequence
  Synthetic oligonucleotide
aacaggtccacaggaggggaagtaaatcgg

SEQ ID NO: 122892 - DNA, 30 bp, Artificial Sequence
  Synthetic oligonucleotide
ggaagcagtcttaaagttactccacatcgg

SEQ ID NO: 122893 - DNA, 30 bp, Artificial Sequence
  Synthetic oligonucleotide
agttcccgacaactgggtgatgtgcatcgg

SEQ ID NO: 122894 - DNA, 30 bp, Artificial Sequence
  Synthetic oligonucleotide
gggcacaaattaccgcttcttaaagatcgg

SEQ ID NO: 122895 - DNA, 30 bp, Artificial Sequence
  Synthetic oligonucleotide
ctgtggcggacgcatagttctacagatcgg

SEQ ID NO: 122896 - DNA, 30 bp, Artificial Sequence
  Synthetic oligonucleotide
catggtcatggctctgaaacgcacgatcgg

SEQ ID NO: 122897 - DNA, 30 bp, Artificial Sequence
  Synthetic oligonucleotide
agaagagaccccggcccacgttacgatcgg

SEQ ID NO: 122898 - DNA, 30 bp, Artificial Sequence
  Synthetic oligonucleotide
gtaagattccaaaagtgcagcgtcgatcgg

SEQ ID NO: 122899 - DNA, 30 bp, Artificial Sequence
  Synthetic oligonucleotide
tcaggagatcagagtgagtgtgtggatcgg

SEQ ID NO: 122900 - DNA, 30 bp, Artificial Sequence
  Synthetic oligonucleotide
ggagacctcaatcgccagtcattggatcgg

SEQ ID NO: 122901 - DNA, 30 bp, Artificial Sequence
  Synthetic oligonucleotide
ccttacgcagtatggaggagccctgatcgg

SEQ ID NO: 122902 - DNA, 30 bp, Artificial Sequence
  Synthetic oligonucleotide
ggacactgtacaaatgtcatgtttgatcgg

SEQ ID NO: 122903 - DNA, 30 bp, Artificial Sequence
  Synthetic oligonucleotide
acggggtatccggtgtaacccaactatcgg

SEQ ID NO: 122904 - DNA, 30 bp, Artificial Sequence
  Synthetic oligonucleotide
gttgaacatagccgtagcgtactctatcgg

SEQ ID NO: 122905 - DNA, 30 bp, Artificial Sequence
  Synthetic oligonucleotide
actctgccaataataagacaatggtatcgg

SEQ ID NO: 122906 - DNA, 30 bp, Artificial Sequence
  Synthetic oligonucleotide
gtgggcattgaagtgagcaagatttatcgg

SEQ ID NO: 122907 - DNA, 30 bp, Artificial Sequence
  Synthetic oligonucleotide
gcatgtaaaaagttgaacgcgcctactcgg

SEQ ID NO: 122908 - DNA, 30 bp, Artificial Sequence
  Synthetic oligonucleotide
ttatgttgcaggcttagtgcaaaacctcgg

SEQ ID NO: 122909 - DNA, 30 bp, Artificial Sequence
  Synthetic oligonucleotide
ggataggggtcgcccggggacacacctcgg

SEQ ID NO: 122910 - DNA, 30 bp, Artificial Sequence
  Synthetic oligonucleotide
cctaacctggatgaatcggtagcccctcgg

SEQ ID NO: 122911 - DNA, 30 bp, Artificial Sequence
  Synthetic oligonucleotide
tgagatgaggacgattacaggccgcctcgg

SEQ ID NO: 122912 - DNA, 30 bp, Artificial Sequence
  Synthetic oligonucleotide
atcaggattgtctcagacaatcgtcctcgg

SEQ ID NO: 122913 - DNA, 30 bp, Artificial Sequence
  Synthetic oligonucleotide
ggtttaggagatgaactaaagcaagctcgg

SEQ ID NO: 122914 - DNA, 30 bp, Artificial Sequence
  Synthetic oligonucleotide
caaagggtgtcgtgagaacggagcgctcgg

SEQ ID NO: 122915 - DNA, 30 bp, Artificial Sequence
  Synthetic oligonucleotide
ctgatcgtcacgaagagccagcaatctcgg

SEQ ID NO: 122916 - DNA, 30 bp, Artificial Sequence
  Synthetic oligonucleotide
cgccattgatgagtctcgagctcatctcgg

SEQ ID NO: 122917 - DNA, 30 bp, Artificial Sequence
  Synthetic oligonucleotide
tacttacgaaatacgctattgacgtctcgg

SEQ ID NO: 122918 - DNA, 30 bp, Artificial Sequence
  Synthetic oligonucleotide
agcgattaactaaacaggagtccgtctcgg

SEQ ID NO: 122919 - DNA, 30 bp, Artificial Sequence
  Synthetic oligonucleotide
gggtcaacgaatgctgcttgtaagagtcgg

SEQ ID NO: 122920 - DNA, 30 bp, Artificial Sequence
  Synthetic oligonucleotide
gtgaatgcgtggcaagacctcgggagtcgg

SEQ ID NO: 122921 - DNA, 30 bp, Artificial Sequence
  Synthetic oligonucleotide
ccgagaatcccatactgtcacagtagtcgg

SEQ ID NO: 122922 - DNA, 30 bp, Artificial Sequence
  Synthetic oligonucleotide
gataagagcccactagggccagcacgtcgg

SEQ ID NO: 122923 - DNA, 30 bp, Artificial Sequence
  Synthetic oligonucleotide
acaccactatgctcttccctggcacgtcgg

SEQ ID NO: 122924 - DNA, 30 bp, Artificial Sequence
  Synthetic oligonucleotide
gtcggcaattggtcacccgggtgacgtcgg

SEQ ID NO: 122925 - DNA, 30 bp, Artificial Sequence
  Synthetic oligonucleotide
ggtaactgggattacatccatccccgtcgg

SEQ ID NO: 122926 - DNA, 30 bp, Artificial Sequence
  Synthetic oligonucleotide
tacacgtatataaatgatggagagggtcgg

SEQ ID NO: 122927 - DNA, 31 bp, Artificial Sequence
  Synthetic oligonucleotide
taatcggggataaaagtaactgagtggtcgg

SEQ ID NO: 122928 - DNA, 30 bp, Artificial Sequence
  Synthetic oligonucleotide
ctgggaattgttggttataagggtggtcgg

SEQ ID NO: 122929 - DNA, 30 bp, Artificial Sequence
  Synthetic oligonucleotide
aaggaacctgggagatactacgcaattcgg

SEQ ID NO: 122930 - DNA, 30 bp, Artificial Sequence
  Synthetic oligonucleotide
cggctcagaccaggacactgggcaattcgg

SEQ ID NO: 122931 - DNA, 30 bp, Artificial Sequence
  Synthetic oligonucleotide
caacgaactaaatgatggcttgccattcgg

SEQ ID NO: 122932 - DNA, 30 bp, Artificial Sequence
  Synthetic oligonucleotide
acaggatatgcccatagacagcgcattcgg

SEQ ID NO: 122933 - DNA, 30 bp, Artificial Sequence
  Synthetic oligonucleotide
gataactcatgtcctgttgcgaatattcgg

SEQ ID NO: 122934 - DNA, 30 bp, Artificial Sequence
  Synthetic oligonucleotide
ctcatgactaaggactagtaaactattcgg

SEQ ID NO: 122935 - DNA, 30 bp, Artificial Sequence
  Synthetic oligonucleotide
ctacgcccaatcgaactgaaccaacttcgg

SEQ ID NO: 122936 - DNA, 30 bp, Artificial Sequence
  Synthetic oligonucleotide
caactcccatactttctggtcttacttcgg

SEQ ID NO: 122937 - DNA, 29 bp, Artificial Sequence
  Synthetic oligonucleotide
gagctgaaaggcatgaatatacagttcgg

SEQ ID NO: 122938 - DNA, 30 bp, Artificial Sequence
  Synthetic oligonucleotide
gaagacgattagctaggatgtcgagttcgg

SEQ ID NO: 122939 - DNA, 30 bp, Artificial Sequence
  Synthetic oligonucleotide
ggagtttcgtgaaggaacagtcatgttcgg

SEQ ID NO: 122940 - DNA, 30 bp, Artificial Sequence
  Synthetic oligonucleotide
actcacttgggcagaaggtcttttgttcgg

SEQ ID NO: 122941 - DNA, 30 bp, Artificial Sequence
  Synthetic oligonucleotide
ggtatggccttcagatgcttcacttttcgg

SEQ ID NO: 122942 - DNA, 30 bp, Artificial Sequence
  Synthetic oligonucleotide
gaagtcgtggaaccagtgtccatttttcgg

SEQ ID NO: 122943 - DNA, 30 bp, Artificial Sequence
  Synthetic oligonucleotide
agaaaaatcgtcgcagtggaagaaaaaggg

SEQ ID NO: 122944 - DNA, 30 bp, Artificial Sequence
  Synthetic oligonucleotide
ggtatagacctattcagtcgtccaaaaggg

SEQ ID NO: 122945 - DNA, 30 bp, Artificial Sequence
  Synthetic oligonucleotide
gatagggaagtcctccttagaaacaaaggg

SEQ ID NO: 122946 - DNA, 30 bp, Artificial Sequence
  Synthetic oligonucleotide
ctgtgctaattaggatatatacacaaaggg

SEQ ID NO: 122947 - DNA, 30 bp, Artificial Sequence
  Synthetic oligonucleotide
taatctgttaggactacgtgtgtgaaaggg

SEQ ID NO: 122948 - DNA, 30 bp, Artificial Sequence
  Synthetic oligonucleotide
gctatggcggagggccttctcactaaaggg

SEQ ID NO: 122949 - DNA, 30 bp, Artificial Sequence
  Synthetic oligonucleotide
gccggggtgacgatactcctaagtaaaggg

SEQ ID NO: 122950 - DNA, 30 bp, Artificial Sequence
  Synthetic oligonucleotide
taagccccgggcacgttaaacggtaaaggg

SEQ ID NO: 122951 - DNA, 30 bp, Artificial Sequence
  Synthetic oligonucleotide
gcgtagctatctttcactgtcggtaaaggg

SEQ ID NO: 122952 - DNA, 30 bp, Artificial Sequence
  Synthetic oligonucleotide
actgcttaacatggtaaacggccacaaggg

SEQ ID NO: 122953 - DNA, 30 bp, Artificial Sequence
  Synthetic oligonucleotide
gtgcgaacaattggaagaaaggaagaaggg

SEQ ID NO: 122954 - DNA, 30 bp, Artificial Sequence
  Synthetic oligonucleotide
agcacgtaatcgattatttgtgtagaaggg

SEQ ID NO: 122955 - DNA, 30 bp, Artificial Sequence
  Synthetic oligonucleotide
gagaacgcgtagtttgtagcggaggaaggg

SEQ ID NO: 122956 - DNA, 30 bp, Artificial Sequence
  Synthetic oligonucleotide
aaagtcatgaggattctctacccggaaggg

SEQ ID NO: 122957 - DNA, 30 bp, Artificial Sequence
  Synthetic oligonucleotide
aagtgatcaattggtatttagtatgaaggg

SEQ ID NO: 122958 - DNA, 30 bp, Artificial Sequence
  Synthetic oligonucleotide
gggccaagctcctttgaagaatctgaaggg

SEQ ID NO: 122959 - DNA, 30 bp, Artificial Sequence
  Synthetic oligonucleotide
tctcaaaggtattttccctcagggtaaggg

SEQ ID NO: 122960 - DNA, 30 bp, Artificial Sequence
  Synthetic oligonucleotide
aggcacataaagcatggtctggccacaggg

SEQ ID NO: 122961 - DNA, 30 bp, Artificial Sequence
  Synthetic oligonucleotide
actctgtagagcaccgcgagcctcacaggg

SEQ ID NO: 122962 - DNA, 29 bp, Artificial Sequence
  Synthetic oligonucleotide
gtgaagccttcttccacccccggacaggg

SEQ ID NO: 122963 - DNA, 30 bp, Artificial Sequence
  Synthetic oligonucleotide
actagttcagtatataggtgttcaccaggg

SEQ ID NO: 122964 - DNA, 30 bp, Artificial Sequence
  Synthetic oligonucleotide
cggaaagggtgaaggttcggcttaccaggg

SEQ ID NO: 122965 - DNA, 30 bp, Artificial Sequence
  Synthetic oligonucleotide
atgagggatgcatcgggcccgaattcaggg

SEQ ID NO: 122966 - DNA, 30 bp, Artificial Sequence
  Synthetic oligonucleotide
tgtagttacacacgggcattacgttcaggg

SEQ ID NO: 122967 - DNA, 30 bp, Artificial Sequence
  Synthetic oligonucleotide
atgtgcgacgtaaccataatgtcaagaggg

SEQ ID NO: 122968 - DNA, 30 bp, Artificial Sequence
  Synthetic oligonucleotide
ttgtggtacaagcttcgaagtcgaagaggg

SEQ ID NO: 122969 - DNA, 30 bp, Artificial Sequence
  Synthetic oligonucleotide
cactatatgaaaaaaaatatatgaagaggg

SEQ ID NO: 122970 - DNA, 30 bp, Artificial Sequence
  Synthetic oligonucleotide
taactaacaattgttatttccttcagaggg

SEQ ID NO: 122971 - DNA, 30 bp, Artificial Sequence
  Synthetic oligonucleotide
ctaccaccgctttcaagacagtatagaggg

SEQ ID NO: 122972 - DNA, 30 bp, Artificial Sequence
  Synthetic oligonucleotide
tccggggaaacttcatccctgactagaggg

SEQ ID NO: 122973 - DNA, 30 bp, Artificial Sequence
  Synthetic oligonucleotide
acggcataacatgaggaacggacacgaggg

SEQ ID NO: 122974 - DNA, 30 bp, Artificial Sequence
  Synthetic oligonucleotide
ggagaacggtcgctggtcagggatcgaggg

SEQ ID NO: 122975 - DNA, 30 bp, Artificial Sequence
  Synthetic oligonucleotide
gttggaatactcatcagtaaagcaggaggg

SEQ ID NO: 122976 - DNA, 30 bp, Artificial Sequence
  Synthetic oligonucleotide
gccagtttcgcctctcagaaccagggaggg

SEQ ID NO: 122977 - DNA, 30 bp, Artificial Sequence
  Synthetic oligonucleotide
gctcccgcgaagatgccccgttatggaggg

SEQ ID NO: 122978 - DNA, 30 bp, Artificial Sequence
  Synthetic oligonucleotide
tggccgtggcatagtacctcgcaatgaggg

SEQ ID NO: 122979 - DNA, 30 bp, Artificial Sequence
  Synthetic oligonucleotide
gtcaagctgctgcgacaacgctggtgaggg

SEQ ID NO: 122980 - DNA, 30 bp, Artificial Sequence
  Synthetic oligonucleotide
taggtatagacgtgaaacaagtgttgaggg

SEQ ID NO: 122981 - DNA, 30 bp, Artificial Sequence
  Synthetic oligonucleotide
tatccgcgaacgcgaaagcatgaaataggg

SEQ ID NO: 122982 - DNA, 30 bp, Artificial Sequence
  Synthetic oligonucleotide
cggtttggctataacttttaggtcataggg

SEQ ID NO: 122983 - DNA, 30 bp, Artificial Sequence
  Synthetic oligonucleotide
catgcgggggctaatgaataattcataggg

SEQ ID NO: 122984 - DNA, 30 bp, Artificial Sequence
  Synthetic oligonucleotide
agaccttcaacgtggttacgcatgataggg

SEQ ID NO: 122985 - DNA, 30 bp, Artificial Sequence
  Synthetic oligonucleotide
gtggaactgcctcgtgcaacaggtataggg

SEQ ID NO: 122986 - DNA, 30 bp, Artificial Sequence
  Synthetic oligonucleotide
acactcagcaatttgatttggaaactaggg

SEQ ID NO: 122987 - DNA, 30 bp, Artificial Sequence
  Synthetic oligonucleotide
ggatgacgtcgggtgggcaacagactaggg

SEQ ID NO: 122988 - DNA, 30 bp, Artificial Sequence
  Synthetic oligonucleotide
ctgtaatactttgggtggtagtgactaggg

SEQ ID NO: 122989 - DNA, 30 bp, Artificial Sequence
  Synthetic oligonucleotide
tcgcatcaggtcgacgtagggcatctaggg

SEQ ID NO: 122990 - DNA, 30 bp, Artificial Sequence
  Synthetic oligonucleotide
ctctggaacaaattgggtacatctctaggg

SEQ ID NO: 122991 - DNA, 30 bp, Artificial Sequence
  Synthetic oligonucleotide
agcacttacacatgcagattgtgggtaggg

SEQ ID NO: 122992 - DNA, 30 bp, Artificial Sequence
  Synthetic oligonucleotide
tgtttggcccttcacgataccaatgtaggg

SEQ ID NO: 122993 - DNA, 30 bp, Artificial Sequence
  Synthetic oligonucleotide
tatttacggactagcggatacattgtaggg

SEQ ID NO: 122994 - DNA, 30 bp, Artificial Sequence
  Synthetic oligonucleotide
ggtgcgtccccagttctagagattgtaggg

SEQ ID NO: 122995 - DNA, 30 bp, Artificial Sequence
  Synthetic oligonucleotide
gtcagcaaagccccgaaatttacgttaggg

SEQ ID NO: 122996 - DNA, 30 bp, Artificial Sequence
  Synthetic oligonucleotide
ctaatagaagaagcatacatagcgttaggg

SEQ ID NO: 122997 - DNA, 30 bp, Artificial Sequence
  Synthetic oligonucleotide
cgaatagaagtaaggctctttcctttaggg

SEQ ID NO: 122998 - DNA, 30 bp, Artificial Sequence
  Synthetic oligonucleotide
caaaagtccttcgcctggtagggaaacggg

SEQ ID NO: 122999 - DNA, 30 bp, Artificial Sequence
  Synthetic oligonucleotide
agcaaattcatctgtacccgcttcaacggg

SEQ ID NO: 123000 - DNA, 30 bp, Artificial Sequence
  Synthetic oligonucleotide
gtaacgggcgggaagcagaaggtccacggg

SEQ ID NO: 123001 - DNA, 30 bp, Artificial Sequence
  Synthetic oligonucleotide
gcgaggccattacagagtttagagcacggg

SEQ ID NO: 123002 - DNA, 30 bp, Artificial Sequence
  Synthetic oligonucleotide
gtggaggacaatcgagtctcgtaagacggg

SEQ ID NO: 123003 - DNA, 30 bp, Artificial Sequence
  Synthetic oligonucleotide
tacgaaatttattgatatattgaggacggg

SEQ ID NO: 123004 - DNA, 30 bp, Artificial Sequence
  Synthetic oligonucleotide
gttaatagcggggacaggtaatgggacggg

SEQ ID NO: 123005 - DNA, 30 bp, Artificial Sequence
  Synthetic oligonucleotide
ggaggaatggttcgcaacggaactgacggg

SEQ ID NO: 123006 - DNA, 30 bp, Artificial Sequence
  Synthetic oligonucleotide
agaaggaagctaaccagtatgggctacggg

SEQ ID NO: 123007 - DNA, 30 bp, Artificial Sequence
  Synthetic oligonucleotide
tccaactccgtgcatgaaaaggggaccggg

SEQ ID NO: 123008 - DNA, 30 bp, Artificial Sequence
  Synthetic oligonucleotide
gacaaccttaacatatgagctcagcccggg

SEQ ID NO: 123009 - DNA, 30 bp, Artificial Sequence
  Synthetic oligonucleotide
agggcgactaaacgtacatgagcagccggg

SEQ ID NO: 123010 - DNA, 30 bp, Artificial Sequence
  Synthetic oligonucleotide
tcattacgggaaagcgggctgatagccggg

SEQ ID NO: 123011 - DNA, 30 bp, Artificial Sequence
  Synthetic oligonucleotide
cttagatcgctcgcaattagcagcgccggg

SEQ ID NO: 123012 - DNA, 30 bp, Artificial Sequence
  Synthetic oligonucleotide
ctcgaatcgcgaatttcgaaataggccggg

SEQ ID NO: 123013 - DNA, 30 bp, Artificial Sequence
  Synthetic oligonucleotide
tgctgatcactactgagcgttttatccggg

SEQ ID NO: 123014 - DNA, 30 bp, Artificial Sequence
  Synthetic oligonucleotide
cgaccgggatgtggataggtgtttcgcggg

SEQ ID NO: 123015 - DNA, 30 bp, Artificial Sequence
  Synthetic oligonucleotide
acgggctgctagacctagtgttgaggcggg

SEQ ID NO: 123016 - DNA, 30 bp, Artificial Sequence
  Synthetic oligonucleotide
tgagaatctttataaggaggtacgggcggg

SEQ ID NO: 123017 - DNA, 30 bp, Artificial Sequence
  Synthetic oligonucleotide
aaccggtgttcagtcccgtattgatgcggg

SEQ ID NO: 123018 - DNA, 30 bp, Artificial Sequence
  Synthetic oligonucleotide
gatcctggttaacgttacaattattgcggg

SEQ ID NO: 123019 - DNA, 31 bp, Artificial Sequence
  Synthetic oligonucleotide
gcagaatgaattaggtaaacgccttatcggg

SEQ ID NO: 123020 - DNA, 30 bp, Artificial Sequence
  Synthetic oligonucleotide
taaaccccataggaccttctagttatcggg

SEQ ID NO: 123021 - DNA, 30 bp, Artificial Sequence
  Synthetic oligonucleotide
ggcgggcctgccgctgaataaaaactcggg

SEQ ID NO: 123022 - DNA, 30 bp, Artificial Sequence
  Synthetic oligonucleotide
caaaccccggacatatctagtaaactcggg

SEQ ID NO: 123023 - DNA, 30 bp, Artificial Sequence
  Synthetic oligonucleotide
ttcggacgctatcgatggcgattactcggg

SEQ ID NO: 123024 - DNA, 30 bp, Artificial Sequence
  Synthetic oligonucleotide
attgaattcagccggtattaggtgctcggg

SEQ ID NO: 123025 - DNA, 30 bp, Artificial Sequence
  Synthetic oligonucleotide
ggaaccctcgatgtctactgctacgtcggg

SEQ ID NO: 123026 - DNA, 30 bp, Artificial Sequence
  Synthetic oligonucleotide
ccaccgtaaggggcacctggtactgtcggg

SEQ ID NO: 123027 - DNA, 30 bp, Artificial Sequence
  Synthetic oligonucleotide
aagcagccagtatgcattaaaattgtcggg

SEQ ID NO: 123028 - DNA, 30 bp, Artificial Sequence
  Synthetic oligonucleotide
agcttcacataggtgggtcacctcttcggg

SEQ ID NO: 123029 - DNA, 30 bp, Artificial Sequence
  Synthetic oligonucleotide
cgctccttaactagccagtagtatttcggg

SEQ ID NO: 123030 - DNA, 30 bp, Artificial Sequence
  Synthetic oligonucleotide
tggccctgtggttagtagtctcaaaagggg

SEQ ID NO: 123031 - DNA, 30 bp, Artificial Sequence
  Synthetic oligonucleotide
catggataagcaggccgaacgtaaaagggg

SEQ ID NO: 123032 - DNA, 30 bp, Artificial Sequence
  Synthetic oligonucleotide
tggacgtggttatcacggagttaaaagggg

SEQ ID NO: 123033 - DNA, 30 bp, Artificial Sequence
  Synthetic oligonucleotide
cttttatgcatcaagtctggccgaaagggg

SEQ ID NO: 123034 - DNA, 30 bp, Artificial Sequence
  Synthetic oligonucleotide
ttctaggacataagtccgagacccaagggg

SEQ ID NO: 123035 - DNA, 30 bp, Artificial Sequence
  Synthetic oligonucleotide
catgaagggctctagcggctttataagggg

SEQ ID NO: 123036 - DNA, 30 bp, Artificial Sequence
  Synthetic oligonucleotide
gctggtcaaccgaggtattcaattaagggg

SEQ ID NO: 123037 - DNA, 30 bp, Artificial Sequence
  Synthetic oligonucleotide
aagaatggcggcgacgaattcagacagggg

SEQ ID NO: 123038 - DNA, 30 bp, Artificial Sequence
  Synthetic oligonucleotide
cggcgaagagctttgaggcgataccagggg

SEQ ID NO: 123039 - DNA, 30 bp, Artificial Sequence
  Synthetic oligonucleotide
caatgaacggcagtttatatgtagcagggg

SEQ ID NO: 123040 - DNA, 30 bp, Artificial Sequence
  Synthetic oligonucleotide
cagtgacagtctgatcttctgcggcagggg

SEQ ID NO: 123041 - DNA, 30 bp, Artificial Sequence
  Synthetic oligonucleotide
gagaaccgaaagcgaataaaaatgcagggg

SEQ ID NO: 123042 - DNA, 30 bp, Artificial Sequence
  Synthetic oligonucleotide
aatgagccgacccagcgcacagcggagggg

SEQ ID NO: 123043 - DNA, 30 bp, Artificial Sequence
  Synthetic oligonucleotide
cgatcggctacgaggaagtggaatgagggg

SEQ ID NO: 123044 - DNA, 30 bp, Artificial Sequence
  Synthetic oligonucleotide
tctccgaaaaatgtcctaagacgatagggg

SEQ ID NO: 123045 - DNA, 30 bp, Artificial Sequence
  Synthetic oligonucleotide
cattaggatcttattcactgaggatagggg

SEQ ID NO: 123046 - DNA, 30 bp, Artificial Sequence
  Synthetic oligonucleotide
aacgactcgcgtcaaaaaggctgctagggg

SEQ ID NO: 123047 - DNA, 30 bp, Artificial Sequence
  Synthetic oligonucleotide
atgttttagtggcgtcaatcagggtagggg

SEQ ID NO: 123048 - DNA, 30 bp, Artificial Sequence
  Synthetic oligonucleotide
cgtatatccggacccttggggaattagggg

SEQ ID NO: 123049 - DNA, 30 bp, Artificial Sequence
  Synthetic oligonucleotide
cacgggacatagtcttcaaagaaaacgggg

SEQ ID NO: 123050 - DNA, 30 bp, Artificial Sequence
  Synthetic oligonucleotide
ggtagtatctactcgtggaaatctacgggg

SEQ ID NO: 123051 - DNA, 30 bp, Artificial Sequence
  Synthetic oligonucleotide
gaactcaggagggtgacttgctcaccgggg

SEQ ID NO: 123052 - DNA, 30 bp, Artificial Sequence
  Synthetic oligonucleotide
cagattggggttcaaattacacacccgggg

SEQ ID NO: 123053 - DNA, 30 bp, Artificial Sequence
  Synthetic oligonucleotide
tgtcgtcctatagaccttattttcccgggg

SEQ ID NO: 123054 - DNA, 30 bp, Artificial Sequence
  Synthetic oligonucleotide
tattgagaacaaattcaaactttgccgggg

SEQ ID NO: 123055 - DNA, 30 bp, Artificial Sequence
  Synthetic oligonucleotide
ctgcggaattaatgactataagcagcgggg

SEQ ID NO: 123056 - DNA, 30 bp, Artificial Sequence
  Synthetic oligonucleotide
acgggagaggtaagtacggcgagagcgggg

SEQ ID NO: 123057 - DNA, 30 bp, Artificial Sequence
  Synthetic oligonucleotide
cagtacacatataacgcatcgagtgcgggg

SEQ ID NO: 123058 - DNA, 30 bp, Artificial Sequence
  Synthetic oligonucleotide
gtacaccgaaggtgcgccagagaatcgggg

SEQ ID NO: 123059 - DNA, 30 bp, Artificial Sequence
  Synthetic oligonucleotide
actgaactggtgacacgacctcactcgggg

SEQ ID NO: 123060 - DNA, 30 bp, Artificial Sequence
  Synthetic oligonucleotide
cagagtagcaaggaacacaaagcctcgggg

SEQ ID NO: 123061 - DNA, 30 bp, Artificial Sequence
  Synthetic oligonucleotide
actatttaggggagcgtaacgtgctcgggg

SEQ ID NO: 123062 - DNA, 30 bp, Artificial Sequence
  Synthetic oligonucleotide
gtcgtcgccggaaactctgaaaggtcgggg

SEQ ID NO: 123063 - DNA, 30 bp, Artificial Sequence
  Synthetic oligonucleotide
gaaggtactgccgacgatggtatgtcgggg

SEQ ID NO: 123064 - DNA, 30 bp, Artificial Sequence
  Synthetic oligonucleotide
aatcgatgttaacacaaagttgtgtcgggg

SEQ ID NO: 123065 - DNA, 30 bp, Artificial Sequence
  Synthetic oligonucleotide
aaggagttctgaagactgcagtcaaggggg

SEQ ID NO: 123066 - DNA, 30 bp, Artificial Sequence
  Synthetic oligonucleotide
accaaccatccgatatcgcgctacaggggg

SEQ ID NO: 123067 - DNA, 30 bp, Artificial Sequence
  Synthetic oligonucleotide
ccagagcttgcgtccggacggacgaggggg

SEQ ID NO: 123068 - DNA, 30 bp, Artificial Sequence
  Synthetic oligonucleotide
gggggcaagtaggaagactattataggggg

SEQ ID NO: 123069 - DNA, 30 bp, Artificial Sequence
  Synthetic oligonucleotide
ttggcgattgccagcgtaggttcgcggggg

SEQ ID NO: 123070 - DNA, 30 bp, Artificial Sequence
  Synthetic oligonucleotide
acgcaagtctggtaacaaccccaggggggg

SEQ ID NO: 123071 - DNA, 30 bp, Artificial Sequence
  Synthetic oligonucleotide
gttgcgtcactgtcacaggtttcggggggg

SEQ ID NO: 123072 - DNA, 30 bp, Artificial Sequence
  Synthetic oligonucleotide
ctcaatgagctattaaaagctggggggggg

SEQ ID NO: 123073 - DNA, 30 bp, Artificial Sequence
  Synthetic oligonucleotide
ggcaggatgtgaaaacagaagctatggggg

SEQ ID NO: 123074 - DNA, 30 bp, Artificial Sequence
  Synthetic oligonucleotide
gggtcagaagtcaggtttcaaaaaatgggg

SEQ ID NO: 123075 - DNA, 30 bp, Artificial Sequence
  Synthetic oligonucleotide
taagagtcgtccccctccgggacaatgggg

SEQ ID NO: 123076 - DNA, 30 bp, Artificial Sequence
  Synthetic oligonucleotide
gggcaagtcttgtgtagggcggccatgggg

SEQ ID NO: 123077 - DNA, 30 bp, Artificial Sequence
  Synthetic oligonucleotide
ccagacgggccgtagctactacggatgggg

SEQ ID NO: 123078 - DNA, 30 bp, Artificial Sequence
  Synthetic oligonucleotide
cggaaccctacgggcatcaaatctatgggg

SEQ ID NO: 123079 - DNA, 30 bp, Artificial Sequence
  Synthetic oligonucleotide
gcgccataagcggtagttacaatcgtgggg

SEQ ID NO: 123080 - DNA, 30 bp, Artificial Sequence
  Synthetic oligonucleotide
tcttagtggcatagctaggcgtgggtgggg

SEQ ID NO: 123081 - DNA, 30 bp, Artificial Sequence
  Synthetic oligonucleotide
gggtgacatattagacttcagtgtttgggg

SEQ ID NO: 123082 - DNA, 30 bp, Artificial Sequence
  Synthetic oligonucleotide
cgtgggtactgcatagcattacttttgggg

SEQ ID NO: 123083 - DNA, 30 bp, Artificial Sequence
  Synthetic oligonucleotide
tcgtactcaacgaggggctaaagacatggg

SEQ ID NO: 123084 - DNA, 30 bp, Artificial Sequence
  Synthetic oligonucleotide
ggtccaccagacaatggcgatgtacatggg

SEQ ID NO: 123085 - DNA, 30 bp, Artificial Sequence
  Synthetic oligonucleotide
taaaaatcgaatctgagttgagagcatggg

SEQ ID NO: 123086 - DNA, 30 bp, Artificial Sequence
  Synthetic oligonucleotide
taaatactcggctcgtaccttattcatggg

SEQ ID NO: 123087 - DNA, 30 bp, Artificial Sequence
  Synthetic oligonucleotide
cgagcaagatctttcaatacgtttcatggg

SEQ ID NO: 123088 - DNA, 30 bp, Artificial Sequence
  Synthetic oligonucleotide
gaggccctccggagaaaccgcaaagatggg

SEQ ID NO: 123089 - DNA, 30 bp, Artificial Sequence
  Synthetic oligonucleotide
tacatagcctccagaggttgtcaagatggg

SEQ ID NO: 123090 - DNA, 30 bp, Artificial Sequence
  Synthetic oligonucleotide
tgtccgggtgaatgtggaaccgacgatggg

SEQ ID NO: 123091 - DNA, 30 bp, Artificial Sequence
  Synthetic oligonucleotide
gggatcgggtgtgctgtgtgcgccgatggg

SEQ ID NO: 123092 - DNA, 31 bp, Artificial Sequence
  Synthetic oligonucleotide
aacggtcccgtgctaggatataacatatggg

SEQ ID NO: 123093 - DNA, 30 bp, Artificial Sequence
  Synthetic oligonucleotide
ccgggctctaccgttaggtctatctatggg

SEQ ID NO: 123094 - DNA, 30 bp, Artificial Sequence
  Synthetic oligonucleotide
cgctaggctaggtgggggaatcaaactggg

SEQ ID NO: 123095 - DNA, 30 bp, Artificial Sequence
  Synthetic oligonucleotide
ggtcgtggtagtgcggcgatgggcactggg

SEQ ID NO: 123096 - DNA, 30 bp, Artificial Sequence
  Synthetic oligonucleotide
aagctagtgtcttcaatacatgtacctggg

SEQ ID NO: 123097 - DNA, 30 bp, Artificial Sequence
  Synthetic oligonucleotide
agcgcatgaaactgcggagcatttgctggg

SEQ ID NO: 123098 - DNA, 30 bp, Artificial Sequence
  Synthetic oligonucleotide
gggtggatctcgcaactggaagaatctggg

SEQ ID NO: 123099 - DNA, 30 bp, Artificial Sequence
  Synthetic oligonucleotide
aatgcaaacaagcactaccaactatctggg

SEQ ID NO: 123100 - DNA, 30 bp, Artificial Sequence
  Synthetic oligonucleotide
gtgggagacctgcggtgatcacgttctggg

SEQ ID NO: 123101 - DNA, 30 bp, Artificial Sequence
  Synthetic oligonucleotide
tgttaattatagtagtaaggctcaagtggg

SEQ ID NO: 123102 - DNA, 30 bp, Artificial Sequence
  Synthetic oligonucleotide
agactgtaaaatgatcatctggacagtggg

SEQ ID NO: 123103 - DNA, 30 bp, Artificial Sequence
  Synthetic oligonucleotide
taataagtcaacaaaaattctatacgtggg

SEQ ID NO: 123104 - DNA, 30 bp, Artificial Sequence
  Synthetic oligonucleotide
tcgggtcgataatacgacctcctacgtggg

SEQ ID NO: 123105 - DNA, 30 bp, Artificial Sequence
  Synthetic oligonucleotide
atacaccgtgaatgcccaataacccgtggg

SEQ ID NO: 123106 - DNA, 30 bp, Artificial Sequence
  Synthetic oligonucleotide
ccagggctcaagagctggtcacagcgtggg

SEQ ID NO: 123107 - DNA, 30 bp, Artificial Sequence
  Synthetic oligonucleotide
aagcttcgtagctatgccgaggatcgtggg

SEQ ID NO: 123108 - DNA, 30 bp, Artificial Sequence
  Synthetic oligonucleotide
tgcctaaaactacgatcaatttgttgtggg

SEQ ID NO: 123109 - DNA, 30 bp, Artificial Sequence
  Synthetic oligonucleotide
ctcgttaaacgctatacgaacatttgtggg

SEQ ID NO: 123110 - DNA, 30 bp, Artificial Sequence
  Synthetic oligonucleotide
attactcgagcaaaggataaagagattggg

SEQ ID NO: 123111 - DNA, 30 bp, Artificial Sequence
  Synthetic oligonucleotide
ccgcctaacacgaccgttgaagatattggg

SEQ ID NO: 123112 - DNA, 30 bp, Artificial Sequence
  Synthetic oligonucleotide
cacgtggcattaggtatggacggtattggg

SEQ ID NO: 123113 - DNA, 30 bp, Artificial Sequence
  Synthetic oligonucleotide
agcccgtaactgaaacaggtttgtcttggg

SEQ ID NO: 123114 - DNA, 30 bp, Artificial Sequence
  Synthetic oligonucleotide
aagtacgtgtaaaagtctatttgagttggg

SEQ ID NO: 123115 - DNA, 30 bp, Artificial Sequence
  Synthetic oligonucleotide
acggtgtgcgaatgtaggtgagtttttggg

SEQ ID NO: 123116 - DNA, 30 bp, Artificial Sequence
  Synthetic oligonucleotide
tcggttcgatggcttgacaaagaaaaatgg

SEQ ID NO: 123117 - DNA, 30 bp, Artificial Sequence
  Synthetic oligonucleotide
gctccaatcctcaatgaaagggaaaaatgg

SEQ ID NO: 123118 - DNA, 30 bp, Artificial Sequence
  Synthetic oligonucleotide
agcgtacggcatgacgaatattgaaaatgg

SEQ ID NO: 123119 - DNA, 30 bp, Artificial Sequence
  Synthetic oligonucleotide
gagactggggacaaagcatggataaaatgg

SEQ ID NO: 123120 - DNA, 30 bp, Artificial Sequence
  Synthetic oligonucleotide
ttaaagctaagcgtcagtacaggtaaatgg

SEQ ID NO: 123121 - DNA, 30 bp, Artificial Sequence
  Synthetic oligonucleotide
taatcgtgagttaaggaaaatacacaatgg

SEQ ID NO: 123122 - DNA, 30 bp, Artificial Sequence
  Synthetic oligonucleotide
atactaaccttaggctgaagttgacaatgg

SEQ ID NO: 123123 - DNA, 30 bp, Artificial Sequence
  Synthetic oligonucleotide
ggtctagtctataagaagagacggcaatgg

SEQ ID NO: 123124 - DNA, 30 bp, Artificial Sequence
  Synthetic oligonucleotide
acatcacgtgtccggaggggacggcaatgg

SEQ ID NO: 123125 - DNA, 30 bp, Artificial Sequence
  Synthetic oligonucleotide
caaccttataaacagtacaggatgcaatgg

SEQ ID NO: 123126 - DNA, 30 bp, Artificial Sequence
  Synthetic oligonucleotide
agcttgataccatattgtggcttagaatgg

SEQ ID NO: 123127 - DNA, 30 bp, Artificial Sequence
  Synthetic oligonucleotide
ttacagtatcgcttcgcgtggtacgaatgg

SEQ ID NO: 123128 - DNA, 30 bp, Artificial Sequence
  Synthetic oligonucleotide
aagaattattgagaagccaggagcgaatgg

SEQ ID NO: 123129 - DNA, 30 bp, Artificial Sequence
  Synthetic oligonucleotide
taggcaagatgaggaagtggcgcggaatgg

SEQ ID NO: 123130 - DNA, 30 bp, Artificial Sequence
  Synthetic oligonucleotide
tgagttcgtactcaaatgccccgtgaatgg

SEQ ID NO: 123131 - DNA, 30 bp, Artificial Sequence
  Synthetic oligonucleotide
tgggcgttaatgcaccttcagtcgtaatgg

SEQ ID NO: 123132 - DNA, 30 bp, Artificial Sequence
  Synthetic oligonucleotide
tccccccaagggcatatgaatgaaacatgg

SEQ ID NO: 123133 - DNA, 30 bp, Artificial Sequence
  Synthetic oligonucleotide
agagtacactcgggcatgcacggcacatgg

SEQ ID NO: 123134 - DNA, 30 bp, Artificial Sequence
  Synthetic oligonucleotide
ctatggagaacggttctaattctgacatgg

SEQ ID NO: 123135 - DNA, 30 bp, Artificial Sequence
  Synthetic oligonucleotide
aagaaagagcacaagttatacaaaccatgg

SEQ ID NO: 123136 - DNA, 30 bp, Artificial Sequence
  Synthetic oligonucleotide
gggctaaggcgggtagtctagtgaccatgg

SEQ ID NO: 123137 - DNA, 30 bp, Artificial Sequence
  Synthetic oligonucleotide
gcttgtgcattgctcaattctagcccatgg

SEQ ID NO: 123138 - DNA, 26 bp, Artificial Sequence
  Synthetic oligonucleotide
tatccggagacagtagtatcccatgg

SEQ ID NO: 123139 - DNA, 30 bp, Artificial Sequence
  Synthetic oligonucleotide
gctcaacttgcatatgaaacatgcgcatgg

SEQ ID NO: 123140 - DNA, 30 bp, Artificial Sequence
  Synthetic oligonucleotide
gatgatagagacataaggatgagggcatgg

SEQ ID NO: 123141 - DNA, 30 bp, Artificial Sequence
  Synthetic oligonucleotide
ttatacaaaggagggtatatggtggcatgg

SEQ ID NO: 123142 - DNA, 30 bp, Artificial Sequence
  Synthetic oligonucleotide
ggaaacaacgtggcattttccgtatcatgg

SEQ ID NO: 123143 - DNA, 30 bp, Artificial Sequence
  Synthetic oligonucleotide
tctcggtgataactttagtcaccctcatgg

SEQ ID NO: 123144 - DNA, 30 bp, Artificial Sequence
  Synthetic oligonucleotide
gacggagcgaagtgcttgctgtagtcatgg

SEQ ID NO: 123145 - DNA, 30 bp, Artificial Sequence
  Synthetic oligonucleotide
caccaaggtcacggctaatccagttcatgg

SEQ ID NO: 123146 - DNA, 30 bp, Artificial Sequence
  Synthetic oligonucleotide
ctgactcatcacaaaagggcccgttcatgg

SEQ ID NO: 123147 - DNA, 30 bp, Artificial Sequence
  Synthetic oligonucleotide
gctgaataccgaaactaagcgtcaagatgg

SEQ ID NO: 123148 - DNA, 30 bp, Artificial Sequence
  Synthetic oligonucleotide
agcattgtatatgaccaaatggccagatgg

SEQ ID NO: 123149 - DNA, 30 bp, Artificial Sequence
  Synthetic oligonucleotide
aacccttgcagtgggaaagatagcagatgg

SEQ ID NO: 123150 - DNA, 30 bp, Artificial Sequence
  Synthetic oligonucleotide
gcggctaacatgtacagcgtccgcagatgg

SEQ ID NO: 123151 - DNA, 30 bp, Artificial Sequence
  Synthetic oligonucleotide
tagagagaagggagttggcgtggcagatgg

SEQ ID NO: 123152 - DNA, 30 bp, Artificial Sequence
  Synthetic oligonucleotide
aagcattatatcgtacacatgtgtagatgg

SEQ ID NO: 123153 - DNA, 30 bp, Artificial Sequence
  Synthetic oligonucleotide
gggacagattgaaggctgtaatttagatgg

SEQ ID NO: 123154 - DNA, 30 bp, Artificial Sequence
  Synthetic oligonucleotide
agaagtcgcgatcaagcctgacgaggatgg

SEQ ID NO: 123155 - DNA, 30 bp, Artificial Sequence
  Synthetic oligonucleotide
cggccagcgcgggtttgtacgggtggatgg

SEQ ID NO: 123156 - DNA, 30 bp, Artificial Sequence
  Synthetic oligonucleotide
actgtccggagtgaggacccagggtgatgg

SEQ ID NO: 123157 - DNA, 30 bp, Artificial Sequence
  Synthetic oligonucleotide
gtaacgggcatagttcgtggagggtgatgg

SEQ ID NO: 123158 - DNA, 30 bp, Artificial Sequence
  Synthetic oligonucleotide
aaggttagggcatcgcgtggggtgtgatgg

SEQ ID NO: 123159 - DNA, 30 bp, Artificial Sequence
  Synthetic oligonucleotide
gttgaaaatcggtcctgacttgaagtatgg

SEQ ID NO: 123160 - DNA, 30 bp, Artificial Sequence
  Synthetic oligonucleotide
gtagagtggcgataatcccacacagtatgg

SEQ ID NO: 123161 - DNA, 30 bp, Artificial Sequence
  Synthetic oligonucleotide
cggatcaccttgagcagattactagtatgg

SEQ ID NO: 123162 - DNA, 30 bp, Artificial Sequence
  Synthetic oligonucleotide
cagtggattctaggtaaccttgtagtatgg

SEQ ID NO: 123163 - DNA, 30 bp, Artificial Sequence
  Synthetic oligonucleotide
cggaccgccatgttgagtatagtggtatgg

SEQ ID NO: 123164 - DNA, 30 bp, Artificial Sequence
  Synthetic oligonucleotide
aaggctatcgaattgcaaaaccgtgtatgg

SEQ ID NO: 123165 - DNA, 30 bp, Artificial Sequence
  Synthetic oligonucleotide
acatgacataggtcacgggattttgtatgg

SEQ ID NO: 123166 - DNA, 30 bp, Artificial Sequence
  Synthetic oligonucleotide
caggcaattcgtgacaatattagcttatgg

SEQ ID NO: 123167 - DNA, 30 bp, Artificial Sequence
  Synthetic oligonucleotide
aacaaggttcagactgcggtacggttatgg

SEQ ID NO: 123168 - DNA, 30 bp, Artificial Sequence
  Synthetic oligonucleotide
aggcaatagtgatgcgatcactaaaactgg

SEQ ID NO: 123169 - DNA, 30 bp, Artificial Sequence
  Synthetic oligonucleotide
gtcatgggcctcaccccaatgagaaactgg

SEQ ID NO: 123170 - DNA, 30 bp, Artificial Sequence
  Synthetic oligonucleotide
aaagttgtcaagatagggaagaggaactgg

SEQ ID NO: 123171 - DNA, 30 bp, Artificial Sequence
  Synthetic oligonucleotide
tggggcattcttgagggattcatgaactgg

SEQ ID NO: 123172 - DNA, 30 bp, Artificial Sequence
  Synthetic oligonucleotide
cagcagggggccagagaacttcctcactgg

SEQ ID NO: 123173 - DNA, 30 bp, Artificial Sequence
  Synthetic oligonucleotide
gctcgccatcctcaatgaaatacagactgg

SEQ ID NO: 123174 - DNA, 30 bp, Artificial Sequence
  Synthetic oligonucleotide
ggcacgcaagcctattcgaccaatgactgg

SEQ ID NO: 123175 - DNA, 30 bp, Artificial Sequence
  Synthetic oligonucleotide
ggaacagacgggtaaaggaccaagtactgg

SEQ ID NO: 123176 - DNA, 30 bp, Artificial Sequence
  Synthetic oligonucleotide
acgggaaagtccctaaaacacttttactgg

SEQ ID NO: 123177 - DNA, 30 bp, Artificial Sequence
  Synthetic oligonucleotide
cttggtgttagaacagtagtaatgacctgg

SEQ ID NO: 123178 - DNA, 30 bp, Artificial Sequence
  Synthetic oligonucleotide
ggaaaacgtagcgcttcacgttaagcctgg

SEQ ID NO: 123179 - DNA, 30 bp, Artificial Sequence
  Synthetic oligonucleotide
ctggggggatttatgagatcttacgcctgg

SEQ ID NO: 123180 - DNA, 31 bp, Artificial Sequence
  Synthetic oligonucleotide
tcatccttaaccaggtgtaagtatggcctgg

SEQ ID NO: 123181 - DNA, 30 bp, Artificial Sequence
  Synthetic oligonucleotide
gcaaatgtgatatgcttggggaaatcctgg

SEQ ID NO: 123182 - DNA, 30 bp, Artificial Sequence
  Synthetic oligonucleotide
ggaaggtccctatagctgctcccatcctgg

SEQ ID NO: 123183 - DNA, 30 bp, Artificial Sequence
  Synthetic oligonucleotide
agaccgcgagttccgtgaccgatatcctgg

SEQ ID NO: 123184 - DNA, 30 bp, Artificial Sequence
  Synthetic oligonucleotide
aacctcgtttgtgcacgaatgaagtcctgg

SEQ ID NO: 123185 - DNA, 30 bp, Artificial Sequence
  Synthetic oligonucleotide
cagaacgtagggttaacctgttaaagctgg

SEQ ID NO: 123186 - DNA, 30 bp, Artificial Sequence
  Synthetic oligonucleotide
catgacctatggcctgatattataagctgg

SEQ ID NO: 123187 - DNA, 30 bp, Artificial Sequence
  Synthetic oligonucleotide
tgtccaacgtgctacatgttgctgagctgg

SEQ ID NO: 123188 - DNA, 30 bp, Artificial Sequence
  Synthetic oligonucleotide
cttcatcctaaaaggcgcccatcaggctgg

SEQ ID NO: 123189 - DNA, 30 bp, Artificial Sequence
  Synthetic oligonucleotide
cgatacgcgttaagaaggtaagtaggctgg

SEQ ID NO: 123190 - DNA, 30 bp, Artificial Sequence
  Synthetic oligonucleotide
tagtctgtttggcacactactcatggctgg

SEQ ID NO: 123191 - DNA, 30 bp, Artificial Sequence
  Synthetic oligonucleotide
aactaaatacttcaagagttttgctgctgg

SEQ ID NO: 123192 - DNA, 30 bp, Artificial Sequence
  Synthetic oligonucleotide
ggatcttgcaattagaaactagaaatctgg

SEQ ID NO: 123193 - DNA, 30 bp, Artificial Sequence
  Synthetic oligonucleotide
caggacacgttccgagtgagcaacatctgg

SEQ ID NO: 123194 - DNA, 30 bp, Artificial Sequence
  Synthetic oligonucleotide
cacttacggatgagtaaagatggcatctgg

SEQ ID NO: 123195 - DNA, 30 bp, Artificial Sequence
  Synthetic oligonucleotide
gcgttactgccgaattaatttgtcatctgg

SEQ ID NO: 123196 - DNA, 30 bp, Artificial Sequence
  Synthetic oligonucleotide
cataataacaccgacacgacttagatctgg

SEQ ID NO: 123197 - DNA, 30 bp, Artificial Sequence
  Synthetic oligonucleotide
gaagtcgagtgccagacaggccggatctgg

SEQ ID NO: 123198 - DNA, 30 bp, Artificial Sequence
  Synthetic oligonucleotide
tcatcctgcgtcagccctctactactctgg

SEQ ID NO: 123199 - DNA, 30 bp, Artificial Sequence
  Synthetic oligonucleotide
gtacacatgatcatcggaaccgatctctgg

SEQ ID NO: 123200 - DNA, 30 bp, Artificial Sequence
  Synthetic oligonucleotide
atgctctacggttagcaagctcgcgtctgg

SEQ ID NO: 123201 - DNA, 30 bp, Artificial Sequence
  Synthetic oligonucleotide
tccgaatgtggtagtattggacgattctgg

SEQ ID NO: 123202 - DNA, 30 bp, Artificial Sequence
  Synthetic oligonucleotide
cactccccaccgggatgccgagagttctgg

SEQ ID NO: 123203 - DNA, 30 bp, Artificial Sequence
  Synthetic oligonucleotide
agatctctcgatcatggttatgacaagtgg

SEQ ID NO: 123204 - DNA, 30 bp, Artificial Sequence
  Synthetic oligonucleotide
tacatttgtgaacaggaccattctaagtgg

SEQ ID NO: 123205 - DNA, 30 bp, Artificial Sequence
  Synthetic oligonucleotide
ctcaataggcctggtggtgagtgtaagtgg

SEQ ID NO: 123206 - DNA, 30 bp, Artificial Sequence
  Synthetic oligonucleotide
agtaatcacaatacttatatttaacagtgg

SEQ ID NO: 123207 - DNA, 30 bp, Artificial Sequence
  Synthetic oligonucleotide
gcaagcccgagggtgtatctccgccagtgg

SEQ ID NO: 123208 - DNA, 30 bp, Artificial Sequence
  Synthetic oligonucleotide
aaaccaatgatgtagggacgtctagagtgg

SEQ ID NO: 123209 - DNA, 30 bp, Artificial Sequence
  Synthetic oligonucleotide
agttgaatgatggtggggccgcacgagtgg

SEQ ID NO: 123210 - DNA, 30 bp, Artificial Sequence
  Synthetic oligonucleotide
caacatatgagagattcggacattgagtgg

SEQ ID NO: 123211 - DNA, 30 bp, Artificial Sequence
  Synthetic oligonucleotide
aaaagcaaagtattttaagggtcatagtgg

SEQ ID NO: 123212 - DNA, 30 bp, Artificial Sequence
  Synthetic oligonucleotide
tggtggaatggaattgcgaagcgatagtgg

SEQ ID NO: 123213 - DNA, 30 bp, Artificial Sequence
  Synthetic oligonucleotide
gcgagtaacaaatgtgagaggagctagtgg

SEQ ID NO: 123214 - DNA, 30 bp, Artificial Sequence
  Synthetic oligonucleotide
ggagtggttcacatatggtagcgttagtgg

SEQ ID NO: 123215 - DNA, 30 bp, Artificial Sequence
  Synthetic oligonucleotide
ttgtgaggccgaaacgatacgcgcacgtgg

SEQ ID NO: 123216 - DNA, 30 bp, Artificial Sequence
  Synthetic oligonucleotide
cacgaagtgggaacacccaatggcacgtgg

SEQ ID NO: 123217 - DNA, 30 bp, Artificial Sequence
  Synthetic oligonucleotide
catctgtggctactagttacaaagacgtgg

SEQ ID NO: 123218 - DNA, 30 bp, Artificial Sequence
  Synthetic oligonucleotide
atcggggccagactcgataatacggcgtgg

SEQ ID NO: 123219 - DNA, 30 bp, Artificial Sequence
  Synthetic oligonucleotide
gtcgagggaaaaaggcggcacatggcgtgg

SEQ ID NO: 123220 - DNA, 30 bp, Artificial Sequence
  Synthetic oligonucleotide
cgcccttaaggccggcaaatgcgatcgtgg

SEQ ID NO: 123221 - DNA, 30 bp, Artificial Sequence
  Synthetic oligonucleotide
ttgttagggagcctgagacttagttcgtgg

SEQ ID NO: 123222 - DNA, 30 bp, Artificial Sequence
  Synthetic oligonucleotide
agtgacattagtagtacagcccgttcgtgg

SEQ ID NO: 123223 - DNA, 30 bp, Artificial Sequence
  Synthetic oligonucleotide
accaacgtcactccccagcgcccaaggtgg

SEQ ID NO: 123224 - DNA, 30 bp, Artificial Sequence
  Synthetic oligonucleotide
cgtgcggatcggttccaataatagaggtgg

SEQ ID NO: 123225 - DNA, 30 bp, Artificial Sequence
  Synthetic oligonucleotide
taaggcaataatgaagactctaggaggtgg

SEQ ID NO: 123226 - DNA, 30 bp, Artificial Sequence
  Synthetic oligonucleotide
ggaattggtgttgactcaagcctgaggtgg

SEQ ID NO: 123227 - DNA, 30 bp, Artificial Sequence
  Synthetic oligonucleotide
gtgagacacccgtcacaaaatgttcggtgg

SEQ ID NO: 123228 - DNA, 30 bp, Artificial Sequence
  Synthetic oligonucleotide
cttgatatcagacaacgtgcgcttgggtgg

SEQ ID NO: 123229 - DNA, 30 bp, Artificial Sequence
  Synthetic oligonucleotide
aaggagagcctagtgtttgttctatggtgg

SEQ ID NO: 123230 - DNA, 30 bp, Artificial Sequence
  Synthetic oligonucleotide
aagtaactgagctggggatatacctggtgg

SEQ ID NO: 123231 - DNA, 30 bp, Artificial Sequence
  Synthetic oligonucleotide
gatgcaaatacagttgtactcggctggtgg

SEQ ID NO: 123232 - DNA, 30 bp, Artificial Sequence
  Synthetic oligonucleotide
tccggcatgggaacccgcaattaaatgtgg

SEQ ID NO: 123233 - DNA, 30 bp, Artificial Sequence
  Synthetic oligonucleotide
ccgttgcttaacactctgaaactcatgtgg

SEQ ID NO: 123234 - DNA, 30 bp, Artificial Sequence
  Synthetic oligonucleotide
tgaacctcgataaggatgccgccgatgtgg

SEQ ID NO: 123235 - DNA, 30 bp, Artificial Sequence
  Synthetic oligonucleotide
tgatctattgcacgtaaacatcggatgtgg

SEQ ID NO: 123236 - DNA, 30 bp, Artificial Sequence
  Synthetic oligonucleotide
gacagtgagcggcaaaccctaactatgtgg

SEQ ID NO: 123237 - DNA, 30 bp, Artificial Sequence
  Synthetic oligonucleotide
gcactcgggtgtcaaaacgcgcttatgtgg

SEQ ID NO: 123238 - DNA, 30 bp, Artificial Sequence
  Synthetic oligonucleotide
gcacacaatgttaaagtctgcaaactgtgg

SEQ ID NO: 123239 - DNA, 30 bp, Artificial Sequence
  Synthetic oligonucleotide
atcgcggggttaggcaaagatgtgctgtgg

SEQ ID NO: 123240 - DNA, 30 bp, Artificial Sequence
  Synthetic oligonucleotide
tgaaaggacgcggaaatgaataatctgtgg

SEQ ID NO: 123241 - DNA, 30 bp, Artificial Sequence
  Synthetic oligonucleotide
aagatgggtaataggcatcggactctgtgg

SEQ ID NO: 123242 - DNA, 30 bp, Artificial Sequence
  Synthetic oligonucleotide
tcgcctgatggcaaccagaatactctgtgg

SEQ ID NO: 123243 - DNA, 30 bp, Artificial Sequence
  Synthetic oligonucleotide
atacaacggcgaggagtaaacgacttgtgg

SEQ ID NO: 123244 - DNA, 29 bp, Artificial Sequence
  Synthetic oligonucleotide
gttaagggatcgacacatataccttgtgg

SEQ ID NO: 123245 - DNA, 30 bp, Artificial Sequence
  Synthetic oligonucleotide
gggctagtgattcatcttagacccttgtgg

SEQ ID NO: 123246 - DNA, 30 bp, Artificial Sequence
  Synthetic oligonucleotide
aatgtggggtagcatcgttgtgcgttgtgg

SEQ ID NO: 123247 - DNA, 30 bp, Artificial Sequence
  Synthetic oligonucleotide
ataaagcacgatctatgatcaaccaattgg

SEQ ID NO: 123248 - DNA, 30 bp, Artificial Sequence
  Synthetic oligonucleotide
ttcagccgcggttaccctaaccgtaattgg

SEQ ID NO: 123249 - DNA, 30 bp, Artificial Sequence
  Synthetic oligonucleotide
gaagagcgtcacggtcggtcaggtaattgg

SEQ ID NO: 123250 - DNA, 30 bp, Artificial Sequence
  Synthetic oligonucleotide
ttaaggaacaacctgatggcgaaagattgg

SEQ ID NO: 123251 - DNA, 30 bp, Artificial Sequence
  Synthetic oligonucleotide
atgtacgctgaacgtccacgcaatgattgg

SEQ ID NO: 123252 - DNA, 30 bp, Artificial Sequence
  Synthetic oligonucleotide
acaatattagtgtcaatccattgcacttgg

SEQ ID NO: 123253 - DNA, 30 bp, Artificial Sequence
  Synthetic oligonucleotide
cacaggatcaggataccatatactacttgg

SEQ ID NO: 123254 - DNA, 30 bp, Artificial Sequence
  Synthetic oligonucleotide
gcctaacattcggtcgtttgacacccttgg

SEQ ID NO: 123255 - DNA, 30 bp, Artificial Sequence
  Synthetic oligonucleotide
ccaggacattgttacggggaatatccttgg

SEQ ID NO: 123256 - DNA, 30 bp, Artificial Sequence
  Synthetic oligonucleotide
tgacctcatgatgtgccgaattatccttgg

SEQ ID NO: 123257 - DNA, 30 bp, Artificial Sequence
  Synthetic oligonucleotide
ctagagggatagtctcgactaccagcttgg

SEQ ID NO: 123258 - DNA, 30 bp, Artificial Sequence
  Synthetic oligonucleotide
acatactgatggtgcgtagcaagcgcttgg

SEQ ID NO: 123259 - DNA, 30 bp, Artificial Sequence
  Synthetic oligonucleotide
taccgatacgcaaagcgatacgatgcttgg

SEQ ID NO: 123260 - DNA, 30 bp, Artificial Sequence
  Synthetic oligonucleotide
ttaaggtcgcatggaaccagcagctcttgg

SEQ ID NO: 123261 - DNA, 30 bp, Artificial Sequence
  Synthetic oligonucleotide
gactgagggtcaagcacctccagaagttgg

SEQ ID NO: 123262 - DNA, 30 bp, Artificial Sequence
  Synthetic oligonucleotide
acgggtgagcgggtatagccgttgagttgg

SEQ ID NO: 123263 - DNA, 30 bp, Artificial Sequence
  Synthetic oligonucleotide
cggacggatcatgtgggagccaatagttgg

SEQ ID NO: 123264 - DNA, 30 bp, Artificial Sequence
  Synthetic oligonucleotide
acatgtgttgactttaattagtatcgttgg

SEQ ID NO: 123265 - DNA, 30 bp, Artificial Sequence
  Synthetic oligonucleotide
taacattctgaagttgataggggtcgttgg

SEQ ID NO: 123266 - DNA, 30 bp, Artificial Sequence
  Synthetic oligonucleotide
acgcggccgggaagagtcgtgggaggttgg

SEQ ID NO: 123267 - DNA, 30 bp, Artificial Sequence
  Synthetic oligonucleotide
agcattcgtgtggccgggggatgaggttgg

SEQ ID NO: 123268 - DNA, 30 bp, Artificial Sequence
  Synthetic oligonucleotide
ccagctaatctcgaaatccggtgcggttgg

SEQ ID NO: 123269 - DNA, 30 bp, Artificial Sequence
  Synthetic oligonucleotide
cggtcccatcctaatgtgtgctatggttgg

SEQ ID NO: 123270 - DNA, 30 bp, Artificial Sequence
  Synthetic oligonucleotide
tgggacaggtacctcgcgagagtgtgttgg

SEQ ID NO: 123271 - DNA, 30 bp, Artificial Sequence
  Synthetic oligonucleotide
atgcataagtagatatatcgcgccatttgg

SEQ ID NO: 123272 - DNA, 30 bp, Artificial Sequence
  Synthetic oligonucleotide
cgtggatagaacctaaatgtcttcatttgg

SEQ ID NO: 123273 - DNA, 30 bp, Artificial Sequence
  Synthetic oligonucleotide
agcgggtctagagtctcgagcttactttgg

SEQ ID NO: 123274 - DNA, 30 bp, Artificial Sequence
  Synthetic oligonucleotide
tctatcccgtaacggaaatttcaagtttgg

SEQ ID NO: 123275 - DNA, 30 bp, Artificial Sequence
  Synthetic oligonucleotide
gggacgtggtgttggtttcgtacagtttgg

SEQ ID NO: 123276 - DNA, 30 bp, Artificial Sequence
  Synthetic oligonucleotide
gcgaactataagtggaggccgttagtttgg

SEQ ID NO: 123277 - DNA, 30 bp, Artificial Sequence
  Synthetic oligonucleotide
gaatacggcacaggaaagtcatccgtttgg

SEQ ID NO: 123278 - DNA, 30 bp, Artificial Sequence
  Synthetic oligonucleotide
aggtagctagtctagacataccaggtttgg

SEQ ID NO: 123279 - DNA, 30 bp, Artificial Sequence
  Synthetic oligonucleotide
actaggtccgtttaccgctggacggtttgg

SEQ ID NO: 123280 - DNA, 30 bp, Artificial Sequence
  Synthetic oligonucleotide
aacgaataagacagaacgtttcgggtttgg

SEQ ID NO: 123281 - DNA, 30 bp, Artificial Sequence
  Synthetic oligonucleotide
tcaagcggcagctagcccccccatttttgg

SEQ ID NO: 123282 - DNA, 30 bp, Artificial Sequence
  Synthetic oligonucleotide
cagaacgatactctgctcattgctttttgg

SEQ ID NO: 123283 - DNA, 30 bp, Artificial Sequence
  Synthetic oligonucleotide
gtccattggtagcaaccagatatcaaaatg

SEQ ID NO: 123284 - DNA, 30 bp, Artificial Sequence
  Synthetic oligonucleotide
cgctaatagttagatgagacttagaaaatg

SEQ ID NO: 123285 - DNA, 30 bp, Artificial Sequence
  Synthetic oligonucleotide
tccatacgtgaggggcccagcacgaaaatg

SEQ ID NO: 123286 - DNA, 30 bp, Artificial Sequence
  Synthetic oligonucleotide
tctaacatggtttatatggggttgaaaatg

SEQ ID NO: 123287 - DNA, 30 bp, Artificial Sequence
  Synthetic oligonucleotide
cagctacggaatgaatagaaattccaaatg

SEQ ID NO: 123288 - DNA, 30 bp, Artificial Sequence
  Synthetic oligonucleotide
accagacttccataacggtgcaatcaaatg

SEQ ID NO: 123289 - DNA, 30 bp, Artificial Sequence
  Synthetic oligonucleotide
cagggtgtaaagtaatttcagtttcaaatg

SEQ ID NO: 123290 - DNA, 30 bp, Artificial Sequence
  Synthetic oligonucleotide
agcaaaggtcgtcacttattaccagaaatg

SEQ ID NO: 123291 - DNA, 30 bp, Artificial Sequence
  Synthetic oligonucleotide
cttggtcagtggcgaaaacagccagaaatg

SEQ ID NO: 123292 - DNA, 30 bp, Artificial Sequence
  Synthetic oligonucleotide
tacgttctgggcctctaacatcgggaaatg

SEQ ID NO: 123293 - DNA, 30 bp, Artificial Sequence
  Synthetic oligonucleotide
ccataattgctcgaagaatgtggtgaaatg

SEQ ID NO: 123294 - DNA, 30 bp, Artificial Sequence
  Synthetic oligonucleotide
cattcggggacgggacacaaccgctaaatg

SEQ ID NO: 123295 - DNA, 30 bp, Artificial Sequence
  Synthetic oligonucleotide
tcgagtactgcggcagtggtactctaaatg

SEQ ID NO: 123296 - DNA, 30 bp, Artificial Sequence
  Synthetic oligonucleotide
tggaggcataatgctggtaaacattaaatg

SEQ ID NO: 123297 - DNA, 30 bp, Artificial Sequence
  Synthetic oligonucleotide
aataaccgagtccgcaagactagttaaatg

SEQ ID NO: 123298 - DNA, 30 bp, Artificial Sequence
  Synthetic oligonucleotide
tcgcctcgacatcagggaacatgaacaatg

SEQ ID NO: 123299 - DNA, 31 bp, Artificial Sequence
  Synthetic oligonucleotide
gggtcaatgacgatattagtgtaggacaatg

SEQ ID NO: 123300 - DNA, 30 bp, Artificial Sequence
  Synthetic oligonucleotide
ttgatataatggataggggatataccaatg

SEQ ID NO: 123301 - DNA, 30 bp, Artificial Sequence
  Synthetic oligonucleotide
tagccggccggactctaaacgctaccaatg

SEQ ID NO: 123302 - DNA, 30 bp, Artificial Sequence
  Synthetic oligonucleotide
tagagctggctaacccacgcacggccaatg

SEQ ID NO: 123303 - DNA, 31 bp, Artificial Sequence
  Synthetic oligonucleotide
gggtttgcgcttcgcacgattagggccaatg

SEQ ID NO: 123304 - DNA, 30 bp, Artificial Sequence
  Synthetic oligonucleotide
cgcgtgactatcagctgacgaatgccaatg

SEQ ID NO: 123305 - DNA, 30 bp, Artificial Sequence
  Synthetic oligonucleotide
tgtcgacaatcggcgtatgtgtctccaatg

SEQ ID NO: 123306 - DNA, 30 bp, Artificial Sequence
  Synthetic oligonucleotide
caagattcgtcggtgcgacgaatagcaatg

SEQ ID NO: 123307 - DNA, 30 bp, Artificial Sequence
  Synthetic oligonucleotide
aagtatccgacggattttcgttgtgcaatg

SEQ ID NO: 123308 - DNA, 30 bp, Artificial Sequence
  Synthetic oligonucleotide
ttatgcgttgtaagcccgatgggatcaatg

SEQ ID NO: 123309 - DNA, 30 bp, Artificial Sequence
  Synthetic oligonucleotide
cccttccatcaacgggaaacaacctcaatg

SEQ ID NO: 123310 - DNA, 30 bp, Artificial Sequence
  Synthetic oligonucleotide
tatgttgaaacggcatacatagcctcaatg

SEQ ID NO: 123311 - DNA, 30 bp, Artificial Sequence
  Synthetic oligonucleotide
aaggtttcgcatgttcaatcgatgtcaatg

SEQ ID NO: 123312 - DNA, 30 bp, Artificial Sequence
  Synthetic oligonucleotide
accggattcaaacctgcttatgtaagaatg

SEQ ID NO: 123313 - DNA, 30 bp, Artificial Sequence
  Synthetic oligonucleotide
tctgagaaggaactcggggaatccagaatg

SEQ ID NO: 123314 - DNA, 30 bp, Artificial Sequence
  Synthetic oligonucleotide
gccaagatgcgctagcatgactctagaatg

SEQ ID NO: 123315 - DNA, 30 bp, Artificial Sequence
  Synthetic oligonucleotide
agcgggaggggaccaccagaggttagaatg

SEQ ID NO: 123316 - DNA, 30 bp, Artificial Sequence
  Synthetic oligonucleotide
caacgtcgacggggggatacacgaggaatg

SEQ ID NO: 123317 - DNA, 30 bp, Artificial Sequence
  Synthetic oligonucleotide
caacatcatgtactaagtgttcacggaatg

SEQ ID NO: 123318 - DNA, 30 bp, Artificial Sequence
  Synthetic oligonucleotide
aggaacactgtagttaggtcaatcggaatg

SEQ ID NO: 123319 - DNA, 30 bp, Artificial Sequence
  Synthetic oligonucleotide
tgcggctcgactggctgagagtatggaatg

SEQ ID NO: 123320 - DNA, 30 bp, Artificial Sequence
  Synthetic oligonucleotide
gacggcgagccgcgcgacgtgtatggaatg

SEQ ID NO: 123321 - DNA, 30 bp, Artificial Sequence
  Synthetic oligonucleotide
tgctggcggaaaccggctaaagaatgaatg

SEQ ID NO: 123322 - DNA, 30 bp, Artificial Sequence
  Synthetic oligonucleotide
accgcagccaagcaccaatgcagatgaatg

SEQ ID NO: 123323 - DNA, 30 bp, Artificial Sequence
  Synthetic oligonucleotide
aatgcgctaaggtatgccatagactgaatg

SEQ ID NO: 123324 - DNA, 30 bp, Artificial Sequence
  Synthetic oligonucleotide
ttgacgtaccgaaggggactggactgaatg

SEQ ID NO: 123325 - DNA, 30 bp, Artificial Sequence
  Synthetic oligonucleotide
gtcctacggggactagtgtatcggtgaatg

SEQ ID NO: 123326 - DNA, 30 bp, Artificial Sequence
  Synthetic oligonucleotide
actagaccagttgtagtgtactgttgaatg

SEQ ID NO: 123327 - DNA, 30 bp, Artificial Sequence
  Synthetic oligonucleotide
tgcttatgggtaccgagcgaggaaataatg

SEQ ID NO: 123328 - DNA, 30 bp, Artificial Sequence
  Synthetic oligonucleotide
taagtaatgggggcaaacgggtaaataatg

SEQ ID NO: 123329 - DNA, 30 bp, Artificial Sequence
  Synthetic oligonucleotide
gctttggaacgaattagtggttaaataatg

SEQ ID NO: 123330 - DNA, 30 bp, Artificial Sequence
  Synthetic oligonucleotide
accgtactagttagtccttagctaataatg

SEQ ID NO: 123331 - DNA, 31 bp, Artificial Sequence
  Synthetic oligonucleotide
atcctgcagcccgtatgaggtctgcataatg

SEQ ID NO: 123332 - DNA, 30 bp, Artificial Sequence
  Synthetic oligonucleotide
cggtccgattcagagtaatctaagataatg

SEQ ID NO: 123333 - DNA, 30 bp, Artificial Sequence
  Synthetic oligonucleotide
cgaaccctagagtaaggggcactgataatg

SEQ ID NO: 123334 - DNA, 30 bp, Artificial Sequence
  Synthetic oligonucleotide
ggtatctacgggctattcggaaatataatg

SEQ ID NO: 123335 - DNA, 30 bp, Artificial Sequence
  Synthetic oligonucleotide
taagggtcattgaagtgtgcataactaatg

SEQ ID NO: 123336 - DNA, 30 bp, Artificial Sequence
  Synthetic oligonucleotide
cccctcactatggatcgggcaaagctaatg

SEQ ID NO: 123337 - DNA, 30 bp, Artificial Sequence
  Synthetic oligonucleotide
tatggataggactaaacatttaggctaatg

SEQ ID NO: 123338 - DNA, 30 bp, Artificial Sequence
  Synthetic oligonucleotide
ctgaggcgtcgctggaacggtagcgtaatg

SEQ ID NO: 123339 - DNA, 30 bp, Artificial Sequence
  Synthetic oligonucleotide
cttaaaccatatcacccggactgtgtaatg

SEQ ID NO: 123340 - DNA, 30 bp, Artificial Sequence
  Synthetic oligonucleotide
gagaaaatctataaaaatactccattaatg

SEQ ID NO: 123341 - DNA, 30 bp, Artificial Sequence
  Synthetic oligonucleotide
aaaagaaacaagttacggactcgcttaatg

SEQ ID NO: 123342 - DNA, 30 bp, Artificial Sequence
  Synthetic oligonucleotide
taagggcaggtaatggctcggaagttaatg

SEQ ID NO: 123343 - DNA, 30 bp, Artificial Sequence
  Synthetic oligonucleotide
ccaggaatgggtccggctaaaacaaacatg

SEQ ID NO: 123344 - DNA, 30 bp, Artificial Sequence
  Synthetic oligonucleotide
cgaaaagtagttacagaaattccaaacatg

SEQ ID NO: 123345 - DNA, 30 bp, Artificial Sequence
  Synthetic oligonucleotide
gctgtatcacgataaacaatcaacaacatg

SEQ ID NO: 123346 - DNA, 30 bp, Artificial Sequence
  Synthetic oligonucleotide
acaattcgagataaacgaattgtcaacatg

SEQ ID NO: 123347 - DNA, 30 bp, Artificial Sequence
  Synthetic oligonucleotide
taccgatcatgagaatacggttcgaacatg

SEQ ID NO: 123348 - DNA, 30 bp, Artificial Sequence
  Synthetic oligonucleotide
taaactccgatgtttccaagagagcacatg

SEQ ID NO: 123349 - DNA, 30 bp, Artificial Sequence
  Synthetic oligonucleotide
gaagtcaagatcaaaatttcatcgcacatg

SEQ ID NO: 123350 - DNA, 30 bp, Artificial Sequence
  Synthetic oligonucleotide
ggtaccacagcaattttgagacaagacatg

SEQ ID NO: 123351 - DNA, 30 bp, Artificial Sequence
  Synthetic oligonucleotide
accacggtgaggcgagtttaaccagacatg

SEQ ID NO: 123352 - DNA, 30 bp, Artificial Sequence
  Synthetic oligonucleotide
aggaaccatctgtacggcagatcagacatg

SEQ ID NO: 123353 - DNA, 30 bp, Artificial Sequence
  Synthetic oligonucleotide
tcaatgctggctttttcccggcacgacatg

SEQ ID NO: 123354 - DNA, 30 bp, Artificial Sequence
  Synthetic oligonucleotide
aaaatggcgggttgaactcattaggacatg

SEQ ID NO: 123355 - DNA, 30 bp, Artificial Sequence
  Synthetic oligonucleotide
cctccgagccagcaaggactatactacatg

SEQ ID NO: 123356 - DNA, 30 bp, Artificial Sequence
  Synthetic oligonucleotide
tgtaccccaacgcggaagaaaggaaccatg

SEQ ID NO: 123357 - DNA, 30 bp, Artificial Sequence
  Synthetic oligonucleotide
gcagaacaattaggatcggctaagaccatg

SEQ ID NO: 123358 - DNA, 30 bp, Artificial Sequence
  Synthetic oligonucleotide
agattgccacaattcgagagccggaccatg

SEQ ID NO: 123359 - DNA, 30 bp, Artificial Sequence
  Synthetic oligonucleotide
ctagactggagtgtggaaatggataccatg

SEQ ID NO: 123360 - DNA, 30 bp, Artificial Sequence
  Synthetic oligonucleotide
tgagcttctcagccaaccccgtgacccatg

SEQ ID NO: 123361 - DNA, 30 bp, Artificial Sequence
  Synthetic oligonucleotide
ggaactaatctagcgcccgaagtacccatg

SEQ ID NO: 123362 - DNA, 30 bp, Artificial Sequence
  Synthetic oligonucleotide
aatcgcatctaattcataaatgtgcccatg

SEQ ID NO: 123363 - DNA, 30 bp, Artificial Sequence
  Synthetic oligonucleotide
ccacggtccgtctagagttagcgggccatg

SEQ ID NO: 123364 - DNA, 30 bp, Artificial Sequence
  Synthetic oligonucleotide
attcgtgcgaggcggttcacccttgccatg

SEQ ID NO: 123365 - DNA, 30 bp, Artificial Sequence
  Synthetic oligonucleotide
ggagtcaagtcgcaactaaaaaaatccatg

SEQ ID NO: 123366 - DNA, 30 bp, Artificial Sequence
  Synthetic oligonucleotide
atgcagccgcctagcaggcaggagtccatg

SEQ ID NO: 123367 - DNA, 30 bp, Artificial Sequence
  Synthetic oligonucleotide
tgctctacttgatgaatgagaaggtccatg

SEQ ID NO: 123368 - DNA, 30 bp, Artificial Sequence
  Synthetic oligonucleotide
tgacagcaaaagtggttcgctgcttccatg

SEQ ID NO: 123369 - DNA, 30 bp, Artificial Sequence
  Synthetic oligonucleotide
aacaattaagtcgatccatcgtggagcatg

SEQ ID NO: 123370 - DNA, 30 bp, Artificial Sequence
  Synthetic oligonucleotide
tctgtactaaattgcaaacccgctagcatg

SEQ ID NO: 123371 - DNA, 30 bp, Artificial Sequence
  Synthetic oligonucleotide
cagtcactcacgtactcgatttgtagcatg

SEQ ID NO: 123372 - DNA, 30 bp, Artificial Sequence
  Synthetic oligonucleotide
acttaatgattcatcagaatgccgcgcatg

SEQ ID NO: 123373 - DNA, 30 bp, Artificial Sequence
  Synthetic oligonucleotide
ggatttggaaaccgtctcaaagggcgcatg

SEQ ID NO: 123374 - DNA, 30 bp, Artificial Sequence
  Synthetic oligonucleotide
ggtctgtcagattctccagcaacgggcatg

SEQ ID NO: 123375 - DNA, 30 bp, Artificial Sequence
  Synthetic oligonucleotide
taattggaacagggtactacagaatgcatg

SEQ ID NO: 123376 - DNA, 30 bp, Artificial Sequence
  Synthetic oligonucleotide
cacaatgcactactaaccctgtactgcatg

SEQ ID NO: 123377 - DNA, 30 bp, Artificial Sequence
  Synthetic oligonucleotide
acgcgtgggtatggttcattctcgtgcatg

SEQ ID NO: 123378 - DNA, 30 bp, Artificial Sequence
  Synthetic oligonucleotide
acctccagccttgcaaaacccttgtgcatg

SEQ ID NO: 123379 - DNA, 30 bp, Artificial Sequence
  Synthetic oligonucleotide
caagcctgcgccgagaagccagaaatcatg

SEQ ID NO: 123380 - DNA, 30 bp, Artificial Sequence
  Synthetic oligonucleotide
ctcccaccgctagaggattaaggaatcatg

SEQ ID NO: 123381 - DNA, 30 bp, Artificial Sequence
  Synthetic oligonucleotide
tgttaaagaatctccgtactgtagatcatg

SEQ ID NO: 123382 - DNA, 30 bp, Artificial Sequence
  Synthetic oligonucleotide
tgagttatcgctatcgaaaagccgatcatg

SEQ ID NO: 123383 - DNA, 30 bp, Artificial Sequence
  Synthetic oligonucleotide
agcgacggggcgtcctcgtccgatatcatg

SEQ ID NO: 123384 - DNA, 30 bp, Artificial Sequence
  Synthetic oligonucleotide
cttggaggcttcgtgcaccagggtctcatg

SEQ ID NO: 123385 - DNA, 30 bp, Artificial Sequence
  Synthetic oligonucleotide
gtgatccgtaaacaataacgaaaggtcatg

SEQ ID NO: 123386 - DNA, 30 bp, Artificial Sequence
  Synthetic oligonucleotide
gagaatggggccaaaggaacgcgattcatg

SEQ ID NO: 123387 - DNA, 30 bp, Artificial Sequence
  Synthetic oligonucleotide
ccgtcatcttcggtatagtctctattcatg

SEQ ID NO: 123388 - DNA, 30 bp, Artificial Sequence
  Synthetic oligonucleotide
acatagagtccggactgaacaagcttcatg

SEQ ID NO: 123389 - DNA, 30 bp, Artificial Sequence
  Synthetic oligonucleotide
ggaacgcaggtaccggcgttggagttcatg

SEQ ID NO: 123390 - DNA, 30 bp, Artificial Sequence
  Synthetic oligonucleotide
tgtgcgtcaactgaataatgatggttcatg

SEQ ID NO: 123391 - DNA, 30 bp, Artificial Sequence
  Synthetic oligonucleotide
atgatcctgaagaatgaaattgttttcatg

SEQ ID NO: 123392 - DNA, 30 bp, Artificial Sequence
  Synthetic oligonucleotide
ctggacataggatcaagcagttcgaagatg

SEQ ID NO: 123393 - DNA, 30 bp, Artificial Sequence
  Synthetic oligonucleotide
gacctacgcttaccgctcggttaacagatg

SEQ ID NO: 123394 - DNA, 30 bp, Artificial Sequence
  Synthetic oligonucleotide
cttcgttggatgtaaaaggctcgccagatg

SEQ ID NO: 123395 - DNA, 30 bp, Artificial Sequence
  Synthetic oligonucleotide
gagggcatactcgggcatggcacgcagatg

SEQ ID NO: 123396 - DNA, 30 bp, Artificial Sequence
  Synthetic oligonucleotide
gtggcaaacagcttaaggtacggtcagatg

SEQ ID NO: 123397 - DNA, 30 bp, Artificial Sequence
  Synthetic oligonucleotide
aaggtttgatggcaaattccaggagagatg

SEQ ID NO: 123398 - DNA, 30 bp, Artificial Sequence
  Synthetic oligonucleotide
atcgccggacgtaagtgaccaccggagatg

SEQ ID NO: 123399 - DNA, 30 bp, Artificial Sequence
  Synthetic oligonucleotide
ggcgctaagatagaccctcgggtatagatg

SEQ ID NO: 123400 - DNA, 30 bp, Artificial Sequence
  Synthetic oligonucleotide
agatgtgacgacggtcctttcctctagatg

SEQ ID NO: 123401 - DNA, 30 bp, Artificial Sequence
  Synthetic oligonucleotide
cgggccacgtggactagaattttctagatg

SEQ ID NO: 123402 - DNA, 31 bp, Artificial Sequence
  Synthetic oligonucleotide
cagccgctttgtgcatgtaaaagggtagatg

SEQ ID NO: 123403 - DNA, 30 bp, Artificial Sequence
  Synthetic oligonucleotide
taaccgggggattcgaaaattaaaacgatg

SEQ ID NO: 123404 - DNA, 30 bp, Artificial Sequence
  Synthetic oligonucleotide
gccgccgttaaacacatcaattaaacgatg

SEQ ID NO: 123405 - DNA, 31 bp, Artificial Sequence
  Synthetic oligonucleotide
agaggtgtataatacacatgtcagaacgatg

SEQ ID NO: 123406 - DNA, 30 bp, Artificial Sequence
  Synthetic oligonucleotide
taatctggcgcgtaaaaccgactcacgatg

SEQ ID NO: 123407 - DNA, 30 bp, Artificial Sequence
  Synthetic oligonucleotide
ccacgtgtcggtataggcggctttacgatg

SEQ ID NO: 123408 - DNA, 30 bp, Artificial Sequence
  Synthetic oligonucleotide
tggaaatcggcgatcatcagacatccgatg

SEQ ID NO: 123409 - DNA, 30 bp, Artificial Sequence
  Synthetic oligonucleotide
cactcgataaaattcgtcatacgtccgatg

SEQ ID NO: 123410 - DNA, 30 bp, Artificial Sequence
  Synthetic oligonucleotide
ctccttgcgtatggcatttagtaagcgatg

SEQ ID NO: 123411 - DNA, 30 bp, Artificial Sequence
  Synthetic oligonucleotide
ggttggtggtcatgagctgtaaatgcgatg

SEQ ID NO: 123412 - DNA, 30 bp, Artificial Sequence
  Synthetic oligonucleotide
taccaagaataattggataacacgtcgatg

SEQ ID NO: 123413 - DNA, 30 bp, Artificial Sequence
  Synthetic oligonucleotide
acagtcgcaactaagtcatacgaaaggatg

SEQ ID NO: 123414 - DNA, 30 bp, Artificial Sequence
  Synthetic oligonucleotide
cttctaattgtcgggctccaaccaaggatg

SEQ ID NO: 123415 - DNA, 30 bp, Artificial Sequence
  Synthetic oligonucleotide
tgcaagaagggtcacacctctgataggatg

SEQ ID NO: 123416 - DNA, 30 bp, Artificial Sequence
  Synthetic oligonucleotide
gaatcatactcgaaggggacctctaggatg

SEQ ID NO: 123417 - DNA, 30 bp, Artificial Sequence
  Synthetic oligonucleotide
ggatagaggcccctccactatcaagggatg

SEQ ID NO: 123418 - DNA, 30 bp, Artificial Sequence
  Synthetic oligonucleotide
gtaatgaacgggccataccgagcagggatg

SEQ ID NO: 123419 - DNA, 30 bp, Artificial Sequence
  Synthetic oligonucleotide
cctgcacggtactgtttttaacgagggatg

SEQ ID NO: 123420 - DNA, 30 bp, Artificial Sequence
  Synthetic oligonucleotide
cttagaccttaagtcgggtgtcgggggatg

SEQ ID NO: 123421 - DNA, 30 bp, Artificial Sequence
  Synthetic oligonucleotide
acttccacagtagggcgagagagtgggatg

SEQ ID NO: 123422 - DNA, 30 bp, Artificial Sequence
  Synthetic oligonucleotide
agacatttgagagctgctcgacgatggatg

SEQ ID NO: 123423 - DNA, 30 bp, Artificial Sequence
  Synthetic oligonucleotide
caaggtcatctacatggtgcttcctggatg

SEQ ID NO: 123424 - DNA, 30 bp, Artificial Sequence
  Synthetic oligonucleotide
ataaggcaagccctaagttggatctggatg

SEQ ID NO: 123425 - DNA, 30 bp, Artificial Sequence
  Synthetic oligonucleotide
aatagacgggggtagtgggcgaagtggatg

SEQ ID NO: 123426 - DNA, 30 bp, Artificial Sequence
  Synthetic oligonucleotide
tcaccctcgacgagtggtcaaccttggatg

SEQ ID NO: 123427 - DNA, 30 bp, Artificial Sequence
  Synthetic oligonucleotide
ggtattcatatgggtaaatggcgaatgatg

SEQ ID NO: 123428 - DNA, 30 bp, Artificial Sequence
  Synthetic oligonucleotide
tgcgcgggtaagggttttaatttaatgatg

SEQ ID NO: 123429 - DNA, 30 bp, Artificial Sequence
  Synthetic oligonucleotide
atccccacgggtgtgatactggcgatgatg

SEQ ID NO: 123430 - DNA, 30 bp, Artificial Sequence
  Synthetic oligonucleotide
ggtctagctactgtcgacaacatgatgatg

SEQ ID NO: 123431 - DNA, 30 bp, Artificial Sequence
  Synthetic oligonucleotide
ccgtttatgagggaccttaggcgtatgatg

SEQ ID NO: 123432 - DNA, 30 bp, Artificial Sequence
  Synthetic oligonucleotide
ctgagcaacctttcatgatctaagctgatg

SEQ ID NO: 123433 - DNA, 30 bp, Artificial Sequence
  Synthetic oligonucleotide
accgcagggagctacgctagagggctgatg

SEQ ID NO: 123434 - DNA, 30 bp, Artificial Sequence
  Synthetic oligonucleotide
gtaagcgggtttcgctgggacatgctgatg

SEQ ID NO: 123435 - DNA, 30 bp, Artificial Sequence
  Synthetic oligonucleotide
cgaatggagaaagtgcaagttagtctgatg

SEQ ID NO: 123436 - DNA, 30 bp, Artificial Sequence
  Synthetic oligonucleotide
ggggccttagtacaccttaaataagtgatg

SEQ ID NO: 123437 - DNA, 30 bp, Artificial Sequence
  Synthetic oligonucleotide
cctttcatcggcaggccaggacccgtgatg

SEQ ID NO: 123438 - DNA, 30 bp, Artificial Sequence
  Synthetic oligonucleotide
tgaatcagagattaaagactgatcaatatg

SEQ ID NO: 123439 - DNA, 30 bp, Artificial Sequence
  Synthetic oligonucleotide
cttagtaagggtgcctgggcggtgaatatg

SEQ ID NO: 123440 - DNA, 30 bp, Artificial Sequence
  Synthetic oligonucleotide
gccaagggcttccgacttgccgttaatatg

SEQ ID NO: 123441 - DNA, 30 bp, Artificial Sequence
  Synthetic oligonucleotide
aattaaaaatacgcctacctcgtacatatg

SEQ ID NO: 123442 - DNA, 30 bp, Artificial Sequence
  Synthetic oligonucleotide
agtggatccgtgcaagaaatacgtcatatg

SEQ ID NO: 123443 - DNA, 30 bp, Artificial Sequence
  Synthetic oligonucleotide
ccttgaggatcgatattaatccttcatatg

SEQ ID NO: 123444 - DNA, 30 bp, Artificial Sequence
  Synthetic oligonucleotide
gagacagcgtgattgttttgcgttcatatg

SEQ ID NO: 123445 - DNA, 30 bp, Artificial Sequence
  Synthetic oligonucleotide
atggaccattccaggatcgaacaagatatg

SEQ ID NO: 123446 - DNA, 30 bp, Artificial Sequence
  Synthetic oligonucleotide
aggccgatttctctgcgcatgtcagatatg

SEQ ID NO: 123447 - DNA, 30 bp, Artificial Sequence
  Synthetic oligonucleotide
agcatggacacaacgtcaggcagatatatg

SEQ ID NO: 123448 - DNA, 30 bp, Artificial Sequence
  Synthetic oligonucleotide
ggcattgaggcggactgacagtgatatatg

SEQ ID NO: 123449 - DNA, 30 bp, Artificial Sequence
  Synthetic oligonucleotide
acgcaaagacttactgttaggaagtatatg

SEQ ID NO: 123450 - DNA, 30 bp, Artificial Sequence
  Synthetic oligonucleotide
tcgagtagtgtaggagcaccacattatatg

SEQ ID NO: 123451 - DNA, 30 bp, Artificial Sequence
  Synthetic oligonucleotide
acgccttaacgacgagtgggtgaaactatg

SEQ ID NO: 123452 - DNA, 30 bp, Artificial Sequence
  Synthetic oligonucleotide
ggtcttaaaaatcagcggctcgacactatg

SEQ ID NO: 123453 - DNA, 30 bp, Artificial Sequence
  Synthetic oligonucleotide
atagcctggccataggcccgagccactatg

SEQ ID NO: 123454 - DNA, 30 bp, Artificial Sequence
  Synthetic oligonucleotide
agctgtctgaatcggaaccattagactatg

SEQ ID NO: 123455 - DNA, 30 bp, Artificial Sequence
  Synthetic oligonucleotide
gatgaccatctcgtgagcggaaggactatg

SEQ ID NO: 123456 - DNA, 30 bp, Artificial Sequence
  Synthetic oligonucleotide
tgagaagagagttattcggaaaaccctatg

SEQ ID NO: 123457 - DNA, 30 bp, Artificial Sequence
  Synthetic oligonucleotide
ttgacatgaattatatgcgacactcctatg

SEQ ID NO: 123458 - DNA, 30 bp, Artificial Sequence
  Synthetic oligonucleotide
agggtattacgaaggtgtcggtacgctatg

SEQ ID NO: 123459 - DNA, 30 bp, Artificial Sequence
  Synthetic oligonucleotide
agaaggtagaaagatatattctaggctatg

SEQ ID NO: 123460 - DNA, 30 bp, Artificial Sequence
  Synthetic oligonucleotide
cgacacgcaagtactgcaacctcatctatg

SEQ ID NO: 123461 - DNA, 30 bp, Artificial Sequence
  Synthetic oligonucleotide
gggcggaagtggcgaaggcgcgactctatg

SEQ ID NO: 123462 - DNA, 30 bp, Artificial Sequence
  Synthetic oligonucleotide
tacgggaacgtcaacccgttgtgctctatg

SEQ ID NO: 123463 - DNA, 30 bp, Artificial Sequence
  Synthetic oligonucleotide
acctggaatgttagaaggggagcgtctatg

SEQ ID NO: 123464 - DNA, 30 bp, Artificial Sequence
  Synthetic oligonucleotide
ttacacagtcgcaaaaccactttgtctatg

SEQ ID NO: 123465 - DNA, 30 bp, Artificial Sequence
  Synthetic oligonucleotide
ggcgctcataagcgttaatagaaaagtatg

SEQ ID NO: 123466 - DNA, 30 bp, Artificial Sequence
  Synthetic oligonucleotide
tatggagtctatcctgcaggatgacgtatg

SEQ ID NO: 123467 - DNA, 30 bp, Artificial Sequence
  Synthetic oligonucleotide
ctcggaatgtctggaaggggggctcgtatg

SEQ ID NO: 123468 - DNA, 30 bp, Artificial Sequence
  Synthetic oligonucleotide
cacgccctagcatgaggggagattcgtatg

SEQ ID NO: 123469 - DNA, 30 bp, Artificial Sequence
  Synthetic oligonucleotide
gtatgggctccgtgtttgtgcacaggtatg

SEQ ID NO: 123470 - DNA, 30 bp, Artificial Sequence
  Synthetic oligonucleotide
agaaataggaacgtggaacccgcaggtatg

SEQ ID NO: 123471 - DNA, 30 bp, Artificial Sequence
  Synthetic oligonucleotide
cagtaagacaactatgatacctacggtatg

SEQ ID NO: 123472 - DNA, 30 bp, Artificial Sequence
  Synthetic oligonucleotide
gcgcccgtggttacaagtgaatgctgtatg

SEQ ID NO: 123473 - DNA, 30 bp, Artificial Sequence
  Synthetic oligonucleotide
tgatgaataaaactacaacctctctgtatg

SEQ ID NO: 123474 - DNA, 30 bp, Artificial Sequence
  Synthetic oligonucleotide
tgcgcacagaaggggacttgggtctgtatg

SEQ ID NO: 123475 - DNA, 30 bp, Artificial Sequence
  Synthetic oligonucleotide
gtgtaatcaacttagctgtccagcattatg

SEQ ID NO: 123476 - DNA, 30 bp, Artificial Sequence
  Synthetic oligonucleotide
cttctatcatacctattactcgcacttatg

SEQ ID NO: 123477 - DNA, 30 bp, Artificial Sequence
  Synthetic oligonucleotide
agttggagaaatccacaaaattcacttatg

SEQ ID NO: 123478 - DNA, 30 bp, Artificial Sequence
  Synthetic oligonucleotide
ggcgtatctgcccccgtagaagtccttatg

SEQ ID NO: 123479 - DNA, 30 bp, Artificial Sequence
  Synthetic oligonucleotide
ggaaatgcaggagtttttagttagcttatg

SEQ ID NO: 123480 - DNA, 30 bp, Artificial Sequence
  Synthetic oligonucleotide
taggtaattaacggcatgtaaccgcttatg

SEQ ID NO: 123481 - DNA, 30 bp, Artificial Sequence
  Synthetic oligonucleotide
ggcaatgtaagtcccgtaatcccgcttatg

SEQ ID NO: 123482 - DNA, 30 bp, Artificial Sequence
  Synthetic oligonucleotide
tcaagtaggaagtgagtaagggggcttatg

SEQ ID NO: 123483 - DNA, 30 bp, Artificial Sequence
  Synthetic oligonucleotide
taagacgtcaattgtgataactggcttatg

SEQ ID NO: 123484 - DNA, 30 bp, Artificial Sequence
  Synthetic oligonucleotide
ggtccgggagaccaggatgactttcttatg

SEQ ID NO: 123485 - DNA, 30 bp, Artificial Sequence
  Synthetic oligonucleotide
gtgctacgttctgctgccgggccagttatg

SEQ ID NO: 123486 - DNA, 30 bp, Artificial Sequence
  Synthetic oligonucleotide
ggcgtgggattccccgtgttaagggttatg

SEQ ID NO: 123487 - DNA, 30 bp, Artificial Sequence
  Synthetic oligonucleotide
tctggggtgcatggcgaaaattatgttatg

SEQ ID NO: 123488 - DNA, 30 bp, Artificial Sequence
  Synthetic oligonucleotide
ccggctgtagaaacgattgaatggtttatg

SEQ ID NO: 123489 - DNA, 30 bp, Artificial Sequence
  Synthetic oligonucleotide
cagacacaagaataggtaccatggtttatg

SEQ ID NO: 123490 - DNA, 30 bp, Artificial Sequence
  Synthetic oligonucleotide
aatccatcatttgggaggaactggtttatg

SEQ ID NO: 123491 - DNA, 30 bp, Artificial Sequence
  Synthetic oligonucleotide
tgtcgataagggcgttacgtaatgtttatg

SEQ ID NO: 123492 - DNA, 30 bp, Artificial Sequence
  Synthetic oligonucleotide
ggacgtaatccttgcccggagagttttatg

SEQ ID NO: 123493 - DNA, 30 bp, Artificial Sequence
  Synthetic oligonucleotide
tccggttgggggaactgcccactttttatg

SEQ ID NO: 123494 - DNA, 30 bp, Artificial Sequence
  Synthetic oligonucleotide
tagaggaatttgggacctgctctcaaactg

SEQ ID NO: 123495 - DNA, 30 bp, Artificial Sequence
  Synthetic oligonucleotide
ggcatcgacgctttacgacatgcgaaactg

SEQ ID NO: 123496 - DNA, 30 bp, Artificial Sequence
  Synthetic oligonucleotide
acaatgatcgcagagtgaagttcgcaactg

SEQ ID NO: 123497 - DNA, 29 bp, Artificial Sequence
  Synthetic oligonucleotide
ttaaaagcgagagcttagttgaagaactg

SEQ ID NO: 123498 - DNA, 30 bp, Artificial Sequence
  Synthetic oligonucleotide
gaagccgcgtgatggccgaaaccggaactg

SEQ ID NO: 123499 - DNA, 30 bp, Artificial Sequence
  Synthetic oligonucleotide
aagccctttgtcagccgataacgggaactg

SEQ ID NO: 123500 - DNA, 30 bp, Artificial Sequence
  Synthetic oligonucleotide
agtctcaacataccataccctcgataactg

SEQ ID NO: 123501 - DNA, 30 bp, Artificial Sequence
  Synthetic oligonucleotide
acttggaatctagaagagtcgacctaactg

SEQ ID NO: 123502 - DNA, 30 bp, Artificial Sequence
  Synthetic oligonucleotide
caagccaaatttaaaagaagttagtaactg

SEQ ID NO: 123503 - DNA, 30 bp, Artificial Sequence
  Synthetic oligonucleotide
ctagcctaggtgaaagcactctgaacactg

SEQ ID NO: 123504 - DNA, 30 bp, Artificial Sequence
  Synthetic oligonucleotide
cagacaaatagctgctaatgagtcacactg

SEQ ID NO: 123505 - DNA, 30 bp, Artificial Sequence
  Synthetic oligonucleotide
tctccgctgattcttaggacattcacactg

SEQ ID NO: 123506 - DNA, 30 bp, Artificial Sequence
  Synthetic oligonucleotide
tagtagaaggcgaacctacatctgacactg

SEQ ID NO: 123507 - DNA, 30 bp, Artificial Sequence
  Synthetic oligonucleotide
atacatactccaatacacatttcgccactg

SEQ ID NO: 123508 - DNA, 30 bp, Artificial Sequence
  Synthetic oligonucleotide
gtcccacgagcaattcacggagatccactg

SEQ ID NO: 123509 - DNA, 30 bp, Artificial Sequence
  Synthetic oligonucleotide
cggtcaagtgaggaagaacttttagcactg

SEQ ID NO: 123510 - DNA, 30 bp, Artificial Sequence
  Synthetic oligonucleotide
gctagtaaaacagggacccaggaggcactg

SEQ ID NO: 123511 - DNA, 30 bp, Artificial Sequence
  Synthetic oligonucleotide
aagataaacgactagtgcggcatatcactg

SEQ ID NO: 123512 - DNA, 30 bp, Artificial Sequence
  Synthetic oligonucleotide
ggcgccgtcgcgtaattttatatcagactg

SEQ ID NO: 123513 - DNA, 30 bp, Artificial Sequence
  Synthetic oligonucleotide
cattgacatttcgtttgaccggagagactg

SEQ ID NO: 123514 - DNA, 30 bp, Artificial Sequence
  Synthetic oligonucleotide
caaatgtcacagcggcgtgtgtttagactg

SEQ ID NO: 123515 - DNA, 30 bp, Artificial Sequence
  Synthetic oligonucleotide
gaagacgcctggacacgaatattacgactg

SEQ ID NO: 123516 - DNA, 30 bp, Artificial Sequence
  Synthetic oligonucleotide
gtgaacatattggaccataaagaccgactg

SEQ ID NO: 123517 - DNA, 30 bp, Artificial Sequence
  Synthetic oligonucleotide
gggagccgggtcgtgtcctctaagcgactg

SEQ ID NO: 123518 - DNA, 30 bp, Artificial Sequence
  Synthetic oligonucleotide
cgtcgctcctgcgtaggggggttgcgactg

SEQ ID NO: 123519 - DNA, 30 bp, Artificial Sequence
  Synthetic oligonucleotide
atgtcaaaatgtacaagccatctcggactg

SEQ ID NO: 123520 - DNA, 30 bp, Artificial Sequence
  Synthetic oligonucleotide
gcgaggttgcccgactagctggtgggactg

SEQ ID NO: 123521 - DNA, 30 bp, Artificial Sequence
  Synthetic oligonucleotide
ggaatacgaaattcagaacacactggactg

SEQ ID NO: 123522 - DNA, 30 bp, Artificial Sequence
  Synthetic oligonucleotide
cacgaccagggcaagccttcagtaatactg

SEQ ID NO: 123523 - DNA, 30 bp, Artificial Sequence
  Synthetic oligonucleotide
atcgggctggttgacaattcacccatactg

SEQ ID NO: 123524 - DNA, 30 bp, Artificial Sequence
  Synthetic oligonucleotide
acgttactatgttataccagtagcatactg

SEQ ID NO: 123525 - DNA, 30 bp, Artificial Sequence
  Synthetic oligonucleotide
aggacctatttaggaaagggtattatactg

SEQ ID NO: 123526 - DNA, 30 bp, Artificial Sequence
  Synthetic oligonucleotide
aacgccggcggggttcgtgtggaggtactg

SEQ ID NO: 123527 - DNA, 30 bp, Artificial Sequence
  Synthetic oligonucleotide
aaccacggaaggccgatttagtctgtactg

SEQ ID NO: 123528 - DNA, 30 bp, Artificial Sequence
  Synthetic oligonucleotide
agaggctgtggttcgatttggcgtttactg

SEQ ID NO: 123529 - DNA, 30 bp, Artificial Sequence
  Synthetic oligonucleotide
gttcgtggggctattaactcacaaaacctg

SEQ ID NO: 123530 - DNA, 30 bp, Artificial Sequence
  Synthetic oligonucleotide
cgagtccttggatactcctgcctaaacctg

SEQ ID NO: 123531 - DNA, 30 bp, Artificial Sequence
  Synthetic oligonucleotide
tgagagcaagcaaatcaatatttcaacctg

SEQ ID NO: 123532 - DNA, 30 bp, Artificial Sequence
  Synthetic oligonucleotide
aggtgtagggagatggatgaacagaacctg

SEQ ID NO: 123533 - DNA, 30 bp, Artificial Sequence
  Synthetic oligonucleotide
tcgggcaaacaatacgtatacttatacctg

SEQ ID NO: 123534 - DNA, 30 bp, Artificial Sequence
  Synthetic oligonucleotide
ggagtaatctccgccgtgccttcgtacctg

SEQ ID NO: 123535 - DNA, 30 bp, Artificial Sequence
  Synthetic oligonucleotide
ggtcctttgtaacaattagacagttacctg

SEQ ID NO: 123536 - DNA, 30 bp, Artificial Sequence
  Synthetic oligonucleotide
gtgttctcaattagcgtcctgtgtaccctg

SEQ ID NO: 123537 - DNA, 30 bp, Artificial Sequence
  Synthetic oligonucleotide
acatagagatcagtggggcaaaaccccctg

SEQ ID NO: 123538 - DNA, 30 bp, Artificial Sequence
  Synthetic oligonucleotide
accctcactcgtaataactcaaggcccctg

SEQ ID NO: 123539 - DNA, 30 bp, Artificial Sequence
  Synthetic oligonucleotide
tcttgttcacataggagcggcggtcccctg

SEQ ID NO: 123540 - DNA, 30 bp, Artificial Sequence
  Synthetic oligonucleotide
accacaggtctgaagatgcgataagccctg

SEQ ID NO: 123541 - DNA, 30 bp, Artificial Sequence
  Synthetic oligonucleotide
gaatatgaccagtatccaaccctagccctg

SEQ ID NO: 123542 - DNA, 30 bp, Artificial Sequence
  Synthetic oligonucleotide
cctggttggatgatactcctgttttccctg

SEQ ID NO: 123543 - DNA, 30 bp, Artificial Sequence
  Synthetic oligonucleotide
caactaacgtgaggccgacttgtacgcctg

SEQ ID NO: 123544 - DNA, 30 bp, Artificial Sequence
  Synthetic oligonucleotide
gcgaagctatatctctggtatctccgcctg

SEQ ID NO: 123545 - DNA, 30 bp, Artificial Sequence
  Synthetic oligonucleotide
gaacggggcacactaacgtcccctcgcctg

SEQ ID NO: 123546 - DNA, 30 bp, Artificial Sequence
  Synthetic oligonucleotide
tcgactgtacggagaacgaatggtcgcctg

SEQ ID NO: 123547 - DNA, 30 bp, Artificial Sequence
  Synthetic oligonucleotide
gattgacccaaaatatcgtcctgctgcctg

SEQ ID NO: 123548 - DNA, 30 bp, Artificial Sequence
  Synthetic oligonucleotide
acgtgaatttaggcgcgagagtaaatcctg

SEQ ID NO: 123549 - DNA, 30 bp, Artificial Sequence
  Synthetic oligonucleotide
ggtgcgatgagttcaagcatttggatcctg

SEQ ID NO: 123550 - DNA, 30 bp, Artificial Sequence
  Synthetic oligonucleotide
tgagccgaagtggggctgacttgactcctg

SEQ ID NO: 123551 - DNA, 30 bp, Artificial Sequence
  Synthetic oligonucleotide
tcccagcggtccggccgatgatgagtcctg

SEQ ID NO: 123552 - DNA, 30 bp, Artificial Sequence
  Synthetic oligonucleotide
ccctggcgtcaacgcgagtagctcgtcctg

SEQ ID NO: 123553 - DNA, 30 bp, Artificial Sequence
  Synthetic oligonucleotide
gataaccccgaatgccgtgaacaggtcctg

SEQ ID NO: 123554 - DNA, 30 bp, Artificial Sequence
  Synthetic oligonucleotide
gcataatcctgtggccagatccgtgtcctg

SEQ ID NO: 123555 - DNA, 30 bp, Artificial Sequence
  Synthetic oligonucleotide
gcggctctcacggtaaccggaggcttcctg

SEQ ID NO: 123556 - DNA, 30 bp, Artificial Sequence
  Synthetic oligonucleotide
ccggtgttcaactggggaaacaatttcctg

SEQ ID NO: 123557 - DNA, 30 bp, Artificial Sequence
  Synthetic oligonucleotide
gtaaaaactcatccggccataagaaagctg

SEQ ID NO: 123558 - DNA, 30 bp, Artificial Sequence
  Synthetic oligonucleotide
cgttcagcatgctctaacgatactaagctg

SEQ ID NO: 123559 - DNA, 30 bp, Artificial Sequence
  Synthetic oligonucleotide
cacgaattacgattagaagggacacagctg

SEQ ID NO: 123560 - DNA, 30 bp, Artificial Sequence
  Synthetic oligonucleotide
ataggctcaatggataatcggtttgagctg

SEQ ID NO: 123561 - DNA, 30 bp, Artificial Sequence
  Synthetic oligonucleotide
ctcagcatgagtcacaaggggggatagctg

SEQ ID NO: 123562 - DNA, 30 bp, Artificial Sequence
  Synthetic oligonucleotide
atagtatgagcaactgtggcaatctagctg

SEQ ID NO: 123563 - DNA, 30 bp, Artificial Sequence
  Synthetic oligonucleotide
gctgagagctttgattccgttgtctagctg

SEQ ID NO: 123564 - DNA, 30 bp, Artificial Sequence
  Synthetic oligonucleotide
aggtaaatctgttccgtggtgtagtagctg

SEQ ID NO: 123565 - DNA, 30 bp, Artificial Sequence
  Synthetic oligonucleotide
gaagcaacaacactcaaattcacaacgctg

SEQ ID NO: 123566 - DNA, 30 bp, Artificial Sequence
  Synthetic oligonucleotide
aacgtaacgagcggaatccggggcacgctg

SEQ ID NO: 123567 - DNA, 30 bp, Artificial Sequence
  Synthetic oligonucleotide
acaagtaaggcgatggtgacaaatacgctg

SEQ ID NO: 123568 - DNA, 30 bp, Artificial Sequence
  Synthetic oligonucleotide
gtcggtcgggcatgacaaaacagtacgctg

SEQ ID NO: 123569 - DNA, 30 bp, Artificial Sequence
  Synthetic oligonucleotide
cgaacgtcgggatattcccgtggtacgctg

SEQ ID NO: 123570 - DNA, 30 bp, Artificial Sequence
  Synthetic oligonucleotide
cgccacaggaaactacagctgcaaccgctg

SEQ ID NO: 123571 - DNA, 30 bp, Artificial Sequence
  Synthetic oligonucleotide
tggttgtcactaccataatatctaccgctg

SEQ ID NO: 123572 - DNA, 30 bp, Artificial Sequence
  Synthetic oligonucleotide
tcgaccaggggagattcttacctatcgctg

SEQ ID NO: 123573 - DNA, 30 bp, Artificial Sequence
  Synthetic oligonucleotide
gcgccgtggaagaatctacgcgtatcgctg

SEQ ID NO: 123574 - DNA, 30 bp, Artificial Sequence
  Synthetic oligonucleotide
aatatgggcaagtacgcgcagtgctcgctg

SEQ ID NO: 123575 - DNA, 30 bp, Artificial Sequence
  Synthetic oligonucleotide
ccggccgcgaaggtgttctaacgaaggctg

SEQ ID NO: 123576 - DNA, 30 bp, Artificial Sequence
  Synthetic oligonucleotide
cagaaccgaattatttaactggttaggctg

SEQ ID NO: 123577 - DNA, 30 bp, Artificial Sequence
  Synthetic oligonucleotide
tgaaagacaagctaggggtgcttagggctg

SEQ ID NO: 123578 - DNA, 30 bp, Artificial Sequence
  Synthetic oligonucleotide
gttcgacactaagggaggtacattgggctg

SEQ ID NO: 123579 - DNA, 30 bp, Artificial Sequence
  Synthetic oligonucleotide
agggtgaatttgtgagcactgaaatggctg

SEQ ID NO: 123580 - DNA, 30 bp, Artificial Sequence
  Synthetic oligonucleotide
agtaagtgccaaaagtttgtaccttggctg

SEQ ID NO: 123581 - DNA, 30 bp, Artificial Sequence
  Synthetic oligonucleotide
ttgtcgtggttcttagtacggtctatgctg

SEQ ID NO: 123582 - DNA, 30 bp, Artificial Sequence
  Synthetic oligonucleotide
aactggcgagaacttcatggtgtactgctg

SEQ ID NO: 123583 - DNA, 30 bp, Artificial Sequence
  Synthetic oligonucleotide
tagacgaccgatgtcaaggcccccctgctg

SEQ ID NO: 123584 - DNA, 30 bp, Artificial Sequence
  Synthetic oligonucleotide
caaggggtctctcgcctggtcgtcgtgctg

SEQ ID NO: 123585 - DNA, 30 bp, Artificial Sequence
  Synthetic oligonucleotide
gtatgagctaaaggagcagcacctgtgctg

SEQ ID NO: 123586 - DNA, 30 bp, Artificial Sequence
  Synthetic oligonucleotide
cagccttgcagaaccctggtacatttgctg

SEQ ID NO: 123587 - DNA, 30 bp, Artificial Sequence
  Synthetic oligonucleotide
caggtcccggccaaaccatatgataatctg

SEQ ID NO: 123588 - DNA, 30 bp, Artificial Sequence
  Synthetic oligonucleotide
cgaatataagtggttcacgcatataatctg

SEQ ID NO: 123589 - DNA, 30 bp, Artificial Sequence
  Synthetic oligonucleotide
tcggatggatttggtcatagtactcatctg

SEQ ID NO: 123590 - DNA, 30 bp, Artificial Sequence
  Synthetic oligonucleotide
gccactacggaaataggattgtcagatctg

SEQ ID NO: 123591 - DNA, 30 bp, Artificial Sequence
  Synthetic oligonucleotide
taccccagcagcaatccaacagaggatctg

SEQ ID NO: 123592 - DNA, 30 bp, Artificial Sequence
  Synthetic oligonucleotide
tgtgccttgcgtaactagagtagctatctg

SEQ ID NO: 123593 - DNA, 30 bp, Artificial Sequence
  Synthetic oligonucleotide
tactcaagagttaataaaactacgtatctg

SEQ ID NO: 123594 - DNA, 30 bp, Artificial Sequence
  Synthetic oligonucleotide
tggggtccagcattgttgaattccactctg

SEQ ID NO: 123595 - DNA, 29 bp, Artificial Sequence
  Synthetic oligonucleotide
tgcgccctatcatcatttattcgactctg

SEQ ID NO: 123596 - DNA, 30 bp, Artificial Sequence
  Synthetic oligonucleotide
ggctggtgatacagattccgcgtccctctg

SEQ ID NO: 123597 - DNA, 30 bp, Artificial Sequence
  Synthetic oligonucleotide
tcaccgatggttagggtgaccagggctctg

SEQ ID NO: 123598 - DNA, 30 bp, Artificial Sequence
  Synthetic oligonucleotide
agcagaaaagtggtggaaaccccgtctctg

SEQ ID NO: 123599 - DNA, 30 bp, Artificial Sequence
  Synthetic oligonucleotide
atcgagcgaagctagttaagttgcagtctg

SEQ ID NO: 123600 - DNA, 30 bp, Artificial Sequence
  Synthetic oligonucleotide
gacattaagagattattacaatcgcgtctg

SEQ ID NO: 123601 - DNA, 30 bp, Artificial Sequence
  Synthetic oligonucleotide
gaagggcgtatcgatatagtcatgcgtctg

SEQ ID NO: 123602 - DNA, 30 bp, Artificial Sequence
  Synthetic oligonucleotide
catagacggggatcttgtcatggaggtctg

SEQ ID NO: 123603 - DNA, 30 bp, Artificial Sequence
  Synthetic oligonucleotide
agtagcaacgggatcgaggtaaagtgtctg

SEQ ID NO: 123604 - DNA, 31 bp, Artificial Sequence
  Synthetic oligonucleotide
gggcacatcctgcgttatcttctgttgtctg

SEQ ID NO: 123605 - DNA, 30 bp, Artificial Sequence
  Synthetic oligonucleotide
gtggtccggtaattcgtgttactttgtctg

SEQ ID NO: 123606 - DNA, 30 bp, Artificial Sequence
  Synthetic oligonucleotide
tggggtgtgttcgcttactttgcaattctg

SEQ ID NO: 123607 - DNA, 30 bp, Artificial Sequence
  Synthetic oligonucleotide
ccaacgaggccggttaggtcagtaattctg

SEQ ID NO: 123608 - DNA, 30 bp, Artificial Sequence
  Synthetic oligonucleotide
agaattgaatgtacgattccctcacttctg

SEQ ID NO: 123609 - DNA, 30 bp, Artificial Sequence
  Synthetic oligonucleotide
gttattgcgatcggttcatgtaagcttctg

SEQ ID NO: 123610 - DNA, 30 bp, Artificial Sequence
  Synthetic oligonucleotide
gttcgacaccgagaaaccattcatcttctg

SEQ ID NO: 123611 - DNA, 30 bp, Artificial Sequence
  Synthetic oligonucleotide
agtcaccttactttcgaggtgaaagttctg

SEQ ID NO: 123612 - DNA, 30 bp, Artificial Sequence
  Synthetic oligonucleotide
ggtgttacacttacatgagagacagttctg

SEQ ID NO: 123613 - DNA, 30 bp, Artificial Sequence
  Synthetic oligonucleotide
gggccaagtttaagtgaattgagggttctg

SEQ ID NO: 123614 - DNA, 30 bp, Artificial Sequence
  Synthetic oligonucleotide
atggcgcggggcgtacttcgctgaaaagtg

SEQ ID NO: 123615 - DNA, 30 bp, Artificial Sequence
  Synthetic oligonucleotide
aaatcaaaaatagcatagctaatacaagtg

SEQ ID NO: 123616 - DNA, 30 bp, Artificial Sequence
  Synthetic oligonucleotide
tatagtggaattgacaaacttgaccaagtg

SEQ ID NO: 123617 - DNA, 30 bp, Artificial Sequence
  Synthetic oligonucleotide
gacgtcaaacgcgggtgctgaatccaagtg

SEQ ID NO: 123618 - DNA, 30 bp, Artificial Sequence
  Synthetic oligonucleotide
ccaccaacacacaactaacagggtcaagtg

SEQ ID NO: 123619 - DNA, 30 bp, Artificial Sequence
  Synthetic oligonucleotide
ctcactagtttcgatgtcccctaagaagtg

SEQ ID NO: 123620 - DNA, 30 bp, Artificial Sequence
  Synthetic oligonucleotide
tcccaatggcaagattgccaattagaagtg

SEQ ID NO: 123621 - DNA, 30 bp, Artificial Sequence
  Synthetic oligonucleotide
cgaaaatctcgaatagctgcaagcgaagtg

SEQ ID NO: 123622 - DNA, 30 bp, Artificial Sequence
  Synthetic oligonucleotide
tgaggcaaaagcctagttggctcggaagtg

SEQ ID NO: 123623 - DNA, 30 bp, Artificial Sequence
  Synthetic oligonucleotide
caactgcataagagtcggaccggtgaagtg

SEQ ID NO: 123624 - DNA, 30 bp, Artificial Sequence
  Synthetic oligonucleotide
caccatgcgcgctatggtcttgggtaagtg

SEQ ID NO: 123625 - DNA, 30 bp, Artificial Sequence
  Synthetic oligonucleotide
catagatacgcttagatgagctggtaagtg

SEQ ID NO: 123626 - DNA, 30 bp, Artificial Sequence
  Synthetic oligonucleotide
tattcatgggtgtacatcagcatgtaagtg

SEQ ID NO: 123627 - DNA, 30 bp, Artificial Sequence
  Synthetic oligonucleotide
gaatcagatcgtggtagaccggtgtaagtg

SEQ ID NO: 123628 - DNA, 30 bp, Artificial Sequence
  Synthetic oligonucleotide
cggtcgtggtcaccgcttttcaagacagtg

SEQ ID NO: 123629 - DNA, 30 bp, Artificial Sequence
  Synthetic oligonucleotide
tcaaaccagagcctatatgttccgacagtg

SEQ ID NO: 123630 - DNA, 30 bp, Artificial Sequence
  Synthetic oligonucleotide
aaagggacgtatgtgataaattcgacagtg

SEQ ID NO: 123631 - DNA, 30 bp, Artificial Sequence
  Synthetic oligonucleotide
gtgaggaccgccctcactacaaacccagtg

SEQ ID NO: 123632 - DNA, 30 bp, Artificial Sequence
  Synthetic oligonucleotide
ttgtagcgaggctctgctcaaaagccagtg

SEQ ID NO: 123633 - DNA, 30 bp, Artificial Sequence
  Synthetic oligonucleotide
caccatggagctgcacatactcgggcagtg

SEQ ID NO: 123634 - DNA, 30 bp, Artificial Sequence
  Synthetic oligonucleotide
cagtaccatacccgactttagtaatcagtg

SEQ ID NO: 123635 - DNA, 30 bp, Artificial Sequence
  Synthetic oligonucleotide
aagcttcgtggtctccatgctagatcagtg

SEQ ID NO: 123636 - DNA, 31 bp, Artificial Sequence
  Synthetic oligonucleotide
cgttgattgcgctgcagtcggtagatcagtg

SEQ ID NO: 123637 - DNA, 30 bp, Artificial Sequence
  Synthetic oligonucleotide
tattaacgatcaatggctctttcttcagtg

SEQ ID NO: 123638 - DNA, 30 bp, Artificial Sequence
  Synthetic oligonucleotide
aagggcttgagcgttctactgagcagagtg

SEQ ID NO: 123639 - DNA, 30 bp, Artificial Sequence
  Synthetic oligonucleotide
gtatggtgagaatcacactccctgagagtg

SEQ ID NO: 123640 - DNA, 30 bp, Artificial Sequence
  Synthetic oligonucleotide
acggtctgtctccctatccgaactagagtg

SEQ ID NO: 123641 - DNA, 30 bp, Artificial Sequence
  Synthetic oligonucleotide
gtgtaaatatgagtgggaagttgtagagtg

SEQ ID NO: 123642 - DNA, 30 bp, Artificial Sequence
  Synthetic oligonucleotide
tgccgtatcggcgggccattaacacgagtg

SEQ ID NO: 123643 - DNA, 30 bp, Artificial Sequence
  Synthetic oligonucleotide
tgggtaagttaagcctggtagacccgagtg

SEQ ID NO: 123644 - DNA, 30 bp, Artificial Sequence
  Synthetic oligonucleotide
gaagtggttttagctggcccctggcgagtg

SEQ ID NO: 123645 - DNA, 30 bp, Artificial Sequence
  Synthetic oligonucleotide
ttagttcggcttgtcggtgatcgaggagtg

SEQ ID NO: 123646 - DNA, 30 bp, Artificial Sequence
  Synthetic oligonucleotide
ggtataagatgggtccgaagttacggagtg

SEQ ID NO: 123647 - DNA, 30 bp, Artificial Sequence
  Synthetic oligonucleotide
aacacatagcaagtcaaagccctgggagtg

SEQ ID NO: 123648 - DNA, 30 bp, Artificial Sequence
  Synthetic oligonucleotide
ttacgtatcaacaaagtcaatccatgagtg

SEQ ID NO: 123649 - DNA, 30 bp, Artificial Sequence
  Synthetic oligonucleotide
ctacccaattaagacaaatgtggcatagtg

SEQ ID NO: 123650 - DNA, 30 bp, Artificial Sequence
  Synthetic oligonucleotide
gcccgggcctagttccgagcgcaactagtg

SEQ ID NO: 123651 - DNA, 30 bp, Artificial Sequence
  Synthetic oligonucleotide
gtcccgcctgggggatccggtttactagtg

SEQ ID NO: 123652 - DNA, 30 bp, Artificial Sequence
  Synthetic oligonucleotide
aaatgggggatgatgagaataaacctagtg

SEQ ID NO: 123653 - DNA, 30 bp, Artificial Sequence
  Synthetic oligonucleotide
gggtagccgtcatattgcctatacctagtg

SEQ ID NO: 123654 - DNA, 30 bp, Artificial Sequence
  Synthetic oligonucleotide
cacgtggcacgtctacgcctgaaagtagtg

SEQ ID NO: 123655 - DNA, 30 bp, Artificial Sequence
  Synthetic oligonucleotide
tgtacagcagttttttagttcagggtagtg

SEQ ID NO: 123656 - DNA, 30 bp, Artificial Sequence
  Synthetic oligonucleotide
gcgctatgaacaactttaggagtattagtg

SEQ ID NO: 123657 - DNA, 30 bp, Artificial Sequence
  Synthetic oligonucleotide
gtgcatagtcttcttaaccatctgttagtg

SEQ ID NO: 123658 - DNA, 30 bp, Artificial Sequence
  Synthetic oligonucleotide
aagataataggggcgctaagctaaaacgtg

SEQ ID NO: 123659 - DNA, 30 bp, Artificial Sequence
  Synthetic oligonucleotide
aaccagggcatgccacctcacttcaacgtg

SEQ ID NO: 123660 - DNA, 30 bp, Artificial Sequence
  Synthetic oligonucleotide
tcgcaccgctagatgtaggtaaggaacgtg

SEQ ID NO: 123661 - DNA, 30 bp, Artificial Sequence
  Synthetic oligonucleotide
ggataagataattgatgaacttggaacgtg

SEQ ID NO: 123662 - DNA, 30 bp, Artificial Sequence
  Synthetic oligonucleotide
ttggtatgtatctctcgaaaaacacacgtg

SEQ ID NO: 123663 - DNA, 30 bp, Artificial Sequence
  Synthetic oligonucleotide
caatgcaggctgttaacatattagcacgtg

SEQ ID NO: 123664 - DNA, 30 bp, Artificial Sequence
  Synthetic oligonucleotide
ggggtttccatagctaagtactatcacgtg

SEQ ID NO: 123665 - DNA, 30 bp, Artificial Sequence
  Synthetic oligonucleotide
tgtaaaaaaagtgtagaacccgttcacgtg

SEQ ID NO: 123666 - DNA, 30 bp, Artificial Sequence
  Synthetic oligonucleotide
ggcccagaggtctgcgctacacgggacgtg

SEQ ID NO: 123667 - DNA, 30 bp, Artificial Sequence
  Synthetic oligonucleotide
ctatgatgggcacgctagtagcttgacgtg

SEQ ID NO: 123668 - DNA, 30 bp, Artificial Sequence
  Synthetic oligonucleotide
ccctactgggtcacgactgtagcatacgtg

SEQ ID NO: 123669 - DNA, 30 bp, Artificial Sequence
  Synthetic oligonucleotide
cagacgatatctcgtctaattgtatacgtg

SEQ ID NO: 123670 - DNA, 30 bp, Artificial Sequence
  Synthetic oligonucleotide
tcggaatgccccgtcgaagcatggtacgtg

SEQ ID NO: 123671 - DNA, 30 bp, Artificial Sequence
  Synthetic oligonucleotide
ataaacttccgaaagtcttacacttacgtg

SEQ ID NO: 123672 - DNA, 30 bp, Artificial Sequence
  Synthetic oligonucleotide
accggcatgtggtgagtggaacgttacgtg

SEQ ID NO: 123673 - DNA, 30 bp, Artificial Sequence
  Synthetic oligonucleotide
cgaagcgtacttgcgaacgtagaaaccgtg

SEQ ID NO: 123674 - DNA, 30 bp, Artificial Sequence
  Synthetic oligonucleotide
gcggtcagttcgggctgctccagaaccgtg

SEQ ID NO: 123675 - DNA, 30 bp, Artificial Sequence
  Synthetic oligonucleotide
gtgcttcaagactggcggtaccatcccgtg

SEQ ID NO: 123676 - DNA, 30 bp, Artificial Sequence
  Synthetic oligonucleotide
tcatatataccgctttacttcagagccgtg

SEQ ID NO: 123677 - DNA, 30 bp, Artificial Sequence
  Synthetic oligonucleotide
taaactcctcggcacgtgcgtgtagccgtg

SEQ ID NO: 123678 - DNA, 30 bp, Artificial Sequence
  Synthetic oligonucleotide
gggctgttatagcgatttgtgatatccgtg

SEQ ID NO: 123679 - DNA, 31 bp, Artificial Sequence
  Synthetic oligonucleotide
tttagagaacaaactaggtcgcgcgtccgtg

SEQ ID NO: 123680 - DNA, 30 bp, Artificial Sequence
  Synthetic oligonucleotide
acggaacaccggtacttattggtttccgtg

SEQ ID NO: 123681 - DNA, 30 bp, Artificial Sequence
  Synthetic oligonucleotide
acgtgattgttgtcctgaaacacaagcgtg

SEQ ID NO: 123682 - DNA, 30 bp, Artificial Sequence
  Synthetic oligonucleotide
ctagaaattgcggttcactatcagagcgtg

SEQ ID NO: 123683 - DNA, 30 bp, Artificial Sequence
  Synthetic oligonucleotide
agggatcggtgatagctatgaaggcgcgtg

SEQ ID NO: 123684 - DNA, 30 bp, Artificial Sequence
  Synthetic oligonucleotide
cgcaggtgagatcatccgtgtcttcgcgtg

SEQ ID NO: 123685 - DNA, 30 bp, Artificial Sequence
  Synthetic oligonucleotide
ccataaagtaataacgcttttcgtggcgtg

SEQ ID NO: 123686 - DNA, 30 bp, Artificial Sequence
  Synthetic oligonucleotide
gagcaactagcacgtaataagcaatgcgtg

SEQ ID NO: 123687 - DNA, 30 bp, Artificial Sequence
  Synthetic oligonucleotide
tcgttgggagaggcttgctatatatgcgtg

SEQ ID NO: 123688 - DNA, 30 bp, Artificial Sequence
  Synthetic oligonucleotide
agcaccgagttccgatactccgtaatcgtg

SEQ ID NO: 123689 - DNA, 30 bp, Artificial Sequence
  Synthetic oligonucleotide
gtttatgtacaacataatttatgcatcgtg

SEQ ID NO: 123690 - DNA, 30 bp, Artificial Sequence
  Synthetic oligonucleotide
ccaagcgccgcggtcgagagtgggatcgtg

SEQ ID NO: 123691 - DNA, 30 bp, Artificial Sequence
  Synthetic oligonucleotide
tgttgtaaatccggccggcagaatatcgtg

SEQ ID NO: 123692 - DNA, 30 bp, Artificial Sequence
  Synthetic oligonucleotide
tctaatcgcacggagtatatctgactcgtg

SEQ ID NO: 123693 - DNA, 30 bp, Artificial Sequence
  Synthetic oligonucleotide
cacttgggtcacacgtgaggcgacctcgtg

SEQ ID NO: 123694 - DNA, 30 bp, Artificial Sequence
  Synthetic oligonucleotide
catgcgcctcagggtgtaggagggctcgtg

SEQ ID NO: 123695 - DNA, 30 bp, Artificial Sequence
  Synthetic oligonucleotide
gctgatagcatggcgttaatcggggtcgtg

SEQ ID NO: 123696 - DNA, 30 bp, Artificial Sequence
  Synthetic oligonucleotide
tcgaccgtgttgccgaacggacaattcgtg

SEQ ID NO: 123697 - DNA, 30 bp, Artificial Sequence
  Synthetic oligonucleotide
gcagggaagattacgcgccctgtattcgtg

SEQ ID NO: 123698 - DNA, 30 bp, Artificial Sequence
  Synthetic oligonucleotide
gtccggtgaggacagtttttagccttcgtg

SEQ ID NO: 123699 - DNA, 30 bp, Artificial Sequence
  Synthetic oligonucleotide
cgccggtatgactcgtctactttcttcgtg

SEQ ID NO: 123700 - DNA, 30 bp, Artificial Sequence
  Synthetic oligonucleotide
agagaagggcatgactccaattccaaggtg

SEQ ID NO: 123701 - DNA, 30 bp, Artificial Sequence
  Synthetic oligonucleotide
cgtttaaacggaacagatggctgcaaggtg

SEQ ID NO: 123702 - DNA, 30 bp, Artificial Sequence
  Synthetic oligonucleotide
aagacagtcatgcaagtagtcttgaaggtg

SEQ ID NO: 123703 - DNA, 30 bp, Artificial Sequence
  Synthetic oligonucleotide
agggcgctaaacacactcggcggtaaggtg

SEQ ID NO: 123704 - DNA, 30 bp, Artificial Sequence
  Synthetic oligonucleotide
ccaagggaaagtaatttccgtggtaaggtg

SEQ ID NO: 123705 - DNA, 30 bp, Artificial Sequence
  Synthetic oligonucleotide
cccgaggattcagaccgcatgagacaggtg

SEQ ID NO: 123706 - DNA, 30 bp, Artificial Sequence
  Synthetic oligonucleotide
cggcttagatgtttctcttcgacccaggtg

SEQ ID NO: 123707 - DNA, 29 bp, Artificial Sequence
  Synthetic oligonucleotide
catgtcgtgaagggtggcggtctcaggtg

SEQ ID NO: 123708 - DNA, 30 bp, Artificial Sequence
  Synthetic oligonucleotide
acgacttatgcgactcacatccgtcaggtg

SEQ ID NO: 123709 - DNA, 30 bp, Artificial Sequence
  Synthetic oligonucleotide
atgttatagcttgttatgccctgagaggtg

SEQ ID NO: 123710 - DNA, 30 bp, Artificial Sequence
  Synthetic oligonucleotide
taaagtctgatacaggacgataaggaggtg

SEQ ID NO: 123711 - DNA, 30 bp, Artificial Sequence
  Synthetic oligonucleotide
acacagttacgggagcaggaatatgaggtg

SEQ ID NO: 123712 - DNA, 30 bp, Artificial Sequence
  Synthetic oligonucleotide
ccaggattagtataaaagtcggttgaggtg

SEQ ID NO: 123713 - DNA, 30 bp, Artificial Sequence
  Synthetic oligonucleotide
atttagccagagcaaattgaggtctaggtg

SEQ ID NO: 123714 - DNA, 30 bp, Artificial Sequence
  Synthetic oligonucleotide
gtagagcataaaacggatgtggtgtaggtg

SEQ ID NO: 123715 - DNA, 30 bp, Artificial Sequence
  Synthetic oligonucleotide
cgtaggagacagcggaaatagccttaggtg

SEQ ID NO: 123716 - DNA, 30 bp, Artificial Sequence
  Synthetic oligonucleotide
aggtgtcccgttatttggctcgtaacggtg

SEQ ID NO: 123717 - DNA, 30 bp, Artificial Sequence
  Synthetic oligonucleotide
acttaattagtcagaagttaggatacggtg

SEQ ID NO: 123718 - DNA, 30 bp, Artificial Sequence
  Synthetic oligonucleotide
ctcggagcatagtgctatagcaaaccggtg

SEQ ID NO: 123719 - DNA, 30 bp, Artificial Sequence
  Synthetic oligonucleotide
agataatatggcatgggggttgtaccggtg

SEQ ID NO: 123720 - DNA, 30 bp, Artificial Sequence
  Synthetic oligonucleotide
gcgcgagaattaaattcatttatgccggtg

SEQ ID NO: 123721 - DNA, 30 bp, Artificial Sequence
  Synthetic oligonucleotide
taaggtggttagcaatgttatgccgcggtg

SEQ ID NO: 123722 - DNA, 30 bp, Artificial Sequence
  Synthetic oligonucleotide
gaaaatgctggaccgcaacagcgcgcggtg

SEQ ID NO: 123723 - DNA, 30 bp, Artificial Sequence
  Synthetic oligonucleotide
gttggcaacgttagcgccctctatgcggtg

SEQ ID NO: 123724 - DNA, 30 bp, Artificial Sequence
  Synthetic oligonucleotide
taagcggggtcctacggtgtatccagggtg

SEQ ID NO: 123725 - DNA, 30 bp, Artificial Sequence
  Synthetic oligonucleotide
gataggaagtaagaagaggcgtcgagggtg

SEQ ID NO: 123726 - DNA, 30 bp, Artificial Sequence
  Synthetic oligonucleotide
ttgagcgccacgctacagcgctggagggtg

SEQ ID NO: 123727 - DNA, 30 bp, Artificial Sequence
  Synthetic oligonucleotide
gggttaatcaatggacaattttaacgggtg

SEQ ID NO: 123728 - DNA, 30 bp, Artificial Sequence
  Synthetic oligonucleotide
cggattcttcaaagttgagccgcccgggtg

SEQ ID NO: 123729 - DNA, 30 bp, Artificial Sequence
  Synthetic oligonucleotide
ggggtcgcacaggatctcaagagccgggtg

SEQ ID NO: 123730 - DNA, 30 bp, Artificial Sequence
  Synthetic oligonucleotide
ttagagatatggacgcttagaatccgggtg

SEQ ID NO: 123731 - DNA, 30 bp, Artificial Sequence
  Synthetic oligonucleotide
gacgaccagagaggtaatagacggcgggtg

SEQ ID NO: 123732 - DNA, 30 bp, Artificial Sequence
  Synthetic oligonucleotide
aagaggaggtatctagtaacagtgcgggtg

SEQ ID NO: 123733 - DNA, 30 bp, Artificial Sequence
  Synthetic oligonucleotide
gggggtagtcgactcttgggcccaggggtg

SEQ ID NO: 123734 - DNA, 30 bp, Artificial Sequence
  Synthetic oligonucleotide
cagggaatattcacagtaacccagggggtg

SEQ ID NO: 123735 - DNA, 30 bp, Artificial Sequence
  Synthetic oligonucleotide
acaaaccgtgggtgaggggtagatggggtg

SEQ ID NO: 123736 - DNA, 30 bp, Artificial Sequence
  Synthetic oligonucleotide
gtcatggcgcgcagaaattagtgatgggtg

SEQ ID NO: 123737 - DNA, 30 bp, Artificial Sequence
  Synthetic oligonucleotide
tatcactacccaatgaggtaagaaatggtg

SEQ ID NO: 123738 - DNA, 30 bp, Artificial Sequence
  Synthetic oligonucleotide
gtgcgtagactatcggcgggctggatggtg

SEQ ID NO: 123739 - DNA, 30 bp, Artificial Sequence
  Synthetic oligonucleotide
gatgatatcgcggaacctctgcgactggtg

SEQ ID NO: 123740 - DNA, 30 bp, Artificial Sequence
  Synthetic oligonucleotide
tgtactgataaaatctgtgaatagctggtg

SEQ ID NO: 123741 - DNA, 31 bp, Artificial Sequence
  Synthetic oligonucleotide
taggcacaaaaggtggacgtcgcatctggtg

SEQ ID NO: 123742 - DNA, 30 bp, Artificial Sequence
  Synthetic oligonucleotide
gtgtgacgaaatgattaagtacccgtggtg

SEQ ID NO: 123743 - DNA, 30 bp, Artificial Sequence
  Synthetic oligonucleotide
cccgtcggttgatgaccaaagggcgtggtg

SEQ ID NO: 123744 - DNA, 30 bp, Artificial Sequence
  Synthetic oligonucleotide
accgcaacctggtcaggctgcgtcgtggtg

SEQ ID NO: 123745 - DNA, 30 bp, Artificial Sequence
  Synthetic oligonucleotide
aacaggagtagcaagggtcaaagggtggtg

SEQ ID NO: 123746 - DNA, 30 bp, Artificial Sequence
  Synthetic oligonucleotide
acgcttacttgcaatatgctagatgtggtg

SEQ ID NO: 123747 - DNA, 30 bp, Artificial Sequence
  Synthetic oligonucleotide
atcaaatacacgaactaatctggcaatgtg

SEQ ID NO: 123748 - DNA, 30 bp, Artificial Sequence
  Synthetic oligonucleotide
ccctctatcctcccaagagatgggaatgtg

SEQ ID NO: 123749 - DNA, 30 bp, Artificial Sequence
  Synthetic oligonucleotide
acgcgtctgtgggtgccctggtctaatgtg

SEQ ID NO: 123750 - DNA, 30 bp, Artificial Sequence
  Synthetic oligonucleotide
gccatcagtgataactcctcctttaatgtg

SEQ ID NO: 123751 - DNA, 30 bp, Artificial Sequence
  Synthetic oligonucleotide
acgcgtgtgcattatgtgctgaatgatgtg

SEQ ID NO: 123752 - DNA, 30 bp, Artificial Sequence
  Synthetic oligonucleotide
acgtcgtggtcgacttggtcacgcactgtg

SEQ ID NO: 123753 - DNA, 30 bp, Artificial Sequence
  Synthetic oligonucleotide
agatccagcctcaagagcgggatcactgtg

SEQ ID NO: 123754 - DNA, 30 bp, Artificial Sequence
  Synthetic oligonucleotide
atcagctgacctctctagagaacagctgtg

SEQ ID NO: 123755 - DNA, 30 bp, Artificial Sequence
  Synthetic oligonucleotide
tcgagctacggccgttatctggaggctgtg

SEQ ID NO: 123756 - DNA, 30 bp, Artificial Sequence
  Synthetic oligonucleotide
tatcgaactcgtccaattggtcatgctgtg

SEQ ID NO: 123757 - DNA, 30 bp, Artificial Sequence
  Synthetic oligonucleotide
gtcacataaggaatgtgtgcttatgctgtg

SEQ ID NO: 123758 - DNA, 30 bp, Artificial Sequence
  Synthetic oligonucleotide
accacatggcttcgcgagactcctgctgtg

SEQ ID NO: 123759 - DNA, 30 bp, Artificial Sequence
  Synthetic oligonucleotide
acgcttacgcccgatcgatcgaactctgtg

SEQ ID NO: 123760 - DNA, 30 bp, Artificial Sequence
  Synthetic oligonucleotide
ctgggctggggtcgaggactatacagtgtg

SEQ ID NO: 123761 - DNA, 30 bp, Artificial Sequence
  Synthetic oligonucleotide
aatcgagtatatctgtggcacgtacgtgtg

SEQ ID NO: 123762 - DNA, 30 bp, Artificial Sequence
  Synthetic oligonucleotide
gcatgttagggaacatcgtacaaccgtgtg

SEQ ID NO: 123763 - DNA, 30 bp, Artificial Sequence
  Synthetic oligonucleotide
attaaacacaatcccaatgcagggcgtgtg

SEQ ID NO: 123764 - DNA, 30 bp, Artificial Sequence
  Synthetic oligonucleotide
cagtgttatggcgtattgtaagtgcgtgtg

SEQ ID NO: 123765 - DNA, 30 bp, Artificial Sequence
  Synthetic oligonucleotide
ttcgatcgagcaagtaaaaggactcgtgtg

SEQ ID NO: 123766 - DNA, 30 bp, Artificial Sequence
  Synthetic oligonucleotide
tggttcggacggaaaaccgaacgcggtgtg

SEQ ID NO: 123767 - DNA, 30 bp, Artificial Sequence
  Synthetic oligonucleotide
tcaagcgggcgaaagagtcgggagggtgtg

SEQ ID NO: 123768 - DNA, 30 bp, Artificial Sequence
  Synthetic oligonucleotide
agcttatggtagggtcccttagatggtgtg

SEQ ID NO: 123769 - DNA, 30 bp, Artificial Sequence
  Synthetic oligonucleotide
gcgagatcagtcattaccttctctggtgtg

SEQ ID NO: 123770 - DNA, 30 bp, Artificial Sequence
  Synthetic oligonucleotide
gggggtacacttgtgtcgcaagttggtgtg

SEQ ID NO: 123771 - DNA, 30 bp, Artificial Sequence
  Synthetic oligonucleotide
tttgcatggtccaacaaacaagagtgtgtg

SEQ ID NO: 123772 - DNA, 30 bp, Artificial Sequence
  Synthetic oligonucleotide
gtcaggaggtcaagtattcgcgggtgtgtg

SEQ ID NO: 123773 - DNA, 30 bp, Artificial Sequence
  Synthetic oligonucleotide
gtaaaagttcgaagtggggtaaaaattgtg

SEQ ID NO: 123774 - DNA, 30 bp, Artificial Sequence
  Synthetic oligonucleotide
cgtccattgtccccgtactacataattgtg

SEQ ID NO: 123775 - DNA, 30 bp, Artificial Sequence
  Synthetic oligonucleotide
tagttggtggagtgcagtgcgggcattgtg

SEQ ID NO: 123776 - DNA, 30 bp, Artificial Sequence
  Synthetic oligonucleotide
ggtctcgatgtcaattgggggatcattgtg

SEQ ID NO: 123777 - DNA, 30 bp, Artificial Sequence
  Synthetic oligonucleotide
aaaggagataaggtgtttcaggggattgtg

SEQ ID NO: 123778 - DNA, 30 bp, Artificial Sequence
  Synthetic oligonucleotide
cacatagtcctaaaaaatagttgacttgtg

SEQ ID NO: 123779 - DNA, 30 bp, Artificial Sequence
  Synthetic oligonucleotide
atgtgttcgggtaggtaagtgtgccttgtg

SEQ ID NO: 123780 - DNA, 30 bp, Artificial Sequence
  Synthetic oligonucleotide
taggacacaaggatctaaggcactcttgtg

SEQ ID NO: 123781 - DNA, 30 bp, Artificial Sequence
  Synthetic oligonucleotide
tcacgagcttattttgagttatccgttgtg

SEQ ID NO: 123782 - DNA, 30 bp, Artificial Sequence
  Synthetic oligonucleotide
aaaactcgagcatcgtgatcaatcgttgtg

SEQ ID NO: 123783 - DNA, 30 bp, Artificial Sequence
  Synthetic oligonucleotide
ctggatttgggtaaggtcttccatgttgtg

SEQ ID NO: 123784 - DNA, 30 bp, Artificial Sequence
  Synthetic oligonucleotide
tttgttagcaaacgtaccggatcatttgtg

SEQ ID NO: 123785 - DNA, 30 bp, Artificial Sequence
  Synthetic oligonucleotide
tagcgtgggcttgagcactgggcctttgtg

SEQ ID NO: 123786 - DNA, 30 bp, Artificial Sequence
  Synthetic oligonucleotide
aacagtagggtccggaataacataaaattg

SEQ ID NO: 123787 - DNA, 30 bp, Artificial Sequence
  Synthetic oligonucleotide
cgtcaccggagctacaggccaaacaaattg

SEQ ID NO: 123788 - DNA, 30 bp, Artificial Sequence
  Synthetic oligonucleotide
aggaaacgctcagagtcatcgcgcaaattg

SEQ ID NO: 123789 - DNA, 30 bp, Artificial Sequence
  Synthetic oligonucleotide
tagattggccaagatgtgggctagaaattg

SEQ ID NO: 123790 - DNA, 30 bp, Artificial Sequence
  Synthetic oligonucleotide
tcgcggggcgtcgtgctcaacggacaattg

SEQ ID NO: 123791 - DNA, 30 bp, Artificial Sequence
  Synthetic oligonucleotide
gcacacgttacagactcgtagcagcaattg

SEQ ID NO: 123792 - DNA, 30 bp, Artificial Sequence
  Synthetic oligonucleotide
cacagggtctggggaggtcggtcgcaattg

SEQ ID NO: 123793 - DNA, 30 bp, Artificial Sequence
  Synthetic oligonucleotide
gctgagcctagatccgagaattggcaattg

SEQ ID NO: 123794 - DNA, 30 bp, Artificial Sequence
  Synthetic oligonucleotide
ataaaaatggcactaaacgtagtgcaattg

SEQ ID NO: 123795 - DNA, 30 bp, Artificial Sequence
  Synthetic oligonucleotide
ctggtcgttccgagaaatcctcctcaattg

SEQ ID NO: 123796 - DNA, 30 bp, Artificial Sequence
  Synthetic oligonucleotide
aatgttcacgggtcgtaatcgcaagaattg

SEQ ID NO: 123797 - DNA, 30 bp, Artificial Sequence
  Synthetic oligonucleotide
ccttcacacgactgtcatgtgaaggaattg

SEQ ID NO: 123798 - DNA, 30 bp, Artificial Sequence
  Synthetic oligonucleotide
ggggagcgtttcatattcctagaggaattg

SEQ ID NO: 123799 - DNA, 30 bp, Artificial Sequence
  Synthetic oligonucleotide
gttgcgcccggcaccacacgtcactaattg

SEQ ID NO: 123800 - DNA, 30 bp, Artificial Sequence
  Synthetic oligonucleotide
tttgcgatgctcagctagcgacggtaattg

SEQ ID NO: 123801 - DNA, 30 bp, Artificial Sequence
  Synthetic oligonucleotide
cagcaggggtgggggcaccccaattaattg

SEQ ID NO: 123802 - DNA, 30 bp, Artificial Sequence
  Synthetic oligonucleotide
ccgttcattggaagccaggaatgaccattg

SEQ ID NO: 123803 - DNA, 30 bp, Artificial Sequence
  Synthetic oligonucleotide
acaatcattcgacaaggaggcctcccattg

SEQ ID NO: 123804 - DNA, 30 bp, Artificial Sequence
  Synthetic oligonucleotide
accacatgcgtcagagttagcgcgccattg

SEQ ID NO: 123805 - DNA, 30 bp, Artificial Sequence
  Synthetic oligonucleotide
accggtatccccgaacggtcagtgccattg

SEQ ID NO: 123806 - DNA, 30 bp, Artificial Sequence
  Synthetic oligonucleotide
actcaaagtaccatcactgactatccattg

SEQ ID NO: 123807 - DNA, 30 bp, Artificial Sequence
  Synthetic oligonucleotide
ggtagtatacgggagtaaccagccgcattg

SEQ ID NO: 123808 - DNA, 30 bp, Artificial Sequence
  Synthetic oligonucleotide
cgtggtgggtacactggtgccgaggcattg

SEQ ID NO: 123809 - DNA, 30 bp, Artificial Sequence
  Synthetic oligonucleotide
tcgtgccggagaataacgtgtcatgcattg

SEQ ID NO: 123810 - DNA, 30 bp, Artificial Sequence
  Synthetic oligonucleotide
caacggcagaaatcccttaccttatcattg

SEQ ID NO: 123811 - DNA, 30 bp, Artificial Sequence
  Synthetic oligonucleotide
cttagtggagttgcccaaacatagtcattg

SEQ ID NO: 123812 - DNA, 30 bp, Artificial Sequence
  Synthetic oligonucleotide
gatcagaaggactccgggtgtacaagattg

SEQ ID NO: 123813 - DNA, 30 bp, Artificial Sequence
  Synthetic oligonucleotide
catggggcgggtggtaactaagcaagattg

SEQ ID NO: 123814 - DNA, 30 bp, Artificial Sequence
  Synthetic oligonucleotide
cagctgataaacaatctaaccgtaagattg

SEQ ID NO: 123815 - DNA, 30 bp, Artificial Sequence
  Synthetic oligonucleotide
tatgccgaacttcgcgcgagaaacagattg

SEQ ID NO: 123816 - DNA, 30 bp, Artificial Sequence
  Synthetic oligonucleotide
cgcagcgggtacgcacaatacaacagattg

SEQ ID NO: 123817 - DNA, 30 bp, Artificial Sequence
  Synthetic oligonucleotide
ttgatcgaaatatggcacgtaactagattg

SEQ ID NO: 123818 - DNA, 30 bp, Artificial Sequence
  Synthetic oligonucleotide
ggagtgctggccttgtgaataatacgattg

SEQ ID NO: 123819 - DNA, 30 bp, Artificial Sequence
  Synthetic oligonucleotide
ggaggcaccgggtcaggggtcgtacgattg

SEQ ID NO: 123820 - DNA, 30 bp, Artificial Sequence
  Synthetic oligonucleotide
taacaagtaacatacgacgatgcgcgattg

SEQ ID NO: 123821 - DNA, 30 bp, Artificial Sequence
  Synthetic oligonucleotide
tgacgggcgggtatagctctttggcgattg

SEQ ID NO: 123822 - DNA, 30 bp, Artificial Sequence
  Synthetic oligonucleotide
acgtttataccacgtttaaacgtgcgattg

SEQ ID NO: 123823 - DNA, 28 bp, Artificial Sequence
  Synthetic oligonucleotide
cttctcgataagcacgcggttgcgattg

SEQ ID NO: 123824 - DNA, 30 bp, Artificial Sequence
  Synthetic oligonucleotide
tgtgcgggcctgaagatgcgtggaggattg

SEQ ID NO: 123825 - DNA, 30 bp, Artificial Sequence
  Synthetic oligonucleotide
taccgtattcgtcgtcatgttctaggattg

SEQ ID NO: 123826 - DNA, 30 bp, Artificial Sequence
  Synthetic oligonucleotide
cgttgcgagtaggggtcgtgcgtgggattg

SEQ ID NO: 123827 - DNA, 30 bp, Artificial Sequence
  Synthetic oligonucleotide
accggcactgaccgttgtgaagaatgattg

SEQ ID NO: 123828 - DNA, 30 bp, Artificial Sequence
  Synthetic oligonucleotide
agtagccaataagctaggatcaggtgattg

SEQ ID NO: 123829 - DNA, 30 bp, Artificial Sequence
  Synthetic oligonucleotide
ccgccagatagcacgttttacctcatattg

SEQ ID NO: 123830 - DNA, 30 bp, Artificial Sequence
  Synthetic oligonucleotide
cattaatggtcaatccagacagcggtattg

SEQ ID NO: 123831 - DNA, 30 bp, Artificial Sequence
  Synthetic oligonucleotide
cgctgttgtgtggactgcccctgggtattg

SEQ ID NO: 123832 - DNA, 30 bp, Artificial Sequence
  Synthetic oligonucleotide
taccgacatatcctctggctagagttattg

SEQ ID NO: 123833 - DNA, 29 bp, Artificial Sequence
  Synthetic oligonucleotide
aagtaagcagttcgtgcggcctgttattg

SEQ ID NO: 123834 - DNA, 30 bp, Artificial Sequence
  Synthetic oligonucleotide
ggccaaaatgatacaggccttatgaacttg

SEQ ID NO: 123835 - DNA, 30 bp, Artificial Sequence
  Synthetic oligonucleotide
ctacgaaggcttagggacgctaataacttg

SEQ ID NO: 123836 - DNA, 30 bp, Artificial Sequence
  Synthetic oligonucleotide
gatgtgtggagtaataatggtgcgcacttg

SEQ ID NO: 123837 - DNA, 30 bp, Artificial Sequence
  Synthetic oligonucleotide
tgcaaactgctattaggtattaaagacttg

SEQ ID NO: 123838 - DNA, 30 bp, Artificial Sequence
  Synthetic oligonucleotide
atctaatttcgggcagaaccggacgacttg

SEQ ID NO: 123839 - DNA, 30 bp, Artificial Sequence
  Synthetic oligonucleotide
ttccaggtcacataatgggatctcgacttg

SEQ ID NO: 123840 - DNA, 30 bp, Artificial Sequence
  Synthetic oligonucleotide
catgactaatatgcctgtgcgcaggacttg

SEQ ID NO: 123841 - DNA, 30 bp, Artificial Sequence
  Synthetic oligonucleotide
aatgaagctggcaagcgcgacgaggacttg

SEQ ID NO: 123842 - DNA, 30 bp, Artificial Sequence
  Synthetic oligonucleotide
gtaccaggtaaggctatccgggagtacttg

SEQ ID NO: 123843 - DNA, 30 bp, Artificial Sequence
  Synthetic oligonucleotide
caaggagtcagatacactacaacttacttg

SEQ ID NO: 123844 - DNA, 30 bp, Artificial Sequence
  Synthetic oligonucleotide
tcgtaagataggtaggcagtattgaccttg

SEQ ID NO: 123845 - DNA, 30 bp, Artificial Sequence
  Synthetic oligonucleotide
tgtcccccaagtaattgggagcataccttg

SEQ ID NO: 123846 - DNA, 30 bp, Artificial Sequence
  Synthetic oligonucleotide
gatctccattgtgggaaaaccgaacccttg

SEQ ID NO: 123847 - DNA, 30 bp, Artificial Sequence
  Synthetic oligonucleotide
tgaaacgaaaaagagacggcacaatccttg

SEQ ID NO: 123848 - DNA, 30 bp, Artificial Sequence
  Synthetic oligonucleotide
cctggcgttatccacgtaacagaatccttg

SEQ ID NO: 123849 - DNA, 30 bp, Artificial Sequence
  Synthetic oligonucleotide
tcatcaataagccggagggatgtgtccttg

SEQ ID NO: 123850 - DNA, 30 bp, Artificial Sequence
  Synthetic oligonucleotide
gagcgtgggaccacagaccacgtaagcttg

SEQ ID NO: 123851 - DNA, 30 bp, Artificial Sequence
  Synthetic oligonucleotide
ataacgttgaagtatttacaactgcgcttg

SEQ ID NO: 123852 - DNA, 30 bp, Artificial Sequence
  Synthetic oligonucleotide
ttcgaggccctctaaaagcaagtgcgcttg

SEQ ID NO: 123853 - DNA, 30 bp, Artificial Sequence
  Synthetic oligonucleotide
aaggatctggggtcataggtgtctggcttg

SEQ ID NO: 123854 - DNA, 30 bp, Artificial Sequence
  Synthetic oligonucleotide
ttgttaccaaacggagaaagtgttggcttg

SEQ ID NO: 123855 - DNA, 30 bp, Artificial Sequence
  Synthetic oligonucleotide
agcctcgagtcataatatctgaactgcttg

SEQ ID NO: 123856 - DNA, 30 bp, Artificial Sequence
  Synthetic oligonucleotide
ggtaaaaaccaaagagtccgatcctgcttg

SEQ ID NO: 123857 - DNA, 30 bp, Artificial Sequence
  Synthetic oligonucleotide
cccttaaaagaaataccatcgtgctgcttg

SEQ ID NO: 123858 - DNA, 30 bp, Artificial Sequence
  Synthetic oligonucleotide
ggaggccatccttcttatctaaagatcttg

SEQ ID NO: 123859 - DNA, 30 bp, Artificial Sequence
  Synthetic oligonucleotide
aggataacggatgctcacgcgcggctcttg

SEQ ID NO: 123860 - DNA, 30 bp, Artificial Sequence
  Synthetic oligonucleotide
ctcgtttacttaaaggctcaaaatctcttg

SEQ ID NO: 123861 - DNA, 30 bp, Artificial Sequence
  Synthetic oligonucleotide
aggtatagcaatcgctccttgccggtcttg

SEQ ID NO: 123862 - DNA, 30 bp, Artificial Sequence
  Synthetic oligonucleotide
atcagacagggtaaggattctccggtcttg

SEQ ID NO: 123863 - DNA, 30 bp, Artificial Sequence
  Synthetic oligonucleotide
tccacggagaatgcacagttaactgtcttg

SEQ ID NO: 123864 - DNA, 30 bp, Artificial Sequence
  Synthetic oligonucleotide
agccgagaaggacgccgtatcagattcttg

SEQ ID NO: 123865 - DNA, 30 bp, Artificial Sequence
  Synthetic oligonucleotide
ctagcagaagccactctactgtccaagttg

SEQ ID NO: 123866 - DNA, 30 bp, Artificial Sequence
  Synthetic oligonucleotide
gggggatgcgcgggtatctagtctaagttg

SEQ ID NO: 123867 - DNA, 30 bp, Artificial Sequence
  Synthetic oligonucleotide
taggcagtggcttgggaaatgtcccagttg

SEQ ID NO: 123868 - DNA, 30 bp, Artificial Sequence
  Synthetic oligonucleotide
tggaagctggccgggactcttagccagttg

SEQ ID NO: 123869 - DNA, 30 bp, Artificial Sequence
  Synthetic oligonucleotide
accggcgtagttggagggctcgtgcagttg

SEQ ID NO: 123870 - DNA, 30 bp, Artificial Sequence
  Synthetic oligonucleotide
gggaccgtgggagtatgcggaggtcagttg

SEQ ID NO: 123871 - DNA, 30 bp, Artificial Sequence
  Synthetic oligonucleotide
cgcgatatttacgcctaataaaccgagttg

SEQ ID NO: 123872 - DNA, 30 bp, Artificial Sequence
  Synthetic oligonucleotide
gcggggacgctaacgctgtctaccgagttg

SEQ ID NO: 123873 - DNA, 30 bp, Artificial Sequence
  Synthetic oligonucleotide
cttgagttctactgagagtgctgcgagttg

SEQ ID NO: 123874 - DNA, 30 bp, Artificial Sequence
  Synthetic oligonucleotide
ctcaaggttggcatctcttcttgcgagttg

SEQ ID NO: 123875 - DNA, 30 bp, Artificial Sequence
  Synthetic oligonucleotide
cggggtcgcatctttcggaaataggagttg

SEQ ID NO: 123876 - DNA, 30 bp, Artificial Sequence
  Synthetic oligonucleotide
actcggggcaactacgcctagtcctagttg

SEQ ID NO: 123877 - DNA, 30 bp, Artificial Sequence
  Synthetic oligonucleotide
gctacgctcaaggcctgatcttcgtagttg

SEQ ID NO: 123878 - DNA, 30 bp, Artificial Sequence
  Synthetic oligonucleotide
catattgactgaactcacttttggtagttg

SEQ ID NO: 123879 - DNA, 30 bp, Artificial Sequence
  Synthetic oligonucleotide
cgcgcgtccagccaatgaatgatgtagttg

SEQ ID NO: 123880 - DNA, 30 bp, Artificial Sequence
  Synthetic oligonucleotide
ctacgtcgcgcgtggcaattacgcacgttg

SEQ ID NO: 123881 - DNA, 30 bp, Artificial Sequence
  Synthetic oligonucleotide
ttgcggggttgtgcgtatgtgatcacgttg

SEQ ID NO: 123882 - DNA, 30 bp, Artificial Sequence
  Synthetic oligonucleotide
agtgggaggtgcgggactatcaatacgttg

SEQ ID NO: 123883 - DNA, 30 bp, Artificial Sequence
  Synthetic oligonucleotide
taataagtggtgcgctagtcatatccgttg

SEQ ID NO: 123884 - DNA, 30 bp, Artificial Sequence
  Synthetic oligonucleotide
tgtgggcacttattccggagatatccgttg

SEQ ID NO: 123885 - DNA, 30 bp, Artificial Sequence
  Synthetic oligonucleotide
gtcggaaagaatgggctttgactcgcgttg

SEQ ID NO: 123886 - DNA, 30 bp, Artificial Sequence
  Synthetic oligonucleotide
tgcccaaggtcccaactcaaaaaggcgttg

SEQ ID NO: 123887 - DNA, 30 bp, Artificial Sequence
  Synthetic oligonucleotide
gtaaagtgagtgttgtatcctccggcgttg

SEQ ID NO: 123888 - DNA, 30 bp, Artificial Sequence
  Synthetic oligonucleotide
cgataagcctgtttgaatggtagggcgttg

SEQ ID NO: 123889 - DNA, 30 bp, Artificial Sequence
  Synthetic oligonucleotide
ggaaacacacccagaaataagcttgcgttg

SEQ ID NO: 123890 - DNA, 30 bp, Artificial Sequence
  Synthetic oligonucleotide
ccaacctaacgaagcgccataaaatcgttg

SEQ ID NO: 123891 - DNA, 30 bp, Artificial Sequence
  Synthetic oligonucleotide
gacgttctgaattaggccgccagatcgttg

SEQ ID NO: 123892 - DNA, 30 bp, Artificial Sequence
  Synthetic oligonucleotide
aaaaatgaactccacgaccattcgtcgttg

SEQ ID NO: 123893 - DNA, 30 bp, Artificial Sequence
  Synthetic oligonucleotide
tgaaaggagggggcctgctattggtcgttg

SEQ ID NO: 123894 - DNA, 30 bp, Artificial Sequence
  Synthetic oligonucleotide
ggtctcataagggatcttagcatttcgttg

SEQ ID NO: 123895 - DNA, 30 bp, Artificial Sequence
  Synthetic oligonucleotide
ccttcataagatctatcggagagaaggttg

SEQ ID NO: 123896 - DNA, 30 bp, Artificial Sequence
  Synthetic oligonucleotide
tctggctgtagacccacggtcataaggttg

SEQ ID NO: 123897 - DNA, 30 bp, Artificial Sequence
  Synthetic oligonucleotide
gaccatacaaggaaagcaataaacaggttg

SEQ ID NO: 123898 - DNA, 30 bp, Artificial Sequence
  Synthetic oligonucleotide
ggcgggtccccccatagacatcgcaggttg

SEQ ID NO: 123899 - DNA, 30 bp, Artificial Sequence
  Synthetic oligonucleotide
tgttactcgctcctctgatttaagaggttg

SEQ ID NO: 123900 - DNA, 30 bp, Artificial Sequence
  Synthetic oligonucleotide
tagggacttgtcaaggccagtttccggttg

SEQ ID NO: 123901 - DNA, 30 bp, Artificial Sequence
  Synthetic oligonucleotide
gtcaagctacgagtggatatcgggcggttg

SEQ ID NO: 123902 - DNA, 30 bp, Artificial Sequence
  Synthetic oligonucleotide
cgtaaggacgggaggggtctgtgtcggttg

SEQ ID NO: 123903 - DNA, 30 bp, Artificial Sequence
  Synthetic oligonucleotide
agttatgtcggcctcagaaacgaagggttg

SEQ ID NO: 123904 - DNA, 30 bp, Artificial Sequence
  Synthetic oligonucleotide
atcgtacgataggttatgtgtagagggttg

SEQ ID NO: 123905 - DNA, 30 bp, Artificial Sequence
  Synthetic oligonucleotide
tcaggagaaacatcagatagggtagggttg

SEQ ID NO: 123906 - DNA, 30 bp, Artificial Sequence
  Synthetic oligonucleotide
gtgtgcggactcgtgaattttcacgggttg

SEQ ID NO: 123907 - DNA, 30 bp, Artificial Sequence
  Synthetic oligonucleotide
ttaaatgtccaacaacgggctacggggttg

SEQ ID NO: 123908 - DNA, 30 bp, Artificial Sequence
  Synthetic oligonucleotide
gtgttcgttaggtgggacgactcggggttg

SEQ ID NO: 123909 - DNA, 30 bp, Artificial Sequence
  Synthetic oligonucleotide
acaataggctcactgaatcaactgtggttg

SEQ ID NO: 123910 - DNA, 30 bp, Artificial Sequence
  Synthetic oligonucleotide
aaggacgaggggcgagcgctgaggatgttg

SEQ ID NO: 123911 - DNA, 30 bp, Artificial Sequence
  Synthetic oligonucleotide
ctgtgagttcggcaccagcggtatatgttg

SEQ ID NO: 123912 - DNA, 30 bp, Artificial Sequence
  Synthetic oligonucleotide
ttgagtatgtaaggaccgtggtatatgttg

SEQ ID NO: 123913 - DNA, 30 bp, Artificial Sequence
  Synthetic oligonucleotide
aatggttgcccagtcgtagtcgagctgttg

SEQ ID NO: 123914 - DNA, 30 bp, Artificial Sequence
  Synthetic oligonucleotide
gagcgaacgatcagggcgcgacctctgttg

SEQ ID NO: 123915 - DNA, 30 bp, Artificial Sequence
  Synthetic oligonucleotide
cgatacaaaagcatgtgtctgaaagtgttg

SEQ ID NO: 123916 - DNA, 30 bp, Artificial Sequence
  Synthetic oligonucleotide
ccgatcggggtgatgttcgagaacgtgttg

SEQ ID NO: 123917 - DNA, 30 bp, Artificial Sequence
  Synthetic oligonucleotide
ccaacaatgtctagtctacaaggggtgttg

SEQ ID NO: 123918 - DNA, 30 bp, Artificial Sequence
  Synthetic oligonucleotide
ggcccctaggaacagagtcatgatgtgttg

SEQ ID NO: 123919 - DNA, 30 bp, Artificial Sequence
  Synthetic oligonucleotide
cttaactcatttcaaaacatgtgtgtgttg

SEQ ID NO: 123920 - DNA, 30 bp, Artificial Sequence
  Synthetic oligonucleotide
ctaacgcgtgacgttagaattctattgttg

SEQ ID NO: 123921 - DNA, 30 bp, Artificial Sequence
  Synthetic oligonucleotide
gggtctgctcatagtgccgtcgcgttgttg

SEQ ID NO: 123922 - DNA, 30 bp, Artificial Sequence
  Synthetic oligonucleotide
ggagcggaacaactagagagatctttgttg

SEQ ID NO: 123923 - DNA, 30 bp, Artificial Sequence
  Synthetic oligonucleotide
agaggtacatagtcgttccacagtttgttg

SEQ ID NO: 123924 - DNA, 30 bp, Artificial Sequence
  Synthetic oligonucleotide
agctgcaagcgtggccccgagactaatttg

SEQ ID NO: 123925 - DNA, 30 bp, Artificial Sequence
  Synthetic oligonucleotide
acactaatgatatctcacatccgtcatttg

SEQ ID NO: 123926 - DNA, 30 bp, Artificial Sequence
  Synthetic oligonucleotide
aaaatgggtaatcgaatagcctcagatttg

SEQ ID NO: 123927 - DNA, 30 bp, Artificial Sequence
  Synthetic oligonucleotide
taaaaatggaccctacttacggacgatttg

SEQ ID NO: 123928 - DNA, 30 bp, Artificial Sequence
  Synthetic oligonucleotide
cgttgcaagcggggtgaaatttgggatttg

SEQ ID NO: 123929 - DNA, 30 bp, Artificial Sequence
  Synthetic oligonucleotide
ctgaccgaacctgaaagaccagaatatttg

SEQ ID NO: 123930 - DNA, 30 bp, Artificial Sequence
  Synthetic oligonucleotide
atgaccacgtcaacctcgtattcttatttg

SEQ ID NO: 123931 - DNA, 30 bp, Artificial Sequence
  Synthetic oligonucleotide
agtggataaagggtaataacacggactttg

SEQ ID NO: 123932 - DNA, 30 bp, Artificial Sequence
  Synthetic oligonucleotide
ttccgattatcaagtctgccgaaccctttg

SEQ ID NO: 123933 - DNA, 30 bp, Artificial Sequence
  Synthetic oligonucleotide
tgtcggctcaaatgtaacatcttcgctttg

SEQ ID NO: 123934 - DNA, 30 bp, Artificial Sequence
  Synthetic oligonucleotide
gttaacgaaaccggttggcatcttgctttg

SEQ ID NO: 123935 - DNA, 30 bp, Artificial Sequence
  Synthetic oligonucleotide
tctaatggccaagaaaggatcatctctttg

SEQ ID NO: 123936 - DNA, 30 bp, Artificial Sequence
  Synthetic oligonucleotide
aacgcgttagtcgtacaacagactagtttg

SEQ ID NO: 123937 - DNA, 30 bp, Artificial Sequence
  Synthetic oligonucleotide
cccagctaatttgcgtcgagggttagtttg

SEQ ID NO: 123938 - DNA, 30 bp, Artificial Sequence
  Synthetic oligonucleotide
gcggctaccccaacccccagagatcgtttg

SEQ ID NO: 123939 - DNA, 30 bp, Artificial Sequence
  Synthetic oligonucleotide
ttcagagggtgtcgtccatgtgaaggtttg

SEQ ID NO: 123940 - DNA, 30 bp, Artificial Sequence
  Synthetic oligonucleotide
ccgcaacagtacgtctagccgtgaggtttg

SEQ ID NO: 123941 - DNA, 30 bp, Artificial Sequence
  Synthetic oligonucleotide
ctcgggaggttttccaagtgcaagggtttg

SEQ ID NO: 123942 - DNA, 30 bp, Artificial Sequence
  Synthetic oligonucleotide
gtatataaatgtcatgaaatccgtggtttg

SEQ ID NO: 123943 - DNA, 30 bp, Artificial Sequence
  Synthetic oligonucleotide
gtgagagcggcatttcgcccgacgtgtttg

SEQ ID NO: 123944 - DNA, 30 bp, Artificial Sequence
  Synthetic oligonucleotide
atagtggattggcatacaatgtaaattttg

SEQ ID NO: 123945 - DNA, 30 bp, Artificial Sequence
  Synthetic oligonucleotide
gcttagtacctgtttcctacatacattttg

SEQ ID NO: 123946 - DNA, 30 bp, Artificial Sequence
  Synthetic oligonucleotide
gaatgcataggagaaggacctgaacttttg

SEQ ID NO: 123947 - DNA, 30 bp, Artificial Sequence
  Synthetic oligonucleotide
agagttcaggatacaatggtatgacttttg

SEQ ID NO: 123948 - DNA, 30 bp, Artificial Sequence
  Synthetic oligonucleotide
agatatgcgtgctagcctgaagaccttttg

SEQ ID NO: 123949 - DNA, 30 bp, Artificial Sequence
  Synthetic oligonucleotide
atcggaagccacgacaccactttagttttg

SEQ ID NO: 123950 - DNA, 30 bp, Artificial Sequence
  Synthetic oligonucleotide
atgtgagctagtaaaggcctcaacgttttg

SEQ ID NO: 123951 - DNA, 30 bp, Artificial Sequence
  Synthetic oligonucleotide
ggtggaagcgacccaaaccgctaggttttg

SEQ ID NO: 123952 - DNA, 30 bp, Artificial Sequence
  Synthetic oligonucleotide
tgacccgttatccactgacctcatgttttg

SEQ ID NO: 123953 - DNA, 30 bp, Artificial Sequence
  Synthetic oligonucleotide
aggggtacatcgcccggaggaattgttttg

SEQ ID NO: 123954 - DNA, 30 bp, Artificial Sequence
  Synthetic oligonucleotide
aacagggcaaagtgtgcaccccttgttttg

SEQ ID NO: 123955 - DNA, 30 bp, Artificial Sequence
  Synthetic oligonucleotide
acgcgttgcctggtctgctcctttgttttg

SEQ ID NO: 123956 - DNA, 30 bp, Artificial Sequence
  Synthetic oligonucleotide
actgctctacacattagaaattgatttttg

SEQ ID NO: 123957 - DNA, 30 bp, Artificial Sequence
  Synthetic oligonucleotide
tcgacccttgacgtgataaccggctttttg

SEQ ID NO: 123958 - DNA, 30 bp, Artificial Sequence
  Synthetic oligonucleotide
ctcacaaggccaatttgtcactcgaaaaat

SEQ ID NO: 123959 - DNA, 30 bp, Artificial Sequence
  Synthetic oligonucleotide
ttcggcggcggcagcccgatagcacaaaat

SEQ ID NO: 123960 - DNA, 30 bp, Artificial Sequence
  Synthetic oligonucleotide
caaccagtattaaccaagtggggccaaaat

SEQ ID NO: 123961 - DNA, 30 bp, Artificial Sequence
  Synthetic oligonucleotide
ttattttgcaggatcccacgaggggaaaat

SEQ ID NO: 123962 - DNA, 30 bp, Artificial Sequence
  Synthetic oligonucleotide
atacgtgaagacacgggataacgctaaaat

SEQ ID NO: 123963 - DNA, 30 bp, Artificial Sequence
  Synthetic oligonucleotide
gcgtcattgaatagcgctaagatgtaaaat

SEQ ID NO: 123964 - DNA, 30 bp, Artificial Sequence
  Synthetic oligonucleotide
agtctcgatgagccaaggcattgaacaaat

SEQ ID NO: 123965 - DNA, 30 bp, Artificial Sequence
  Synthetic oligonucleotide
cacgggagccccgccatcatgtcgacaaat

SEQ ID NO: 123966 - DNA, 30 bp, Artificial Sequence
  Synthetic oligonucleotide
cgtctcgacttctgattatctcggacaaat

SEQ ID NO: 123967 - DNA, 30 bp, Artificial Sequence
  Synthetic oligonucleotide
agtagccgtgagtgagcatcacctacaaat

SEQ ID NO: 123968 - DNA, 30 bp, Artificial Sequence
  Synthetic oligonucleotide
acacgatgtgtcagagaataacccccaaat

SEQ ID NO: 123969 - DNA, 30 bp, Artificial Sequence
  Synthetic oligonucleotide
ctcggaacccactgaggaacaggtccaaat

SEQ ID NO: 123970 - DNA, 30 bp, Artificial Sequence
  Synthetic oligonucleotide
ggggagggtgtaggctcggtgcaagcaaat

SEQ ID NO: 123971 - DNA, 30 bp, Artificial Sequence
  Synthetic oligonucleotide
attaggagcatacaaggctacggagcaaat

SEQ ID NO: 123972 - DNA, 30 bp, Artificial Sequence
  Synthetic oligonucleotide
cgtatcgttagaatggtgaagtgtgcaaat

SEQ ID NO: 123973 - DNA, 30 bp, Artificial Sequence
  Synthetic oligonucleotide
tttcggaagttagaaaaggtatgctcaaat

SEQ ID NO: 123974 - DNA, 30 bp, Artificial Sequence
  Synthetic oligonucleotide
cagaccaaggtggccaggtaccagtcaaat

SEQ ID NO: 123975 - DNA, 30 bp, Artificial Sequence
  Synthetic oligonucleotide
gtaagtgtgaaattcgagttgataagaaat

SEQ ID NO: 123976 - DNA, 30 bp, Artificial Sequence
  Synthetic oligonucleotide
taacgtggaggtgctccaaaatccagaaat

SEQ ID NO: 123977 - DNA, 30 bp, Artificial Sequence
  Synthetic oligonucleotide
ataatctattgaggcctaatgtggagaaat

SEQ ID NO: 123978 - DNA, 30 bp, Artificial Sequence
  Synthetic oligonucleotide
tagggatatagttccctgtatgtgagaaat

SEQ ID NO: 123979 - DNA, 30 bp, Artificial Sequence
  Synthetic oligonucleotide
cagaaaacgttgcaagaggtactacgaaat

SEQ ID NO: 123980 - DNA, 30 bp, Artificial Sequence
  Synthetic oligonucleotide
caagcactccggcctcagagggtccgaaat

SEQ ID NO: 123981 - DNA, 30 bp, Artificial Sequence
  Synthetic oligonucleotide
aggcaggtccgtagatttagtgcgcgaaat

SEQ ID NO: 123982 - DNA, 30 bp, Artificial Sequence
  Synthetic oligonucleotide
cactaaatacaataaagctgcggtcgaaat

SEQ ID NO: 123983 - DNA, 30 bp, Artificial Sequence
  Synthetic oligonucleotide
ggccgcgcgaagattacgaataaaggaaat

SEQ ID NO: 123984 - DNA, 30 bp, Artificial Sequence
  Synthetic oligonucleotide
cagtgatagatacttgatgtgagcggaaat

SEQ ID NO: 123985 - DNA, 30 bp, Artificial Sequence
  Synthetic oligonucleotide
cgtgagcgtattactgcacgggtcggaaat

SEQ ID NO: 123986 - DNA, 30 bp, Artificial Sequence
  Synthetic oligonucleotide
ttccaaacaactcggtgtctgcggggaaat

SEQ ID NO: 123987 - DNA, 30 bp, Artificial Sequence
  Synthetic oligonucleotide
gtgataaggtatcggagcgcaaaatgaaat

SEQ ID NO: 123988 - DNA, 30 bp, Artificial Sequence
  Synthetic oligonucleotide
tgcatgggtgtcatattgtattagtgaaat

SEQ ID NO: 123989 - DNA, 30 bp, Artificial Sequence
  Synthetic oligonucleotide
acgtcagtggtgtcctcgtggtaaataaat

SEQ ID NO: 123990 - DNA, 30 bp, Artificial Sequence
  Synthetic oligonucleotide
tacgatgaaggtaaaagtgcaagaataaat

SEQ ID NO: 123991 - DNA, 30 bp, Artificial Sequence
  Synthetic oligonucleotide
aggagcagacacacgttgttaagaataaat

SEQ ID NO: 123992 - DNA, 30 bp, Artificial Sequence
  Synthetic oligonucleotide
ttggaaaggcgaaagcacacgtagataaat

SEQ ID NO: 123993 - DNA, 30 bp, Artificial Sequence
  Synthetic oligonucleotide
cgatcagataaagggttttccgcgataaat

SEQ ID NO: 123994 - DNA, 30 bp, Artificial Sequence
  Synthetic oligonucleotide
tgtcacagatcgagggatatcaatataaat

SEQ ID NO: 123995 - DNA, 30 bp, Artificial Sequence
  Synthetic oligonucleotide
aaacccccaaaagtaagtgtcacgctaaat

SEQ ID NO: 123996 - DNA, 30 bp, Artificial Sequence
  Synthetic oligonucleotide
ggtgcatataggcaggacaagtttctaaat

SEQ ID NO: 123997 - DNA, 30 bp, Artificial Sequence
  Synthetic oligonucleotide
tccaggtgtattatatgatgtccagtaaat

SEQ ID NO: 123998 - DNA, 30 bp, Artificial Sequence
  Synthetic oligonucleotide
ctaagtatcacgggggtaccattagtaaat

SEQ ID NO: 123999 - DNA, 30 bp, Artificial Sequence
  Synthetic oligonucleotide
gcatgtggctgcggaaggggtcgggtaaat

SEQ ID NO: 124000 - DNA, 30 bp, Artificial Sequence
  Synthetic oligonucleotide
cgtagacccatatacaatgacgctgtaaat

SEQ ID NO: 124001 - DNA, 30 bp, Artificial Sequence
  Synthetic oligonucleotide
cggatattaccttcacactttacattaaat

SEQ ID NO: 124002 - DNA, 30 bp, Artificial Sequence
  Synthetic oligonucleotide
tttcagcaatcatccaacaaggccttaaat

SEQ ID NO: 124003 - DNA, 30 bp, Artificial Sequence
  Synthetic oligonucleotide
ggtgcacattgcggcggtgaaggcttaaat

SEQ ID NO: 124004 - DNA, 30 bp, Artificial Sequence
  Synthetic oligonucleotide
gagacccggcctgccaaggtgtagttaaat

SEQ ID NO: 124005 - DNA, 30 bp, Artificial Sequence
  Synthetic oligonucleotide
aaaacgtgggaaagtacggtcactttaaat

SEQ ID NO: 124006 - DNA, 30 bp, Artificial Sequence
  Synthetic oligonucleotide
ttagctagtcttaaagtcgaacccaacaat

SEQ ID NO: 124007 - DNA, 30 bp, Artificial Sequence
  Synthetic oligonucleotide
tggcttaaagtagacatgaccagcaacaat

SEQ ID NO: 124008 - DNA, 30 bp, Artificial Sequence
  Synthetic oligonucleotide
gaatagaagagagtaaggagtgagaacaat

SEQ ID NO: 124009 - DNA, 30 bp, Artificial Sequence
  Synthetic oligonucleotide
ggtcgcggaacactacggctctggaacaat

SEQ ID NO: 124010 - DNA, 30 bp, Artificial Sequence
  Synthetic oligonucleotide
acgctaaggggaggaccttctgcacacaat

SEQ ID NO: 124011 - DNA, 30 bp, Artificial Sequence
  Synthetic oligonucleotide
agatatcacaagctgtcgttgtgagacaat

SEQ ID NO: 124012 - DNA, 30 bp, Artificial Sequence
  Synthetic oligonucleotide
cacattgggtgtaaacgggtgatagacaat

SEQ ID NO: 124013 - DNA, 30 bp, Artificial Sequence
  Synthetic oligonucleotide
cctagaatttcatgatgcaccgacgacaat

SEQ ID NO: 124014 - DNA, 30 bp, Artificial Sequence
  Synthetic oligonucleotide
tcgctgaccaccgcgtagaggagtgacaat

SEQ ID NO: 124015 - DNA, 30 bp, Artificial Sequence
  Synthetic oligonucleotide
gttatgcctaggcactcgagagaatacaat

SEQ ID NO: 124016 - DNA, 30 bp, Artificial Sequence
  Synthetic oligonucleotide
agcgcacggcatgagcggttttactacaat

SEQ ID NO: 124017 - DNA, 30 bp, Artificial Sequence
  Synthetic oligonucleotide
cagggggtaggactctgcacggcctacaat

SEQ ID NO: 124018 - DNA, 30 bp, Artificial Sequence
  Synthetic oligonucleotide
tccacgtggtaccacaagattccttacaat

SEQ ID NO: 124019 - DNA, 30 bp, Artificial Sequence
  Synthetic oligonucleotide
ccaacacctctggactttggaatcaccaat

SEQ ID NO: 124020 - DNA, 30 bp, Artificial Sequence
  Synthetic oligonucleotide
catccgcaaggtaggaagccgttcaccaat

SEQ ID NO: 124021 - DNA, 30 bp, Artificial Sequence
  Synthetic oligonucleotide
ggcatctacacataccccaaggttaccaat

SEQ ID NO: 124022 - DNA, 30 bp, Artificial Sequence
  Synthetic oligonucleotide
aggtcaggtctccgggaaagtgcagccaat

SEQ ID NO: 124023 - DNA, 30 bp, Artificial Sequence
  Synthetic oligonucleotide
agagtagttgtccgaaaagttcacgccaat

SEQ ID NO: 124024 - DNA, 30 bp, Artificial Sequence
  Synthetic oligonucleotide
acattgctgaactcggggaataccgccaat

SEQ ID NO: 124025 - DNA, 30 bp, Artificial Sequence
  Synthetic oligonucleotide
gtaaacgctaaaggggatctggatgccaat

SEQ ID NO: 124026 - DNA, 30 bp, Artificial Sequence
  Synthetic oligonucleotide
acgttcttggtaaaagaaaggtgctccaat

SEQ ID NO: 124027 - DNA, 30 bp, Artificial Sequence
  Synthetic oligonucleotide
caacgtctgcacgtgctacctgattccaat

SEQ ID NO: 124028 - DNA, 30 bp, Artificial Sequence
  Synthetic oligonucleotide
cacgtactgagcctaaactacggttccaat

SEQ ID NO: 124029 - DNA, 30 bp, Artificial Sequence
  Synthetic oligonucleotide
gcggtgtaacgcatttgagggacgagcaat

SEQ ID NO: 124030 - DNA, 30 bp, Artificial Sequence
  Synthetic oligonucleotide
gacgtaattataagcgctatcgaaggcaat

SEQ ID NO: 124031 - DNA, 30 bp, Artificial Sequence
  Synthetic oligonucleotide
cgtgagatgaaaaactgccaatacggcaat

SEQ ID NO: 124032 - DNA, 30 bp, Artificial Sequence
  Synthetic oligonucleotide
ctcactggacgaacaatccgggcgggcaat

SEQ ID NO: 124033 - DNA, 30 bp, Artificial Sequence
  Synthetic oligonucleotide
agctaacctccgcaaagatagtcgggcaat

SEQ ID NO: 124034 - DNA, 30 bp, Artificial Sequence
  Synthetic oligonucleotide
acggacgccggttgaccgtgtgactgcaat

SEQ ID NO: 124035 - DNA, 30 bp, Artificial Sequence
  Synthetic oligonucleotide
ccctcgatcgtcctagctaagaacatcaat

SEQ ID NO: 124036 - DNA, 30 bp, Artificial Sequence
  Synthetic oligonucleotide
gtgaggttctcatcaaaaaaagccatcaat

SEQ ID NO: 124037 - DNA, 30 bp, Artificial Sequence
  Synthetic oligonucleotide
agatgaggctgagggaaacctggcatcaat

SEQ ID NO: 124038 - DNA, 30 bp, Artificial Sequence
  Synthetic oligonucleotide
tcccgcgtgaggcctgaagtgaaagtcaat

SEQ ID NO: 124039 - DNA, 30 bp, Artificial Sequence
  Synthetic oligonucleotide
ggagtggtgcagacttcagttgccgtcaat

SEQ ID NO: 124040 - DNA, 30 bp, Artificial Sequence
  Synthetic oligonucleotide
tctgcaaatatgagtagagatggcgtcaat

SEQ ID NO: 124041 - DNA, 29 bp, Artificial Sequence
  Synthetic oligonucleotide
tgtcaaattaccctcgcaacgtcttcaat

SEQ ID NO: 124042 - DNA, 30 bp, Artificial Sequence
  Synthetic oligonucleotide
atagagccaatatctggaacagagttcaat

SEQ ID NO: 124043 - DNA, 30 bp, Artificial Sequence
  Synthetic oligonucleotide
gctgaaggaatgaatttggatgatttcaat

SEQ ID NO: 124044 - DNA, 30 bp, Artificial Sequence
  Synthetic oligonucleotide
gggtgctgtcttcagtcgaaccccaagaat

SEQ ID NO: 124045 - DNA, 30 bp, Artificial Sequence
  Synthetic oligonucleotide
gggccaggtgtggatggtaagcgacagaat

SEQ ID NO: 124046 - DNA, 30 bp, Artificial Sequence
  Synthetic oligonucleotide
cgcttttcgaggtaccgtggcagccagaat

SEQ ID NO: 124047 - DNA, 30 bp, Artificial Sequence
  Synthetic oligonucleotide
acagggggagattgggaggcagtgcagaat

SEQ ID NO: 124048 - DNA, 30 bp, Artificial Sequence
  Synthetic oligonucleotide
taaattgacatgtatcgttcagtgcagaat

SEQ ID NO: 124049 - DNA, 30 bp, Artificial Sequence
  Synthetic oligonucleotide
accacggaacactgggatcatcacgagaat

SEQ ID NO: 124050 - DNA, 30 bp, Artificial Sequence
  Synthetic oligonucleotide
agaccacccgagccgacgcggtgcgagaat

SEQ ID NO: 124051 - DNA, 30 bp, Artificial Sequence
  Synthetic oligonucleotide
agcaaagggacacagccaaagtgggagaat

SEQ ID NO: 124052 - DNA, 30 bp, Artificial Sequence
  Synthetic oligonucleotide
aatagggtagccaaacaactcaactagaat

SEQ ID NO: 124053 - DNA, 30 bp, Artificial Sequence
  Synthetic oligonucleotide
gttcaaggggactgacagcacgcgacgaat

SEQ ID NO: 124054 - DNA, 30 bp, Artificial Sequence
  Synthetic oligonucleotide
cgatgcaccgctggcccgatgttgacgaat

SEQ ID NO: 124055 - DNA, 30 bp, Artificial Sequence
  Synthetic oligonucleotide
attacatcgaatattgccgaaactacgaat

SEQ ID NO: 124056 - DNA, 30 bp, Artificial Sequence
  Synthetic oligonucleotide
gagtctggaagtaataaccaaggtacgaat

SEQ ID NO: 124057 - DNA, 30 bp, Artificial Sequence
  Synthetic oligonucleotide
gcaacgcacgcgacaggcaagcttacgaat

SEQ ID NO: 124058 - DNA, 30 bp, Artificial Sequence
  Synthetic oligonucleotide
ctgaaagttacggtaggaaacagaccgaat

SEQ ID NO: 124059 - DNA, 30 bp, Artificial Sequence
  Synthetic oligonucleotide
gcatgacaaccggactaatcttgaccgaat

SEQ ID NO: 124060 - DNA, 30 bp, Artificial Sequence
  Synthetic oligonucleotide
taatagcttgggaccaatagccggccgaat

SEQ ID NO: 124061 - DNA, 30 bp, Artificial Sequence
  Synthetic oligonucleotide
tacaaccggttcccaggagggccagcgaat

SEQ ID NO: 124062 - DNA, 30 bp, Artificial Sequence
  Synthetic oligonucleotide
gacggggagttacatggtcactctgcgaat

SEQ ID NO: 124063 - DNA, 30 bp, Artificial Sequence
  Synthetic oligonucleotide
gttatgggctggacgtgatcagcatcgaat

SEQ ID NO: 124064 - DNA, 30 bp, Artificial Sequence
  Synthetic oligonucleotide
cgagcatgctgcaagcgagaaccctcgaat

SEQ ID NO: 124065 - DNA, 30 bp, Artificial Sequence
  Synthetic oligonucleotide
tcaggaaccactttgttgtaggtctcgaat

SEQ ID NO: 124066 - DNA, 30 bp, Artificial Sequence
  Synthetic oligonucleotide
agcgggcggtcgaccgcaaagaggaggaat

SEQ ID NO: 124067 - DNA, 30 bp, Artificial Sequence
  Synthetic oligonucleotide
gacagttgaaaaacgtggagtaaatggaat

SEQ ID NO: 124068 - DNA, 30 bp, Artificial Sequence
  Synthetic oligonucleotide
gtgccagagatccactattcaccatggaat

SEQ ID NO: 124069 - DNA, 31 bp, Artificial Sequence
  Synthetic oligonucleotide
ttaccagtaatatcaataagcggacatgaat

SEQ ID NO: 124070 - DNA, 30 bp, Artificial Sequence
  Synthetic oligonucleotide
gtcacagatgatacctcggatggcatgaat

SEQ ID NO: 124071 - DNA, 30 bp, Artificial Sequence
  Synthetic oligonucleotide
cggttacttcaggcgcatgacatactgaat

SEQ ID NO: 124072 - DNA, 30 bp, Artificial Sequence
  Synthetic oligonucleotide
tacatcgtgtgtcagaaaccgtagctgaat

SEQ ID NO: 124073 - DNA, 30 bp, Artificial Sequence
  Synthetic oligonucleotide
ggccaagacatcatcaaagagcaagtgaat

SEQ ID NO: 124074 - DNA, 30 bp, Artificial Sequence
  Synthetic oligonucleotide
atggctagttcacgaccgagaccagtgaat

SEQ ID NO: 124075 - DNA, 30 bp, Artificial Sequence
  Synthetic oligonucleotide
gagatcagtgggtagttcgatccagtgaat

SEQ ID NO: 124076 - DNA, 30 bp, Artificial Sequence
  Synthetic oligonucleotide
tctacttgagggaaccacatttgagtgaat

SEQ ID NO: 124077 - DNA, 30 bp, Artificial Sequence
  Synthetic oligonucleotide
tcgtgctggagcgaattgttttgagtgaat

SEQ ID NO: 124078 - DNA, 30 bp, Artificial Sequence
  Synthetic oligonucleotide
ggagaatgcttactgtcagtgaccgtgaat

SEQ ID NO: 124079 - DNA, 30 bp, Artificial Sequence
  Synthetic oligonucleotide
ctgctcacgtgtcgaccgtcccgcttgaat

SEQ ID NO: 124080 - DNA, 30 bp, Artificial Sequence
  Synthetic oligonucleotide
gtacaattcaaatgcgggtgaaggttgaat

SEQ ID NO: 124081 - DNA, 30 bp, Artificial Sequence
  Synthetic oligonucleotide
ggtactcaattcgcgatctattacaataat

SEQ ID NO: 124082 - DNA, 30 bp, Artificial Sequence
  Synthetic oligonucleotide
caggaagtgttgtatgcaaccgcgaataat

SEQ ID NO: 124083 - DNA, 30 bp, Artificial Sequence
  Synthetic oligonucleotide
cagagttggggcaggtggccctggaataat

SEQ ID NO: 124084 - DNA, 30 bp, Artificial Sequence
  Synthetic oligonucleotide
agttaaagacatctagtgggatataataat

SEQ ID NO: 124085 - DNA, 30 bp, Artificial Sequence
  Synthetic oligonucleotide
ggaaggaattcgactagcgaccaccataat

SEQ ID NO: 124086 - DNA, 30 bp, Artificial Sequence
  Synthetic oligonucleotide
gcgtacctactatgtatgtcggtccataat

SEQ ID NO: 124087 - DNA, 30 bp, Artificial Sequence
  Synthetic oligonucleotide
atcatcagctctaacagggatatgcataat

SEQ ID NO: 124088 - DNA, 30 bp, Artificial Sequence
  Synthetic oligonucleotide
ctgcaatccgagactctaatgattcataat

SEQ ID NO: 124089 - DNA, 30 bp, Artificial Sequence
  Synthetic oligonucleotide
atgaggtatgaagattcggcacgcgataat

SEQ ID NO: 124090 - DNA, 30 bp, Artificial Sequence
  Synthetic oligonucleotide
gatatgccaaggacagcataaaaggataat

SEQ ID NO: 124091 - DNA, 30 bp, Artificial Sequence
  Synthetic oligonucleotide
acgcttgtccctgtaccataatgtgataat

SEQ ID NO: 124092 - DNA, 30 bp, Artificial Sequence
  Synthetic oligonucleotide
ggattcgtctgattacaactttaatataat

SEQ ID NO: 124093 - DNA, 30 bp, Artificial Sequence
  Synthetic oligonucleotide
aatgaaacagtcccatgtccaagaactaat

SEQ ID NO: 124094 - DNA, 30 bp, Artificial Sequence
  Synthetic oligonucleotide
cctctttcactgaggaagaccacacctaat

SEQ ID NO: 124095 - DNA, 30 bp, Artificial Sequence
  Synthetic oligonucleotide
gctggtaaagattgaggatagtgtgctaat

SEQ ID NO: 124096 - DNA, 30 bp, Artificial Sequence
  Synthetic oligonucleotide
ctaacgatgtggatatgacaaagatctaat

SEQ ID NO: 124097 - DNA, 30 bp, Artificial Sequence
  Synthetic oligonucleotide
tgctaaacaccgagatcagaacgatctaat

SEQ ID NO: 124098 - DNA, 30 bp, Artificial Sequence
  Synthetic oligonucleotide
agttaagccggtagggcaagcccgtctaat

SEQ ID NO: 124099 - DNA, 30 bp, Artificial Sequence
  Synthetic oligonucleotide
gtccacaaacaaacatttttagcaagtaat

SEQ ID NO: 124100 - DNA, 30 bp, Artificial Sequence
  Synthetic oligonucleotide
ctagaaagaatgctcttgggcatcagtaat

SEQ ID NO: 124101 - DNA, 30 bp, Artificial Sequence
  Synthetic oligonucleotide
atgtacaaggattgccatccaacccgtaat

SEQ ID NO: 124102 - DNA, 30 bp, Artificial Sequence
  Synthetic oligonucleotide
aaggttggggcagactctcggatccgtaat

SEQ ID NO: 124103 - DNA, 30 bp, Artificial Sequence
  Synthetic oligonucleotide
tcataacataggctatttgattagcgtaat

SEQ ID NO: 124104 - DNA, 30 bp, Artificial Sequence
  Synthetic oligonucleotide
tcggggggtaggcgggcatacacctgtaat

SEQ ID NO: 124105 - DNA, 30 bp, Artificial Sequence
  Synthetic oligonucleotide
agtaaaccaatgttatccaaggcctgtaat

SEQ ID NO: 124106 - DNA, 30 bp, Artificial Sequence
  Synthetic oligonucleotide
tcctttctgtctgttgttatttgttgtaat

SEQ ID NO: 124107 - DNA, 30 bp, Artificial Sequence
  Synthetic oligonucleotide
aggcctacacgctacgataggtgaattaat

SEQ ID NO: 124108 - DNA, 30 bp, Artificial Sequence
  Synthetic oligonucleotide
ccaggagaacgagctgctccgtaacttaat

SEQ ID NO: 124109 - DNA, 30 bp, Artificial Sequence
  Synthetic oligonucleotide
cagcgtgagcaccgggagcctaaatttaat

SEQ ID NO: 124110 - DNA, 30 bp, Artificial Sequence
  Synthetic oligonucleotide
agacgatatggcggtcattactcatttaat

SEQ ID NO: 124111 - DNA, 29 bp, Artificial Sequence
  Synthetic oligonucleotide
taatattgcatcatgagtgccggtttaat

SEQ ID NO: 124112 - DNA, 30 bp, Artificial Sequence
  Synthetic oligonucleotide
agacggcactagatacaaagcataaaacat

SEQ ID NO: 124113 - DNA, 30 bp, Artificial Sequence
  Synthetic oligonucleotide
gcatgcgtacagactataactaaacaacat

SEQ ID NO: 124114 - DNA, 30 bp, Artificial Sequence
  Synthetic oligonucleotide
cgttataagtccacccggtcacaacaacat

SEQ ID NO: 124115 - DNA, 30 bp, Artificial Sequence
  Synthetic oligonucleotide
attggagaagacatggggcaaaagcaacat

SEQ ID NO: 124116 - DNA, 30 bp, Artificial Sequence
  Synthetic oligonucleotide
gatcatgatacgcattaagccgagcaacat

SEQ ID NO: 124117 - DNA, 30 bp, Artificial Sequence
  Synthetic oligonucleotide
ttcgtgagggcgattcacgatatgcaacat

SEQ ID NO: 124118 - DNA, 30 bp, Artificial Sequence
  Synthetic oligonucleotide
ggacagtaacccgggatatgctgtcaacat

SEQ ID NO: 124119 - DNA, 30 bp, Artificial Sequence
  Synthetic oligonucleotide
aggatgtgtatatgtgtaggtttagaacat

SEQ ID NO: 124120 - DNA, 30 bp, Artificial Sequence
  Synthetic oligonucleotide
actgtgaagccatggggttgccgggaacat

SEQ ID NO: 124121 - DNA, 30 bp, Artificial Sequence
  Synthetic oligonucleotide
cgtgacccagcgtcgactattaggacacat

SEQ ID NO: 124122 - DNA, 30 bp, Artificial Sequence
  Synthetic oligonucleotide
tgaggttatatagcgattcgtggtacacat

SEQ ID NO: 124123 - DNA, 30 bp, Artificial Sequence
  Synthetic oligonucleotide
aatagataccacaagcggattggtccacat

SEQ ID NO: 124124 - DNA, 30 bp, Artificial Sequence
  Synthetic oligonucleotide
gatgaaaagcagtcccacatgtgcgcacat

SEQ ID NO: 124125 - DNA, 30 bp, Artificial Sequence
  Synthetic oligonucleotide
agaaaaagacggcaggttacaatcgcacat

SEQ ID NO: 124126 - DNA, 30 bp, Artificial Sequence
  Synthetic oligonucleotide
tgagatgtccatggcaaatgattggcacat

SEQ ID NO: 124127 - DNA, 30 bp, Artificial Sequence
  Synthetic oligonucleotide
gatagtaacaccagcgagagtacatcacat

SEQ ID NO: 124128 - DNA, 30 bp, Artificial Sequence
  Synthetic oligonucleotide
tggagctaagattcgggaatcatctcacat

SEQ ID NO: 124129 - DNA, 30 bp, Artificial Sequence
  Synthetic oligonucleotide
ggatgtcggatcctaaggatgcgttcacat

SEQ ID NO: 124130 - DNA, 30 bp, Artificial Sequence
  Synthetic oligonucleotide
gtcgggacgagagatgtatgataaagacat

SEQ ID NO: 124131 - DNA, 30 bp, Artificial Sequence
  Synthetic oligonucleotide
gggcgatcggtactatcgtatcagagacat

SEQ ID NO: 124132 - DNA, 30 bp, Artificial Sequence
  Synthetic oligonucleotide
ctcgcatgcgggaatcggcatcggagacat

SEQ ID NO: 124133 - DNA, 30 bp, Artificial Sequence
  Synthetic oligonucleotide
tagacacgacttctatgaggaacgcgacat

SEQ ID NO: 124134 - DNA, 30 bp, Artificial Sequence
  Synthetic oligonucleotide
gtactaagacaagattgaagttcgcgacat

SEQ ID NO: 124135 - DNA, 30 bp, Artificial Sequence
  Synthetic oligonucleotide
tcactcaaaaaaaggcccaaggccggacat

SEQ ID NO: 124136 - DNA, 30 bp, Artificial Sequence
  Synthetic oligonucleotide
aacgaaagaggtagtcgtagccagggacat

SEQ ID NO: 124137 - DNA, 30 bp, Artificial Sequence
  Synthetic oligonucleotide
caggacagcgaaagctgcgtacattgacat

SEQ ID NO: 124138 - DNA, 30 bp, Artificial Sequence
  Synthetic oligonucleotide
gcctccggtgagccgcggagctgcatacat

SEQ ID NO: 124139 - DNA, 30 bp, Artificial Sequence
  Synthetic oligonucleotide
gactccgcggagggtagctcaatgatacat

SEQ ID NO: 124140 - DNA, 30 bp, Artificial Sequence
  Synthetic oligonucleotide
aaacgcctattcgatgtgatggtgatacat

SEQ ID NO: 124141 - DNA, 30 bp, Artificial Sequence
  Synthetic oligonucleotide
cgcggggctatttagtaagacttactacat

SEQ ID NO: 124142 - DNA, 30 bp, Artificial Sequence
  Synthetic oligonucleotide
tcaagcaaatcatacaattaattcctacat

SEQ ID NO: 124143 - DNA, 30 bp, Artificial Sequence
  Synthetic oligonucleotide
ccagacacagttcattcaaacaacgtacat

SEQ ID NO: 124144 - DNA, 30 bp, Artificial Sequence
  Synthetic oligonucleotide
ccatggtctgaactggttcaccacgtacat

SEQ ID NO: 124145 - DNA, 30 bp, Artificial Sequence
  Synthetic oligonucleotide
ctagtaagagtatttcgcgctatcgtacat

SEQ ID NO: 124146 - DNA, 30 bp, Artificial Sequence
  Synthetic oligonucleotide
tgaaaacgactcatagccgattcgaaccat

SEQ ID NO: 124147 - DNA, 30 bp, Artificial Sequence
  Synthetic oligonucleotide
gggtaaccacctaggctgagccatcaccat

SEQ ID NO: 124148 - DNA, 30 bp, Artificial Sequence
  Synthetic oligonucleotide
tatgtacgaagttagatacgacacgaccat

SEQ ID NO: 124149 - DNA, 30 bp, Artificial Sequence
  Synthetic oligonucleotide
gcacatgaccgtgaaacacggatcgaccat

SEQ ID NO: 124150 - DNA, 30 bp, Artificial Sequence
  Synthetic oligonucleotide
tcactacgggccgattacgacggggaccat

SEQ ID NO: 124151 - DNA, 30 bp, Artificial Sequence
  Synthetic oligonucleotide
tctcgcgctcaaactggaacctctgaccat

SEQ ID NO: 124152 - DNA, 30 bp, Artificial Sequence
  Synthetic oligonucleotide
agacgaggcggagcaagaagtcgctaccat

SEQ ID NO: 124153 - DNA, 30 bp, Artificial Sequence
  Synthetic oligonucleotide
gacgccacgaagaattaattaaagtaccat

SEQ ID NO: 124154 - DNA, 30 bp, Artificial Sequence
  Synthetic oligonucleotide
agggtatttgggctaggcggttagtaccat

SEQ ID NO: 124155 - DNA, 30 bp, Artificial Sequence
  Synthetic oligonucleotide
acggcctttatcgagtgggtgctgtaccat

SEQ ID NO: 124156 - DNA, 30 bp, Artificial Sequence
  Synthetic oligonucleotide
cacacggtcgggagaagtcctggcacccat

SEQ ID NO: 124157 - DNA, 30 bp, Artificial Sequence
  Synthetic oligonucleotide
cactggaatcaggaaactctttactcccat

SEQ ID NO: 124158 - DNA, 30 bp, Artificial Sequence
  Synthetic oligonucleotide
cgggtagcgtttatcggagtttgttcccat

SEQ ID NO: 124159 - DNA, 30 bp, Artificial Sequence
  Synthetic oligonucleotide
taaccgcaccctctggcgggagtcagccat

SEQ ID NO: 124160 - DNA, 30 bp, Artificial Sequence
  Synthetic oligonucleotide
cggcaaaattcatttataccatggagccat

SEQ ID NO: 124161 - DNA, 30 bp, Artificial Sequence
  Synthetic oligonucleotide
agccataggcgcctagtacgccaccgccat

SEQ ID NO: 124162 - DNA, 30 bp, Artificial Sequence
  Synthetic oligonucleotide
agcctacgacgccataaccatacctgccat

SEQ ID NO: 124163 - DNA, 30 bp, Artificial Sequence
  Synthetic oligonucleotide
ggtccatttcatacaattcccgacatccat

SEQ ID NO: 124164 - DNA, 30 bp, Artificial Sequence
  Synthetic oligonucleotide
aatgaggtctacaagggtggcgcgatccat

SEQ ID NO: 124165 - DNA, 30 bp, Artificial Sequence
  Synthetic oligonucleotide
cgagtagatgtctctggcggaatgatccat

SEQ ID NO: 124166 - DNA, 30 bp, Artificial Sequence
  Synthetic oligonucleotide
atcaaccgaaaggtatcgaggatactccat

SEQ ID NO: 124167 - DNA, 30 bp, Artificial Sequence
  Synthetic oligonucleotide
catagcccaatcatcgcacttcatgtccat

SEQ ID NO: 124168 - DNA, 30 bp, Artificial Sequence
  Synthetic oligonucleotide
ggtgatttggtaagcagcgtattattccat

SEQ ID NO: 124169 - DNA, 30 bp, Artificial Sequence
  Synthetic oligonucleotide
tcacggcagctatatcccccagtgttccat

SEQ ID NO: 124170 - DNA, 30 bp, Artificial Sequence
  Synthetic oligonucleotide
cgaaagtacccataaggagactgtttccat

SEQ ID NO: 124171 - DNA, 30 bp, Artificial Sequence
  Synthetic oligonucleotide
gggtttgtgacatatccaacaaaaaagcat

SEQ ID NO: 124172 - DNA, 30 bp, Artificial Sequence
  Synthetic oligonucleotide
cttaagttgagttttaaagcaagcaagcat

SEQ ID NO: 124173 - DNA, 30 bp, Artificial Sequence
  Synthetic oligonucleotide
ggttataggaatgcgctcataaaacagcat

SEQ ID NO: 124174 - DNA, 30 bp, Artificial Sequence
  Synthetic oligonucleotide
tgtagggacagggtcaggcgaagccagcat

SEQ ID NO: 124175 - DNA, 30 bp, Artificial Sequence
  Synthetic oligonucleotide
taaggtactatgaaaagctgtagccagcat

SEQ ID NO: 124176 - DNA, 30 bp, Artificial Sequence
  Synthetic oligonucleotide
agaggactacgatccttattggtccagcat

SEQ ID NO: 124177 - DNA, 30 bp, Artificial Sequence
  Synthetic oligonucleotide
tgtgtctgtggtcttcgagagaacgagcat

SEQ ID NO: 124178 - DNA, 30 bp, Artificial Sequence
  Synthetic oligonucleotide
aattacggataagggagtgaattcgagcat

SEQ ID NO: 124179 - DNA, 30 bp, Artificial Sequence
  Synthetic oligonucleotide
gggagtcagaaaagacagcatcttgagcat

SEQ ID NO: 124180 - DNA, 30 bp, Artificial Sequence
  Synthetic oligonucleotide
tccttgtatagatccggtccgatatagcat

SEQ ID NO: 124181 - DNA, 30 bp, Artificial Sequence
  Synthetic oligonucleotide
gcagcgggctcgagtgtacgattatagcat

SEQ ID NO: 124182 - DNA, 30 bp, Artificial Sequence
  Synthetic oligonucleotide
ctacagaattcgaagaaacctgagtagcat

SEQ ID NO: 124183 - DNA, 30 bp, Artificial Sequence
  Synthetic oligonucleotide
gtccgacacgcgtacgtcggctagtagcat

SEQ ID NO: 124184 - DNA, 30 bp, Artificial Sequence
  Synthetic oligonucleotide
caactatgtgggcgtggcccagtttagcat

SEQ ID NO: 124185 - DNA, 30 bp, Artificial Sequence
  Synthetic oligonucleotide
attcgcggacttgatagaggtgaaacgcat

SEQ ID NO: 124186 - DNA, 30 bp, Artificial Sequence
  Synthetic oligonucleotide
accccagtataggtgagggtgtgcacgcat

SEQ ID NO: 124187 - DNA, 30 bp, Artificial Sequence
  Synthetic oligonucleotide
cctagaggataaataagggcgcacccgcat

SEQ ID NO: 124188 - DNA, 30 bp, Artificial Sequence
  Synthetic oligonucleotide
agctcgtcttctgtcttagttcttccgcat

SEQ ID NO: 124189 - DNA, 30 bp, Artificial Sequence
  Synthetic oligonucleotide
tggctaacggatgtgtgcttgttagcgcat

SEQ ID NO: 124190 - DNA, 30 bp, Artificial Sequence
  Synthetic oligonucleotide
acatgttgtaaaagattacatgttgcgcat

SEQ ID NO: 124191 - DNA, 30 bp, Artificial Sequence
  Synthetic oligonucleotide
gcctcagaaactaaaacattatgaaggcat

SEQ ID NO: 124192 - DNA, 30 bp, Artificial Sequence
  Synthetic oligonucleotide
ataccaatgtctctaataaggggacggcat

SEQ ID NO: 124193 - DNA, 30 bp, Artificial Sequence
  Synthetic oligonucleotide
tcacgcttactggagctggtctatcggcat

SEQ ID NO: 124194 - DNA, 30 bp, Artificial Sequence
  Synthetic oligonucleotide
agtgctagcgatcaaggtctgagcgggcat

SEQ ID NO: 124195 - DNA, 30 bp, Artificial Sequence
  Synthetic oligonucleotide
ggggaacgggtcggccagtcatcggggcat

SEQ ID NO: 124196 - DNA, 30 bp, Artificial Sequence
  Synthetic oligonucleotide
ctaggaatgcatactaggattaatgggcat

SEQ ID NO: 124197 - DNA, 30 bp, Artificial Sequence
  Synthetic oligonucleotide
atctgagatagggtcgccaggataatgcat

SEQ ID NO: 124198 - DNA, 30 bp, Artificial Sequence
  Synthetic oligonucleotide
aggggtggtacttgacaaacgctcatgcat

SEQ ID NO: 124199 - DNA, 30 bp, Artificial Sequence
  Synthetic oligonucleotide
cgtatactctcggtaatctatctcatgcat

SEQ ID NO: 124200 - DNA, 30 bp, Artificial Sequence
  Synthetic oligonucleotide
cttaatgggtaacgaccttcgtagctgcat

SEQ ID NO: 124201 - DNA, 30 bp, Artificial Sequence
  Synthetic oligonucleotide
ctgaaagcaaggcaaaaagaaatgctgcat

SEQ ID NO: 124202 - DNA, 30 bp, Artificial Sequence
  Synthetic oligonucleotide
tacgatctcagcgtacccgtcaatctgcat

SEQ ID NO: 124203 - DNA, 30 bp, Artificial Sequence
  Synthetic oligonucleotide
catgccaaactttccgggcatggcgtgcat

SEQ ID NO: 124204 - DNA, 30 bp, Artificial Sequence
  Synthetic oligonucleotide
atggtcggctaggactaaaaccatttgcat

SEQ ID NO: 124205 - DNA, 30 bp, Artificial Sequence
  Synthetic oligonucleotide
acttcacgtccttagtaccagcaaaatcat

SEQ ID NO: 124206 - DNA, 30 bp, Artificial Sequence
  Synthetic oligonucleotide
ggacgtaacggctggtgtacacgaaatcat

SEQ ID NO: 124207 - DNA, 30 bp, Artificial Sequence
  Synthetic oligonucleotide
ccggtaagggttgcacactcgggcaatcat

SEQ ID NO: 124208 - DNA, 30 bp, Artificial Sequence
  Synthetic oligonucleotide
cacacccgctgccagcatcgctcccatcat

SEQ ID NO: 124209 - DNA, 30 bp, Artificial Sequence
  Synthetic oligonucleotide
aactcgtcccggataaggaccatgcatcat

SEQ ID NO: 124210 - DNA, 30 bp, Artificial Sequence
  Synthetic oligonucleotide
cgtacttaagcgtgttttagggatcatcat

SEQ ID NO: 124211 - DNA, 30 bp, Artificial Sequence
  Synthetic oligonucleotide
cgttgggggtggtttgggtaatcagatcat

SEQ ID NO: 124212 - DNA, 30 bp, Artificial Sequence
  Synthetic oligonucleotide
cttgattgtgggcgtgatgctcgcgatcat

SEQ ID NO: 124213 - DNA, 30 bp, Artificial Sequence
  Synthetic oligonucleotide
gccgggcactgagttgtcccctatgatcat

SEQ ID NO: 124214 - DNA, 30 bp, Artificial Sequence
  Synthetic oligonucleotide
gtgtgctctgaggcaatcgggattgatcat

SEQ ID NO: 124215 - DNA, 30 bp, Artificial Sequence
  Synthetic oligonucleotide
gtggcaaaagccggtacatctgaatatcat

SEQ ID NO: 124216 - DNA, 30 bp, Artificial Sequence
  Synthetic oligonucleotide
aagggttcaagggcaagtctggtatatcat

SEQ ID NO: 124217 - DNA, 30 bp, Artificial Sequence
  Synthetic oligonucleotide
gaactctagcaattaaagatcatcactcat

SEQ ID NO: 124218 - DNA, 30 bp, Artificial Sequence
  Synthetic oligonucleotide
agcctggcgggtgggcgggggctgactcat

SEQ ID NO: 124219 - DNA, 30 bp, Artificial Sequence
  Synthetic oligonucleotide
gcttgaggcgtacacagacggactactcat

SEQ ID NO: 124220 - DNA, 30 bp, Artificial Sequence
  Synthetic oligonucleotide
ggagaggataataaatacctaggccctcat

SEQ ID NO: 124221 - DNA, 30 bp, Artificial Sequence
  Synthetic oligonucleotide
taccggattactatcaaagtaaacgctcat

SEQ ID NO: 124222 - DNA, 30 bp, Artificial Sequence
  Synthetic oligonucleotide
ctcaagacgctcaggtggtgaagaagtcat

SEQ ID NO: 124223 - DNA, 30 bp, Artificial Sequence
  Synthetic oligonucleotide
tatcggtccacgagtgcgaatggacgtcat

SEQ ID NO: 124224 - DNA, 30 bp, Artificial Sequence
  Synthetic oligonucleotide
agtccgatcgatagagtaaggcaccgtcat

SEQ ID NO: 124225 - DNA, 30 bp, Artificial Sequence
  Synthetic oligonucleotide
tcttgagacaggtggtttactctccgtcat

SEQ ID NO: 124226 - DNA, 30 bp, Artificial Sequence
  Synthetic oligonucleotide
gctatcctggaaaagatacgccctcgtcat

SEQ ID NO: 124227 - DNA, 30 bp, Artificial Sequence
  Synthetic oligonucleotide
cttgcaaggatgggttatagaacaggtcat

SEQ ID NO: 124228 - DNA, 30 bp, Artificial Sequence
  Synthetic oligonucleotide
gaccggggtacagtcgggaatagaggtcat

SEQ ID NO: 124229 - DNA, 30 bp, Artificial Sequence
  Synthetic oligonucleotide
cggttctcgggtagacaagtcgacggtcat

SEQ ID NO: 124230 - DNA, 30 bp, Artificial Sequence
  Synthetic oligonucleotide
agggagcctggcaggaacgggagctgtcat

SEQ ID NO: 124231 - DNA, 30 bp, Artificial Sequence
  Synthetic oligonucleotide
ggataaacatcagtcatggcagtgtgtcat

SEQ ID NO: 124232 - DNA, 30 bp, Artificial Sequence
  Synthetic oligonucleotide
tggggaccggtttgtcagactcattgtcat

SEQ ID NO: 124233 - DNA, 30 bp, Artificial Sequence
  Synthetic oligonucleotide
ggagtcaatcaatctacgaaccaaattcat

SEQ ID NO: 124234 - DNA, 30 bp, Artificial Sequence
  Synthetic oligonucleotide
cgaacgtgcatcttatgttgaagaattcat

SEQ ID NO: 124235 - DNA, 30 bp, Artificial Sequence
  Synthetic oligonucleotide
gcatgcgcgggagttatgcgtcacattcat

SEQ ID NO: 124236 - DNA, 30 bp, Artificial Sequence
  Synthetic oligonucleotide
ccctaatttccagtcgagaagccgattcat

SEQ ID NO: 124237 - DNA, 30 bp, Artificial Sequence
  Synthetic oligonucleotide
ccaagtcatatcacgggaatataacttcat

SEQ ID NO: 124238 - DNA, 30 bp, Artificial Sequence
  Synthetic oligonucleotide
aagagcccacatctcataggtcagcttcat

SEQ ID NO: 124239 - DNA, 30 bp, Artificial Sequence
  Synthetic oligonucleotide
gccgatcagggccctagcgccagtgttcat

SEQ ID NO: 124240 - DNA, 30 bp, Artificial Sequence
  Synthetic oligonucleotide
agttcgcggatttgggcactgttatttcat

SEQ ID NO: 124241 - DNA, 30 bp, Artificial Sequence
  Synthetic oligonucleotide
ggcaagtcgctccggcctggaaaaaaagat

SEQ ID NO: 124242 - DNA, 30 bp, Artificial Sequence
  Synthetic oligonucleotide
cctttgatctgaggtgacatccaaaaagat

SEQ ID NO: 124243 - DNA, 30 bp, Artificial Sequence
  Synthetic oligonucleotide
ttcaattcagagcgtcgctaaggcaaagat

SEQ ID NO: 124244 - DNA, 30 bp, Artificial Sequence
  Synthetic oligonucleotide
gtgagtgaagtgtagttctacctcaaagat

SEQ ID NO: 124245 - DNA, 30 bp, Artificial Sequence
  Synthetic oligonucleotide
tcattcggtgatttgggacggccacaagat

SEQ ID NO: 124246 - DNA, 30 bp, Artificial Sequence
  Synthetic oligonucleotide
agagcaaatgttgagtaccagtcacaagat

SEQ ID NO: 124247 - DNA, 30 bp, Artificial Sequence
  Synthetic oligonucleotide
ctaccgcgcctattagtatagtgacaagat

SEQ ID NO: 124248 - DNA, 30 bp, Artificial Sequence
  Synthetic oligonucleotide
taattgctaaatgcgagggatgaccaagat

SEQ ID NO: 124249 - DNA, 30 bp, Artificial Sequence
  Synthetic oligonucleotide
caatacctgcgatcgtattgggggcaagat

SEQ ID NO: 124250 - DNA, 30 bp, Artificial Sequence
  Synthetic oligonucleotide
cttaagtcacggattaagtacatcgaagat

SEQ ID NO: 124251 - DNA, 30 bp, Artificial Sequence
  Synthetic oligonucleotide
tagaatgtactactatatgctaaggaagat

SEQ ID NO: 124252 - DNA, 30 bp, Artificial Sequence
  Synthetic oligonucleotide
cacctcaaatactaaattcaccaggaagat

SEQ ID NO: 124253 - DNA, 30 bp, Artificial Sequence
  Synthetic oligonucleotide
atcgaggctggataatcggccacggaagat

SEQ ID NO: 124254 - DNA, 30 bp, Artificial Sequence
  Synthetic oligonucleotide
tggttccgatgtgaccgctccccggaagat

SEQ ID NO: 124255 - DNA, 30 bp, Artificial Sequence
  Synthetic oligonucleotide
gataccatcacgttttgggaccaataagat

SEQ ID NO: 124256 - DNA, 30 bp, Artificial Sequence
  Synthetic oligonucleotide
ttgatacaccctgcttgataatcctaagat

SEQ ID NO: 124257 - DNA, 30 bp, Artificial Sequence
  Synthetic oligonucleotide
ggtggccccaaggcccgcaggaagtaagat

SEQ ID NO: 124258 - DNA, 30 bp, Artificial Sequence
  Synthetic oligonucleotide
ggttgtcgagtcccaactcatcattaagat

SEQ ID NO: 124259 - DNA, 30 bp, Artificial Sequence
  Synthetic oligonucleotide
gtatgcagtcccaagccgcgagattaagat

SEQ ID NO: 124260 - DNA, 30 bp, Artificial Sequence
  Synthetic oligonucleotide
cgcgttaagaaaaccaatcgagcttaagat

SEQ ID NO: 124261 - DNA, 30 bp, Artificial Sequence
  Synthetic oligonucleotide
aagtgagccagtttaacgcaccgttaagat

SEQ ID NO: 124262 - DNA, 30 bp, Artificial Sequence
  Synthetic oligonucleotide
ggatccggcatatttcgaacaagcccagat

SEQ ID NO: 124263 - DNA, 30 bp, Artificial Sequence
  Synthetic oligonucleotide
acaacgcccagcggtatattgatcccagat

SEQ ID NO: 124264 - DNA, 30 bp, Artificial Sequence
  Synthetic oligonucleotide
aggccgaacttgatcccttgctatccagat

SEQ ID NO: 124265 - DNA, 30 bp, Artificial Sequence
  Synthetic oligonucleotide
cggataaggacggtgagacgaagtccagat

SEQ ID NO: 124266 - DNA, 30 bp, Artificial Sequence
  Synthetic oligonucleotide
ggcgacagtgtcgtatgactcccagcagat

SEQ ID NO: 124267 - DNA, 30 bp, Artificial Sequence
  Synthetic oligonucleotide
tatggtataggccccacacatcgagcagat

SEQ ID NO: 124268 - DNA, 30 bp, Artificial Sequence
  Synthetic oligonucleotide
ttgtggaatggcatttggactaaatcagat

SEQ ID NO: 124269 - DNA, 30 bp, Artificial Sequence
  Synthetic oligonucleotide
atgtgatgtacatgaaactcaatctcagat

SEQ ID NO: 124270 - DNA, 30 bp, Artificial Sequence
  Synthetic oligonucleotide
tttcagaaacatgcgatgttgaggtcagat

SEQ ID NO: 124271 - DNA, 30 bp, Artificial Sequence
  Synthetic oligonucleotide
gatggctaagattgtacatcggtccgagat

SEQ ID NO: 124272 - DNA, 30 bp, Artificial Sequence
  Synthetic oligonucleotide
agaaaccttcgaggtgctacccggcgagat

SEQ ID NO: 124273 - DNA, 30 bp, Artificial Sequence
  Synthetic oligonucleotide
ggatgcgcaggagcatcatattctcgagat

SEQ ID NO: 124274 - DNA, 30 bp, Artificial Sequence
  Synthetic oligonucleotide
ttgtactcttactacatgatctgtcgagat

SEQ ID NO: 124275 - DNA, 30 bp, Artificial Sequence
  Synthetic oligonucleotide
gggaccgtatgctcaccaagccaaggagat

SEQ ID NO: 124276 - DNA, 30 bp, Artificial Sequence
  Synthetic oligonucleotide
cggcagtacctcgcttacgacataggagat

SEQ ID NO: 124277 - DNA, 31 bp, Artificial Sequence
  Synthetic oligonucleotide
cagagggtctgtagtagccagtgccggagat

SEQ ID NO: 124278 - DNA, 30 bp, Artificial Sequence
  Synthetic oligonucleotide
cgaagcgcgggtgcatatacaccgggagat

SEQ ID NO: 124279 - DNA, 30 bp, Artificial Sequence
  Synthetic oligonucleotide
aagatcaaaaacgttgagcacttgggagat

SEQ ID NO: 124280 - DNA, 30 bp, Artificial Sequence
  Synthetic oligonucleotide
gtagcagtgagcgtcaactccgaatgagat

SEQ ID NO: 124281 - DNA, 30 bp, Artificial Sequence
  Synthetic oligonucleotide
acgagttataaacgagtcatggcatgagat

SEQ ID NO: 124282 - DNA, 30 bp, Artificial Sequence
  Synthetic oligonucleotide
catcaaacggaacatcggcattgctgagat

SEQ ID NO: 124283 - DNA, 30 bp, Artificial Sequence
  Synthetic oligonucleotide
caaggcgaggtctcgtgaacaaagtgagat

SEQ ID NO: 124284 - DNA, 30 bp, Artificial Sequence
  Synthetic oligonucleotide
cacaaacaacgcgagcgattgcggtgagat

SEQ ID NO: 124285 - DNA, 30 bp, Artificial Sequence
  Synthetic oligonucleotide
tagcggtcaggaccaagcctattgtgagat

SEQ ID NO: 124286 - DNA, 30 bp, Artificial Sequence
  Synthetic oligonucleotide
agcgagcaaaataagtctagtgaaatagat

SEQ ID NO: 124287 - DNA, 30 bp, Artificial Sequence
  Synthetic oligonucleotide
ataataggcacgatgacaagtttaatagat

SEQ ID NO: 124288 - DNA, 30 bp, Artificial Sequence
  Synthetic oligonucleotide
gacaggaggttaccccttttaaaactagat

SEQ ID NO: 124289 - DNA, 30 bp, Artificial Sequence
  Synthetic oligonucleotide
aaaaaccgggcgtaagaacgcgagctagat

SEQ ID NO: 124290 - DNA, 30 bp, Artificial Sequence
  Synthetic oligonucleotide
actgctaaactgcggccgaacagtctagat

SEQ ID NO: 124291 - DNA, 30 bp, Artificial Sequence
  Synthetic oligonucleotide
agttgcttcctccgagcaggtcgggtagat

SEQ ID NO: 124292 - DNA, 30 bp, Artificial Sequence
  Synthetic oligonucleotide
tagagacgtgatggtgccctgatggtagat

SEQ ID NO: 124293 - DNA, 30 bp, Artificial Sequence
  Synthetic oligonucleotide
gaagaagctcacactctatgctttgtagat

SEQ ID NO: 124294 - DNA, 30 bp, Artificial Sequence
  Synthetic oligonucleotide
gggccgacatgacactcagattttgtagat

SEQ ID NO: 124295 - DNA, 30 bp, Artificial Sequence
  Synthetic oligonucleotide
ggagagcaacagcaaactctcacattagat

SEQ ID NO: 124296 - DNA, 30 bp, Artificial Sequence
  Synthetic oligonucleotide
aaggcaagagaggctgccaacagcttagat

SEQ ID NO: 124297 - DNA, 30 bp, Artificial Sequence
  Synthetic oligonucleotide
tcgccgagcgagatagtgctcggtttagat

SEQ ID NO: 124298 - DNA, 30 bp, Artificial Sequence
  Synthetic oligonucleotide
atgacacaaggaccaggcaacggcaacgat

SEQ ID NO: 124299 - DNA, 30 bp, Artificial Sequence
  Synthetic oligonucleotide
agaatgaagtgaccgcctcgtgttaacgat

SEQ ID NO: 124300 - DNA, 30 bp, Artificial Sequence
  Synthetic oligonucleotide
aggtagggaggtaagtctccctttaacgat

SEQ ID NO: 124301 - DNA, 30 bp, Artificial Sequence
  Synthetic oligonucleotide
accatttcggaacggatcgcgtgacacgat

SEQ ID NO: 124302 - DNA, 30 bp, Artificial Sequence
  Synthetic oligonucleotide
atacgaggcggaaggacgcttaaccacgat

SEQ ID NO: 124303 - DNA, 30 bp, Artificial Sequence
  Synthetic oligonucleotide
cgcggtgacccctttccgaatatccacgat

SEQ ID NO: 124304 - DNA, 30 bp, Artificial Sequence
  Synthetic oligonucleotide
ggagggcagtaacaatacagaacagacgat

SEQ ID NO: 124305 - DNA, 30 bp, Artificial Sequence
  Synthetic oligonucleotide
gttaccgaacatccgattactggagacgat

SEQ ID NO: 124306 - DNA, 30 bp, Artificial Sequence
  Synthetic oligonucleotide
ggagatggcattgaataccggtgcgacgat

SEQ ID NO: 124307 - DNA, 30 bp, Artificial Sequence
  Synthetic oligonucleotide
ccatggaataatctcgaggtccattacgat

SEQ ID NO: 124308 - DNA, 30 bp, Artificial Sequence
  Synthetic oligonucleotide
atgtaaacacccaaagttcttgattacgat

SEQ ID NO: 124309 - DNA, 30 bp, Artificial Sequence
  Synthetic oligonucleotide
gtagtcggtaaggatagaaagggtaccgat

SEQ ID NO: 124310 - DNA, 30 bp, Artificial Sequence
  Synthetic oligonucleotide
gctcactactgagaatgcttttagcccgat

SEQ ID NO: 124311 - DNA, 30 bp, Artificial Sequence
  Synthetic oligonucleotide
gggagactgtacactgaaacgcatgccgat

SEQ ID NO: 124312 - DNA, 30 bp, Artificial Sequence
  Synthetic oligonucleotide
tgattcgggactcaaattagaccatccgat

SEQ ID NO: 124313 - DNA, 30 bp, Artificial Sequence
  Synthetic oligonucleotide
tcttgcatagttgggtttcgggcgtccgat

SEQ ID NO: 124314 - DNA, 30 bp, Artificial Sequence
  Synthetic oligonucleotide
cggtcaacgacttatacgggtaacagcgat

SEQ ID NO: 124315 - DNA, 30 bp, Artificial Sequence
  Synthetic oligonucleotide
ccttaggtcccagagacattcaccagcgat

SEQ ID NO: 124316 - DNA, 30 bp, Artificial Sequence
  Synthetic oligonucleotide
tgtgaaagttattcatctgtagatagcgat

SEQ ID NO: 124317 - DNA, 30 bp, Artificial Sequence
  Synthetic oligonucleotide
agtaaaattcaaaatgggaccagtagcgat

SEQ ID NO: 124318 - DNA, 30 bp, Artificial Sequence
  Synthetic oligonucleotide
gataggacacccaagcacaggcagcgcgat

SEQ ID NO: 124319 - DNA, 29 bp, Artificial Sequence
  Synthetic oligonucleotide
gggagtagcaaccgtaaagctagggcgat

SEQ ID NO: 124320 - DNA, 30 bp, Artificial Sequence
  Synthetic oligonucleotide
cagggactgtcctacagcgcctagtgcgat

SEQ ID NO: 124321 - DNA, 30 bp, Artificial Sequence
  Synthetic oligonucleotide
tttatgggcagaggaatgttgacgtgcgat

SEQ ID NO: 124322 - DNA, 30 bp, Artificial Sequence
  Synthetic oligonucleotide
tcggcgatttttctaagtgaatcgtgcgat

SEQ ID NO: 124323 - DNA, 30 bp, Artificial Sequence
  Synthetic oligonucleotide
tggttcggatagttagagcggaaaatcgat

SEQ ID NO: 124324 - DNA, 30 bp, Artificial Sequence
  Synthetic oligonucleotide
gatcatggggaagggaaggcgctactcgat

SEQ ID NO: 124325 - DNA, 30 bp, Artificial Sequence
  Synthetic oligonucleotide
aggggatttagtcctgtaactcacctcgat

SEQ ID NO: 124326 - DNA, 30 bp, Artificial Sequence
  Synthetic oligonucleotide
tagaaatgaaggacggacgagaagttcgat

SEQ ID NO: 124327 - DNA, 30 bp, Artificial Sequence
  Synthetic oligonucleotide
tcgacattagtacacatgtacgccaaggat

SEQ ID NO: 124328 - DNA, 30 bp, Artificial Sequence
  Synthetic oligonucleotide
tagctagcggggaacggcaatttgaaggat

SEQ ID NO: 124329 - DNA, 30 bp, Artificial Sequence
  Synthetic oligonucleotide
cttgcgatattcgggtaataatgtaaggat

SEQ ID NO: 124330 - DNA, 30 bp, Artificial Sequence
  Synthetic oligonucleotide
cgccattgtcggaaaaagggtctacaggat

SEQ ID NO: 124331 - DNA, 30 bp, Artificial Sequence
  Synthetic oligonucleotide
ctgtcggatggctgccgcaatgaagaggat

SEQ ID NO: 124332 - DNA, 30 bp, Artificial Sequence
  Synthetic oligonucleotide
gtgcgcaggggcaatgtcaatgcagaggat

SEQ ID NO: 124333 - DNA, 30 bp, Artificial Sequence
  Synthetic oligonucleotide
ccatgtacgccagtaaagacacactaggat

SEQ ID NO: 124334 - DNA, 30 bp, Artificial Sequence
  Synthetic oligonucleotide
taggcggaaacctgctcagtggcgtaggat

SEQ ID NO: 124335 - DNA, 30 bp, Artificial Sequence
  Synthetic oligonucleotide
aggtacatttgccgctatgtcgtcccggat

SEQ ID NO: 124336 - DNA, 30 bp, Artificial Sequence
  Synthetic oligonucleotide
cgcgtttggaagggactatataatccggat

SEQ ID NO: 124337 - DNA, 30 bp, Artificial Sequence
  Synthetic oligonucleotide
aaatgcgtgactggctctcggaaggcggat

SEQ ID NO: 124338 - DNA, 30 bp, Artificial Sequence
  Synthetic oligonucleotide
acatgctgcgactaggttacatatgcggat

SEQ ID NO: 124339 - DNA, 30 bp, Artificial Sequence
  Synthetic oligonucleotide
gctcggcatactctatcgcctgctgcggat

SEQ ID NO: 124340 - DNA, 30 bp, Artificial Sequence
  Synthetic oligonucleotide
tcgtgaaatctgtaaggatataattcggat

SEQ ID NO: 124341 - DNA, 30 bp, Artificial Sequence
  Synthetic oligonucleotide
cttataagtctcacgaatgccacaagggat

SEQ ID NO: 124342 - DNA, 31 bp, Artificial Sequence
  Synthetic oligonucleotide
tcataatacgaggccttaattagcaagggat

SEQ ID NO: 124343 - DNA, 30 bp, Artificial Sequence
  Synthetic oligonucleotide
aacttgcggggtactaaagccctacgggat

SEQ ID NO: 124344 - DNA, 30 bp, Artificial Sequence
  Synthetic oligonucleotide
tgacacatgtgtacgagagtggggcgggat

SEQ ID NO: 124345 - DNA, 30 bp, Artificial Sequence
  Synthetic oligonucleotide
aaagatcattggtaatgaactgggcgggat

SEQ ID NO: 124346 - DNA, 30 bp, Artificial Sequence
  Synthetic oligonucleotide
actgtataaaacaacgtattacagggggat

SEQ ID NO: 124347 - DNA, 38 bp, Artificial Sequence
  Synthetic oligonucleotide
ttgatataaacgatttatgaccggcgtattatggggat

SEQ ID NO: 124348 - DNA, 30 bp, Artificial Sequence
  Synthetic oligonucleotide
tgtgacagaccgacgcgggttgaatgggat

SEQ ID NO: 124349 - DNA, 30 bp, Artificial Sequence
  Synthetic oligonucleotide
ggaatcaagtgcccttacagtccgtgggat

SEQ ID NO: 124350 - DNA, 30 bp, Artificial Sequence
  Synthetic oligonucleotide
acgaaaagagagccctacctattgtgggat

SEQ ID NO: 124351 - DNA, 30 bp, Artificial Sequence
  Synthetic oligonucleotide
acgtaatgaatagtccttattaccatggat

SEQ ID NO: 124352 - DNA, 30 bp, Artificial Sequence
  Synthetic oligonucleotide
ggaggttggtattcatgaacaggtatggat

SEQ ID NO: 124353 - DNA, 30 bp, Artificial Sequence
  Synthetic oligonucleotide
aagctaacgtaggactaggtctatctggat

SEQ ID NO: 124354 - DNA, 30 bp, Artificial Sequence
  Synthetic oligonucleotide
tgatgaatagcccggctcgggtgcgtggat

SEQ ID NO: 124355 - DNA, 30 bp, Artificial Sequence
  Synthetic oligonucleotide
gctagcaaaggaacctacccaatcttggat

SEQ ID NO: 124356 - DNA, 30 bp, Artificial Sequence
  Synthetic oligonucleotide
acgaccatcggaagcagactttatttggat

SEQ ID NO: 124357 - DNA, 30 bp, Artificial Sequence
  Synthetic oligonucleotide
gcggagatatgacttggtgcccgcaatgat

SEQ ID NO: 124358 - DNA, 30 bp, Artificial Sequence
  Synthetic oligonucleotide
gagaaaggaaggtgagaacctaaccatgat

SEQ ID NO: 124359 - DNA, 30 bp, Artificial Sequence
  Synthetic oligonucleotide
agagacctattagtcagagaaacgcatgat

SEQ ID NO: 124360 - DNA, 30 bp, Artificial Sequence
  Synthetic oligonucleotide
atttcgtggagacggcccccacacgatgat

SEQ ID NO: 124361 - DNA, 30 bp, Artificial Sequence
  Synthetic oligonucleotide
cgtaacagaagttggccgtaagatgatgat

SEQ ID NO: 124362 - DNA, 30 bp, Artificial Sequence
  Synthetic oligonucleotide
gcagacggagtggcggttctgccatctgat

SEQ ID NO: 124363 - DNA, 30 bp, Artificial Sequence
  Synthetic oligonucleotide
ggagacactagcctcgcttggaactctgat

SEQ ID NO: 124364 - DNA, 30 bp, Artificial Sequence
  Synthetic oligonucleotide
ctcaggcttgattcgcttaccgcctctgat

SEQ ID NO: 124365 - DNA, 30 bp, Artificial Sequence
  Synthetic oligonucleotide
ttcataggacaccgagaggttgcgtctgat

SEQ ID NO: 124366 - DNA, 30 bp, Artificial Sequence
  Synthetic oligonucleotide
ttggagtgacatgagtaccataggagtgat

SEQ ID NO: 124367 - DNA, 30 bp, Artificial Sequence
  Synthetic oligonucleotide
agccggaaggtgcctaattacaatagtgat

SEQ ID NO: 124368 - DNA, 30 bp, Artificial Sequence
  Synthetic oligonucleotide
attacggacgatcctcccgtagcaggtgat

SEQ ID NO: 124369 - DNA, 30 bp, Artificial Sequence
  Synthetic oligonucleotide
acggaaattacaaattacctaataggtgat

SEQ ID NO: 124370 - DNA, 30 bp, Artificial Sequence
  Synthetic oligonucleotide
gcggtaggtcgcaaagggagtcgtggtgat

SEQ ID NO: 124371 - DNA, 30 bp, Artificial Sequence
  Synthetic oligonucleotide
agaagtgcctatagagtgaccaagtgtgat

SEQ ID NO: 124372 - DNA, 30 bp, Artificial Sequence
  Synthetic oligonucleotide
gtctacgaggtaagtggggaatgttgtgat

SEQ ID NO: 124373 - DNA, 30 bp, Artificial Sequence
  Synthetic oligonucleotide
ctgcctatttgggcgatcacatgcattgat

SEQ ID NO: 124374 - DNA, 30 bp, Artificial Sequence
  Synthetic oligonucleotide
catatagatggcactccgacgaagattgat

SEQ ID NO: 124375 - DNA, 30 bp, Artificial Sequence
  Synthetic oligonucleotide
gtgcgtgaggtcacgctttaacaacttgat

SEQ ID NO: 124376 - DNA, 30 bp, Artificial Sequence
  Synthetic oligonucleotide
tgttctcaaataggggcaaggacacttgat

SEQ ID NO: 124377 - DNA, 30 bp, Artificial Sequence
  Synthetic oligonucleotide
ctagcgtaatacccgggataagtccttgat

SEQ ID NO: 124378 - DNA, 30 bp, Artificial Sequence
  Synthetic oligonucleotide
tcgtgggtgccaattcgcaatttccttgat

SEQ ID NO: 124379 - DNA, 30 bp, Artificial Sequence
  Synthetic oligonucleotide
tcacgagggcggtgtaattaggggcttgat

SEQ ID NO: 124380 - DNA, 30 bp, Artificial Sequence
  Synthetic oligonucleotide
acgccattggtggggagtaattgtcttgat

SEQ ID NO: 124381 - DNA, 30 bp, Artificial Sequence
  Synthetic oligonucleotide
gtatgacagtatatagagagggcatttgat

SEQ ID NO: 124382 - DNA, 30 bp, Artificial Sequence
  Synthetic oligonucleotide
aggaggatgtcggccagcggggcaaaatat

SEQ ID NO: 124383 - DNA, 30 bp, Artificial Sequence
  Synthetic oligonucleotide
ccgagtccgagtaaaaagaataccaaatat

SEQ ID NO: 124384 - DNA, 30 bp, Artificial Sequence
  Synthetic oligonucleotide
tgtctgtagagactaggagcgcggaaatat

SEQ ID NO: 124385 - DNA, 30 bp, Artificial Sequence
  Synthetic oligonucleotide
atgcaattggaagcagagatgccacaatat

SEQ ID NO: 124386 - DNA, 30 bp, Artificial Sequence
  Synthetic oligonucleotide
gcgataggaatgtctagtttacgccaatat

SEQ ID NO: 124387 - DNA, 30 bp, Artificial Sequence
  Synthetic oligonucleotide
ggccggcggagcctcaggttaatagaatat

SEQ ID NO: 124388 - DNA, 30 bp, Artificial Sequence
  Synthetic oligonucleotide
ctgaagggctggcttgacctggacgaatat

SEQ ID NO: 124389 - DNA, 30 bp, Artificial Sequence
  Synthetic oligonucleotide
aaatgcggtctggcatcacagactgaatat

SEQ ID NO: 124390 - DNA, 30 bp, Artificial Sequence
  Synthetic oligonucleotide
gtggatatgccagaaaggtgtgctgaatat

SEQ ID NO: 124391 - DNA, 30 bp, Artificial Sequence
  Synthetic oligonucleotide
tgtctgaggtgtagtgtatggcattaatat

SEQ ID NO: 124392 - DNA, 30 bp, Artificial Sequence
  Synthetic oligonucleotide
ggctcaaatactattgacatgcgttaatat

SEQ ID NO: 124393 - DNA, 30 bp, Artificial Sequence
  Synthetic oligonucleotide
taggtgttagcgtaccaagggatcacatat

SEQ ID NO: 124394 - DNA, 30 bp, Artificial Sequence
  Synthetic oligonucleotide
acacacgtggctgacagtcaccagacatat

SEQ ID NO: 124395 - DNA, 30 bp, Artificial Sequence
  Synthetic oligonucleotide
tctcgggcacgtgaaagccggcatccatat

SEQ ID NO: 124396 - DNA, 30 bp, Artificial Sequence
  Synthetic oligonucleotide
agggacttgtgccatcagagctatccatat

SEQ ID NO: 124397 - DNA, 30 bp, Artificial Sequence
  Synthetic oligonucleotide
gacggggttggataaattatatgagcatat

SEQ ID NO: 124398 - DNA, 30 bp, Artificial Sequence
  Synthetic oligonucleotide
cctatgtaggttaggtaaccagcggcatat

SEQ ID NO: 124399 - DNA, 30 bp, Artificial Sequence
  Synthetic oligonucleotide
cactgatcccaccgtccaaacgtatcatat

SEQ ID NO: 124400 - DNA, 30 bp, Artificial Sequence
  Synthetic oligonucleotide
ggtgcatcgtgagggctggacgtgtcatat

SEQ ID NO: 124401 - DNA, 30 bp, Artificial Sequence
  Synthetic oligonucleotide
tcgccatgggcgggaactgccttaagatat

SEQ ID NO: 124402 - DNA, 30 bp, Artificial Sequence
  Synthetic oligonucleotide
ctagtaccatccaacctgatacatagatat

SEQ ID NO: 124403 - DNA, 30 bp, Artificial Sequence
  Synthetic oligonucleotide
ctaacaaaacggcgttaacctctacgatat

SEQ ID NO: 124404 - DNA, 30 bp, Artificial Sequence
  Synthetic oligonucleotide
agtaagcacaccagtaagtgtaggcgatat

SEQ ID NO: 124405 - DNA, 30 bp, Artificial Sequence
  Synthetic oligonucleotide
gagtatatatattggtgaggtcggcgatat

SEQ ID NO: 124406 - DNA, 30 bp, Artificial Sequence
  Synthetic oligonucleotide
agaatggaggcgtataccaactatcgatat

SEQ ID NO: 124407 - DNA, 30 bp, Artificial Sequence
  Synthetic oligonucleotide
cggagcactacgcgtcaagaccacggatat

SEQ ID NO: 124408 - DNA, 30 bp, Artificial Sequence
  Synthetic oligonucleotide
tcgtttagcagtctcgacatggggggatat

SEQ ID NO: 124409 - DNA, 30 bp, Artificial Sequence
  Synthetic oligonucleotide
cctagtcacaagttgtgagatcatggatat

SEQ ID NO: 124410 - DNA, 30 bp, Artificial Sequence
  Synthetic oligonucleotide
aagctggcagagtactgagaagcatgatat

SEQ ID NO: 124411 - DNA, 30 bp, Artificial Sequence
  Synthetic oligonucleotide
atctcaagatgtgctaatgaaatatgatat

SEQ ID NO: 124412 - DNA, 30 bp, Artificial Sequence
  Synthetic oligonucleotide
ttgtgtcgtttatacggagacggttgatat

SEQ ID NO: 124413 - DNA, 30 bp, Artificial Sequence
  Synthetic oligonucleotide
gccggtaagctctctgatcagcgaatatat

SEQ ID NO: 124414 - DNA, 30 bp, Artificial Sequence
  Synthetic oligonucleotide
gagatcacgtcttccgattcaccgatatat

SEQ ID NO: 124415 - DNA, 30 bp, Artificial Sequence
  Synthetic oligonucleotide
gcatctgatgacacggactatgtgatatat

SEQ ID NO: 124416 - DNA, 30 bp, Artificial Sequence
  Synthetic oligonucleotide
agttcggcgtgagtattgatatcagtatat

SEQ ID NO: 124417 - DNA, 30 bp, Artificial Sequence
  Synthetic oligonucleotide
ttcgatcaagctcgtttgccgatagtatat

SEQ ID NO: 124418 - DNA, 30 bp, Artificial Sequence
  Synthetic oligonucleotide
acgaacgttcgtccacgcaatatcgtatat

SEQ ID NO: 124419 - DNA, 30 bp, Artificial Sequence
  Synthetic oligonucleotide
tgaggggtggtattcttaggattggtatat

SEQ ID NO: 124420 - DNA, 30 bp, Artificial Sequence
  Synthetic oligonucleotide
gaaagtctggtatacgtgccatgtgtatat

SEQ ID NO: 124421 - DNA, 30 bp, Artificial Sequence
  Synthetic oligonucleotide
gctcaccgttaggggtgggagcgattatat

SEQ ID NO: 124422 - DNA, 37 bp, Artificial Sequence
  Synthetic oligonucleotide
tgaatcaaggtcacctatccacttaatcgacttatat

SEQ ID NO: 124423 - DNA, 30 bp, Artificial Sequence
  Synthetic oligonucleotide
gttatagctgggctggtgggacagttatat

SEQ ID NO: 124424 - DNA, 30 bp, Artificial Sequence
  Synthetic oligonucleotide
caaggaaatcagtcttaatttctcaactat

SEQ ID NO: 124425 - DNA, 30 bp, Artificial Sequence
  Synthetic oligonucleotide
agctgacacgggcaatcaacgtttaactat

SEQ ID NO: 124426 - DNA, 30 bp, Artificial Sequence
  Synthetic oligonucleotide
gcagtctcaagccgaacggggtatcactat

SEQ ID NO: 124427 - DNA, 30 bp, Artificial Sequence
  Synthetic oligonucleotide
taggaggagactctcaatgtgtacgactat

SEQ ID NO: 124428 - DNA, 30 bp, Artificial Sequence
  Synthetic oligonucleotide
ctatgcgacaaaaaggtaaaatgcgactat

SEQ ID NO: 124429 - DNA, 30 bp, Artificial Sequence
  Synthetic oligonucleotide
ggacctaaccgcatccgaggcaagtactat

SEQ ID NO: 124430 - DNA, 30 bp, Artificial Sequence
  Synthetic oligonucleotide
cgtggggggcgttaagatcgttaaacctat

SEQ ID NO: 124431 - DNA, 30 bp, Artificial Sequence
  Synthetic oligonucleotide
tccaagattgttaccacatatccgacctat

SEQ ID NO: 124432 - DNA, 30 bp, Artificial Sequence
  Synthetic oligonucleotide
acgccagcagaaattgccgagtgtacctat

SEQ ID NO: 124433 - DNA, 30 bp, Artificial Sequence
  Synthetic oligonucleotide
tgctgagtgtactagacagaaagcgcctat

SEQ ID NO: 124434 - DNA, 30 bp, Artificial Sequence
  Synthetic oligonucleotide
accggaaacgggcgataaggcggatcctat

SEQ ID NO: 124435 - DNA, 30 bp, Artificial Sequence
  Synthetic oligonucleotide
ttgttgtgtgctctttttgtgttttcctat

SEQ ID NO: 124436 - DNA, 30 bp, Artificial Sequence
  Synthetic oligonucleotide
aataaacacacgtgaggttcgaaaagctat

SEQ ID NO: 124437 - DNA, 30 bp, Artificial Sequence
  Synthetic oligonucleotide
aggctcattcgttctcccaaacagagctat

SEQ ID NO: 124438 - DNA, 30 bp, Artificial Sequence
  Synthetic oligonucleotide
ggggcgtgcccaagtcacgggcgtagctat

SEQ ID NO: 124439 - DNA, 30 bp, Artificial Sequence
  Synthetic oligonucleotide
aggtccgcccggcagttaagtggtagctat

SEQ ID NO: 124440 - DNA, 30 bp, Artificial Sequence
  Synthetic oligonucleotide
gttggacgaaacccacaacactaccgctat

SEQ ID NO: 124441 - DNA, 30 bp, Artificial Sequence
  Synthetic oligonucleotide
atggagtcactaagacttcacgtccgctat

SEQ ID NO: 124442 - DNA, 30 bp, Artificial Sequence
  Synthetic oligonucleotide
cacggccggagaattcactccgtgggctat

SEQ ID NO: 124443 - DNA, 30 bp, Artificial Sequence
  Synthetic oligonucleotide
tggttacttagacggagtggagtctgctat

SEQ ID NO: 124444 - DNA, 30 bp, Artificial Sequence
  Synthetic oligonucleotide
agagcgggctcctcaaatacgccgtgctat

SEQ ID NO: 124445 - DNA, 30 bp, Artificial Sequence
  Synthetic oligonucleotide
gtacgtctaaggttgaaaagttggtgctat

SEQ ID NO: 124446 - DNA, 30 bp, Artificial Sequence
  Synthetic oligonucleotide
aggaagtggttgcggatgaaactttgctat

SEQ ID NO: 124447 - DNA, 30 bp, Artificial Sequence
  Synthetic oligonucleotide
ggtagtgacaaccatcgacactctatctat

SEQ ID NO: 124448 - DNA, 30 bp, Artificial Sequence
  Synthetic oligonucleotide
acttgccaacaagcaataatgagtatctat

SEQ ID NO: 124449 - DNA, 30 bp, Artificial Sequence
  Synthetic oligonucleotide
agtgtataccgagtggaaatagccgtctat

SEQ ID NO: 124450 - DNA, 30 bp, Artificial Sequence
  Synthetic oligonucleotide
tattgccgaagtgcaggatcaagattctat

SEQ ID NO: 124451 - DNA, 30 bp, Artificial Sequence
  Synthetic oligonucleotide
ggaggccagtcggatgcttctttcttctat

SEQ ID NO: 124452 - DNA, 31 bp, Artificial Sequence
  Synthetic oligonucleotide
tgaaatacatttgaaggtggtaaaaaagtat

SEQ ID NO: 124453 - DNA, 30 bp, Artificial Sequence
  Synthetic oligonucleotide
ttgtccggaatggggcgtggccgaaagtat

SEQ ID NO: 124454 - DNA, 30 bp, Artificial Sequence
  Synthetic oligonucleotide
tggaacatagatagggaaccttgcaagtat

SEQ ID NO: 124455 - DNA, 30 bp, Artificial Sequence
  Synthetic oligonucleotide
tcgcacagcacctgggctgggactaagtat

SEQ ID NO: 124456 - DNA, 30 bp, Artificial Sequence
  Synthetic oligonucleotide
aataaacaggatggggaacgccaacagtat

SEQ ID NO: 124457 - DNA, 30 bp, Artificial Sequence
  Synthetic oligonucleotide
gggtgagtactatagatctccgaccagtat

SEQ ID NO: 124458 - DNA, 30 bp, Artificial Sequence
  Synthetic oligonucleotide
cgttccccaggtaatgcattaatccagtat

SEQ ID NO: 124459 - DNA, 30 bp, Artificial Sequence
  Synthetic oligonucleotide
tcatcgtctagtatggaacgggggcagtat

SEQ ID NO: 124460 - DNA, 30 bp, Artificial Sequence
  Synthetic oligonucleotide
ctggcacagtggagtgataactatcagtat

SEQ ID NO: 124461 - DNA, 30 bp, Artificial Sequence
  Synthetic oligonucleotide
tggtacagctgtgactttgaaccagagtat

SEQ ID NO: 124462 - DNA, 30 bp, Artificial Sequence
  Synthetic oligonucleotide
tcagaggtcctataccactggcgagagtat

SEQ ID NO: 124463 - DNA, 30 bp, Artificial Sequence
  Synthetic oligonucleotide
gcaggggccacacataccgcagtagagtat

SEQ ID NO: 124464 - DNA, 30 bp, Artificial Sequence
  Synthetic oligonucleotide
acactcctgaaacactcgacggtgtagtat

SEQ ID NO: 124465 - DNA, 30 bp, Artificial Sequence
  Synthetic oligonucleotide
cgtgtacgaattcaggcgtgacgttagtat

SEQ ID NO: 124466 - DNA, 30 bp, Artificial Sequence
  Synthetic oligonucleotide
attcaaacattgccgtacattcacacgtat

SEQ ID NO: 124467 - DNA, 30 bp, Artificial Sequence
  Synthetic oligonucleotide
cgtatgtggtttgtcaccgagataccgtat

SEQ ID NO: 124468 - DNA, 30 bp, Artificial Sequence
  Synthetic oligonucleotide
gtcatagctttagtctactcgtgtccgtat

SEQ ID NO: 124469 - DNA, 30 bp, Artificial Sequence
  Synthetic oligonucleotide
cgtccacattaacgtgcaaatgcagcgtat

SEQ ID NO: 124470 - DNA, 30 bp, Artificial Sequence
  Synthetic oligonucleotide
ggtctgactggactagccttaatagcgtat

SEQ ID NO: 124471 - DNA, 30 bp, Artificial Sequence
  Synthetic oligonucleotide
taaggtgtctcgcccagttgcagtgcgtat

SEQ ID NO: 124472 - DNA, 30 bp, Artificial Sequence
  Synthetic oligonucleotide
gtgcaaacagctggaatggcttttgcgtat

SEQ ID NO: 124473 - DNA, 30 bp, Artificial Sequence
  Synthetic oligonucleotide
gacccggaggacaggtctatggcatcgtat

SEQ ID NO: 124474 - DNA, 30 bp, Artificial Sequence
  Synthetic oligonucleotide
gcatcgactcaccgggtaagtaagaggtat

SEQ ID NO: 124475 - DNA, 30 bp, Artificial Sequence
  Synthetic oligonucleotide
ccacgatgtttcgttatttagtagcggtat

SEQ ID NO: 124476 - DNA, 30 bp, Artificial Sequence
  Synthetic oligonucleotide
agggcacgattcacaaaacttgtagggtat

SEQ ID NO: 124477 - DNA, 30 bp, Artificial Sequence
  Synthetic oligonucleotide
gtcgcaatcctaggcaggacagactggtat

SEQ ID NO: 124478 - DNA, 30 bp, Artificial Sequence
  Synthetic oligonucleotide
catgtatagtaaaatcagtatgtctggtat

SEQ ID NO: 124479 - DNA, 30 bp, Artificial Sequence
  Synthetic oligonucleotide
gaagatcatagggaggcgccgggttggtat

SEQ ID NO: 124480 - DNA, 30 bp, Artificial Sequence
  Synthetic oligonucleotide
atggcggatagcggttcgggacggatgtat

SEQ ID NO: 124481 - DNA, 30 bp, Artificial Sequence
  Synthetic oligonucleotide
gaagaggacacgcacataaaaatcgtgtat

SEQ ID NO: 124482 - DNA, 30 bp, Artificial Sequence
  Synthetic oligonucleotide
cttatcgcaaaacggatgttgcttgtgtat

SEQ ID NO: 124483 - DNA, 30 bp, Artificial Sequence
  Synthetic oligonucleotide
tcttatcggttgtgttttcctcttgtgtat

SEQ ID NO: 124484 - DNA, 30 bp, Artificial Sequence
  Synthetic oligonucleotide
tcttatctgttgttttttcctcttgtgtat

SEQ ID NO: 124485 - DNA, 30 bp, Artificial Sequence
  Synthetic oligonucleotide
aagagttggagctaaggaggggggttgtat

SEQ ID NO: 124486 - DNA, 30 bp, Artificial Sequence
  Synthetic oligonucleotide
gcgccaactaagagacactagtgcaattat

SEQ ID NO: 124487 - DNA, 30 bp, Artificial Sequence
  Synthetic oligonucleotide
agtaactgcgcatttaacaaagaggattat

SEQ ID NO: 124488 - DNA, 30 bp, Artificial Sequence
  Synthetic oligonucleotide
gttaccgacgaaaaaaaaagatatacttat

SEQ ID NO: 124489 - DNA, 30 bp, Artificial Sequence
  Synthetic oligonucleotide
acgaaataccggtagcgttcccatccttat

SEQ ID NO: 124490 - DNA, 30 bp, Artificial Sequence
  Synthetic oligonucleotide
tagtgtcgggcgacgacgatgagtgcttat

SEQ ID NO: 124491 - DNA, 30 bp, Artificial Sequence
  Synthetic oligonucleotide
tcccaggcaggcgagagcatggcgtcttat

SEQ ID NO: 124492 - DNA, 30 bp, Artificial Sequence
  Synthetic oligonucleotide
gcggggccccaggagtacgccaattcttat

SEQ ID NO: 124493 - DNA, 30 bp, Artificial Sequence
  Synthetic oligonucleotide
tggactacaaaagaaggggcataaagttat

SEQ ID NO: 124494 - DNA, 30 bp, Artificial Sequence
  Synthetic oligonucleotide
tgatcgagaaaatacagacaggagagttat

SEQ ID NO: 124495 - DNA, 30 bp, Artificial Sequence
  Synthetic oligonucleotide
acaagatggacctggtcactcttgagttat

SEQ ID NO: 124496 - DNA, 30 bp, Artificial Sequence
  Synthetic oligonucleotide
tcacggagtatgtcactatcttaacgttat

SEQ ID NO: 124497 - DNA, 30 bp, Artificial Sequence
  Synthetic oligonucleotide
gaactggggaaaagtatgacggctcgttat

SEQ ID NO: 124498 - DNA, 30 bp, Artificial Sequence
  Synthetic oligonucleotide
gggactgcacgcggtaggtgaaacggttat

SEQ ID NO: 124499 - DNA, 30 bp, Artificial Sequence
  Synthetic oligonucleotide
taaggcgacgagatgccagcgggcggttat

SEQ ID NO: 124500 - DNA, 30 bp, Artificial Sequence
  Synthetic oligonucleotide
gcgtattagatgtaggtcttagacatttat

SEQ ID NO: 124501 - DNA, 30 bp, Artificial Sequence
  Synthetic oligonucleotide
cgaagtcggtgaacgagacatgggctttat

SEQ ID NO: 124502 - DNA, 30 bp, Artificial Sequence
  Synthetic oligonucleotide
cagcttgcacagtaacgggtggggttttat

SEQ ID NO: 124503 - DNA, 30 bp, Artificial Sequence
  Synthetic oligonucleotide
acgtgggttcgggaagtgggaacaaaaact

SEQ ID NO: 124504 - DNA, 30 bp, Artificial Sequence
  Synthetic oligonucleotide
cgaggatagggtgtcgcagaggtgaaaact

SEQ ID NO: 124505 - DNA, 30 bp, Artificial Sequence
  Synthetic oligonucleotide
gagcggtaaacccgagaggacaaacaaact

SEQ ID NO: 124506 - DNA, 30 bp, Artificial Sequence
  Synthetic oligonucleotide
gtgtgacttaactcgcgacacccccaaact

SEQ ID NO: 124507 - DNA, 30 bp, Artificial Sequence
  Synthetic oligonucleotide
taggagattagacatcgtccccggcaaact

SEQ ID NO: 124508 - DNA, 30 bp, Artificial Sequence
  Synthetic oligonucleotide
acgcgtcgtaaatcgcggtttagtcaaact

SEQ ID NO: 124509 - DNA, 30 bp, Artificial Sequence
  Synthetic oligonucleotide
tcgctacatactaaggtgcgtggcgaaact

SEQ ID NO: 124510 - DNA, 30 bp, Artificial Sequence
  Synthetic oligonucleotide
tcaagggccgcgtcccgtcaagtcgaaact

SEQ ID NO: 124511 - DNA, 30 bp, Artificial Sequence
  Synthetic oligonucleotide
agaagcgtgttaaagggtccaatttaaact

SEQ ID NO: 124512 - DNA, 30 bp, Artificial Sequence
  Synthetic oligonucleotide
tgcttggcataggcgaagtcgccaacaact

SEQ ID NO: 124513 - DNA, 30 bp, Artificial Sequence
  Synthetic oligonucleotide
actcatatccggcttacaggagtaacaact

SEQ ID NO: 124514 - DNA, 30 bp, Artificial Sequence
  Synthetic oligonucleotide
gagactcacatctttccgtgctgtacaact

SEQ ID NO: 124515 - DNA, 30 bp, Artificial Sequence
  Synthetic oligonucleotide
tctccaaaccgtcctgctaagcgcccaact

SEQ ID NO: 124516 - DNA, 30 bp, Artificial Sequence
  Synthetic oligonucleotide
agttcacaatgctgagaagttagagcaact

SEQ ID NO: 124517 - DNA, 30 bp, Artificial Sequence
  Synthetic oligonucleotide
tagttatgagtcgatactatgggggcaact

SEQ ID NO: 124518 - DNA, 30 bp, Artificial Sequence
  Synthetic oligonucleotide
agcaccgcgggtacacgaatgctggcaact

SEQ ID NO: 124519 - DNA, 30 bp, Artificial Sequence
  Synthetic oligonucleotide
aaggtggtcaagaagcgcgcttctgcaact

SEQ ID NO: 124520 - DNA, 30 bp, Artificial Sequence
  Synthetic oligonucleotide
ccgaagaacgcacgtggcccacaatcaact

SEQ ID NO: 124521 - DNA, 30 bp, Artificial Sequence
  Synthetic oligonucleotide
ctagaaaaacttccaaaagctgggtcaact

SEQ ID NO: 124522 - DNA, 30 bp, Artificial Sequence
  Synthetic oligonucleotide
gctacgacgtcgctggatggccattcaact

SEQ ID NO: 124523 - DNA, 30 bp, Artificial Sequence
  Synthetic oligonucleotide
agcataagtgaggcgacggggtattcaact

SEQ ID NO: 124524 - DNA, 30 bp, Artificial Sequence
  Synthetic oligonucleotide
gagccaaactgtgttagcttgctttcaact

SEQ ID NO: 124525 - DNA, 30 bp, Artificial Sequence
  Synthetic oligonucleotide
ccaaatgttatgtgataatgggtgagaact

SEQ ID NO: 124526 - DNA, 30 bp, Artificial Sequence
  Synthetic oligonucleotide
ggatggatagaaacggaccaacatcgaact

SEQ ID NO: 124527 - DNA, 30 bp, Artificial Sequence
  Synthetic oligonucleotide
tgtctgctgatgtcctaatacactcgaact

SEQ ID NO: 124528 - DNA, 30 bp, Artificial Sequence
  Synthetic oligonucleotide
cattaggagcaggtgcggtatcactgaact

SEQ ID NO: 124529 - DNA, 30 bp, Artificial Sequence
  Synthetic oligonucleotide
aaacaacaatggagggcatggaattgaact

SEQ ID NO: 124530 - DNA, 30 bp, Artificial Sequence
  Synthetic oligonucleotide
acgggtgctgagcttgaaacatcttgaact

SEQ ID NO: 124531 - DNA, 30 bp, Artificial Sequence
  Synthetic oligonucleotide
gaacggcgtgtggatcgcttacggataact

SEQ ID NO: 124532 - DNA, 30 bp, Artificial Sequence
  Synthetic oligonucleotide
gcctacaagcgtgaacaactgactataact

SEQ ID NO: 124533 - DNA, 30 bp, Artificial Sequence
  Synthetic oligonucleotide
acaatggggacgcattaattcatcctaact

SEQ ID NO: 124534 - DNA, 30 bp, Artificial Sequence
  Synthetic oligonucleotide
ctcgaggcgtcgaatcagtcatatctaact

SEQ ID NO: 124535 - DNA, 30 bp, Artificial Sequence
  Synthetic oligonucleotide
aacttagagcggcgggatagcaaagtaact

SEQ ID NO: 124536 - DNA, 30 bp, Artificial Sequence
  Synthetic oligonucleotide
caccaacaacaggagggcctcatagtaact

SEQ ID NO: 124537 - DNA, 30 bp, Artificial Sequence
  Synthetic oligonucleotide
aggagttcggagtgctggctgtacgtaact

SEQ ID NO: 124538 - DNA, 30 bp, Artificial Sequence
  Synthetic oligonucleotide
gcgtccgtcgtgactcaaacggatgtaact

SEQ ID NO: 124539 - DNA, 30 bp, Artificial Sequence
  Synthetic oligonucleotide
cggcactgcctcgcttaaacactattaact

SEQ ID NO: 124540 - DNA, 31 bp, Artificial Sequence
  Synthetic oligonucleotide
ttgtgtattgtgtgacaagggaggcttaact

SEQ ID NO: 124541 - DNA, 30 bp, Artificial Sequence
  Synthetic oligonucleotide
acgacttgagccagaacacctggcttaact

SEQ ID NO: 124542 - DNA, 30 bp, Artificial Sequence
  Synthetic oligonucleotide
cgatcggaagcggttgcccgataacacact

SEQ ID NO: 124543 - DNA, 30 bp, Artificial Sequence
  Synthetic oligonucleotide
atttcaggcctggaacacacgggacacact

SEQ ID NO: 124544 - DNA, 30 bp, Artificial Sequence
  Synthetic oligonucleotide
tcaggacctggtaagtagagctgacacact

SEQ ID NO: 124545 - DNA, 30 bp, Artificial Sequence
  Synthetic oligonucleotide
cgaatcccgaaatctttcaagagtgacact

SEQ ID NO: 124546 - DNA, 30 bp, Artificial Sequence
  Synthetic oligonucleotide
gcgaatacggataggttgcatactcccact

SEQ ID NO: 124547 - DNA, 30 bp, Artificial Sequence
  Synthetic oligonucleotide
ggcaggtgcgaagttagtcgaaatgccact

SEQ ID NO: 124548 - DNA, 30 bp, Artificial Sequence
  Synthetic oligonucleotide
cgtcggacagtagctgaaagccgatccact

SEQ ID NO: 124549 - DNA, 30 bp, Artificial Sequence
  Synthetic oligonucleotide
ctgtgcgagtgaaaagatctccattccact

SEQ ID NO: 124550 - DNA, 30 bp, Artificial Sequence
  Synthetic oligonucleotide
gcgtgccggctatgatggcgcataagcact

SEQ ID NO: 124551 - DNA, 30 bp, Artificial Sequence
  Synthetic oligonucleotide
atagaggcgccaggtccgccaacgagcact

SEQ ID NO: 124552 - DNA, 30 bp, Artificial Sequence
  Synthetic oligonucleotide
agcgcaagtccgagtaagaatcggagcact

SEQ ID NO: 124553 - DNA, 30 bp, Artificial Sequence
  Synthetic oligonucleotide
agtaaacttaccgagccacatcaccgcact

SEQ ID NO: 124554 - DNA, 30 bp, Artificial Sequence
  Synthetic oligonucleotide
agagtgcgggaacgacactcgcgtcgcact

SEQ ID NO: 124555 - DNA, 30 bp, Artificial Sequence
  Synthetic oligonucleotide
cggcctgcgagcgccgagtggccatgcact

SEQ ID NO: 124556 - DNA, 30 bp, Artificial Sequence
  Synthetic oligonucleotide
cgtttggcctatagtactcgggtgtgcact

SEQ ID NO: 124557 - DNA, 30 bp, Artificial Sequence
  Synthetic oligonucleotide
tcaggcgggtggcttggtacggccatcact

SEQ ID NO: 124558 - DNA, 30 bp, Artificial Sequence
  Synthetic oligonucleotide
gtgttggagtgtcacagtgttggcatcact

SEQ ID NO: 124559 - DNA, 30 bp, Artificial Sequence
  Synthetic oligonucleotide
tgcccgaccgatagtcgtctaacactcact

SEQ ID NO: 124560 - DNA, 30 bp, Artificial Sequence
  Synthetic oligonucleotide
atgccagagttaatgtccaaacatctcact

SEQ ID NO: 124561 - DNA, 30 bp, Artificial Sequence
  Synthetic oligonucleotide
aaagagacagggggaggactagtggtcact

SEQ ID NO: 124562 - DNA, 30 bp, Artificial Sequence
  Synthetic oligonucleotide
tctagggcagcgaatgtcacataattcact

SEQ ID NO: 124563 - DNA, 30 bp, Artificial Sequence
  Synthetic oligonucleotide
ggagcgtatccgcaattttagtcgttcact

SEQ ID NO: 124564 - DNA, 30 bp, Artificial Sequence
  Synthetic oligonucleotide
ccgtcaaccacggggacttacattttcact

SEQ ID NO: 124565 - DNA, 30 bp, Artificial Sequence
  Synthetic oligonucleotide
actttagtaagccagttgggcgggaagact

SEQ ID NO: 124566 - DNA, 30 bp, Artificial Sequence
  Synthetic oligonucleotide
agaagtgcgcaatcaaagttcgataagact

SEQ ID NO: 124567 - DNA, 30 bp, Artificial Sequence
  Synthetic oligonucleotide
tcgagatcgaacaactatagggaagagact

SEQ ID NO: 124568 - DNA, 30 bp, Artificial Sequence
  Synthetic oligonucleotide
cctgctcaagagatggatagccgcgagact

SEQ ID NO: 124569 - DNA, 30 bp, Artificial Sequence
  Synthetic oligonucleotide
cgttgaagcaaaaggtatcgcagggagact

SEQ ID NO: 124570 - DNA, 30 bp, Artificial Sequence
  Synthetic oligonucleotide
ctaggacttgcagaggtgtcccgggagact

SEQ ID NO: 124571 - DNA, 30 bp, Artificial Sequence
  Synthetic oligonucleotide
tgattacctgtgaacgtacaatatgagact

SEQ ID NO: 124572 - DNA, 30 bp, Artificial Sequence
  Synthetic oligonucleotide
cagtcgtaaaactgccaccagcgtgagact

SEQ ID NO: 124573 - DNA, 29 bp, Artificial Sequence
  Synthetic oligonucleotide
tcactggcgcacaccgacgtcattagact

SEQ ID NO: 124574 - DNA, 30 bp, Artificial Sequence
  Synthetic oligonucleotide
tgtatgaagagagacgaaaatggaacgact

SEQ ID NO: 124575 - DNA, 30 bp, Artificial Sequence
  Synthetic oligonucleotide
ccaaagagtcatggatcccgccttacgact

SEQ ID NO: 124576 - DNA, 30 bp, Artificial Sequence
  Synthetic oligonucleotide
tgagagcgtgcgtaatccaggtttacgact

SEQ ID NO: 124577 - DNA, 30 bp, Artificial Sequence
  Synthetic oligonucleotide
gatgaagcgtgcacgttagggctgccgact

SEQ ID NO: 124578 - DNA, 30 bp, Artificial Sequence
  Synthetic oligonucleotide
tgtatgttatagctgaaaaggaaggcgact

SEQ ID NO: 124579 - DNA, 30 bp, Artificial Sequence
  Synthetic oligonucleotide
caggctgatctgttcgttgctcaggcgact

SEQ ID NO: 124580 - DNA, 30 bp, Artificial Sequence
  Synthetic oligonucleotide
gcaacggtaacttagaagtgtggggcgact

SEQ ID NO: 124581 - DNA, 30 bp, Artificial Sequence
  Synthetic oligonucleotide
agaagaggaggtagactgttcccttcgact

SEQ ID NO: 124582 - DNA, 30 bp, Artificial Sequence
  Synthetic oligonucleotide
accgataaaactccgaaaaatccttcgact

SEQ ID NO: 124583 - DNA, 30 bp, Artificial Sequence
  Synthetic oligonucleotide
gcatccagtatcagagctacgcgcaggact

SEQ ID NO: 124584 - DNA, 30 bp, Artificial Sequence
  Synthetic oligonucleotide
agcactcctggtcatcccggcaataggact

SEQ ID NO: 124585 - DNA, 30 bp, Artificial Sequence
  Synthetic oligonucleotide
aatgtccacacatccagtgtgactaggact

SEQ ID NO: 124586 - DNA, 30 bp, Artificial Sequence
  Synthetic oligonucleotide
cgagcccccggctctataagggcatggact

SEQ ID NO: 124587 - DNA, 30 bp, Artificial Sequence
  Synthetic oligonucleotide
aagtgcggaccacggaccgcataaatgact

SEQ ID NO: 124588 - DNA, 30 bp, Artificial Sequence
  Synthetic oligonucleotide
taacagcgggatggactaagtggcatgact

SEQ ID NO: 124589 - DNA, 30 bp, Artificial Sequence
  Synthetic oligonucleotide
agctcaaggcgcaggacagaagctctgact

SEQ ID NO: 124590 - DNA, 30 bp, Artificial Sequence
  Synthetic oligonucleotide
gttgctagaggacagaacgtccttgtgact

SEQ ID NO: 124591 - DNA, 30 bp, Artificial Sequence
  Synthetic oligonucleotide
cggggcgtggtcatggagatagggttgact

SEQ ID NO: 124592 - DNA, 30 bp, Artificial Sequence
  Synthetic oligonucleotide
agggcaatagattcatgcagtgacaatact

SEQ ID NO: 124593 - DNA, 30 bp, Artificial Sequence
  Synthetic oligonucleotide
ggctgcagatttcgtcggaccggcaatact

SEQ ID NO: 124594 - DNA, 30 bp, Artificial Sequence
  Synthetic oligonucleotide
gaatcgcatgaaagggctatgacgaatact

SEQ ID NO: 124595 - DNA, 30 bp, Artificial Sequence
  Synthetic oligonucleotide
caggtcaccagagtgaagtgcgttcatact

SEQ ID NO: 124596 - DNA, 30 bp, Artificial Sequence
  Synthetic oligonucleotide
tgagatatcccgcgaaactgcgccgatact

SEQ ID NO: 124597 - DNA, 30 bp, Artificial Sequence
  Synthetic oligonucleotide
aggcgtcacgttattggaatggtcgatact

SEQ ID NO: 124598 - DNA, 29 bp, Artificial Sequence
  Synthetic oligonucleotide
taggtatggcatgggagagtaatgatact

SEQ ID NO: 124599 - DNA, 30 bp, Artificial Sequence
  Synthetic oligonucleotide
gaccggcatccggaaaccaacagctatact

SEQ ID NO: 124600 - DNA, 30 bp, Artificial Sequence
  Synthetic oligonucleotide
catcgcccgaattagcaatgtaagtatact

SEQ ID NO: 124601 - DNA, 30 bp, Artificial Sequence
  Synthetic oligonucleotide
cgagcgcaagggcaggcattggtgtatact

SEQ ID NO: 124602 - DNA, 30 bp, Artificial Sequence
  Synthetic oligonucleotide
aaggttggccgcgtgcagccagaagctact

SEQ ID NO: 124603 - DNA, 30 bp, Artificial Sequence
  Synthetic oligonucleotide
catagcaggggcaaacaatgtagcgctact

SEQ ID NO: 124604 - DNA, 30 bp, Artificial Sequence
  Synthetic oligonucleotide
gttaaaagggtcacaaactaatgcgctact

SEQ ID NO: 124605 - DNA, 30 bp, Artificial Sequence
  Synthetic oligonucleotide
ggtcttcagcgatctaaagctgaggctact

SEQ ID NO: 124606 - DNA, 30 bp, Artificial Sequence
  Synthetic oligonucleotide
accaaaaggcaccgaccggatctatctact

SEQ ID NO: 124607 - DNA, 30 bp, Artificial Sequence
  Synthetic oligonucleotide
ggcctagaggcgtatcactcaacaagtact

SEQ ID NO: 124608 - DNA, 30 bp, Artificial Sequence
  Synthetic oligonucleotide
gtgagttgtggtaagtgtcaatccagtact

SEQ ID NO: 124609 - DNA, 30 bp, Artificial Sequence
  Synthetic oligonucleotide
aggtaagccatggcgcactagagccgtact

SEQ ID NO: 124610 - DNA, 30 bp, Artificial Sequence
  Synthetic oligonucleotide
gggtcgagtgagctacacgataagcgtact

SEQ ID NO: 124611 - DNA, 30 bp, Artificial Sequence
  Synthetic oligonucleotide
aagaatagggacacaggcttgcgaggtact

SEQ ID NO: 124612 - DNA, 30 bp, Artificial Sequence
  Synthetic oligonucleotide
cagagttgccctgggcgaacaggttgtact

SEQ ID NO: 124613 - DNA, 30 bp, Artificial Sequence
  Synthetic oligonucleotide
taagcgataccgagtcagagcaaaattact

SEQ ID NO: 124614 - DNA, 30 bp, Artificial Sequence
  Synthetic oligonucleotide
ctgcgtagtctgggactataacatcttact

SEQ ID NO: 124615 - DNA, 30 bp, Artificial Sequence
  Synthetic oligonucleotide
cgagaagaacataaatgggctcgtcttact

SEQ ID NO: 124616 - DNA, 30 bp, Artificial Sequence
  Synthetic oligonucleotide
tgcctccgggatcaagaaaaagctgttact

SEQ ID NO: 124617 - DNA, 30 bp, Artificial Sequence
  Synthetic oligonucleotide
gaggagagttgttcgttacggatctttact

SEQ ID NO: 124618 - DNA, 30 bp, Artificial Sequence
  Synthetic oligonucleotide
gagattagactgcatataactgagtttact

SEQ ID NO: 124619 - DNA, 30 bp, Artificial Sequence
  Synthetic oligonucleotide
cgcgagttgatgcgaactgccggttttact

SEQ ID NO: 124620 - DNA, 30 bp, Artificial Sequence
  Synthetic oligonucleotide
agactggcaatatccgcacccgctcaacct

SEQ ID NO: 124621 - DNA, 30 bp, Artificial Sequence
  Synthetic oligonucleotide
gtcgttacggcggagggtcagtgagaacct

SEQ ID NO: 124622 - DNA, 30 bp, Artificial Sequence
  Synthetic oligonucleotide
tgagaactagtacgtctatacatagaacct

SEQ ID NO: 124623 - DNA, 30 bp, Artificial Sequence
  Synthetic oligonucleotide
cgtggttttagcggatcaagtgacgaacct

SEQ ID NO: 124624 - DNA, 30 bp, Artificial Sequence
  Synthetic oligonucleotide
cggtcaccgattcgtatcatcatcgaacct

SEQ ID NO: 124625 - DNA, 30 bp, Artificial Sequence
  Synthetic oligonucleotide
caaaacaagcgtcatgaatcgacctaacct

SEQ ID NO: 124626 - DNA, 30 bp, Artificial Sequence
  Synthetic oligonucleotide
caatcgggaaaatcgctcgtacggtaacct

SEQ ID NO: 124627 - DNA, 30 bp, Artificial Sequence
  Synthetic oligonucleotide
actccaaggaaaggtgtctaggcaacacct

SEQ ID NO: 124628 - DNA, 30 bp, Artificial Sequence
  Synthetic oligonucleotide
tgacaaggatctttagtatcgaatacacct

SEQ ID NO: 124629 - DNA, 30 bp, Artificial Sequence
  Synthetic oligonucleotide
cgagatgcgatccacatcgctgtaccacct

SEQ ID NO: 124630 - DNA, 30 bp, Artificial Sequence
  Synthetic oligonucleotide
gaggtttatgtcgtagagcagtgggcacct

SEQ ID NO: 124631 - DNA, 30 bp, Artificial Sequence
  Synthetic oligonucleotide
cggaagtaacaggaagacgcggagtcacct

SEQ ID NO: 124632 - DNA, 30 bp, Artificial Sequence
  Synthetic oligonucleotide
tgttgaatagtagaggaacttgagtcacct

SEQ ID NO: 124633 - DNA, 30 bp, Artificial Sequence
  Synthetic oligonucleotide
atctgaagaaaatctgggtgaaacagacct

SEQ ID NO: 124634 - DNA, 30 bp, Artificial Sequence
  Synthetic oligonucleotide
cgcggggcaacggaatcttggacgagacct

SEQ ID NO: 124635 - DNA, 30 bp, Artificial Sequence
  Synthetic oligonucleotide
cacgtagtgacagtcacgacgttacgacct

SEQ ID NO: 124636 - DNA, 30 bp, Artificial Sequence
  Synthetic oligonucleotide
gagaatatgatacggtgagcttagcgacct

SEQ ID NO: 124637 - DNA, 30 bp, Artificial Sequence
  Synthetic oligonucleotide
catcacggaccgcacgctcagaaaggacct

SEQ ID NO: 124638 - DNA, 30 bp, Artificial Sequence
  Synthetic oligonucleotide
tatcacctcttacaggctacctacggacct

SEQ ID NO: 124639 - DNA, 30 bp, Artificial Sequence
  Synthetic oligonucleotide
gaagtaaactaaacgaattagcaatgacct

SEQ ID NO: 124640 - DNA, 30 bp, Artificial Sequence
  Synthetic oligonucleotide
gcaacggtataaaaagatttacgctgacct

SEQ ID NO: 124641 - DNA, 30 bp, Artificial Sequence
  Synthetic oligonucleotide
agaagaaacaagcggccagaggaaatacct

SEQ ID NO: 124642 - DNA, 30 bp, Artificial Sequence
  Synthetic oligonucleotide
cgaccggttattaaaatcgtggctatacct

SEQ ID NO: 124643 - DNA, 30 bp, Artificial Sequence
  Synthetic oligonucleotide
tttagtgcgcttaagaggtgaagtatacct

SEQ ID NO: 124644 - DNA, 30 bp, Artificial Sequence
  Synthetic oligonucleotide
tcttcctgcgcagagagtgtaagcgtacct

SEQ ID NO: 124645 - DNA, 30 bp, Artificial Sequence
  Synthetic oligonucleotide
tcatgtgcaacttatcggtgctgtgtacct

SEQ ID NO: 124646 - DNA, 30 bp, Artificial Sequence
  Synthetic oligonucleotide
ctgggggcttgggaagcaacaacaaaccct

SEQ ID NO: 124647 - DNA, 30 bp, Artificial Sequence
  Synthetic oligonucleotide
caaaccaacttaaagctcctaaacaaccct

SEQ ID NO: 124648 - DNA, 30 bp, Artificial Sequence
  Synthetic oligonucleotide
atcaggaagacgtcctagctggcacaccct

SEQ ID NO: 124649 - DNA, 30 bp, Artificial Sequence
  Synthetic oligonucleotide
cagcgcgtaaaacgggactgcgttcaccct

SEQ ID NO: 124650 - DNA, 30 bp, Artificial Sequence
  Synthetic oligonucleotide
tacaaaagggcacgagaccgggcgtaccct

SEQ ID NO: 124651 - DNA, 30 bp, Artificial Sequence
  Synthetic oligonucleotide
aacgccataatttgcctcctcatgtaccct

SEQ ID NO: 124652 - DNA, 30 bp, Artificial Sequence
  Synthetic oligonucleotide
cccctctcgctttctattcctttgtaccct

SEQ ID NO: 124653 - DNA, 30 bp, Artificial Sequence
  Synthetic oligonucleotide
gtggcggttagcaaaacctgaagttaccct

SEQ ID NO: 124654 - DNA, 30 bp, Artificial Sequence
  Synthetic oligonucleotide
ccttgagaggtcgagtaactaggaacccct

SEQ ID NO: 124655 - DNA, 30 bp, Artificial Sequence
  Synthetic oligonucleotide
ggtgatggtaccgataagcggcaaccccct

SEQ ID NO: 124656 - DNA, 30 bp, Artificial Sequence
  Synthetic oligonucleotide
cgagagcaagcgcgcattgagataccccct

SEQ ID NO: 124657 - DNA, 30 bp, Artificial Sequence
  Synthetic oligonucleotide
cgaaacagaccctgttatacctccgcccct

SEQ ID NO: 124658 - DNA, 30 bp, Artificial Sequence
  Synthetic oligonucleotide
gtagcatcgagacagggagtggtcgcccct

SEQ ID NO: 124659 - DNA, 30 bp, Artificial Sequence
  Synthetic oligonucleotide
catcagctcaccagttaatggtctgcccct

SEQ ID NO: 124660 - DNA, 30 bp, Artificial Sequence
  Synthetic oligonucleotide
gcgaacacgcgtgcaccaccgcggtcccct

SEQ ID NO: 124661 - DNA, 30 bp, Artificial Sequence
  Synthetic oligonucleotide
gacggcttaatgagtacgtggttttcccct

SEQ ID NO: 124662 - DNA, 30 bp, Artificial Sequence
  Synthetic oligonucleotide
aacaagtcccgaatgaccaggaagagccct

SEQ ID NO: 124663 - DNA, 30 bp, Artificial Sequence
  Synthetic oligonucleotide
aggctggatcttgatttgagggggagccct

SEQ ID NO: 124664 - DNA, 30 bp, Artificial Sequence
  Synthetic oligonucleotide
actcgcgcagtcgatgcaatggtacgccct

SEQ ID NO: 124665 - DNA, 30 bp, Artificial Sequence
  Synthetic oligonucleotide
tgggctagagcagaagagcgtgagtgccct

SEQ ID NO: 124666 - DNA, 30 bp, Artificial Sequence
  Synthetic oligonucleotide
attgaggaagggcacttaagtagaatccct

SEQ ID NO: 124667 - DNA, 30 bp, Artificial Sequence
  Synthetic oligonucleotide
ctgatgtccaacaagaccgaaccgatccct

SEQ ID NO: 124668 - DNA, 30 bp, Artificial Sequence
  Synthetic oligonucleotide
agcgataacgcgtgtggcaccattttccct

SEQ ID NO: 124669 - DNA, 30 bp, Artificial Sequence
  Synthetic oligonucleotide
taggtgagactctgtctctccaaccagcct

SEQ ID NO: 124670 - DNA, 30 bp, Artificial Sequence
  Synthetic oligonucleotide
gcgaatgcgtaaagtcaatcacatcagcct

SEQ ID NO: 124671 - DNA, 31 bp, Artificial Sequence
  Synthetic oligonucleotide
aactccatccggctaagacggtaaagagcct

SEQ ID NO: 124672 - DNA, 30 bp, Artificial Sequence
  Synthetic oligonucleotide
tgtcggactgcaacgcattatcacgagcct

SEQ ID NO: 124673 - DNA, 30 bp, Artificial Sequence
  Synthetic oligonucleotide
cccttaaacgggtctcaagggagatagcct

SEQ ID NO: 124674 - DNA, 30 bp, Artificial Sequence
  Synthetic oligonucleotide
gatggcttgggtatccgcaaaatttagcct

SEQ ID NO: 124675 - DNA, 30 bp, Artificial Sequence
  Synthetic oligonucleotide
taagtggaagtgggagccgcgactacgcct

SEQ ID NO: 124676 - DNA, 30 bp, Artificial Sequence
  Synthetic oligonucleotide
tcggcagatgtatagttgacgggtacgcct

SEQ ID NO: 124677 - DNA, 30 bp, Artificial Sequence
  Synthetic oligonucleotide
ctaaacgtggtgcataggtaaattacgcct

SEQ ID NO: 124678 - DNA, 30 bp, Artificial Sequence
  Synthetic oligonucleotide
ggcctaaagggtcagcctcataccccgcct

SEQ ID NO: 124679 - DNA, 30 bp, Artificial Sequence
  Synthetic oligonucleotide
taatcgaagattgcagatcaccgtccgcct

SEQ ID NO: 124680 - DNA, 30 bp, Artificial Sequence
  Synthetic oligonucleotide
ctcgggtgtagactatgagattaagcgcct

SEQ ID NO: 124681 - DNA, 30 bp, Artificial Sequence
  Synthetic oligonucleotide
ccgtacaatcccctcggcagcaacgcgcct

SEQ ID NO: 124682 - DNA, 30 bp, Artificial Sequence
  Synthetic oligonucleotide
tgcgaattcctaatagggacatccgcgcct

SEQ ID NO: 124683 - DNA, 30 bp, Artificial Sequence
  Synthetic oligonucleotide
taagataatagtgactaatgcagcgcgcct

SEQ ID NO: 124684 - DNA, 30 bp, Artificial Sequence
  Synthetic oligonucleotide
tggtagaataacgatccatgccatgcgcct

SEQ ID NO: 124685 - DNA, 30 bp, Artificial Sequence
  Synthetic oligonucleotide
ctgttaattaatcagaatccatattcgcct

SEQ ID NO: 124686 - DNA, 30 bp, Artificial Sequence
  Synthetic oligonucleotide
ttcgtcgaatccaccaggttcccttcgcct

SEQ ID NO: 124687 - DNA, 30 bp, Artificial Sequence
  Synthetic oligonucleotide
ctagaaaagtgatctaaaccgctacggcct

SEQ ID NO: 124688 - DNA, 30 bp, Artificial Sequence
  Synthetic oligonucleotide
ggaagccaaactcccagcggataccggcct

SEQ ID NO: 124689 - DNA, 30 bp, Artificial Sequence
  Synthetic oligonucleotide
gtacttgttgggcgcgttgagagtcggcct

SEQ ID NO: 124690 - DNA, 30 bp, Artificial Sequence
  Synthetic oligonucleotide
gggctatagctgatgacagatatctggcct

SEQ ID NO: 124691 - DNA, 30 bp, Artificial Sequence
  Synthetic oligonucleotide
aaagaggagatgtttttagcccggtggcct

SEQ ID NO: 124692 - DNA, 30 bp, Artificial Sequence
  Synthetic oligonucleotide
tggtgttccggcaaaaaatagctcatgcct

SEQ ID NO: 124693 - DNA, 30 bp, Artificial Sequence
  Synthetic oligonucleotide
ggcgggatggagtttaacggcttactgcct

SEQ ID NO: 124694 - DNA, 30 bp, Artificial Sequence
  Synthetic oligonucleotide
acaaatatttcaaatgagcataacctgcct

SEQ ID NO: 124695 - DNA, 30 bp, Artificial Sequence
  Synthetic oligonucleotide
taagggtcgagctggtcaccagttctgcct

SEQ ID NO: 124696 - DNA, 30 bp, Artificial Sequence
  Synthetic oligonucleotide
actagaccgataccgtagcctgaagtgcct

SEQ ID NO: 124697 - DNA, 30 bp, Artificial Sequence
  Synthetic oligonucleotide
ggagaagtgcgtgttccacccagtgtgcct

SEQ ID NO: 124698 - DNA, 30 bp, Artificial Sequence
  Synthetic oligonucleotide
aggtgctagcggttagtccagactttgcct

SEQ ID NO: 124699 - DNA, 30 bp, Artificial Sequence
  Synthetic oligonucleotide
caacatagcgggaccacttcctttaatcct

SEQ ID NO: 124700 - DNA, 30 bp, Artificial Sequence
  Synthetic oligonucleotide
ccttgcattcgttcaacggcccaacatcct

SEQ ID NO: 124701 - DNA, 30 bp, Artificial Sequence
  Synthetic oligonucleotide
ccatccaaggtgactagcaagccatatcct

SEQ ID NO: 124702 - DNA, 30 bp, Artificial Sequence
  Synthetic oligonucleotide
ctgtacataattctaactagatcatatcct

SEQ ID NO: 124703 - DNA, 30 bp, Artificial Sequence
  Synthetic oligonucleotide
gagggttatgcaggggtaagcgtatatcct

SEQ ID NO: 124704 - DNA, 30 bp, Artificial Sequence
  Synthetic oligonucleotide
gatcgggaaacgttcaggctgagctatcct

SEQ ID NO: 124705 - DNA, 30 bp, Artificial Sequence
  Synthetic oligonucleotide
cgaaatgtgtgattaatgcatgagtatcct

SEQ ID NO: 124706 - DNA, 30 bp, Artificial Sequence
  Synthetic oligonucleotide
cacctacaatctccatgaggtcaaactcct

SEQ ID NO: 124707 - DNA, 30 bp, Artificial Sequence
  Synthetic oligonucleotide
gtcaatgaacggggttcaacgttgcctcct

SEQ ID NO: 124708 - DNA, 30 bp, Artificial Sequence
  Synthetic oligonucleotide
gttgcgacaatgactgggactcgaagtcct

SEQ ID NO: 124709 - DNA, 30 bp, Artificial Sequence
  Synthetic oligonucleotide
ctatttcggaaacaactgacctacagtcct

SEQ ID NO: 124710 - DNA, 30 bp, Artificial Sequence
  Synthetic oligonucleotide
cgcgcggcggtcaataaggagcgacgtcct

SEQ ID NO: 124711 - DNA, 30 bp, Artificial Sequence
  Synthetic oligonucleotide
cctacaatgggttatagcatgtactgtcct

SEQ ID NO: 124712 - DNA, 30 bp, Artificial Sequence
  Synthetic oligonucleotide
tgtgaccagcggactaaacatatgtgtcct

SEQ ID NO: 124713 - DNA, 30 bp, Artificial Sequence
  Synthetic oligonucleotide
gacgaaatgagagtgtcaatgcggattcct

SEQ ID NO: 124714 - DNA, 30 bp, Artificial Sequence
  Synthetic oligonucleotide
cggtcgagctcgtcctcgaattatattcct

SEQ ID NO: 124715 - DNA, 30 bp, Artificial Sequence
  Synthetic oligonucleotide
gcctggcggacccaacacctgcggcttcct

SEQ ID NO: 124716 - DNA, 30 bp, Artificial Sequence
  Synthetic oligonucleotide
cacccaccaacctcacaatcacaatttcct

SEQ ID NO: 124717 - DNA, 30 bp, Artificial Sequence
  Synthetic oligonucleotide
acgttatctgtggtcatccgggtcaaagct

SEQ ID NO: 124718 - DNA, 30 bp, Artificial Sequence
  Synthetic oligonucleotide
gacccacactagtggacctccacgaaagct

SEQ ID NO: 124719 - DNA, 30 bp, Artificial Sequence
  Synthetic oligonucleotide
tctatatatgcggattcgtcgaaccaagct

SEQ ID NO: 124720 - DNA, 30 bp, Artificial Sequence
  Synthetic oligonucleotide
tcagaggtgtcaagaccgcggtgtgaagct

SEQ ID NO: 124721 - DNA, 30 bp, Artificial Sequence
  Synthetic oligonucleotide
aggtacgacccaggttgtggcacctaagct

SEQ ID NO: 124722 - DNA, 30 bp, Artificial Sequence
  Synthetic oligonucleotide
tacggatctcgggatcggtgcttaacagct

SEQ ID NO: 124723 - DNA, 30 bp, Artificial Sequence
  Synthetic oligonucleotide
gaaaggcggctaaggatcagagctccagct

SEQ ID NO: 124724 - DNA, 30 bp, Artificial Sequence
  Synthetic oligonucleotide
gggtttgcactagtacaaaggtctccagct

SEQ ID NO: 124725 - DNA, 30 bp, Artificial Sequence
  Synthetic oligonucleotide
gtgctcgtcttggtctgtaacaaagcagct

SEQ ID NO: 124726 - DNA, 31 bp, Artificial Sequence
  Synthetic oligonucleotide
agggaaggaatcccccagaaccattgcagct

SEQ ID NO: 124727 - DNA, 30 bp, Artificial Sequence
  Synthetic oligonucleotide
ggtcagatgctggtactaaaaaactcagct

SEQ ID NO: 124728 - DNA, 30 bp, Artificial Sequence
  Synthetic oligonucleotide
gggggtacaagaataaaaatacgctcagct

SEQ ID NO: 124729 - DNA, 30 bp, Artificial Sequence
  Synthetic oligonucleotide
ccgggccccagtttccatactatctcagct

SEQ ID NO: 124730 - DNA, 30 bp, Artificial Sequence
  Synthetic oligonucleotide
gaagactaaatggcgatgtgttattcagct

SEQ ID NO: 124731 - DNA, 30 bp, Artificial Sequence
  Synthetic oligonucleotide
gccagcgcgggaaggagtcggacttcagct

SEQ ID NO: 124732 - DNA, 30 bp, Artificial Sequence
  Synthetic oligonucleotide
tagatagagcgctactttattaccagagct

SEQ ID NO: 124733 - DNA, 30 bp, Artificial Sequence
  Synthetic oligonucleotide
gtgtgtgagaaggacaagaatcgcagagct

SEQ ID NO: 124734 - DNA, 30 bp, Artificial Sequence
  Synthetic oligonucleotide
tacgcttggattccaaatcgagaccgagct

SEQ ID NO: 124735 - DNA, 29 bp, Artificial Sequence
  Synthetic oligonucleotide
ccgacattaaagtcgatgcttagggagct

SEQ ID NO: 124736 - DNA, 30 bp, Artificial Sequence
  Synthetic oligonucleotide
aaggggttgcgcgaattaacacaatgagct

SEQ ID NO: 124737 - DNA, 30 bp, Artificial Sequence
  Synthetic oligonucleotide
tgagggactactcgacggccgtcgtgagct

SEQ ID NO: 124738 - DNA, 30 bp, Artificial Sequence
  Synthetic oligonucleotide
aggacaccgaaactgccaacgtttatagct

SEQ ID NO: 124739 - DNA, 30 bp, Artificial Sequence
  Synthetic oligonucleotide
cagtgataacagcccccaaatgcactagct

SEQ ID NO: 124740 - DNA, 30 bp, Artificial Sequence
  Synthetic oligonucleotide
gatatcaggtccggatgaagtgttctagct

SEQ ID NO: 124741 - DNA, 30 bp, Artificial Sequence
  Synthetic oligonucleotide
agtttggcgtaagactggacgaaggtagct

SEQ ID NO: 124742 - DNA, 30 bp, Artificial Sequence
  Synthetic oligonucleotide
atctaaatgccgggctactcgcaggtagct

SEQ ID NO: 124743 - DNA, 30 bp, Artificial Sequence
  Synthetic oligonucleotide
gaagtgcgtcgtgtctgtgagggggtagct

SEQ ID NO: 124744 - DNA, 30 bp, Artificial Sequence
  Synthetic oligonucleotide
acatgcgaaaagggctctagcactgtagct

SEQ ID NO: 124745 - DNA, 30 bp, Artificial Sequence
  Synthetic oligonucleotide
tagggggaataagtgcgttcgaccttagct

SEQ ID NO: 124746 - DNA, 30 bp, Artificial Sequence
  Synthetic oligonucleotide
tcgaaagcccgttaatacagcccgaacgct

SEQ ID NO: 124747 - DNA, 30 bp, Artificial Sequence
  Synthetic oligonucleotide
cacccgaactctggcgacctcgcgcacgct

SEQ ID NO: 124748 - DNA, 30 bp, Artificial Sequence
  Synthetic oligonucleotide
aagcgcacgatccctcctattaatcacgct

SEQ ID NO: 124749 - DNA, 30 bp, Artificial Sequence
  Synthetic oligonucleotide
tgacaagaagctgcgacgaggtcggacgct

SEQ ID NO: 124750 - DNA, 30 bp, Artificial Sequence
  Synthetic oligonucleotide
cagatgcaatatgagcacactggctacgct

SEQ ID NO: 124751 - DNA, 30 bp, Artificial Sequence
  Synthetic oligonucleotide
ctcaataagaagaatgagcatcggaccgct

SEQ ID NO: 124752 - DNA, 30 bp, Artificial Sequence
  Synthetic oligonucleotide
gtaccaccttcatcttgaaatttgcccgct

SEQ ID NO: 124753 - DNA, 30 bp, Artificial Sequence
  Synthetic oligonucleotide
gttgttggtcaggagagttgatgagccgct

SEQ ID NO: 124754 - DNA, 30 bp, Artificial Sequence
  Synthetic oligonucleotide
cgtccttctggcagtacactcgaggccgct

SEQ ID NO: 124755 - DNA, 30 bp, Artificial Sequence
  Synthetic oligonucleotide
aatcggtcactgtcgagtcgcaaatccgct

SEQ ID NO: 124756 - DNA, 30 bp, Artificial Sequence
  Synthetic oligonucleotide
tcagagaacaagcgtacaaccggaagcgct

SEQ ID NO: 124757 - DNA, 30 bp, Artificial Sequence
  Synthetic oligonucleotide
agaaggcgacagccttggtaatgcagcgct

SEQ ID NO: 124758 - DNA, 30 bp, Artificial Sequence
  Synthetic oligonucleotide
acggcatcttacgtatagggacttagcgct

SEQ ID NO: 124759 - DNA, 30 bp, Artificial Sequence
  Synthetic oligonucleotide
caagtcaccaacgggagtcaagcgcgcgct

SEQ ID NO: 124760 - DNA, 30 bp, Artificial Sequence
  Synthetic oligonucleotide
tcaccctgatccagaggcgagtatcgcgct

SEQ ID NO: 124761 - DNA, 30 bp, Artificial Sequence
  Synthetic oligonucleotide
tagacaaagagcccccgaggaaacggcgct

SEQ ID NO: 124762 - DNA, 30 bp, Artificial Sequence
  Synthetic oligonucleotide
gtgctcgtacgtcaatgtgggcgtggcgct

SEQ ID NO: 124763 - DNA, 30 bp, Artificial Sequence
  Synthetic oligonucleotide
cgagccaccaaggatggaattatgatcgct

SEQ ID NO: 124764 - DNA, 30 bp, Artificial Sequence
  Synthetic oligonucleotide
cactgcaacttggccaagcaacctatcgct

SEQ ID NO: 124765 - DNA, 30 bp, Artificial Sequence
  Synthetic oligonucleotide
taacgaggatacgtgagataatcactcgct

SEQ ID NO: 124766 - DNA, 30 bp, Artificial Sequence
  Synthetic oligonucleotide
cacggcattctaaactctaagagcctcgct

SEQ ID NO: 124767 - DNA, 30 bp, Artificial Sequence
  Synthetic oligonucleotide
agggactaataagaacgtcttaggctcgct

SEQ ID NO: 124768 - DNA, 30 bp, Artificial Sequence
  Synthetic oligonucleotide
agtcacgaccacctatcgtgcggtgtcgct

SEQ ID NO: 124769 - DNA, 30 bp, Artificial Sequence
  Synthetic oligonucleotide
tggatagcgtatcctcatacgccaaaggct

SEQ ID NO: 124770 - DNA, 30 bp, Artificial Sequence
  Synthetic oligonucleotide
aacgaacgtacaagacgtctgcccaaggct

SEQ ID NO: 124771 - DNA, 30 bp, Artificial Sequence
  Synthetic oligonucleotide
cggatagtggtcctggagtaggccaaggct

SEQ ID NO: 124772 - DNA, 30 bp, Artificial Sequence
  Synthetic oligonucleotide
agggcaaagtggcattttgttgtcaaggct

SEQ ID NO: 124773 - DNA, 30 bp, Artificial Sequence
  Synthetic oligonucleotide
tccgtatagagtcacctcggcgataaggct

SEQ ID NO: 124774 - DNA, 30 bp, Artificial Sequence
  Synthetic oligonucleotide
aggtcaaccctattacatgaactccaggct

SEQ ID NO: 124775 - DNA, 30 bp, Artificial Sequence
  Synthetic oligonucleotide
tggtactatatcgtgtaacaatagcaggct

SEQ ID NO: 124776 - DNA, 30 bp, Artificial Sequence
  Synthetic oligonucleotide
agaaacagttcaaatggggccactgaggct

SEQ ID NO: 124777 - DNA, 30 bp, Artificial Sequence
  Synthetic oligonucleotide
aggggaccgtcatggctgtgggttgaggct

SEQ ID NO: 124778 - DNA, 30 bp, Artificial Sequence
  Synthetic oligonucleotide
tcactaaatgtaaccaacaaatactaggct

SEQ ID NO: 124779 - DNA, 30 bp, Artificial Sequence
  Synthetic oligonucleotide
cctagcgtctcggctaaacctccaacggct

SEQ ID NO: 124780 - DNA, 30 bp, Artificial Sequence
  Synthetic oligonucleotide
actcaagcagcgtgaacagtcattacggct

SEQ ID NO: 124781 - DNA, 30 bp, Artificial Sequence
  Synthetic oligonucleotide
cgattcaccagaaaacggagttgagcggct

SEQ ID NO: 124782 - DNA, 30 bp, Artificial Sequence
  Synthetic oligonucleotide
atcgtagaagggtatctggcgagcgcggct

SEQ ID NO: 124783 - DNA, 30 bp, Artificial Sequence
  Synthetic oligonucleotide
tatctgctgatatctcgaaaataggcggct

SEQ ID NO: 124784 - DNA, 30 bp, Artificial Sequence
  Synthetic oligonucleotide
tgggtccagctttctagtgattgggcggct

SEQ ID NO: 124785 - DNA, 30 bp, Artificial Sequence
  Synthetic oligonucleotide
taccgttttaggtagcagatacatgcggct

SEQ ID NO: 124786 - DNA, 30 bp, Artificial Sequence
  Synthetic oligonucleotide
gcataacgtatgatccattgaatttcggct

SEQ ID NO: 124787 - DNA, 29 bp, Artificial Sequence
  Synthetic oligonucleotide
caactaaatgcgtttgcgaatgaagggct

SEQ ID NO: 124788 - DNA, 30 bp, Artificial Sequence
  Synthetic oligonucleotide
agagcacgcattgtctctggaatacgggct

SEQ ID NO: 124789 - DNA, 30 bp, Artificial Sequence
  Synthetic oligonucleotide
ccgcttatacacatccagaggctacgggct

SEQ ID NO: 124790 - DNA, 30 bp, Artificial Sequence
  Synthetic oligonucleotide
gcatggctgaaattgatacattggcgggct

SEQ ID NO: 124791 - DNA, 30 bp, Artificial Sequence
  Synthetic oligonucleotide
ggcatactccatgccattcactatggggct

SEQ ID NO: 124792 - DNA, 30 bp, Artificial Sequence
  Synthetic oligonucleotide
gataatccgggagagggagtgtgctgggct

SEQ ID NO: 124793 - DNA, 30 bp, Artificial Sequence
  Synthetic oligonucleotide
gctaatccatgggctcgactgaattgggct

SEQ ID NO: 124794 - DNA, 30 bp, Artificial Sequence
  Synthetic oligonucleotide
tgatagcgataatgactcgattgttgggct

SEQ ID NO: 124795 - DNA, 30 bp, Artificial Sequence
  Synthetic oligonucleotide
ctgtcgaagactatcttgggtgaaatggct

SEQ ID NO: 124796 - DNA, 30 bp, Artificial Sequence
  Synthetic oligonucleotide
gccctacaggtatgtatctagcgcatggct

SEQ ID NO: 124797 - DNA, 30 bp, Artificial Sequence
  Synthetic oligonucleotide
agctcagaaggtattctctcttctatggct

SEQ ID NO: 124798 - DNA, 30 bp, Artificial Sequence
  Synthetic oligonucleotide
ccctgcggtttgaagtgcaggaggctggct

SEQ ID NO: 124799 - DNA, 30 bp, Artificial Sequence
  Synthetic oligonucleotide
ataaaacgaactggcgtgaggtggctggct

SEQ ID NO: 124800 - DNA, 30 bp, Artificial Sequence
  Synthetic oligonucleotide
tcacacaactattctgtaaaaaagttggct

SEQ ID NO: 124801 - DNA, 30 bp, Artificial Sequence
  Synthetic oligonucleotide
cacagatacagagttgcatcatcgaatgct

SEQ ID NO: 124802 - DNA, 30 bp, Artificial Sequence
  Synthetic oligonucleotide
tcgtagagtcattagcatttaacacatgct

SEQ ID NO: 124803 - DNA, 30 bp, Artificial Sequence
  Synthetic oligonucleotide
aggtagcttcgagcgatttgtagggatgct

SEQ ID NO: 124804 - DNA, 30 bp, Artificial Sequence
  Synthetic oligonucleotide
tctaggatatggcaataggcactctatgct

SEQ ID NO: 124805 - DNA, 30 bp, Artificial Sequence
  Synthetic oligonucleotide
aaatggcaaagattgctcacgacttatgct

SEQ ID NO: 124806 - DNA, 30 bp, Artificial Sequence
  Synthetic oligonucleotide
cctgcgaagaccgctacgcgggtgactgct

SEQ ID NO: 124807 - DNA, 30 bp, Artificial Sequence
  Synthetic oligonucleotide
gtgtgggacaggtcgatataataggctgct

SEQ ID NO: 124808 - DNA, 30 bp, Artificial Sequence
  Synthetic oligonucleotide
gcgagatacttcatcgcaacccttgctgct

SEQ ID NO: 124809 - DNA, 30 bp, Artificial Sequence
  Synthetic oligonucleotide
cagatttaggtcatggaggagtcatctgct

SEQ ID NO: 124810 - DNA, 30 bp, Artificial Sequence
  Synthetic oligonucleotide
ttgttcggcgagatggggaagtggtctgct

SEQ ID NO: 124811 - DNA, 30 bp, Artificial Sequence
  Synthetic oligonucleotide
aggatagtggatgggcggtccggttctgct

SEQ ID NO: 124812 - DNA, 30 bp, Artificial Sequence
  Synthetic oligonucleotide
cccgatagtcacaaagtgaatgtttctgct

SEQ ID NO: 124813 - DNA, 30 bp, Artificial Sequence
  Synthetic oligonucleotide
ccccgtctgccgatgacagataaaagtgct

SEQ ID NO: 124814 - DNA, 30 bp, Artificial Sequence
  Synthetic oligonucleotide
ccgaggctgaagtcaacgtatttaagtgct

SEQ ID NO: 124815 - DNA, 30 bp, Artificial Sequence
  Synthetic oligonucleotide
gagacggctaaacttacttccatcagtgct

SEQ ID NO: 124816 - DNA, 30 bp, Artificial Sequence
  Synthetic oligonucleotide
cctacgtaattgggcgagcatatgagtgct

SEQ ID NO: 124817 - DNA, 30 bp, Artificial Sequence
  Synthetic oligonucleotide
cccgattcgtggaaccgaccatgtagtgct

SEQ ID NO: 124818 - DNA, 30 bp, Artificial Sequence
  Synthetic oligonucleotide
cgagctagacctatgaaggtgagacgtgct

SEQ ID NO: 124819 - DNA, 30 bp, Artificial Sequence
  Synthetic oligonucleotide
cagagtaattgcaaactgagtcgacgtgct

SEQ ID NO: 124820 - DNA, 30 bp, Artificial Sequence
  Synthetic oligonucleotide
cgtccctgacctgattatgttagtggtgct

SEQ ID NO: 124821 - DNA, 30 bp, Artificial Sequence
  Synthetic oligonucleotide
tggcgatcagaaagaggtttccggattgct

SEQ ID NO: 124822 - DNA, 30 bp, Artificial Sequence
  Synthetic oligonucleotide
aactcggagaaacaaactttatagcttgct

SEQ ID NO: 124823 - DNA, 30 bp, Artificial Sequence
  Synthetic oligonucleotide
caatagcgaaaaggttgggtatcctttgct

SEQ ID NO: 124824 - DNA, 30 bp, Artificial Sequence
  Synthetic oligonucleotide
ctcaatggaataaggaacttatagaaatct

SEQ ID NO: 124825 - DNA, 30 bp, Artificial Sequence
  Synthetic oligonucleotide
ggtagcgtaaggagatgcatcaggaaatct

SEQ ID NO: 124826 - DNA, 30 bp, Artificial Sequence
  Synthetic oligonucleotide
aagtaataaagtgagaaaaagtgccaatct

SEQ ID NO: 124827 - DNA, 30 bp, Artificial Sequence
  Synthetic oligonucleotide
agggcgtgcatagacggaaacgaagaatct

SEQ ID NO: 124828 - DNA, 30 bp, Artificial Sequence
  Synthetic oligonucleotide
aaggaacgagatgttgcatatacaacatct

SEQ ID NO: 124829 - DNA, 30 bp, Artificial Sequence
  Synthetic oligonucleotide
acaagtcggttcggaaggttatgtacatct

SEQ ID NO: 124830 - DNA, 30 bp, Artificial Sequence
  Synthetic oligonucleotide
atatttagtggtgagcgtcgaacgccatct

SEQ ID NO: 124831 - DNA, 30 bp, Artificial Sequence
  Synthetic oligonucleotide
gaggatacattgcgagcacaagtagcatct

SEQ ID NO: 124832 - DNA, 30 bp, Artificial Sequence
  Synthetic oligonucleotide
gaggaggctaaattgtagctgcgtgcatct

SEQ ID NO: 124833 - DNA, 30 bp, Artificial Sequence
  Synthetic oligonucleotide
aggctgatgatacagatgatgtgtgcatct

SEQ ID NO: 124834 - DNA, 30 bp, Artificial Sequence
  Synthetic oligonucleotide
gggtggcactgaccttgttggacatcatct

SEQ ID NO: 124835 - DNA, 30 bp, Artificial Sequence
  Synthetic oligonucleotide
gcgaggattatgtcgcccttgtactcatct

SEQ ID NO: 124836 - DNA, 30 bp, Artificial Sequence
  Synthetic oligonucleotide
ggggtgggttgtgtggaaaaatcaagatct

SEQ ID NO: 124837 - DNA, 30 bp, Artificial Sequence
  Synthetic oligonucleotide
cgggtttaaatgccatggcaggaacgatct

SEQ ID NO: 124838 - DNA, 30 bp, Artificial Sequence
  Synthetic oligonucleotide
caccggggcctcacgggtaacagccgatct

SEQ ID NO: 124839 - DNA, 30 bp, Artificial Sequence
  Synthetic oligonucleotide
ctatagttcgtcaaagtcttagcaggatct

SEQ ID NO: 124840 - DNA, 30 bp, Artificial Sequence
  Synthetic oligonucleotide
tcgctagaggatcaacaattaggaggatct

SEQ ID NO: 124841 - DNA, 30 bp, Artificial Sequence
  Synthetic oligonucleotide
tagtgagccagtaggatgcccgctggatct

SEQ ID NO: 124842 - DNA, 30 bp, Artificial Sequence
  Synthetic oligonucleotide
tggtcgtggatagaaaaaccttgtggatct

SEQ ID NO: 124843 - DNA, 30 bp, Artificial Sequence
  Synthetic oligonucleotide
aagaaccgtagtgattcggggtagtgatct

SEQ ID NO: 124844 - DNA, 30 bp, Artificial Sequence
  Synthetic oligonucleotide
atgggagcactataatgagaggggtgatct

SEQ ID NO: 124845 - DNA, 30 bp, Artificial Sequence
  Synthetic oligonucleotide
caagggatggggcagataatcgtgtgatct

SEQ ID NO: 124846 - DNA, 30 bp, Artificial Sequence
  Synthetic oligonucleotide
agggtcgaacaaagagtacggactatatct

SEQ ID NO: 124847 - DNA, 30 bp, Artificial Sequence
  Synthetic oligonucleotide
gacaaaatcttaagagccatgagtatatct

SEQ ID NO: 124848 - DNA, 30 bp, Artificial Sequence
  Synthetic oligonucleotide
gcgaaatcaagtagcggcgacatcctatct

SEQ ID NO: 124849 - DNA, 30 bp, Artificial Sequence
  Synthetic oligonucleotide
tttcaataacatcagtccgatcctgtatct

SEQ ID NO: 124850 - DNA, 30 bp, Artificial Sequence
  Synthetic oligonucleotide
tcctggacgtcgagtgtcgtggtgttatct

SEQ ID NO: 124851 - DNA, 30 bp, Artificial Sequence
  Synthetic oligonucleotide
ccaggtgggactaaggtagtgggtttatct

SEQ ID NO: 124852 - DNA, 30 bp, Artificial Sequence
  Synthetic oligonucleotide
gtggaacagccgggtactctgccccactct

SEQ ID NO: 124853 - DNA, 30 bp, Artificial Sequence
  Synthetic oligonucleotide
caacaccacaaagttgcgatatgggactct

SEQ ID NO: 124854 - DNA, 30 bp, Artificial Sequence
  Synthetic oligonucleotide
gtgtgaaaggtaacgaacctcatgtactct

SEQ ID NO: 124855 - DNA, 30 bp, Artificial Sequence
  Synthetic oligonucleotide
ggataactaaacaccgcaaccaacacctct

SEQ ID NO: 124856 - DNA, 30 bp, Artificial Sequence
  Synthetic oligonucleotide
gcggtccatcagtagcaaccactcgcctct

SEQ ID NO: 124857 - DNA, 29 bp, Artificial Sequence
  Synthetic oligonucleotide
tccgtagtggaggaggtgggctatcctct

SEQ ID NO: 124858 - DNA, 30 bp, Artificial Sequence
  Synthetic oligonucleotide
ctgatagcctgcacaacgtcgaacagctct

SEQ ID NO: 124859 - DNA, 30 bp, Artificial Sequence
  Synthetic oligonucleotide
atcaaggtacgaggcggggcatgtagctct

SEQ ID NO: 124860 - DNA, 30 bp, Artificial Sequence
  Synthetic oligonucleotide
cccgtcgggaactacatgcatcttagctct

SEQ ID NO: 124861 - DNA, 30 bp, Artificial Sequence
  Synthetic oligonucleotide
cacgatcgaatgaaaaaaaaacgacgctct

SEQ ID NO: 124862 - DNA, 30 bp, Artificial Sequence
  Synthetic oligonucleotide
cggagacagatacattcacaacaccgctct

SEQ ID NO: 124863 - DNA, 30 bp, Artificial Sequence
  Synthetic oligonucleotide
tatggcattactagtaatattacccgctct

SEQ ID NO: 124864 - DNA, 30 bp, Artificial Sequence
  Synthetic oligonucleotide
tttggggcggtctgctccacgcaatgctct

SEQ ID NO: 124865 - DNA, 30 bp, Artificial Sequence
  Synthetic oligonucleotide
tgctgacggagacggaagtgggggatctct

SEQ ID NO: 124866 - DNA, 30 bp, Artificial Sequence
  Synthetic oligonucleotide
cccgcgaggtatatgaaacgcgtgatctct

SEQ ID NO: 124867 - DNA, 30 bp, Artificial Sequence
  Synthetic oligonucleotide
gggctgtctgtgcgatctacacttatctct

SEQ ID NO: 124868 - DNA, 30 bp, Artificial Sequence
  Synthetic oligonucleotide
tggttagtcatgattaatttcaacctctct

SEQ ID NO: 124869 - DNA, 30 bp, Artificial Sequence
  Synthetic oligonucleotide
caggtgggacatttcagaagtcctctctct

SEQ ID NO: 124870 - DNA, 30 bp, Artificial Sequence
  Synthetic oligonucleotide
cgcctatcggtggattcgagtgaagtctct

SEQ ID NO: 124871 - DNA, 30 bp, Artificial Sequence
  Synthetic oligonucleotide
ggcagtgaaagcaagtcgaaacaattctct

SEQ ID NO: 124872 - DNA, 30 bp, Artificial Sequence
  Synthetic oligonucleotide
aaatgggtactagtcagcggcacgttctct

SEQ ID NO: 124873 - DNA, 30 bp, Artificial Sequence
  Synthetic oligonucleotide
gcagtagaagctagtgcaacgcgaaagtct

SEQ ID NO: 124874 - DNA, 30 bp, Artificial Sequence
  Synthetic oligonucleotide
acccaacacaacggctgcggttcccagtct

SEQ ID NO: 124875 - DNA, 30 bp, Artificial Sequence
  Synthetic oligonucleotide
atcgagcttataattcttaacgagcagtct

SEQ ID NO: 124876 - DNA, 30 bp, Artificial Sequence
  Synthetic oligonucleotide
ccatcctcagcgatcagcaacctgcagtct

SEQ ID NO: 124877 - DNA, 30 bp, Artificial Sequence
  Synthetic oligonucleotide
ctggcttggaacgacgacaagcatcagtct

SEQ ID NO: 124878 - DNA, 30 bp, Artificial Sequence
  Synthetic oligonucleotide
cagagaagctcagcgagactggttgagtct

SEQ ID NO: 124879 - DNA, 30 bp, Artificial Sequence
  Synthetic oligonucleotide
ccacgacaggccgcaatgataggctagtct

SEQ ID NO: 124880 - DNA, 30 bp, Artificial Sequence
  Synthetic oligonucleotide
gtacaggaggattcaaatgaggagtagtct

SEQ ID NO: 124881 - DNA, 30 bp, Artificial Sequence
  Synthetic oligonucleotide
tgcggtgcccatcaagatgttgggtagtct

SEQ ID NO: 124882 - DNA, 30 bp, Artificial Sequence
  Synthetic oligonucleotide
gtctgataatgaccgagggggacttagtct

SEQ ID NO: 124883 - DNA, 30 bp, Artificial Sequence
  Synthetic oligonucleotide
gcggagggcacaagtgcatttgccacgtct

SEQ ID NO: 124884 - DNA, 30 bp, Artificial Sequence
  Synthetic oligonucleotide
cagcacatcaggaatgggttctagacgtct

SEQ ID NO: 124885 - DNA, 30 bp, Artificial Sequence
  Synthetic oligonucleotide
tcagaacatggatattgggtgtagacgtct

SEQ ID NO: 124886 - DNA, 30 bp, Artificial Sequence
  Synthetic oligonucleotide
atcagctaatttgtgtacaatggaccgtct

SEQ ID NO: 124887 - DNA, 30 bp, Artificial Sequence
  Synthetic oligonucleotide
gttaagagcgtctacctcacattgccgtct

SEQ ID NO: 124888 - DNA, 30 bp, Artificial Sequence
  Synthetic oligonucleotide
tcatcatgagcggagagccccccggcgtct

SEQ ID NO: 124889 - DNA, 30 bp, Artificial Sequence
  Synthetic oligonucleotide
cgtgtgggatcaacatgatgaagatcgtct

SEQ ID NO: 124890 - DNA, 29 bp, Artificial Sequence
  Synthetic oligonucleotide
caccggcctatgtaaaagtgggttcgtct

SEQ ID NO: 124891 - DNA, 30 bp, Artificial Sequence
  Synthetic oligonucleotide
atacttaagggaactctccagccaaggtct

SEQ ID NO: 124892 - DNA, 30 bp, Artificial Sequence
  Synthetic oligonucleotide
cagggtgagcgtaccgatacatgaaggtct

SEQ ID NO: 124893 - DNA, 30 bp, Artificial Sequence
  Synthetic oligonucleotide
tccggaggtgtcgaggcaatcgtcaggtct

SEQ ID NO: 124894 - DNA, 31 bp, Artificial Sequence
  Synthetic oligonucleotide
aacgtcacagggcttagctggtgcccggtct

SEQ ID NO: 124895 - DNA, 30 bp, Artificial Sequence
  Synthetic oligonucleotide
ggagctaatgcgacaaacgatcaggggtct

SEQ ID NO: 124896 - DNA, 30 bp, Artificial Sequence
  Synthetic oligonucleotide
tcgtcactggttccctggatgcatgggtct

SEQ ID NO: 124897 - DNA, 30 bp, Artificial Sequence
  Synthetic oligonucleotide
tggtaccttcctatactggccagatggtct

SEQ ID NO: 124898 - DNA, 30 bp, Artificial Sequence
  Synthetic oligonucleotide
tcgggatcgaatgcctgtatacgatggtct

SEQ ID NO: 124899 - DNA, 30 bp, Artificial Sequence
  Synthetic oligonucleotide
gatgagcaacatagctggacatcttggtct

SEQ ID NO: 124900 - DNA, 30 bp, Artificial Sequence
  Synthetic oligonucleotide
ttgggcccatgaagcggatggcatatgtct

SEQ ID NO: 124901 - DNA, 30 bp, Artificial Sequence
  Synthetic oligonucleotide
tgaaataagggatcttttcgtattatgtct

SEQ ID NO: 124902 - DNA, 30 bp, Artificial Sequence
  Synthetic oligonucleotide
agggaaggtagatgggttgaaggactgtct

SEQ ID NO: 124903 - DNA, 30 bp, Artificial Sequence
  Synthetic oligonucleotide
aaggcattcactatgcgtaaactcctgtct

SEQ ID NO: 124904 - DNA, 30 bp, Artificial Sequence
  Synthetic oligonucleotide
caagacgtccagatttgagttagtctgtct

SEQ ID NO: 124905 - DNA, 30 bp, Artificial Sequence
  Synthetic oligonucleotide
aaggcgggttcgtatcgcataggtctgtct

SEQ ID NO: 124906 - DNA, 30 bp, Artificial Sequence
  Synthetic oligonucleotide
tgagggcgtgaagcgggcatagcagtgtct

SEQ ID NO: 124907 - DNA, 30 bp, Artificial Sequence
  Synthetic oligonucleotide
aacggtaagagcggaccacaggtggtgtct

SEQ ID NO: 124908 - DNA, 30 bp, Artificial Sequence
  Synthetic oligonucleotide
cgtatattgcaatgttaacggcaattgtct

SEQ ID NO: 124909 - DNA, 30 bp, Artificial Sequence
  Synthetic oligonucleotide
aggcatatgagatgcttgtcaaggttgtct

SEQ ID NO: 124910 - DNA, 30 bp, Artificial Sequence
  Synthetic oligonucleotide
ccgggtgttcgaagttgagtgtgaaattct

SEQ ID NO: 124911 - DNA, 30 bp, Artificial Sequence
  Synthetic oligonucleotide
gtgaggagcgagtgggggacatccaattct

SEQ ID NO: 124912 - DNA, 30 bp, Artificial Sequence
  Synthetic oligonucleotide
tcacgagtgcctaaatgtaggtataattct

SEQ ID NO: 124913 - DNA, 30 bp, Artificial Sequence
  Synthetic oligonucleotide
tttggcgtgtagattaagggtgggcattct

SEQ ID NO: 124914 - DNA, 30 bp, Artificial Sequence
  Synthetic oligonucleotide
atggacctcctggtatcgcttactgattct

SEQ ID NO: 124915 - DNA, 30 bp, Artificial Sequence
  Synthetic oligonucleotide
aacggccaagtgagagctgttggaacttct

SEQ ID NO: 124916 - DNA, 30 bp, Artificial Sequence
  Synthetic oligonucleotide
tctatcgcattgccggtcgaccgatcttct

SEQ ID NO: 124917 - DNA, 30 bp, Artificial Sequence
  Synthetic oligonucleotide
ctgcgccaccagtgagttggaggatcttct

SEQ ID NO: 124918 - DNA, 30 bp, Artificial Sequence
  Synthetic oligonucleotide
aatgaagcagggcgcgttaatgtctcttct

SEQ ID NO: 124919 - DNA, 30 bp, Artificial Sequence
  Synthetic oligonucleotide
tgcggtcatggaggtttacaacaaagttct

SEQ ID NO: 124920 - DNA, 30 bp, Artificial Sequence
  Synthetic oligonucleotide
gaggagagcacagacgtatcaggaagttct

SEQ ID NO: 124921 - DNA, 30 bp, Artificial Sequence
  Synthetic oligonucleotide
gctgattgccgataggacaggaatagttct

SEQ ID NO: 124922 - DNA, 30 bp, Artificial Sequence
  Synthetic oligonucleotide
gctcaagagggcgcacacggtaaaggttct

SEQ ID NO: 124923 - DNA, 30 bp, Artificial Sequence
  Synthetic oligonucleotide
tggaaactataggttcgacaatagggttct

SEQ ID NO: 124924 - DNA, 30 bp, Artificial Sequence
  Synthetic oligonucleotide
gacgtcgatcacgagtgatttcgctgttct

SEQ ID NO: 124925 - DNA, 30 bp, Artificial Sequence
  Synthetic oligonucleotide
atggagctctaggataattaagattgttct

SEQ ID NO: 124926 - DNA, 30 bp, Artificial Sequence
  Synthetic oligonucleotide
aacatacgaatgccggacctctgttgttct

SEQ ID NO: 124927 - DNA, 30 bp, Artificial Sequence
  Synthetic oligonucleotide
acttgcgtgaggagagcgtgtttaatttct

SEQ ID NO: 124928 - DNA, 30 bp, Artificial Sequence
  Synthetic oligonucleotide
tcgacatcggatgattaccggcgattttct

SEQ ID NO: 124929 - DNA, 30 bp, Artificial Sequence
  Synthetic oligonucleotide
tcctggtaagcttataagatacagttttct

SEQ ID NO: 124930 - DNA, 30 bp, Artificial Sequence
  Synthetic oligonucleotide
agaagaaaggggaaacttaatgtgaaaagt

SEQ ID NO: 124931 - DNA, 30 bp, Artificial Sequence
  Synthetic oligonucleotide
caaagcgtcctgaagcggttcgagcaaagt

SEQ ID NO: 124932 - DNA, 30 bp, Artificial Sequence
  Synthetic oligonucleotide
gggtggggttttaccatagtccaggaaagt

SEQ ID NO: 124933 - DNA, 30 bp, Artificial Sequence
  Synthetic oligonucleotide
caaactgtaggaattctggatagtgaaagt

SEQ ID NO: 124934 - DNA, 30 bp, Artificial Sequence
  Synthetic oligonucleotide
agtacgcgtctatgcggacagcttgaaagt

SEQ ID NO: 124935 - DNA, 30 bp, Artificial Sequence
  Synthetic oligonucleotide
taaatgaggaggtttcatcgaatgtaaagt

SEQ ID NO: 124936 - DNA, 30 bp, Artificial Sequence
  Synthetic oligonucleotide
acggaaattaaacaacctattccttaaagt

SEQ ID NO: 124937 - DNA, 30 bp, Artificial Sequence
  Synthetic oligonucleotide
gctgggaccggggtgcggatgatgacaagt

SEQ ID NO: 124938 - DNA, 30 bp, Artificial Sequence
  Synthetic oligonucleotide
acatagaatgtgcagaggcccaacccaagt

SEQ ID NO: 124939 - DNA, 30 bp, Artificial Sequence
  Synthetic oligonucleotide
atgtggggactgaagcagattaacccaagt

SEQ ID NO: 124940 - DNA, 30 bp, Artificial Sequence
  Synthetic oligonucleotide
gaattaaaccgagactgcaccaggccaagt

SEQ ID NO: 124941 - DNA, 30 bp, Artificial Sequence
  Synthetic oligonucleotide
agcccgcaaaacagactcaatgtagcaagt

SEQ ID NO: 124942 - DNA, 30 bp, Artificial Sequence
  Synthetic oligonucleotide
caacggcgcgagaagacggtggctgcaagt

SEQ ID NO: 124943 - DNA, 30 bp, Artificial Sequence
  Synthetic oligonucleotide
gataaagaacgatgaggcctctctgcaagt

SEQ ID NO: 124944 - DNA, 30 bp, Artificial Sequence
  Synthetic oligonucleotide
cgactgctgacaagatggcttgggtcaagt

SEQ ID NO: 124945 - DNA, 30 bp, Artificial Sequence
  Synthetic oligonucleotide
aaagcaccacagtcaaagacccaaagaagt

SEQ ID NO: 124946 - DNA, 30 bp, Artificial Sequence
  Synthetic oligonucleotide
gaacgaatggagggccaccaatccagaagt

SEQ ID NO: 124947 - DNA, 30 bp, Artificial Sequence
  Synthetic oligonucleotide
cgccgtcaataaaaaccacgcacgagaagt

SEQ ID NO: 124948 - DNA, 30 bp, Artificial Sequence
  Synthetic oligonucleotide
gggacgatgcgctgtccctccaagcgaagt

SEQ ID NO: 124949 - DNA, 30 bp, Artificial Sequence
  Synthetic oligonucleotide
tgcgcaacagccagcggaagccatcgaagt

SEQ ID NO: 124950 - DNA, 30 bp, Artificial Sequence
  Synthetic oligonucleotide
gatctgccttagtctactttacgtcgaagt

SEQ ID NO: 124951 - DNA, 31 bp, Artificial Sequence
  Synthetic oligonucleotide
aactcgctgtaataggtaagtagttcgaagt

SEQ ID NO: 124952 - DNA, 30 bp, Artificial Sequence
  Synthetic oligonucleotide
gtggggtgcgcttcgctgtccgtcggaagt

SEQ ID NO: 124953 - DNA, 30 bp, Artificial Sequence
  Synthetic oligonucleotide
atcgagacctctagagaacctggatgaagt

SEQ ID NO: 124954 - DNA, 30 bp, Artificial Sequence
  Synthetic oligonucleotide
taagcgaccgtgacgggtggaatatgaagt

SEQ ID NO: 124955 - DNA, 30 bp, Artificial Sequence
  Synthetic oligonucleotide
agcgactacatggagactaatgagtgaagt

SEQ ID NO: 124956 - DNA, 30 bp, Artificial Sequence
  Synthetic oligonucleotide
ctacagcgggtttacccttggaggataagt

SEQ ID NO: 124957 - DNA, 30 bp, Artificial Sequence
  Synthetic oligonucleotide
gcactagagcagtcagatgtggctataagt

SEQ ID NO: 124958 - DNA, 29 bp, Artificial Sequence
  Synthetic oligonucleotide
gatcgactgttgcgaggggcgggctaagt

SEQ ID NO: 124959 - DNA, 30 bp, Artificial Sequence
  Synthetic oligonucleotide
aggggggaaggcgataagtggtggctaagt

SEQ ID NO: 124960 - DNA, 30 bp, Artificial Sequence
  Synthetic oligonucleotide
tcatagaagattccggtaattgaagtaagt

SEQ ID NO: 124961 - DNA, 30 bp, Artificial Sequence
  Synthetic oligonucleotide
tgtaaagaaaaggctgagtgattggtaagt

SEQ ID NO: 124962 - DNA, 30 bp, Artificial Sequence
  Synthetic oligonucleotide
taggactataaggcgtcgggtcacttaagt

SEQ ID NO: 124963 - DNA, 30 bp, Artificial Sequence
  Synthetic oligonucleotide
tagcatagagtcgggtaatcagaaaacagt

SEQ ID NO: 124964 - DNA, 30 bp, Artificial Sequence
  Synthetic oligonucleotide
catgcaacttaggagaatagaataaacagt

SEQ ID NO: 124965 - DNA, 30 bp, Artificial Sequence
  Synthetic oligonucleotide
ccgaagcattgccagttaaggcacaacagt

SEQ ID NO: 124966 - DNA, 30 bp, Artificial Sequence
  Synthetic oligonucleotide
cgcgtggttagaaaatctgatccgaacagt

SEQ ID NO: 124967 - DNA, 30 bp, Artificial Sequence
  Synthetic oligonucleotide
aacatttgaaaggggtacaaagggaacagt

SEQ ID NO: 124968 - DNA, 30 bp, Artificial Sequence
  Synthetic oligonucleotide
actagaacaagttcggggtttagtaacagt

SEQ ID NO: 124969 - DNA, 30 bp, Artificial Sequence
  Synthetic oligonucleotide
aggtcaataagattggttgtcaaacacagt

SEQ ID NO: 124970 - DNA, 30 bp, Artificial Sequence
  Synthetic oligonucleotide
ggcggtgcgtcgggcatcacgtaccacagt

SEQ ID NO: 124971 - DNA, 30 bp, Artificial Sequence
  Synthetic oligonucleotide
aatccgaacgagattggcagagatcacagt

SEQ ID NO: 124972 - DNA, 30 bp, Artificial Sequence
  Synthetic oligonucleotide
agtcgggataacaaagatgttattcacagt

SEQ ID NO: 124973 - DNA, 30 bp, Artificial Sequence
  Synthetic oligonucleotide
cggggtaagcgtccgtacttttaggacagt

SEQ ID NO: 124974 - DNA, 30 bp, Artificial Sequence
  Synthetic oligonucleotide
tagcccaagagcgagtagatctgtgacagt

SEQ ID NO: 124975 - DNA, 30 bp, Artificial Sequence
  Synthetic oligonucleotide
cagccattcgaggtcgaaagcggaaccagt

SEQ ID NO: 124976 - DNA, 30 bp, Artificial Sequence
  Synthetic oligonucleotide
cggaaattacgaacaggctgacggcccagt

SEQ ID NO: 124977 - DNA, 30 bp, Artificial Sequence
  Synthetic oligonucleotide
taggcagggcacgatgtatggtgggccagt

SEQ ID NO: 124978 - DNA, 31 bp, Artificial Sequence
  Synthetic oligonucleotide
ccctattacagacagcgtgcgcttggccagt

SEQ ID NO: 124979 - DNA, 30 bp, Artificial Sequence
  Synthetic oligonucleotide
cagcattgcccaaggaaggatgaaagcagt

SEQ ID NO: 124980 - DNA, 30 bp, Artificial Sequence
  Synthetic oligonucleotide
tgtgaccgagttagtcggatcgtcagcagt

SEQ ID NO: 124981 - DNA, 30 bp, Artificial Sequence
  Synthetic oligonucleotide
tcggcactatcgatcgatgactcgagcagt

SEQ ID NO: 124982 - DNA, 30 bp, Artificial Sequence
  Synthetic oligonucleotide
aaggcctccatgaatttaagtgcaggcagt

SEQ ID NO: 124983 - DNA, 30 bp, Artificial Sequence
  Synthetic oligonucleotide
ctggactgaaaacgcagtcatcatggcagt

SEQ ID NO: 124984 - DNA, 30 bp, Artificial Sequence
  Synthetic oligonucleotide
accggaaaagactggtgtgacggtggcagt

SEQ ID NO: 124985 - DNA, 30 bp, Artificial Sequence
  Synthetic oligonucleotide
ggacgcctacgtagtgtggatcactgcagt

SEQ ID NO: 124986 - DNA, 30 bp, Artificial Sequence
  Synthetic oligonucleotide
tgtgctagtacgagccgtgtaaagtgcagt

SEQ ID NO: 124987 - DNA, 30 bp, Artificial Sequence
  Synthetic oligonucleotide
accaccggctgtagccaacagaggtgcagt

SEQ ID NO: 124988 - DNA, 30 bp, Artificial Sequence
  Synthetic oligonucleotide
taggttaacaatctcgaactccaaatcagt

SEQ ID NO: 124989 - DNA, 30 bp, Artificial Sequence
  Synthetic oligonucleotide
tacccgtcatatcgcttggaggtaatcagt

SEQ ID NO: 124990 - DNA, 30 bp, Artificial Sequence
  Synthetic oligonucleotide
tatgaaggggtgtgttgactaggcatcagt

SEQ ID NO: 124991 - DNA, 30 bp, Artificial Sequence
  Synthetic oligonucleotide
gcatacacgacaattgcttggctgatcagt

SEQ ID NO: 124992 - DNA, 30 bp, Artificial Sequence
  Synthetic oligonucleotide
gtcattatggattttggaaagagtatcagt

SEQ ID NO: 124993 - DNA, 30 bp, Artificial Sequence
  Synthetic oligonucleotide
gcaataacctgcgcgagctgacaactcagt

SEQ ID NO: 124994 - DNA, 30 bp, Artificial Sequence
  Synthetic oligonucleotide
gataatgcggtggttgggatgcgagtcagt

SEQ ID NO: 124995 - DNA, 30 bp, Artificial Sequence
  Synthetic oligonucleotide
tttggaccgtttgagagtagaatagtcagt

SEQ ID NO: 124996 - DNA, 30 bp, Artificial Sequence
  Synthetic oligonucleotide
gcgaagctaagtctagaagttgtagtcagt

SEQ ID NO: 124997 - DNA, 30 bp, Artificial Sequence
  Synthetic oligonucleotide
ggcgggcggtgatttaaattgcctttcagt

SEQ ID NO: 124998 - DNA, 30 bp, Artificial Sequence
  Synthetic oligonucleotide
gcagcgagatcatcacggttgggtttcagt

SEQ ID NO: 124999 - DNA, 30 bp, Artificial Sequence
  Synthetic oligonucleotide
accattggctcgaacgtagatagaaagagt

SEQ ID NO: 125000 - DNA, 30 bp, Artificial Sequence
  Synthetic oligonucleotide
caaacgctacgtccacacggctgcaagagt

SEQ ID NO: 125001 - DNA, 30 bp, Artificial Sequence
  Synthetic oligonucleotide
aacatggagtaagattgggaaggtaagagt

SEQ ID NO: 125002 - DNA, 30 bp, Artificial Sequence
  Synthetic oligonucleotide
aatggaggcttagtgattgcacgccagagt

SEQ ID NO: 125003 - DNA, 30 bp, Artificial Sequence
  Synthetic oligonucleotide
cgtttccaggatctataggaggaagagagt

SEQ ID NO: 125004 - DNA, 30 bp, Artificial Sequence
  Synthetic oligonucleotide
aaggacacctacaaatcgcgggaagagagt

SEQ ID NO: 125005 - DNA, 30 bp, Artificial Sequence
  Synthetic oligonucleotide
atgtgacgtctcgcgctcagctaagagagt

SEQ ID NO: 125006 - DNA, 30 bp, Artificial Sequence
  Synthetic oligonucleotide
ggtaccaggttgttaactacgtgagagagt

SEQ ID NO: 125007 - DNA, 30 bp, Artificial Sequence
  Synthetic oligonucleotide
gggaatctgaaaaaacgcccgcacgagagt

SEQ ID NO: 125008 - DNA, 30 bp, Artificial Sequence
  Synthetic oligonucleotide
gtacggcactacctagggatcggtgagagt

SEQ ID NO: 125009 - DNA, 30 bp, Artificial Sequence
  Synthetic oligonucleotide
atggaagtgtcgagatgggagaactagagt

SEQ ID NO: 125010 - DNA, 30 bp, Artificial Sequence
  Synthetic oligonucleotide
gttcacgagaataccgcccagccgacgagt

SEQ ID NO: 125011 - DNA, 30 bp, Artificial Sequence
  Synthetic oligonucleotide
gctcgaatctgttgtctttctcatacgagt

SEQ ID NO: 125012 - DNA, 30 bp, Artificial Sequence
  Synthetic oligonucleotide
ccggcaacgggcgtgtggccaaaaccgagt

SEQ ID NO: 125013 - DNA, 30 bp, Artificial Sequence
  Synthetic oligonucleotide
aagttagtcctagctggagggccaccgagt

SEQ ID NO: 125014 - DNA, 30 bp, Artificial Sequence
  Synthetic oligonucleotide
gtaagtatcagattaagcattacgccgagt

SEQ ID NO: 125015 - DNA, 30 bp, Artificial Sequence
  Synthetic oligonucleotide
atgtcgctaaacgagctgtgttccgcgagt

SEQ ID NO: 125016 - DNA, 30 bp, Artificial Sequence
  Synthetic oligonucleotide
cgggcgcatttacttcggacactggcgagt

SEQ ID NO: 125017 - DNA, 30 bp, Artificial Sequence
  Synthetic oligonucleotide
tgagggcgtttgaattggctaaatgcgagt

SEQ ID NO: 125018 - DNA, 30 bp, Artificial Sequence
  Synthetic oligonucleotide
ggagcagatacggtagcctgtggatcgagt

SEQ ID NO: 125019 - DNA, 30 bp, Artificial Sequence
  Synthetic oligonucleotide
ccgtaaaccaaaacgacaacctggtcgagt

SEQ ID NO: 125020 - DNA, 30 bp, Artificial Sequence
  Synthetic oligonucleotide
tggctccaggaggtttgtgttcacaggagt

SEQ ID NO: 125021 - DNA, 30 bp, Artificial Sequence
  Synthetic oligonucleotide
gcgcgaacggaatgtgaccccacgaggagt

SEQ ID NO: 125022 - DNA, 30 bp, Artificial Sequence
  Synthetic oligonucleotide
acaatgcaccacgacattatactgaggagt

SEQ ID NO: 125023 - DNA, 30 bp, Artificial Sequence
  Synthetic oligonucleotide
atcgaaatactcggggaagaaagtaggagt

SEQ ID NO: 125024 - DNA, 30 bp, Artificial Sequence
  Synthetic oligonucleotide
agaggactgcagaaggtggcagaccggagt

SEQ ID NO: 125025 - DNA, 30 bp, Artificial Sequence
  Synthetic oligonucleotide
aacctcggaaaagccatgagcgctcggagt

SEQ ID NO: 125026 - DNA, 30 bp, Artificial Sequence
  Synthetic oligonucleotide
taaatcgtggtacggagccaaagatggagt

SEQ ID NO: 125027 - DNA, 30 bp, Artificial Sequence
  Synthetic oligonucleotide
cgcaaaataggggtgtaatgatactggagt

SEQ ID NO: 125028 - DNA, 30 bp, Artificial Sequence
  Synthetic oligonucleotide
tcagacgtacggagtccgaatacaatgagt

SEQ ID NO: 125029 - DNA, 30 bp, Artificial Sequence
  Synthetic oligonucleotide
gggtgatttggtctatttgcgagaatgagt

SEQ ID NO: 125030 - DNA, 30 bp, Artificial Sequence
  Synthetic oligonucleotide
cggcctgagcgaattctaaattgaatgagt

SEQ ID NO: 125031 - DNA, 30 bp, Artificial Sequence
  Synthetic oligonucleotide
ttcgtatcccttcacacttaggccatgagt

SEQ ID NO: 125032 - DNA, 30 bp, Artificial Sequence
  Synthetic oligonucleotide
agcgatatatcgcaactctagtccatgagt

SEQ ID NO: 125033 - DNA, 30 bp, Artificial Sequence
  Synthetic oligonucleotide
cgccttggggtctacgaggacagtatgagt

SEQ ID NO: 125034 - DNA, 30 bp, Artificial Sequence
  Synthetic oligonucleotide
agtcaattaccgtaacatgcctagctgagt

SEQ ID NO: 125035 - DNA, 30 bp, Artificial Sequence
  Synthetic oligonucleotide
gcaagtggatagtgaactaaatgtctgagt

SEQ ID NO: 125036 - DNA, 30 bp, Artificial Sequence
  Synthetic oligonucleotide
gtagatatgcccgcgtagcaattagtgagt

SEQ ID NO: 125037 - DNA, 30 bp, Artificial Sequence
  Synthetic oligonucleotide
ccgacatccatgcgaacggttctcgtgagt

SEQ ID NO: 125038 - DNA, 30 bp, Artificial Sequence
  Synthetic oligonucleotide
agtaccatgcacatttcgaatttggtgagt

SEQ ID NO: 125039 - DNA, 30 bp, Artificial Sequence
  Synthetic oligonucleotide
tttaagcgacacctctatgattctgtgagt

SEQ ID NO: 125040 - DNA, 30 bp, Artificial Sequence
  Synthetic oligonucleotide
caagcacacattacttcattgaaattgagt

SEQ ID NO: 125041 - DNA, 30 bp, Artificial Sequence
  Synthetic oligonucleotide
agttaggatagtggaaggaggcccttgagt

SEQ ID NO: 125042 - DNA, 30 bp, Artificial Sequence
  Synthetic oligonucleotide
tcgatgcatgatactgggataagaaatagt

SEQ ID NO: 125043 - DNA, 30 bp, Artificial Sequence
  Synthetic oligonucleotide
ggaacctattgtagaatggaagctaatagt

SEQ ID NO: 125044 - DNA, 30 bp, Artificial Sequence
  Synthetic oligonucleotide
ggcaaccactatcacgaaatgggtaatagt

SEQ ID NO: 125045 - DNA, 30 bp, Artificial Sequence
  Synthetic oligonucleotide
cgtttctgtttattcactagaaagcatagt

SEQ ID NO: 125046 - DNA, 30 bp, Artificial Sequence
  Synthetic oligonucleotide
cacgaagcgatcgcttaacttttagatagt

SEQ ID NO: 125047 - DNA, 30 bp, Artificial Sequence
  Synthetic oligonucleotide
cgggaacgaagacaagggcgtccatatagt

SEQ ID NO: 125048 - DNA, 30 bp, Artificial Sequence
  Synthetic oligonucleotide
gcgaggcttagtgcacctttggtatatagt

SEQ ID NO: 125049 - DNA, 30 bp, Artificial Sequence
  Synthetic oligonucleotide
ggtctcccaggtgatctgtgtacaactagt

SEQ ID NO: 125050 - DNA, 30 bp, Artificial Sequence
  Synthetic oligonucleotide
gtgcttactaaaaggctgacccgaactagt

SEQ ID NO: 125051 - DNA, 30 bp, Artificial Sequence
  Synthetic oligonucleotide
tcgtgggggttgtcgaagtcagacactagt

SEQ ID NO: 125052 - DNA, 30 bp, Artificial Sequence
  Synthetic oligonucleotide
aaggataattgagctatctggcccactagt

SEQ ID NO: 125053 - DNA, 30 bp, Artificial Sequence
  Synthetic oligonucleotide
ccaactatagacagtgaagggtatgctagt

SEQ ID NO: 125054 - DNA, 30 bp, Artificial Sequence
  Synthetic oligonucleotide
cgcccaaagtgggtggagcgcggatctagt

SEQ ID NO: 125055 - DNA, 30 bp, Artificial Sequence
  Synthetic oligonucleotide
tggcgaaccaggcacgaacaggcaagtagt

SEQ ID NO: 125056 - DNA, 30 bp, Artificial Sequence
  Synthetic oligonucleotide
tagaacggaagggacctccactctcgtagt

SEQ ID NO: 125057 - DNA, 30 bp, Artificial Sequence
  Synthetic oligonucleotide
aacacggaacatcaactgaataaaggtagt

SEQ ID NO: 125058 - DNA, 30 bp, Artificial Sequence
  Synthetic oligonucleotide
tctcgacaaattgaaggcgcataaggtagt

SEQ ID NO: 125059 - DNA, 30 bp, Artificial Sequence
  Synthetic oligonucleotide
cggagttacacacatccatccaacggtagt

SEQ ID NO: 125060 - DNA, 30 bp, Artificial Sequence
  Synthetic oligonucleotide
aatgaatatacatttcatgtaagcggtagt

SEQ ID NO: 125061 - DNA, 30 bp, Artificial Sequence
  Synthetic oligonucleotide
aggggatcgggtattagtcacgactgtagt

SEQ ID NO: 125062 - DNA, 30 bp, Artificial Sequence
  Synthetic oligonucleotide
gctagtgaccgattgttagcatagtgtagt

SEQ ID NO: 125063 - DNA, 30 bp, Artificial Sequence
  Synthetic oligonucleotide
tgtgttaaaagggagttagttgcaattagt

SEQ ID NO: 125064 - DNA, 30 bp, Artificial Sequence
  Synthetic oligonucleotide
ggtggtgattgaaagatgagcgtaattagt

SEQ ID NO: 125065 - DNA, 30 bp, Artificial Sequence
  Synthetic oligonucleotide
aagctcgcaaggaggtatctcgtacttagt

SEQ ID NO: 125066 - DNA, 30 bp, Artificial Sequence
  Synthetic oligonucleotide
acggcacgaacagttaagcggaggcttagt

SEQ ID NO: 125067 - DNA, 30 bp, Artificial Sequence
  Synthetic oligonucleotide
cgatatcgaagtcaggattcgcatcttagt

SEQ ID NO: 125068 - DNA, 30 bp, Artificial Sequence
  Synthetic oligonucleotide
tgggtgttgtaaagttagaggtacgttagt

SEQ ID NO: 125069 - DNA, 30 bp, Artificial Sequence
  Synthetic oligonucleotide
acagcaggcaagtgataccgttccgttagt

SEQ ID NO: 125070 - DNA, 30 bp, Artificial Sequence
  Synthetic oligonucleotide
acaacgcaaccggaaccagactaggttagt

SEQ ID NO: 125071 - DNA, 30 bp, Artificial Sequence
  Synthetic oligonucleotide
cgtgtggacggcatcatcaccccggttagt

SEQ ID NO: 125072 - DNA, 30 bp, Artificial Sequence
  Synthetic oligonucleotide
gtggactgtcataactgcaactgatttagt

SEQ ID NO: 125073 - DNA, 30 bp, Artificial Sequence
  Synthetic oligonucleotide
gaacaaacactaccttacctagcctttagt

SEQ ID NO: 125074 - DNA, 30 bp, Artificial Sequence
  Synthetic oligonucleotide
ctcaacggggttaaatgggcggggtttagt

SEQ ID NO: 125075 - DNA, 30 bp, Artificial Sequence
  Synthetic oligonucleotide
ggtgacagggacagaatgatgacaaaacgt

SEQ ID NO: 125076 - DNA, 30 bp, Artificial Sequence
  Synthetic oligonucleotide
atatcaagaggatatttaccggcaaaacgt

SEQ ID NO: 125077 - DNA, 30 bp, Artificial Sequence
  Synthetic oligonucleotide
acattaatagcacgatttggtaccaaacgt

SEQ ID NO: 125078 - DNA, 30 bp, Artificial Sequence
  Synthetic oligonucleotide
cgtaagagagctgcgatgtacaataaacgt

SEQ ID NO: 125079 - DNA, 30 bp, Artificial Sequence
  Synthetic oligonucleotide
tgggcatggaagccctcaataagtaaacgt

SEQ ID NO: 125080 - DNA, 30 bp, Artificial Sequence
  Synthetic oligonucleotide
tacatgtggtacactgggcgcgtacaacgt

SEQ ID NO: 125081 - DNA, 30 bp, Artificial Sequence
  Synthetic oligonucleotide
ttgaaaacgatcgcaagtaatgtggaacgt

SEQ ID NO: 125082 - DNA, 30 bp, Artificial Sequence
  Synthetic oligonucleotide
atgctgaccggaggtctaactccataacgt

SEQ ID NO: 125083 - DNA, 30 bp, Artificial Sequence
  Synthetic oligonucleotide
cggtgagtcattacaaatacaacgtaacgt

SEQ ID NO: 125084 - DNA, 30 bp, Artificial Sequence
  Synthetic oligonucleotide
taggacaacgagccttcgccatgttaacgt

SEQ ID NO: 125085 - DNA, 30 bp, Artificial Sequence
  Synthetic oligonucleotide
gactatgggctagggactctgctaacacgt

SEQ ID NO: 125086 - DNA, 30 bp, Artificial Sequence
  Synthetic oligonucleotide
acggggaagtaatgccaaattctgacacgt

SEQ ID NO: 125087 - DNA, 30 bp, Artificial Sequence
  Synthetic oligonucleotide
acgaactgtactaggttagacgttacacgt

SEQ ID NO: 125088 - DNA, 30 bp, Artificial Sequence
  Synthetic oligonucleotide
ggacaggaatccaggcaaaagggagcacgt

SEQ ID NO: 125089 - DNA, 30 bp, Artificial Sequence
  Synthetic oligonucleotide
tatgggagagtagctcaggggagcgcacgt

SEQ ID NO: 125090 - DNA, 30 bp, Artificial Sequence
  Synthetic oligonucleotide
tctggcagtgtaatcgaaaaggaggcacgt

SEQ ID NO: 125091 - DNA, 30 bp, Artificial Sequence
  Synthetic oligonucleotide
ataccggaagaaggatgtgatgcaagacgt

SEQ ID NO: 125092 - DNA, 30 bp, Artificial Sequence
  Synthetic oligonucleotide
tcatcgcccgacccgaaagctgtcagacgt

SEQ ID NO: 125093 - DNA, 30 bp, Artificial Sequence
  Synthetic oligonucleotide
ttatgtgattagaggtacaagtagagacgt

SEQ ID NO: 125094 - DNA, 30 bp, Artificial Sequence
  Synthetic oligonucleotide
aaaatggctgaggctcgtaaaattagacgt

SEQ ID NO: 125095 - DNA, 30 bp, Artificial Sequence
  Synthetic oligonucleotide
ggaaaaatcctagtctggttaatacgacgt

SEQ ID NO: 125096 - DNA, 30 bp, Artificial Sequence
  Synthetic oligonucleotide
cattaacctgccgtgtaaatatgccgacgt

SEQ ID NO: 125097 - DNA, 30 bp, Artificial Sequence
  Synthetic oligonucleotide
tgaagccgtgcaaccagaggttggatacgt

SEQ ID NO: 125098 - DNA, 30 bp, Artificial Sequence
  Synthetic oligonucleotide
ggtttgggctaggactaaagaatactacgt

SEQ ID NO: 125099 - DNA, 30 bp, Artificial Sequence
  Synthetic oligonucleotide
gtcaggtcgatcacgggacggaccttacgt

SEQ ID NO: 125100 - DNA, 29 bp, Artificial Sequence
  Synthetic oligonucleotide
ccggactatccaaggcagtaagtttacgt

SEQ ID NO: 125101 - DNA, 30 bp, Artificial Sequence
  Synthetic oligonucleotide
ggaagagtcgagccgcgctcaggggaccgt

SEQ ID NO: 125102 - DNA, 30 bp, Artificial Sequence
  Synthetic oligonucleotide
aaaggcctacgatcatagatcccgtaccgt

SEQ ID NO: 125103 - DNA, 30 bp, Artificial Sequence
  Synthetic oligonucleotide
ctaggcttagagaccgtaagttggtaccgt

SEQ ID NO: 125104 - DNA, 30 bp, Artificial Sequence
  Synthetic oligonucleotide
catgcgaatggaattaattcgatgtaccgt

SEQ ID NO: 125105 - DNA, 31 bp, Artificial Sequence
  Synthetic oligonucleotide
aattaatagaatcaaagacggtaatacccgt

SEQ ID NO: 125106 - DNA, 30 bp, Artificial Sequence
  Synthetic oligonucleotide
gacgttacaggatgtttaacaactacccgt

SEQ ID NO: 125107 - DNA, 30 bp, Artificial Sequence
  Synthetic oligonucleotide
tcgtaaaatggccatcttagagccgcccgt

SEQ ID NO: 125108 - DNA, 30 bp, Artificial Sequence
  Synthetic oligonucleotide
agaacgaactgtctccggggttgtgcccgt

SEQ ID NO: 125109 - DNA, 30 bp, Artificial Sequence
  Synthetic oligonucleotide
gggtaatgggctcactattactttagccgt

SEQ ID NO: 125110 - DNA, 30 bp, Artificial Sequence
  Synthetic oligonucleotide
ggccgtgcatttgaatgggaaccgcgccgt

SEQ ID NO: 125111 - DNA, 30 bp, Artificial Sequence
  Synthetic oligonucleotide
cggtgcttattgagggatcgcaccggccgt

SEQ ID NO: 125112 - DNA, 30 bp, Artificial Sequence
  Synthetic oligonucleotide
gcgcatagaagaatagtccccatcggccgt

SEQ ID NO: 125113 - DNA, 30 bp, Artificial Sequence
  Synthetic oligonucleotide
cgtaggctctcgacgctctatcggggccgt

SEQ ID NO: 125114 - DNA, 30 bp, Artificial Sequence
  Synthetic oligonucleotide
ctgaaaaaggggtaaaatcgcaatggccgt

SEQ ID NO: 125115 - DNA, 30 bp, Artificial Sequence
  Synthetic oligonucleotide
ctgccgatacgatagagacacgaatgccgt

SEQ ID NO: 125116 - DNA, 30 bp, Artificial Sequence
  Synthetic oligonucleotide
gacgtaggggcgttcccgaccgactgccgt

SEQ ID NO: 125117 - DNA, 30 bp, Artificial Sequence
  Synthetic oligonucleotide
agcgtcgctcacctcggaggaccctgccgt

SEQ ID NO: 125118 - DNA, 30 bp, Artificial Sequence
  Synthetic oligonucleotide
ccactgtgaaagtgcaaaaagcagtgccgt

SEQ ID NO: 125119 - DNA, 30 bp, Artificial Sequence
  Synthetic oligonucleotide
ggtcttataagacaggataggtagtgccgt

SEQ ID NO: 125120 - DNA, 30 bp, Artificial Sequence
  Synthetic oligonucleotide
ctgggataccttgcatcgatagagatccgt

SEQ ID NO: 125121 - DNA, 30 bp, Artificial Sequence
  Synthetic oligonucleotide
gcacactcgacgaatataggacatatccgt

SEQ ID NO: 125122 - DNA, 30 bp, Artificial Sequence
  Synthetic oligonucleotide
ctaaagtagaacccataccgcgctatccgt

SEQ ID NO: 125123 - DNA, 30 bp, Artificial Sequence
  Synthetic oligonucleotide
tgaggtctgccagcactgtaaggactccgt

SEQ ID NO: 125124 - DNA, 30 bp, Artificial Sequence
  Synthetic oligonucleotide
acaggacgaaacactgtgaagttagtccgt

SEQ ID NO: 125125 - DNA, 30 bp, Artificial Sequence
  Synthetic oligonucleotide
actgaactagttagtcggatgtgcgtccgt

SEQ ID NO: 125126 - DNA, 30 bp, Artificial Sequence
  Synthetic oligonucleotide
agtagtcacacttcaggcacactggtccgt

SEQ ID NO: 125127 - DNA, 30 bp, Artificial Sequence
  Synthetic oligonucleotide
acgttcgcgtcaatactggtgtccaagcgt

SEQ ID NO: 125128 - DNA, 30 bp, Artificial Sequence
  Synthetic oligonucleotide
tcacccgagcacattattagggtcaagcgt

SEQ ID NO: 125129 - DNA, 30 bp, Artificial Sequence
  Synthetic oligonucleotide
acgagacttctgtctacattgcataagcgt

SEQ ID NO: 125130 - DNA, 30 bp, Artificial Sequence
  Synthetic oligonucleotide
gagctcatataaggataggggtacgagcgt

SEQ ID NO: 125131 - DNA, 30 bp, Artificial Sequence
  Synthetic oligonucleotide
atggctcggtgaagaatgttggaggagcgt

SEQ ID NO: 125132 - DNA, 30 bp, Artificial Sequence
  Synthetic oligonucleotide
caccttagggttgctcaattaaaatagcgt

SEQ ID NO: 125133 - DNA, 30 bp, Artificial Sequence
  Synthetic oligonucleotide
gcagatcagcgtatcggagtatgctagcgt

SEQ ID NO: 125134 - DNA, 30 bp, Artificial Sequence
  Synthetic oligonucleotide
ggtcagtcgtgctaagtcagcagaacgcgt

SEQ ID NO: 125135 - DNA, 30 bp, Artificial Sequence
  Synthetic oligonucleotide
ctacaagaaaatgcaagtagaatcacgcgt

SEQ ID NO: 125136 - DNA, 30 bp, Artificial Sequence
  Synthetic oligonucleotide
caaatcgtgtggacgaagatgcttacgcgt

SEQ ID NO: 125137 - DNA, 30 bp, Artificial Sequence
  Synthetic oligonucleotide
cgggcacaggaatacttcaggtttacgcgt

SEQ ID NO: 125138 - DNA, 30 bp, Artificial Sequence
  Synthetic oligonucleotide
caatcagtaggatggatttgtgtcgcgcgt

SEQ ID NO: 125139 - DNA, 30 bp, Artificial Sequence
  Synthetic oligonucleotide
caagataacaactctgggaatcagtcgcgt

SEQ ID NO: 125140 - DNA, 30 bp, Artificial Sequence
  Synthetic oligonucleotide
atctagcacggagggcgttccacgaggcgt

SEQ ID NO: 125141 - DNA, 30 bp, Artificial Sequence
  Synthetic oligonucleotide
aacaagagtaagcctccactcgataggcgt

SEQ ID NO: 125142 - DNA, 30 bp, Artificial Sequence
  Synthetic oligonucleotide
ctcgcaatcagcattgatgagcctaggcgt

SEQ ID NO: 125143 - DNA, 30 bp, Artificial Sequence
  Synthetic oligonucleotide
gggccatatgatgctgtatgccttaggcgt

SEQ ID NO: 125144 - DNA, 30 bp, Artificial Sequence
  Synthetic oligonucleotide
taggttcatgaacgagatatagaacggcgt

SEQ ID NO: 125145 - DNA, 30 bp, Artificial Sequence
  Synthetic oligonucleotide
acgggccacggaacgtgtctcatacggcgt

SEQ ID NO: 125146 - DNA, 30 bp, Artificial Sequence
  Synthetic oligonucleotide
atgcgtcatacccaccagccaacccggcgt

SEQ ID NO: 125147 - DNA, 31 bp, Artificial Sequence
  Synthetic oligonucleotide
ggttatactgttcggttatccacgagggcgt

SEQ ID NO: 125148 - DNA, 30 bp, Artificial Sequence
  Synthetic oligonucleotide
cgcaaggtacggttttctcgccggtggcgt

SEQ ID NO: 125149 - DNA, 30 bp, Artificial Sequence
  Synthetic oligonucleotide
agattaagtgtctgattggccacaatgcgt

SEQ ID NO: 125150 - DNA, 30 bp, Artificial Sequence
  Synthetic oligonucleotide
gaacaaggttcgaggtgttcgagaatgcgt

SEQ ID NO: 125151 - DNA, 30 bp, Artificial Sequence
  Synthetic oligonucleotide
gaacgggacgatacgggattatcgatgcgt

SEQ ID NO: 125152 - DNA, 30 bp, Artificial Sequence
  Synthetic oligonucleotide
tgcgccaacgaatatactcgggggctgcgt

SEQ ID NO: 125153 - DNA, 30 bp, Artificial Sequence
  Synthetic oligonucleotide
caacaagaactgattactggtcttctgcgt

SEQ ID NO: 125154 - DNA, 30 bp, Artificial Sequence
  Synthetic oligonucleotide
caggacctgaggatgatggccctagtgcgt

SEQ ID NO: 125155 - DNA, 30 bp, Artificial Sequence
  Synthetic oligonucleotide
gctgtcctggcaggatgcaagtgcgtgcgt

SEQ ID NO: 125156 - DNA, 30 bp, Artificial Sequence
  Synthetic oligonucleotide
aaggctagctatggtatctcgaatgtgcgt

SEQ ID NO: 125157 - DNA, 30 bp, Artificial Sequence
  Synthetic oligonucleotide
taggcggcgaacggagcgaggccaaatcgt

SEQ ID NO: 125158 - DNA, 30 bp, Artificial Sequence
  Synthetic oligonucleotide
agttgtgtgtgtaacttactgattaatcgt

SEQ ID NO: 125159 - DNA, 30 bp, Artificial Sequence
  Synthetic oligonucleotide
atggggcctgcggatattatcagacatcgt

SEQ ID NO: 125160 - DNA, 30 bp, Artificial Sequence
  Synthetic oligonucleotide
gaagataatggatgtgctgtaatacatcgt

SEQ ID NO: 125161 - DNA, 30 bp, Artificial Sequence
  Synthetic oligonucleotide
actgggcttaatcgggaaggatcccatcgt

SEQ ID NO: 125162 - DNA, 30 bp, Artificial Sequence
  Synthetic oligonucleotide
tgaaagaggtccagaggcaggaagcatcgt

SEQ ID NO: 125163 - DNA, 30 bp, Artificial Sequence
  Synthetic oligonucleotide
agtgagcaattaggcaatgatcatcatcgt

SEQ ID NO: 125164 - DNA, 30 bp, Artificial Sequence
  Synthetic oligonucleotide
cctttagatgtgctaggaagccgagatcgt

SEQ ID NO: 125165 - DNA, 30 bp, Artificial Sequence
  Synthetic oligonucleotide
cagactacaggtgttgatcagctagatcgt

SEQ ID NO: 125166 - DNA, 30 bp, Artificial Sequence
  Synthetic oligonucleotide
tcgggcggaggaaactgtcctcgctatcgt

SEQ ID NO: 125167 - DNA, 30 bp, Artificial Sequence
  Synthetic oligonucleotide
cagggggaggctgttgtttcgggctatcgt

SEQ ID NO: 125168 - DNA, 30 bp, Artificial Sequence
  Synthetic oligonucleotide
aacgctgagccgtacagttagaaaactcgt

SEQ ID NO: 125169 - DNA, 30 bp, Artificial Sequence
  Synthetic oligonucleotide
ggaaaacataattccggcctttcaactcgt

SEQ ID NO: 125170 - DNA, 30 bp, Artificial Sequence
  Synthetic oligonucleotide
aaaggctggtaaaaagctttaataactcgt

SEQ ID NO: 125171 - DNA, 30 bp, Artificial Sequence
  Synthetic oligonucleotide
tcaagtataaaacttttgacattaactcgt

SEQ ID NO: 125172 - DNA, 30 bp, Artificial Sequence
  Synthetic oligonucleotide
ggaataatccggcctatgaaactcactcgt

SEQ ID NO: 125173 - DNA, 30 bp, Artificial Sequence
  Synthetic oligonucleotide
cgaggctggcgtatgggggaacaccctcgt

SEQ ID NO: 125174 - DNA, 29 bp, Artificial Sequence
  Synthetic oligonucleotide
tgaggattataagcggggtggacgctcgt

SEQ ID NO: 125175 - DNA, 30 bp, Artificial Sequence
  Synthetic oligonucleotide
acggtagcgtatgggttacatatcgctcgt

SEQ ID NO: 125176 - DNA, 30 bp, Artificial Sequence
  Synthetic oligonucleotide
ccacttcaggtaagtgaaatatcgtctcgt

SEQ ID NO: 125177 - DNA, 30 bp, Artificial Sequence
  Synthetic oligonucleotide
ctagccagggaattcgcacgccgacgtcgt

SEQ ID NO: 125178 - DNA, 30 bp, Artificial Sequence
  Synthetic oligonucleotide
ggagagttatctagaacagggtgacgtcgt

SEQ ID NO: 125179 - DNA, 30 bp, Artificial Sequence
  Synthetic oligonucleotide
aagagcactaccgtatgtaatccccgtcgt

SEQ ID NO: 125180 - DNA, 30 bp, Artificial Sequence
  Synthetic oligonucleotide
gttgagacagggcaccttattaatggtcgt

SEQ ID NO: 125181 - DNA, 30 bp, Artificial Sequence
  Synthetic oligonucleotide
taacattagattggtatccgtttctgtcgt

SEQ ID NO: 125182 - DNA, 30 bp, Artificial Sequence
  Synthetic oligonucleotide
cagcgggaagaaccaatcgtcgattgtcgt

SEQ ID NO: 125183 - DNA, 30 bp, Artificial Sequence
  Synthetic oligonucleotide
tcgtgaggactggacctgcttatttgtcgt

SEQ ID NO: 125184 - DNA, 30 bp, Artificial Sequence
  Synthetic oligonucleotide
cggaacgagaggggcccgagatccattcgt

SEQ ID NO: 125185 - DNA, 30 bp, Artificial Sequence
  Synthetic oligonucleotide
gtggccagaccctcttaagtgtaccttcgt

SEQ ID NO: 125186 - DNA, 30 bp, Artificial Sequence
  Synthetic oligonucleotide
gagatgagagatgaaaggacgtcgcttcgt

SEQ ID NO: 125187 - DNA, 30 bp, Artificial Sequence
  Synthetic oligonucleotide
tcctagggcgagtaggagtacaaagttcgt

SEQ ID NO: 125188 - DNA, 30 bp, Artificial Sequence
  Synthetic oligonucleotide
gcagagttatagtgggttatccgtgttcgt

SEQ ID NO: 125189 - DNA, 30 bp, Artificial Sequence
  Synthetic oligonucleotide
aatcgtaatctagtaattgaagcgtttcgt

SEQ ID NO: 125190 - DNA, 30 bp, Artificial Sequence
  Synthetic oligonucleotide
ggtctacgagtgcagagtcgtgtcaaaggt

SEQ ID NO: 125191 - DNA, 30 bp, Artificial Sequence
  Synthetic oligonucleotide
gcaacatgctagatgggaacgaagaaaggt

SEQ ID NO: 125192 - DNA, 30 bp, Artificial Sequence
  Synthetic oligonucleotide
gtccaaggagcttggtacacgaagaaaggt

SEQ ID NO: 125193 - DNA, 30 bp, Artificial Sequence
  Synthetic oligonucleotide
gctgcaagcccaacgaccaagtagaaaggt

SEQ ID NO: 125194 - DNA, 30 bp, Artificial Sequence
  Synthetic oligonucleotide
gttggccattctcgcttagagcaagaaggt

SEQ ID NO: 125195 - DNA, 30 bp, Artificial Sequence
  Synthetic oligonucleotide
tttccgcgagaaggaacgggaatcgaaggt

SEQ ID NO: 125196 - DNA, 30 bp, Artificial Sequence
  Synthetic oligonucleotide
tggaatataggtggatggggttactaaggt

SEQ ID NO: 125197 - DNA, 30 bp, Artificial Sequence
  Synthetic oligonucleotide
tacatgaatctagcggcaaactattaaggt

SEQ ID NO: 125198 - DNA, 30 bp, Artificial Sequence
  Synthetic oligonucleotide
tgagttgcggttagagaagaaccttaaggt

SEQ ID NO: 125199 - DNA, 30 bp, Artificial Sequence
  Synthetic oligonucleotide
aggatatcttcgcaacggcggaaaccaggt

SEQ ID NO: 125200 - DNA, 30 bp, Artificial Sequence
  Synthetic oligonucleotide
gagattcgctagaggggtgcagagccaggt

SEQ ID NO: 125201 - DNA, 30 bp, Artificial Sequence
  Synthetic oligonucleotide
gcaatagcgtttcaggcgaagcggccaggt

SEQ ID NO: 125202 - DNA, 30 bp, Artificial Sequence
  Synthetic oligonucleotide
gatgataataccgcgaaaatcggggcaggt

SEQ ID NO: 125203 - DNA, 30 bp, Artificial Sequence
  Synthetic oligonucleotide
gtggagggcaaagcagtttcttatgcaggt

SEQ ID NO: 125204 - DNA, 30 bp, Artificial Sequence
  Synthetic oligonucleotide
ggcgtaagtccttatggacagtgtgcaggt

SEQ ID NO: 125205 - DNA, 30 bp, Artificial Sequence
  Synthetic oligonucleotide
ctgtacctagaacgaagtcgtttatcaggt

SEQ ID NO: 125206 - DNA, 30 bp, Artificial Sequence
  Synthetic oligonucleotide
ggggaacctcgctaacatggggcctcaggt

SEQ ID NO: 125207 - DNA, 30 bp, Artificial Sequence
  Synthetic oligonucleotide
agtcggacggtataaactatccgttcaggt

SEQ ID NO: 125208 - DNA, 30 bp, Artificial Sequence
  Synthetic oligonucleotide
tacggtaacagatattctgtaataagaggt

SEQ ID NO: 125209 - DNA, 30 bp, Artificial Sequence
  Synthetic oligonucleotide
acgggtcgtagctggcagtgggccagaggt

SEQ ID NO: 125210 - DNA, 30 bp, Artificial Sequence
  Synthetic oligonucleotide
tccatccagacgttaaccagcacaggaggt

SEQ ID NO: 125211 - DNA, 30 bp, Artificial Sequence
  Synthetic oligonucleotide
cagatattagacattagtgaagtaggaggt

SEQ ID NO: 125212 - DNA, 30 bp, Artificial Sequence
  Synthetic oligonucleotide
ggtgaaggggtggatttcttattaggaggt

SEQ ID NO: 125213 - DNA, 30 bp, Artificial Sequence
  Synthetic oligonucleotide
tgctgcctaattaaacaatcggagggaggt

SEQ ID NO: 125214 - DNA, 30 bp, Artificial Sequence
  Synthetic oligonucleotide
cttctcgccagaaccggagtcgcgtgaggt

SEQ ID NO: 125215 - DNA, 30 bp, Artificial Sequence
  Synthetic oligonucleotide
ggcaaagacgtattgatcgggctttgaggt

SEQ ID NO: 125216 - DNA, 30 bp, Artificial Sequence
  Synthetic oligonucleotide
acactggcaaagtataaacaacgaataggt

SEQ ID NO: 125217 - DNA, 30 bp, Artificial Sequence
  Synthetic oligonucleotide
cgcctcggagaatggcaatttaacataggt

SEQ ID NO: 125218 - DNA, 30 bp, Artificial Sequence
  Synthetic oligonucleotide
accgaacgtgtaatatatagtaaactaggt

SEQ ID NO: 125219 - DNA, 30 bp, Artificial Sequence
  Synthetic oligonucleotide
gtgctatcgggtaatctgctaaacgtaggt

SEQ ID NO: 125220 - DNA, 30 bp, Artificial Sequence
  Synthetic oligonucleotide
aagctgtggtcctgcaaaaaaaacttaggt

SEQ ID NO: 125221 - DNA, 30 bp, Artificial Sequence
  Synthetic oligonucleotide
ctgccagtagtgtattgcgtagggttaggt

SEQ ID NO: 125222 - DNA, 30 bp, Artificial Sequence
  Synthetic oligonucleotide
cgagtctggttgggaagtcgacttttaggt

SEQ ID NO: 125223 - DNA, 30 bp, Artificial Sequence
  Synthetic oligonucleotide
atggctgcgagaggattgtacccccacggt

SEQ ID NO: 125224 - DNA, 30 bp, Artificial Sequence
  Synthetic oligonucleotide
agtgatgtccgcgcgcaaagatggcacggt

SEQ ID NO: 125225 - DNA, 30 bp, Artificial Sequence
  Synthetic oligonucleotide
aggaagggtagatatcgtatagtagacggt

SEQ ID NO: 125226 - DNA, 30 bp, Artificial Sequence
  Synthetic oligonucleotide
agacacatgagtcctagtcgaatatacggt

SEQ ID NO: 125227 - DNA, 30 bp, Artificial Sequence
  Synthetic oligonucleotide
gcgaatgaaagatgctcagagtcgtacggt

SEQ ID NO: 125228 - DNA, 30 bp, Artificial Sequence
  Synthetic oligonucleotide
cacggtacaatcgacttctgccggtacggt

SEQ ID NO: 125229 - DNA, 30 bp, Artificial Sequence
  Synthetic oligonucleotide
cggtgcacaatgcgcgcatcggaaaccggt

SEQ ID NO: 125230 - DNA, 30 bp, Artificial Sequence
  Synthetic oligonucleotide
ctctacggtgaccgcataaggcgtaccggt

SEQ ID NO: 125231 - DNA, 30 bp, Artificial Sequence
  Synthetic oligonucleotide
ttatcaaaacacagggaaggaatccccggt

SEQ ID NO: 125232 - DNA, 30 bp, Artificial Sequence
  Synthetic oligonucleotide
agcaagcacgaggcctgggaataagccggt

SEQ ID NO: 125233 - DNA, 31 bp, Artificial Sequence
  Synthetic oligonucleotide
aaaggggtttactactttgaaacccgccggt

SEQ ID NO: 125234 - DNA, 30 bp, Artificial Sequence
  Synthetic oligonucleotide
tacgcggtgcgcacgtaaataattgccggt

SEQ ID NO: 125235 - DNA, 30 bp, Artificial Sequence
  Synthetic oligonucleotide
ttatgcatcagcattcgataacactccggt

SEQ ID NO: 125236 - DNA, 30 bp, Artificial Sequence
  Synthetic oligonucleotide
gaattcgatggcaggagaggcatttccggt

SEQ ID NO: 125237 - DNA, 30 bp, Artificial Sequence
  Synthetic oligonucleotide
tagccgtcatacgaatcggttgaaagcggt

SEQ ID NO: 125238 - DNA, 30 bp, Artificial Sequence
  Synthetic oligonucleotide
gtgataaagtaatatcgtcttgtgcgcggt

SEQ ID NO: 125239 - DNA, 30 bp, Artificial Sequence
  Synthetic oligonucleotide
ctcttatcgggctgacgaaaatatcgcggt

SEQ ID NO: 125240 - DNA, 30 bp, Artificial Sequence
  Synthetic oligonucleotide
cagatgcttcaagtgagctggccatgcggt

SEQ ID NO: 125241 - DNA, 30 bp, Artificial Sequence
  Synthetic oligonucleotide
caaagtactctcatggaatcgttctgcggt

SEQ ID NO: 125242 - DNA, 31 bp, Artificial Sequence
  Synthetic oligonucleotide
accaatccagtgggcacaggcctagtgcggt

SEQ ID NO: 125243 - DNA, 30 bp, Artificial Sequence
  Synthetic oligonucleotide
tatacgaagtcaattggcggcggaatcggt

SEQ ID NO: 125244 - DNA, 30 bp, Artificial Sequence
  Synthetic oligonucleotide
ggtataagaatcaaggaacggcacctcggt

SEQ ID NO: 125245 - DNA, 30 bp, Artificial Sequence
  Synthetic oligonucleotide
tgtgtcgaggtacgcatagtgaggctcggt

SEQ ID NO: 125246 - DNA, 30 bp, Artificial Sequence
  Synthetic oligonucleotide
gacggtgtggaagacgagtattgtctcggt

SEQ ID NO: 125247 - DNA, 30 bp, Artificial Sequence
  Synthetic oligonucleotide
agaaatatatcagaaggtaccgccgtcggt

SEQ ID NO: 125248 - DNA, 30 bp, Artificial Sequence
  Synthetic oligonucleotide
ataaaatcatctgaaacgagttccgtcggt

SEQ ID NO: 125249 - DNA, 30 bp, Artificial Sequence
  Synthetic oligonucleotide
attgacaaccactagtgtgatcaattcggt

SEQ ID NO: 125250 - DNA, 30 bp, Artificial Sequence
  Synthetic oligonucleotide
agaagaccggtgaaatgagtgaacttcggt

SEQ ID NO: 125251 - DNA, 30 bp, Artificial Sequence
  Synthetic oligonucleotide
atccgggcaggagctaagcaggctttcggt

SEQ ID NO: 125252 - DNA, 30 bp, Artificial Sequence
  Synthetic oligonucleotide
ctgtgcaatgccacggtaacttggaagggt

SEQ ID NO: 125253 - DNA, 30 bp, Artificial Sequence
  Synthetic oligonucleotide
gatacgccaaattcaccgaggtgtaagggt

SEQ ID NO: 125254 - DNA, 30 bp, Artificial Sequence
  Synthetic oligonucleotide
ttaagagggttcaaatagaggatgcagggt

SEQ ID NO: 125255 - DNA, 30 bp, Artificial Sequence
  Synthetic oligonucleotide
cgacgtaagaccacatgtgacattcagggt

SEQ ID NO: 125256 - DNA, 30 bp, Artificial Sequence
  Synthetic oligonucleotide
aacgcccaacggtaggaacccgaagagggt

SEQ ID NO: 125257 - DNA, 30 bp, Artificial Sequence
  Synthetic oligonucleotide
gaaatcgggaaccgaagtcagcacgagggt

SEQ ID NO: 125258 - DNA, 30 bp, Artificial Sequence
  Synthetic oligonucleotide
cccacagctcaagaacgtagagcgtagggt

SEQ ID NO: 125259 - DNA, 30 bp, Artificial Sequence
  Synthetic oligonucleotide
tgtaggtcactatacgagttaagttagggt

SEQ ID NO: 125260 - DNA, 30 bp, Artificial Sequence
  Synthetic oligonucleotide
gaagtgcacatgcacgctttaactacgggt

SEQ ID NO: 125261 - DNA, 30 bp, Artificial Sequence
  Synthetic oligonucleotide
cgggagttcttataggtcaattaaccgggt

SEQ ID NO: 125262 - DNA, 30 bp, Artificial Sequence
  Synthetic oligonucleotide
cagggtggcaggtggtgaagaatcccgggt

SEQ ID NO: 125263 - DNA, 30 bp, Artificial Sequence
  Synthetic oligonucleotide
caacagattacgcggcgaacagtgccgggt

SEQ ID NO: 125264 - DNA, 30 bp, Artificial Sequence
  Synthetic oligonucleotide
agcatcatagttgatttcctggtgccgggt

SEQ ID NO: 125265 - DNA, 30 bp, Artificial Sequence
  Synthetic oligonucleotide
ggtccacatctcgcgaaactatcggcgggt

SEQ ID NO: 125266 - DNA, 30 bp, Artificial Sequence
  Synthetic oligonucleotide
acacgaatatcaagacctaagccaaggggt

SEQ ID NO: 125267 - DNA, 30 bp, Artificial Sequence
  Synthetic oligonucleotide
gttcagcaagagaatgaaattaaacggggt

SEQ ID NO: 125268 - DNA, 30 bp, Artificial Sequence
  Synthetic oligonucleotide
cgacggggattcacgggagttgatcggggt

SEQ ID NO: 125269 - DNA, 30 bp, Artificial Sequence
  Synthetic oligonucleotide
aaggtccagagtttcgtcgcaactcggggt

SEQ ID NO: 125270 - DNA, 30 bp, Artificial Sequence
  Synthetic oligonucleotide
tgggactccgtgtgagtttagcgagggggt

SEQ ID NO: 125271 - DNA, 31 bp, Artificial Sequence
  Synthetic oligonucleotide
tagaattcgtgacaaaccaagaagcgggggt

SEQ ID NO: 125272 - DNA, 30 bp, Artificial Sequence
  Synthetic oligonucleotide
gaggatatcgcttgacaagttatcgggggt

SEQ ID NO: 125273 - DNA, 30 bp, Artificial Sequence
  Synthetic oligonucleotide
gcgtgggcctcatcagctaatactgggggt

SEQ ID NO: 125274 - DNA, 30 bp, Artificial Sequence
  Synthetic oligonucleotide
gggctaccgcgtagctcgcggagtgggggt

SEQ ID NO: 125275 - DNA, 30 bp, Artificial Sequence
  Synthetic oligonucleotide
accgtattcctgctcatggcaccttggggt

SEQ ID NO: 125276 - DNA, 30 bp, Artificial Sequence
  Synthetic oligonucleotide
atcaggacttcgtttgtgtgatcaatgggt

SEQ ID NO: 125277 - DNA, 30 bp, Artificial Sequence
  Synthetic oligonucleotide
ctgcacctaatgttcagtggcagaatgggt

SEQ ID NO: 125278 - DNA, 30 bp, Artificial Sequence
  Synthetic oligonucleotide
tagcgcgcacgataagacccgtttatgggt

SEQ ID NO: 125279 - DNA, 30 bp, Artificial Sequence
  Synthetic oligonucleotide
ccgagcaaaatagagttaaagtcactgggt

SEQ ID NO: 125280 - DNA, 30 bp, Artificial Sequence
  Synthetic oligonucleotide
atcagtaacaccgttggggggcgactgggt

SEQ ID NO: 125281 - DNA, 30 bp, Artificial Sequence
  Synthetic oligonucleotide
tcaatgcggacgcgagatatgatactgggt

SEQ ID NO: 125282 - DNA, 30 bp, Artificial Sequence
  Synthetic oligonucleotide
ggtcatacccgatcagtagtaatgctgggt

SEQ ID NO: 125283 - DNA, 30 bp, Artificial Sequence
  Synthetic oligonucleotide
agggaagtggagcgatccgtattagtgggt

SEQ ID NO: 125284 - DNA, 30 bp, Artificial Sequence
  Synthetic oligonucleotide
gcagagccaaggcgtcgaaatagtgtgggt

SEQ ID NO: 125285 - DNA, 30 bp, Artificial Sequence
  Synthetic oligonucleotide
ggtgtgtgaaacgtgtgttacggattgggt

SEQ ID NO: 125286 - DNA, 30 bp, Artificial Sequence
  Synthetic oligonucleotide
tgtatatgctcacaacacatcgacttgggt

SEQ ID NO: 125287 - DNA, 30 bp, Artificial Sequence
  Synthetic oligonucleotide
agcatacgcgtcctaaggacagtcttgggt

SEQ ID NO: 125288 - DNA, 30 bp, Artificial Sequence
  Synthetic oligonucleotide
ggaaaaacgagtcagtaacttgggttgggt

SEQ ID NO: 125289 - DNA, 30 bp, Artificial Sequence
  Synthetic oligonucleotide
gttgaaccgtgggtaagtgtgccaaatggt

SEQ ID NO: 125290 - DNA, 30 bp, Artificial Sequence
  Synthetic oligonucleotide
gaagctcggaagagcaccgtatacaatggt

SEQ ID NO: 125291 - DNA, 30 bp, Artificial Sequence
  Synthetic oligonucleotide
tggaactagttcttcagtgagttcaatggt

SEQ ID NO: 125292 - DNA, 30 bp, Artificial Sequence
  Synthetic oligonucleotide
cccaacaggcgaggacatggttctaatggt

SEQ ID NO: 125293 - DNA, 30 bp, Artificial Sequence
  Synthetic oligonucleotide
tgcaaacaaaaattgtaatgagatcatggt

SEQ ID NO: 125294 - DNA, 30 bp, Artificial Sequence
  Synthetic oligonucleotide
gcgctatcagtatccacctaatgagatggt

SEQ ID NO: 125295 - DNA, 30 bp, Artificial Sequence
  Synthetic oligonucleotide
gcctagcaaggccccacatatatcgatggt

SEQ ID NO: 125296 - DNA, 30 bp, Artificial Sequence
  Synthetic oligonucleotide
tagacgaatagttctatagcggcggatggt

SEQ ID NO: 125297 - DNA, 30 bp, Artificial Sequence
  Synthetic oligonucleotide
tatttgagcggtgagtgggataaatatggt

SEQ ID NO: 125298 - DNA, 30 bp, Artificial Sequence
  Synthetic oligonucleotide
taataattagcaaatgaggtgagatatggt

SEQ ID NO: 125299 - DNA, 30 bp, Artificial Sequence
  Synthetic oligonucleotide
agtaggatggagttataaggactatatggt

SEQ ID NO: 125300 - DNA, 30 bp, Artificial Sequence
  Synthetic oligonucleotide
gacaacagtccgaagaggatactatatggt

SEQ ID NO: 125301 - DNA, 30 bp, Artificial Sequence
  Synthetic oligonucleotide
tggtaaaatgtggagttgagcaactatggt

SEQ ID NO: 125302 - DNA, 30 bp, Artificial Sequence
  Synthetic oligonucleotide
tgcacgatggtaatctccgtaatgcctggt

SEQ ID NO: 125303 - DNA, 30 bp, Artificial Sequence
  Synthetic oligonucleotide
tgtgtggcgcggacgaccaacaatcctggt

SEQ ID NO: 125304 - DNA, 30 bp, Artificial Sequence
  Synthetic oligonucleotide
accggagagtacgatgcggccgacgctggt

SEQ ID NO: 125305 - DNA, 30 bp, Artificial Sequence
  Synthetic oligonucleotide
attaacagcagcatttgaacgtatgctggt

SEQ ID NO: 125306 - DNA, 30 bp, Artificial Sequence
  Synthetic oligonucleotide
caagcacggggatcgtcacgtcaccgtggt

SEQ ID NO: 125307 - DNA, 30 bp, Artificial Sequence
  Synthetic oligonucleotide
atgaggtatccccctcgtatggtgcgtggt

SEQ ID NO: 125308 - DNA, 30 bp, Artificial Sequence
  Synthetic oligonucleotide
gacacaggacaatatatgataactcgtggt

SEQ ID NO: 125309 - DNA, 30 bp, Artificial Sequence
  Synthetic oligonucleotide
cctcccaggtgacgaatcaataccggtggt

SEQ ID NO: 125310 - DNA, 30 bp, Artificial Sequence
  Synthetic oligonucleotide
gtcacgcgttgtgttacgggtctcggtggt

SEQ ID NO: 125311 - DNA, 30 bp, Artificial Sequence
  Synthetic oligonucleotide
gtctgactaaagcagtaaaatacgtgtggt

SEQ ID NO: 125312 - DNA, 30 bp, Artificial Sequence
  Synthetic oligonucleotide
cgacacacgaagtcgagcgatgtttgtggt

SEQ ID NO: 125313 - DNA, 30 bp, Artificial Sequence
  Synthetic oligonucleotide
gcttgactacgcctaataatagtagttggt

SEQ ID NO: 125314 - DNA, 30 bp, Artificial Sequence
  Synthetic oligonucleotide
caatattatagtccacggatagcggttggt

SEQ ID NO: 125315 - DNA, 30 bp, Artificial Sequence
  Synthetic oligonucleotide
cagtagagacaaacgtgggtgtcggttggt

SEQ ID NO: 125316 - DNA, 30 bp, Artificial Sequence
  Synthetic oligonucleotide
acgagctgggcccgtaaatcaggggttggt

SEQ ID NO: 125317 - DNA, 30 bp, Artificial Sequence
  Synthetic oligonucleotide
cgttcgaaccacaattgaccgaaatttggt

SEQ ID NO: 125318 - DNA, 30 bp, Artificial Sequence
  Synthetic oligonucleotide
tgagttaaacgaacatagtattgatttggt

SEQ ID NO: 125319 - DNA, 30 bp, Artificial Sequence
  Synthetic oligonucleotide
tgggggggagactaatattagtcgtttggt

SEQ ID NO: 125320 - DNA, 30 bp, Artificial Sequence
  Synthetic oligonucleotide
cacgtaaacgcgaatttctgtaggtttggt

SEQ ID NO: 125321 - DNA, 30 bp, Artificial Sequence
  Synthetic oligonucleotide
ctcggaaatttcggagagcacacttttggt

SEQ ID NO: 125322 - DNA, 30 bp, Artificial Sequence
  Synthetic oligonucleotide
ctaaggaagacttaggggatactttttggt

SEQ ID NO: 125323 - DNA, 30 bp, Artificial Sequence
  Synthetic oligonucleotide
tgtacaggactcctgggttaacagaaatgt

SEQ ID NO: 125324 - DNA, 30 bp, Artificial Sequence
  Synthetic oligonucleotide
gaaaggcgcgtcttgtcgccggtgaaatgt

SEQ ID NO: 125325 - DNA, 30 bp, Artificial Sequence
  Synthetic oligonucleotide
ctgttctccaatatcaagaaccgccaatgt

SEQ ID NO: 125326 - DNA, 30 bp, Artificial Sequence
  Synthetic oligonucleotide
tccggtggacagtgataacgcgcgcaatgt

SEQ ID NO: 125327 - DNA, 30 bp, Artificial Sequence
  Synthetic oligonucleotide
ctaccgaactacacgaatgagtctcaatgt

SEQ ID NO: 125328 - DNA, 30 bp, Artificial Sequence
  Synthetic oligonucleotide
ccacggaaagctgcgggttaaggggaatgt

SEQ ID NO: 125329 - DNA, 30 bp, Artificial Sequence
  Synthetic oligonucleotide
tggtgctgggactataggctcgtggaatgt

SEQ ID NO: 125330 - DNA, 30 bp, Artificial Sequence
  Synthetic oligonucleotide
ctggttcattagggagggtaacgtgaatgt

SEQ ID NO: 125331 - DNA, 30 bp, Artificial Sequence
  Synthetic oligonucleotide
tacggaaactggttcagccctacctaatgt

SEQ ID NO: 125332 - DNA, 30 bp, Artificial Sequence
  Synthetic oligonucleotide
taagcgaggaccgtcctgctggtcacatgt

SEQ ID NO: 125333 - DNA, 30 bp, Artificial Sequence
  Synthetic oligonucleotide
tgctggagtaaaagcgaggagcgtacatgt

SEQ ID NO: 125334 - DNA, 30 bp, Artificial Sequence
  Synthetic oligonucleotide
gatgtgtccagcgaatcatcccggccatgt

SEQ ID NO: 125335 - DNA, 30 bp, Artificial Sequence
  Synthetic oligonucleotide
tgggatctgggccacgctacctgtgcatgt

SEQ ID NO: 125336 - DNA, 30 bp, Artificial Sequence
  Synthetic oligonucleotide
gccgatctgaatagggaaggctacagatgt

SEQ ID NO: 125337 - DNA, 30 bp, Artificial Sequence
  Synthetic oligonucleotide
acagaaaagtgtgtatcacctgggagatgt

SEQ ID NO: 125338 - DNA, 30 bp, Artificial Sequence
  Synthetic oligonucleotide
cgccagggtatgctgcataaacatagatgt

SEQ ID NO: 125339 - DNA, 30 bp, Artificial Sequence
  Synthetic oligonucleotide
ccacgccccgatgaggctactgcccgatgt

SEQ ID NO: 125340 - DNA, 30 bp, Artificial Sequence
  Synthetic oligonucleotide
gtccgaaatgtaatcgcggaagagcgatgt

SEQ ID NO: 125341 - DNA, 30 bp, Artificial Sequence
  Synthetic oligonucleotide
tccaaagaataggttgagcaacgtcgatgt

SEQ ID NO: 125342 - DNA, 30 bp, Artificial Sequence
  Synthetic oligonucleotide
atgaatatccaacggtgttattgtcgatgt

SEQ ID NO: 125343 - DNA, 30 bp, Artificial Sequence
  Synthetic oligonucleotide
aaacatgtcacagcgcttggaacaggatgt

SEQ ID NO: 125344 - DNA, 30 bp, Artificial Sequence
  Synthetic oligonucleotide
ccaaattcatgcgcaatgcagggcggatgt

SEQ ID NO: 125345 - DNA, 30 bp, Artificial Sequence
  Synthetic oligonucleotide
ggcgataaggctgatgggttggctggatgt

SEQ ID NO: 125346 - DNA, 30 bp, Artificial Sequence
  Synthetic oligonucleotide
ctaaatggaatctaagcgcaccaatgatgt

SEQ ID NO: 125347 - DNA, 30 bp, Artificial Sequence
  Synthetic oligonucleotide
caaaaggacaaggaacgaagcagctgatgt

SEQ ID NO: 125348 - DNA, 30 bp, Artificial Sequence
  Synthetic oligonucleotide
cttacacatagatgtaatggatagtgatgt

SEQ ID NO: 125349 - DNA, 30 bp, Artificial Sequence
  Synthetic oligonucleotide
ctagagactggacttacagttatgtgatgt

SEQ ID NO: 125350 - DNA, 30 bp, Artificial Sequence
  Synthetic oligonucleotide
ggtagagtctgattgttccattcaatatgt

SEQ ID NO: 125351 - DNA, 30 bp, Artificial Sequence
  Synthetic oligonucleotide
caagattgcttcatcacactgaacatatgt

SEQ ID NO: 125352 - DNA, 30 bp, Artificial Sequence
  Synthetic oligonucleotide
taaggcatctgtctataaatgcacatatgt

SEQ ID NO: 125353 - DNA, 30 bp, Artificial Sequence
  Synthetic oligonucleotide
ttgcagaaatgtcgataagttctcatatgt

SEQ ID NO: 125354 - DNA, 30 bp, Artificial Sequence
  Synthetic oligonucleotide
ggggcctgtagcgatgtggagagactatgt

SEQ ID NO: 125355 - DNA, 30 bp, Artificial Sequence
  Synthetic oligonucleotide
acgggtagtagatactgcatggacgtatgt

SEQ ID NO: 125356 - DNA, 30 bp, Artificial Sequence
  Synthetic oligonucleotide
catgaatgataaacctttgttccggtatgt

SEQ ID NO: 125357 - DNA, 30 bp, Artificial Sequence
  Synthetic oligonucleotide
cagaagccgctcactccacaagtattatgt

SEQ ID NO: 125358 - DNA, 30 bp, Artificial Sequence
  Synthetic oligonucleotide
agatcggtatcatttatggaggagttatgt

SEQ ID NO: 125359 - DNA, 30 bp, Artificial Sequence
  Synthetic oligonucleotide
tgccaaatcgtatcacgggcgatcaactgt

SEQ ID NO: 125360 - DNA, 30 bp, Artificial Sequence
  Synthetic oligonucleotide
agtaaaaccaatgtggatactattaactgt

SEQ ID NO: 125361 - DNA, 30 bp, Artificial Sequence
  Synthetic oligonucleotide
gggagaaatcttggaatcatacgccactgt

SEQ ID NO: 125362 - DNA, 30 bp, Artificial Sequence
  Synthetic oligonucleotide
tggagaagcacatctacggtgaggcactgt

SEQ ID NO: 125363 - DNA, 30 bp, Artificial Sequence
  Synthetic oligonucleotide
tacggggtcgacataaggagacaggactgt

SEQ ID NO: 125364 - DNA, 30 bp, Artificial Sequence
  Synthetic oligonucleotide
aaacccaataacgcgaaactccactactgt

SEQ ID NO: 125365 - DNA, 30 bp, Artificial Sequence
  Synthetic oligonucleotide
catcaaggttacaaggtaaagagcgcctgt

SEQ ID NO: 125366 - DNA, 30 bp, Artificial Sequence
  Synthetic oligonucleotide
cgtatttgggggttcatttttcgtgcctgt

SEQ ID NO: 125367 - DNA, 30 bp, Artificial Sequence
  Synthetic oligonucleotide
aacacgtcgggaccatgcgacccctcctgt

SEQ ID NO: 125368 - DNA, 30 bp, Artificial Sequence
  Synthetic oligonucleotide
agtcggagttactactcagcggcttcctgt

SEQ ID NO: 125369 - DNA, 30 bp, Artificial Sequence
  Synthetic oligonucleotide
agcctactcagaatcacacgagtgagctgt

SEQ ID NO: 125370 - DNA, 30 bp, Artificial Sequence
  Synthetic oligonucleotide
cctgctcaaaatcaacaagggtggcgctgt

SEQ ID NO: 125371 - DNA, 30 bp, Artificial Sequence
  Synthetic oligonucleotide
gcattaaacgaagggaacaccatctgctgt

SEQ ID NO: 125372 - DNA, 30 bp, Artificial Sequence
  Synthetic oligonucleotide
catggagttggcgcttgtacgctgtgctgt

SEQ ID NO: 125373 - DNA, 30 bp, Artificial Sequence
  Synthetic oligonucleotide
gcgggtggaagggttttcatgcccctctgt

SEQ ID NO: 125374 - DNA, 30 bp, Artificial Sequence
  Synthetic oligonucleotide
ccgtcaacctcatgagtatgccagctctgt

SEQ ID NO: 125375 - DNA, 30 bp, Artificial Sequence
  Synthetic oligonucleotide
tgccagtcgcgtaggaaggtaactctctgt

SEQ ID NO: 125376 - DNA, 30 bp, Artificial Sequence
  Synthetic oligonucleotide
ggcttaaaagaaaacagagcacttgtctgt

SEQ ID NO: 125377 - DNA, 30 bp, Artificial Sequence
  Synthetic oligonucleotide
ccgtgatgtgtagacccgttccagaagtgt

SEQ ID NO: 125378 - DNA, 30 bp, Artificial Sequence
  Synthetic oligonucleotide
cctagggttaatacttgccttatgaagtgt

SEQ ID NO: 125379 - DNA, 30 bp, Artificial Sequence
  Synthetic oligonucleotide
caagtcttaggtggcccaatgcataagtgt

SEQ ID NO: 125380 - DNA, 30 bp, Artificial Sequence
  Synthetic oligonucleotide
catctcacagtgtaggaggcacgtaagtgt

SEQ ID NO: 125381 - DNA, 30 bp, Artificial Sequence
  Synthetic oligonucleotide
gtgagtgtttcaacggcccatgtccagtgt

SEQ ID NO: 125382 - DNA, 30 bp, Artificial Sequence
  Synthetic oligonucleotide
atcatagggcggttcgggtaaatgcagtgt

SEQ ID NO: 125383 - DNA, 30 bp, Artificial Sequence
  Synthetic oligonucleotide
agcgcctagctcagccgaataaacgagtgt

SEQ ID NO: 125384 - DNA, 30 bp, Artificial Sequence
  Synthetic oligonucleotide
agtgttcccacctcgcgtggccaggagtgt

SEQ ID NO: 125385 - DNA, 30 bp, Artificial Sequence
  Synthetic oligonucleotide
agtgcacagcgacattaatggacggagtgt

SEQ ID NO: 125386 - DNA, 30 bp, Artificial Sequence
  Synthetic oligonucleotide
taccgtattgagtttggagatcatgagtgt

SEQ ID NO: 125387 - DNA, 30 bp, Artificial Sequence
  Synthetic oligonucleotide
ggttgactagaggccgaataatcatagtgt

SEQ ID NO: 125388 - DNA, 30 bp, Artificial Sequence
  Synthetic oligonucleotide
cgatagtaacgggggcgtcttcgatagtgt

SEQ ID NO: 125389 - DNA, 30 bp, Artificial Sequence
  Synthetic oligonucleotide
ctgagcatcgccgatttacaattaacgtgt

SEQ ID NO: 125390 - DNA, 30 bp, Artificial Sequence
  Synthetic oligonucleotide
cctctggcgacagcgtgacagccgacgtgt

SEQ ID NO: 125391 - DNA, 30 bp, Artificial Sequence
  Synthetic oligonucleotide
acaaccatacatgatagaccgtatacgtgt

SEQ ID NO: 125392 - DNA, 30 bp, Artificial Sequence
  Synthetic oligonucleotide
atacgatcggacatatccttgtaaccgtgt

SEQ ID NO: 125393 - DNA, 30 bp, Artificial Sequence
  Synthetic oligonucleotide
aggaatatcttaaaatagtgagtcgcgtgt

SEQ ID NO: 125394 - DNA, 30 bp, Artificial Sequence
  Synthetic oligonucleotide
tcgcgagtgtacgccataaagttcgcgtgt

SEQ ID NO: 125395 - DNA, 30 bp, Artificial Sequence
  Synthetic oligonucleotide
cacgtagcgtgttcgatccgccaggcgtgt

SEQ ID NO: 125396 - DNA, 30 bp, Artificial Sequence
  Synthetic oligonucleotide
cacggagagcatagatatagctaggcgtgt

SEQ ID NO: 125397 - DNA, 30 bp, Artificial Sequence
  Synthetic oligonucleotide
aaggctgacggcttcagataggtggcgtgt

SEQ ID NO: 125398 - DNA, 30 bp, Artificial Sequence
  Synthetic oligonucleotide
cggggtaaggatctagacttggtcaggtgt

SEQ ID NO: 125399 - DNA, 30 bp, Artificial Sequence
  Synthetic oligonucleotide
aactggtgcatgtcgcatgatgaccggtgt

SEQ ID NO: 125400 - DNA, 30 bp, Artificial Sequence
  Synthetic oligonucleotide
gaaagcagtcgggcaaaaaaagggcggtgt

SEQ ID NO: 125401 - DNA, 30 bp, Artificial Sequence
  Synthetic oligonucleotide
gggcgtatactgtatagaaaaacagggtgt

SEQ ID NO: 125402 - DNA, 30 bp, Artificial Sequence
  Synthetic oligonucleotide
cagtagagccaacggcaatggttgtggtgt

SEQ ID NO: 125403 - DNA, 30 bp, Artificial Sequence
  Synthetic oligonucleotide
tgaaaagatatgtcggcagtgttttggtgt

SEQ ID NO: 125404 - DNA, 30 bp, Artificial Sequence
  Synthetic oligonucleotide
caaggaccactaaatcacacggttatgtgt

SEQ ID NO: 125405 - DNA, 30 bp, Artificial Sequence
  Synthetic oligonucleotide
aatttgcatacgaaaggtaagtggctgtgt

SEQ ID NO: 125406 - DNA, 30 bp, Artificial Sequence
  Synthetic oligonucleotide
ggtagtggcgagatatcaataggtctgtgt

SEQ ID NO: 125407 - DNA, 31 bp, Artificial Sequence
  Synthetic oligonucleotide
agacggctgccgaaagccctgtggagtgtgt

SEQ ID NO: 125408 - DNA, 30 bp, Artificial Sequence
  Synthetic oligonucleotide
acgtcggaggtcaatttactcgttgtgtgt

SEQ ID NO: 125409 - DNA, 30 bp, Artificial Sequence
  Synthetic oligonucleotide
tgcgggagctggagcgcgaatcaattgtgt

SEQ ID NO: 125410 - DNA, 30 bp, Artificial Sequence
  Synthetic oligonucleotide
cacagggaactgtatcagccagtattgtgt

SEQ ID NO: 125411 - DNA, 30 bp, Artificial Sequence
  Synthetic oligonucleotide
cacgaccctaggggagtcggtccgttgtgt

SEQ ID NO: 125412 - DNA, 30 bp, Artificial Sequence
  Synthetic oligonucleotide
ccgtaactgtggtagtcctctcggttgtgt

SEQ ID NO: 125413 - DNA, 30 bp, Artificial Sequence
  Synthetic oligonucleotide
ggcgtccggagggaaaacgaagaaaattgt

SEQ ID NO: 125414 - DNA, 30 bp, Artificial Sequence
  Synthetic oligonucleotide
tgaaaatcctggaaaatgactagcaattgt

SEQ ID NO: 125415 - DNA, 30 bp, Artificial Sequence
  Synthetic oligonucleotide
ctcaagtcggggtcacatggcagtaattgt

SEQ ID NO: 125416 - DNA, 30 bp, Artificial Sequence
  Synthetic oligonucleotide
tcaacgctggcccgtacaaatcaagattgt

SEQ ID NO: 125417 - DNA, 30 bp, Artificial Sequence
  Synthetic oligonucleotide
aaaccccactaaccaacagtaagatattgt

SEQ ID NO: 125418 - DNA, 30 bp, Artificial Sequence
  Synthetic oligonucleotide
gaggctacgggtacgtaacgagcaacttgt

SEQ ID NO: 125419 - DNA, 30 bp, Artificial Sequence
  Synthetic oligonucleotide
taagacatgcagagaagatccagtacttgt

SEQ ID NO: 125420 - DNA, 30 bp, Artificial Sequence
  Synthetic oligonucleotide
ggaacttggtccattgttgagcaaccttgt

SEQ ID NO: 125421 - DNA, 30 bp, Artificial Sequence
  Synthetic oligonucleotide
cacgccacttagtccaatgcacgaccttgt

SEQ ID NO: 125422 - DNA, 30 bp, Artificial Sequence
  Synthetic oligonucleotide
catcggtagtcccacggtctcccgccttgt

SEQ ID NO: 125423 - DNA, 30 bp, Artificial Sequence
  Synthetic oligonucleotide
ggtcagatgtcggtcttgcgtgtaagttgt

SEQ ID NO: 125424 - DNA, 30 bp, Artificial Sequence
  Synthetic oligonucleotide
ttccatcacaatgctacgtccaaccgttgt

SEQ ID NO: 125425 - DNA, 30 bp, Artificial Sequence
  Synthetic oligonucleotide
catgacgcacaggtaaagagagaaggttgt

SEQ ID NO: 125426 - DNA, 30 bp, Artificial Sequence
  Synthetic oligonucleotide
taggggcgggatatttgacatgaatgttgt

SEQ ID NO: 125427 - DNA, 29 bp, Artificial Sequence
  Synthetic oligonucleotide
acgtatgttgttccactaaagagtgttgt

SEQ ID NO: 125428 - DNA, 30 bp, Artificial Sequence
  Synthetic oligonucleotide
cactgagactagagtggccgatgtatttgt

SEQ ID NO: 125429 - DNA, 30 bp, Artificial Sequence
  Synthetic oligonucleotide
gtaagtaggcttatagagttcagactttgt

SEQ ID NO: 125430 - DNA, 30 bp, Artificial Sequence
  Synthetic oligonucleotide
tcgtagttatgatgaaaatggggggtttgt

SEQ ID NO: 125431 - DNA, 30 bp, Artificial Sequence
  Synthetic oligonucleotide
cgtatctcggtgggatagacattattttgt

SEQ ID NO: 125432 - DNA, 30 bp, Artificial Sequence
  Synthetic oligonucleotide
agaacctagggctctaatgagcagttttgt

SEQ ID NO: 125433 - DNA, 30 bp, Artificial Sequence
  Synthetic oligonucleotide
acgaagtatcatttgtgacgttggttttgt

SEQ ID NO: 125434 - DNA, 30 bp, Artificial Sequence
  Synthetic oligonucleotide
gggaaaacgatctcctccattactttttgt

SEQ ID NO: 125435 - DNA, 30 bp, Artificial Sequence
  Synthetic oligonucleotide
tgcgcaggtagagcatgacttacaaaaatt

SEQ ID NO: 125436 - DNA, 30 bp, Artificial Sequence
  Synthetic oligonucleotide
atgaaggcgatcatcgtaaaggagaaaatt

SEQ ID NO: 125437 - DNA, 30 bp, Artificial Sequence
  Synthetic oligonucleotide
atgcgcactacttaatggccttagaaaatt

SEQ ID NO: 125438 - DNA, 30 bp, Artificial Sequence
  Synthetic oligonucleotide
agatcacagtccgggaaccgactagaaatt

SEQ ID NO: 125439 - DNA, 30 bp, Artificial Sequence
  Synthetic oligonucleotide
agttagctcacccgttcagtactggaaatt

SEQ ID NO: 125440 - DNA, 30 bp, Artificial Sequence
  Synthetic oligonucleotide
ctcagcgcaaaagaagtgcggcctgaaatt

SEQ ID NO: 125441 - DNA, 30 bp, Artificial Sequence
  Synthetic oligonucleotide
attgtggaaaggcattaccgatgtgaaatt

SEQ ID NO: 125442 - DNA, 30 bp, Artificial Sequence
  Synthetic oligonucleotide
ctggtctggcgatacgagggttgttaaatt

SEQ ID NO: 125443 - DNA, 30 bp, Artificial Sequence
  Synthetic oligonucleotide
ctatggcatacagcggacgatgaaacaatt

SEQ ID NO: 125444 - DNA, 30 bp, Artificial Sequence
  Synthetic oligonucleotide
gtcaaagatatccatgacagatgaacaatt

SEQ ID NO: 125445 - DNA, 30 bp, Artificial Sequence
  Synthetic oligonucleotide
aacgatacctgtgcatgtataggcacaatt

SEQ ID NO: 125446 - DNA, 30 bp, Artificial Sequence
  Synthetic oligonucleotide
agaggaactacttacaggactgtaccaatt

SEQ ID NO: 125447 - DNA, 30 bp, Artificial Sequence
  Synthetic oligonucleotide
agaaggcacctcggtttattcattgcaatt

SEQ ID NO: 125448 - DNA, 30 bp, Artificial Sequence
  Synthetic oligonucleotide
ataatcacgtctagtccatgggaacgaatt

SEQ ID NO: 125449 - DNA, 30 bp, Artificial Sequence
  Synthetic oligonucleotide
ggtccaatgttcgttgttggagggcgaatt

SEQ ID NO: 125450 - DNA, 30 bp, Artificial Sequence
  Synthetic oligonucleotide
ctggcggggttacggcacgaggggcgaatt

SEQ ID NO: 125451 - DNA, 30 bp, Artificial Sequence
  Synthetic oligonucleotide
agatcaggcctggcatctcctgctcgaatt

SEQ ID NO: 125452 - DNA, 30 bp, Artificial Sequence
  Synthetic oligonucleotide
cacacacaaggcaacgctcagaagggaatt

SEQ ID NO: 125453 - DNA, 30 bp, Artificial Sequence
  Synthetic oligonucleotide
gggagacaatggacattgttgtagggaatt

SEQ ID NO: 125454 - DNA, 30 bp, Artificial Sequence
  Synthetic oligonucleotide
tgatgataaaacagtaacatcaagtgaatt

SEQ ID NO: 125455 - DNA, 30 bp, Artificial Sequence
  Synthetic oligonucleotide
gacgtctcctggatgattgagtgcataatt

SEQ ID NO: 125456 - DNA, 30 bp, Artificial Sequence
  Synthetic oligonucleotide
tcgcactgaggccaacagtgaggtataatt

SEQ ID NO: 125457 - DNA, 30 bp, Artificial Sequence
  Synthetic oligonucleotide
tgggatcatcttgaagctggtcttataatt

SEQ ID NO: 125458 - DNA, 30 bp, Artificial Sequence
  Synthetic oligonucleotide
aacggaaccatatattaagtattggtaatt

SEQ ID NO: 125459 - DNA, 30 bp, Artificial Sequence
  Synthetic oligonucleotide
cgagttagaacgggagattccgatgtaatt

SEQ ID NO: 125460 - DNA, 30 bp, Artificial Sequence
  Synthetic oligonucleotide
caagttgaacgggtacgctcatgcttaatt

SEQ ID NO: 125461 - DNA, 30 bp, Artificial Sequence
  Synthetic oligonucleotide
atggataactccccggacagaccgttaatt

SEQ ID NO: 125462 - DNA, 30 bp, Artificial Sequence
  Synthetic oligonucleotide
ctagttgagacaaggggttagtcgttaatt

SEQ ID NO: 125463 - DNA, 30 bp, Artificial Sequence
  Synthetic oligonucleotide
ggtcagtactaaactatgcctttcaacatt

SEQ ID NO: 125464 - DNA, 30 bp, Artificial Sequence
  Synthetic oligonucleotide
gaaggacgctacgacgaagatcgacacatt

SEQ ID NO: 125465 - DNA, 30 bp, Artificial Sequence
  Synthetic oligonucleotide
ggaaagattgaaagacaggattggtacatt

SEQ ID NO: 125466 - DNA, 30 bp, Artificial Sequence
  Synthetic oligonucleotide
atccgaggccgaatttaagggtcaaccatt

SEQ ID NO: 125467 - DNA, 30 bp, Artificial Sequence
  Synthetic oligonucleotide
gaacccaatcatcaaagacagagaaccatt

SEQ ID NO: 125468 - DNA, 30 bp, Artificial Sequence
  Synthetic oligonucleotide
cggggtcgcgatgtgattagtggaaccatt

SEQ ID NO: 125469 - DNA, 30 bp, Artificial Sequence
  Synthetic oligonucleotide
gttgagcatatcagggatcgcaccaccatt

SEQ ID NO: 125470 - DNA, 30 bp, Artificial Sequence
  Synthetic oligonucleotide
ctatcaggggagggattaccagtcaccatt

SEQ ID NO: 125471 - DNA, 30 bp, Artificial Sequence
  Synthetic oligonucleotide
cggctagaatctggattgactgtgaccatt

SEQ ID NO: 125472 - DNA, 30 bp, Artificial Sequence
  Synthetic oligonucleotide
gaagcagcgataacggaccaaaataccatt

SEQ ID NO: 125473 - DNA, 30 bp, Artificial Sequence
  Synthetic oligonucleotide
tggcgtcaacagctcataaggcgacccatt

SEQ ID NO: 125474 - DNA, 30 bp, Artificial Sequence
  Synthetic oligonucleotide
taaaatccggaaagacgatgtacccccatt

SEQ ID NO: 125475 - DNA, 30 bp, Artificial Sequence
  Synthetic oligonucleotide
taggcgccacaagacttatgcaagcccatt

SEQ ID NO: 125476 - DNA, 30 bp, Artificial Sequence
  Synthetic oligonucleotide
aggaaatatcggaattgatagcgtcccatt

SEQ ID NO: 125477 - DNA, 30 bp, Artificial Sequence
  Synthetic oligonucleotide
ctaagcctgaataacgggttggaagccatt

SEQ ID NO: 125478 - DNA, 30 bp, Artificial Sequence
  Synthetic oligonucleotide
acagagaacctctgctcaaatgtagccatt

SEQ ID NO: 125479 - DNA, 30 bp, Artificial Sequence
  Synthetic oligonucleotide
acgagcgcagtcccgagcggtaatgccatt

SEQ ID NO: 125480 - DNA, 30 bp, Artificial Sequence
  Synthetic oligonucleotide
cagatgaatacaatctggttcttatccatt

SEQ ID NO: 125481 - DNA, 30 bp, Artificial Sequence
  Synthetic oligonucleotide
aaagaatcacgaaacgtcggactgtccatt

SEQ ID NO: 125482 - DNA, 30 bp, Artificial Sequence
  Synthetic oligonucleotide
ctcacatagcagttccaataaccgagcatt

SEQ ID NO: 125483 - DNA, 30 bp, Artificial Sequence
  Synthetic oligonucleotide
gatcgagcacaatacccggagaatagcatt

SEQ ID NO: 125484 - DNA, 30 bp, Artificial Sequence
  Synthetic oligonucleotide
acgtcttgcttgaacagttacgttagcatt

SEQ ID NO: 125485 - DNA, 30 bp, Artificial Sequence
  Synthetic oligonucleotide
cagatcacgtctaacgacgtattacgcatt

SEQ ID NO: 125486 - DNA, 30 bp, Artificial Sequence
  Synthetic oligonucleotide
aacgatgtgtatggagggaagccccgcatt

SEQ ID NO: 125487 - DNA, 29 bp, Artificial Sequence
  Synthetic oligonucleotide
acagcggctaacctgcgaagcgtcgcatt

SEQ ID NO: 125488 - DNA, 30 bp, Artificial Sequence
  Synthetic oligonucleotide
tgagttgcacggctcacgtgatgtcgcatt

SEQ ID NO: 125489 - DNA, 30 bp, Artificial Sequence
  Synthetic oligonucleotide
ccactgaccgctatacaaacaaaaggcatt

SEQ ID NO: 125490 - DNA, 30 bp, Artificial Sequence
  Synthetic oligonucleotide
cccgcatagcacgaaatttgggaatgcatt

SEQ ID NO: 125491 - DNA, 30 bp, Artificial Sequence
  Synthetic oligonucleotide
cggtcacctaaattacaatgtggatgcatt

SEQ ID NO: 125492 - DNA, 30 bp, Artificial Sequence
  Synthetic oligonucleotide
taacagtctgttaacctcgaatcgtgcatt

SEQ ID NO: 125493 - DNA, 30 bp, Artificial Sequence
  Synthetic oligonucleotide
accagtgggtaaatgcagaaccgaatcatt

SEQ ID NO: 125494 - DNA, 30 bp, Artificial Sequence
  Synthetic oligonucleotide
gggaatgctcggatttaagccctaatcatt

SEQ ID NO: 125495 - DNA, 30 bp, Artificial Sequence
  Synthetic oligonucleotide
acatgataaaatgacagccacgtaatcatt

SEQ ID NO: 125496 - DNA, 30 bp, Artificial Sequence
  Synthetic oligonucleotide
atagaagggacgaacacaggaggtatcatt

SEQ ID NO: 125497 - DNA, 30 bp, Artificial Sequence
  Synthetic oligonucleotide
gcagggactcggggctccgagctgctcatt

SEQ ID NO: 125498 - DNA, 30 bp, Artificial Sequence
  Synthetic oligonucleotide
gtgagatggtaccggatcgggatagtcatt

SEQ ID NO: 125499 - DNA, 30 bp, Artificial Sequence
  Synthetic oligonucleotide
acactcgccctgttgggcaaggtcgtcatt

SEQ ID NO: 125500 - DNA, 30 bp, Artificial Sequence
  Synthetic oligonucleotide
atcggaatagtgacctattcaagattcatt

SEQ ID NO: 125501 - DNA, 30 bp, Artificial Sequence
  Synthetic oligonucleotide
acggttgaccctttccgagtcggattcatt

SEQ ID NO: 125502 - DNA, 30 bp, Artificial Sequence
  Synthetic oligonucleotide
gggtacacagattaatctcgaatattcatt

SEQ ID NO: 125503 - DNA, 30 bp, Artificial Sequence
  Synthetic oligonucleotide
cgagtggacaggcgtcgtccttccttcatt

SEQ ID NO: 125504 - DNA, 30 bp, Artificial Sequence
  Synthetic oligonucleotide
tcctgtcacattgactgggtgaggaagatt

SEQ ID NO: 125505 - DNA, 30 bp, Artificial Sequence
  Synthetic oligonucleotide
atgcgaggacgctctcggttgagtaagatt

SEQ ID NO: 125506 - DNA, 30 bp, Artificial Sequence
  Synthetic oligonucleotide
gcgtccagctcgtctcttcaagaccagatt

SEQ ID NO: 125507 - DNA, 30 bp, Artificial Sequence
  Synthetic oligonucleotide
aaggaccatcaggtgaacgcttcccagatt

SEQ ID NO: 125508 - DNA, 30 bp, Artificial Sequence
  Synthetic oligonucleotide
tcatgagaccatagaagtgttcgccagatt

SEQ ID NO: 125509 - DNA, 30 bp, Artificial Sequence
  Synthetic oligonucleotide
acagcaagaggttaaaaggtccaagagatt

SEQ ID NO: 125510 - DNA, 30 bp, Artificial Sequence
  Synthetic oligonucleotide
cgccgacgaattgtatatcagcgagagatt

SEQ ID NO: 125511 - DNA, 30 bp, Artificial Sequence
  Synthetic oligonucleotide
gtgacgtggtaagatggggactacgagatt

SEQ ID NO: 125512 - DNA, 30 bp, Artificial Sequence
  Synthetic oligonucleotide
caaccaggccggtgaaatatcactgagatt

SEQ ID NO: 125513 - DNA, 30 bp, Artificial Sequence
  Synthetic oligonucleotide
cagtactgtaacgtaggatgcccctagatt

SEQ ID NO: 125514 - DNA, 30 bp, Artificial Sequence
  Synthetic oligonucleotide
gggccattctaaatagcggttccaacgatt

SEQ ID NO: 125515 - DNA, 30 bp, Artificial Sequence
  Synthetic oligonucleotide
agaacatattaggtcagaggagccacgatt

SEQ ID NO: 125516 - DNA, 30 bp, Artificial Sequence
  Synthetic oligonucleotide
gcggggttggtggtacttgcctctacgatt

SEQ ID NO: 125517 - DNA, 30 bp, Artificial Sequence
  Synthetic oligonucleotide
gcctgggttaagggtgaaatgatcccgatt

SEQ ID NO: 125518 - DNA, 30 bp, Artificial Sequence
  Synthetic oligonucleotide
tcgagcaggcaccaaatgactattccgatt

SEQ ID NO: 125519 - DNA, 30 bp, Artificial Sequence
  Synthetic oligonucleotide
tgcattagggtactaagggcctcggcgatt

SEQ ID NO: 125520 - DNA, 30 bp, Artificial Sequence
  Synthetic oligonucleotide
catgatctgaaggaaggtccacagaggatt

SEQ ID NO: 125521 - DNA, 30 bp, Artificial Sequence
  Synthetic oligonucleotide
ttaatgtaaagcaaggacgggactaggatt

SEQ ID NO: 125522 - DNA, 30 bp, Artificial Sequence
  Synthetic oligonucleotide
gacccgatagagagcaaagagctcatgatt

SEQ ID NO: 125523 - DNA, 30 bp, Artificial Sequence
  Synthetic oligonucleotide
gtgcataaggacagttccgcacccctgatt

SEQ ID NO: 125524 - DNA, 30 bp, Artificial Sequence
  Synthetic oligonucleotide
ccgctacggctgagcgttcaataagtgatt

SEQ ID NO: 125525 - DNA, 30 bp, Artificial Sequence
  Synthetic oligonucleotide
tagtagcacacagtgataagttcagtgatt

SEQ ID NO: 125526 - DNA, 30 bp, Artificial Sequence
  Synthetic oligonucleotide
aggtaagataagttgtctcagcgcgtgatt

SEQ ID NO: 125527 - DNA, 30 bp, Artificial Sequence
  Synthetic oligonucleotide
agcgtgacggtacaacaggggtttttgatt

SEQ ID NO: 125528 - DNA, 30 bp, Artificial Sequence
  Synthetic oligonucleotide
ccgcatgatcgttaagctgtaggcaatatt

SEQ ID NO: 125529 - DNA, 30 bp, Artificial Sequence
  Synthetic oligonucleotide
ggctcgcatccgatggttgtatcgaatatt

SEQ ID NO: 125530 - DNA, 30 bp, Artificial Sequence
  Synthetic oligonucleotide
gtaggggtagccggatcaaggagtaatatt

SEQ ID NO: 125531 - DNA, 30 bp, Artificial Sequence
  Synthetic oligonucleotide
tggagacgaaagccatgaagcaggcatatt

SEQ ID NO: 125532 - DNA, 30 bp, Artificial Sequence
  Synthetic oligonucleotide
gcacgatcccttatgcccggcgacactatt

SEQ ID NO: 125533 - DNA, 30 bp, Artificial Sequence
  Synthetic oligonucleotide
tggatcaggtactaagtgaggcggactatt

SEQ ID NO: 125534 - DNA, 30 bp, Artificial Sequence
  Synthetic oligonucleotide
gcgtgaagggcaagtcctaacgtgcctatt

SEQ ID NO: 125535 - DNA, 30 bp, Artificial Sequence
  Synthetic oligonucleotide
gacgttgcggattggtgtcgcttagctatt

SEQ ID NO: 125536 - DNA, 30 bp, Artificial Sequence
  Synthetic oligonucleotide
tattagagtggcacaatcccaattgctatt

SEQ ID NO: 125537 - DNA, 30 bp, Artificial Sequence
  Synthetic oligonucleotide
ggcgcggcggtccagagacgaagatctatt

SEQ ID NO: 125538 - DNA, 30 bp, Artificial Sequence
  Synthetic oligonucleotide
ggacttccctccacgggatcccgaagtatt

SEQ ID NO: 125539 - DNA, 30 bp, Artificial Sequence
  Synthetic oligonucleotide
ttgtacggtgttaagcgtgcgtatagtatt

SEQ ID NO: 125540 - DNA, 30 bp, Artificial Sequence
  Synthetic oligonucleotide
cagaaggggagtctcatgttcgctagtatt

SEQ ID NO: 125541 - DNA, 30 bp, Artificial Sequence
  Synthetic oligonucleotide
acactgaacattagaatgatgcgtggtatt

SEQ ID NO: 125542 - DNA, 30 bp, Artificial Sequence
  Synthetic oligonucleotide
tcggtcactggattctacacgattggtatt

SEQ ID NO: 125543 - DNA, 30 bp, Artificial Sequence
  Synthetic oligonucleotide
tagtggcatacggccaggaatatatgtatt

SEQ ID NO: 125544 - DNA, 30 bp, Artificial Sequence
  Synthetic oligonucleotide
gcaggcggtatacagagaagcggttgtatt

SEQ ID NO: 125545 - DNA, 30 bp, Artificial Sequence
  Synthetic oligonucleotide
ttgtgagtaggctagtgcttcagaattatt

SEQ ID NO: 125546 - DNA, 30 bp, Artificial Sequence
  Synthetic oligonucleotide
caagccgacggcccgaggattctaattatt

SEQ ID NO: 125547 - DNA, 30 bp, Artificial Sequence
  Synthetic oligonucleotide
ttagttcggaggaggggtaggttgattatt

SEQ ID NO: 125548 - DNA, 30 bp, Artificial Sequence
  Synthetic oligonucleotide
ttgggccagtgcatttcgaggatgcttatt

SEQ ID NO: 125549 - DNA, 30 bp, Artificial Sequence
  Synthetic oligonucleotide
agacgtgagtacagccattcgaatgttatt

SEQ ID NO: 125550 - DNA, 30 bp, Artificial Sequence
  Synthetic oligonucleotide
aacgagagggggctctaaggtatatttatt

SEQ ID NO: 125551 - DNA, 30 bp, Artificial Sequence
  Synthetic oligonucleotide
cgagacggcttttgtaatgaagggtttatt

SEQ ID NO: 125552 - DNA, 30 bp, Artificial Sequence
  Synthetic oligonucleotide
cacgacattttgaatggtcgagaaaaactt

SEQ ID NO: 125553 - DNA, 31 bp, Artificial Sequence
  Synthetic oligonucleotide
tgggggcgagaccctcactcggggaaaactt

SEQ ID NO: 125554 - DNA, 30 bp, Artificial Sequence
  Synthetic oligonucleotide
ggtgggccaagctgcaacaggcgcgaactt

SEQ ID NO: 125555 - DNA, 30 bp, Artificial Sequence
  Synthetic oligonucleotide
tcaggcgcgacaacttccacgttcgaactt

SEQ ID NO: 125556 - DNA, 30 bp, Artificial Sequence
  Synthetic oligonucleotide
ggggtaattcaggggcgcccacgtgaactt

SEQ ID NO: 125557 - DNA, 30 bp, Artificial Sequence
  Synthetic oligonucleotide
taacctctatgtctagtggtgtcgtaactt

SEQ ID NO: 125558 - DNA, 30 bp, Artificial Sequence
  Synthetic oligonucleotide
gggtctgagggatccagatcagaaacactt

SEQ ID NO: 125559 - DNA, 30 bp, Artificial Sequence
  Synthetic oligonucleotide
cacatggggattgctcgcataagaacactt

SEQ ID NO: 125560 - DNA, 30 bp, Artificial Sequence
  Synthetic oligonucleotide
cgaggagagataatagcgaggtgaacactt

SEQ ID NO: 125561 - DNA, 30 bp, Artificial Sequence
  Synthetic oligonucleotide
acatatttttggaaaggagtttgcacactt

SEQ ID NO: 125562 - DNA, 30 bp, Artificial Sequence
  Synthetic oligonucleotide
ggcggtggtccgagcttccaacaggcactt

SEQ ID NO: 125563 - DNA, 30 bp, Artificial Sequence
  Synthetic oligonucleotide
gtcctaccaaagcgaaacagcatcagactt

SEQ ID NO: 125564 - DNA, 30 bp, Artificial Sequence
  Synthetic oligonucleotide
agatggagaagtgaagcagtagttagactt

SEQ ID NO: 125565 - DNA, 30 bp, Artificial Sequence
  Synthetic oligonucleotide
caggagtttaaactcagagcttgacgactt

SEQ ID NO: 125566 - DNA, 30 bp, Artificial Sequence
  Synthetic oligonucleotide
ggtgcatacatcggaattcagacccgactt

SEQ ID NO: 125567 - DNA, 30 bp, Artificial Sequence
  Synthetic oligonucleotide
gacaagactgagtatacgttgccgcgactt

SEQ ID NO: 125568 - DNA, 30 bp, Artificial Sequence
  Synthetic oligonucleotide
ggcactaatcaatgggttaaaatgggactt

SEQ ID NO: 125569 - DNA, 30 bp, Artificial Sequence
  Synthetic oligonucleotide
ggctcagaggcagagctgctaactggactt

SEQ ID NO: 125570 - DNA, 30 bp, Artificial Sequence
  Synthetic oligonucleotide
tcgcgtacactggagcccgaatactgactt

SEQ ID NO: 125571 - DNA, 30 bp, Artificial Sequence
  Synthetic oligonucleotide
tcatgcccttgcaatccaaaggcgatactt

SEQ ID NO: 125572 - DNA, 30 bp, Artificial Sequence
  Synthetic oligonucleotide
aatagagaaatccgaacattttgcgtactt

SEQ ID NO: 125573 - DNA, 30 bp, Artificial Sequence
  Synthetic oligonucleotide
accggcaggggaggatatgtaatcgtactt

SEQ ID NO: 125574 - DNA, 30 bp, Artificial Sequence
  Synthetic oligonucleotide
acaccactcaaaccccgtcggatggtactt

SEQ ID NO: 125575 - DNA, 30 bp, Artificial Sequence
  Synthetic oligonucleotide
tatggaggacatttttcggggacgttactt

SEQ ID NO: 125576 - DNA, 30 bp, Artificial Sequence
  Synthetic oligonucleotide
gggcgtcacttcggtggaagaagtaacctt

SEQ ID NO: 125577 - DNA, 30 bp, Artificial Sequence
  Synthetic oligonucleotide
acgaactggcacctgttgagacttaacctt

SEQ ID NO: 125578 - DNA, 30 bp, Artificial Sequence
  Synthetic oligonucleotide
ggccaagcaaactactgcttctaacacctt

SEQ ID NO: 125579 - DNA, 30 bp, Artificial Sequence
  Synthetic oligonucleotide
gaaccataagccaaaaaaactctagacctt

SEQ ID NO: 125580 - DNA, 30 bp, Artificial Sequence
  Synthetic oligonucleotide
ggtagaggacctaagataaacaagtacctt

SEQ ID NO: 125581 - DNA, 30 bp, Artificial Sequence
  Synthetic oligonucleotide
caacgaaactgaataacgccggtaaccctt

SEQ ID NO: 125582 - DNA, 30 bp, Artificial Sequence
  Synthetic oligonucleotide
tacctgagagttaaggctctaaggcccctt

SEQ ID NO: 125583 - DNA, 30 bp, Artificial Sequence
  Synthetic oligonucleotide
gagggaactgtggcgtgattttgttccctt

SEQ ID NO: 125584 - DNA, 30 bp, Artificial Sequence
  Synthetic oligonucleotide
aaggatggctcgtctagacggtgaagcctt

SEQ ID NO: 125585 - DNA, 30 bp, Artificial Sequence
  Synthetic oligonucleotide
cctgggtcctagcttgaggtcgtcagcctt

SEQ ID NO: 125586 - DNA, 30 bp, Artificial Sequence
  Synthetic oligonucleotide
tcgtgcagagagatggcattggctcgcctt

SEQ ID NO: 125587 - DNA, 30 bp, Artificial Sequence
  Synthetic oligonucleotide
tctaagctgatgcggtgatcccaaatcctt

SEQ ID NO: 125588 - DNA, 30 bp, Artificial Sequence
  Synthetic oligonucleotide
ggcaggggcgaggaccgaaaatgtatcctt

SEQ ID NO: 125589 - DNA, 30 bp, Artificial Sequence
  Synthetic oligonucleotide
cctataggtgaccgtcttccgtcgctcctt

SEQ ID NO: 125590 - DNA, 30 bp, Artificial Sequence
  Synthetic oligonucleotide
cttggcagaagatcgagcatcgtggtcctt

SEQ ID NO: 125591 - DNA, 30 bp, Artificial Sequence
  Synthetic oligonucleotide
tgaggagatacaaaatactgcgtaaagctt

SEQ ID NO: 125592 - DNA, 29 bp, Artificial Sequence
  Synthetic oligonucleotide
acgtggagcatactagctactctaagctt

SEQ ID NO: 125593 - DNA, 30 bp, Artificial Sequence
  Synthetic oligonucleotide
tcgcggattggccattaacagtcacagctt

SEQ ID NO: 125594 - DNA, 30 bp, Artificial Sequence
  Synthetic oligonucleotide
caaggcaaataagaacgacctgatcagctt

SEQ ID NO: 125595 - DNA, 30 bp, Artificial Sequence
  Synthetic oligonucleotide
tccctaagggctgaaagagaccaagagctt

SEQ ID NO: 125596 - DNA, 30 bp, Artificial Sequence
  Synthetic oligonucleotide
gggggtgggccagcatccggaccaacgctt

SEQ ID NO: 125597 - DNA, 30 bp, Artificial Sequence
  Synthetic oligonucleotide
cgatcttaatcggcggggataccgacgctt

SEQ ID NO: 125598 - DNA, 30 bp, Artificial Sequence
  Synthetic oligonucleotide
acaaaggtatccgaacggcacagatcgctt

SEQ ID NO: 125599 - DNA, 30 bp, Artificial Sequence
  Synthetic oligonucleotide
taggtcgatcgcgtcgaggccaagaggctt

SEQ ID NO: 125600 - DNA, 30 bp, Artificial Sequence
  Synthetic oligonucleotide
gcaaatgaaacagaacgcgtctagcggctt

SEQ ID NO: 125601 - DNA, 30 bp, Artificial Sequence
  Synthetic oligonucleotide
aacgccctcattaacaaacagcaggggctt

SEQ ID NO: 125602 - DNA, 30 bp, Artificial Sequence
  Synthetic oligonucleotide
aacggaattcattgacccaatgttgggctt

SEQ ID NO: 125603 - DNA, 30 bp, Artificial Sequence
  Synthetic oligonucleotide
gcggtcatagagaaggatatggtctggctt

SEQ ID NO: 125604 - DNA, 30 bp, Artificial Sequence
  Synthetic oligonucleotide
gtgcgaagcgagatgacacaatttatgctt

SEQ ID NO: 125605 - DNA, 30 bp, Artificial Sequence
  Synthetic oligonucleotide
gtatggggccatgcgcccaggtacctgctt

SEQ ID NO: 125606 - DNA, 30 bp, Artificial Sequence
  Synthetic oligonucleotide
aagtaacatagccgtatattcggagtgctt

SEQ ID NO: 125607 - DNA, 30 bp, Artificial Sequence
  Synthetic oligonucleotide
cgaggccggctccctcgcagggaattgctt

SEQ ID NO: 125608 - DNA, 30 bp, Artificial Sequence
  Synthetic oligonucleotide
acaaggcgcactgagatatgaccgttgctt

SEQ ID NO: 125609 - DNA, 30 bp, Artificial Sequence
  Synthetic oligonucleotide
agaccacaatggtgctcaagcgcccatctt

SEQ ID NO: 125610 - DNA, 30 bp, Artificial Sequence
  Synthetic oligonucleotide
agctcaaacgactgctgtggtaagcatctt

SEQ ID NO: 125611 - DNA, 30 bp, Artificial Sequence
  Synthetic oligonucleotide
agtccttggaatgcggctcaccatcatctt

SEQ ID NO: 125612 - DNA, 30 bp, Artificial Sequence
  Synthetic oligonucleotide
cgccaattgggcaagaggtcgacagatctt

SEQ ID NO: 125613 - DNA, 30 bp, Artificial Sequence
  Synthetic oligonucleotide
cggcgcgcacaaacggtcgtgatcactctt

SEQ ID NO: 125614 - DNA, 30 bp, Artificial Sequence
  Synthetic oligonucleotide
cagagcgggttccatcatagagagactctt

SEQ ID NO: 125615 - DNA, 30 bp, Artificial Sequence
  Synthetic oligonucleotide
ctgcgatgtctcgaaagaccctgagctctt

SEQ ID NO: 125616 - DNA, 30 bp, Artificial Sequence
  Synthetic oligonucleotide
gtagtcattagggacacgtatcactctctt

SEQ ID NO: 125617 - DNA, 30 bp, Artificial Sequence
  Synthetic oligonucleotide
atgagatatcgcacccaataccagagtctt

SEQ ID NO: 125618 - DNA, 30 bp, Artificial Sequence
  Synthetic oligonucleotide
taatccagaacgatcatcaggactcgtctt

SEQ ID NO: 125619 - DNA, 30 bp, Artificial Sequence
  Synthetic oligonucleotide
agagtctgcgaccaagggtattaaggtctt

SEQ ID NO: 125620 - DNA, 30 bp, Artificial Sequence
  Synthetic oligonucleotide
cggacaacaaaaatagttaacataggtctt

SEQ ID NO: 125621 - DNA, 30 bp, Artificial Sequence
  Synthetic oligonucleotide
agatgtcaaactaccttacccacatgtctt

SEQ ID NO: 125622 - DNA, 30 bp, Artificial Sequence
  Synthetic oligonucleotide
cgatagagagatttgatttcggcatgtctt

SEQ ID NO: 125623 - DNA, 30 bp, Artificial Sequence
  Synthetic oligonucleotide
tggtaaaggggtacggagaaggtatgtctt

SEQ ID NO: 125624 - DNA, 30 bp, Artificial Sequence
  Synthetic oligonucleotide
gtcgaggaagccaagggggtgctaattctt

SEQ ID NO: 125625 - DNA, 30 bp, Artificial Sequence
  Synthetic oligonucleotide
aacagagtcatatgagtccaccagattctt

SEQ ID NO: 125626 - DNA, 30 bp, Artificial Sequence
  Synthetic oligonucleotide
agaaccctaggcatcgagggaatggttctt

SEQ ID NO: 125627 - DNA, 30 bp, Artificial Sequence
  Synthetic oligonucleotide
ctgagactacaaacagaggccgctaaagtt

SEQ ID NO: 125628 - DNA, 30 bp, Artificial Sequence
  Synthetic oligonucleotide
attagcgtatcctccctcggagaacaagtt

SEQ ID NO: 125629 - DNA, 30 bp, Artificial Sequence
  Synthetic oligonucleotide
gtgacaacccgccgcctcaccagccaagtt

SEQ ID NO: 125630 - DNA, 30 bp, Artificial Sequence
  Synthetic oligonucleotide
aggtcaccagagtggtcccaagctcaagtt

SEQ ID NO: 125631 - DNA, 30 bp, Artificial Sequence
  Synthetic oligonucleotide
gacttggaaggtgggcgggaacgtcaagtt

SEQ ID NO: 125632 - DNA, 30 bp, Artificial Sequence
  Synthetic oligonucleotide
ccaatcgtttagaacatgtacgaggaagtt

SEQ ID NO: 125633 - DNA, 30 bp, Artificial Sequence
  Synthetic oligonucleotide
caaggctgtgttcctgatagaagggaagtt

SEQ ID NO: 125634 - DNA, 30 bp, Artificial Sequence
  Synthetic oligonucleotide
gcctgagtgccgatatatattttggaagtt

SEQ ID NO: 125635 - DNA, 30 bp, Artificial Sequence
  Synthetic oligonucleotide
gaacccgttagaggtcataggcatgaagtt

SEQ ID NO: 125636 - DNA, 30 bp, Artificial Sequence
  Synthetic oligonucleotide
aaccaagaacgcgatgattatgatgaagtt

SEQ ID NO: 125637 - DNA, 30 bp, Artificial Sequence
  Synthetic oligonucleotide
gcattgtcagtgcacccatatggataagtt

SEQ ID NO: 125638 - DNA, 30 bp, Artificial Sequence
  Synthetic oligonucleotide
ccgcactgctgaaagagtttttgataagtt

SEQ ID NO: 125639 - DNA, 30 bp, Artificial Sequence
  Synthetic oligonucleotide
taacaaacgcgaaaacagtggtagtaagtt

SEQ ID NO: 125640 - DNA, 30 bp, Artificial Sequence
  Synthetic oligonucleotide
tcgtggcgagtccctagtatcttgtaagtt

SEQ ID NO: 125641 - DNA, 30 bp, Artificial Sequence
  Synthetic oligonucleotide
gggggggacccatggcctcaataaacagtt

SEQ ID NO: 125642 - DNA, 30 bp, Artificial Sequence
  Synthetic oligonucleotide
tagttgaaagagtccagggttgatacagtt

SEQ ID NO: 125643 - DNA, 30 bp, Artificial Sequence
  Synthetic oligonucleotide
atacaataccggactgtgaggggggcagtt

SEQ ID NO: 125644 - DNA, 30 bp, Artificial Sequence
  Synthetic oligonucleotide
tctcaagtccgtaatgggaggggtgcagtt

SEQ ID NO: 125645 - DNA, 30 bp, Artificial Sequence
  Synthetic oligonucleotide
acttcagggggcaatcgtcaatgtgcagtt

SEQ ID NO: 125646 - DNA, 31 bp, Artificial Sequence
  Synthetic oligonucleotide
aagtcaagggggttcgaatattcagtcagtt

SEQ ID NO: 125647 - DNA, 30 bp, Artificial Sequence
  Synthetic oligonucleotide
tgagggttctctactgcaataaatagagtt

SEQ ID NO: 125648 - DNA, 30 bp, Artificial Sequence
  Synthetic oligonucleotide
aatgagtcacagcacaatataaaccgagtt

SEQ ID NO: 125649 - DNA, 30 bp, Artificial Sequence
  Synthetic oligonucleotide
cttagaaggctccgcttcgagtatcgagtt

SEQ ID NO: 125650 - DNA, 30 bp, Artificial Sequence
  Synthetic oligonucleotide
aaaaggataaggcaacatgcggtaggagtt

SEQ ID NO: 125651 - DNA, 30 bp, Artificial Sequence
  Synthetic oligonucleotide
agtcgactggcatcctgacctaattgagtt

SEQ ID NO: 125652 - DNA, 30 bp, Artificial Sequence
  Synthetic oligonucleotide
gtaagggcggaacacctcggtaacatagtt

SEQ ID NO: 125653 - DNA, 30 bp, Artificial Sequence
  Synthetic oligonucleotide
agctaaataacacatacaagttatctagtt

SEQ ID NO: 125654 - DNA, 30 bp, Artificial Sequence
  Synthetic oligonucleotide
ctcgcaatagaggtgtttgtgcacgtagtt

SEQ ID NO: 125655 - DNA, 30 bp, Artificial Sequence
  Synthetic oligonucleotide
cgtgcccgtattggatgcacggatgtagtt

SEQ ID NO: 125656 - DNA, 30 bp, Artificial Sequence
  Synthetic oligonucleotide
ggtttggaatctacgagtaccgcattagtt

SEQ ID NO: 125657 - DNA, 30 bp, Artificial Sequence
  Synthetic oligonucleotide
ttagtgaaagtagcgatatgcctgttagtt

SEQ ID NO: 125658 - DNA, 30 bp, Artificial Sequence
  Synthetic oligonucleotide
taagcgctcacaggtgattcggcccacgtt

SEQ ID NO: 125659 - DNA, 30 bp, Artificial Sequence
  Synthetic oligonucleotide
agcagattcgaaattggtgaacatcacgtt

SEQ ID NO: 125660 - DNA, 30 bp, Artificial Sequence
  Synthetic oligonucleotide
agttacgataaagtgcccccgtgagacgtt

SEQ ID NO: 125661 - DNA, 30 bp, Artificial Sequence
  Synthetic oligonucleotide
gtagagagcgtgtaaccgcttggcgacgtt

SEQ ID NO: 125662 - DNA, 30 bp, Artificial Sequence
  Synthetic oligonucleotide
ccagaccactatgctccaatcggggacgtt

SEQ ID NO: 125663 - DNA, 30 bp, Artificial Sequence
  Synthetic oligonucleotide
cgcactttctcagcaccgaaaagctacgtt

SEQ ID NO: 125664 - DNA, 30 bp, Artificial Sequence
  Synthetic oligonucleotide
cggggcagccgatataagcgtagctacgtt

SEQ ID NO: 125665 - DNA, 30 bp, Artificial Sequence
  Synthetic oligonucleotide
gactagtccaaagagagttaacaccccgtt

SEQ ID NO: 125666 - DNA, 30 bp, Artificial Sequence
  Synthetic oligonucleotide
cacattttacgtagagcgcgtatgcccgtt

SEQ ID NO: 125667 - DNA, 30 bp, Artificial Sequence
  Synthetic oligonucleotide
cgctctctattggattgccagtaagccgtt

SEQ ID NO: 125668 - DNA, 30 bp, Artificial Sequence
  Synthetic oligonucleotide
aagataaaacaagactcggaaaactccgtt

SEQ ID NO: 125669 - DNA, 30 bp, Artificial Sequence
  Synthetic oligonucleotide
tgagcttggcaaccaagacagcacagcgtt

SEQ ID NO: 125670 - DNA, 30 bp, Artificial Sequence
  Synthetic oligonucleotide
ggtgcagaaagtacttttcgattcagcgtt

SEQ ID NO: 125671 - DNA, 30 bp, Artificial Sequence
  Synthetic oligonucleotide
acgtcatcatgcggagtgagaggacgcgtt

SEQ ID NO: 125672 - DNA, 30 bp, Artificial Sequence
  Synthetic oligonucleotide
gggggcgtgtcacaccgcaatcgaggcgtt

SEQ ID NO: 125673 - DNA, 30 bp, Artificial Sequence
  Synthetic oligonucleotide
gaggcaagggctacagttgtacttggcgtt

SEQ ID NO: 125674 - DNA, 30 bp, Artificial Sequence
  Synthetic oligonucleotide
tacgaggaggatccaagattcgaaatcgtt

SEQ ID NO: 125675 - DNA, 30 bp, Artificial Sequence
  Synthetic oligonucleotide
gcgcatcgcaagcggatagtcacaatcgtt

SEQ ID NO: 125676 - DNA, 30 bp, Artificial Sequence
  Synthetic oligonucleotide
gcctgggcaatttaatagcagccaatcgtt

SEQ ID NO: 125677 - DNA, 30 bp, Artificial Sequence
  Synthetic oligonucleotide
agtaacaggcactggtgtgcattcatcgtt

SEQ ID NO: 125678 - DNA, 30 bp, Artificial Sequence
  Synthetic oligonucleotide
aggttccactggactcgttctactctcgtt

SEQ ID NO: 125679 - DNA, 30 bp, Artificial Sequence
  Synthetic oligonucleotide
cataaagaccggatactacggaacgtcgtt

SEQ ID NO: 125680 - DNA, 30 bp, Artificial Sequence
  Synthetic oligonucleotide
tacgtggcgcgagagctactgtcattcgtt

SEQ ID NO: 125681 - DNA, 30 bp, Artificial Sequence
  Synthetic oligonucleotide
cagaagtaatagaggaacgtcatcttcgtt

SEQ ID NO: 125682 - DNA, 30 bp, Artificial Sequence
  Synthetic oligonucleotide
actatccgtggagggagactacgccaggtt

SEQ ID NO: 125683 - DNA, 30 bp, Artificial Sequence
  Synthetic oligonucleotide
ggtcgtagagatatcaaagttcagcaggtt

SEQ ID NO: 125684 - DNA, 30 bp, Artificial Sequence
  Synthetic oligonucleotide
ctcgcgcggaattagtcatcgcttcaggtt

SEQ ID NO: 125685 - DNA, 30 bp, Artificial Sequence
  Synthetic oligonucleotide
tcgttaatttaagagtcgacttaagaggtt

SEQ ID NO: 125686 - DNA, 30 bp, Artificial Sequence
  Synthetic oligonucleotide
ccgaattagcacctgacaccactataggtt

SEQ ID NO: 125687 - DNA, 30 bp, Artificial Sequence
  Synthetic oligonucleotide
cattcgagaagtgcgaaaccagcctaggtt

SEQ ID NO: 125688 - DNA, 30 bp, Artificial Sequence
  Synthetic oligonucleotide
ttcaacggtgcgcggcgttcgaagtaggtt

SEQ ID NO: 125689 - DNA, 30 bp, Artificial Sequence
  Synthetic oligonucleotide
ctgcgacttgacaaaacaggcaagacggtt

SEQ ID NO: 125690 - DNA, 30 bp, Artificial Sequence
  Synthetic oligonucleotide
agtctgaagaggtagtagagtagtacggtt

SEQ ID NO: 125691 - DNA, 30 bp, Artificial Sequence
  Synthetic oligonucleotide
gcacgatatttgtgagtatgactaccggtt

SEQ ID NO: 125692 - DNA, 30 bp, Artificial Sequence
  Synthetic oligonucleotide
atctagcgggtggtttatgtcacagcggtt

SEQ ID NO: 125693 - DNA, 30 bp, Artificial Sequence
  Synthetic oligonucleotide
tgacaggctggaaggcgcgtcatagcggtt

SEQ ID NO: 125694 - DNA, 30 bp, Artificial Sequence
  Synthetic oligonucleotide
cgcggaacaaagcattggccgatagcggtt

SEQ ID NO: 125695 - DNA, 30 bp, Artificial Sequence
  Synthetic oligonucleotide
caacgccttaccacgatagtatgggcggtt

SEQ ID NO: 125696 - DNA, 30 bp, Artificial Sequence
  Synthetic oligonucleotide
agttgtcgcgtgggcgtaaggatggcggtt

SEQ ID NO: 125697 - DNA, 30 bp, Artificial Sequence
  Synthetic oligonucleotide
gttggcgttagatacagggtcgtggcggtt

SEQ ID NO: 125698 - DNA, 30 bp, Artificial Sequence
  Synthetic oligonucleotide
atgcgatagggcacgccgcgtttgtcggtt

SEQ ID NO: 125699 - DNA, 30 bp, Artificial Sequence
  Synthetic oligonucleotide
gagaaaattcgaagagggccacaaagggtt

SEQ ID NO: 125700 - DNA, 30 bp, Artificial Sequence
  Synthetic oligonucleotide
agaatagtcaaaccaaaagattgcagggtt

SEQ ID NO: 125701 - DNA, 30 bp, Artificial Sequence
  Synthetic oligonucleotide
cttcggtggatggcctcacgaaggagggtt

SEQ ID NO: 125702 - DNA, 30 bp, Artificial Sequence
  Synthetic oligonucleotide
cgttgctggagttttaagccatctagggtt

SEQ ID NO: 125703 - DNA, 30 bp, Artificial Sequence
  Synthetic oligonucleotide
agtaactgtcatactatacaccgacgggtt

SEQ ID NO: 125704 - DNA, 30 bp, Artificial Sequence
  Synthetic oligonucleotide
tgaagcctagcgctggggtgaaatcgggtt

SEQ ID NO: 125705 - DNA, 30 bp, Artificial Sequence
  Synthetic oligonucleotide
ttacgaagattgaaattaataggtcgggtt

SEQ ID NO: 125706 - DNA, 30 bp, Artificial Sequence
  Synthetic oligonucleotide
cgctagaacaggatggagctgcctggggtt

SEQ ID NO: 125707 - DNA, 30 bp, Artificial Sequence
  Synthetic oligonucleotide
gaacagattcaggccgctaagtggtgggtt

SEQ ID NO: 125708 - DNA, 30 bp, Artificial Sequence
  Synthetic oligonucleotide
aagaggcttaagacagtatgttttatggtt

SEQ ID NO: 125709 - DNA, 30 bp, Artificial Sequence
  Synthetic oligonucleotide
aagtgggtaatcagggcgatcttactggtt

SEQ ID NO: 125710 - DNA, 30 bp, Artificial Sequence
  Synthetic oligonucleotide
aagggaggtcgcaccacgtgcattctggtt

SEQ ID NO: 125711 - DNA, 30 bp, Artificial Sequence
  Synthetic oligonucleotide
ttcacaccattagagagtgcactagtggtt

SEQ ID NO: 125712 - DNA, 30 bp, Artificial Sequence
  Synthetic oligonucleotide
acgagcgaggactttaactggtccttggtt

SEQ ID NO: 125713 - DNA, 30 bp, Artificial Sequence
  Synthetic oligonucleotide
ctcgtgctcacggagggactcatcttggtt

SEQ ID NO: 125714 - DNA, 30 bp, Artificial Sequence
  Synthetic oligonucleotide
gggcgaggggcccgatacttccgccatgtt

SEQ ID NO: 125715 - DNA, 30 bp, Artificial Sequence
  Synthetic oligonucleotide
ggggaggtgagctcgccgggaactcatgtt

SEQ ID NO: 125716 - DNA, 30 bp, Artificial Sequence
  Synthetic oligonucleotide
aatagagcacttcatatcgtgagtcatgtt

SEQ ID NO: 125717 - DNA, 30 bp, Artificial Sequence
  Synthetic oligonucleotide
ctgaccgtgtattagcattaacgtgatgtt

SEQ ID NO: 125718 - DNA, 30 bp, Artificial Sequence
  Synthetic oligonucleotide
cattattaccatgctcttctgcgatatgtt

SEQ ID NO: 125719 - DNA, 30 bp, Artificial Sequence
  Synthetic oligonucleotide
gagggaattgacatgaggcacttctatgtt

SEQ ID NO: 125720 - DNA, 30 bp, Artificial Sequence
  Synthetic oligonucleotide
cgaggtacctagccccttagcgtttatgtt

SEQ ID NO: 125721 - DNA, 31 bp, Artificial Sequence
  Synthetic oligonucleotide
aggaggtcgatcccctgagttcccgactgtt

SEQ ID NO: 125722 - DNA, 30 bp, Artificial Sequence
  Synthetic oligonucleotide
tccaatggagtaagttaagagagtactgtt

SEQ ID NO: 125723 - DNA, 30 bp, Artificial Sequence
  Synthetic oligonucleotide
caaaggcggcccgttgaaccagaccctgtt

SEQ ID NO: 125724 - DNA, 30 bp, Artificial Sequence
  Synthetic oligonucleotide
gggatcgggcaacatctatctatgcctgtt

SEQ ID NO: 125725 - DNA, 30 bp, Artificial Sequence
  Synthetic oligonucleotide
atctcgttgcataacggaggacggagtgtt

SEQ ID NO: 125726 - DNA, 30 bp, Artificial Sequence
  Synthetic oligonucleotide
gtcaggcgatttagttaggaatggcgtgtt

SEQ ID NO: 125727 - DNA, 30 bp, Artificial Sequence
  Synthetic oligonucleotide
cggtcaaatgcattaacataatgtggtgtt

SEQ ID NO: 125728 - DNA, 30 bp, Artificial Sequence
  Synthetic oligonucleotide
gcttaagcgctgaactggaatcggtgtgtt

SEQ ID NO: 125729 - DNA, 30 bp, Artificial Sequence
  Synthetic oligonucleotide
ccatgcgagcaatggtcttatgggattgtt

SEQ ID NO: 125730 - DNA, 30 bp, Artificial Sequence
  Synthetic oligonucleotide
agggagggacgggcgtcgttctctcttgtt

SEQ ID NO: 125731 - DNA, 30 bp, Artificial Sequence
  Synthetic oligonucleotide
gggcacattttattggccgggagagttgtt

SEQ ID NO: 125732 - DNA, 30 bp, Artificial Sequence
  Synthetic oligonucleotide
tctcaaatgttgaggttacgtgccgttgtt

SEQ ID NO: 125733 - DNA, 30 bp, Artificial Sequence
  Synthetic oligonucleotide
acacgcgtgcgttacccttgagactttgtt

SEQ ID NO: 125734 - DNA, 30 bp, Artificial Sequence
  Synthetic oligonucleotide
ctctgaggtacagtgcgtctacgaaaattt

SEQ ID NO: 125735 - DNA, 30 bp, Artificial Sequence
  Synthetic oligonucleotide
agtcacatccgtaacttgttagtcaaattt

SEQ ID NO: 125736 - DNA, 30 bp, Artificial Sequence
  Synthetic oligonucleotide
accggtgaagatgatgaggggtcgaaattt

SEQ ID NO: 125737 - DNA, 30 bp, Artificial Sequence
  Synthetic oligonucleotide
agattaaatcgaatgctatctgggaaattt

SEQ ID NO: 125738 - DNA, 30 bp, Artificial Sequence
  Synthetic oligonucleotide
ttggaattcagggtgacaaatggagaattt

SEQ ID NO: 125739 - DNA, 30 bp, Artificial Sequence
  Synthetic oligonucleotide
ggcgagcgatcgaggtataggtaggaattt

SEQ ID NO: 125740 - DNA, 30 bp, Artificial Sequence
  Synthetic oligonucleotide
catgaatgactttcaggacaggtggaattt

SEQ ID NO: 125741 - DNA, 30 bp, Artificial Sequence
  Synthetic oligonucleotide
agcggtggttggcgcgagtagatttaattt

SEQ ID NO: 125742 - DNA, 30 bp, Artificial Sequence
  Synthetic oligonucleotide
ggcgtcgacccatgtcgtttgaccacattt

SEQ ID NO: 125743 - DNA, 30 bp, Artificial Sequence
  Synthetic oligonucleotide
ctgtagggacccgttaagaagccagcattt

SEQ ID NO: 125744 - DNA, 30 bp, Artificial Sequence
  Synthetic oligonucleotide
gtactgatggaggaagtggaagattcattt

SEQ ID NO: 125745 - DNA, 30 bp, Artificial Sequence
  Synthetic oligonucleotide
agaaagcggaccgaatctcatgcaagattt

SEQ ID NO: 125746 - DNA, 30 bp, Artificial Sequence
  Synthetic oligonucleotide
gtccatcgtgtggcagaaggaataagattt

SEQ ID NO: 125747 - DNA, 30 bp, Artificial Sequence
  Synthetic oligonucleotide
gctaaggaacgagggtcgtaacagcgattt

SEQ ID NO: 125748 - DNA, 30 bp, Artificial Sequence
  Synthetic oligonucleotide
gccataaagataacgttgtgccctcgattt

SEQ ID NO: 125749 - DNA, 30 bp, Artificial Sequence
  Synthetic oligonucleotide
ttcgtgaaactgtggccaattaggggattt

SEQ ID NO: 125750 - DNA, 30 bp, Artificial Sequence
  Synthetic oligonucleotide
tgaaggaggtgcccagtaccaccatgattt

SEQ ID NO: 125751 - DNA, 30 bp, Artificial Sequence
  Synthetic oligonucleotide
cgcaaaaggggggaaatttcgggatgattt

SEQ ID NO: 125752 - DNA, 30 bp, Artificial Sequence
  Synthetic oligonucleotide
caacgggttccgtgacagtatcatgtattt

SEQ ID NO: 125753 - DNA, 30 bp, Artificial Sequence
  Synthetic oligonucleotide
cagagtagccgttctacgcaaaacttattt

SEQ ID NO: 125754 - DNA, 30 bp, Artificial Sequence
  Synthetic oligonucleotide
gccactagtagctcaaacacgataaacttt

SEQ ID NO: 125755 - DNA, 30 bp, Artificial Sequence
  Synthetic oligonucleotide
tggcgaacaggcctcaaccccggcaacttt

SEQ ID NO: 125756 - DNA, 30 bp, Artificial Sequence
  Synthetic oligonucleotide
gcataattgatacatcctgaacaacacttt

SEQ ID NO: 125757 - DNA, 30 bp, Artificial Sequence
  Synthetic oligonucleotide
aaggaagtttggaatctcgatcaacacttt

SEQ ID NO: 125758 - DNA, 30 bp, Artificial Sequence
  Synthetic oligonucleotide
acaacaaccgagtcacgggggttatacttt

SEQ ID NO: 125759 - DNA, 30 bp, Artificial Sequence
  Synthetic oligonucleotide
ttgggcgctagtacacgatccaagtacttt

SEQ ID NO: 125760 - DNA, 30 bp, Artificial Sequence
  Synthetic oligonucleotide
caaatcagtctcatcacgggtgcgtacttt

SEQ ID NO: 125761 - DNA, 30 bp, Artificial Sequence
  Synthetic oligonucleotide
tcgaggaactctctaaaaggcgattacttt

SEQ ID NO: 125762 - DNA, 30 bp, Artificial Sequence
  Synthetic oligonucleotide
gctgggcatttacggggtcaactaaccttt

SEQ ID NO: 125763 - DNA, 30 bp, Artificial Sequence
  Synthetic oligonucleotide
tcaggcaggaggcaggtactcgtagccttt

SEQ ID NO: 125764 - DNA, 30 bp, Artificial Sequence
  Synthetic oligonucleotide
cgcgtaagaactttagacgaaaatgccttt

SEQ ID NO: 125765 - DNA, 30 bp, Artificial Sequence
  Synthetic oligonucleotide
aggcgagctcctaatagaaactgcagcttt

SEQ ID NO: 125766 - DNA, 30 bp, Artificial Sequence
  Synthetic oligonucleotide
cgcgttattaacgctgaggatacatgcttt

SEQ ID NO: 125767 - DNA, 30 bp, Artificial Sequence
  Synthetic oligonucleotide
gagctcaagattcggaccgaaagtatcttt

SEQ ID NO: 125768 - DNA, 30 bp, Artificial Sequence
  Synthetic oligonucleotide
tcgcaagagggtcagcctatttccaagttt

SEQ ID NO: 125769 - DNA, 30 bp, Artificial Sequence
  Synthetic oligonucleotide
cagagagcgcggtgatcatagcgcaagttt

SEQ ID NO: 125770 - DNA, 30 bp, Artificial Sequence
  Synthetic oligonucleotide
cgagcagtgatgcacagtataccccagttt

SEQ ID NO: 125771 - DNA, 30 bp, Artificial Sequence
  Synthetic oligonucleotide
tccgcatacggagctgacattccagagttt

SEQ ID NO: 125772 - DNA, 31 bp, Artificial Sequence
  Synthetic oligonucleotide
cggactcaatttcgtccgaaactccgagttt

SEQ ID NO: 125773 - DNA, 30 bp, Artificial Sequence
  Synthetic oligonucleotide
aacactgctgagcgagcaggatctgagttt

SEQ ID NO: 125774 - DNA, 30 bp, Artificial Sequence
  Synthetic oligonucleotide
tgcgggtcagataagtatcaggcctagttt

SEQ ID NO: 125775 - DNA, 30 bp, Artificial Sequence
  Synthetic oligonucleotide
agcgagtgcttatcgtgcgagtattagttt

SEQ ID NO: 125776 - DNA, 30 bp, Artificial Sequence
  Synthetic oligonucleotide
gaagctgacccatgccgtcgaacaccgttt

SEQ ID NO: 125777 - DNA, 30 bp, Artificial Sequence
  Synthetic oligonucleotide
catcgtcgatcagctggatgaattccgttt

SEQ ID NO: 125778 - DNA, 30 bp, Artificial Sequence
  Synthetic oligonucleotide
acgcgccagttcgtggcgaaagattcgttt

SEQ ID NO: 125779 - DNA, 30 bp, Artificial Sequence
  Synthetic oligonucleotide
cgaaacatacggcatatgggctagcggttt

SEQ ID NO: 125780 - DNA, 30 bp, Artificial Sequence
  Synthetic oligonucleotide
atgcatcggtttgggtgtaaatcgcggttt

SEQ ID NO: 125781 - DNA, 30 bp, Artificial Sequence
  Synthetic oligonucleotide
ttcgagctaaagaaagggtcggaagggttt

SEQ ID NO: 125782 - DNA, 30 bp, Artificial Sequence
  Synthetic oligonucleotide
tggaagtcggttggcgtcttactatggttt

SEQ ID NO: 125783 - DNA, 30 bp, Artificial Sequence
  Synthetic oligonucleotide
gaatggcggagaaggtagattctatggttt

SEQ ID NO: 125784 - DNA, 30 bp, Artificial Sequence
  Synthetic oligonucleotide
gaatgctaaataaggtaaggcgaaatgttt

SEQ ID NO: 125785 - DNA, 30 bp, Artificial Sequence
  Synthetic oligonucleotide
cagggaaagaacttcacgctagagatgttt

SEQ ID NO: 125786 - DNA, 30 bp, Artificial Sequence
  Synthetic oligonucleotide
atcactgcaagtgcgcctgaaacactgttt

SEQ ID NO: 125787 - DNA, 30 bp, Artificial Sequence
  Synthetic oligonucleotide
ctgttaggacgagcaataaggatgctgttt

SEQ ID NO: 125788 - DNA, 30 bp, Artificial Sequence
  Synthetic oligonucleotide
aggtgtacggtgccatagtcaggtctgttt

SEQ ID NO: 125789 - DNA, 30 bp, Artificial Sequence
  Synthetic oligonucleotide
tcaggaccccggagcatactcggtaatttt

SEQ ID NO: 125790 - DNA, 30 bp, Artificial Sequence
  Synthetic oligonucleotide
ggtgcggataaccggaattgtgaacatttt

SEQ ID NO: 125791 - DNA, 30 bp, Artificial Sequence
  Synthetic oligonucleotide
gggtaagactgaatgcaagcgcgagatttt

SEQ ID NO: 125792 - DNA, 30 bp, Artificial Sequence
  Synthetic oligonucleotide
ataatacaccggcctgggctacacgatttt

SEQ ID NO: 125793 - DNA, 30 bp, Artificial Sequence
  Synthetic oligonucleotide
atgtaaggcggctacagagacccatatttt

SEQ ID NO: 125794 - DNA, 30 bp, Artificial Sequence
  Synthetic oligonucleotide
agcaccgaactgtacgaggtctcatatttt

SEQ ID NO: 125795 - DNA, 30 bp, Artificial Sequence
  Synthetic oligonucleotide
actggacaacgagctaggtccgagtatttt

SEQ ID NO: 125796 - DNA, 30 bp, Artificial Sequence
  Synthetic oligonucleotide
cacgacagttatcagctacgtcgagctttt

SEQ ID NO: 125797 - DNA, 30 bp, Artificial Sequence
  Synthetic oligonucleotide
gggcacaaataagcgaagcaaatgtctttt

SEQ ID NO: 125798 - DNA, 30 bp, Artificial Sequence
  Synthetic oligonucleotide
aggcgcccttgcgagtgttacgccagtttt

SEQ ID NO: 125799 - DNA, 30 bp, Artificial Sequence
  Synthetic oligonucleotide
cgagccaaatcgcgggacgatagacgtttt

SEQ ID NO: 125800 - DNA, 30 bp, Artificial Sequence
  Synthetic oligonucleotide
cgggatcaagtcccaatgcaggtacgtttt

SEQ ID NO: 125801 - DNA, 30 bp, Artificial Sequence
  Synthetic oligonucleotide
ggactgcacagcgcaggaaggcctcgtttt

SEQ ID NO: 125802 - DNA, 30 bp, Artificial Sequence
  Synthetic oligonucleotide
ggtgaggtgagagacatcggtaatggtttt

SEQ ID NO: 125803 - DNA, 30 bp, Artificial Sequence
  Synthetic oligonucleotide
gcgctagctgacaacatatccgattgtttt

SEQ ID NO: 125804 - DNA, 30 bp, Artificial Sequence
  Synthetic oligonucleotide
gacggtcgttggcaccttcctctttgtttt

SEQ ID NO: 125805 - DNA, 30 bp, Artificial Sequence
  Synthetic oligonucleotide
gctgcaacaggctagctacgactaattttt

SEQ ID NO: 125806 - DNA, 30 bp, Artificial Sequence
  Synthetic oligonucleotide
cacggccccgaggcccagctgctcattttt

SEQ ID NO: 125807 - DNA, 30 bp, Artificial Sequence
  Synthetic oligonucleotide
agtgtcgcgcaaaggatacgaaaaaaaaaa

SEQ ID NO: 125808 - DNA, 30 bp, Artificial Sequence
  Synthetic oligonucleotide
acgcatagcgcgagacgtgcctgcaaaaaa

SEQ ID NO: 125809 - DNA, 30 bp, Artificial Sequence
  Synthetic oligonucleotide
atagtgtaacccgaaagtaagttgaaaaaa

SEQ ID NO: 125810 - DNA, 30 bp, Artificial Sequence
  Synthetic oligonucleotide
gtgcacaagaagcaaggagccgataaaaaa

SEQ ID NO: 125811 - DNA, 30 bp, Artificial Sequence
  Synthetic oligonucleotide
cgagtcgcgcaatcaactagatgacaaaaa

SEQ ID NO: 125812 - DNA, 30 bp, Artificial Sequence
  Synthetic oligonucleotide
gacatcgatgttgcgtcttcgctccaaaaa

SEQ ID NO: 125813 - DNA, 30 bp, Artificial Sequence
  Synthetic oligonucleotide
aagcgttgggcgcttgggtcgcatcaaaaa

SEQ ID NO: 125814 - DNA, 30 bp, Artificial Sequence
  Synthetic oligonucleotide
gtgcttcattaactcggagtgaaagaaaaa

SEQ ID NO: 125815 - DNA, 30 bp, Artificial Sequence
  Synthetic oligonucleotide
gacggtcatgaggagctatggacagaaaaa

SEQ ID NO: 125816 - DNA, 30 bp, Artificial Sequence
  Synthetic oligonucleotide
ttcgacgcatcagtcgaacgtgccgaaaaa

SEQ ID NO: 125817 - DNA, 30 bp, Artificial Sequence
  Synthetic oligonucleotide
caagactggacttgtaaccatagcgaaaaa

SEQ ID NO: 125818 - DNA, 30 bp, Artificial Sequence
  Synthetic oligonucleotide
ctgatgtggatgttgatagagccgtaaaaa

SEQ ID NO: 125819 - DNA, 30 bp, Artificial Sequence
  Synthetic oligonucleotide
acgaaagtagaacgggttccccggtaaaaa

SEQ ID NO: 125820 - DNA, 30 bp, Artificial Sequence
  Synthetic oligonucleotide
gaagtcagggggccttaattagggtaaaaa

SEQ ID NO: 125821 - DNA, 30 bp, Artificial Sequence
  Synthetic oligonucleotide
atcccacacactagtgttaacccttaaaaa

SEQ ID NO: 125822 - DNA, 30 bp, Artificial Sequence
  Synthetic oligonucleotide
gggttcccgtaggtaagtaaagtttaaaaa

SEQ ID NO: 125823 - DNA, 30 bp, Artificial Sequence
  Synthetic oligonucleotide
ggggggggtcttagtgaacagggaacaaaa

SEQ ID NO: 125824 - DNA, 30 bp, Artificial Sequence
  Synthetic oligonucleotide
attcccacgggaagagtagcagggacaaaa

SEQ ID NO: 125825 - DNA, 30 bp, Artificial Sequence
  Synthetic oligonucleotide
cacagggtccctgttggtcacgtgacaaaa

SEQ ID NO: 125826 - DNA, 30 bp, Artificial Sequence
  Synthetic oligonucleotide
gagaaagaaaccattgtcaccgttacaaaa

SEQ ID NO: 125827 - DNA, 30 bp, Artificial Sequence
  Synthetic oligonucleotide
gaggatagcaacaggataacgtacccaaaa

SEQ ID NO: 125828 - DNA, 30 bp, Artificial Sequence
  Synthetic oligonucleotide
agttacgttaagcctgggggtagcgcaaaa

SEQ ID NO: 125829 - DNA, 30 bp, Artificial Sequence
  Synthetic oligonucleotide
tcattatctccagatctcgtgcgcgcaaaa

SEQ ID NO: 125830 - DNA, 30 bp, Artificial Sequence
  Synthetic oligonucleotide
ggcagctcgacattcctctgcccatcaaaa

SEQ ID NO: 125831 - DNA, 30 bp, Artificial Sequence
  Synthetic oligonucleotide
cgaatcgttgaagcatgttcctgctcaaaa

SEQ ID NO: 125832 - DNA, 30 bp, Artificial Sequence
  Synthetic oligonucleotide
gcggtgagctggcgaactcgctaaagaaaa

SEQ ID NO: 125833 - DNA, 30 bp, Artificial Sequence
  Synthetic oligonucleotide
cgtggacgcccgtagagtagcacaagaaaa

SEQ ID NO: 125834 - DNA, 30 bp, Artificial Sequence
  Synthetic oligonucleotide
ggcgcaccgtcgggcaaattgagaagaaaa

SEQ ID NO: 125835 - DNA, 30 bp, Artificial Sequence
  Synthetic oligonucleotide
caccgaacgagcccctaggctttaagaaaa

SEQ ID NO: 125836 - DNA, 40 bp, Artificial Sequence
  Synthetic oligonucleotide
acggtgttcggcaaagtaatcgggtaggcgttggagaaaa

SEQ ID NO: 125837 - DNA, 30 bp, Artificial Sequence
  Synthetic oligonucleotide
gaacagaacgagagacacttcttgagaaaa

SEQ ID NO: 125838 - DNA, 30 bp, Artificial Sequence
  Synthetic oligonucleotide
agccgtactgaccgctccccagatagaaaa

SEQ ID NO: 125839 - DNA, 30 bp, Artificial Sequence
  Synthetic oligonucleotide
attcgcacagcagagattacaaaacgaaaa

SEQ ID NO: 125840 - DNA, 30 bp, Artificial Sequence
  Synthetic oligonucleotide
acggaggctcgtcagaggagttaccgaaaa

SEQ ID NO: 125841 - DNA, 31 bp, Artificial Sequence
  Synthetic oligonucleotide
gctagttcaaggcgtggaggcgacgcgaaaa

SEQ ID NO: 125842 - DNA, 30 bp, Artificial Sequence
  Synthetic oligonucleotide
aatgcagatagggttgaaaggtcgcgaaaa

SEQ ID NO: 125843 - DNA, 30 bp, Artificial Sequence
  Synthetic oligonucleotide
attgaaaatatatagacatccatgcgaaaa

SEQ ID NO: 125844 - DNA, 31 bp, Artificial Sequence
  Synthetic oligonucleotide
agcgtagcatgacgtgagaacattgggaaaa

SEQ ID NO: 125845 - DNA, 30 bp, Artificial Sequence
  Synthetic oligonucleotide
ctcgcagagttaaaagaatgtttgggaaaa

SEQ ID NO: 125846 - DNA, 30 bp, Artificial Sequence
  Synthetic oligonucleotide
cacctcggtcaagaaggggaagactgaaaa

SEQ ID NO: 125847 - DNA, 30 bp, Artificial Sequence
  Synthetic oligonucleotide
aaagaagggcgcaggatagcctactgaaaa

SEQ ID NO: 125848 - DNA, 30 bp, Artificial Sequence
  Synthetic oligonucleotide
cgcccgaaaagtctgctcgaagtctgaaaa

SEQ ID NO: 125849 - DNA, 30 bp, Artificial Sequence
  Synthetic oligonucleotide
gagtaaactgtgggttaggggcggtgaaaa

SEQ ID NO: 125850 - DNA, 30 bp, Artificial Sequence
  Synthetic oligonucleotide
tggtatgtctttgcacactaatggtgaaaa

SEQ ID NO: 125851 - DNA, 30 bp, Artificial Sequence
  Synthetic oligonucleotide
tggtgcacctagcccgacaaaggttgaaaa

SEQ ID NO: 125852 - DNA, 30 bp, Artificial Sequence
  Synthetic oligonucleotide
agagaagacaagtcaccagtaggttgaaaa

SEQ ID NO: 125853 - DNA, 30 bp, Artificial Sequence
  Synthetic oligonucleotide
cgatgttctcgatagttcatatgcataaaa

SEQ ID NO: 125854 - DNA, 30 bp, Artificial Sequence
  Synthetic oligonucleotide
taagtaaaccccatgaagcatccgataaaa

SEQ ID NO: 125855 - DNA, 30 bp, Artificial Sequence
  Synthetic oligonucleotide
gctgactacaaaaattggctttatataaaa

SEQ ID NO: 125856 - DNA, 30 bp, Artificial Sequence
  Synthetic oligonucleotide
cgtatgcagggaaaaagctacagtataaaa

SEQ ID NO: 125857 - DNA, 30 bp, Artificial Sequence
  Synthetic oligonucleotide
taaaatgtagggataaggatctacctaaaa

SEQ ID NO: 125858 - DNA, 30 bp, Artificial Sequence
  Synthetic oligonucleotide
tgtacaagggcctgtaaatcgtccctaaaa

SEQ ID NO: 125859 - DNA, 30 bp, Artificial Sequence
  Synthetic oligonucleotide
atgatctaaaccagacaaccacagctaaaa

SEQ ID NO: 125860 - DNA, 30 bp, Artificial Sequence
  Synthetic oligonucleotide
ccaactagtatgtgttagcaccatctaaaa

SEQ ID NO: 125861 - DNA, 30 bp, Artificial Sequence
  Synthetic oligonucleotide
actaaccgggaatggtctttcgctctaaaa

SEQ ID NO: 125862 - DNA, 30 bp, Artificial Sequence
  Synthetic oligonucleotide
ccgtaatttagcaaccaggagtctctaaaa

SEQ ID NO: 125863 - DNA, 30 bp, Artificial Sequence
  Synthetic oligonucleotide
ggcaacgctatgctcaccgtaacagtaaaa

SEQ ID NO: 125864 - DNA, 30 bp, Artificial Sequence
  Synthetic oligonucleotide
ggccaacgctacttaaggccagcagtaaaa

SEQ ID NO: 125865 - DNA, 30 bp, Artificial Sequence
  Synthetic oligonucleotide
taagtcctgcaaggcatttgggcagtaaaa

SEQ ID NO: 125866 - DNA, 30 bp, Artificial Sequence
  Synthetic oligonucleotide
cacgttgtagttggtgctccctatgtaaaa

SEQ ID NO: 125867 - DNA, 30 bp, Artificial Sequence
  Synthetic oligonucleotide
catacttgacctggtgtggcctttgtaaaa

SEQ ID NO: 125868 - DNA, 30 bp, Artificial Sequence
  Synthetic oligonucleotide
atcaaaacacacgtaaacaacccattaaaa

SEQ ID NO: 125869 - DNA, 30 bp, Artificial Sequence
  Synthetic oligonucleotide
ctacatcccagtatagagaataccttaaaa

SEQ ID NO: 125870 - DNA, 30 bp, Artificial Sequence
  Synthetic oligonucleotide
tgatactagagcaagggggagcgcttaaaa

SEQ ID NO: 125871 - DNA, 30 bp, Artificial Sequence
  Synthetic oligonucleotide
agattagtcgggatggttatgagaaacaaa

SEQ ID NO: 125872 - DNA, 30 bp, Artificial Sequence
  Synthetic oligonucleotide
tctaccaaacgtccatcgctgcgcaacaaa

SEQ ID NO: 125873 - DNA, 30 bp, Artificial Sequence
  Synthetic oligonucleotide
ggcagtagctactccgcatgcacgaacaaa

SEQ ID NO: 125874 - DNA, 30 bp, Artificial Sequence
  Synthetic oligonucleotide
tcaatatattgtgtatcgctaatgaacaaa

SEQ ID NO: 125875 - DNA, 30 bp, Artificial Sequence
  Synthetic oligonucleotide
aggagcagccgatgagtcggacctaacaaa

SEQ ID NO: 125876 - DNA, 30 bp, Artificial Sequence
  Synthetic oligonucleotide
gtttcggggcttgagacgtataagcacaaa

SEQ ID NO: 125877 - DNA, 30 bp, Artificial Sequence
  Synthetic oligonucleotide
ggatcgatgtgattgatgatagagcacaaa

SEQ ID NO: 125878 - DNA, 30 bp, Artificial Sequence
  Synthetic oligonucleotide
ttgatgggtaggggattaaggattcacaaa

SEQ ID NO: 125879 - DNA, 30 bp, Artificial Sequence
  Synthetic oligonucleotide
gaacgagcgtttcaagcgcgcggagacaaa

SEQ ID NO: 125880 - DNA, 30 bp, Artificial Sequence
  Synthetic oligonucleotide
gagcgccccagtggtggctgccgcgacaaa

SEQ ID NO: 125881 - DNA, 30 bp, Artificial Sequence
  Synthetic oligonucleotide
ccgaagccgacacttagtagagtcgacaaa

SEQ ID NO: 125882 - DNA, 30 bp, Artificial Sequence
  Synthetic oligonucleotide
gaagatgggtatgagcgcacggcctacaaa

SEQ ID NO: 125883 - DNA, 30 bp, Artificial Sequence
  Synthetic oligonucleotide
gtagcatagaatgcaccactagtctacaaa

SEQ ID NO: 125884 - DNA, 30 bp, Artificial Sequence
  Synthetic oligonucleotide
cggccgagtccagaagctcctgcttacaaa

SEQ ID NO: 125885 - DNA, 30 bp, Artificial Sequence
  Synthetic oligonucleotide
ccgtttgcacgtccttgaggaaacaccaaa

SEQ ID NO: 125886 - DNA, 30 bp, Artificial Sequence
  Synthetic oligonucleotide
tccccggtcagaagaacactgagtaccaaa

SEQ ID NO: 125887 - DNA, 30 bp, Artificial Sequence
  Synthetic oligonucleotide
aaggacccaacagtcccgagcacacccaaa

SEQ ID NO: 125888 - DNA, 30 bp, Artificial Sequence
  Synthetic oligonucleotide
ctgaccggcccacaacgctatgcagccaaa

SEQ ID NO: 125889 - DNA, 30 bp, Artificial Sequence
  Synthetic oligonucleotide
caggtgatagggattaccagatacgccaaa

SEQ ID NO: 125890 - DNA, 30 bp, Artificial Sequence
  Synthetic oligonucleotide
gtcgggcgaatattctgatatctggccaaa

SEQ ID NO: 125891 - DNA, 30 bp, Artificial Sequence
  Synthetic oligonucleotide
aggacgtagggggtaggtttgatcagcaaa

SEQ ID NO: 125892 - DNA, 30 bp, Artificial Sequence
  Synthetic oligonucleotide
tataagaggttcgatttctgtgtgagcaaa

SEQ ID NO: 125893 - DNA, 30 bp, Artificial Sequence
  Synthetic oligonucleotide
caaagcaacttaagcgtcgtggatagcaaa

SEQ ID NO: 125894 - DNA, 30 bp, Artificial Sequence
  Synthetic oligonucleotide
gatcctttccagggcaaagacacacgcaaa

SEQ ID NO: 125895 - DNA, 30 bp, Artificial Sequence
  Synthetic oligonucleotide
aatgaagttccgtccacagggagacgcaaa

SEQ ID NO: 125896 - DNA, 30 bp, Artificial Sequence
  Synthetic oligonucleotide
agagtcggcacgcactggggcggacgcaaa

SEQ ID NO: 125897 - DNA, 30 bp, Artificial Sequence
  Synthetic oligonucleotide
acgacgcccgcatctcgtctcccccgcaaa

SEQ ID NO: 125898 - DNA, 30 bp, Artificial Sequence
  Synthetic oligonucleotide
gttttgcccgaggaagacgccgtccgcaaa

SEQ ID NO: 125899 - DNA, 30 bp, Artificial Sequence
  Synthetic oligonucleotide
tcaacagtccagataaatgcgtcgcgcaaa

SEQ ID NO: 125900 - DNA, 30 bp, Artificial Sequence
  Synthetic oligonucleotide
cgacgcaagcgctaagcggccaaaggcaaa

SEQ ID NO: 125901 - DNA, 30 bp, Artificial Sequence
  Synthetic oligonucleotide
cgcccatggactcgcggcccaaatggcaaa

SEQ ID NO: 125902 - DNA, 30 bp, Artificial Sequence
  Synthetic oligonucleotide
atggatggattaaacgtagcctttggcaaa

SEQ ID NO: 125903 - DNA, 30 bp, Artificial Sequence
  Synthetic oligonucleotide
gacgcgtcagcctatctaaagacctgcaaa

SEQ ID NO: 125904 - DNA, 30 bp, Artificial Sequence
  Synthetic oligonucleotide
acttccgcaaagacgccaagcccgtgcaaa

SEQ ID NO: 125905 - DNA, 30 bp, Artificial Sequence
  Synthetic oligonucleotide
tgcctagtgtgaggataatccttaatcaaa

SEQ ID NO: 125906 - DNA, 30 bp, Artificial Sequence
  Synthetic oligonucleotide
ccactcactgacacacacccgtcgatcaaa

SEQ ID NO: 125907 - DNA, 30 bp, Artificial Sequence
  Synthetic oligonucleotide
gacggcatagacatcctccgaggtatcaaa

SEQ ID NO: 125908 - DNA, 30 bp, Artificial Sequence
  Synthetic oligonucleotide
ggtaaaagttcagtgctagtacgcctcaaa

SEQ ID NO: 125909 - DNA, 30 bp, Artificial Sequence
  Synthetic oligonucleotide
agggtgccaaaagaggttctaggcctcaaa

SEQ ID NO: 125910 - DNA, 30 bp, Artificial Sequence
  Synthetic oligonucleotide
cctgggtacggcgtactttgagagctcaaa

SEQ ID NO: 125911 - DNA, 30 bp, Artificial Sequence
  Synthetic oligonucleotide
atcgactgatcgtgtgcccaatggctcaaa

SEQ ID NO: 125912 - DNA, 30 bp, Artificial Sequence
  Synthetic oligonucleotide
cagcggaaaccgggattcataggtctcaaa

SEQ ID NO: 125913 - DNA, 30 bp, Artificial Sequence
  Synthetic oligonucleotide
ttggtcgtgtctagaggacgtgaagtcaaa

SEQ ID NO: 125914 - DNA, 30 bp, Artificial Sequence
  Synthetic oligonucleotide
ctggggctgacgaagtctgtataagtcaaa

SEQ ID NO: 125915 - DNA, 30 bp, Artificial Sequence
  Synthetic oligonucleotide
tactacaacatgggtaaatacatagtcaaa

SEQ ID NO: 125916 - DNA, 30 bp, Artificial Sequence
  Synthetic oligonucleotide
acggcgacgtttagatgctatatggtcaaa

SEQ ID NO: 125917 - DNA, 30 bp, Artificial Sequence
  Synthetic oligonucleotide
aacatatttcgacgactaaataatgtcaaa

SEQ ID NO: 125918 - DNA, 30 bp, Artificial Sequence
  Synthetic oligonucleotide
ggggtcacgatctgtcgcccgattttcaaa

SEQ ID NO: 125919 - DNA, 30 bp, Artificial Sequence
  Synthetic oligonucleotide
gaaagagaggttgtcatggaaggaaagaaa

SEQ ID NO: 125920 - DNA, 30 bp, Artificial Sequence
  Synthetic oligonucleotide
gttgacggaaagaatatgtacgacaagaaa

SEQ ID NO: 125921 - DNA, 30 bp, Artificial Sequence
  Synthetic oligonucleotide
actgaggcctggactaccgttcccaagaaa

SEQ ID NO: 125922 - DNA, 30 bp, Artificial Sequence
  Synthetic oligonucleotide
catgatgaaaagtggcccggcaagaagaaa

SEQ ID NO: 125923 - DNA, 31 bp, Artificial Sequence
  Synthetic oligonucleotide
agtggcacgtgggttacttctggtgaagaaa

SEQ ID NO: 125924 - DNA, 30 bp, Artificial Sequence
  Synthetic oligonucleotide
gtaggtcagtgggatagagagtctaagaaa

SEQ ID NO: 125925 - DNA, 30 bp, Artificial Sequence
  Synthetic oligonucleotide
gataggaaatctgaccgaaccgaacagaaa

SEQ ID NO: 125926 - DNA, 30 bp, Artificial Sequence
  Synthetic oligonucleotide
cattgagcgttaagataaataaaccagaaa

SEQ ID NO: 125927 - DNA, 30 bp, Artificial Sequence
  Synthetic oligonucleotide
gagctaaagctcaacttggaggatcagaaa

SEQ ID NO: 125928 - DNA, 30 bp, Artificial Sequence
  Synthetic oligonucleotide
agcacagtgtatggttaatgctctcagaaa

SEQ ID NO: 125929 - DNA, 30 bp, Artificial Sequence
  Synthetic oligonucleotide
tgaatcgagaggggttgccggccggagaaa

SEQ ID NO: 125930 - DNA, 31 bp, Artificial Sequence
  Synthetic oligonucleotide
ggctatacagccaaaaacgatcctggagaaa

SEQ ID NO: 125931 - DNA, 30 bp, Artificial Sequence
  Synthetic oligonucleotide
aagttgatatcggataggaccacctagaaa

SEQ ID NO: 125932 - DNA, 30 bp, Artificial Sequence
  Synthetic oligonucleotide
ggcccagtttatggaggccaatagtagaaa

SEQ ID NO: 125933 - DNA, 30 bp, Artificial Sequence
  Synthetic oligonucleotide
cggcctcacacggcgagtgcaccttagaaa

SEQ ID NO: 125934 - DNA, 30 bp, Artificial Sequence
  Synthetic oligonucleotide
caactgaagggggttcacgtgtgttagaaa

SEQ ID NO: 125935 - DNA, 30 bp, Artificial Sequence
  Synthetic oligonucleotide
ttaaacgaggataaatccgaggaaacgaaa

SEQ ID NO: 125936 - DNA, 30 bp, Artificial Sequence
  Synthetic oligonucleotide
ttcaagcaaaactccaggaaacccacgaaa

SEQ ID NO: 125937 - DNA, 30 bp, Artificial Sequence
  Synthetic oligonucleotide
gcctgaaactgcgttatagatttgacgaaa

SEQ ID NO: 125938 - DNA, 30 bp, Artificial Sequence
  Synthetic oligonucleotide
gcaacctaaatcaatgcctcatgtacgaaa

SEQ ID NO: 125939 - DNA, 30 bp, Artificial Sequence
  Synthetic oligonucleotide
ccatggaacaacgttgtaggacaaccgaaa

SEQ ID NO: 125940 - DNA, 30 bp, Artificial Sequence
  Synthetic oligonucleotide
taggcactgggaacaatacagaccccgaaa

SEQ ID NO: 125941 - DNA, 30 bp, Artificial Sequence
  Synthetic oligonucleotide
gtaaaatatccaacgagtaactccccgaaa

SEQ ID NO: 125942 - DNA, 30 bp, Artificial Sequence
  Synthetic oligonucleotide
cagacaggtgatcgccagtctggcccgaaa

SEQ ID NO: 125943 - DNA, 30 bp, Artificial Sequence
  Synthetic oligonucleotide
ttgtcggacagtgaggccagaacgccgaaa

SEQ ID NO: 125944 - DNA, 30 bp, Artificial Sequence
  Synthetic oligonucleotide
ttaaatcaggtgactactgcgaggccgaaa

SEQ ID NO: 125945 - DNA, 30 bp, Artificial Sequence
  Synthetic oligonucleotide
agtgaggtagagttggcggcaatgccgaaa

SEQ ID NO: 125946 - DNA, 30 bp, Artificial Sequence
  Synthetic oligonucleotide
gaggccaatcggctaatatcactagcgaaa

SEQ ID NO: 125947 - DNA, 30 bp, Artificial Sequence
  Synthetic oligonucleotide
acgaacttccacgaatgtcgcgccgcgaaa

SEQ ID NO: 125948 - DNA, 30 bp, Artificial Sequence
  Synthetic oligonucleotide
tagagaggcaagcggagcagcagggcgaaa

SEQ ID NO: 125949 - DNA, 30 bp, Artificial Sequence
  Synthetic oligonucleotide
ggctagctagagtctactgggtgggcgaaa

SEQ ID NO: 125950 - DNA, 30 bp, Artificial Sequence
  Synthetic oligonucleotide
tgtacaatagagtcactcttcatggcgaaa

SEQ ID NO: 125951 - DNA, 30 bp, Artificial Sequence
  Synthetic oligonucleotide
tctcaggtaaaaatgactagtatggcgaaa

SEQ ID NO: 125952 - DNA, 30 bp, Artificial Sequence
  Synthetic oligonucleotide
acactcgaataaaagtcctgaaatgcgaaa

SEQ ID NO: 125953 - DNA, 28 bp, Artificial Sequence
  Synthetic oligonucleotide
cagataggacctgtgtgtaaaatcgaaa

SEQ ID NO: 125954 - DNA, 30 bp, Artificial Sequence
  Synthetic oligonucleotide
gtgattgtctagcgatcatgataatcgaaa

SEQ ID NO: 125955 - DNA, 30 bp, Artificial Sequence
  Synthetic oligonucleotide
ttcgggaagcttagaaaccactaatcgaaa

SEQ ID NO: 125956 - DNA, 30 bp, Artificial Sequence
  Synthetic oligonucleotide
acatcttctctggactgggttttatcgaaa

SEQ ID NO: 125957 - DNA, 30 bp, Artificial Sequence
  Synthetic oligonucleotide
attgaagagagacaggcatagggctcgaaa

SEQ ID NO: 125958 - DNA, 30 bp, Artificial Sequence
  Synthetic oligonucleotide
gttcgagccgtaagtgtaggcccgtcgaaa

SEQ ID NO: 125959 - DNA, 30 bp, Artificial Sequence
  Synthetic oligonucleotide
ataaagaaagtagcccaaccgttttcgaaa

SEQ ID NO: 125960 - DNA, 30 bp, Artificial Sequence
  Synthetic oligonucleotide
tgtcttaggcaggggaaaccccgaaggaaa

SEQ ID NO: 125961 - DNA, 30 bp, Artificial Sequence
  Synthetic oligonucleotide
cccaatggaataccatagagaaagaggaaa

SEQ ID NO: 125962 - DNA, 30 bp, Artificial Sequence
  Synthetic oligonucleotide
ctgtcgtcgctggcggaatgaaagaggaaa

SEQ ID NO: 125963 - DNA, 30 bp, Artificial Sequence
  Synthetic oligonucleotide
gaggaattccgtggggagaaacagaggaaa

SEQ ID NO: 125964 - DNA, 30 bp, Artificial Sequence
  Synthetic oligonucleotide
caacgaagacgtttgggtataccgaggaaa

SEQ ID NO: 125965 - DNA, 30 bp, Artificial Sequence
  Synthetic oligonucleotide
cctccgatcttgctagagcttgggaggaaa

SEQ ID NO: 125966 - DNA, 30 bp, Artificial Sequence
  Synthetic oligonucleotide
gctatggagatctacatgtgatggaggaaa

SEQ ID NO: 125967 - DNA, 30 bp, Artificial Sequence
  Synthetic oligonucleotide
gggtgtaactgtacggtcgagaataggaaa

SEQ ID NO: 125968 - DNA, 30 bp, Artificial Sequence
  Synthetic oligonucleotide
gtcgtatacgattgagtgaactttaggaaa

SEQ ID NO: 125969 - DNA, 30 bp, Artificial Sequence
  Synthetic oligonucleotide
tagaccgatgctaactcaaatagccggaaa

SEQ ID NO: 125970 - DNA, 30 bp, Artificial Sequence
  Synthetic oligonucleotide
tatgacagactgattaggggtccgcggaaa

SEQ ID NO: 125971 - DNA, 30 bp, Artificial Sequence
  Synthetic oligonucleotide
tgggcctgggttacatcttaagtgcggaaa

SEQ ID NO: 125972 - DNA, 30 bp, Artificial Sequence
  Synthetic oligonucleotide
cggtaacccgtgacaaggagtaatcggaaa

SEQ ID NO: 125973 - DNA, 30 bp, Artificial Sequence
  Synthetic oligonucleotide
ataatcatacatacaatatgttttcggaaa

SEQ ID NO: 125974 - DNA, 31 bp, Artificial Sequence
  Synthetic oligonucleotide
atagagctcagtgtacaaatacgtatggaaa

SEQ ID NO: 125975 - DNA, 30 bp, Artificial Sequence
  Synthetic oligonucleotide
tcgggatccactatcaacaaacgctggaaa

SEQ ID NO: 125976 - DNA, 30 bp, Artificial Sequence
  Synthetic oligonucleotide
gggaggacgacattgggtagatgttggaaa

SEQ ID NO: 125977 - DNA, 30 bp, Artificial Sequence
  Synthetic oligonucleotide
catggcttgaatatctttctatgttggaaa

SEQ ID NO: 125978 - DNA, 30 bp, Artificial Sequence
  Synthetic oligonucleotide
agaattgcctggctaaggtatcccatgaaa

SEQ ID NO: 125979 - DNA, 30 bp, Artificial Sequence
  Synthetic oligonucleotide
tggccggaggtgttagagagaaggatgaaa

SEQ ID NO: 125980 - DNA, 30 bp, Artificial Sequence
  Synthetic oligonucleotide
taccaaaccgaccatcggcacatactgaaa

SEQ ID NO: 125981 - DNA, 30 bp, Artificial Sequence
  Synthetic oligonucleotide
gttcgtcacccgatggagaaatacctgaaa

SEQ ID NO: 125982 - DNA, 30 bp, Artificial Sequence
  Synthetic oligonucleotide
aagtcagtttggcgagtgcctcccctgaaa

SEQ ID NO: 125983 - DNA, 30 bp, Artificial Sequence
  Synthetic oligonucleotide
tcgagctctcctattggagttcgcctgaaa

SEQ ID NO: 125984 - DNA, 30 bp, Artificial Sequence
  Synthetic oligonucleotide
ggcaagatggggtcaagcccagcgctgaaa

SEQ ID NO: 125985 - DNA, 30 bp, Artificial Sequence
  Synthetic oligonucleotide
acagtacaccgtcgtgcaccgcatctgaaa

SEQ ID NO: 125986 - DNA, 30 bp, Artificial Sequence
  Synthetic oligonucleotide
gaagacgcaggctgaatggacgaggtgaaa

SEQ ID NO: 125987 - DNA, 30 bp, Artificial Sequence
  Synthetic oligonucleotide
ccgccaccaagtgctcattgcttgaataaa

SEQ ID NO: 125988 - DNA, 30 bp, Artificial Sequence
  Synthetic oligonucleotide
cgtggaacattcagcgcgggcggtaataaa

SEQ ID NO: 125989 - DNA, 30 bp, Artificial Sequence
  Synthetic oligonucleotide
gaccccgcagtcgcccacaatgaacataaa

SEQ ID NO: 125990 - DNA, 30 bp, Artificial Sequence
  Synthetic oligonucleotide
tcggcgctgttgtgactgtaccgacataaa

SEQ ID NO: 125991 - DNA, 30 bp, Artificial Sequence
  Synthetic oligonucleotide
caaacagaccaagaaccgcacctacataaa

SEQ ID NO: 125992 - DNA, 30 bp, Artificial Sequence
  Synthetic oligonucleotide
ttcacggtctttagcgagtgagtgcataaa

SEQ ID NO: 125993 - DNA, 30 bp, Artificial Sequence
  Synthetic oligonucleotide
aatccgaagaaacttatcggcttgcataaa

SEQ ID NO: 125994 - DNA, 30 bp, Artificial Sequence
  Synthetic oligonucleotide
ttcatggaagaatgactgccgaatcataaa

SEQ ID NO: 125995 - DNA, 30 bp, Artificial Sequence
  Synthetic oligonucleotide
tagccccaacggcggctgaagactcataaa

SEQ ID NO: 125996 - DNA, 30 bp, Artificial Sequence
  Synthetic oligonucleotide
ctcgtactaaacaaattcggtcttcataaa

SEQ ID NO: 125997 - DNA, 30 bp, Artificial Sequence
  Synthetic oligonucleotide
agtctagagccggtgtgggtagttcataaa

SEQ ID NO: 125998 - DNA, 30 bp, Artificial Sequence
  Synthetic oligonucleotide
gcgcaggacagatgcaagtctttagataaa

SEQ ID NO: 125999 - DNA, 30 bp, Artificial Sequence
  Synthetic oligonucleotide
tacatggaacgcttattacagccggataaa

SEQ ID NO: 126000 - DNA, 30 bp, Artificial Sequence
  Synthetic oligonucleotide
gtggccaatggtcgtgagtgtatgtataaa

SEQ ID NO: 126001 - DNA, 30 bp, Artificial Sequence
  Synthetic oligonucleotide
cctcatgatgggatcaaccagcattataaa

SEQ ID NO: 126002 - DNA, 30 bp, Artificial Sequence
  Synthetic oligonucleotide
ggactgtgtatgttgtaagtagtaactaaa

SEQ ID NO: 126003 - DNA, 30 bp, Artificial Sequence
  Synthetic oligonucleotide
gtcaagcatcggaacatgtattgcactaaa

SEQ ID NO: 126004 - DNA, 30 bp, Artificial Sequence
  Synthetic oligonucleotide
gtctcggtacattcgcgttgtaagactaaa

SEQ ID NO: 126005 - DNA, 30 bp, Artificial Sequence
  Synthetic oligonucleotide
aggttccgtaaagtgttcaggacccctaaa

SEQ ID NO: 126006 - DNA, 31 bp, Artificial Sequence
  Synthetic oligonucleotide
ctggcgattaataaccgaccaggagcctaaa

SEQ ID NO: 126007 - DNA, 30 bp, Artificial Sequence
  Synthetic oligonucleotide
cacaccaaaagcggaagaagtgatcctaaa

SEQ ID NO: 126008 - DNA, 30 bp, Artificial Sequence
  Synthetic oligonucleotide
ctaacgggggcagggttacgcgaagctaaa

SEQ ID NO: 126009 - DNA, 30 bp, Artificial Sequence
  Synthetic oligonucleotide
gtcgatgggcatgacgcggtgctctctaaa

SEQ ID NO: 126010 - DNA, 30 bp, Artificial Sequence
  Synthetic oligonucleotide
atccacggcctcaggatccaaaccagtaaa

SEQ ID NO: 126011 - DNA, 30 bp, Artificial Sequence
  Synthetic oligonucleotide
ataattagcttacagaccctacttagtaaa

SEQ ID NO: 126012 - DNA, 30 bp, Artificial Sequence
  Synthetic oligonucleotide
tcgagcgtcaggcacttacccccacgtaaa

SEQ ID NO: 126013 - DNA, 30 bp, Artificial Sequence
  Synthetic oligonucleotide
agcaccttggaagcgtataatcatcgtaaa

SEQ ID NO: 126014 - DNA, 31 bp, Artificial Sequence
  Synthetic oligonucleotide
ttatggcgcgtgttaagcaggatttcgtaaa

SEQ ID NO: 126015 - DNA, 30 bp, Artificial Sequence
  Synthetic oligonucleotide
tcagcgtcgtacgaaggccagaaaggtaaa

SEQ ID NO: 126016 - DNA, 30 bp, Artificial Sequence
  Synthetic oligonucleotide
tcaacagagtagggagatgcttcttgtaaa

SEQ ID NO: 126017 - DNA, 30 bp, Artificial Sequence
  Synthetic oligonucleotide
tatcatggctcagagagatgcataattaaa

SEQ ID NO: 126018 - DNA, 30 bp, Artificial Sequence
  Synthetic oligonucleotide
ctaggttgtcgtgagctgccaaagattaaa

SEQ ID NO: 126019 - DNA, 30 bp, Artificial Sequence
  Synthetic oligonucleotide
cactgacagtgagtcacgtacttgattaaa

SEQ ID NO: 126020 - DNA, 30 bp, Artificial Sequence
  Synthetic oligonucleotide
gcgaaagggactccttttcgccctattaaa

SEQ ID NO: 126021 - DNA, 30 bp, Artificial Sequence
  Synthetic oligonucleotide
gagaggacaacagagatgcaccaagttaaa

SEQ ID NO: 126022 - DNA, 30 bp, Artificial Sequence
  Synthetic oligonucleotide
cgacaactcgggcaacgcccggcagttaaa

SEQ ID NO: 126023 - DNA, 30 bp, Artificial Sequence
  Synthetic oligonucleotide
aggatagtcgagcagctcctattagttaaa

SEQ ID NO: 126024 - DNA, 30 bp, Artificial Sequence
  Synthetic oligonucleotide
tcttaccgaattcgccatatgtacgttaaa

SEQ ID NO: 126025 - DNA, 30 bp, Artificial Sequence
  Synthetic oligonucleotide
aagctcggacgtaagctaggaatggttaaa

SEQ ID NO: 126026 - DNA, 30 bp, Artificial Sequence
  Synthetic oligonucleotide
acgggtgtagtgataactaccactgttaaa

SEQ ID NO: 126027 - DNA, 30 bp, Artificial Sequence
  Synthetic oligonucleotide
acaaataagcacggttaacaatattttaaa

SEQ ID NO: 126028 - DNA, 31 bp, Artificial Sequence
  Synthetic oligonucleotide
aatcctgcgtggaaatacggtcaagcaacaa

SEQ ID NO: 126029 - DNA, 30 bp, Artificial Sequence
  Synthetic oligonucleotide
caacgtacttccatcttgggaccgcaacaa

SEQ ID NO: 126030 - DNA, 30 bp, Artificial Sequence
  Synthetic oligonucleotide
atagggcgtgcaggtgaccactggcaacaa

SEQ ID NO: 126031 - DNA, 30 bp, Artificial Sequence
  Synthetic oligonucleotide
aggctacaaatcgtcttatccctgcaacaa

SEQ ID NO: 126032 - DNA, 30 bp, Artificial Sequence
  Synthetic oligonucleotide
gcccactctgtaccagtacaaaatcaacaa

SEQ ID NO: 126033 - DNA, 30 bp, Artificial Sequence
  Synthetic oligonucleotide
ggcgtcgattaccaccgtgccaaagaacaa

SEQ ID NO: 126034 - DNA, 30 bp, Artificial Sequence
  Synthetic oligonucleotide
tcaggctccattcaaatcattatagaacaa

SEQ ID NO: 126035 - DNA, 30 bp, Artificial Sequence
  Synthetic oligonucleotide
gagggtataaacctttcgctgttggaacaa

SEQ ID NO: 126036 - DNA, 30 bp, Artificial Sequence
  Synthetic oligonucleotide
cacgaatacggggaccgcgacacataacaa

SEQ ID NO: 126037 - DNA, 30 bp, Artificial Sequence
  Synthetic oligonucleotide
tcgtcgactgcatcatcccacgcgtaacaa

SEQ ID NO: 126038 - DNA, 30 bp, Artificial Sequence
  Synthetic oligonucleotide
aataactcaataatcaaatgaatgtaacaa

SEQ ID NO: 126039 - DNA, 30 bp, Artificial Sequence
  Synthetic oligonucleotide
tactacttcgagatagatagttattaacaa

SEQ ID NO: 126040 - DNA, 30 bp, Artificial Sequence
  Synthetic oligonucleotide
cgattaattaaacttgaggagaccacacaa

SEQ ID NO: 126041 - DNA, 30 bp, Artificial Sequence
  Synthetic oligonucleotide
tcacgtaagagagtagcgactcgcacacaa

SEQ ID NO: 126042 - DNA, 30 bp, Artificial Sequence
  Synthetic oligonucleotide
acggagcgaaggcttttaagcggaccacaa

SEQ ID NO: 126043 - DNA, 30 bp, Artificial Sequence
  Synthetic oligonucleotide
atgcagttagcgctgggactgtggccacaa

SEQ ID NO: 126044 - DNA, 30 bp, Artificial Sequence
  Synthetic oligonucleotide
ctcgcaacggccaagacgggcactccacaa

SEQ ID NO: 126045 - DNA, 30 bp, Artificial Sequence
  Synthetic oligonucleotide
tcaaataatcagacctatgtcagagcacaa

SEQ ID NO: 126046 - DNA, 30 bp, Artificial Sequence
  Synthetic oligonucleotide
cagaatcacaatcggtccgggcaggcacaa

SEQ ID NO: 126047 - DNA, 30 bp, Artificial Sequence
  Synthetic oligonucleotide
ccaattcaaatgcctaagaaggaggcacaa

SEQ ID NO: 126048 - DNA, 30 bp, Artificial Sequence
  Synthetic oligonucleotide
tgggaacaatgttagtttcacgatgcacaa

SEQ ID NO: 126049 - DNA, 30 bp, Artificial Sequence
  Synthetic oligonucleotide
acgaaatagattctaggtcttttaagacaa

SEQ ID NO: 126050 - DNA, 30 bp, Artificial Sequence
  Synthetic oligonucleotide
aatccgtaagtggaatgggccctcagacaa

SEQ ID NO: 126051 - DNA, 30 bp, Artificial Sequence
  Synthetic oligonucleotide
tcatctcggttaatcgcattgcctagacaa

SEQ ID NO: 126052 - DNA, 30 bp, Artificial Sequence
  Synthetic oligonucleotide
ggcgcccctgtgtcgaggtaatctagacaa

SEQ ID NO: 126053 - DNA, 30 bp, Artificial Sequence
  Synthetic oligonucleotide
aaatcgtaactctggactcgtgaacgacaa

SEQ ID NO: 126054 - DNA, 30 bp, Artificial Sequence
  Synthetic oligonucleotide
gcaagtgaaacccacggttggttgcgacaa

SEQ ID NO: 126055 - DNA, 30 bp, Artificial Sequence
  Synthetic oligonucleotide
cacctataaaatccccgtcaaattcgacaa

SEQ ID NO: 126056 - DNA, 30 bp, Artificial Sequence
  Synthetic oligonucleotide
ttacgaatcctgggcgatcggggaggacaa

SEQ ID NO: 126057 - DNA, 30 bp, Artificial Sequence
  Synthetic oligonucleotide
catatgggcccttagccgtgaatcggacaa

SEQ ID NO: 126058 - DNA, 30 bp, Artificial Sequence
  Synthetic oligonucleotide
aggagtagctcaaataatcccatgggacaa

SEQ ID NO: 126059 - DNA, 30 bp, Artificial Sequence
  Synthetic oligonucleotide
ctctgtagacccataagatgttctggacaa

SEQ ID NO: 126060 - DNA, 30 bp, Artificial Sequence
  Synthetic oligonucleotide
aagatcagcggccagatgaatacaatacaa

SEQ ID NO: 126061 - DNA, 30 bp, Artificial Sequence
  Synthetic oligonucleotide
gataccgacatatataaaataggaatacaa

SEQ ID NO: 126062 - DNA, 30 bp, Artificial Sequence
  Synthetic oligonucleotide
tgcctaggtgcactgtgagaatccatacaa

SEQ ID NO: 126063 - DNA, 30 bp, Artificial Sequence
  Synthetic oligonucleotide
tgtcagttcgaccgagacttgcgtctacaa

SEQ ID NO: 126064 - DNA, 30 bp, Artificial Sequence
  Synthetic oligonucleotide
atccaacagcagcgctgtaaaagagtacaa

SEQ ID NO: 126065 - DNA, 30 bp, Artificial Sequence
  Synthetic oligonucleotide
ccccgaaaacctggtaagcctaccgtacaa

SEQ ID NO: 126066 - DNA, 30 bp, Artificial Sequence
  Synthetic oligonucleotide
gcgcggaatcaccaatccgctcgcgtacaa

SEQ ID NO: 126067 - DNA, 30 bp, Artificial Sequence
  Synthetic oligonucleotide
aggaattcggacccatatgctcgcgtacaa

SEQ ID NO: 126068 - DNA, 30 bp, Artificial Sequence
  Synthetic oligonucleotide
cgcttatgtgagacaaatgtgcgggtacaa

SEQ ID NO: 126069 - DNA, 30 bp, Artificial Sequence
  Synthetic oligonucleotide
cttgatatcggtcataggtcatatgtacaa

SEQ ID NO: 126070 - DNA, 30 bp, Artificial Sequence
  Synthetic oligonucleotide
cctaaaatttggccgggagaacgtgtacaa

SEQ ID NO: 126071 - DNA, 30 bp, Artificial Sequence
  Synthetic oligonucleotide
taaggctatttgccgagcaaaggattacaa

SEQ ID NO: 126072 - DNA, 30 bp, Artificial Sequence
  Synthetic oligonucleotide
agagtcgtagcactccataaatgattacaa

SEQ ID NO: 126073 - DNA, 30 bp, Artificial Sequence
  Synthetic oligonucleotide
actggaaactcgacatgaaggttattacaa

SEQ ID NO: 126074 - DNA, 30 bp, Artificial Sequence
  Synthetic oligonucleotide
cctgtctgaaatcaacccttcaacttacaa

SEQ ID NO: 126075 - DNA, 30 bp, Artificial Sequence
  Synthetic oligonucleotide
actgctaatagaaaaaggaaggtgttacaa

SEQ ID NO: 126076 - DNA, 30 bp, Artificial Sequence
  Synthetic oligonucleotide
ttcgcatctggaataagcatcataaaccaa

SEQ ID NO: 126077 - DNA, 30 bp, Artificial Sequence
  Synthetic oligonucleotide
gggatcagctgcaagcgccaaaccaaccaa

SEQ ID NO: 126078 - DNA, 30 bp, Artificial Sequence
  Synthetic oligonucleotide
gttacgtcggatctcctagaaccgaaccaa

SEQ ID NO: 126079 - DNA, 30 bp, Artificial Sequence
  Synthetic oligonucleotide
taaatctgaaaatttattggcccgaaccaa

SEQ ID NO: 126080 - DNA, 30 bp, Artificial Sequence
  Synthetic oligonucleotide
tatatgaggaaaaacgtccacgaacaccaa

SEQ ID NO: 126081 - DNA, 30 bp, Artificial Sequence
  Synthetic oligonucleotide
cgcggtccccgagcccagttcaaccaccaa

SEQ ID NO: 126082 - DNA, 30 bp, Artificial Sequence
  Synthetic oligonucleotide
agatacccacaaagacgattatgtcaccaa

SEQ ID NO: 126083 - DNA, 30 bp, Artificial Sequence
  Synthetic oligonucleotide
acttggatcgcgttagtaggagctgaccaa

SEQ ID NO: 126084 - DNA, 30 bp, Artificial Sequence
  Synthetic oligonucleotide
gcatgggcctgaatagaggctcaataccaa

SEQ ID NO: 126085 - DNA, 30 bp, Artificial Sequence
  Synthetic oligonucleotide
ttacctgttcacagggccgggatataccaa

SEQ ID NO: 126086 - DNA, 30 bp, Artificial Sequence
  Synthetic oligonucleotide
ggccactagccaacccgcctctaaacccaa

SEQ ID NO: 126087 - DNA, 30 bp, Artificial Sequence
  Synthetic oligonucleotide
atattgaagaatccctacccattaacccaa

SEQ ID NO: 126088 - DNA, 30 bp, Artificial Sequence
  Synthetic oligonucleotide
cgtgattcgccaatgataacgatcacccaa

SEQ ID NO: 126089 - DNA, 30 bp, Artificial Sequence
  Synthetic oligonucleotide
ttgagcgtgatgtccgctcgttagacccaa

SEQ ID NO: 126090 - DNA, 30 bp, Artificial Sequence
  Synthetic oligonucleotide
ttagacagccctcccaactcgtatacccaa

SEQ ID NO: 126091 - DNA, 30 bp, Artificial Sequence
  Synthetic oligonucleotide
acacaagcgtgagcgcgtttcgtcccccaa

SEQ ID NO: 126092 - DNA, 30 bp, Artificial Sequence
  Synthetic oligonucleotide
agcgcggcacacatctgactagagccccaa

SEQ ID NO: 126093 - DNA, 30 bp, Artificial Sequence
  Synthetic oligonucleotide
agcagggttcaaccataagtgagagcccaa

SEQ ID NO: 126094 - DNA, 30 bp, Artificial Sequence
  Synthetic oligonucleotide
aagaaggaggcacctctacaaggagcccaa

SEQ ID NO: 126095 - DNA, 30 bp, Artificial Sequence
  Synthetic oligonucleotide
aacagtacccataattcctcgtgcgcccaa

SEQ ID NO: 126096 - DNA, 30 bp, Artificial Sequence
  Synthetic oligonucleotide
ccacaattcagtactcgggggggggcccaa

SEQ ID NO: 126097 - DNA, 30 bp, Artificial Sequence
  Synthetic oligonucleotide
ccagctaactgcgagacattagttgcccaa

SEQ ID NO: 126098 - DNA, 30 bp, Artificial Sequence
  Synthetic oligonucleotide
tccggtactatccacgatttcgagtcccaa

SEQ ID NO: 126099 - DNA, 30 bp, Artificial Sequence
  Synthetic oligonucleotide
gtagcgcaccttatcctcggtagcagccaa

SEQ ID NO: 126100 - DNA, 30 bp, Artificial Sequence
  Synthetic oligonucleotide
cgtgtacaacgaactacttccgtgagccaa

SEQ ID NO: 126101 - DNA, 30 bp, Artificial Sequence
  Synthetic oligonucleotide
gtgttatagcaagagacccacgaccgccaa

SEQ ID NO: 126102 - DNA, 30 bp, Artificial Sequence
  Synthetic oligonucleotide
aatcgcaagatcgcatttgcgcgccgccaa

SEQ ID NO: 126103 - DNA, 30 bp, Artificial Sequence
  Synthetic oligonucleotide
acatttcgtgccagcgtaggtgcgcgccaa

SEQ ID NO: 126104 - DNA, 30 bp, Artificial Sequence
  Synthetic oligonucleotide
gcttagggcacccgggacgctgatcgccaa

SEQ ID NO: 126105 - DNA, 30 bp, Artificial Sequence
  Synthetic oligonucleotide
ttagccaccggaaaatcaacaggcggccaa

SEQ ID NO: 126106 - DNA, 30 bp, Artificial Sequence
  Synthetic oligonucleotide
gggcggtgacataagtaggagaatggccaa

SEQ ID NO: 126107 - DNA, 30 bp, Artificial Sequence
  Synthetic oligonucleotide
gccgaagggatttgggtcgtgtgatgccaa

SEQ ID NO: 126108 - DNA, 30 bp, Artificial Sequence
  Synthetic oligonucleotide
aactcgtcaactctacaaaccgcgtgccaa

SEQ ID NO: 126109 - DNA, 30 bp, Artificial Sequence
  Synthetic oligonucleotide
gtacggtgatattttccggcggtgtgccaa

SEQ ID NO: 126110 - DNA, 30 bp, Artificial Sequence
  Synthetic oligonucleotide
gctgggacctgagaaccgagataactccaa

SEQ ID NO: 126111 - DNA, 30 bp, Artificial Sequence
  Synthetic oligonucleotide
ggccctacacatctgcaggccaggctccaa

SEQ ID NO: 126112 - DNA, 30 bp, Artificial Sequence
  Synthetic oligonucleotide
agaagggggaacgctttgacggtgctccaa

SEQ ID NO: 126113 - DNA, 30 bp, Artificial Sequence
  Synthetic oligonucleotide
gtcacggaactcactcgattagaagtccaa

SEQ ID NO: 126114 - DNA, 30 bp, Artificial Sequence
  Synthetic oligonucleotide
tcgaacgtataatacgccggcaccgtccaa

SEQ ID NO: 126115 - DNA, 30 bp, Artificial Sequence
  Synthetic oligonucleotide
tgctacaacaactaaacatacagcgtccaa

SEQ ID NO: 126116 - DNA, 30 bp, Artificial Sequence
  Synthetic oligonucleotide
tgaggtcagtttgcaagtacgtcggtccaa

SEQ ID NO: 126117 - DNA, 30 bp, Artificial Sequence
  Synthetic oligonucleotide
ctgaccgacattcgaggtggacgcttccaa

SEQ ID NO: 126118 - DNA, 31 bp, Artificial Sequence
  Synthetic oligonucleotide
ggcatcgagtcatagacaagcctgcttccaa

SEQ ID NO: 126119 - DNA, 30 bp, Artificial Sequence
  Synthetic oligonucleotide
acaccgcgtggataagtgtatctgttccaa

SEQ ID NO: 126120 - DNA, 30 bp, Artificial Sequence
  Synthetic oligonucleotide
aggccgttgagtcgctcagcagatttccaa

SEQ ID NO: 126121 - DNA, 30 bp, Artificial Sequence
  Synthetic oligonucleotide
tagcaactcgtccaacacgtcgcaaagcaa

SEQ ID NO: 126122 - DNA, 30 bp, Artificial Sequence
  Synthetic oligonucleotide
atctcggtcgagcctttgacaagaaagcaa

SEQ ID NO: 126123 - DNA, 30 bp, Artificial Sequence
  Synthetic oligonucleotide
ttctccgaggccggcgttaaatgcaagcaa

SEQ ID NO: 126124 - DNA, 30 bp, Artificial Sequence
  Synthetic oligonucleotide
aacagagcggtgatacactgagagaagcaa

SEQ ID NO: 126125 - DNA, 30 bp, Artificial Sequence
  Synthetic oligonucleotide
acgattcggctcgatccgaggatgaagcaa

SEQ ID NO: 126126 - DNA, 30 bp, Artificial Sequence
  Synthetic oligonucleotide
taggtgcggtctaccgaaggtaataagcaa

SEQ ID NO: 126127 - DNA, 30 bp, Artificial Sequence
  Synthetic oligonucleotide
gcctggggttaaggagggtggcctaagcaa

SEQ ID NO: 126128 - DNA, 30 bp, Artificial Sequence
  Synthetic oligonucleotide
caagaatctagaaagggataaacacagcaa

SEQ ID NO: 126129 - DNA, 30 bp, Artificial Sequence
  Synthetic oligonucleotide
ccgggatgtcgtgtcgaatagcgacagcaa

SEQ ID NO: 126130 - DNA, 30 bp, Artificial Sequence
  Synthetic oligonucleotide
cgtgccggggcttagaagtgctgccagcaa

SEQ ID NO: 126131 - DNA, 30 bp, Artificial Sequence
  Synthetic oligonucleotide
agccgaggccatcctggaccaagagagcaa

SEQ ID NO: 126132 - DNA, 30 bp, Artificial Sequence
  Synthetic oligonucleotide
cctcggagggaatctaggtcagtagagcaa

SEQ ID NO: 126133 - DNA, 30 bp, Artificial Sequence
  Synthetic oligonucleotide
ggagtatcgatgcagaagtttagcgagcaa

SEQ ID NO: 126134 - DNA, 30 bp, Artificial Sequence
  Synthetic oligonucleotide
actgggagagtggagacgtagaaggagcaa

SEQ ID NO: 126135 - DNA, 30 bp, Artificial Sequence
  Synthetic oligonucleotide
ataagtctactgcggtaacgccaggagcaa

SEQ ID NO: 126136 - DNA, 30 bp, Artificial Sequence
  Synthetic oligonucleotide
caagctatacgaggttcagatcctgagcaa

SEQ ID NO: 126137 - DNA, 30 bp, Artificial Sequence
  Synthetic oligonucleotide
tccgagaataatgatacggtgattgagcaa

SEQ ID NO: 126138 - DNA, 31 bp, Artificial Sequence
  Synthetic oligonucleotide
gcgcgtacattgggatgttctcaaatagcaa

SEQ ID NO: 126139 - DNA, 30 bp, Artificial Sequence
  Synthetic oligonucleotide
tggcaaagcagtaggactaatgcatagcaa

SEQ ID NO: 126140 - DNA, 30 bp, Artificial Sequence
  Synthetic oligonucleotide
gaaatagtaaccttggggcctcactagcaa

SEQ ID NO: 126141 - DNA, 30 bp, Artificial Sequence
  Synthetic oligonucleotide
gggtggggattggtggggcacggttagcaa

SEQ ID NO: 126142 - DNA, 30 bp, Artificial Sequence
  Synthetic oligonucleotide
ggtaagcctagcagtgaaaatggttagcaa

SEQ ID NO: 126143 - DNA, 30 bp, Artificial Sequence
  Synthetic oligonucleotide
gatcaactgataaaagacatcgaaacgcaa

SEQ ID NO: 126144 - DNA, 30 bp, Artificial Sequence
  Synthetic oligonucleotide
acgcttgggcaccatatatactcgccgcaa

SEQ ID NO: 126145 - DNA, 30 bp, Artificial Sequence
  Synthetic oligonucleotide
agcgagcccgttaagcgaaaagtgccgcaa

SEQ ID NO: 126146 - DNA, 30 bp, Artificial Sequence
  Synthetic oligonucleotide
cactgctagatactatggtaccatgcgcaa

SEQ ID NO: 126147 - DNA, 30 bp, Artificial Sequence
  Synthetic oligonucleotide
caaggttaattatgcgtgtatggctcgcaa

SEQ ID NO: 126148 - DNA, 30 bp, Artificial Sequence
  Synthetic oligonucleotide
tcttggcggacactatggaaattctcgcaa

SEQ ID NO: 126149 - DNA, 30 bp, Artificial Sequence
  Synthetic oligonucleotide
aagcccgagagccagggagcgacgtcgcaa

SEQ ID NO: 126150 - DNA, 30 bp, Artificial Sequence
  Synthetic oligonucleotide
tcacatcgcaatatatagcttccgtcgcaa

SEQ ID NO: 126151 - DNA, 30 bp, Artificial Sequence
  Synthetic oligonucleotide
ccaggtatacagttcaatactgacaggcaa

SEQ ID NO: 126152 - DNA, 30 bp, Artificial Sequence
  Synthetic oligonucleotide
cgaaattcaatgcgtcttcactccaggcaa

SEQ ID NO: 126153 - DNA, 30 bp, Artificial Sequence
  Synthetic oligonucleotide
ctaacgaggcggactacttgctataggcaa

SEQ ID NO: 126154 - DNA, 30 bp, Artificial Sequence
  Synthetic oligonucleotide
gaggacagtatggcctgagaatctaggcaa

SEQ ID NO: 126155 - DNA, 30 bp, Artificial Sequence
  Synthetic oligonucleotide
ggaatacgcagagcacggtgcgagcggcaa

SEQ ID NO: 126156 - DNA, 30 bp, Artificial Sequence
  Synthetic oligonucleotide
gtatcccacagaagaacagggtatcggcaa

SEQ ID NO: 126157 - DNA, 30 bp, Artificial Sequence
  Synthetic oligonucleotide
ggacaaattggcagggtgcggacagggcaa

SEQ ID NO: 126158 - DNA, 30 bp, Artificial Sequence
  Synthetic oligonucleotide
aatcagcagagtaacgcgatctgagggcaa

SEQ ID NO: 126159 - DNA, 30 bp, Artificial Sequence
  Synthetic oligonucleotide
gtagaacctgtgtaaggaaagctagggcaa

SEQ ID NO: 126160 - DNA, 30 bp, Artificial Sequence
  Synthetic oligonucleotide
aagtaatgaaagctggatcaccgggggcaa

SEQ ID NO: 126161 - DNA, 30 bp, Artificial Sequence
  Synthetic oligonucleotide
gcgattctaaggtctcggctacctgggcaa

SEQ ID NO: 126162 - DNA, 30 bp, Artificial Sequence
  Synthetic oligonucleotide
atatatggacaaaaaccatgctgtgggcaa

SEQ ID NO: 126163 - DNA, 30 bp, Artificial Sequence
  Synthetic oligonucleotide
gacgcgggaaatcccatttcgtattggcaa

SEQ ID NO: 126164 - DNA, 30 bp, Artificial Sequence
  Synthetic oligonucleotide
ataaaaagacaatgattccatttttggcaa

SEQ ID NO: 126165 - DNA, 30 bp, Artificial Sequence
  Synthetic oligonucleotide
atggtacgacacgatgcgagcaacatgcaa

SEQ ID NO: 126166 - DNA, 30 bp, Artificial Sequence
  Synthetic oligonucleotide
cggcattagcttgacaatttgcacctgcaa

SEQ ID NO: 126167 - DNA, 30 bp, Artificial Sequence
  Synthetic oligonucleotide
aatcagtccaggatgaacagggtcctgcaa

SEQ ID NO: 126168 - DNA, 30 bp, Artificial Sequence
  Synthetic oligonucleotide
gatgacgtgtccggccttcaagtgctgcaa

SEQ ID NO: 126169 - DNA, 30 bp, Artificial Sequence
  Synthetic oligonucleotide
gtgctgtctcgcgaaatgaaattagtgcaa

SEQ ID NO: 126170 - DNA, 30 bp, Artificial Sequence
  Synthetic oligonucleotide
gtgcggacgaaccgtaatttgtgcgtgcaa

SEQ ID NO: 126171 - DNA, 30 bp, Artificial Sequence
  Synthetic oligonucleotide
aacgccaagccgaaccggggaacggtgcaa

SEQ ID NO: 126172 - DNA, 30 bp, Artificial Sequence
  Synthetic oligonucleotide
ggtatgaacaatagcggtatgactgtgcaa

SEQ ID NO: 126173 - DNA, 30 bp, Artificial Sequence
  Synthetic oligonucleotide
gcgagaggcggaggttccactgccttgcaa

SEQ ID NO: 126174 - DNA, 30 bp, Artificial Sequence
  Synthetic oligonucleotide
acaggactttagcaatttcacttgttgcaa

SEQ ID NO: 126175 - DNA, 30 bp, Artificial Sequence
  Synthetic oligonucleotide
ccaatgtatcatgaaatcgaacctttgcaa

SEQ ID NO: 126176 - DNA, 30 bp, Artificial Sequence
  Synthetic oligonucleotide
caagggaacgttacataggcgtctttgcaa

SEQ ID NO: 126177 - DNA, 29 bp, Artificial Sequence
  Synthetic oligonucleotide
gaggttaatgtaggcccccgcggaatcaa

SEQ ID NO: 126178 - DNA, 30 bp, Artificial Sequence
  Synthetic oligonucleotide
ttctcaaccagatctctagagcataatcaa

SEQ ID NO: 126179 - DNA, 30 bp, Artificial Sequence
  Synthetic oligonucleotide
acattggcaggtgcaatttcaagccatcaa

SEQ ID NO: 126180 - DNA, 30 bp, Artificial Sequence
  Synthetic oligonucleotide
cggctcgcagtaggaatatctgtccatcaa

SEQ ID NO: 126181 - DNA, 30 bp, Artificial Sequence
  Synthetic oligonucleotide
ggaagggtcggtgcaccctgctggcatcaa

SEQ ID NO: 126182 - DNA, 30 bp, Artificial Sequence
  Synthetic oligonucleotide
atcacgaatagatgaccacaccttcatcaa

SEQ ID NO: 126183 - DNA, 30 bp, Artificial Sequence
  Synthetic oligonucleotide
cacctgcactgcgaacatctagtcgatcaa

SEQ ID NO: 126184 - DNA, 30 bp, Artificial Sequence
  Synthetic oligonucleotide
acataagcggtgacaattccattcgatcaa

SEQ ID NO: 126185 - DNA, 30 bp, Artificial Sequence
  Synthetic oligonucleotide
tgtatcgtggtaacctttgaggaggatcaa

SEQ ID NO: 126186 - DNA, 30 bp, Artificial Sequence
  Synthetic oligonucleotide
gcaattcgtttaaaaataagtgatgatcaa

SEQ ID NO: 126187 - DNA, 30 bp, Artificial Sequence
  Synthetic oligonucleotide
agacatagacacgcacgtcacgtatatcaa

SEQ ID NO: 126188 - DNA, 30 bp, Artificial Sequence
  Synthetic oligonucleotide
actgaccacctggcaggtggtgggtatcaa

SEQ ID NO: 126189 - DNA, 30 bp, Artificial Sequence
  Synthetic oligonucleotide
taaatttttcaccgatacattaagactcaa

SEQ ID NO: 126190 - DNA, 30 bp, Artificial Sequence
  Synthetic oligonucleotide
tcggcaagctcgtttacgtgtcagactcaa

SEQ ID NO: 126191 - DNA, 30 bp, Artificial Sequence
  Synthetic oligonucleotide
agaggcacaaaagagaacgagaggactcaa

SEQ ID NO: 126192 - DNA, 30 bp, Artificial Sequence
  Synthetic oligonucleotide
acaagatatagcgttggtggctggactcaa

SEQ ID NO: 126193 - DNA, 30 bp, Artificial Sequence
  Synthetic oligonucleotide
ggaagacgaatagagacctaaagtactcaa

SEQ ID NO: 126194 - DNA, 30 bp, Artificial Sequence
  Synthetic oligonucleotide
ggtcaagcattgatccgatccagacctcaa

SEQ ID NO: 126195 - DNA, 30 bp, Artificial Sequence
  Synthetic oligonucleotide
gcttacagccggggtcgtgggtcccctcaa

SEQ ID NO: 126196 - DNA, 30 bp, Artificial Sequence
  Synthetic oligonucleotide
caaccattcctagacaaactgcgccctcaa

SEQ ID NO: 126197 - DNA, 30 bp, Artificial Sequence
  Synthetic oligonucleotide
agggatgactacttcgttatcggccctcaa

SEQ ID NO: 126198 - DNA, 30 bp, Artificial Sequence
  Synthetic oligonucleotide
agcgcatatgcaaattgtaaccggcctcaa

SEQ ID NO: 126199 - DNA, 30 bp, Artificial Sequence
  Synthetic oligonucleotide
cgaggtcaggattagacccgatgtcctcaa

SEQ ID NO: 126200 - DNA, 30 bp, Artificial Sequence
  Synthetic oligonucleotide
ttattgtattaaaaggcgaggagagctcaa

SEQ ID NO: 126201 - DNA, 30 bp, Artificial Sequence
  Synthetic oligonucleotide
ggactgggcaaggagtcacctttcgctcaa

SEQ ID NO: 126202 - DNA, 30 bp, Artificial Sequence
  Synthetic oligonucleotide
atcgagcatgcgacgtgggtaccatctcaa

SEQ ID NO: 126203 - DNA, 30 bp, Artificial Sequence
  Synthetic oligonucleotide
tggacctaaactgagagggtgtatagtcaa

SEQ ID NO: 126204 - DNA, 30 bp, Artificial Sequence
  Synthetic oligonucleotide
ttcggtggaaacatagcatagaaccgtcaa

SEQ ID NO: 126205 - DNA, 30 bp, Artificial Sequence
  Synthetic oligonucleotide
gctaaacagatataaagaagcagccgtcaa

SEQ ID NO: 126206 - DNA, 30 bp, Artificial Sequence
  Synthetic oligonucleotide
gacgtggactatgtatacggagggcgtcaa

SEQ ID NO: 126207 - DNA, 30 bp, Artificial Sequence
  Synthetic oligonucleotide
taccctaggctacccaggatgatgcgtcaa

SEQ ID NO: 126208 - DNA, 30 bp, Artificial Sequence
  Synthetic oligonucleotide
cgctcgattctcttctccttttgtcgtcaa

SEQ ID NO: 126209 - DNA, 30 bp, Artificial Sequence
  Synthetic oligonucleotide
cggtcggaggtcaatatcctcgtaggtcaa

SEQ ID NO: 126210 - DNA, 30 bp, Artificial Sequence
  Synthetic oligonucleotide
agacaactcaggtagactcgccatggtcaa

SEQ ID NO: 126211 - DNA, 30 bp, Artificial Sequence
  Synthetic oligonucleotide
ccttgcaccacgagctacataaagtgtcaa

SEQ ID NO: 126212 - DNA, 30 bp, Artificial Sequence
  Synthetic oligonucleotide
tctgtggggccaaggggtagggtttgtcaa

SEQ ID NO: 126213 - DNA, 30 bp, Artificial Sequence
  Synthetic oligonucleotide
catgtgtagagggcaaacctttgaattcaa

SEQ ID NO: 126214 - DNA, 30 bp, Artificial Sequence
  Synthetic oligonucleotide
tataggaacatcgaaactacagacattcaa

SEQ ID NO: 126215 - DNA, 30 bp, Artificial Sequence
  Synthetic oligonucleotide
gggtgtactacacgagtggccatgattcaa

SEQ ID NO: 126216 - DNA, 30 bp, Artificial Sequence
  Synthetic oligonucleotide
acataccgtaccagctgacgacgtattcaa

SEQ ID NO: 126217 - DNA, 30 bp, Artificial Sequence
  Synthetic oligonucleotide
cagtagccattctaaatttgagaccttcaa

SEQ ID NO: 126218 - DNA, 30 bp, Artificial Sequence
  Synthetic oligonucleotide
atccaagctacaataatgctcatccttcaa

SEQ ID NO: 126219 - DNA, 30 bp, Artificial Sequence
  Synthetic oligonucleotide
atcgtgcgctttgaggtgggaaatcttcaa

SEQ ID NO: 126220 - DNA, 30 bp, Artificial Sequence
  Synthetic oligonucleotide
gactggtcagatccatgtcacgaatttcaa

SEQ ID NO: 126221 - DNA, 30 bp, Artificial Sequence
  Synthetic oligonucleotide
cagcgccagcacagccaagacgaatttcaa

SEQ ID NO: 126222 - DNA, 30 bp, Artificial Sequence
  Synthetic oligonucleotide
cagaaactaatcgatcaagtaacgtttcaa

SEQ ID NO: 126223 - DNA, 34 bp, Artificial Sequence
  Synthetic oligonucleotide
gatactagaccaccacgtgtccatcagaaaagaa

SEQ ID NO: 126224 - DNA, 30 bp, Artificial Sequence
  Synthetic oligonucleotide
catcagcaaccaggacaccgtggaaaagaa

SEQ ID NO: 126225 - DNA, 30 bp, Artificial Sequence
  Synthetic oligonucleotide
cattcaacgactgttaccgtttacaaagaa

SEQ ID NO: 126226 - DNA, 30 bp, Artificial Sequence
  Synthetic oligonucleotide
gccggccgacggagtacacctatcaaagaa

SEQ ID NO: 126227 - DNA, 30 bp, Artificial Sequence
  Synthetic oligonucleotide
ccctttctacggatctgagaagcgaaagaa

SEQ ID NO: 126228 - DNA, 30 bp, Artificial Sequence
  Synthetic oligonucleotide
gcaatcgcctaacactacatgaggaaagaa

SEQ ID NO: 126229 - DNA, 30 bp, Artificial Sequence
  Synthetic oligonucleotide
ggcatgtgaatgactagatccttgaaagaa

SEQ ID NO: 126230 - DNA, 30 bp, Artificial Sequence
  Synthetic oligonucleotide
aggttaacctcaatggggttaaataaagaa

SEQ ID NO: 126231 - DNA, 30 bp, Artificial Sequence
  Synthetic oligonucleotide
atacgctgccgataaaagctatataaagaa

SEQ ID NO: 126232 - DNA, 30 bp, Artificial Sequence
  Synthetic oligonucleotide
gttcgaaacttataaccatgaattaaagaa

SEQ ID NO: 126233 - DNA, 30 bp, Artificial Sequence
  Synthetic oligonucleotide
tcttatgaatgctggccggacttacaagaa

SEQ ID NO: 126234 - DNA, 30 bp, Artificial Sequence
  Synthetic oligonucleotide
caggtggtagacgttatcaatccccaagaa

SEQ ID NO: 126235 - DNA, 30 bp, Artificial Sequence
  Synthetic oligonucleotide
ggttacgggcacgcggttaataggcaagaa

SEQ ID NO: 126236 - DNA, 30 bp, Artificial Sequence
  Synthetic oligonucleotide
cgtggatccaataaatccacagatcaagaa

SEQ ID NO: 126237 - DNA, 30 bp, Artificial Sequence
  Synthetic oligonucleotide
gctggggggggatctgtactaactcaagaa

SEQ ID NO: 126238 - DNA, 30 bp, Artificial Sequence
  Synthetic oligonucleotide
gggggtactgaagtccaccacagtcaagaa

SEQ ID NO: 126239 - DNA, 30 bp, Artificial Sequence
  Synthetic oligonucleotide
tcaagagggttggagacattgtgagaagaa

SEQ ID NO: 126240 - DNA, 30 bp, Artificial Sequence
  Synthetic oligonucleotide
ggtgaagccgatagtgtacttgaggaagaa

SEQ ID NO: 126241 - DNA, 30 bp, Artificial Sequence
  Synthetic oligonucleotide
aaagggggttgcggattcgagccggaagaa

SEQ ID NO: 126242 - DNA, 30 bp, Artificial Sequence
  Synthetic oligonucleotide
tgcgacattcacaccccaccccatgaagaa

SEQ ID NO: 126243 - DNA, 30 bp, Artificial Sequence
  Synthetic oligonucleotide
aagtcatatgctcctacagtggtataagaa

SEQ ID NO: 126244 - DNA, 30 bp, Artificial Sequence
  Synthetic oligonucleotide
cagagcctaaatcttcctattgcctaagaa

SEQ ID NO: 126245 - DNA, 30 bp, Artificial Sequence
  Synthetic oligonucleotide
attgcaccaggcggccacactctctaagaa

SEQ ID NO: 126246 - DNA, 30 bp, Artificial Sequence
  Synthetic oligonucleotide
ttggggtatcaattaaataccgagtaagaa

SEQ ID NO: 126247 - DNA, 30 bp, Artificial Sequence
  Synthetic oligonucleotide
ccaactaatgaccttcgacaaatttaagaa

SEQ ID NO: 126248 - DNA, 30 bp, Artificial Sequence
  Synthetic oligonucleotide
cgagggccttccaacgcccgcgaaacagaa

SEQ ID NO: 126249 - DNA, 30 bp, Artificial Sequence
  Synthetic oligonucleotide
ggggatgcgctgtgttaaggagtaacagaa

SEQ ID NO: 126250 - DNA, 30 bp, Artificial Sequence
  Synthetic oligonucleotide
tacgaaacgagtgattaaaattacacagaa

SEQ ID NO: 126251 - DNA, 30 bp, Artificial Sequence
  Synthetic oligonucleotide
actgaaattagattgcctaatccgacagaa

SEQ ID NO: 126252 - DNA, 30 bp, Artificial Sequence
  Synthetic oligonucleotide
atcgagtagcttgccacacgttatacagaa

SEQ ID NO: 126253 - DNA, 30 bp, Artificial Sequence
  Synthetic oligonucleotide
tcagcagcagaccggggagcctgtacagaa

SEQ ID NO: 126254 - DNA, 30 bp, Artificial Sequence
  Synthetic oligonucleotide
acgtcgattgttgctaactgtctcccagaa

SEQ ID NO: 126255 - DNA, 30 bp, Artificial Sequence
  Synthetic oligonucleotide
attgaaggcgggagggtcagaatgccagaa

SEQ ID NO: 126256 - DNA, 30 bp, Artificial Sequence
  Synthetic oligonucleotide
ggtagcgatcgctcataacctgtgccagaa

SEQ ID NO: 126257 - DNA, 30 bp, Artificial Sequence
  Synthetic oligonucleotide
ctagtgtagtgaaaggtaagcgatccagaa

SEQ ID NO: 126258 - DNA, 30 bp, Artificial Sequence
  Synthetic oligonucleotide
ttgaggagccccgggcacgcgactccagaa

SEQ ID NO: 126259 - DNA, 30 bp, Artificial Sequence
  Synthetic oligonucleotide
aggacaacgtgcccagtggagacagcagaa

SEQ ID NO: 126260 - DNA, 30 bp, Artificial Sequence
  Synthetic oligonucleotide
gtgaagcccggctaggcgccccgagcagaa

SEQ ID NO: 126261 - DNA, 30 bp, Artificial Sequence
  Synthetic oligonucleotide
cggggaccttcaatgtatgtgcgggcagaa

SEQ ID NO: 126262 - DNA, 30 bp, Artificial Sequence
  Synthetic oligonucleotide
cagccataaagaagaaattcataatcagaa

SEQ ID NO: 126263 - DNA, 30 bp, Artificial Sequence
  Synthetic oligonucleotide
cctacgtgacccaaccaacgtacatcagaa

SEQ ID NO: 126264 - DNA, 30 bp, Artificial Sequence
  Synthetic oligonucleotide
tcagcgtacgcgggtgccggctggtcagaa

SEQ ID NO: 126265 - DNA, 30 bp, Artificial Sequence
  Synthetic oligonucleotide
aagacgggggactaaccggatacttcagaa

SEQ ID NO: 126266 - DNA, 30 bp, Artificial Sequence
  Synthetic oligonucleotide
ggaaatacattatgatacgcgataagagaa

SEQ ID NO: 126267 - DNA, 30 bp, Artificial Sequence
  Synthetic oligonucleotide
tacatttaaggagcgcgaaacgccagagaa

SEQ ID NO: 126268 - DNA, 30 bp, Artificial Sequence
  Synthetic oligonucleotide
cgatgatgtcccgccgtcctcaatagagaa

SEQ ID NO: 126269 - DNA, 30 bp, Artificial Sequence
  Synthetic oligonucleotide
ttgatgcctagagatcattttagccgagaa

SEQ ID NO: 126270 - DNA, 30 bp, Artificial Sequence
  Synthetic oligonucleotide
cacattgctagcttcgaggcgttccgagaa

SEQ ID NO: 126271 - DNA, 30 bp, Artificial Sequence
  Synthetic oligonucleotide
ttcatctagttaactaatcctacgcgagaa

SEQ ID NO: 126272 - DNA, 30 bp, Artificial Sequence
  Synthetic oligonucleotide
ctatgaatccttgatagcaggtcaggagaa

SEQ ID NO: 126273 - DNA, 30 bp, Artificial Sequence
  Synthetic oligonucleotide
gtaatagagtcggaaggaaatagcggagaa

SEQ ID NO: 126274 - DNA, 30 bp, Artificial Sequence
  Synthetic oligonucleotide
ccatggcgctctaagggagaccgcggagaa

SEQ ID NO: 126275 - DNA, 30 bp, Artificial Sequence
  Synthetic oligonucleotide
cacccgtattaacggcaagcgctcggagaa

SEQ ID NO: 126276 - DNA, 30 bp, Artificial Sequence
  Synthetic oligonucleotide
tccagggaccacatcatgtggctgggagaa

SEQ ID NO: 126277 - DNA, 30 bp, Artificial Sequence
  Synthetic oligonucleotide
aggggcgtcatagattgtctggtgggagaa

SEQ ID NO: 126278 - DNA, 30 bp, Artificial Sequence
  Synthetic oligonucleotide
cgcgaaatgtagtgaggagcagctggagaa

SEQ ID NO: 126279 - DNA, 30 bp, Artificial Sequence
  Synthetic oligonucleotide
cggtgaagagaggccgctcgaccaatagaa

SEQ ID NO: 126280 - DNA, 30 bp, Artificial Sequence
  Synthetic oligonucleotide
cgagtggcgacgttccaagtgagaatagaa

SEQ ID NO: 126281 - DNA, 30 bp, Artificial Sequence
  Synthetic oligonucleotide
agtattctgcatcaagcttggattctagaa

SEQ ID NO: 126282 - DNA, 30 bp, Artificial Sequence
  Synthetic oligonucleotide
gcgaggatagtcccgcaacgaacggtagaa

SEQ ID NO: 126283 - DNA, 30 bp, Artificial Sequence
  Synthetic oligonucleotide
aacgggtgtccgcaattgtacggggtagaa

SEQ ID NO: 126284 - DNA, 30 bp, Artificial Sequence
  Synthetic oligonucleotide
ctatgtcattcataaaagcaattggtagaa

SEQ ID NO: 126285 - DNA, 30 bp, Artificial Sequence
  Synthetic oligonucleotide
ttgtaggccagatcccttccacgtgtagaa

SEQ ID NO: 126286 - DNA, 30 bp, Artificial Sequence
  Synthetic oligonucleotide
gaatgcaaggctcggtatctttacttagaa

SEQ ID NO: 126287 - DNA, 30 bp, Artificial Sequence
  Synthetic oligonucleotide
cgccgtgcgagcccgagcctctccttagaa

SEQ ID NO: 126288 - DNA, 30 bp, Artificial Sequence
  Synthetic oligonucleotide
ccatgcgttctcgatcgcaagtggttagaa

SEQ ID NO: 126289 - DNA, 30 bp, Artificial Sequence
  Synthetic oligonucleotide
agatttgtgtcattcacatgcgtgttagaa

SEQ ID NO: 126290 - DNA, 30 bp, Artificial Sequence
  Synthetic oligonucleotide
ctcggctagtgtggagcacatagtttagaa

SEQ ID NO: 126291 - DNA, 30 bp, Artificial Sequence
  Synthetic oligonucleotide
tctgaaccgaggatgccacataaaaacgaa

SEQ ID NO: 126292 - DNA, 30 bp, Artificial Sequence
  Synthetic oligonucleotide
gccgggtttgaccaacagagtctgaacgaa

SEQ ID NO: 126293 - DNA, 30 bp, Artificial Sequence
  Synthetic oligonucleotide
accctactttactcgatggtgactaacgaa

SEQ ID NO: 126294 - DNA, 30 bp, Artificial Sequence
  Synthetic oligonucleotide
cccaacgatttgcgcgtgaccagtaacgaa

SEQ ID NO: 126295 - DNA, 30 bp, Artificial Sequence
  Synthetic oligonucleotide
gaagtgtgctacgatacgacaggtaacgaa

SEQ ID NO: 126296 - DNA, 30 bp, Artificial Sequence
  Synthetic oligonucleotide
cctcagctaaagaccggtgaacggcacgaa

SEQ ID NO: 126297 - DNA, 30 bp, Artificial Sequence
  Synthetic oligonucleotide
atcgcaaccgcgtcgacgccctctcacgaa

SEQ ID NO: 126298 - DNA, 30 bp, Artificial Sequence
  Synthetic oligonucleotide
tgcgaactttaagaagagcatcgagacgaa

SEQ ID NO: 126299 - DNA, 30 bp, Artificial Sequence
  Synthetic oligonucleotide
cggcttggtcacaaatgtcgtggggacgaa

SEQ ID NO: 126300 - DNA, 30 bp, Artificial Sequence
  Synthetic oligonucleotide
cgcgggaaatgtgaatcttatgatgacgaa

SEQ ID NO: 126301 - DNA, 30 bp, Artificial Sequence
  Synthetic oligonucleotide
tacaaaagaagacaagagaaattatacgaa

SEQ ID NO: 126302 - DNA, 30 bp, Artificial Sequence
  Synthetic oligonucleotide
gtcttagagttaacccgaagaatgtacgaa

SEQ ID NO: 126303 - DNA, 30 bp, Artificial Sequence
  Synthetic oligonucleotide
ccatatttatgcgacacattgcgtaccgaa

SEQ ID NO: 126304 - DNA, 30 bp, Artificial Sequence
  Synthetic oligonucleotide
aactaactattccaataggtatgacccgaa

SEQ ID NO: 126305 - DNA, 30 bp, Artificial Sequence
  Synthetic oligonucleotide
aaccgacattggacatgcgatagcgccgaa

SEQ ID NO: 126306 - DNA, 30 bp, Artificial Sequence
  Synthetic oligonucleotide
aaccaagtaacgtcaccgagtgaggccgaa

SEQ ID NO: 126307 - DNA, 30 bp, Artificial Sequence
  Synthetic oligonucleotide
ctgcatgtatcttaactgagttaggccgaa

SEQ ID NO: 126308 - DNA, 30 bp, Artificial Sequence
  Synthetic oligonucleotide
cacgccgtggataggacttcctggtccgaa

SEQ ID NO: 126309 - DNA, 30 bp, Artificial Sequence
  Synthetic oligonucleotide
gtgcgtgtgagagatagctcttggtccgaa

SEQ ID NO: 126310 - DNA, 30 bp, Artificial Sequence
  Synthetic oligonucleotide
aagccgttagagtgttgacagctaagcgaa

SEQ ID NO: 126311 - DNA, 30 bp, Artificial Sequence
  Synthetic oligonucleotide
actgcgatgtaatgattaaatcccagcgaa

SEQ ID NO: 126312 - DNA, 30 bp, Artificial Sequence
  Synthetic oligonucleotide
aggtaaagcatgatttatgtaatcagcgaa

SEQ ID NO: 126313 - DNA, 30 bp, Artificial Sequence
  Synthetic oligonucleotide
aaacgaaacacagagcgtaggtagagcgaa

SEQ ID NO: 126314 - DNA, 30 bp, Artificial Sequence
  Synthetic oligonucleotide
gtaagcccagtaatgcggctgacgagcgaa

SEQ ID NO: 126315 - DNA, 30 bp, Artificial Sequence
  Synthetic oligonucleotide
tcatccgagagggacacaattcggagcgaa

SEQ ID NO: 126316 - DNA, 30 bp, Artificial Sequence
  Synthetic oligonucleotide
cacaggtacagcagactaacctttagcgaa

SEQ ID NO: 126317 - DNA, 30 bp, Artificial Sequence
  Synthetic oligonucleotide
agcatcataaggggttgattccaacgcgaa

SEQ ID NO: 126318 - DNA, 31 bp, Artificial Sequence
  Synthetic oligonucleotide
cggtgactgccagttcacaacagaccgcgaa

SEQ ID NO: 126319 - DNA, 30 bp, Artificial Sequence
  Synthetic oligonucleotide
cccgagacagaaagccttccgagccgcgaa

SEQ ID NO: 126320 - DNA, 31 bp, Artificial Sequence
  Synthetic oligonucleotide
tgcggacccaggcaatttgccagtgcgcgaa

SEQ ID NO: 126321 - DNA, 30 bp, Artificial Sequence
  Synthetic oligonucleotide
gggtgggctcctagaatcagataaggcgaa

SEQ ID NO: 126322 - DNA, 30 bp, Artificial Sequence
  Synthetic oligonucleotide
tgacttggataaaggcccagtcctggcgaa

SEQ ID NO: 126323 - DNA, 30 bp, Artificial Sequence
  Synthetic oligonucleotide
caagcactgataatgaaaaaacaatgcgaa

SEQ ID NO: 126324 - DNA, 30 bp, Artificial Sequence
  Synthetic oligonucleotide
ttcctagggcggcgggttatacagtgcgaa

SEQ ID NO: 126325 - DNA, 30 bp, Artificial Sequence
  Synthetic oligonucleotide
cgccaggttactgctcgaccacattgcgaa

SEQ ID NO: 126326 - DNA, 30 bp, Artificial Sequence
  Synthetic oligonucleotide
acgagtttatcgctcccaatttaaatcgaa

SEQ ID NO: 126327 - DNA, 30 bp, Artificial Sequence
  Synthetic oligonucleotide
ccattctccgcgaataaatctcgaatcgaa

SEQ ID NO: 126328 - DNA, 30 bp, Artificial Sequence
  Synthetic oligonucleotide
gtaaacagatcgccctaggactgaatcgaa

SEQ ID NO: 126329 - DNA, 30 bp, Artificial Sequence
  Synthetic oligonucleotide
ccaggttggcagggggtaaacaacatcgaa

SEQ ID NO: 126330 - DNA, 30 bp, Artificial Sequence
  Synthetic oligonucleotide
tgctagcaaaaagatcctggtaacatcgaa

SEQ ID NO: 126331 - DNA, 30 bp, Artificial Sequence
  Synthetic oligonucleotide
tactgcgataagcatcacgctgttatcgaa

SEQ ID NO: 126332 - DNA, 30 bp, Artificial Sequence
  Synthetic oligonucleotide
caagacggggaaggtccggtcagagtcgaa

SEQ ID NO: 126333 - DNA, 30 bp, Artificial Sequence
  Synthetic oligonucleotide
ggtcggcgtgggttctcgtctgatgtcgaa

SEQ ID NO: 126334 - DNA, 30 bp, Artificial Sequence
  Synthetic oligonucleotide
cggttttccatccctaacccgccgttcgaa

SEQ ID NO: 126335 - DNA, 30 bp, Artificial Sequence
  Synthetic oligonucleotide
cccctcagtggagtattaaataggttcgaa

SEQ ID NO: 126336 - DNA, 30 bp, Artificial Sequence
  Synthetic oligonucleotide
agttaggagatcggtcacgtatggttcgaa

SEQ ID NO: 126337 - DNA, 30 bp, Artificial Sequence
  Synthetic oligonucleotide
ctaatggactctcgcaggaagggtttcgaa

SEQ ID NO: 126338 - DNA, 30 bp, Artificial Sequence
  Synthetic oligonucleotide
gtaaaccgagtgattccgcaggttttcgaa

SEQ ID NO: 126339 - DNA, 30 bp, Artificial Sequence
  Synthetic oligonucleotide
tcaaattcttgcgagtgtaagcaaaaggaa

SEQ ID NO: 126340 - DNA, 30 bp, Artificial Sequence
  Synthetic oligonucleotide
caaatcgaggctattccagggttaaaggaa

SEQ ID NO: 126341 - DNA, 30 bp, Artificial Sequence
  Synthetic oligonucleotide
tggggacgcgtttacgcgagtagcaaggaa

SEQ ID NO: 126342 - DNA, 30 bp, Artificial Sequence
  Synthetic oligonucleotide
cccaggaagggtcgtacgcactgcaaggaa

SEQ ID NO: 126343 - DNA, 30 bp, Artificial Sequence
  Synthetic oligonucleotide
tgttaaaagcctgctcggattcaacaggaa

SEQ ID NO: 126344 - DNA, 30 bp, Artificial Sequence
  Synthetic oligonucleotide
tgttaaacggttaggaagaagggacaggaa

SEQ ID NO: 126345 - DNA, 30 bp, Artificial Sequence
  Synthetic oligonucleotide
atctaagaacaacgccgttgagctcaggaa

SEQ ID NO: 126346 - DNA, 30 bp, Artificial Sequence
  Synthetic oligonucleotide
ctagcataagttacactcggataataggaa

SEQ ID NO: 126347 - DNA, 30 bp, Artificial Sequence
  Synthetic oligonucleotide
agtagagaaactcgtgtctggacataggaa

SEQ ID NO: 126348 - DNA, 30 bp, Artificial Sequence
  Synthetic oligonucleotide
tcaatacttgaccgacagaacgagtaggaa

SEQ ID NO: 126349 - DNA, 30 bp, Artificial Sequence
  Synthetic oligonucleotide
gccgtagccaacacggctagcgagtaggaa

SEQ ID NO: 126350 - DNA, 30 bp, Artificial Sequence
  Synthetic oligonucleotide
tgggcattgcctcaacgtagggggacggaa

SEQ ID NO: 126351 - DNA, 30 bp, Artificial Sequence
  Synthetic oligonucleotide
tggtgatcacataaaaagccgtatacggaa

SEQ ID NO: 126352 - DNA, 30 bp, Artificial Sequence
  Synthetic oligonucleotide
gtgagatcacgttagtgtccaactacggaa

SEQ ID NO: 126353 - DNA, 30 bp, Artificial Sequence
  Synthetic oligonucleotide
gtcaacctggcacttctagtcctaccggaa

SEQ ID NO: 126354 - DNA, 30 bp, Artificial Sequence
  Synthetic oligonucleotide
gtaagtaacgtatgtcagaagtggccggaa

SEQ ID NO: 126355 - DNA, 30 bp, Artificial Sequence
  Synthetic oligonucleotide
ctcttcgggattctgataacccgcgcggaa

SEQ ID NO: 126356 - DNA, 30 bp, Artificial Sequence
  Synthetic oligonucleotide
tgacatttgcttgtgcgcgtgtcggcggaa

SEQ ID NO: 126357 - DNA, 30 bp, Artificial Sequence
  Synthetic oligonucleotide
ccgctatagggttaaagttgcgtggcggaa

SEQ ID NO: 126358 - DNA, 30 bp, Artificial Sequence
  Synthetic oligonucleotide
aaagcccaataatagagtgctcttgcggaa

SEQ ID NO: 126359 - DNA, 30 bp, Artificial Sequence
  Synthetic oligonucleotide
aaaagcgggacctacaagcctacttcggaa

SEQ ID NO: 126360 - DNA, 30 bp, Artificial Sequence
  Synthetic oligonucleotide
tactaaagagtaagacgtctacgttcggaa

SEQ ID NO: 126361 - DNA, 30 bp, Artificial Sequence
  Synthetic oligonucleotide
ctgcttacttgagcacagggactcagggaa

SEQ ID NO: 126362 - DNA, 30 bp, Artificial Sequence
  Synthetic oligonucleotide
ccatagagtgctggttctaacgagagggaa

SEQ ID NO: 126363 - DNA, 30 bp, Artificial Sequence
  Synthetic oligonucleotide
gatgacttaaggcggtgatcatagagggaa

SEQ ID NO: 126364 - DNA, 30 bp, Artificial Sequence
  Synthetic oligonucleotide
ctttcctcaagaagcagtaggccgagggaa

SEQ ID NO: 126365 - DNA, 30 bp, Artificial Sequence
  Synthetic oligonucleotide
taatcggggttccacgaaattgcgagggaa

SEQ ID NO: 126366 - DNA, 30 bp, Artificial Sequence
  Synthetic oligonucleotide
actagcaccagggatggaacaacacgggaa

SEQ ID NO: 126367 - DNA, 30 bp, Artificial Sequence
  Synthetic oligonucleotide
ggagagtctgagggactccagcgacgggaa

SEQ ID NO: 126368 - DNA, 30 bp, Artificial Sequence
  Synthetic oligonucleotide
gcctggatccactatacagtgctacgggaa

SEQ ID NO: 126369 - DNA, 30 bp, Artificial Sequence
  Synthetic oligonucleotide
caggaaaccacggggctattctagcgggaa

SEQ ID NO: 126370 - DNA, 30 bp, Artificial Sequence
  Synthetic oligonucleotide
cactacccgtgggaggtggttagtcgggaa

SEQ ID NO: 126371 - DNA, 30 bp, Artificial Sequence
  Synthetic oligonucleotide
ctaccacgtcatcgagatagacttcgggaa

SEQ ID NO: 126372 - DNA, 30 bp, Artificial Sequence
  Synthetic oligonucleotide
ttccggtaagcaacgcggatctacggggaa

SEQ ID NO: 126373 - DNA, 31 bp, Artificial Sequence
  Synthetic oligonucleotide
gccgaggaggctgttaggatttcatggggaa

SEQ ID NO: 126374 - DNA, 30 bp, Artificial Sequence
  Synthetic oligonucleotide
ggtagacctcgcatgtagtcggatggggaa

SEQ ID NO: 126375 - DNA, 30 bp, Artificial Sequence
  Synthetic oligonucleotide
tcataactccagaagtaaaacattggggaa

SEQ ID NO: 126376 - DNA, 30 bp, Artificial Sequence
  Synthetic oligonucleotide
gcacacgtgtctttcagcttagttggggaa

SEQ ID NO: 126377 - DNA, 30 bp, Artificial Sequence
  Synthetic oligonucleotide
tccgagaaccgtaacacgctgccatgggaa

SEQ ID NO: 126378 - DNA, 30 bp, Artificial Sequence
  Synthetic oligonucleotide
gtaatagccagtacatggacgaactgggaa

SEQ ID NO: 126379 - DNA, 30 bp, Artificial Sequence
  Synthetic oligonucleotide
atgctagggttcgtctcaacctgctgggaa

SEQ ID NO: 126380 - DNA, 30 bp, Artificial Sequence
  Synthetic oligonucleotide
ataacgggacgggcttccctccagtgggaa

SEQ ID NO: 126381 - DNA, 30 bp, Artificial Sequence
  Synthetic oligonucleotide
cctggatatcgggtatgacgtgggtgggaa

SEQ ID NO: 126382 - DNA, 30 bp, Artificial Sequence
  Synthetic oligonucleotide
ttagggtgtaatgtgactggtggttgggaa

SEQ ID NO: 126383 - DNA, 30 bp, Artificial Sequence
  Synthetic oligonucleotide
gaggccagattaaatgaagaatcgatggaa

SEQ ID NO: 126384 - DNA, 30 bp, Artificial Sequence
  Synthetic oligonucleotide
cagtggagtcgcgtgtttcgtgggatggaa

SEQ ID NO: 126385 - DNA, 30 bp, Artificial Sequence
  Synthetic oligonucleotide
atggaaggtacacccgggtgtcatatggaa

SEQ ID NO: 126386 - DNA, 30 bp, Artificial Sequence
  Synthetic oligonucleotide
agggtcccatgacgatcatgatgactggaa

SEQ ID NO: 126387 - DNA, 30 bp, Artificial Sequence
  Synthetic oligonucleotide
aagggatattcgtacggcggagttctggaa

SEQ ID NO: 126388 - DNA, 30 bp, Artificial Sequence
  Synthetic oligonucleotide
cggttagcatgaaggtgtctcagagtggaa

SEQ ID NO: 126389 - DNA, 30 bp, Artificial Sequence
  Synthetic oligonucleotide
actctaagaagcaccaagggaagtgtggaa

SEQ ID NO: 126390 - DNA, 30 bp, Artificial Sequence
  Synthetic oligonucleotide
tagcgtgagtacctaaggcagatattggaa

SEQ ID NO: 126391 - DNA, 30 bp, Artificial Sequence
  Synthetic oligonucleotide
tctgtgcaggaaggatctcctcacttggaa

SEQ ID NO: 126392 - DNA, 30 bp, Artificial Sequence
  Synthetic oligonucleotide
ctgggcataaagggggaggtatccttggaa

SEQ ID NO: 126393 - DNA, 30 bp, Artificial Sequence
  Synthetic oligonucleotide
tccgcccaaaatcgcactgaaatcttggaa

SEQ ID NO: 126394 - DNA, 30 bp, Artificial Sequence
  Synthetic oligonucleotide
acacttgatactagattcggtacaaatgaa

SEQ ID NO: 126395 - DNA, 30 bp, Artificial Sequence
  Synthetic oligonucleotide
caagtgatatgccgagcccggggaaatgaa

SEQ ID NO: 126396 - DNA, 30 bp, Artificial Sequence
  Synthetic oligonucleotide
attcaaagttgcatcgacatccggaatgaa

SEQ ID NO: 126397 - DNA, 30 bp, Artificial Sequence
  Synthetic oligonucleotide
tgtcaagagtgcgaggtgggtcataatgaa

SEQ ID NO: 126398 - DNA, 30 bp, Artificial Sequence
  Synthetic oligonucleotide
tccgacaggatatgaacctatactaatgaa

SEQ ID NO: 126399 - DNA, 30 bp, Artificial Sequence
  Synthetic oligonucleotide
tgggacatctgcagcaaacgaattaatgaa

SEQ ID NO: 126400 - DNA, 30 bp, Artificial Sequence
  Synthetic oligonucleotide
tcgtgtgtcttgtgagagatcgcccatgaa

SEQ ID NO: 126401 - DNA, 30 bp, Artificial Sequence
  Synthetic oligonucleotide
tggaggggcttaagagagagaactcatgaa

SEQ ID NO: 126402 - DNA, 30 bp, Artificial Sequence
  Synthetic oligonucleotide
caggggatgcggaacacgctcggtcatgaa

SEQ ID NO: 126403 - DNA, 30 bp, Artificial Sequence
  Synthetic oligonucleotide
acgctcaatggagcacgacaaggagatgaa

SEQ ID NO: 126404 - DNA, 31 bp, Artificial Sequence
  Synthetic oligonucleotide
ggcaatagtgcatcctgtacagaacgatgaa

SEQ ID NO: 126405 - DNA, 30 bp, Artificial Sequence
  Synthetic oligonucleotide
tcggcggcttgcgtggcgatgagtgatgaa

SEQ ID NO: 126406 - DNA, 30 bp, Artificial Sequence
  Synthetic oligonucleotide
aacggtatcagtcagcgagcaccatatgaa

SEQ ID NO: 126407 - DNA, 30 bp, Artificial Sequence
  Synthetic oligonucleotide
gtctggcatagtaagtctggtacctatgaa

SEQ ID NO: 126408 - DNA, 30 bp, Artificial Sequence
  Synthetic oligonucleotide
tacatatgaacatgcgacgtggtctatgaa

SEQ ID NO: 126409 - DNA, 30 bp, Artificial Sequence
  Synthetic oligonucleotide
ttgggacggataaaattgcagtggtatgaa

SEQ ID NO: 126410 - DNA, 30 bp, Artificial Sequence
  Synthetic oligonucleotide
gaccaacgtgagcaagtagtgatgtatgaa

SEQ ID NO: 126411 - DNA, 30 bp, Artificial Sequence
  Synthetic oligonucleotide
tctacgcgattgaagattgagaattatgaa

SEQ ID NO: 126412 - DNA, 30 bp, Artificial Sequence
  Synthetic oligonucleotide
caggtgcgtccattcccacgcttaactgaa

SEQ ID NO: 126413 - DNA, 30 bp, Artificial Sequence
  Synthetic oligonucleotide
tcgtatagcgcaactacctgggccactgaa

SEQ ID NO: 126414 - DNA, 30 bp, Artificial Sequence
  Synthetic oligonucleotide
gggcgaccggcgcgttacgtactcactgaa

SEQ ID NO: 126415 - DNA, 30 bp, Artificial Sequence
  Synthetic oligonucleotide
aagtaaagtacgacattgagtaagactgaa

SEQ ID NO: 126416 - DNA, 30 bp, Artificial Sequence
  Synthetic oligonucleotide
ggctacctaacagtgactgatggacctgaa

SEQ ID NO: 126417 - DNA, 29 bp, Artificial Sequence
  Synthetic oligonucleotide
atcagggggcagtactttctttacctgaa

SEQ ID NO: 126418 - DNA, 30 bp, Artificial Sequence
  Synthetic oligonucleotide
agcaggactacagcatggcactagcctgaa

SEQ ID NO: 126419 - DNA, 30 bp, Artificial Sequence
  Synthetic oligonucleotide
agaatatcactcgcactattaacagctgaa

SEQ ID NO: 126420 - DNA, 30 bp, Artificial Sequence
  Synthetic oligonucleotide
cctgatagggtatcacgtacgaaggctgaa

SEQ ID NO: 126421 - DNA, 30 bp, Artificial Sequence
  Synthetic oligonucleotide
acaacctaagcaagaccccggtgctctgaa

SEQ ID NO: 126422 - DNA, 30 bp, Artificial Sequence
  Synthetic oligonucleotide
tactaattcaaaactgctaaccggtctgaa

SEQ ID NO: 126423 - DNA, 30 bp, Artificial Sequence
  Synthetic oligonucleotide
cacaaaatcgggctagagacttaaagtgaa

SEQ ID NO: 126424 - DNA, 30 bp, Artificial Sequence
  Synthetic oligonucleotide
tcttgcggaaaacccgaacgagcaagtgaa

SEQ ID NO: 126425 - DNA, 30 bp, Artificial Sequence
  Synthetic oligonucleotide
gtcgcccggtcactcttaagttccagtgaa

SEQ ID NO: 126426 - DNA, 30 bp, Artificial Sequence
  Synthetic oligonucleotide
gtacggggggtttagacatatagacgtgaa

SEQ ID NO: 126427 - DNA, 30 bp, Artificial Sequence
  Synthetic oligonucleotide
atacatactcgctggtagggggcccgtgaa

SEQ ID NO: 126428 - DNA, 30 bp, Artificial Sequence
  Synthetic oligonucleotide
cgtataaggtaggggacagcctaaggtgaa

SEQ ID NO: 126429 - DNA, 30 bp, Artificial Sequence
  Synthetic oligonucleotide
caatcgactgagaacacgctcacaggtgaa

SEQ ID NO: 126430 - DNA, 30 bp, Artificial Sequence
  Synthetic oligonucleotide
gaagcgtatgtaatttcgagcaccggtgaa

SEQ ID NO: 126431 - DNA, 30 bp, Artificial Sequence
  Synthetic oligonucleotide
gggtgcagaaagaatctgtcatgtggtgaa

SEQ ID NO: 126432 - DNA, 30 bp, Artificial Sequence
  Synthetic oligonucleotide
tgttggtgggagggcgatatgagatgtgaa

SEQ ID NO: 126433 - DNA, 30 bp, Artificial Sequence
  Synthetic oligonucleotide
catgctgttcagtttgcagcccagtgtgaa

SEQ ID NO: 126434 - DNA, 30 bp, Artificial Sequence
  Synthetic oligonucleotide
tttcgcgaaatatggcgatagacttgtgaa

SEQ ID NO: 126435 - DNA, 30 bp, Artificial Sequence
  Synthetic oligonucleotide
tcatatcgagaaatagtgaacgtaattgaa

SEQ ID NO: 126436 - DNA, 30 bp, Artificial Sequence
  Synthetic oligonucleotide
aagcgagtcttcgtgtgcgaaagtattgaa

SEQ ID NO: 126437 - DNA, 30 bp, Artificial Sequence
  Synthetic oligonucleotide
actgaaagccgtacgattccacaacttgaa

SEQ ID NO: 126438 - DNA, 30 bp, Artificial Sequence
  Synthetic oligonucleotide
tggggaccgtacaaaagaacctaagttgaa

SEQ ID NO: 126439 - DNA, 30 bp, Artificial Sequence
  Synthetic oligonucleotide
ctaacgatgtcaattcttaaggatgttgaa

SEQ ID NO: 126440 - DNA, 30 bp, Artificial Sequence
  Synthetic oligonucleotide
tcgaatctgtgcacgtggtgtattgttgaa

SEQ ID NO: 126441 - DNA, 30 bp, Artificial Sequence
  Synthetic oligonucleotide
cgaaatcactttggtgttcacaagtttgaa

SEQ ID NO: 126442 - DNA, 30 bp, Artificial Sequence
  Synthetic oligonucleotide
acgcgcattggcaaaagctcggggaaataa

SEQ ID NO: 126443 - DNA, 30 bp, Artificial Sequence
  Synthetic oligonucleotide
gctaacgtagcgtgactcgaccgacaataa

SEQ ID NO: 126444 - DNA, 30 bp, Artificial Sequence
  Synthetic oligonucleotide
actaactccacaaatccctttaggcaataa

SEQ ID NO: 126445 - DNA, 30 bp, Artificial Sequence
  Synthetic oligonucleotide
attatgacaactcaggagccgtatcaataa

SEQ ID NO: 126446 - DNA, 30 bp, Artificial Sequence
  Synthetic oligonucleotide
cagcaatgcaaagataagaataaagaataa

SEQ ID NO: 126447 - DNA, 30 bp, Artificial Sequence
  Synthetic oligonucleotide
cggatatcccgtacattgacatacgaataa

SEQ ID NO: 126448 - DNA, 30 bp, Artificial Sequence
  Synthetic oligonucleotide
gtccgcgtttcacagtcaccaagcgaataa

SEQ ID NO: 126449 - DNA, 30 bp, Artificial Sequence
  Synthetic oligonucleotide
tactacacggctagagtggataaggaataa

SEQ ID NO: 126450 - DNA, 30 bp, Artificial Sequence
  Synthetic oligonucleotide
cagggcgccatgatagaggtggcggaataa

SEQ ID NO: 126451 - DNA, 30 bp, Artificial Sequence
  Synthetic oligonucleotide
cttgcggactctgactattgacgggaataa

SEQ ID NO: 126452 - DNA, 30 bp, Artificial Sequence
  Synthetic oligonucleotide
cgccgaatccgggtatgacagacctaataa

SEQ ID NO: 126453 - DNA, 30 bp, Artificial Sequence
  Synthetic oligonucleotide
caattgtaagggtgaaaactgagctaataa

SEQ ID NO: 126454 - DNA, 30 bp, Artificial Sequence
  Synthetic oligonucleotide
tggaatgcgaataagggacctgattaataa

SEQ ID NO: 126455 - DNA, 30 bp, Artificial Sequence
  Synthetic oligonucleotide
cagtgcaaagtgacagaataacctacataa

SEQ ID NO: 126456 - DNA, 30 bp, Artificial Sequence
  Synthetic oligonucleotide
taaagagttctcgccgaaaaataaccataa

SEQ ID NO: 126457 - DNA, 30 bp, Artificial Sequence
  Synthetic oligonucleotide
aatatagcataatatctacaagcaccataa

SEQ ID NO: 126458 - DNA, 30 bp, Artificial Sequence
  Synthetic oligonucleotide
gggaataacagaacgtaaacaaccccataa

SEQ ID NO: 126459 - DNA, 30 bp, Artificial Sequence
  Synthetic oligonucleotide
cgccagcggcccggtaatcaatcgccataa

SEQ ID NO: 126460 - DNA, 30 bp, Artificial Sequence
  Synthetic oligonucleotide
gtgagaaggatggtatagagatccgcataa

SEQ ID NO: 126461 - DNA, 30 bp, Artificial Sequence
  Synthetic oligonucleotide
cgaaccaagcctcaatatcgagaggcataa

SEQ ID NO: 126462 - DNA, 30 bp, Artificial Sequence
  Synthetic oligonucleotide
tagaggtgcaaaagaacttcgcctgcataa

SEQ ID NO: 126463 - DNA, 30 bp, Artificial Sequence
  Synthetic oligonucleotide
tctactgtacccttcctaaatcaatcataa

SEQ ID NO: 126464 - DNA, 30 bp, Artificial Sequence
  Synthetic oligonucleotide
gtgtactagatcgtaggaccatgatcataa

SEQ ID NO: 126465 - DNA, 30 bp, Artificial Sequence
  Synthetic oligonucleotide
cgtgtgagaccggaggtggctctatcataa

SEQ ID NO: 126466 - DNA, 30 bp, Artificial Sequence
  Synthetic oligonucleotide
atgggacaaatctaggtaagtctctcataa

SEQ ID NO: 126467 - DNA, 30 bp, Artificial Sequence
  Synthetic oligonucleotide
gtgggcccacggatattaaggttctcataa

SEQ ID NO: 126468 - DNA, 30 bp, Artificial Sequence
  Synthetic oligonucleotide
cacctacggttagcttgtaaggggtcataa

SEQ ID NO: 126469 - DNA, 30 bp, Artificial Sequence
  Synthetic oligonucleotide
acctggctgaagtgatgtagttcaagataa

SEQ ID NO: 126470 - DNA, 30 bp, Artificial Sequence
  Synthetic oligonucleotide
aggctccagaaaaataataatgtaagataa

SEQ ID NO: 126471 - DNA, 30 bp, Artificial Sequence
  Synthetic oligonucleotide
tgaggaatgtgcttacagcatacgagataa

SEQ ID NO: 126472 - DNA, 30 bp, Artificial Sequence
  Synthetic oligonucleotide
acccgtgcaaatacgaatcacgtgagataa

SEQ ID NO: 126473 - DNA, 30 bp, Artificial Sequence
  Synthetic oligonucleotide
ctgcaagtgatgtttagggcgagtagataa

SEQ ID NO: 126474 - DNA, 30 bp, Artificial Sequence
  Synthetic oligonucleotide
cattaatcttggtcgtcctgaatccgataa

SEQ ID NO: 126475 - DNA, 30 bp, Artificial Sequence
  Synthetic oligonucleotide
gggctataacattccgaaatggtccgataa

SEQ ID NO: 126476 - DNA, 30 bp, Artificial Sequence
  Synthetic oligonucleotide
cctcgccgacgcccgcctccccatcgataa

SEQ ID NO: 126477 - DNA, 30 bp, Artificial Sequence
  Synthetic oligonucleotide
cggctcctcagggtcaaacatcgcggataa

SEQ ID NO: 126478 - DNA, 30 bp, Artificial Sequence
  Synthetic oligonucleotide
ctgacagatcaaaagcataatgatggataa

SEQ ID NO: 126479 - DNA, 30 bp, Artificial Sequence
  Synthetic oligonucleotide
cctgcgaaggctttcgatcatactggataa

SEQ ID NO: 126480 - DNA, 30 bp, Artificial Sequence
  Synthetic oligonucleotide
tagttgggatgcgaccacggaatatgataa

SEQ ID NO: 126481 - DNA, 30 bp, Artificial Sequence
  Synthetic oligonucleotide
taagacggagacttgtccgatacgtgataa

SEQ ID NO: 126482 - DNA, 30 bp, Artificial Sequence
  Synthetic oligonucleotide
tgtaatctaatcatggtgaacctgtgataa

SEQ ID NO: 126483 - DNA, 30 bp, Artificial Sequence
  Synthetic oligonucleotide
catcgtcggtctgcgatttaattgtgataa

SEQ ID NO: 126484 - DNA, 30 bp, Artificial Sequence
  Synthetic oligonucleotide
aagtgctgttcccagtgaggacattgataa

SEQ ID NO: 126485 - DNA, 30 bp, Artificial Sequence
  Synthetic oligonucleotide
gaagacgtggaacgggtagtacgttgataa

SEQ ID NO: 126486 - DNA, 30 bp, Artificial Sequence
  Synthetic oligonucleotide
caggtccgaacatgcaagcggatttgataa

SEQ ID NO: 126487 - DNA, 30 bp, Artificial Sequence
  Synthetic oligonucleotide
agccatggcttacaattaacggccatataa

SEQ ID NO: 126488 - DNA, 30 bp, Artificial Sequence
  Synthetic oligonucleotide
caaacttccagcacagctcacggtatataa

SEQ ID NO: 126489 - DNA, 30 bp, Artificial Sequence
  Synthetic oligonucleotide
aggtgtagactccatttgcgttaactataa

SEQ ID NO: 126490 - DNA, 30 bp, Artificial Sequence
  Synthetic oligonucleotide
cttgtagaacaatgaatctgagtcctataa

SEQ ID NO: 126491 - DNA, 30 bp, Artificial Sequence
  Synthetic oligonucleotide
agcagaattcctgcggtcctagtcctataa

SEQ ID NO: 126492 - DNA, 30 bp, Artificial Sequence
  Synthetic oligonucleotide
gggcgccagacgtgtacttgcgtcctataa

SEQ ID NO: 126493 - DNA, 30 bp, Artificial Sequence
  Synthetic oligonucleotide
tatcgcgcaaaaacaaaggtggggctataa

SEQ ID NO: 126494 - DNA, 30 bp, Artificial Sequence
  Synthetic oligonucleotide
tagccccgataatacagaggattgctataa

SEQ ID NO: 126495 - DNA, 30 bp, Artificial Sequence
  Synthetic oligonucleotide
ggccatcgcgtaacccggagagacgtataa

SEQ ID NO: 126496 - DNA, 30 bp, Artificial Sequence
  Synthetic oligonucleotide
acaagtgctaaattggagaacgccttataa

SEQ ID NO: 126497 - DNA, 30 bp, Artificial Sequence
  Synthetic oligonucleotide
cgcatagttgtggtggtaaacgatttataa

SEQ ID NO: 126498 - DNA, 30 bp, Artificial Sequence
  Synthetic oligonucleotide
tgtggcggtaaagaatttctgtgtttataa

SEQ ID NO: 126499 - DNA, 30 bp, Artificial Sequence
  Synthetic oligonucleotide
cgtttgtgcacgggactatttcgaaactaa

SEQ ID NO: 126500 - DNA, 30 bp, Artificial Sequence
  Synthetic oligonucleotide
acatgcgcgtttcgaattggccttaactaa

SEQ ID NO: 126501 - DNA, 30 bp, Artificial Sequence
  Synthetic oligonucleotide
atgctatacgttacttttggagcccactaa

SEQ ID NO: 126502 - DNA, 30 bp, Artificial Sequence
  Synthetic oligonucleotide
taagtgaccaacccaaggctgtacgactaa

SEQ ID NO: 126503 - DNA, 30 bp, Artificial Sequence
  Synthetic oligonucleotide
ggcgggtagaccattatacaggaggactaa

SEQ ID NO: 126504 - DNA, 30 bp, Artificial Sequence
  Synthetic oligonucleotide
gcgacagtgattgcactaaaattggactaa

SEQ ID NO: 126505 - DNA, 30 bp, Artificial Sequence
  Synthetic oligonucleotide
cggtctaagttttgcacatataatgactaa

SEQ ID NO: 126506 - DNA, 30 bp, Artificial Sequence
  Synthetic oligonucleotide
atgacagtatccaggtattgaccctactaa

SEQ ID NO: 126507 - DNA, 30 bp, Artificial Sequence
  Synthetic oligonucleotide
atcagatgtcaatagtgtgatcgctactaa

SEQ ID NO: 126508 - DNA, 30 bp, Artificial Sequence
  Synthetic oligonucleotide
catggcattcgcggaacataagagtactaa

SEQ ID NO: 126509 - DNA, 30 bp, Artificial Sequence
  Synthetic oligonucleotide
tcttaataaagcgcacgacctcgttactaa

SEQ ID NO: 126510 - DNA, 30 bp, Artificial Sequence
  Synthetic oligonucleotide
tgacgtagactccacaaggatctaacctaa

SEQ ID NO: 126511 - DNA, 30 bp, Artificial Sequence
  Synthetic oligonucleotide
tttgcccagcgggactcatgtgatacctaa

SEQ ID NO: 126512 - DNA, 30 bp, Artificial Sequence
  Synthetic oligonucleotide
ccgtaacgttacttgtaggtatatgcctaa

SEQ ID NO: 126513 - DNA, 30 bp, Artificial Sequence
  Synthetic oligonucleotide
agacacgtcttaattcagtgtccctcctaa

SEQ ID NO: 126514 - DNA, 30 bp, Artificial Sequence
  Synthetic oligonucleotide
acgaattaacggccttatggttcgtcctaa

SEQ ID NO: 126515 - DNA, 30 bp, Artificial Sequence
  Synthetic oligonucleotide
ttgggtattaagagcacacttcattcctaa

SEQ ID NO: 126516 - DNA, 30 bp, Artificial Sequence
  Synthetic oligonucleotide
gatcagtgcaattgaaaagtgccaagctaa

SEQ ID NO: 126517 - DNA, 30 bp, Artificial Sequence
  Synthetic oligonucleotide
agacgggcgggcgacgagggtcgaagctaa

SEQ ID NO: 126518 - DNA, 30 bp, Artificial Sequence
  Synthetic oligonucleotide
ctgcttagacaggggggctccataagctaa

SEQ ID NO: 126519 - DNA, 30 bp, Artificial Sequence
  Synthetic oligonucleotide
aggcccaagggagttcgaggtcacagctaa

SEQ ID NO: 126520 - DNA, 30 bp, Artificial Sequence
  Synthetic oligonucleotide
tgaatcgatagaactataacttccagctaa

SEQ ID NO: 126521 - DNA, 30 bp, Artificial Sequence
  Synthetic oligonucleotide
agctggggctatgaaggcctatcgagctaa

SEQ ID NO: 126522 - DNA, 29 bp, Artificial Sequence
  Synthetic oligonucleotide
agaaggtgggttgtagttttgggagctaa

SEQ ID NO: 126523 - DNA, 30 bp, Artificial Sequence
  Synthetic oligonucleotide
taggaccaatagttctccacctggagctaa

SEQ ID NO: 126524 - DNA, 30 bp, Artificial Sequence
  Synthetic oligonucleotide
tcgattggactgtttcgaaggagtagctaa

SEQ ID NO: 126525 - DNA, 30 bp, Artificial Sequence
  Synthetic oligonucleotide
ccggtccaagacatgtagatcctgcgctaa

SEQ ID NO: 126526 - DNA, 30 bp, Artificial Sequence
  Synthetic oligonucleotide
gggaacacttagtcacaagtctttcgctaa

SEQ ID NO: 126527 - DNA, 30 bp, Artificial Sequence
  Synthetic oligonucleotide
tagggcgaatccagaattacgtccggctaa

SEQ ID NO: 126528 - DNA, 30 bp, Artificial Sequence
  Synthetic oligonucleotide
caaaacggactacgtattagttccggctaa

SEQ ID NO: 126529 - DNA, 30 bp, Artificial Sequence
  Synthetic oligonucleotide
gaggtctcatggtaccttcccatcggctaa

SEQ ID NO: 126530 - DNA, 40 bp, Artificial Sequence
  Synthetic oligonucleotide
aaagtagtacgaattaaaatatgtgtagacttgtggctaa

SEQ ID NO: 126531 - DNA, 30 bp, Artificial Sequence
  Synthetic oligonucleotide
gaaatgtgtaaacatcataccaaatgctaa

SEQ ID NO: 126532 - DNA, 30 bp, Artificial Sequence
  Synthetic oligonucleotide
aaacggcataaaccgcacccacactgctaa

SEQ ID NO: 126533 - DNA, 30 bp, Artificial Sequence
  Synthetic oligonucleotide
ccagcgattgacatgtctgaatactgctaa

SEQ ID NO: 126534 - DNA, 30 bp, Artificial Sequence
  Synthetic oligonucleotide
gtcagaacaaagagacgatcatattgctaa

SEQ ID NO: 126535 - DNA, 30 bp, Artificial Sequence
  Synthetic oligonucleotide
cggccaatcggtcaattcagtatttgctaa

SEQ ID NO: 126536 - DNA, 30 bp, Artificial Sequence
  Synthetic oligonucleotide
agggtcacgacagagttggtgagcatctaa

SEQ ID NO: 126537 - DNA, 30 bp, Artificial Sequence
  Synthetic oligonucleotide
cccgaaaggcatgtaggtcagtggatctaa

SEQ ID NO: 126538 - DNA, 30 bp, Artificial Sequence
  Synthetic oligonucleotide
ccttagtcgggtttgatagagaatatctaa

SEQ ID NO: 126539 - DNA, 30 bp, Artificial Sequence
  Synthetic oligonucleotide
tcgaagatacatctgccagaccgtatctaa

SEQ ID NO: 126540 - DNA, 30 bp, Artificial Sequence
  Synthetic oligonucleotide
cctcaacttacacggtgtatgttactctaa

SEQ ID NO: 126541 - DNA, 30 bp, Artificial Sequence
  Synthetic oligonucleotide
tgcgattttgacaaatctggaccagtctaa

SEQ ID NO: 126542 - DNA, 30 bp, Artificial Sequence
  Synthetic oligonucleotide
ggggtgtttaaccgtgcgcgcatggtctaa

SEQ ID NO: 126543 - DNA, 30 bp, Artificial Sequence
  Synthetic oligonucleotide
gtgtgctagtccttggacggccatgtctaa

SEQ ID NO: 126544 - DNA, 30 bp, Artificial Sequence
  Synthetic oligonucleotide
gttagggacagcaaatggagttctgtctaa

SEQ ID NO: 126545 - DNA, 30 bp, Artificial Sequence
  Synthetic oligonucleotide
cgggtgccacgcaagtttgggttattctaa

SEQ ID NO: 126546 - DNA, 30 bp, Artificial Sequence
  Synthetic oligonucleotide
aagggattaggcatgcaggcggacttctaa

SEQ ID NO: 126547 - DNA, 31 bp, Artificial Sequence
  Synthetic oligonucleotide
tggacatgaagtgagccccccttccaagtaa

SEQ ID NO: 126548 - DNA, 30 bp, Artificial Sequence
  Synthetic oligonucleotide
aggccatgtatttaatgaacagagaagtaa

SEQ ID NO: 126549 - DNA, 30 bp, Artificial Sequence
  Synthetic oligonucleotide
aagccgatgctgtgaagactgtggaagtaa

SEQ ID NO: 126550 - DNA, 30 bp, Artificial Sequence
  Synthetic oligonucleotide
gatagcctccgagggatcgtccttaagtaa

SEQ ID NO: 126551 - DNA, 30 bp, Artificial Sequence
  Synthetic oligonucleotide
tgtccttaaccatgaactgggtagcagtaa

SEQ ID NO: 126552 - DNA, 30 bp, Artificial Sequence
  Synthetic oligonucleotide
gaaagggagtgcgatgtacctgatcagtaa

SEQ ID NO: 126553 - DNA, 30 bp, Artificial Sequence
  Synthetic oligonucleotide
aaaacaccgaccgtaagcggtcctcagtaa

SEQ ID NO: 126554 - DNA, 30 bp, Artificial Sequence
  Synthetic oligonucleotide
tcactatgtcaacttgatcgctaagagtaa

SEQ ID NO: 126555 - DNA, 30 bp, Artificial Sequence
  Synthetic oligonucleotide
gttaaataccgccgaaccctaccagagtaa

SEQ ID NO: 126556 - DNA, 30 bp, Artificial Sequence
  Synthetic oligonucleotide
ctccttggcaaaacgtggaaaatagagtaa

SEQ ID NO: 126557 - DNA, 30 bp, Artificial Sequence
  Synthetic oligonucleotide
taattccgaaaactatattcgaacgagtaa

SEQ ID NO: 126558 - DNA, 30 bp, Artificial Sequence
  Synthetic oligonucleotide
gcgcaacgccgggatacagaaaccgagtaa

SEQ ID NO: 126559 - DNA, 30 bp, Artificial Sequence
  Synthetic oligonucleotide
gtacggctccacagcttatcacgtgagtaa

SEQ ID NO: 126560 - DNA, 30 bp, Artificial Sequence
  Synthetic oligonucleotide
tggataccgacaacctaccatatatagtaa

SEQ ID NO: 126561 - DNA, 30 bp, Artificial Sequence
  Synthetic oligonucleotide
ttggtgtcacgtttcaagggaaagtagtaa

SEQ ID NO: 126562 - DNA, 30 bp, Artificial Sequence
  Synthetic oligonucleotide
tcagtacgacaactcccgcgttggtagtaa

SEQ ID NO: 126563 - DNA, 30 bp, Artificial Sequence
  Synthetic oligonucleotide
tgtatagcaccgcggcagatggattagtaa

SEQ ID NO: 126564 - DNA, 30 bp, Artificial Sequence
  Synthetic oligonucleotide
aggcttacagctggtctactaaggacgtaa

SEQ ID NO: 126565 - DNA, 30 bp, Artificial Sequence
  Synthetic oligonucleotide
tccgatcgcagttccatcctagctccgtaa

SEQ ID NO: 126566 - DNA, 30 bp, Artificial Sequence
  Synthetic oligonucleotide
cgagcggcttggattcttctcccagcgtaa

SEQ ID NO: 126567 - DNA, 30 bp, Artificial Sequence
  Synthetic oligonucleotide
gagcatgcacttcgaagattaggagcgtaa

SEQ ID NO: 126568 - DNA, 30 bp, Artificial Sequence
  Synthetic oligonucleotide
cacgggttgttcttaacaattggagcgtaa

SEQ ID NO: 126569 - DNA, 30 bp, Artificial Sequence
  Synthetic oligonucleotide
cattatggctgagggggaccgtgtgcgtaa

SEQ ID NO: 126570 - DNA, 30 bp, Artificial Sequence
  Synthetic oligonucleotide
gatgcgttgattgcaagtcgggcatcgtaa

SEQ ID NO: 126571 - DNA, 30 bp, Artificial Sequence
  Synthetic oligonucleotide
ctccatcggggagggctttatctgtcgtaa

SEQ ID NO: 126572 - DNA, 30 bp, Artificial Sequence
  Synthetic oligonucleotide
attacaaatagcgttggtgaaggttcgtaa

SEQ ID NO: 126573 - DNA, 30 bp, Artificial Sequence
  Synthetic oligonucleotide
tctggatagatcctcaagaggacaaggtaa

SEQ ID NO: 126574 - DNA, 30 bp, Artificial Sequence
  Synthetic oligonucleotide
ttggaaataggacttcgaaccaccaggtaa

SEQ ID NO: 126575 - DNA, 30 bp, Artificial Sequence
  Synthetic oligonucleotide
ggggacggaaaaagttcccctcagaggtaa

SEQ ID NO: 126576 - DNA, 30 bp, Artificial Sequence
  Synthetic oligonucleotide
aatcaatacgggcattgttgagcgaggtaa

SEQ ID NO: 126577 - DNA, 30 bp, Artificial Sequence
  Synthetic oligonucleotide
tggtaattccggatacgtaacttgaggtaa

SEQ ID NO: 126578 - DNA, 30 bp, Artificial Sequence
  Synthetic oligonucleotide
gtgatgaagacgtgcacagtgtataggtaa

SEQ ID NO: 126579 - DNA, 30 bp, Artificial Sequence
  Synthetic oligonucleotide
gacagtgagaggatccctgccccgcggtaa

SEQ ID NO: 126580 - DNA, 30 bp, Artificial Sequence
  Synthetic oligonucleotide
tcatggagcgtgggtcgctatgatcggtaa

SEQ ID NO: 126581 - DNA, 30 bp, Artificial Sequence
  Synthetic oligonucleotide
tctggggaagtgtggacgccagttcggtaa

SEQ ID NO: 126582 - DNA, 30 bp, Artificial Sequence
  Synthetic oligonucleotide
atcgactgtggtcaatcgaagggagggtaa

SEQ ID NO: 126583 - DNA, 30 bp, Artificial Sequence
  Synthetic oligonucleotide
tcgaaccccacatacaagaggtgggggtaa

SEQ ID NO: 126584 - DNA, 30 bp, Artificial Sequence
  Synthetic oligonucleotide
gtcggaagcgtgaccggcgcgatggggtaa

SEQ ID NO: 126585 - DNA, 30 bp, Artificial Sequence
  Synthetic oligonucleotide
tgtatcatataaaactattaagtggggtaa

SEQ ID NO: 126586 - DNA, 30 bp, Artificial Sequence
  Synthetic oligonucleotide
aaggtggtcctacctgtactacactggtaa

SEQ ID NO: 126587 - DNA, 30 bp, Artificial Sequence
  Synthetic oligonucleotide
tggaccgagagtaacagccgcctctggtaa

SEQ ID NO: 126588 - DNA, 30 bp, Artificial Sequence
  Synthetic oligonucleotide
cgctttaggagcagaaggaacgggtggtaa

SEQ ID NO: 126589 - DNA, 30 bp, Artificial Sequence
  Synthetic oligonucleotide
ccgttgcccgacagtcagaccgtgtggtaa

SEQ ID NO: 126590 - DNA, 30 bp, Artificial Sequence
  Synthetic oligonucleotide
ggggtatgtgagtcttgtgagcattggtaa

SEQ ID NO: 126591 - DNA, 30 bp, Artificial Sequence
  Synthetic oligonucleotide
cgcagggctgcatcacgcccagaaatgtaa

SEQ ID NO: 126592 - DNA, 30 bp, Artificial Sequence
  Synthetic oligonucleotide
acgctggtaacgttagagaccccgatgtaa

SEQ ID NO: 126593 - DNA, 30 bp, Artificial Sequence
  Synthetic oligonucleotide
taacgatcaagcatggacgatatgatgtaa

SEQ ID NO: 126594 - DNA, 30 bp, Artificial Sequence
  Synthetic oligonucleotide
caatgctgtctagcggcctcccctatgtaa

SEQ ID NO: 126595 - DNA, 30 bp, Artificial Sequence
  Synthetic oligonucleotide
gcgtacgtggggtgtagtgcccaactgtaa

SEQ ID NO: 126596 - DNA, 30 bp, Artificial Sequence
  Synthetic oligonucleotide
agtcagccaaaagtggccgacgttctgtaa

SEQ ID NO: 126597 - DNA, 30 bp, Artificial Sequence
  Synthetic oligonucleotide
ttgttcacaattcgatagaaaagcttgtaa

SEQ ID NO: 126598 - DNA, 30 bp, Artificial Sequence
  Synthetic oligonucleotide
ataggttcacggcgtagagaaggcttgtaa

SEQ ID NO: 126599 - DNA, 30 bp, Artificial Sequence
  Synthetic oligonucleotide
agaggaagagtatgacattaaaagttgtaa

SEQ ID NO: 126600 - DNA, 30 bp, Artificial Sequence
  Synthetic oligonucleotide
taaagcattgtaaagcgagacaagttgtaa

SEQ ID NO: 126601 - DNA, 30 bp, Artificial Sequence
  Synthetic oligonucleotide
gttgagactagtggtaagggctagttgtaa

SEQ ID NO: 126602 - DNA, 30 bp, Artificial Sequence
  Synthetic oligonucleotide
acaagtcgaggaaaagtaagataaaattaa

SEQ ID NO: 126603 - DNA, 30 bp, Artificial Sequence
  Synthetic oligonucleotide
acttagagtggatctagactcggcaattaa

SEQ ID NO: 126604 - DNA, 30 bp, Artificial Sequence
  Synthetic oligonucleotide
attgcacgacagattccgactacgaattaa

SEQ ID NO: 126605 - DNA, 30 bp, Artificial Sequence
  Synthetic oligonucleotide
agtagcccaagcacaccattgaataattaa

SEQ ID NO: 126606 - DNA, 30 bp, Artificial Sequence
  Synthetic oligonucleotide
tatcgcgggctcgcgctaaatccggattaa

SEQ ID NO: 126607 - DNA, 30 bp, Artificial Sequence
  Synthetic oligonucleotide
ccgactttggggaggatggaactggattaa

SEQ ID NO: 126608 - DNA, 30 bp, Artificial Sequence
  Synthetic oligonucleotide
aggcagaacagtgaagagcgttactattaa

SEQ ID NO: 126609 - DNA, 30 bp, Artificial Sequence
  Synthetic oligonucleotide
ctgaggtaagtcaaacaggtattctattaa

SEQ ID NO: 126610 - DNA, 30 bp, Artificial Sequence
  Synthetic oligonucleotide
gcctaggatcaagaaattgaacggtattaa

SEQ ID NO: 126611 - DNA, 30 bp, Artificial Sequence
  Synthetic oligonucleotide
cgtagtaccccagctagattttggtattaa

SEQ ID NO: 126612 - DNA, 30 bp, Artificial Sequence
  Synthetic oligonucleotide
tgtgtccagttcaaacgaacactcacttaa

SEQ ID NO: 126613 - DNA, 30 bp, Artificial Sequence
  Synthetic oligonucleotide
gaagcatccaaaccccgtgttcaaccttaa

SEQ ID NO: 126614 - DNA, 30 bp, Artificial Sequence
  Synthetic oligonucleotide
agtacatccgatcccgaggggtttgcttaa

SEQ ID NO: 126615 - DNA, 30 bp, Artificial Sequence
  Synthetic oligonucleotide
tggaacgaggtaacatgggggttatcttaa

SEQ ID NO: 126616 - DNA, 30 bp, Artificial Sequence
  Synthetic oligonucleotide
ggacaaggattaacgaataagacgtcttaa

SEQ ID NO: 126617 - DNA, 30 bp, Artificial Sequence
  Synthetic oligonucleotide
tggaaatgcggctgttgagtgtggtcttaa

SEQ ID NO: 126618 - DNA, 30 bp, Artificial Sequence
  Synthetic oligonucleotide
atatccgttcggtataacgaaaaaagttaa

SEQ ID NO: 126619 - DNA, 30 bp, Artificial Sequence
  Synthetic oligonucleotide
tctctgcgctggcgaaatcggaaaagttaa

SEQ ID NO: 126620 - DNA, 30 bp, Artificial Sequence
  Synthetic oligonucleotide
ctagatttcagggaaggctaagcacgttaa

SEQ ID NO: 126621 - DNA, 30 bp, Artificial Sequence
  Synthetic oligonucleotide
tcagaaacggtgccatgagtagcacgttaa

SEQ ID NO: 126622 - DNA, 30 bp, Artificial Sequence
  Synthetic oligonucleotide
tagggaattattatgataaggctacgttaa

SEQ ID NO: 126623 - DNA, 30 bp, Artificial Sequence
  Synthetic oligonucleotide
gcgtgcagggacttgcgaggcacccgttaa

SEQ ID NO: 126624 - DNA, 30 bp, Artificial Sequence
  Synthetic oligonucleotide
caagacattgaggcaccgcactgtcgttaa

SEQ ID NO: 126625 - DNA, 30 bp, Artificial Sequence
  Synthetic oligonucleotide
gtggtgcaaataagtttgagaggcggttaa

SEQ ID NO: 126626 - DNA, 30 bp, Artificial Sequence
  Synthetic oligonucleotide
gttggggacggtagtaccctagtcggttaa

SEQ ID NO: 126627 - DNA, 30 bp, Artificial Sequence
  Synthetic oligonucleotide
ggatactgggtacaatcatgtccttgttaa

SEQ ID NO: 126628 - DNA, 30 bp, Artificial Sequence
  Synthetic oligonucleotide
caatgggggtgctacaccaatagcatttaa

SEQ ID NO: 126629 - DNA, 30 bp, Artificial Sequence
  Synthetic oligonucleotide
agaaatgggacgggtgtacactctctttaa

SEQ ID NO: 126630 - DNA, 30 bp, Artificial Sequence
  Synthetic oligonucleotide
ccgtatacccctcatcaaaccagagtttaa

SEQ ID NO: 126631 - DNA, 30 bp, Artificial Sequence
  Synthetic oligonucleotide
tataactcagcgatgtcaaaaggagtttaa

SEQ ID NO: 126632 - DNA, 30 bp, Artificial Sequence
  Synthetic oligonucleotide
gcgacatgtcgctgaagctagtacgtttaa

SEQ ID NO: 126633 - DNA, 30 bp, Artificial Sequence
  Synthetic oligonucleotide
gctacagaagcgttgatggttgaaaaaaca

SEQ ID NO: 126634 - DNA, 30 bp, Artificial Sequence
  Synthetic oligonucleotide
caaacgagtcccgtataattatgcaaaaca

SEQ ID NO: 126635 - DNA, 30 bp, Artificial Sequence
  Synthetic oligonucleotide
ttacagcgttcacgaaaacagcaacaaaca

SEQ ID NO: 126636 - DNA, 30 bp, Artificial Sequence
  Synthetic oligonucleotide
tagacaagcccacgaagtcaaatacaaaca

SEQ ID NO: 126637 - DNA, 30 bp, Artificial Sequence
  Synthetic oligonucleotide
agcaagaggaagcaacgaacggagcaaaca

SEQ ID NO: 126638 - DNA, 30 bp, Artificial Sequence
  Synthetic oligonucleotide
gtacgatatagatccggctttggtcaaaca

SEQ ID NO: 126639 - DNA, 30 bp, Artificial Sequence
  Synthetic oligonucleotide
taaaaaagggaccgatcgaaatccgaaaca

SEQ ID NO: 126640 - DNA, 30 bp, Artificial Sequence
  Synthetic oligonucleotide
ggtgcgggcgcgccgcaatggagcgaaaca

SEQ ID NO: 126641 - DNA, 30 bp, Artificial Sequence
  Synthetic oligonucleotide
gcaagaccggccatcaaaggcagggaaaca

SEQ ID NO: 126642 - DNA, 30 bp, Artificial Sequence
  Synthetic oligonucleotide
acaccgtcgagtgcacagcattttgaaaca

SEQ ID NO: 126643 - DNA, 30 bp, Artificial Sequence
  Synthetic oligonucleotide
tcactcctcacatggagaaactgataaaca

SEQ ID NO: 126644 - DNA, 30 bp, Artificial Sequence
  Synthetic oligonucleotide
ggaggccagatcggttgatacaactaaaca

SEQ ID NO: 126645 - DNA, 30 bp, Artificial Sequence
  Synthetic oligonucleotide
aattggaggaaggtaacgtcgtactaaaca

SEQ ID NO: 126646 - DNA, 30 bp, Artificial Sequence
  Synthetic oligonucleotide
gggtcaaatcagttggtctggacctaaaca

SEQ ID NO: 126647 - DNA, 31 bp, Artificial Sequence
  Synthetic oligonucleotide
cggtgtgcgcccaaaccaagcatcctaaaca

SEQ ID NO: 126648 - DNA, 30 bp, Artificial Sequence
  Synthetic oligonucleotide
acagtactgaattgttatcgagagtaaaca

SEQ ID NO: 126649 - DNA, 30 bp, Artificial Sequence
  Synthetic oligonucleotide
cacaggacacgtagaaatctgtgttaaaca

SEQ ID NO: 126650 - DNA, 30 bp, Artificial Sequence
  Synthetic oligonucleotide
cttttggcaaggtggtaagaataaacaaca

SEQ ID NO: 126651 - DNA, 30 bp, Artificial Sequence
  Synthetic oligonucleotide
tctggactatgctatagatgcgccacaaca

SEQ ID NO: 126652 - DNA, 30 bp, Artificial Sequence
  Synthetic oligonucleotide
agcgcctggcgcctgcgtttctccacaaca

SEQ ID NO: 126653 - DNA, 30 bp, Artificial Sequence
  Synthetic oligonucleotide
catcagaagagggcagctgtacgcacaaca

SEQ ID NO: 126654 - DNA, 30 bp, Artificial Sequence
  Synthetic oligonucleotide
tccttggtgacagcacctcaaacaccaaca

SEQ ID NO: 126655 - DNA, 30 bp, Artificial Sequence
  Synthetic oligonucleotide
ctccgtgaacgatagggacgggccccaaca

SEQ ID NO: 126656 - DNA, 30 bp, Artificial Sequence
  Synthetic oligonucleotide
agcaaatatacactgcgatgacggccaaca

SEQ ID NO: 126657 - DNA, 30 bp, Artificial Sequence
  Synthetic oligonucleotide
ggcttaaaaaggatcaagtcattgccaaca

SEQ ID NO: 126658 - DNA, 30 bp, Artificial Sequence
  Synthetic oligonucleotide
ttcaggcaggtagagttcagtgaagcaaca

SEQ ID NO: 126659 - DNA, 30 bp, Artificial Sequence
  Synthetic oligonucleotide
cctcaggagcagattaaaactctagcaaca

SEQ ID NO: 126660 - DNA, 30 bp, Artificial Sequence
  Synthetic oligonucleotide
tagaaaagggcgggcaacatcagggcaaca

SEQ ID NO: 126661 - DNA, 30 bp, Artificial Sequence
  Synthetic oligonucleotide
ccacgtcggtgagtcacctccctggcaaca

SEQ ID NO: 126662 - DNA, 30 bp, Artificial Sequence
  Synthetic oligonucleotide
accatagttaatcaaatggcggatgcaaca

SEQ ID NO: 126663 - DNA, 30 bp, Artificial Sequence
  Synthetic oligonucleotide
atgaggcaattacgttttccttctgcaaca

SEQ ID NO: 126664 - DNA, 30 bp, Artificial Sequence
  Synthetic oligonucleotide
aactaattgggtatgtaaacccgtgcaaca

SEQ ID NO: 126665 - DNA, 30 bp, Artificial Sequence
  Synthetic oligonucleotide
ggtaataagtccgtcctaccgcaatcaaca

SEQ ID NO: 126666 - DNA, 30 bp, Artificial Sequence
  Synthetic oligonucleotide
tgcacactgcgtactcgatgtatgtcaaca

SEQ ID NO: 126667 - DNA, 30 bp, Artificial Sequence
  Synthetic oligonucleotide
ccaaagggttgagaatagggttgcagaaca

SEQ ID NO: 126668 - DNA, 30 bp, Artificial Sequence
  Synthetic oligonucleotide
tggattctcccggacagcaacctgagaaca

SEQ ID NO: 126669 - DNA, 30 bp, Artificial Sequence
  Synthetic oligonucleotide
cgtgtgatgacagctaattgtcctagaaca

SEQ ID NO: 126670 - DNA, 30 bp, Artificial Sequence
  Synthetic oligonucleotide
aaggatataggagggtatgggcgacgaaca

SEQ ID NO: 126671 - DNA, 30 bp, Artificial Sequence
  Synthetic oligonucleotide
tagagagctatgctgagcgccgagcgaaca

SEQ ID NO: 126672 - DNA, 30 bp, Artificial Sequence
  Synthetic oligonucleotide
atacgaatgggcgtaggtgcttcgcgaaca

SEQ ID NO: 126673 - DNA, 30 bp, Artificial Sequence
  Synthetic oligonucleotide
gcctgttgacaagctgaaaataggcgaaca

SEQ ID NO: 126674 - DNA, 30 bp, Artificial Sequence
  Synthetic oligonucleotide
agtcaacgggtagattcggaccttcgaaca

SEQ ID NO: 126675 - DNA, 30 bp, Artificial Sequence
  Synthetic oligonucleotide
aaaagatcttgaatacatggctgcggaaca

SEQ ID NO: 126676 - DNA, 30 bp, Artificial Sequence
  Synthetic oligonucleotide
agtcgcgagacgaattatttggttggaaca

SEQ ID NO: 126677 - DNA, 30 bp, Artificial Sequence
  Synthetic oligonucleotide
gctgtgagaaggggaggtgctatatgaaca

SEQ ID NO: 126678 - DNA, 30 bp, Artificial Sequence
  Synthetic oligonucleotide
gaattacgagccagtaacctcacgtgaaca

SEQ ID NO: 126679 - DNA, 30 bp, Artificial Sequence
  Synthetic oligonucleotide
atagtaggtagggacataaacgattgaaca

SEQ ID NO: 126680 - DNA, 30 bp, Artificial Sequence
  Synthetic oligonucleotide
atgtgaggggtcctaggtctggcgataaca

SEQ ID NO: 126681 - DNA, 30 bp, Artificial Sequence
  Synthetic oligonucleotide
aagcaggcccacccaatacaagttataaca

SEQ ID NO: 126682 - DNA, 30 bp, Artificial Sequence
  Synthetic oligonucleotide
cgcggccaaggtgaagaaaatttactaaca

SEQ ID NO: 126683 - DNA, 30 bp, Artificial Sequence
  Synthetic oligonucleotide
cgaatgagttaccttagctacatagtaaca

SEQ ID NO: 126684 - DNA, 30 bp, Artificial Sequence
  Synthetic oligonucleotide
aatgaaaccaatttggagcagtcggtaaca

SEQ ID NO: 126685 - DNA, 30 bp, Artificial Sequence
  Synthetic oligonucleotide
cagaggaatatgatcatagcattggtaaca

SEQ ID NO: 126686 - DNA, 30 bp, Artificial Sequence
  Synthetic oligonucleotide
ccgaaggatgttccatcctagcaattaaca

SEQ ID NO: 126687 - DNA, 30 bp, Artificial Sequence
  Synthetic oligonucleotide
gttagattacttgacaaccgagtattaaca

SEQ ID NO: 126688 - DNA, 30 bp, Artificial Sequence
  Synthetic oligonucleotide
gcagtgggcgagaaagagctcgaaaacaca

SEQ ID NO: 126689 - DNA, 30 bp, Artificial Sequence
  Synthetic oligonucleotide
cttccgcttgtactcaaggaggtaaacaca

SEQ ID NO: 126690 - DNA, 30 bp, Artificial Sequence
  Synthetic oligonucleotide
ttgagactcgacagcaaggagaaacacaca

SEQ ID NO: 126691 - DNA, 30 bp, Artificial Sequence
  Synthetic oligonucleotide
ggtgcagaagcctaatagcgtgcacacaca

SEQ ID NO: 126692 - DNA, 30 bp, Artificial Sequence
  Synthetic oligonucleotide
cggacattgggtttgcatgaattacacaca

SEQ ID NO: 126693 - DNA, 30 bp, Artificial Sequence
  Synthetic oligonucleotide
tggtagcgatgtcaatcctacaaccacaca

SEQ ID NO: 126694 - DNA, 30 bp, Artificial Sequence
  Synthetic oligonucleotide
cagcacaccgatagacctcgcagtcacaca

SEQ ID NO: 126695 - DNA, 31 bp, Artificial Sequence
  Synthetic oligonucleotide
acggccacttactcgttactgtacagacaca

SEQ ID NO: 126696 - DNA, 30 bp, Artificial Sequence
  Synthetic oligonucleotide
actaataacctggctgtaacgcgagacaca

SEQ ID NO: 126697 - DNA, 30 bp, Artificial Sequence
  Synthetic oligonucleotide
ccaaatgaatacttggacaccttggacaca

SEQ ID NO: 126698 - DNA, 30 bp, Artificial Sequence
  Synthetic oligonucleotide
catcccaaagttttatccgtctaatacaca

SEQ ID NO: 126699 - DNA, 30 bp, Artificial Sequence
  Synthetic oligonucleotide
aggcgtctcggttactaccgtagatacaca

SEQ ID NO: 126700 - DNA, 30 bp, Artificial Sequence
  Synthetic oligonucleotide
cttagagttccagaggagttgcactacaca

SEQ ID NO: 126701 - DNA, 30 bp, Artificial Sequence
  Synthetic oligonucleotide
gtgaccatcgtgtattaactcccgtacaca

SEQ ID NO: 126702 - DNA, 30 bp, Artificial Sequence
  Synthetic oligonucleotide
cggtgctatacactttcatacaaaaccaca

SEQ ID NO: 126703 - DNA, 30 bp, Artificial Sequence
  Synthetic oligonucleotide
aggccaatgtcccggaatcaaacaaccaca

SEQ ID NO: 126704 - DNA, 30 bp, Artificial Sequence
  Synthetic oligonucleotide
gccggctggggtggatgattagacaccaca

SEQ ID NO: 126705 - DNA, 30 bp, Artificial Sequence
  Synthetic oligonucleotide
cctatgagggccttaagcacgtggaccaca

SEQ ID NO: 126706 - DNA, 30 bp, Artificial Sequence
  Synthetic oligonucleotide
tgagtcgtcagtgtccaaagacagcccaca

SEQ ID NO: 126707 - DNA, 30 bp, Artificial Sequence
  Synthetic oligonucleotide
aaacttgtcccggcaatgctccagcccaca

SEQ ID NO: 126708 - DNA, 30 bp, Artificial Sequence
  Synthetic oligonucleotide
aactaacatctcccgtcaggccgtcccaca

SEQ ID NO: 126709 - DNA, 30 bp, Artificial Sequence
  Synthetic oligonucleotide
ccaagaaagcaaggcttgtgcagagccaca

SEQ ID NO: 126710 - DNA, 30 bp, Artificial Sequence
  Synthetic oligonucleotide
ttgctttatttacaagtagtaagggccaca

SEQ ID NO: 126711 - DNA, 30 bp, Artificial Sequence
  Synthetic oligonucleotide
tacgtgcccccagacaagcttatttccaca

SEQ ID NO: 126712 - DNA, 30 bp, Artificial Sequence
  Synthetic oligonucleotide
tacaggacaaagttggtttaagaaagcaca

SEQ ID NO: 126713 - DNA, 30 bp, Artificial Sequence
  Synthetic oligonucleotide
actaatggaactcagtacattatgagcaca

SEQ ID NO: 126714 - DNA, 30 bp, Artificial Sequence
  Synthetic oligonucleotide
cacgtgtggcgtgtatgtacaaaccgcaca

SEQ ID NO: 126715 - DNA, 30 bp, Artificial Sequence
  Synthetic oligonucleotide
actggcctgctgtcttcaccttagggcaca

SEQ ID NO: 126716 - DNA, 30 bp, Artificial Sequence
  Synthetic oligonucleotide
acgtcggtggcgtaacctacttaatgcaca

SEQ ID NO: 126717 - DNA, 30 bp, Artificial Sequence
  Synthetic oligonucleotide
caccgtcggttcgcgtaagaaggatgcaca

SEQ ID NO: 126718 - DNA, 30 bp, Artificial Sequence
  Synthetic oligonucleotide
acatcagacgattcataggactcgtgcaca

SEQ ID NO: 126719 - DNA, 30 bp, Artificial Sequence
  Synthetic oligonucleotide
gtactacggaatatagtgcgttgaatcaca

SEQ ID NO: 126720 - DNA, 30 bp, Artificial Sequence
  Synthetic oligonucleotide
atgaggatggccaggatctctcggatcaca

SEQ ID NO: 126721 - DNA, 30 bp, Artificial Sequence
  Synthetic oligonucleotide
tgagcggtgctcggtcttgccagactcaca

SEQ ID NO: 126722 - DNA, 30 bp, Artificial Sequence
  Synthetic oligonucleotide
atgcgaacctcgcagggccgcgccctcaca

SEQ ID NO: 126723 - DNA, 30 bp, Artificial Sequence
  Synthetic oligonucleotide
ccagacgaatttagtacattgagcctcaca

SEQ ID NO: 126724 - DNA, 30 bp, Artificial Sequence
  Synthetic oligonucleotide
gtctagagaacctaatagtatgagctcaca

SEQ ID NO: 126725 - DNA, 30 bp, Artificial Sequence
  Synthetic oligonucleotide
ccggctcctcccttcgaccatttgctcaca

SEQ ID NO: 126726 - DNA, 30 bp, Artificial Sequence
  Synthetic oligonucleotide
cccgtctagtactaggaacgaaacgtcaca

SEQ ID NO: 126727 - DNA, 30 bp, Artificial Sequence
  Synthetic oligonucleotide
atgggcatacattttggcagttaggtcaca

SEQ ID NO: 126728 - DNA, 30 bp, Artificial Sequence
  Synthetic oligonucleotide
acatatgtcctactgagactaggggtcaca

SEQ ID NO: 126729 - DNA, 30 bp, Artificial Sequence
  Synthetic oligonucleotide
agtgatgcgacaaatcggttcgtggtcaca

SEQ ID NO: 126730 - DNA, 30 bp, Artificial Sequence
  Synthetic oligonucleotide
gacaaagtagtataatgaaacccattcaca

SEQ ID NO: 126731 - DNA, 30 bp, Artificial Sequence
  Synthetic oligonucleotide
cacatctaaggttcgagccgacacaagaca

SEQ ID NO: 126732 - DNA, 30 bp, Artificial Sequence
  Synthetic oligonucleotide
cgattatcaggaaagttatgctacaagaca

SEQ ID NO: 126733 - DNA, 30 bp, Artificial Sequence
  Synthetic oligonucleotide
gacccacagcgggacgacgagcccaagaca

SEQ ID NO: 126734 - DNA, 30 bp, Artificial Sequence
  Synthetic oligonucleotide
agtggcgttcatatttgcgagatcaagaca

SEQ ID NO: 126735 - DNA, 30 bp, Artificial Sequence
  Synthetic oligonucleotide
gtgtcctcaatgcgagagcttttcaagaca

SEQ ID NO: 126736 - DNA, 30 bp, Artificial Sequence
  Synthetic oligonucleotide
cagggaaacttgaatgtaccacagaagaca

SEQ ID NO: 126737 - DNA, 30 bp, Artificial Sequence
  Synthetic oligonucleotide
acgtcagaaggccgcagatactagaagaca

SEQ ID NO: 126738 - DNA, 30 bp, Artificial Sequence
  Synthetic oligonucleotide
tgggcgaatgcccgaggtaggagtaagaca

SEQ ID NO: 126739 - DNA, 30 bp, Artificial Sequence
  Synthetic oligonucleotide
ggaccgtagaacgtagtagttagtaagaca

SEQ ID NO: 126740 - DNA, 30 bp, Artificial Sequence
  Synthetic oligonucleotide
aggctaatagctggtgaaggccttaagaca

SEQ ID NO: 126741 - DNA, 30 bp, Artificial Sequence
  Synthetic oligonucleotide
cgagcccttcccggttggcaacaacagaca

SEQ ID NO: 126742 - DNA, 30 bp, Artificial Sequence
  Synthetic oligonucleotide
tacttgaccacgggaggcgttagtgagaca

SEQ ID NO: 126743 - DNA, 30 bp, Artificial Sequence
  Synthetic oligonucleotide
acggattccggagatccgcatgaatagaca

SEQ ID NO: 126744 - DNA, 30 bp, Artificial Sequence
  Synthetic oligonucleotide
acggaccctaggagaaatacaatctagaca

SEQ ID NO: 126745 - DNA, 30 bp, Artificial Sequence
  Synthetic oligonucleotide
ccagaaggtgcttgctatcgaatttagaca

SEQ ID NO: 126746 - DNA, 30 bp, Artificial Sequence
  Synthetic oligonucleotide
tgcacgccgaacggagtgtcagcaacgaca

SEQ ID NO: 126747 - DNA, 30 bp, Artificial Sequence
  Synthetic oligonucleotide
agtgttgacaggcgtctccgccgtacgaca

SEQ ID NO: 126748 - DNA, 30 bp, Artificial Sequence
  Synthetic oligonucleotide
agtaccggctcgagacctttaaccccgaca

SEQ ID NO: 126749 - DNA, 30 bp, Artificial Sequence
  Synthetic oligonucleotide
atgtaggttggaatgatccaattcccgaca

SEQ ID NO: 126750 - DNA, 30 bp, Artificial Sequence
  Synthetic oligonucleotide
cataacgttatatctataaaaacgccgaca

SEQ ID NO: 126751 - DNA, 30 bp, Artificial Sequence
  Synthetic oligonucleotide
catcgagaagttattttaataattgcgaca

SEQ ID NO: 126752 - DNA, 30 bp, Artificial Sequence
  Synthetic oligonucleotide
acgtaatcattcagtgttaagaaatcgaca

SEQ ID NO: 126753 - DNA, 30 bp, Artificial Sequence
  Synthetic oligonucleotide
gagttaaaaagaaatgcttggagatcgaca

SEQ ID NO: 126754 - DNA, 30 bp, Artificial Sequence
  Synthetic oligonucleotide
atgaaatgttagcggaatagagtttcgaca

SEQ ID NO: 126755 - DNA, 30 bp, Artificial Sequence
  Synthetic oligonucleotide
atggagcaggttgcgcgaatggacaggaca

SEQ ID NO: 126756 - DNA, 30 bp, Artificial Sequence
  Synthetic oligonucleotide
tctgtattgagatctcgaagtcagaggaca

SEQ ID NO: 126757 - DNA, 30 bp, Artificial Sequence
  Synthetic oligonucleotide
agctccgcttccgatgatccagctaggaca

SEQ ID NO: 126758 - DNA, 30 bp, Artificial Sequence
  Synthetic oligonucleotide
cttaccgttccatggtagctagctaggaca

SEQ ID NO: 126759 - DNA, 30 bp, Artificial Sequence
  Synthetic oligonucleotide
cctgcgctaagcgatttgaaggctaggaca

SEQ ID NO: 126760 - DNA, 30 bp, Artificial Sequence
  Synthetic oligonucleotide
cggccgtgcgtgacctcagtgtgtaggaca

SEQ ID NO: 126761 - DNA, 30 bp, Artificial Sequence
  Synthetic oligonucleotide
ggtccgcgaaagaaataagtgaaacggaca

SEQ ID NO: 126762 - DNA, 30 bp, Artificial Sequence
  Synthetic oligonucleotide
cacacacgaaaaggcgtatgggaacggaca

SEQ ID NO: 126763 - DNA, 30 bp, Artificial Sequence
  Synthetic oligonucleotide
gacgtagtgataatgtcactaggacggaca

SEQ ID NO: 126764 - DNA, 30 bp, Artificial Sequence
  Synthetic oligonucleotide
gggaggactctcgacatgcggggccggaca

SEQ ID NO: 126765 - DNA, 30 bp, Artificial Sequence
  Synthetic oligonucleotide
aagggcgcctggtctgaatatcttcggaca

SEQ ID NO: 126766 - DNA, 30 bp, Artificial Sequence
  Synthetic oligonucleotide
atacgttcgtgggactagtatgttcggaca

SEQ ID NO: 126767 - DNA, 30 bp, Artificial Sequence
  Synthetic oligonucleotide
atgctcgagcgccacaaaatacacgggaca

SEQ ID NO: 126768 - DNA, 30 bp, Artificial Sequence
  Synthetic oligonucleotide
tttgaaacaaaattatctcgccgggggaca

SEQ ID NO: 126769 - DNA, 30 bp, Artificial Sequence
  Synthetic oligonucleotide
gcgagtgattggggttacccgatggggaca

SEQ ID NO: 126770 - DNA, 30 bp, Artificial Sequence
  Synthetic oligonucleotide
aggtacacaaaccgtctgaacactgggaca

SEQ ID NO: 126771 - DNA, 30 bp, Artificial Sequence
  Synthetic oligonucleotide
gcacgcgagtacaaatctctgtgtgggaca

SEQ ID NO: 126772 - DNA, 30 bp, Artificial Sequence
  Synthetic oligonucleotide
gcttaccgtaaacgaacgcctgttgggaca

SEQ ID NO: 126773 - DNA, 30 bp, Artificial Sequence
  Synthetic oligonucleotide
gtggatatgggaagaattaggaagtggaca

SEQ ID NO: 126774 - DNA, 30 bp, Artificial Sequence
  Synthetic oligonucleotide
gagcgtaagttatttgctgagtaaatgaca

SEQ ID NO: 126775 - DNA, 30 bp, Artificial Sequence
  Synthetic oligonucleotide
aagaaacgctaggtccgaaagcatatgaca

SEQ ID NO: 126776 - DNA, 30 bp, Artificial Sequence
  Synthetic oligonucleotide
caccacattcgttagtgaaaaagtatgaca

SEQ ID NO: 126777 - DNA, 30 bp, Artificial Sequence
  Synthetic oligonucleotide
taggaatcatagtagcaagcctaactgaca

SEQ ID NO: 126778 - DNA, 30 bp, Artificial Sequence
  Synthetic oligonucleotide
ataataggaggacaatgggtgcgactgaca

SEQ ID NO: 126779 - DNA, 30 bp, Artificial Sequence
  Synthetic oligonucleotide
cttagcgggagtaattcttgcggactgaca

SEQ ID NO: 126780 - DNA, 30 bp, Artificial Sequence
  Synthetic oligonucleotide
gcggtggtgtcactagaaatgcgcctgaca

SEQ ID NO: 126781 - DNA, 30 bp, Artificial Sequence
  Synthetic oligonucleotide
tgggcgcatgagtgctacggtgcgctgaca

SEQ ID NO: 126782 - DNA, 29 bp, Artificial Sequence
  Synthetic oligonucleotide
agccagacagacaggatgggcctgtgaca

SEQ ID NO: 126783 - DNA, 30 bp, Artificial Sequence
  Synthetic oligonucleotide
tgtagtgcgaagtatattcctgatttgaca

SEQ ID NO: 126784 - DNA, 30 bp, Artificial Sequence
  Synthetic oligonucleotide
cgtgcgtcaggttcagacagaattttgaca

SEQ ID NO: 126785 - DNA, 30 bp, Artificial Sequence
  Synthetic oligonucleotide
tccgggcaggttatgtaactgtccaataca

SEQ ID NO: 126786 - DNA, 30 bp, Artificial Sequence
  Synthetic oligonucleotide
ctgggacacctcgtagaaggcggacataca

SEQ ID NO: 126787 - DNA, 30 bp, Artificial Sequence
  Synthetic oligonucleotide
ctcaacattaggacaaccccatgccataca

SEQ ID NO: 126788 - DNA, 30 bp, Artificial Sequence
  Synthetic oligonucleotide
ctgcggtatccaaacgtatattcgcataca

SEQ ID NO: 126789 - DNA, 30 bp, Artificial Sequence
  Synthetic oligonucleotide
agtcacggagttggggacataaggcataca

SEQ ID NO: 126790 - DNA, 30 bp, Artificial Sequence
  Synthetic oligonucleotide
tacattggatcgaggtactgcaggcataca

SEQ ID NO: 126791 - DNA, 30 bp, Artificial Sequence
  Synthetic oligonucleotide
gatcagcaagggcaagccaaccgctataca

SEQ ID NO: 126792 - DNA, 30 bp, Artificial Sequence
  Synthetic oligonucleotide
ttaaacggttagggtattcatggctataca

SEQ ID NO: 126793 - DNA, 30 bp, Artificial Sequence
  Synthetic oligonucleotide
tcatggtagacacatcccaagtagtataca

SEQ ID NO: 126794 - DNA, 30 bp, Artificial Sequence
  Synthetic oligonucleotide
cagggtggatgtgactcatccagcactaca

SEQ ID NO: 126795 - DNA, 30 bp, Artificial Sequence
  Synthetic oligonucleotide
cacggcacccagtctaattatgatactaca

SEQ ID NO: 126796 - DNA, 30 bp, Artificial Sequence
  Synthetic oligonucleotide
tgcgaaaagtcgaatgagctaagtactaca

SEQ ID NO: 126797 - DNA, 30 bp, Artificial Sequence
  Synthetic oligonucleotide
acgccgcccacacgacggaacgcacctaca

SEQ ID NO: 126798 - DNA, 30 bp, Artificial Sequence
  Synthetic oligonucleotide
acgagggtatagagtggtctctcagctaca

SEQ ID NO: 126799 - DNA, 30 bp, Artificial Sequence
  Synthetic oligonucleotide
ctgggtgttcggtctacgtattccgctaca

SEQ ID NO: 126800 - DNA, 30 bp, Artificial Sequence
  Synthetic oligonucleotide
cgagggtgggcacggaagcgaagcgctaca

SEQ ID NO: 126801 - DNA, 30 bp, Artificial Sequence
  Synthetic oligonucleotide
cagcaagctccatgctataactaggctaca

SEQ ID NO: 126802 - DNA, 30 bp, Artificial Sequence
  Synthetic oligonucleotide
aggcaagcgagcataatctgtgattctaca

SEQ ID NO: 126803 - DNA, 30 bp, Artificial Sequence
  Synthetic oligonucleotide
ccatcgggcatcaggaaaagttattctaca

SEQ ID NO: 126804 - DNA, 30 bp, Artificial Sequence
  Synthetic oligonucleotide
ggccacgcaatcgcctgaggccgaagtaca

SEQ ID NO: 126805 - DNA, 30 bp, Artificial Sequence
  Synthetic oligonucleotide
gaggggaacatggtagcaagcataagtaca

SEQ ID NO: 126806 - DNA, 29 bp, Artificial Sequence
  Synthetic oligonucleotide
atagcatcatcgaggtagtaaccagtaca

SEQ ID NO: 126807 - DNA, 30 bp, Artificial Sequence
  Synthetic oligonucleotide
gcacaaccggtattatatacctcgagtaca

SEQ ID NO: 126808 - DNA, 30 bp, Artificial Sequence
  Synthetic oligonucleotide
cttagcacgtgcctaagaatgagacgtaca

SEQ ID NO: 126809 - DNA, 30 bp, Artificial Sequence
  Synthetic oligonucleotide
tcttagtttttaacagcgagcgagcgtaca

SEQ ID NO: 126810 - DNA, 30 bp, Artificial Sequence
  Synthetic oligonucleotide
actacgcttaattcaatcacgtcaggtaca

SEQ ID NO: 126811 - DNA, 30 bp, Artificial Sequence
  Synthetic oligonucleotide
cacgttcgaggggcggggctttcaggtaca

SEQ ID NO: 126812 - DNA, 30 bp, Artificial Sequence
  Synthetic oligonucleotide
gtgatttgacacatttcatattccggtaca

SEQ ID NO: 126813 - DNA, 30 bp, Artificial Sequence
  Synthetic oligonucleotide
ccactaacccgaaggctgtcagagggtaca

SEQ ID NO: 126814 - DNA, 30 bp, Artificial Sequence
  Synthetic oligonucleotide
cctctgggtacattaggtgtaaggggtaca

SEQ ID NO: 126815 - DNA, 30 bp, Artificial Sequence
  Synthetic oligonucleotide
cagtgtacatgagaaagtgactatggtaca

SEQ ID NO: 126816 - DNA, 30 bp, Artificial Sequence
  Synthetic oligonucleotide
gcagactaacttactgattgttttggtaca

SEQ ID NO: 126817 - DNA, 30 bp, Artificial Sequence
  Synthetic oligonucleotide
agtgccttggggacatcctgctcctgtaca

SEQ ID NO: 126818 - DNA, 30 bp, Artificial Sequence
  Synthetic oligonucleotide
tcgagatgcgaggtaatattaacaattaca

SEQ ID NO: 126819 - DNA, 30 bp, Artificial Sequence
  Synthetic oligonucleotide
gtgcgcgaaagagtcggagaaagaattaca

SEQ ID NO: 126820 - DNA, 30 bp, Artificial Sequence
  Synthetic oligonucleotide
attgcctcttagcgagcgaccgacattaca

SEQ ID NO: 126821 - DNA, 30 bp, Artificial Sequence
  Synthetic oligonucleotide
cgattctcgacaacgaatctagggattaca

SEQ ID NO: 126822 - DNA, 30 bp, Artificial Sequence
  Synthetic oligonucleotide
tcgatcggtagcagtattaaagaccttaca

SEQ ID NO: 126823 - DNA, 30 bp, Artificial Sequence
  Synthetic oligonucleotide
gaccacccccaacgaaagtgctatgttaca

SEQ ID NO: 126824 - DNA, 30 bp, Artificial Sequence
  Synthetic oligonucleotide
cgccgacccaaataaacggaactgtttaca

SEQ ID NO: 126825 - DNA, 30 bp, Artificial Sequence
  Synthetic oligonucleotide
ggattgatcggaagaagttcgtacaaacca

SEQ ID NO: 126826 - DNA, 30 bp, Artificial Sequence
  Synthetic oligonucleotide
gctggctcagaattcgggatggctaaacca

SEQ ID NO: 126827 - DNA, 30 bp, Artificial Sequence
  Synthetic oligonucleotide
gcgactatcctctctcaagaaagtaaacca

SEQ ID NO: 126828 - DNA, 30 bp, Artificial Sequence
  Synthetic oligonucleotide
agggggaccgtcagtagtgccggtaaacca

SEQ ID NO: 126829 - DNA, 30 bp, Artificial Sequence
  Synthetic oligonucleotide
ggaagctatactcaatcagttacccaacca

SEQ ID NO: 126830 - DNA, 30 bp, Artificial Sequence
  Synthetic oligonucleotide
cagggctatattaggaaaaaacgccaacca

SEQ ID NO: 126831 - DNA, 30 bp, Artificial Sequence
  Synthetic oligonucleotide
tgatggtgctacaaatgaaatgctcaacca

SEQ ID NO: 126832 - DNA, 30 bp, Artificial Sequence
  Synthetic oligonucleotide
gggaaggccaccaggctacgggttcaacca

SEQ ID NO: 126833 - DNA, 30 bp, Artificial Sequence
  Synthetic oligonucleotide
acggcttacgcgatacgcgcatttcaacca

SEQ ID NO: 126834 - DNA, 30 bp, Artificial Sequence
  Synthetic oligonucleotide
gtccggaacggtaagctattccgagaacca

SEQ ID NO: 126835 - DNA, 30 bp, Artificial Sequence
  Synthetic oligonucleotide
gggtaatctaatgcatggaggtccgaacca

SEQ ID NO: 126836 - DNA, 30 bp, Artificial Sequence
  Synthetic oligonucleotide
gatggatgcttacgagagagtctataacca

SEQ ID NO: 126837 - DNA, 30 bp, Artificial Sequence
  Synthetic oligonucleotide
ccaagcgtactatgatggcggaagtaacca

SEQ ID NO: 126838 - DNA, 30 bp, Artificial Sequence
  Synthetic oligonucleotide
cagtctctgaaatcgttgccactttaacca

SEQ ID NO: 126839 - DNA, 30 bp, Artificial Sequence
  Synthetic oligonucleotide
gcctgacgataatcgaactcaagaacacca

SEQ ID NO: 126840 - DNA, 30 bp, Artificial Sequence
  Synthetic oligonucleotide
ggtaagaggtgagattctaatctaacacca

SEQ ID NO: 126841 - DNA, 30 bp, Artificial Sequence
  Synthetic oligonucleotide
ctagacgttcaaagcataagtaggacacca

SEQ ID NO: 126842 - DNA, 30 bp, Artificial Sequence
  Synthetic oligonucleotide
tcatacacttatataggtcgagtgacacca

SEQ ID NO: 126843 - DNA, 30 bp, Artificial Sequence
  Synthetic oligonucleotide
ttgatgatcctaagcgtatcgacaccacca

SEQ ID NO: 126844 - DNA, 30 bp, Artificial Sequence
  Synthetic oligonucleotide
aacaaccacactctggcagtcatcccacca

SEQ ID NO: 126845 - DNA, 30 bp, Artificial Sequence
  Synthetic oligonucleotide
agacacaacatcaattctctccggccacca

SEQ ID NO: 126846 - DNA, 31 bp, Artificial Sequence
  Synthetic oligonucleotide
aacaaatactatgtcagtctagttagcacca

SEQ ID NO: 126847 - DNA, 30 bp, Artificial Sequence
  Synthetic oligonucleotide
gggcgcgggcgatagtaggtaatcgcacca

SEQ ID NO: 126848 - DNA, 30 bp, Artificial Sequence
  Synthetic oligonucleotide
aagaactggcatatcagatggacggcacca

SEQ ID NO: 126849 - DNA, 30 bp, Artificial Sequence
  Synthetic oligonucleotide
tggcactgttgataaaaggcatgtgcacca

SEQ ID NO: 126850 - DNA, 30 bp, Artificial Sequence
  Synthetic oligonucleotide
ccgtctagagatcgaagtatccggtcacca

SEQ ID NO: 126851 - DNA, 30 bp, Artificial Sequence
  Synthetic oligonucleotide
taaggtgggtattgattgtggtggtcacca

SEQ ID NO: 126852 - DNA, 30 bp, Artificial Sequence
  Synthetic oligonucleotide
aggtgagtaagagtgtctgtgacttcacca

SEQ ID NO: 126853 - DNA, 30 bp, Artificial Sequence
  Synthetic oligonucleotide
aacgaggatgcgctgctgcgtacaagacca

SEQ ID NO: 126854 - DNA, 30 bp, Artificial Sequence
  Synthetic oligonucleotide
aaaggtatactagttaacggagatagacca

SEQ ID NO: 126855 - DNA, 30 bp, Artificial Sequence
  Synthetic oligonucleotide
accacatttcccggacagaccagccgacca

SEQ ID NO: 126856 - DNA, 30 bp, Artificial Sequence
  Synthetic oligonucleotide
actgtccgtgactgggagactgttcgacca

SEQ ID NO: 126857 - DNA, 30 bp, Artificial Sequence
  Synthetic oligonucleotide
gtctatcgtgttggtacaccagaaggacca

SEQ ID NO: 126858 - DNA, 30 bp, Artificial Sequence
  Synthetic oligonucleotide
atctgcagtcggccccgatacccatgacca

SEQ ID NO: 126859 - DNA, 30 bp, Artificial Sequence
  Synthetic oligonucleotide
tccagacatctccgacaataaatatgacca

SEQ ID NO: 126860 - DNA, 30 bp, Artificial Sequence
  Synthetic oligonucleotide
caggcccaggagaacaaattggcttgacca

SEQ ID NO: 126861 - DNA, 30 bp, Artificial Sequence
  Synthetic oligonucleotide
cgcaatgtaaaagctggtcttagttgacca

SEQ ID NO: 126862 - DNA, 30 bp, Artificial Sequence
  Synthetic oligonucleotide
atcaggatgtgaataggcttggggatacca

SEQ ID NO: 126863 - DNA, 30 bp, Artificial Sequence
  Synthetic oligonucleotide
gtatacaacaagtgactggtccatatacca

SEQ ID NO: 126864 - DNA, 30 bp, Artificial Sequence
  Synthetic oligonucleotide
atacgaccctcgcacactaactgtatacca

SEQ ID NO: 126865 - DNA, 30 bp, Artificial Sequence
  Synthetic oligonucleotide
ggcgatatcttcctaacaaagattatacca

SEQ ID NO: 126866 - DNA, 30 bp, Artificial Sequence
  Synthetic oligonucleotide
gtatagagatatggctgagattatgtacca

SEQ ID NO: 126867 - DNA, 30 bp, Artificial Sequence
  Synthetic oligonucleotide
acgtcaagagacggtagggtggtgttacca

SEQ ID NO: 126868 - DNA, 30 bp, Artificial Sequence
  Synthetic oligonucleotide
ccctcctgattgtggcaccaaagaaaccca

SEQ ID NO: 126869 - DNA, 30 bp, Artificial Sequence
  Synthetic oligonucleotide
attcggccacagaaatggtcaatcaaccca

SEQ ID NO: 126870 - DNA, 30 bp, Artificial Sequence
  Synthetic oligonucleotide
ggtagagtttaagtgaacgtttcgaaccca

SEQ ID NO: 126871 - DNA, 30 bp, Artificial Sequence
  Synthetic oligonucleotide
atcggcacattatgtgcggcatcgcaccca

SEQ ID NO: 126872 - DNA, 30 bp, Artificial Sequence
  Synthetic oligonucleotide
ttgacgcatggtcgccgaaatagataccca

SEQ ID NO: 126873 - DNA, 30 bp, Artificial Sequence
  Synthetic oligonucleotide
ttgcacttttggaaatggaaagactaccca

SEQ ID NO: 126874 - DNA, 30 bp, Artificial Sequence
  Synthetic oligonucleotide
cgcggaaggtgtcggtcattaaattaccca

SEQ ID NO: 126875 - DNA, 30 bp, Artificial Sequence
  Synthetic oligonucleotide
tcaccagaacctgaacagcggatttaccca

SEQ ID NO: 126876 - DNA, 30 bp, Artificial Sequence
  Synthetic oligonucleotide
gtcggtttgtgattgtcaacgaacacccca

SEQ ID NO: 126877 - DNA, 30 bp, Artificial Sequence
  Synthetic oligonucleotide
aaaggtgtaacgggtctatgagacacccca

SEQ ID NO: 126878 - DNA, 30 bp, Artificial Sequence
  Synthetic oligonucleotide
gggagtgtggaccgaggcggtaggacccca

SEQ ID NO: 126879 - DNA, 30 bp, Artificial Sequence
  Synthetic oligonucleotide
agggtatatcaagggtatgaagatacccca

SEQ ID NO: 126880 - DNA, 39 bp, Artificial Sequence
  Synthetic oligonucleotide
aaaccacggcacacgacgttcttgacatgcaggccccca

SEQ ID NO: 126881 - DNA, 30 bp, Artificial Sequence
  Synthetic oligonucleotide
actcaggacgaaacgtgaataggagcccca

SEQ ID NO: 126882 - DNA, 30 bp, Artificial Sequence
  Synthetic oligonucleotide
gtacgtggacatggccaagacttagcccca

SEQ ID NO: 126883 - DNA, 30 bp, Artificial Sequence
  Synthetic oligonucleotide
gagataaacctagcgataattgtctcccca

SEQ ID NO: 126884 - DNA, 30 bp, Artificial Sequence
  Synthetic oligonucleotide
acggtcataaaacttgaggtattcagccca

SEQ ID NO: 126885 - DNA, 30 bp, Artificial Sequence
  Synthetic oligonucleotide
caatgcaatcgcacgctctgtctgagccca

SEQ ID NO: 126886 - DNA, 30 bp, Artificial Sequence
  Synthetic oligonucleotide
tcgtagaggcccttacaaaaaggacgccca

SEQ ID NO: 126887 - DNA, 30 bp, Artificial Sequence
  Synthetic oligonucleotide
ctgatcccttgaaaatgcgatgatcgccca

SEQ ID NO: 126888 - DNA, 30 bp, Artificial Sequence
  Synthetic oligonucleotide
tggcgttcagatacaatctaatatcgccca

SEQ ID NO: 126889 - DNA, 30 bp, Artificial Sequence
  Synthetic oligonucleotide
aaggtgaggttgaattgatttgctcgccca

SEQ ID NO: 126890 - DNA, 30 bp, Artificial Sequence
  Synthetic oligonucleotide
tggaatgccctctcaggaaaccttcgccca

SEQ ID NO: 126891 - DNA, 30 bp, Artificial Sequence
  Synthetic oligonucleotide
taagcacaaaagcttccaacccccggccca

SEQ ID NO: 126892 - DNA, 30 bp, Artificial Sequence
  Synthetic oligonucleotide
cagagtgtgggacgctgggtactcggccca

SEQ ID NO: 126893 - DNA, 30 bp, Artificial Sequence
  Synthetic oligonucleotide
cgaacctggtaaggaaatcagacctgccca

SEQ ID NO: 126894 - DNA, 30 bp, Artificial Sequence
  Synthetic oligonucleotide
cagtcgaagaaccgtaagaccaagtgccca

SEQ ID NO: 126895 - DNA, 30 bp, Artificial Sequence
  Synthetic oligonucleotide
gtaatggcagtggctcgccaaagttgccca

SEQ ID NO: 126896 - DNA, 30 bp, Artificial Sequence
  Synthetic oligonucleotide
cgcccaggagccggaatgtacacgatccca

SEQ ID NO: 126897 - DNA, 30 bp, Artificial Sequence
  Synthetic oligonucleotide
tagttcagtagaagtatccctgggctccca

SEQ ID NO: 126898 - DNA, 30 bp, Artificial Sequence
  Synthetic oligonucleotide
tccgagggcgctagtgaggctaccgtccca

SEQ ID NO: 126899 - DNA, 30 bp, Artificial Sequence
  Synthetic oligonucleotide
cctgccaggaaggaaagaacacgggtccca

SEQ ID NO: 126900 - DNA, 30 bp, Artificial Sequence
  Synthetic oligonucleotide
tagcgtatactgtcgacatattgggtccca

SEQ ID NO: 126901 - DNA, 30 bp, Artificial Sequence
  Synthetic oligonucleotide
gaactagtctaggatcgagcaggattccca

SEQ ID NO: 126902 - DNA, 30 bp, Artificial Sequence
  Synthetic oligonucleotide
acctaaccccgtgaacccaccctattccca

SEQ ID NO: 126903 - DNA, 30 bp, Artificial Sequence
  Synthetic oligonucleotide
ttaatagacatgttaacggaagtaaagcca

SEQ ID NO: 126904 - DNA, 30 bp, Artificial Sequence
  Synthetic oligonucleotide
cacatgcaaaattaagcccaccaacagcca

SEQ ID NO: 126905 - DNA, 30 bp, Artificial Sequence
  Synthetic oligonucleotide
gcgattatcgcactgaggcgattacagcca

SEQ ID NO: 126906 - DNA, 30 bp, Artificial Sequence
  Synthetic oligonucleotide
ctatcgactgggtttccagcacaagagcca

SEQ ID NO: 126907 - DNA, 30 bp, Artificial Sequence
  Synthetic oligonucleotide
tgtccagctgacccggaagtggaagagcca

SEQ ID NO: 126908 - DNA, 30 bp, Artificial Sequence
  Synthetic oligonucleotide
gtgagagccttagtgtttgaactggagcca

SEQ ID NO: 126909 - DNA, 30 bp, Artificial Sequence
  Synthetic oligonucleotide
cggtaaaactgtgaaatgatcgaatagcca

SEQ ID NO: 126910 - DNA, 30 bp, Artificial Sequence
  Synthetic oligonucleotide
ccgaggactgtagtatggctgacatagcca

SEQ ID NO: 126911 - DNA, 30 bp, Artificial Sequence
  Synthetic oligonucleotide
aacatatactggtcggcgtctccatagcca

SEQ ID NO: 126912 - DNA, 30 bp, Artificial Sequence
  Synthetic oligonucleotide
agaagtacgtcctgtacatacctatagcca

SEQ ID NO: 126913 - DNA, 30 bp, Artificial Sequence
  Synthetic oligonucleotide
aatagaggccacattcatcaggtaacgcca

SEQ ID NO: 126914 - DNA, 30 bp, Artificial Sequence
  Synthetic oligonucleotide
cattgatagtgttttccaaagtccacgcca

SEQ ID NO: 126915 - DNA, 30 bp, Artificial Sequence
  Synthetic oligonucleotide
tattgaatccatagccattacagcacgcca

SEQ ID NO: 126916 - DNA, 30 bp, Artificial Sequence
  Synthetic oligonucleotide
ttagggctatttctggatgggtgtacgcca

SEQ ID NO: 126917 - DNA, 30 bp, Artificial Sequence
  Synthetic oligonucleotide
gtgtaaaatagtccggaacgcataccgcca

SEQ ID NO: 126918 - DNA, 30 bp, Artificial Sequence
  Synthetic oligonucleotide
ttcggacattctagtggaaaacagccgcca

SEQ ID NO: 126919 - DNA, 30 bp, Artificial Sequence
  Synthetic oligonucleotide
cacaaccctcggcagactatgagagcgcca

SEQ ID NO: 126920 - DNA, 30 bp, Artificial Sequence
  Synthetic oligonucleotide
ccactagggaaggcttcctactaggcgcca

SEQ ID NO: 126921 - DNA, 30 bp, Artificial Sequence
  Synthetic oligonucleotide
ccagtgttcgagcaaactgtctatgcgcca

SEQ ID NO: 126922 - DNA, 30 bp, Artificial Sequence
  Synthetic oligonucleotide
atgggatggacgtatacccagtgtgcgcca

SEQ ID NO: 126923 - DNA, 30 bp, Artificial Sequence
  Synthetic oligonucleotide
cctagccatttaacacacacataatcgcca

SEQ ID NO: 126924 - DNA, 30 bp, Artificial Sequence
  Synthetic oligonucleotide
cctctgcccagatacgggtcccgatcgcca

SEQ ID NO: 126925 - DNA, 30 bp, Artificial Sequence
  Synthetic oligonucleotide
tagttacatgatcctgggaggccttcgcca

SEQ ID NO: 126926 - DNA, 30 bp, Artificial Sequence
  Synthetic oligonucleotide
tacttcggtataccaataaagttttcgcca

SEQ ID NO: 126927 - DNA, 30 bp, Artificial Sequence
  Synthetic oligonucleotide
taactgtgcacaggtctgaaagacaggcca

SEQ ID NO: 126928 - DNA, 30 bp, Artificial Sequence
  Synthetic oligonucleotide
cgttgctagtttagataaaagtctaggcca

SEQ ID NO: 126929 - DNA, 29 bp, Artificial Sequence
  Synthetic oligonucleotide
caaagacccatatgccccagtaccggcca

SEQ ID NO: 126930 - DNA, 30 bp, Artificial Sequence
  Synthetic oligonucleotide
ctatgggctgagactaggatgtaccggcca

SEQ ID NO: 126931 - DNA, 30 bp, Artificial Sequence
  Synthetic oligonucleotide
tgaatccctacactacgtgttgtccggcca

SEQ ID NO: 126932 - DNA, 30 bp, Artificial Sequence
  Synthetic oligonucleotide
ggctaatgagtaatgggtatggatcggcca

SEQ ID NO: 126933 - DNA, 30 bp, Artificial Sequence
  Synthetic oligonucleotide
cggagggcccgcccggtttgatcaatgcca

SEQ ID NO: 126934 - DNA, 30 bp, Artificial Sequence
  Synthetic oligonucleotide
tagcactattactaattacggaaagtgcca

SEQ ID NO: 126935 - DNA, 30 bp, Artificial Sequence
  Synthetic oligonucleotide
cctggctgaggaacattcgttgcagtgcca

SEQ ID NO: 126936 - DNA, 30 bp, Artificial Sequence
  Synthetic oligonucleotide
atagggcccacccaaagccaaggggtgcca

SEQ ID NO: 126937 - DNA, 30 bp, Artificial Sequence
  Synthetic oligonucleotide
tccgtacggctgggcagaatacgtgtgcca

SEQ ID NO: 126938 - DNA, 30 bp, Artificial Sequence
  Synthetic oligonucleotide
aaagaaatcagttgccgaataatattgcca

SEQ ID NO: 126939 - DNA, 30 bp, Artificial Sequence
  Synthetic oligonucleotide
catctctatcaggatttgggcagcttgcca

SEQ ID NO: 126940 - DNA, 30 bp, Artificial Sequence
  Synthetic oligonucleotide
catatgctgcgacagtatagaacgttgcca

SEQ ID NO: 126941 - DNA, 30 bp, Artificial Sequence
  Synthetic oligonucleotide
acgcacattcggtacaataacgtaaatcca

SEQ ID NO: 126942 - DNA, 30 bp, Artificial Sequence
  Synthetic oligonucleotide
tctatgcggatgtcaccattaggcaatcca

SEQ ID NO: 126943 - DNA, 30 bp, Artificial Sequence
  Synthetic oligonucleotide
gcgcgtctcattaatcggagtatacatcca

SEQ ID NO: 126944 - DNA, 30 bp, Artificial Sequence
  Synthetic oligonucleotide
gcaaaaactccgttaattaggaaccatcca

SEQ ID NO: 126945 - DNA, 30 bp, Artificial Sequence
  Synthetic oligonucleotide
cgatagctatatatctaagggaaccatcca

SEQ ID NO: 126946 - DNA, 30 bp, Artificial Sequence
  Synthetic oligonucleotide
cgtcgtgattagttgtagtgaacccatcca

SEQ ID NO: 126947 - DNA, 30 bp, Artificial Sequence
  Synthetic oligonucleotide
ttgtcgcaagagtacacaacgaagcatcca

SEQ ID NO: 126948 - DNA, 30 bp, Artificial Sequence
  Synthetic oligonucleotide
attttccgagcgtagcaagtccagcatcca

SEQ ID NO: 126949 - DNA, 27 bp, Artificial Sequence
  Synthetic oligonucleotide
gggcagtaacaacgacattcgcatcca

SEQ ID NO: 126950 - DNA, 30 bp, Artificial Sequence
  Synthetic oligonucleotide
tctggcgcaatttgtaatactggagatcca

SEQ ID NO: 126951 - DNA, 30 bp, Artificial Sequence
  Synthetic oligonucleotide
accggcgcatgcagcagggtggacgatcca

SEQ ID NO: 126952 - DNA, 30 bp, Artificial Sequence
  Synthetic oligonucleotide
acagatctccgataacaagcaagggatcca

SEQ ID NO: 126953 - DNA, 30 bp, Artificial Sequence
  Synthetic oligonucleotide
gaggcaatccggtgcgatagatgggatcca

SEQ ID NO: 126954 - DNA, 30 bp, Artificial Sequence
  Synthetic oligonucleotide
atcaatttgggccattcgaacctggatcca

SEQ ID NO: 126955 - DNA, 30 bp, Artificial Sequence
  Synthetic oligonucleotide
tgcaagatcacgcgaagctcctttgatcca

SEQ ID NO: 126956 - DNA, 30 bp, Artificial Sequence
  Synthetic oligonucleotide
atgagatactatgttcgtcccacgtatcca

SEQ ID NO: 126957 - DNA, 30 bp, Artificial Sequence
  Synthetic oligonucleotide
tcaacataccggccagcaacccagactcca

SEQ ID NO: 126958 - DNA, 30 bp, Artificial Sequence
  Synthetic oligonucleotide
ctgtagagctgaatgagcggtccacctcca

SEQ ID NO: 126959 - DNA, 30 bp, Artificial Sequence
  Synthetic oligonucleotide
tgataaagacaatggcatcacgcggctcca

SEQ ID NO: 126960 - DNA, 30 bp, Artificial Sequence
  Synthetic oligonucleotide
tgactgatagcaagcgggggcaatgctcca

SEQ ID NO: 126961 - DNA, 30 bp, Artificial Sequence
  Synthetic oligonucleotide
aatgttctcgcattaaaacagatctctcca

SEQ ID NO: 126962 - DNA, 30 bp, Artificial Sequence
  Synthetic oligonucleotide
ggccccctgtgatacattagagaaagtcca

SEQ ID NO: 126963 - DNA, 30 bp, Artificial Sequence
  Synthetic oligonucleotide
actaaccccaactgcgacagcatcagtcca

SEQ ID NO: 126964 - DNA, 30 bp, Artificial Sequence
  Synthetic oligonucleotide
gcggaaaccccagagaaaaaggggagtcca

SEQ ID NO: 126965 - DNA, 31 bp, Artificial Sequence
  Synthetic oligonucleotide
ttaagaaaactgggttttgaaactgagtcca

SEQ ID NO: 126966 - DNA, 30 bp, Artificial Sequence
  Synthetic oligonucleotide
gaagaaagaaaggtttgtcctcatagtcca

SEQ ID NO: 126967 - DNA, 30 bp, Artificial Sequence
  Synthetic oligonucleotide
tcatatacggaactgggatacgtgcgtcca

SEQ ID NO: 126968 - DNA, 30 bp, Artificial Sequence
  Synthetic oligonucleotide
ctacgtttaaaacaaatccgtgagggtcca

SEQ ID NO: 126969 - DNA, 30 bp, Artificial Sequence
  Synthetic oligonucleotide
gacgtgccacacgtatttgagatatgtcca

SEQ ID NO: 126970 - DNA, 30 bp, Artificial Sequence
  Synthetic oligonucleotide
acaaacctttatcaggagcggttaattcca

SEQ ID NO: 126971 - DNA, 30 bp, Artificial Sequence
  Synthetic oligonucleotide
aacagtgggtgtgagtagacacgtattcca

SEQ ID NO: 126972 - DNA, 30 bp, Artificial Sequence
  Synthetic oligonucleotide
ccgcccaaaaattaggcctattgacttcca

SEQ ID NO: 126973 - DNA, 30 bp, Artificial Sequence
  Synthetic oligonucleotide
tcccaagaatatgtaacaccggaagttcca

SEQ ID NO: 126974 - DNA, 30 bp, Artificial Sequence
  Synthetic oligonucleotide
ggatagatctcgcctcgaacttgagttcca

SEQ ID NO: 126975 - DNA, 30 bp, Artificial Sequence
  Synthetic oligonucleotide
agagtgctcctgtggaataggtgatttcca

SEQ ID NO: 126976 - DNA, 30 bp, Artificial Sequence
  Synthetic oligonucleotide
cagatatacaaacccgagattatctttcca

SEQ ID NO: 126977 - DNA, 30 bp, Artificial Sequence
  Synthetic oligonucleotide
atatggagtagaccgtgcgccgcaaaagca

SEQ ID NO: 126978 - DNA, 30 bp, Artificial Sequence
  Synthetic oligonucleotide
gatcagtgtgacacccggcaggtaaaagca

SEQ ID NO: 126979 - DNA, 30 bp, Artificial Sequence
  Synthetic oligonucleotide
taatcgtttcaacgtcctgcgtgcaaagca

SEQ ID NO: 126980 - DNA, 30 bp, Artificial Sequence
  Synthetic oligonucleotide
tcagaatactgtggctctcccatcaaagca

SEQ ID NO: 126981 - DNA, 30 bp, Artificial Sequence
  Synthetic oligonucleotide
acatgatcaatcctgagggtggtcaaagca

SEQ ID NO: 126982 - DNA, 30 bp, Artificial Sequence
  Synthetic oligonucleotide
ggagcattcataagcgcatcacctaaagca

SEQ ID NO: 126983 - DNA, 30 bp, Artificial Sequence
  Synthetic oligonucleotide
cggtgatctcaagtaatgcatgctaaagca

SEQ ID NO: 126984 - DNA, 30 bp, Artificial Sequence
  Synthetic oligonucleotide
atgtcctgatgactggtcgttagtaaagca

SEQ ID NO: 126985 - DNA, 30 bp, Artificial Sequence
  Synthetic oligonucleotide
aatggacagacatcaaaaacatgtcaagca

SEQ ID NO: 126986 - DNA, 30 bp, Artificial Sequence
  Synthetic oligonucleotide
caaggtggtatggggtagttacgagaagca

SEQ ID NO: 126987 - DNA, 30 bp, Artificial Sequence
  Synthetic oligonucleotide
agcatatgtaccattcagtctcgagaagca

SEQ ID NO: 126988 - DNA, 30 bp, Artificial Sequence
  Synthetic oligonucleotide
tgttcaccattgtcataactcgaggaagca

SEQ ID NO: 126989 - DNA, 30 bp, Artificial Sequence
  Synthetic oligonucleotide
gaccgcaaaggtcggggccctgttgaagca

SEQ ID NO: 126990 - DNA, 30 bp, Artificial Sequence
  Synthetic oligonucleotide
caaaaaattaggtatacctggttataagca

SEQ ID NO: 126991 - DNA, 30 bp, Artificial Sequence
  Synthetic oligonucleotide
aagtccctcgttaaggcgccaccgtaagca

SEQ ID NO: 126992 - DNA, 30 bp, Artificial Sequence
  Synthetic oligonucleotide
taatcacgaaactgcatgcggctgtaagca

SEQ ID NO: 126993 - DNA, 30 bp, Artificial Sequence
  Synthetic oligonucleotide
aaacgttagaacccgcttcataaaacagca

SEQ ID NO: 126994 - DNA, 30 bp, Artificial Sequence
  Synthetic oligonucleotide
caccggaatctaggctcaggatacacagca

SEQ ID NO: 126995 - DNA, 30 bp, Artificial Sequence
  Synthetic oligonucleotide
aaagtgcttgcggggtagaagtagacagca

SEQ ID NO: 126996 - DNA, 30 bp, Artificial Sequence
  Synthetic oligonucleotide
aaaaggaactgtcaggagcttactacagca

SEQ ID NO: 126997 - DNA, 30 bp, Artificial Sequence
  Synthetic oligonucleotide
agtaccatgtgacgataagatataccagca

SEQ ID NO: 126998 - DNA, 30 bp, Artificial Sequence
  Synthetic oligonucleotide
accagaaggaggctatagcctataccagca

SEQ ID NO: 126999 - DNA, 30 bp, Artificial Sequence
  Synthetic oligonucleotide
cccaagtgcggacaataagagtcgccagca

SEQ ID NO: 127000 - DNA, 30 bp, Artificial Sequence
  Synthetic oligonucleotide
tttgaaacgtcctcgacaaattaagcagca

SEQ ID NO: 127001 - DNA, 30 bp, Artificial Sequence
  Synthetic oligonucleotide
aagggcaccgttcgccaaataaaggcagca

SEQ ID NO: 127002 - DNA, 30 bp, Artificial Sequence
  Synthetic oligonucleotide
caacctgatcgttccataataacggcagca

SEQ ID NO: 127003 - DNA, 30 bp, Artificial Sequence
  Synthetic oligonucleotide
catcggtagatgtcgcttcttttggcagca

SEQ ID NO: 127004 - DNA, 30 bp, Artificial Sequence
  Synthetic oligonucleotide
gggtctcgcacgttaaaaggttctgcagca

SEQ ID NO: 127005 - DNA, 30 bp, Artificial Sequence
  Synthetic oligonucleotide
gctgtggaggtattgcgttcgcgctcagca

SEQ ID NO: 127006 - DNA, 30 bp, Artificial Sequence
  Synthetic oligonucleotide
ttccgtacactatctgaagagctctcagca

SEQ ID NO: 127007 - DNA, 30 bp, Artificial Sequence
  Synthetic oligonucleotide
gatgattgcgtaaataggttctggtcagca

SEQ ID NO: 127008 - DNA, 30 bp, Artificial Sequence
  Synthetic oligonucleotide
cgcggtggccaacacgtcaaatattcagca

SEQ ID NO: 127009 - DNA, 30 bp, Artificial Sequence
  Synthetic oligonucleotide
gcatttgcgtctgggaagccacatagagca

SEQ ID NO: 127010 - DNA, 30 bp, Artificial Sequence
  Synthetic oligonucleotide
tcacggcagctcatgatagcaggtagagca

SEQ ID NO: 127011 - DNA, 30 bp, Artificial Sequence
  Synthetic oligonucleotide
ccacggtacaaggtctggaacagacgagca

SEQ ID NO: 127012 - DNA, 30 bp, Artificial Sequence
  Synthetic oligonucleotide
cgctgggtttgttaacgagttacgcgagca

SEQ ID NO: 127013 - DNA, 30 bp, Artificial Sequence
  Synthetic oligonucleotide
actaacgaggatatcttgttaaggcgagca

SEQ ID NO: 127014 - DNA, 30 bp, Artificial Sequence
  Synthetic oligonucleotide
atgtagagaaacaggcccggtttgcgagca

SEQ ID NO: 127015 - DNA, 30 bp, Artificial Sequence
  Synthetic oligonucleotide
tacagctacgagcaataagaggctcgagca

SEQ ID NO: 127016 - DNA, 30 bp, Artificial Sequence
  Synthetic oligonucleotide
tccgattaaggaaccatccacagtcgagca

SEQ ID NO: 127017 - DNA, 30 bp, Artificial Sequence
  Synthetic oligonucleotide
cacacggtgctgagatgaaggcaaggagca

SEQ ID NO: 127018 - DNA, 30 bp, Artificial Sequence
  Synthetic oligonucleotide
ctgggcccttggtgtgatatatgaggagca

SEQ ID NO: 127019 - DNA, 30 bp, Artificial Sequence
  Synthetic oligonucleotide
gccgatggggcgggcgactccgtcggagca

SEQ ID NO: 127020 - DNA, 30 bp, Artificial Sequence
  Synthetic oligonucleotide
gacgaagcaaagttcgctgatacgggagca

SEQ ID NO: 127021 - DNA, 30 bp, Artificial Sequence
  Synthetic oligonucleotide
actcggtatctgaattggaaatgctgagca

SEQ ID NO: 127022 - DNA, 30 bp, Artificial Sequence
  Synthetic oligonucleotide
aggaatacgctaattgggtatcggtgagca

SEQ ID NO: 127023 - DNA, 30 bp, Artificial Sequence
  Synthetic oligonucleotide
ggtacaaatgctcggattccgtgaatagca

SEQ ID NO: 127024 - DNA, 30 bp, Artificial Sequence
  Synthetic oligonucleotide
tagcaaggtcaggtgaaaacgggcatagca

SEQ ID NO: 127025 - DNA, 30 bp, Artificial Sequence
  Synthetic oligonucleotide
taatgtaccccttgtatggtatgcctagca

SEQ ID NO: 127026 - DNA, 31 bp, Artificial Sequence
  Synthetic oligonucleotide
ctatgtatttggagaaaatgccagagtagca

SEQ ID NO: 127027 - DNA, 30 bp, Artificial Sequence
  Synthetic oligonucleotide
agccaatccgcgagttccagtagcgtagca

SEQ ID NO: 127028 - DNA, 30 bp, Artificial Sequence
  Synthetic oligonucleotide
tcgtcacaagaagacactataggcgtagca

SEQ ID NO: 127029 - DNA, 30 bp, Artificial Sequence
  Synthetic oligonucleotide
ttcgaaagccggcgcggaatcgttgtagca

SEQ ID NO: 127030 - DNA, 30 bp, Artificial Sequence
  Synthetic oligonucleotide
tcgaaaagttaaggaacgaggtaattagca

SEQ ID NO: 127031 - DNA, 30 bp, Artificial Sequence
  Synthetic oligonucleotide
gcaacgactctcgtataggatcgcttagca

SEQ ID NO: 127032 - DNA, 30 bp, Artificial Sequence
  Synthetic oligonucleotide
tcagaatgtgagagatcacttgcaaacgca

SEQ ID NO: 127033 - DNA, 30 bp, Artificial Sequence
  Synthetic oligonucleotide
acgagccgtattgatgtggtaggtaacgca

SEQ ID NO: 127034 - DNA, 30 bp, Artificial Sequence
  Synthetic oligonucleotide
gcacaccggttaaaaaacatgattaacgca

SEQ ID NO: 127035 - DNA, 30 bp, Artificial Sequence
  Synthetic oligonucleotide
accggccgataatcgatccccctccacgca

SEQ ID NO: 127036 - DNA, 30 bp, Artificial Sequence
  Synthetic oligonucleotide
tagcccaaagggttccgatagccatacgca

SEQ ID NO: 127037 - DNA, 30 bp, Artificial Sequence
  Synthetic oligonucleotide
gtccgtctatgcacagaaaatctatacgca

SEQ ID NO: 127038 - DNA, 30 bp, Artificial Sequence
  Synthetic oligonucleotide
agacgtctaacgaaattcaggagttacgca

SEQ ID NO: 127039 - DNA, 30 bp, Artificial Sequence
  Synthetic oligonucleotide
cacaggaccacgggtggattagtttacgca

SEQ ID NO: 127040 - DNA, 30 bp, Artificial Sequence
  Synthetic oligonucleotide
agtttatgatccgcgggggacataaccgca

SEQ ID NO: 127041 - DNA, 30 bp, Artificial Sequence
  Synthetic oligonucleotide
gtccagctaggatgaaccgctataaccgca

SEQ ID NO: 127042 - DNA, 30 bp, Artificial Sequence
  Synthetic oligonucleotide
gcgatcatactttcgtctgtgcccaccgca

SEQ ID NO: 127043 - DNA, 30 bp, Artificial Sequence
  Synthetic oligonucleotide
gcgatcaaggcatagcatccgaagaccgca

SEQ ID NO: 127044 - DNA, 30 bp, Artificial Sequence
  Synthetic oligonucleotide
gaagccgatttagagggcagggcgaccgca

SEQ ID NO: 127045 - DNA, 30 bp, Artificial Sequence
  Synthetic oligonucleotide
gcccctagtagacaccgcaagatgaccgca

SEQ ID NO: 127046 - DNA, 30 bp, Artificial Sequence
  Synthetic oligonucleotide
aaacaatcaactgcgttatcagaacccgca

SEQ ID NO: 127047 - DNA, 30 bp, Artificial Sequence
  Synthetic oligonucleotide
tcggttatggatccaccaatctcccccgca

SEQ ID NO: 127048 - DNA, 30 bp, Artificial Sequence
  Synthetic oligonucleotide
cttaatcgaaagtaattagattagcccgca

SEQ ID NO: 127049 - DNA, 30 bp, Artificial Sequence
  Synthetic oligonucleotide
gaacgtaatttacatattaggctagccgca

SEQ ID NO: 127050 - DNA, 30 bp, Artificial Sequence
  Synthetic oligonucleotide
aggggaacacaaaaatcgatcttagccgca

SEQ ID NO: 127051 - DNA, 30 bp, Artificial Sequence
  Synthetic oligonucleotide
cgatactttgaagaccaatgatcggccgca

SEQ ID NO: 127052 - DNA, 30 bp, Artificial Sequence
  Synthetic oligonucleotide
gcctaaatgcctcggaaccgctcggccgca

SEQ ID NO: 127053 - DNA, 30 bp, Artificial Sequence
  Synthetic oligonucleotide
tgctatggcatggaaaggtataactccgca

SEQ ID NO: 127054 - DNA, 30 bp, Artificial Sequence
  Synthetic oligonucleotide
actgaaacgcgcgtagcccgaagctccgca

SEQ ID NO: 127055 - DNA, 30 bp, Artificial Sequence
  Synthetic oligonucleotide
ggtttagctgtcagtgagccttagtccgca

SEQ ID NO: 127056 - DNA, 30 bp, Artificial Sequence
  Synthetic oligonucleotide
cgtacttgagggcttgtcttcaatagcgca

SEQ ID NO: 127057 - DNA, 30 bp, Artificial Sequence
  Synthetic oligonucleotide
catgttgctagtcactaagtcgaaggcgca

SEQ ID NO: 127058 - DNA, 30 bp, Artificial Sequence
  Synthetic oligonucleotide
tctcggtcatgtcatggcccccgaggcgca

SEQ ID NO: 127059 - DNA, 30 bp, Artificial Sequence
  Synthetic oligonucleotide
atgcttggttgagaacggagcggatgcgca

SEQ ID NO: 127060 - DNA, 30 bp, Artificial Sequence
  Synthetic oligonucleotide
tgactcagacagaaattttgcccgtgcgca

SEQ ID NO: 127061 - DNA, 30 bp, Artificial Sequence
  Synthetic oligonucleotide
gtccttggcctattaggaaatgaaatcgca

SEQ ID NO: 127062 - DNA, 30 bp, Artificial Sequence
  Synthetic oligonucleotide
cggggcgtaatcagcatattgggcatcgca

SEQ ID NO: 127063 - DNA, 30 bp, Artificial Sequence
  Synthetic oligonucleotide
gaaagacttaatcagctgggcgtcatcgca

SEQ ID NO: 127064 - DNA, 30 bp, Artificial Sequence
  Synthetic oligonucleotide
ctgcactcgaatctttacaacgcactcgca

SEQ ID NO: 127065 - DNA, 30 bp, Artificial Sequence
  Synthetic oligonucleotide
ttaaaacacaactcatcttcacgactcgca

SEQ ID NO: 127066 - DNA, 30 bp, Artificial Sequence
  Synthetic oligonucleotide
gggtgttcgataatctcttgttacctcgca

SEQ ID NO: 127067 - DNA, 30 bp, Artificial Sequence
  Synthetic oligonucleotide
tacttagagtaagggataacactgctcgca

SEQ ID NO: 127068 - DNA, 30 bp, Artificial Sequence
  Synthetic oligonucleotide
aaggggtaacattaatgagccaatctcgca

SEQ ID NO: 127069 - DNA, 30 bp, Artificial Sequence
  Synthetic oligonucleotide
tgcaagggtcatcagggaaggtcattcgca

SEQ ID NO: 127070 - DNA, 30 bp, Artificial Sequence
  Synthetic oligonucleotide
acaagtactgtaaatcaggccaagttcgca

SEQ ID NO: 127071 - DNA, 30 bp, Artificial Sequence
  Synthetic oligonucleotide
cgcaagggtccttcaacagcacggttcgca

SEQ ID NO: 127072 - DNA, 30 bp, Artificial Sequence
  Synthetic oligonucleotide
ccatcatttgtagctctacggcgaaaggca

SEQ ID NO: 127073 - DNA, 30 bp, Artificial Sequence
  Synthetic oligonucleotide
cgggacaatggtatgtgaaacgttaaggca

SEQ ID NO: 127074 - DNA, 30 bp, Artificial Sequence
  Synthetic oligonucleotide
ccagtccggattctgagtccattccaggca

SEQ ID NO: 127075 - DNA, 30 bp, Artificial Sequence
  Synthetic oligonucleotide
tcctatgggtgatagaataggttccaggca

SEQ ID NO: 127076 - DNA, 30 bp, Artificial Sequence
  Synthetic oligonucleotide
tgaggagtcgcggggcaatggcggcaggca

SEQ ID NO: 127077 - DNA, 30 bp, Artificial Sequence
  Synthetic oligonucleotide
ccggtaaggctgggtctcagtctgcaggca

SEQ ID NO: 127078 - DNA, 30 bp, Artificial Sequence
  Synthetic oligonucleotide
ggggtagcattatattagcaggcagaggca

SEQ ID NO: 127079 - DNA, 30 bp, Artificial Sequence
  Synthetic oligonucleotide
gcttagactgagatcaagagccccgaggca

SEQ ID NO: 127080 - DNA, 30 bp, Artificial Sequence
  Synthetic oligonucleotide
agggaatactggtccgattgcagctaggca

SEQ ID NO: 127081 - DNA, 30 bp, Artificial Sequence
  Synthetic oligonucleotide
cagaaagctcggcttagttctataacggca

SEQ ID NO: 127082 - DNA, 30 bp, Artificial Sequence
  Synthetic oligonucleotide
tgctccctgggatggatcaacccgacggca

SEQ ID NO: 127083 - DNA, 30 bp, Artificial Sequence
  Synthetic oligonucleotide
cctgatcggacaataaatacgacaccggca

SEQ ID NO: 127084 - DNA, 30 bp, Artificial Sequence
  Synthetic oligonucleotide
ttcaagtggccgtgaacatcgcaggcggca

SEQ ID NO: 127085 - DNA, 30 bp, Artificial Sequence
  Synthetic oligonucleotide
accacgtgagctggtataggatagtcggca

SEQ ID NO: 127086 - DNA, 30 bp, Artificial Sequence
  Synthetic oligonucleotide
gaacaaccgatagcgtaatatagaagggca

SEQ ID NO: 127087 - DNA, 30 bp, Artificial Sequence
  Synthetic oligonucleotide
cagggactaaagcggtccggaggcagggca

SEQ ID NO: 127088 - DNA, 30 bp, Artificial Sequence
  Synthetic oligonucleotide
tcggggattcagataggcatggcacgggca

SEQ ID NO: 127089 - DNA, 30 bp, Artificial Sequence
  Synthetic oligonucleotide
gtgctacccggctgatagtaaggacgggca

SEQ ID NO: 127090 - DNA, 30 bp, Artificial Sequence
  Synthetic oligonucleotide
cggcgcgccactaactgctctggacgggca

SEQ ID NO: 127091 - DNA, 30 bp, Artificial Sequence
  Synthetic oligonucleotide
ctgtcatacaaaatggcaattttccgggca

SEQ ID NO: 127092 - DNA, 30 bp, Artificial Sequence
  Synthetic oligonucleotide
cgcgggggcatgacgcataattgcggggca

SEQ ID NO: 127093 - DNA, 30 bp, Artificial Sequence
  Synthetic oligonucleotide
tctactcggggtagcagtgtaaggggggca

SEQ ID NO: 127094 - DNA, 30 bp, Artificial Sequence
  Synthetic oligonucleotide
tgggcaaaagttagaacacgcaatggggca

SEQ ID NO: 127095 - DNA, 30 bp, Artificial Sequence
  Synthetic oligonucleotide
agacaggtctgttgggcgtgatatggggca

SEQ ID NO: 127096 - DNA, 30 bp, Artificial Sequence
  Synthetic oligonucleotide
acttggaagattttgcgtatatctggggca

SEQ ID NO: 127097 - DNA, 30 bp, Artificial Sequence
  Synthetic oligonucleotide
aaccggagcgcgggaagtatattctgggca

SEQ ID NO: 127098 - DNA, 30 bp, Artificial Sequence
  Synthetic oligonucleotide
aagcggtgtgaaatctggggcgcgatggca

SEQ ID NO: 127099 - DNA, 30 bp, Artificial Sequence
  Synthetic oligonucleotide
atcatgaagtggaagtaatcacgtatggca

SEQ ID NO: 127100 - DNA, 30 bp, Artificial Sequence
  Synthetic oligonucleotide
ggccacagccaaaaggcactataactggca

SEQ ID NO: 127101 - DNA, 30 bp, Artificial Sequence
  Synthetic oligonucleotide
aaagatagagaaatgaatgtgtaactggca

SEQ ID NO: 127102 - DNA, 30 bp, Artificial Sequence
  Synthetic oligonucleotide
taaggcagaaatcggagtaatattctggca

SEQ ID NO: 127103 - DNA, 30 bp, Artificial Sequence
  Synthetic oligonucleotide
ccaaatggtaatgtgcccactaaggtggca

SEQ ID NO: 127104 - DNA, 30 bp, Artificial Sequence
  Synthetic oligonucleotide
ttccatccgtactaaccggggcaggtggca

SEQ ID NO: 127105 - DNA, 30 bp, Artificial Sequence
  Synthetic oligonucleotide
actcactcggctatgcaatattgggtggca

SEQ ID NO: 127106 - DNA, 30 bp, Artificial Sequence
  Synthetic oligonucleotide
aagtgggccatacttaaggtgatattggca

SEQ ID NO: 127107 - DNA, 30 bp, Artificial Sequence
  Synthetic oligonucleotide
tcaccggaagtcctaaggcctggcttggca

SEQ ID NO: 127108 - DNA, 30 bp, Artificial Sequence
  Synthetic oligonucleotide
cgtctaaacgcggtattgtatgcgaatgca

SEQ ID NO: 127109 - DNA, 30 bp, Artificial Sequence
  Synthetic oligonucleotide
gtcttaatagataaaaagtcaaaacatgca

SEQ ID NO: 127110 - DNA, 30 bp, Artificial Sequence
  Synthetic oligonucleotide
atatgtctggggcgaccagaaccacatgca

SEQ ID NO: 127111 - DNA, 30 bp, Artificial Sequence
  Synthetic oligonucleotide
agtaagttaaggtagctagttaaccatgca

SEQ ID NO: 127112 - DNA, 30 bp, Artificial Sequence
  Synthetic oligonucleotide
gatccctgaaggacagaacgacagcatgca

SEQ ID NO: 127113 - DNA, 30 bp, Artificial Sequence
  Synthetic oligonucleotide
tctactgcgagacatttcaagttgcatgca

SEQ ID NO: 127114 - DNA, 30 bp, Artificial Sequence
  Synthetic oligonucleotide
tgtatagggtcggacggtgcctgggatgca

SEQ ID NO: 127115 - DNA, 30 bp, Artificial Sequence
  Synthetic oligonucleotide
gacaagcaatggaggcgcaattatgatgca

SEQ ID NO: 127116 - DNA, 30 bp, Artificial Sequence
  Synthetic oligonucleotide
gaccgtgcaaattcactggagtaatatgca

SEQ ID NO: 127117 - DNA, 30 bp, Artificial Sequence
  Synthetic oligonucleotide
aaaacaatgtaaggaccacggccatatgca

SEQ ID NO: 127118 - DNA, 30 bp, Artificial Sequence
  Synthetic oligonucleotide
ccaccgaataaaatgttacgcaaaactgca

SEQ ID NO: 127119 - DNA, 30 bp, Artificial Sequence
  Synthetic oligonucleotide
caacgacggtgatgaggtgctaaaactgca

SEQ ID NO: 127120 - DNA, 30 bp, Artificial Sequence
  Synthetic oligonucleotide
gggattgccgatgtcctctggcccactgca

SEQ ID NO: 127121 - DNA, 30 bp, Artificial Sequence
  Synthetic oligonucleotide
attcgcggacccacattcaagaagactgca

SEQ ID NO: 127122 - DNA, 30 bp, Artificial Sequence
  Synthetic oligonucleotide
tgcgattacacaggaggaagcacgactgca

SEQ ID NO: 127123 - DNA, 30 bp, Artificial Sequence
  Synthetic oligonucleotide
tgtgggttacgtagagtaggctgtcctgca

SEQ ID NO: 127124 - DNA, 30 bp, Artificial Sequence
  Synthetic oligonucleotide
ctaaatggtcaagccagtcacagggctgca

SEQ ID NO: 127125 - DNA, 30 bp, Artificial Sequence
  Synthetic oligonucleotide
cgcggatcgtgctgtggttcaagtgctgca

SEQ ID NO: 127126 - DNA, 30 bp, Artificial Sequence
  Synthetic oligonucleotide
gtggggcatcgcagaagcggacaaagtgca

SEQ ID NO: 127127 - DNA, 30 bp, Artificial Sequence
  Synthetic oligonucleotide
aggttcccagataaggaccacgaaagtgca

SEQ ID NO: 127128 - DNA, 30 bp, Artificial Sequence
  Synthetic oligonucleotide
cttatctgcgtataggccgtgtcaagtgca

SEQ ID NO: 127129 - DNA, 30 bp, Artificial Sequence
  Synthetic oligonucleotide
gtgatagggacttgccgaaagagcagtgca

SEQ ID NO: 127130 - DNA, 30 bp, Artificial Sequence
  Synthetic oligonucleotide
gcacgtgaggcaatgtaaggtcctagtgca

SEQ ID NO: 127131 - DNA, 30 bp, Artificial Sequence
  Synthetic oligonucleotide
caagtacacgcaaggacacaagttagtgca

SEQ ID NO: 127132 - DNA, 30 bp, Artificial Sequence
  Synthetic oligonucleotide
cagtaaatgtcgccaagtattaaacgtgca

SEQ ID NO: 127133 - DNA, 30 bp, Artificial Sequence
  Synthetic oligonucleotide
ggcgcattccgattcaattgcaaccgtgca

SEQ ID NO: 127134 - DNA, 30 bp, Artificial Sequence
  Synthetic oligonucleotide
acttatggggctaatgtaatggaccgtgca

SEQ ID NO: 127135 - DNA, 30 bp, Artificial Sequence
  Synthetic oligonucleotide
tagcgaggtacaggcaacaagagccgtgca

SEQ ID NO: 127136 - DNA, 30 bp, Artificial Sequence
  Synthetic oligonucleotide
agtgggaaaacttctgtccatgagcgtgca

SEQ ID NO: 127137 - DNA, 30 bp, Artificial Sequence
  Synthetic oligonucleotide
aggatctagcctaactgcacagggcgtgca

SEQ ID NO: 127138 - DNA, 30 bp, Artificial Sequence
  Synthetic oligonucleotide
accgtaataaaatatccgtcacgtcgtgca

SEQ ID NO: 127139 - DNA, 30 bp, Artificial Sequence
  Synthetic oligonucleotide
gggatgatactaccgcttgatatctgtgca

SEQ ID NO: 127140 - DNA, 30 bp, Artificial Sequence
  Synthetic oligonucleotide
ttgacgctcgttatctgggaggagtgtgca

SEQ ID NO: 127141 - DNA, 30 bp, Artificial Sequence
  Synthetic oligonucleotide
agatcacgacgctgtgaaatggtttgtgca

SEQ ID NO: 127142 - DNA, 30 bp, Artificial Sequence
  Synthetic oligonucleotide
ggcttcgtgtcacggaattcggccattgca

SEQ ID NO: 127143 - DNA, 30 bp, Artificial Sequence
  Synthetic oligonucleotide
tcattaaccatccatagtggggctattgca

SEQ ID NO: 127144 - DNA, 30 bp, Artificial Sequence
  Synthetic oligonucleotide
cagagcgagtaataccagagccgtattgca

SEQ ID NO: 127145 - DNA, 30 bp, Artificial Sequence
  Synthetic oligonucleotide
ctagtaaactcgtaacgtggaattattgca

SEQ ID NO: 127146 - DNA, 30 bp, Artificial Sequence
  Synthetic oligonucleotide
caatcatctaaggggtacgtctatcttgca

SEQ ID NO: 127147 - DNA, 30 bp, Artificial Sequence
  Synthetic oligonucleotide
tcgagccgcatgtttggaataggtcttgca

SEQ ID NO: 127148 - DNA, 30 bp, Artificial Sequence
  Synthetic oligonucleotide
acgaaagttgaagggtcgcacctggttgca

SEQ ID NO: 127149 - DNA, 30 bp, Artificial Sequence
  Synthetic oligonucleotide
cagtaccggcgacaatcgcagagatttgca

SEQ ID NO: 127150 - DNA, 30 bp, Artificial Sequence
  Synthetic oligonucleotide
tttcgagagctaaatgcgtcacggtttgca

SEQ ID NO: 127151 - DNA, 30 bp, Artificial Sequence
  Synthetic oligonucleotide
tcttggtacacgaatcgattaggaaaatca

SEQ ID NO: 127152 - DNA, 30 bp, Artificial Sequence
  Synthetic oligonucleotide
taaaagatgtatttgagaggattaaaatca

SEQ ID NO: 127153 - DNA, 30 bp, Artificial Sequence
  Synthetic oligonucleotide
acgttgtgtttcgcttcagactacaaatca

SEQ ID NO: 127154 - DNA, 30 bp, Artificial Sequence
  Synthetic oligonucleotide
gtatagccttcgtagaaaacaaccaaatca

SEQ ID NO: 127155 - DNA, 30 bp, Artificial Sequence
  Synthetic oligonucleotide
tcgtaagtaaaagggtttcgcgccaaatca

SEQ ID NO: 127156 - DNA, 30 bp, Artificial Sequence
  Synthetic oligonucleotide
cgttatccagaatgaggagggtcgaaatca

SEQ ID NO: 127157 - DNA, 30 bp, Artificial Sequence
  Synthetic oligonucleotide
agcgggatacggttcccttattctaaatca

SEQ ID NO: 127158 - DNA, 30 bp, Artificial Sequence
  Synthetic oligonucleotide
gaatccgggcgccagcgcgtcagtaaatca

SEQ ID NO: 127159 - DNA, 30 bp, Artificial Sequence
  Synthetic oligonucleotide
cggcacgtcgttaaaacacggcgtaaatca

SEQ ID NO: 127160 - DNA, 30 bp, Artificial Sequence
  Synthetic oligonucleotide
tctgatcgatctaatatgacacgggaatca

SEQ ID NO: 127161 - DNA, 30 bp, Artificial Sequence
  Synthetic oligonucleotide
cacggctagggccaccctcttcgataatca

SEQ ID NO: 127162 - DNA, 30 bp, Artificial Sequence
  Synthetic oligonucleotide
gacgactcacgctttaaaattgcctaatca

SEQ ID NO: 127163 - DNA, 30 bp, Artificial Sequence
  Synthetic oligonucleotide
gcgatagcaacgatcttaactgtctaatca

SEQ ID NO: 127164 - DNA, 30 bp, Artificial Sequence
  Synthetic oligonucleotide
gaaaactgcgccgggattgggataacatca

SEQ ID NO: 127165 - DNA, 30 bp, Artificial Sequence
  Synthetic oligonucleotide
tgaaacggaccgtggcaaatctgtacatca

SEQ ID NO: 127166 - DNA, 30 bp, Artificial Sequence
  Synthetic oligonucleotide
tggcaaagagcgctggagtcacccccatca

SEQ ID NO: 127167 - DNA, 30 bp, Artificial Sequence
  Synthetic oligonucleotide
aagatgcgtcccaggtccctccgtccatca

SEQ ID NO: 127168 - DNA, 30 bp, Artificial Sequence
  Synthetic oligonucleotide
cggataacgggtcgtgtctaggaagcatca

SEQ ID NO: 127169 - DNA, 30 bp, Artificial Sequence
  Synthetic oligonucleotide
attcggagcaactcattaaacctcgcatca

SEQ ID NO: 127170 - DNA, 30 bp, Artificial Sequence
  Synthetic oligonucleotide
ggagagggcgtaggttgtgccggggcatca

SEQ ID NO: 127171 - DNA, 30 bp, Artificial Sequence
  Synthetic oligonucleotide
gcctgatgaaacgttatatcactggcatca

SEQ ID NO: 127172 - DNA, 30 bp, Artificial Sequence
  Synthetic oligonucleotide
gctcgcacagactaaattttttaatcatca

SEQ ID NO: 127173 - DNA, 30 bp, Artificial Sequence
  Synthetic oligonucleotide
tacgaactttgttattcaccggtatcatca

SEQ ID NO: 127174 - DNA, 30 bp, Artificial Sequence
  Synthetic oligonucleotide
tatcatgatagcgaggaatgttgaagatca

SEQ ID NO: 127175 - DNA, 30 bp, Artificial Sequence
  Synthetic oligonucleotide
agaactagttataaagaaaggtatagatca

SEQ ID NO: 127176 - DNA, 31 bp, Artificial Sequence
  Synthetic oligonucleotide
cgaactgaatatacataaggcttaacgatca

SEQ ID NO: 127177 - DNA, 30 bp, Artificial Sequence
  Synthetic oligonucleotide
accgagatgataaatggttattcacgatca

SEQ ID NO: 127178 - DNA, 30 bp, Artificial Sequence
  Synthetic oligonucleotide
tggtctaaattgactccttcgtgccgatca

SEQ ID NO: 127179 - DNA, 30 bp, Artificial Sequence
  Synthetic oligonucleotide
tgggaggtgggatcagctgagtgaggatca

SEQ ID NO: 127180 - DNA, 30 bp, Artificial Sequence
  Synthetic oligonucleotide
ctgttcgggaggatctagagttgcggatca

SEQ ID NO: 127181 - DNA, 30 bp, Artificial Sequence
  Synthetic oligonucleotide
gagtcgcaaagacttgcgaatagtggatca

SEQ ID NO: 127182 - DNA, 30 bp, Artificial Sequence
  Synthetic oligonucleotide
cgaggatttaggttacgcttcagttgatca

SEQ ID NO: 127183 - DNA, 30 bp, Artificial Sequence
  Synthetic oligonucleotide
aacatagtaactcgaccatatcgttgatca

SEQ ID NO: 127184 - DNA, 30 bp, Artificial Sequence
  Synthetic oligonucleotide
cgtgtgtatccaccaagctaccacatatca

SEQ ID NO: 127185 - DNA, 30 bp, Artificial Sequence
  Synthetic oligonucleotide
gattaacgaaggttaacccataccatatca

SEQ ID NO: 127186 - DNA, 30 bp, Artificial Sequence
  Synthetic oligonucleotide
tggatacggtcgaggtggtggacgatatca

SEQ ID NO: 127187 - DNA, 30 bp, Artificial Sequence
  Synthetic oligonucleotide
ggagccctggcggggatttaactgatatca

SEQ ID NO: 127188 - DNA, 30 bp, Artificial Sequence
  Synthetic oligonucleotide
gcggcccacattatcatcctcgatatatca

SEQ ID NO: 127189 - DNA, 30 bp, Artificial Sequence
  Synthetic oligonucleotide
tcgtctgagccgcgactgccataactatca

SEQ ID NO: 127190 - DNA, 30 bp, Artificial Sequence
  Synthetic oligonucleotide
atatctaatgtcggaacagatgcactatca

SEQ ID NO: 127191 - DNA, 30 bp, Artificial Sequence
  Synthetic oligonucleotide
gtttgcacaagcaacacactaggtctatca

SEQ ID NO: 127192 - DNA, 30 bp, Artificial Sequence
  Synthetic oligonucleotide
atcatgacaaacgggctgtcgttcgtatca

SEQ ID NO: 127193 - DNA, 30 bp, Artificial Sequence
  Synthetic oligonucleotide
gggagtgattaaaatcctacgactgtatca

SEQ ID NO: 127194 - DNA, 30 bp, Artificial Sequence
  Synthetic oligonucleotide
gttctcaccaaacgttgtgagcaattatca

SEQ ID NO: 127195 - DNA, 30 bp, Artificial Sequence
  Synthetic oligonucleotide
cttttagtggagtttaagggagcattatca

SEQ ID NO: 127196 - DNA, 30 bp, Artificial Sequence
  Synthetic oligonucleotide
acgcaatacgggttaatctttggcttatca

SEQ ID NO: 127197 - DNA, 30 bp, Artificial Sequence
  Synthetic oligonucleotide
agcttcactcgcccaccgttatcgttatca

SEQ ID NO: 127198 - DNA, 30 bp, Artificial Sequence
  Synthetic oligonucleotide
ttcgaccctgtgatacaagggtggttatca

SEQ ID NO: 127199 - DNA, 30 bp, Artificial Sequence
  Synthetic oligonucleotide
gcacagtggaagtatcgtgcaaatttatca

SEQ ID NO: 127200 - DNA, 30 bp, Artificial Sequence
  Synthetic oligonucleotide
tactcctactagaatcctatcataaactca

SEQ ID NO: 127201 - DNA, 30 bp, Artificial Sequence
  Synthetic oligonucleotide
cccgcgaattccagagcggagctaaactca

SEQ ID NO: 127202 - DNA, 30 bp, Artificial Sequence
  Synthetic oligonucleotide
ccgcgaaagtggagttacaacggcaactca

SEQ ID NO: 127203 - DNA, 30 bp, Artificial Sequence
  Synthetic oligonucleotide
ggcggctataatcgcccaggatcgaactca

SEQ ID NO: 127204 - DNA, 30 bp, Artificial Sequence
  Synthetic oligonucleotide
cagggtggtcattagatatgctggaactca

SEQ ID NO: 127205 - DNA, 30 bp, Artificial Sequence
  Synthetic oligonucleotide
ggtcgttgcgagcagcagtctaaacactca

SEQ ID NO: 127206 - DNA, 30 bp, Artificial Sequence
  Synthetic oligonucleotide
agggaaaaggggtaggaaataggccactca

SEQ ID NO: 127207 - DNA, 30 bp, Artificial Sequence
  Synthetic oligonucleotide
accgcccgtaatcagaatgtcaattactca

SEQ ID NO: 127208 - DNA, 30 bp, Artificial Sequence
  Synthetic oligonucleotide
ctccgacatggtgtcataccaccttactca

SEQ ID NO: 127209 - DNA, 30 bp, Artificial Sequence
  Synthetic oligonucleotide
caaatgggcatcctcaagcgcggcacctca

SEQ ID NO: 127210 - DNA, 30 bp, Artificial Sequence
  Synthetic oligonucleotide
agtccgaatgtttcgggatcgtggacctca

SEQ ID NO: 127211 - DNA, 30 bp, Artificial Sequence
  Synthetic oligonucleotide
accaggtcctgcatggttgcgagaccctca

SEQ ID NO: 127212 - DNA, 30 bp, Artificial Sequence
  Synthetic oligonucleotide
atcgaggttctggactcatcatatccctca

SEQ ID NO: 127213 - DNA, 30 bp, Artificial Sequence
  Synthetic oligonucleotide
tatggccacattgacggtgattgagcctca

SEQ ID NO: 127214 - DNA, 30 bp, Artificial Sequence
  Synthetic oligonucleotide
ggttatgcacacgttgatacagcggcctca

SEQ ID NO: 127215 - DNA, 30 bp, Artificial Sequence
  Synthetic oligonucleotide
cgttactgtaaaccgaccctgtctgcctca

SEQ ID NO: 127216 - DNA, 30 bp, Artificial Sequence
  Synthetic oligonucleotide
ttactgcgtatagtctttgccatcagctca

SEQ ID NO: 127217 - DNA, 30 bp, Artificial Sequence
  Synthetic oligonucleotide
atggccctttggccgaccagtaggagctca

SEQ ID NO: 127218 - DNA, 30 bp, Artificial Sequence
  Synthetic oligonucleotide
gggtacagcacgtcacgatcgcatagctca

SEQ ID NO: 127219 - DNA, 30 bp, Artificial Sequence
  Synthetic oligonucleotide
cccgtaatgctgggatgcgagcaccgctca

SEQ ID NO: 127220 - DNA, 30 bp, Artificial Sequence
  Synthetic oligonucleotide
agctgttcagttgtgacgacgtaaggctca

SEQ ID NO: 127221 - DNA, 30 bp, Artificial Sequence
  Synthetic oligonucleotide
gagcgtggcgcccataacctcagaggctca

SEQ ID NO: 127222 - DNA, 30 bp, Artificial Sequence
  Synthetic oligonucleotide
gtaggtggtttagacttacagaatggctca

SEQ ID NO: 127223 - DNA, 30 bp, Artificial Sequence
  Synthetic oligonucleotide
cataatgctgcccataattctgcctgctca

SEQ ID NO: 127224 - DNA, 30 bp, Artificial Sequence
  Synthetic oligonucleotide
tgctaaaagcatctgaacatggagtgctca

SEQ ID NO: 127225 - DNA, 30 bp, Artificial Sequence
  Synthetic oligonucleotide
gtgcgatacggagataaataggtttgctca

SEQ ID NO: 127226 - DNA, 30 bp, Artificial Sequence
  Synthetic oligonucleotide
atgggtggtgtacgagtacgacgaatctca

SEQ ID NO: 127227 - DNA, 30 bp, Artificial Sequence
  Synthetic oligonucleotide
attgcctctgactgtacgaaaggaatctca

SEQ ID NO: 127228 - DNA, 30 bp, Artificial Sequence
  Synthetic oligonucleotide
gtggactgtgggcatcatcctgtgatctca

SEQ ID NO: 127229 - DNA, 30 bp, Artificial Sequence
  Synthetic oligonucleotide
tagacacgtttttgatggcgagagctctca

SEQ ID NO: 127230 - DNA, 30 bp, Artificial Sequence
  Synthetic oligonucleotide
ggtgcgaatcactgcagcgtctaagtctca

SEQ ID NO: 127231 - DNA, 30 bp, Artificial Sequence
  Synthetic oligonucleotide
cattaatatatttgacatccgaacgtctca

SEQ ID NO: 127232 - DNA, 30 bp, Artificial Sequence
  Synthetic oligonucleotide
gggggtgcgatttcaggcagtgaggtctca

SEQ ID NO: 127233 - DNA, 30 bp, Artificial Sequence
  Synthetic oligonucleotide
tagcaaggatcagtgggtggtgaggtctca

SEQ ID NO: 127234 - DNA, 30 bp, Artificial Sequence
  Synthetic oligonucleotide
cagtcgttaagccccaccatgccggtctca

SEQ ID NO: 127235 - DNA, 30 bp, Artificial Sequence
  Synthetic oligonucleotide
atgttgtgtagtgaccgggtgcacttctca

SEQ ID NO: 127236 - DNA, 30 bp, Artificial Sequence
  Synthetic oligonucleotide
aacccacaactaaacaacgtctcgttctca

SEQ ID NO: 127237 - DNA, 30 bp, Artificial Sequence
  Synthetic oligonucleotide
gagcatgtgagacgttctattactaagtca

SEQ ID NO: 127238 - DNA, 30 bp, Artificial Sequence
  Synthetic oligonucleotide
ccgaggtcggaatcatgttctctacagtca

SEQ ID NO: 127239 - DNA, 30 bp, Artificial Sequence
  Synthetic oligonucleotide
tcctggtggactacgcgcgatttcgagtca

SEQ ID NO: 127240 - DNA, 30 bp, Artificial Sequence
  Synthetic oligonucleotide
gtggtatttgggtaaggaagatcttagtca

SEQ ID NO: 127241 - DNA, 31 bp, Artificial Sequence
  Synthetic oligonucleotide
gattgaacaaatcacttccccctctacgtca

SEQ ID NO: 127242 - DNA, 30 bp, Artificial Sequence
  Synthetic oligonucleotide
tgcccttgttggacttcaaaaaccccgtca

SEQ ID NO: 127243 - DNA, 30 bp, Artificial Sequence
  Synthetic oligonucleotide
actcagaaaataaaaagctaataagcgtca

SEQ ID NO: 127244 - DNA, 30 bp, Artificial Sequence
  Synthetic oligonucleotide
atggcgtctccaaacatggatctagcgtca

SEQ ID NO: 127245 - DNA, 30 bp, Artificial Sequence
  Synthetic oligonucleotide
agtgcagacacgattaggtgtccggcgtca

SEQ ID NO: 127246 - DNA, 30 bp, Artificial Sequence
  Synthetic oligonucleotide
cttgatagctaggacctaccggatgcgtca

SEQ ID NO: 127247 - DNA, 30 bp, Artificial Sequence
  Synthetic oligonucleotide
cgtcgagaaccgtagcggtatgatgcgtca

SEQ ID NO: 127248 - DNA, 30 bp, Artificial Sequence
  Synthetic oligonucleotide
aaccgcgacgtacgccggaatttatcgtca

SEQ ID NO: 127249 - DNA, 30 bp, Artificial Sequence
  Synthetic oligonucleotide
gatgagccagtaccgcgttacttaaggtca

SEQ ID NO: 127250 - DNA, 30 bp, Artificial Sequence
  Synthetic oligonucleotide
aagacaataggaacgggtcctgagaggtca

SEQ ID NO: 127251 - DNA, 30 bp, Artificial Sequence
  Synthetic oligonucleotide
agggtgcgatgtgaatggtcactgaggtca

SEQ ID NO: 127252 - DNA, 30 bp, Artificial Sequence
  Synthetic oligonucleotide
tgtgcacggacattcggtgatgtgcggtca

SEQ ID NO: 127253 - DNA, 30 bp, Artificial Sequence
  Synthetic oligonucleotide
gaaggcctggatctatacaaggcagggtca

SEQ ID NO: 127254 - DNA, 30 bp, Artificial Sequence
  Synthetic oligonucleotide
gatgcgtgtcggaagctataccttgggtca

SEQ ID NO: 127255 - DNA, 30 bp, Artificial Sequence
  Synthetic oligonucleotide
ggcgggagttacatgactttcccatggtca

SEQ ID NO: 127256 - DNA, 30 bp, Artificial Sequence
  Synthetic oligonucleotide
ctggtagatacagttctattgcagtggtca

SEQ ID NO: 127257 - DNA, 31 bp, Artificial Sequence
  Synthetic oligonucleotide
aggtggaacgaccccctttaatgagtggtca

SEQ ID NO: 127258 - DNA, 30 bp, Artificial Sequence
  Synthetic oligonucleotide
gcacaacgatcggtgtatcgccggtggtca

SEQ ID NO: 127259 - DNA, 30 bp, Artificial Sequence
  Synthetic oligonucleotide
tggtcgttatcgattttgcgttgaatgtca

SEQ ID NO: 127260 - DNA, 30 bp, Artificial Sequence
  Synthetic oligonucleotide
gcacacattctatgatgtaaacgactgtca

SEQ ID NO: 127261 - DNA, 31 bp, Artificial Sequence
  Synthetic oligonucleotide
gcacgggttgtacggatgttgaaacctgtca

SEQ ID NO: 127262 - DNA, 30 bp, Artificial Sequence
  Synthetic oligonucleotide
tggttcatctgtaaagagaccccgctgtca

SEQ ID NO: 127263 - DNA, 30 bp, Artificial Sequence
  Synthetic oligonucleotide
ctgaagcatgcggggtagggtgcgctgtca

SEQ ID NO: 127264 - DNA, 30 bp, Artificial Sequence
  Synthetic oligonucleotide
gctcgagcgccgactctctaggaggtgtca

SEQ ID NO: 127265 - DNA, 30 bp, Artificial Sequence
  Synthetic oligonucleotide
ctcgtcgggaggcctcatagggttgtgtca

SEQ ID NO: 127266 - DNA, 30 bp, Artificial Sequence
  Synthetic oligonucleotide
cagttgtcaacgaccttcgccgccttgtca

SEQ ID NO: 127267 - DNA, 30 bp, Artificial Sequence
  Synthetic oligonucleotide
tgcagccaggcaaacgttgaagaaaattca

SEQ ID NO: 127268 - DNA, 30 bp, Artificial Sequence
  Synthetic oligonucleotide
ggagatgaacttggttatcagtcgcattca

SEQ ID NO: 127269 - DNA, 30 bp, Artificial Sequence
  Synthetic oligonucleotide
gtccgccgccgggagtgcggtgctcattca

SEQ ID NO: 127270 - DNA, 30 bp, Artificial Sequence
  Synthetic oligonucleotide
cggccacaccctgctggtattgctcattca

SEQ ID NO: 127271 - DNA, 30 bp, Artificial Sequence
  Synthetic oligonucleotide
tgtgggtgtgagggtgtcgtgggtcattca

SEQ ID NO: 127272 - DNA, 30 bp, Artificial Sequence
  Synthetic oligonucleotide
aaagataactgcagggtcgagattcattca

SEQ ID NO: 127273 - DNA, 30 bp, Artificial Sequence
  Synthetic oligonucleotide
cataagtggatgcacttccgggtagattca

SEQ ID NO: 127274 - DNA, 30 bp, Artificial Sequence
  Synthetic oligonucleotide
ttagacagttaagagcactgatgcgattca

SEQ ID NO: 127275 - DNA, 30 bp, Artificial Sequence
  Synthetic oligonucleotide
acttgaatacggtgaaggcttattgattca

SEQ ID NO: 127276 - DNA, 30 bp, Artificial Sequence
  Synthetic oligonucleotide
ggggcgtggcatcacccgcctagcacttca

SEQ ID NO: 127277 - DNA, 30 bp, Artificial Sequence
  Synthetic oligonucleotide
gacccacgatgagcaggaggaaggccttca

SEQ ID NO: 127278 - DNA, 30 bp, Artificial Sequence
  Synthetic oligonucleotide
taagcatcaatacggtgggagcatgcttca

SEQ ID NO: 127279 - DNA, 30 bp, Artificial Sequence
  Synthetic oligonucleotide
gcagggaacatccgtctgttgggtgcttca

SEQ ID NO: 127280 - DNA, 30 bp, Artificial Sequence
  Synthetic oligonucleotide
agcagattcgtctcgttatgcattgcttca

SEQ ID NO: 127281 - DNA, 30 bp, Artificial Sequence
  Synthetic oligonucleotide
accgaccgggggggaggagcgtgatcttca

SEQ ID NO: 127282 - DNA, 30 bp, Artificial Sequence
  Synthetic oligonucleotide
ctggttccctgaaatgtgaacccctcttca

SEQ ID NO: 127283 - DNA, 30 bp, Artificial Sequence
  Synthetic oligonucleotide
gaggagtcattcatgggggccttaagttca

SEQ ID NO: 127284 - DNA, 30 bp, Artificial Sequence
  Synthetic oligonucleotide
gactttgggcaacaggaagtgcggagttca

SEQ ID NO: 127285 - DNA, 30 bp, Artificial Sequence
  Synthetic oligonucleotide
tggaagtaccaccctactctctgtagttca

SEQ ID NO: 127286 - DNA, 30 bp, Artificial Sequence
  Synthetic oligonucleotide
tacatcaaccagctattacactaacgttca

SEQ ID NO: 127287 - DNA, 30 bp, Artificial Sequence
  Synthetic oligonucleotide
ttcatggtatacctcgaattgggacgttca

SEQ ID NO: 127288 - DNA, 30 bp, Artificial Sequence
  Synthetic oligonucleotide
tatctggggtagagagatagggtacgttca

SEQ ID NO: 127289 - DNA, 30 bp, Artificial Sequence
  Synthetic oligonucleotide
gctggtttcaatcaaccccgagtccgttca

SEQ ID NO: 127290 - DNA, 30 bp, Artificial Sequence
  Synthetic oligonucleotide
taacaaaggcggtgacacttccaaggttca

SEQ ID NO: 127291 - DNA, 30 bp, Artificial Sequence
  Synthetic oligonucleotide
caagagcgcttagtcccataaacgggttca

SEQ ID NO: 127292 - DNA, 30 bp, Artificial Sequence
  Synthetic oligonucleotide
tacacatcacgccgactgtacattggttca

SEQ ID NO: 127293 - DNA, 30 bp, Artificial Sequence
  Synthetic oligonucleotide
accgactcgtcaattgcgtcggtgtgttca

SEQ ID NO: 127294 - DNA, 30 bp, Artificial Sequence
  Synthetic oligonucleotide
tgctacgctatactctaagtatgttgttca

SEQ ID NO: 127295 - DNA, 30 bp, Artificial Sequence
  Synthetic oligonucleotide
aaggtatacattcaccgagacgtttgttca

SEQ ID NO: 127296 - DNA, 30 bp, Artificial Sequence
  Synthetic oligonucleotide
tttgggaggcaacggtcaagatcgatttca

SEQ ID NO: 127297 - DNA, 30 bp, Artificial Sequence
  Synthetic oligonucleotide
aaggagagtgcctgcgaagtccacctttca

SEQ ID NO: 127298 - DNA, 30 bp, Artificial Sequence
  Synthetic oligonucleotide
acgacagggatgcattagagccaagtttca

SEQ ID NO: 127299 - DNA, 30 bp, Artificial Sequence
  Synthetic oligonucleotide
tcatcaataaggtgtagaatggtagtttca

SEQ ID NO: 127300 - DNA, 30 bp, Artificial Sequence
  Synthetic oligonucleotide
tcgccgaagtgttgtaggaagcgcgtttca

SEQ ID NO: 127301 - DNA, 30 bp, Artificial Sequence
  Synthetic oligonucleotide
cgagatcgcacgtttccgtgatgcgtttca

SEQ ID NO: 127302 - DNA, 30 bp, Artificial Sequence
  Synthetic oligonucleotide
ggggagcgggagcaaggcatgattgtttca

SEQ ID NO: 127303 - DNA, 30 bp, Artificial Sequence
  Synthetic oligonucleotide
acctgtatcagcgaggccacgacattttca

SEQ ID NO: 127304 - DNA, 30 bp, Artificial Sequence
  Synthetic oligonucleotide
cggatatcgacgggtcgagaagacttttca

SEQ ID NO: 127305 - DNA, 30 bp, Artificial Sequence
  Synthetic oligonucleotide
ggtagtctatcaagcgcatcaccaaaaaga

SEQ ID NO: 127306 - DNA, 30 bp, Artificial Sequence
  Synthetic oligonucleotide
acagatgcatagaatgataatggaaaaaga

SEQ ID NO: 127307 - DNA, 30 bp, Artificial Sequence
  Synthetic oligonucleotide
gtgagctcgttgggcttcggagataaaaga

SEQ ID NO: 127308 - DNA, 30 bp, Artificial Sequence
  Synthetic oligonucleotide
atcggggacatggtttggaactataaaaga

SEQ ID NO: 127309 - DNA, 30 bp, Artificial Sequence
  Synthetic oligonucleotide
aggccagcgagtgcgtcccagggtaaaaga

SEQ ID NO: 127310 - DNA, 30 bp, Artificial Sequence
  Synthetic oligonucleotide
acaaacttcaggagttacggtgcagaaaga

SEQ ID NO: 127311 - DNA, 30 bp, Artificial Sequence
  Synthetic oligonucleotide
aggccaagccgataatttagacgcgaaaga

SEQ ID NO: 127312 - DNA, 30 bp, Artificial Sequence
  Synthetic oligonucleotide
caattctgcgagtcggtatatggcgaaaga

SEQ ID NO: 127313 - DNA, 30 bp, Artificial Sequence
  Synthetic oligonucleotide
ctacacaatttaccatctaagggggaaaga

SEQ ID NO: 127314 - DNA, 30 bp, Artificial Sequence
  Synthetic oligonucleotide
aaggctggaatggccgggctcaaataaaga

SEQ ID NO: 127315 - DNA, 30 bp, Artificial Sequence
  Synthetic oligonucleotide
accaaatacggaaccgcggtgcagtaaaga

SEQ ID NO: 127316 - DNA, 30 bp, Artificial Sequence
  Synthetic oligonucleotide
tgcggtctgcaagtggatgtcctgtaaaga

SEQ ID NO: 127317 - DNA, 30 bp, Artificial Sequence
  Synthetic oligonucleotide
caaggttttacttcttcaacggtcacaaga

SEQ ID NO: 127318 - DNA, 30 bp, Artificial Sequence
  Synthetic oligonucleotide
acttagataggcccctcaccaaggacaaga

SEQ ID NO: 127319 - DNA, 30 bp, Artificial Sequence
  Synthetic oligonucleotide
taagaggctgaccatctcccattgacaaga

SEQ ID NO: 127320 - DNA, 30 bp, Artificial Sequence
  Synthetic oligonucleotide
aagttgcttgggaacagatccgatacaaga

SEQ ID NO: 127321 - DNA, 30 bp, Artificial Sequence
  Synthetic oligonucleotide
cgcgatggctaagcttgggctcgtacaaga

SEQ ID NO: 127322 - DNA, 30 bp, Artificial Sequence
  Synthetic oligonucleotide
ccaaggatacgtgcctattcaataccaaga

SEQ ID NO: 127323 - DNA, 30 bp, Artificial Sequence
  Synthetic oligonucleotide
tggatatggaggaagaggacagacccaaga

SEQ ID NO: 127324 - DNA, 30 bp, Artificial Sequence
  Synthetic oligonucleotide
ccggtaaaaggctggctttgccgcccaaga

SEQ ID NO: 127325 - DNA, 30 bp, Artificial Sequence
  Synthetic oligonucleotide
acgaaaaccggccacgcgtactctccaaga

SEQ ID NO: 127326 - DNA, 30 bp, Artificial Sequence
  Synthetic oligonucleotide
aatgaatttgcggatattaccgttccaaga

SEQ ID NO: 127327 - DNA, 30 bp, Artificial Sequence
  Synthetic oligonucleotide
tcgtagtttgtcaagtgcagttgagcaaga

SEQ ID NO: 127328 - DNA, 30 bp, Artificial Sequence
  Synthetic oligonucleotide
gggtacagcttcctgaagacgaatgcaaga

SEQ ID NO: 127329 - DNA, 30 bp, Artificial Sequence
  Synthetic oligonucleotide
accatttgtgtaggagaaagtagttcaaga

SEQ ID NO: 127330 - DNA, 30 bp, Artificial Sequence
  Synthetic oligonucleotide
ggaacacgtgtgagtagcccccgttcaaga

SEQ ID NO: 127331 - DNA, 30 bp, Artificial Sequence
  Synthetic oligonucleotide
gcgtgacagtcaaatcactcccgttcaaga

SEQ ID NO: 127332 - DNA, 30 bp, Artificial Sequence
  Synthetic oligonucleotide
aagccctaccggagtgtcagcccgagaaga

SEQ ID NO: 127333 - DNA, 30 bp, Artificial Sequence
  Synthetic oligonucleotide
ctgaatgaaacgatctgtgctaatagaaga

SEQ ID NO: 127334 - DNA, 30 bp, Artificial Sequence
  Synthetic oligonucleotide
cgctggcgggtcaactaaatgtgtagaaga

SEQ ID NO: 127335 - DNA, 30 bp, Artificial Sequence
  Synthetic oligonucleotide
aacgcaatccctaactctgtaagccgaaga

SEQ ID NO: 127336 - DNA, 30 bp, Artificial Sequence
  Synthetic oligonucleotide
ttgctaattcgaagtcgtttcgtccgaaga

SEQ ID NO: 127337 - DNA, 30 bp, Artificial Sequence
  Synthetic oligonucleotide
acgctcgttaaacaaataatgtagcgaaga

SEQ ID NO: 127338 - DNA, 30 bp, Artificial Sequence
  Synthetic oligonucleotide
ggtaatcagggcaagggatattgaggaaga

SEQ ID NO: 127339 - DNA, 30 bp, Artificial Sequence
  Synthetic oligonucleotide
cttagtagaaacgtggtttatttcggaaga

SEQ ID NO: 127340 - DNA, 30 bp, Artificial Sequence
  Synthetic oligonucleotide
gccatcacccgcgggagtccgcactgaaga

SEQ ID NO: 127341 - DNA, 30 bp, Artificial Sequence
  Synthetic oligonucleotide
cagacatcttgagatgaccagtcctgaaga

SEQ ID NO: 127342 - DNA, 30 bp, Artificial Sequence
  Synthetic oligonucleotide
agctgtcaacgttcgtccagtagctgaaga

SEQ ID NO: 127343 - DNA, 30 bp, Artificial Sequence
  Synthetic oligonucleotide
agaatttggtcattagaatcccgttgaaga

SEQ ID NO: 127344 - DNA, 30 bp, Artificial Sequence
  Synthetic oligonucleotide
caaaaaaacgacactaatatgatcataaga

SEQ ID NO: 127345 - DNA, 30 bp, Artificial Sequence
  Synthetic oligonucleotide
gtagactaagtgcaaaaagtgccgataaga

SEQ ID NO: 127346 - DNA, 30 bp, Artificial Sequence
  Synthetic oligonucleotide
aactcatcgatgccacgagattgactaaga

SEQ ID NO: 127347 - DNA, 30 bp, Artificial Sequence
  Synthetic oligonucleotide
gcaccaatcaaggaggtctaatccctaaga

SEQ ID NO: 127348 - DNA, 30 bp, Artificial Sequence
  Synthetic oligonucleotide
aaccggacatcgggatattttgggctaaga

SEQ ID NO: 127349 - DNA, 30 bp, Artificial Sequence
  Synthetic oligonucleotide
caggacacattagaacctccaagtctaaga

SEQ ID NO: 127350 - DNA, 30 bp, Artificial Sequence
  Synthetic oligonucleotide
atccggccagacagatatggtggtctaaga

SEQ ID NO: 127351 - DNA, 30 bp, Artificial Sequence
  Synthetic oligonucleotide
agtgtaaataccccggcactcagagtaaga

SEQ ID NO: 127352 - DNA, 30 bp, Artificial Sequence
  Synthetic oligonucleotide
gataatagtcgtagagcgcggctggtaaga

SEQ ID NO: 127353 - DNA, 30 bp, Artificial Sequence
  Synthetic oligonucleotide
gtcattccgcaccgctaaaatagtgtaaga

SEQ ID NO: 127354 - DNA, 30 bp, Artificial Sequence
  Synthetic oligonucleotide
gcacgtattagcaatgggcggctattaaga

SEQ ID NO: 127355 - DNA, 30 bp, Artificial Sequence
  Synthetic oligonucleotide
acgttcgaggctagcagaatctgtttaaga

SEQ ID NO: 127356 - DNA, 30 bp, Artificial Sequence
  Synthetic oligonucleotide
ggcaaaggatgatcggacacctcaaacaga

SEQ ID NO: 127357 - DNA, 30 bp, Artificial Sequence
  Synthetic oligonucleotide
tccgtgactcacataaagaacaacaacaga

SEQ ID NO: 127358 - DNA, 30 bp, Artificial Sequence
  Synthetic oligonucleotide
ccctcgggtccaaaacaaagggcgaacaga

SEQ ID NO: 127359 - DNA, 30 bp, Artificial Sequence
  Synthetic oligonucleotide
aattcgttacatagagatcggttgaacaga

SEQ ID NO: 127360 - DNA, 30 bp, Artificial Sequence
  Synthetic oligonucleotide
tctgctgggttcatcgaacagattaacaga

SEQ ID NO: 127361 - DNA, 30 bp, Artificial Sequence
  Synthetic oligonucleotide
tagagtattctcccaaatatcaaacacaga

SEQ ID NO: 127362 - DNA, 30 bp, Artificial Sequence
  Synthetic oligonucleotide
tcgtagcaaacaacttgggttaaacacaga

SEQ ID NO: 127363 - DNA, 30 bp, Artificial Sequence
  Synthetic oligonucleotide
aattcagagtctattacaatgatacacaga

SEQ ID NO: 127364 - DNA, 30 bp, Artificial Sequence
  Synthetic oligonucleotide
acaacaaagattgcgagatttgatcacaga

SEQ ID NO: 127365 - DNA, 30 bp, Artificial Sequence
  Synthetic oligonucleotide
ttcttcatcacttaatatcaatcagacaga

SEQ ID NO: 127366 - DNA, 30 bp, Artificial Sequence
  Synthetic oligonucleotide
gagaggggaggagttgttagacttgacaga

SEQ ID NO: 127367 - DNA, 30 bp, Artificial Sequence
  Synthetic oligonucleotide
agtggcaacgtctggctgctttaatacaga

SEQ ID NO: 127368 - DNA, 30 bp, Artificial Sequence
  Synthetic oligonucleotide
tagccgactcggctagagaacgtatacaga

SEQ ID NO: 127369 - DNA, 30 bp, Artificial Sequence
  Synthetic oligonucleotide
ccacgggttttgcactgggaaaactacaga

SEQ ID NO: 127370 - DNA, 30 bp, Artificial Sequence
  Synthetic oligonucleotide
tcaagtatacagatgagtcgtatttacaga

SEQ ID NO: 127371 - DNA, 30 bp, Artificial Sequence
  Synthetic oligonucleotide
ggtagctcaataggtcgttcagacaccaga

SEQ ID NO: 127372 - DNA, 30 bp, Artificial Sequence
  Synthetic oligonucleotide
ccgtcataaaattgtcatttcaagaccaga

SEQ ID NO: 127373 - DNA, 30 bp, Artificial Sequence
  Synthetic oligonucleotide
attgcttcgctgcggttaaaaacacccaga

SEQ ID NO: 127374 - DNA, 30 bp, Artificial Sequence
  Synthetic oligonucleotide
atagcgggccccaactgctctccacccaga

SEQ ID NO: 127375 - DNA, 30 bp, Artificial Sequence
  Synthetic oligonucleotide
gacgcctaaaatcataagagtggccccaga

SEQ ID NO: 127376 - DNA, 30 bp, Artificial Sequence
  Synthetic oligonucleotide
aatgcgagttcgcgttgcttcaggcccaga

SEQ ID NO: 127377 - DNA, 30 bp, Artificial Sequence
  Synthetic oligonucleotide
ggagctaacatcttgcgagaatgtcccaga

SEQ ID NO: 127378 - DNA, 30 bp, Artificial Sequence
  Synthetic oligonucleotide
gcaatggttcggggaccacgacaagccaga

SEQ ID NO: 127379 - DNA, 30 bp, Artificial Sequence
  Synthetic oligonucleotide
atcaccgactcgtagctatgtcaagccaga

SEQ ID NO: 127380 - DNA, 30 bp, Artificial Sequence
  Synthetic oligonucleotide
tttcagtgttgaaagcacgcccgagccaga

SEQ ID NO: 127381 - DNA, 30 bp, Artificial Sequence
  Synthetic oligonucleotide
actcgcgcgagttcgacctgtatggccaga

SEQ ID NO: 127382 - DNA, 30 bp, Artificial Sequence
  Synthetic oligonucleotide
tacatagtagggccccgggcctcatccaga

SEQ ID NO: 127383 - DNA, 30 bp, Artificial Sequence
  Synthetic oligonucleotide
agcgggaatttccggccaaagatatccaga

SEQ ID NO: 127384 - DNA, 30 bp, Artificial Sequence
  Synthetic oligonucleotide
tgaccctttgtagagggtcacgcctccaga

SEQ ID NO: 127385 - DNA, 30 bp, Artificial Sequence
  Synthetic oligonucleotide
tcctcaatgtggacttgttgtgcctccaga

SEQ ID NO: 127386 - DNA, 30 bp, Artificial Sequence
  Synthetic oligonucleotide
gtctcggaaagggccagacgatgctccaga

SEQ ID NO: 127387 - DNA, 29 bp, Artificial Sequence
  Synthetic oligonucleotide
catcgaaccagtgtgttgtttgctccaga

SEQ ID NO: 127388 - DNA, 30 bp, Artificial Sequence
  Synthetic oligonucleotide
acactattcatcggttttcggcagtccaga

SEQ ID NO: 127389 - DNA, 30 bp, Artificial Sequence
  Synthetic oligonucleotide
atcaagcccactaagggtaaagtgtccaga

SEQ ID NO: 127390 - DNA, 30 bp, Artificial Sequence
  Synthetic oligonucleotide
cccaaatgctgtccagggggcggttccaga

SEQ ID NO: 127391 - DNA, 30 bp, Artificial Sequence
  Synthetic oligonucleotide
ccacacggcatatgaggcgtgcagagcaga

SEQ ID NO: 127392 - DNA, 30 bp, Artificial Sequence
  Synthetic oligonucleotide
ttatagtaatctagaaggccggagagcaga

SEQ ID NO: 127393 - DNA, 30 bp, Artificial Sequence
  Synthetic oligonucleotide
tcactatacacctatgcaacaagtagcaga

SEQ ID NO: 127394 - DNA, 30 bp, Artificial Sequence
  Synthetic oligonucleotide
aaaagtaattggaatgcgatcccgcgcaga

SEQ ID NO: 127395 - DNA, 30 bp, Artificial Sequence
  Synthetic oligonucleotide
aggattaggaccgttcctttgtgcggcaga

SEQ ID NO: 127396 - DNA, 31 bp, Artificial Sequence
  Synthetic oligonucleotide
tcagactcaatgcactcgtcaaattggcaga

SEQ ID NO: 127397 - DNA, 30 bp, Artificial Sequence
  Synthetic oligonucleotide
cgttttgaccagtgggatgcggactgcaga

SEQ ID NO: 127398 - DNA, 31 bp, Artificial Sequence
  Synthetic oligonucleotide
gaacgcatcactatcctgtatcacgtgcaga

SEQ ID NO: 127399 - DNA, 30 bp, Artificial Sequence
  Synthetic oligonucleotide
ggaacagccctactcagtggcctaatcaga

SEQ ID NO: 127400 - DNA, 30 bp, Artificial Sequence
  Synthetic oligonucleotide
gtacatgcgtttgtctaaatgcgcatcaga

SEQ ID NO: 127401 - DNA, 30 bp, Artificial Sequence
  Synthetic oligonucleotide
tggtgtcgttcgcgtcagtgtcgcatcaga

SEQ ID NO: 127402 - DNA, 30 bp, Artificial Sequence
  Synthetic oligonucleotide
atgttccggtgggataggtaaccgatcaga

SEQ ID NO: 127403 - DNA, 30 bp, Artificial Sequence
  Synthetic oligonucleotide
ccatgggcctttagacccgaacacctcaga

SEQ ID NO: 127404 - DNA, 30 bp, Artificial Sequence
  Synthetic oligonucleotide
ggatggactaaccgcttgccggtcctcaga

SEQ ID NO: 127405 - DNA, 30 bp, Artificial Sequence
  Synthetic oligonucleotide
ctgagggaccttgaaacaaccattctcaga

SEQ ID NO: 127406 - DNA, 29 bp, Artificial Sequence
  Synthetic oligonucleotide
accacctagctaaacttagtagcgtcaga

SEQ ID NO: 127407 - DNA, 30 bp, Artificial Sequence
  Synthetic oligonucleotide
ggcatgcatgtggttaaaaagcgggtcaga

SEQ ID NO: 127408 - DNA, 30 bp, Artificial Sequence
  Synthetic oligonucleotide
tactaatagtcacatttgtgccctgtcaga

SEQ ID NO: 127409 - DNA, 30 bp, Artificial Sequence
  Synthetic oligonucleotide
agaccagcgagtgttaggatgcctgtcaga

SEQ ID NO: 127410 - DNA, 30 bp, Artificial Sequence
  Synthetic oligonucleotide
tctgtcaaatggaagacactaggtgtcaga

SEQ ID NO: 127411 - DNA, 30 bp, Artificial Sequence
  Synthetic oligonucleotide
cccagacgggtcggcgtcgctggtgtcaga

SEQ ID NO: 127412 - DNA, 30 bp, Artificial Sequence
  Synthetic oligonucleotide
tggcccaaggcgcttctgggaggcttcaga

SEQ ID NO: 127413 - DNA, 30 bp, Artificial Sequence
  Synthetic oligonucleotide
gtagcgtccggggcaaatgtgggcttcaga

SEQ ID NO: 127414 - DNA, 30 bp, Artificial Sequence
  Synthetic oligonucleotide
aaggaagacccgtattgactggatttcaga

SEQ ID NO: 127415 - DNA, 30 bp, Artificial Sequence
  Synthetic oligonucleotide
tggcttcggtgctggagatggaaaaagaga

SEQ ID NO: 127416 - DNA, 30 bp, Artificial Sequence
  Synthetic oligonucleotide
gatcgatttgcattgagcggtcaaaagaga

SEQ ID NO: 127417 - DNA, 30 bp, Artificial Sequence
  Synthetic oligonucleotide
aggttaacagcagcaaaggctgtcaagaga

SEQ ID NO: 127418 - DNA, 30 bp, Artificial Sequence
  Synthetic oligonucleotide
ggccgttgttacttaaacgacgagaagaga

SEQ ID NO: 127419 - DNA, 30 bp, Artificial Sequence
  Synthetic oligonucleotide
atgagcaatcgggtactataggtgaagaga

SEQ ID NO: 127420 - DNA, 30 bp, Artificial Sequence
  Synthetic oligonucleotide
cgacctccgcggcgcgtgtgtcataagaga

SEQ ID NO: 127421 - DNA, 30 bp, Artificial Sequence
  Synthetic oligonucleotide
gaagtaggatttgcctacaacagtaagaga

SEQ ID NO: 127422 - DNA, 30 bp, Artificial Sequence
  Synthetic oligonucleotide
caatgcaagcctaatgaaggtattaagaga

SEQ ID NO: 127423 - DNA, 30 bp, Artificial Sequence
  Synthetic oligonucleotide
catttggattcgggctacatgaaacagaga

SEQ ID NO: 127424 - DNA, 30 bp, Artificial Sequence
  Synthetic oligonucleotide
tgggaagtggggggaagtggccgccagaga

SEQ ID NO: 127425 - DNA, 30 bp, Artificial Sequence
  Synthetic oligonucleotide
catatcggtcgacagtttgcgcaggagaga

SEQ ID NO: 127426 - DNA, 30 bp, Artificial Sequence
  Synthetic oligonucleotide
ccaaggtacaaaataccagaagaatagaga

SEQ ID NO: 127427 - DNA, 30 bp, Artificial Sequence
  Synthetic oligonucleotide
tccaccacggaaccaattatggtatagaga

SEQ ID NO: 127428 - DNA, 30 bp, Artificial Sequence
  Synthetic oligonucleotide
ggagtgaaccgctggtcagcggagtagaga

SEQ ID NO: 127429 - DNA, 30 bp, Artificial Sequence
  Synthetic oligonucleotide
gctgactcgttatttaccctggagtagaga

SEQ ID NO: 127430 - DNA, 30 bp, Artificial Sequence
  Synthetic oligonucleotide
aaaaaaaaggaaactaaaaagtaaacgaga

SEQ ID NO: 127431 - DNA, 30 bp, Artificial Sequence
  Synthetic oligonucleotide
gtcatcgggactcggtacgtggccacgaga

SEQ ID NO: 127432 - DNA, 30 bp, Artificial Sequence
  Synthetic oligonucleotide
ttcgataccggtcaataggtcgcgccgaga

SEQ ID NO: 127433 - DNA, 30 bp, Artificial Sequence
  Synthetic oligonucleotide
ggcatacttaaattcgtaacgaatccgaga

SEQ ID NO: 127434 - DNA, 30 bp, Artificial Sequence
  Synthetic oligonucleotide
ttactgtagacaaggaccttaatagcgaga

SEQ ID NO: 127435 - DNA, 30 bp, Artificial Sequence
  Synthetic oligonucleotide
ggtacagttttcaacaatttggaggcgaga

SEQ ID NO: 127436 - DNA, 30 bp, Artificial Sequence
  Synthetic oligonucleotide
gacctcatgcgaaatgacgttttggcgaga

SEQ ID NO: 127437 - DNA, 30 bp, Artificial Sequence
  Synthetic oligonucleotide
aagagctgtctgggcgtgctcagtgcgaga

SEQ ID NO: 127438 - DNA, 30 bp, Artificial Sequence
  Synthetic oligonucleotide
tgacatcgggccctatagcacacatcgaga

SEQ ID NO: 127439 - DNA, 30 bp, Artificial Sequence
  Synthetic oligonucleotide
ttaaacttgtgtcgactatcacgatcgaga

SEQ ID NO: 127440 - DNA, 30 bp, Artificial Sequence
  Synthetic oligonucleotide
tattaattcagggatctagcccgctcgaga

SEQ ID NO: 127441 - DNA, 30 bp, Artificial Sequence
  Synthetic oligonucleotide
atacgagggaattggacctactcgtcgaga

SEQ ID NO: 127442 - DNA, 30 bp, Artificial Sequence
  Synthetic oligonucleotide
ctgatagcatcagtggctttcacttcgaga

SEQ ID NO: 127443 - DNA, 30 bp, Artificial Sequence
  Synthetic oligonucleotide
gcattgaattaagaacagagtggaaggaga

SEQ ID NO: 127444 - DNA, 30 bp, Artificial Sequence
  Synthetic oligonucleotide
tcatcctaatttgggcgggttgacaggaga

SEQ ID NO: 127445 - DNA, 30 bp, Artificial Sequence
  Synthetic oligonucleotide
tctggggccctcacgagggcgatcaggaga

SEQ ID NO: 127446 - DNA, 30 bp, Artificial Sequence
  Synthetic oligonucleotide
gacatctgcactgagacattggagaggaga

SEQ ID NO: 127447 - DNA, 30 bp, Artificial Sequence
  Synthetic oligonucleotide
cccatggaagccggatgttccacgaggaga

SEQ ID NO: 127448 - DNA, 30 bp, Artificial Sequence
  Synthetic oligonucleotide
gccttacttggtgagaagcttgcccggaga

SEQ ID NO: 127449 - DNA, 30 bp, Artificial Sequence
  Synthetic oligonucleotide
ggtacgaacgctctgggcaacatgcggaga

SEQ ID NO: 127450 - DNA, 30 bp, Artificial Sequence
  Synthetic oligonucleotide
gccgttactagtgtagctggcttgcggaga

SEQ ID NO: 127451 - DNA, 30 bp, Artificial Sequence
  Synthetic oligonucleotide
agcccttcacggccccacgtgcatcggaga

SEQ ID NO: 127452 - DNA, 30 bp, Artificial Sequence
  Synthetic oligonucleotide
ggatcaatgctggatcagtattgtcggaga

SEQ ID NO: 127453 - DNA, 30 bp, Artificial Sequence
  Synthetic oligonucleotide
ccttatccagaataagccagatcagggaga

SEQ ID NO: 127454 - DNA, 30 bp, Artificial Sequence
  Synthetic oligonucleotide
ccgccaaactgttcgacgatacgcgggaga

SEQ ID NO: 127455 - DNA, 30 bp, Artificial Sequence
  Synthetic oligonucleotide
aagtctcgcgatagccgaatttaggggaga

SEQ ID NO: 127456 - DNA, 30 bp, Artificial Sequence
  Synthetic oligonucleotide
cagatgctctataattcgccgcctgggaga

SEQ ID NO: 127457 - DNA, 30 bp, Artificial Sequence
  Synthetic oligonucleotide
cggatatgaagtggggaatattgctggaga

SEQ ID NO: 127458 - DNA, 30 bp, Artificial Sequence
  Synthetic oligonucleotide
gaacaattgctaccgacacggacttggaga

SEQ ID NO: 127459 - DNA, 30 bp, Artificial Sequence
  Synthetic oligonucleotide
atttgacaggaggggggaacggaaatgaga

SEQ ID NO: 127460 - DNA, 30 bp, Artificial Sequence
  Synthetic oligonucleotide
gggaattgtgaacgcagataaaccatgaga

SEQ ID NO: 127461 - DNA, 30 bp, Artificial Sequence
  Synthetic oligonucleotide
attccggtgcggcaaatagagaagatgaga

SEQ ID NO: 127462 - DNA, 30 bp, Artificial Sequence
  Synthetic oligonucleotide
gtttccacgtaatcgaatgttaaactgaga

SEQ ID NO: 127463 - DNA, 30 bp, Artificial Sequence
  Synthetic oligonucleotide
gtcgtaggctccatgcacggtatcctgaga

SEQ ID NO: 127464 - DNA, 30 bp, Artificial Sequence
  Synthetic oligonucleotide
agcggttgcgcgcctgccatagagctgaga

SEQ ID NO: 127465 - DNA, 30 bp, Artificial Sequence
  Synthetic oligonucleotide
taagtcacatggccttatacccaagtgaga

SEQ ID NO: 127466 - DNA, 30 bp, Artificial Sequence
  Synthetic oligonucleotide
ctagacgccctgattgcgatgtccttgaga

SEQ ID NO: 127467 - DNA, 30 bp, Artificial Sequence
  Synthetic oligonucleotide
tataccacgagaaaaggtgcagagttgaga

SEQ ID NO: 127468 - DNA, 30 bp, Artificial Sequence
  Synthetic oligonucleotide
tcatatctggcctgcctaaattagttgaga

SEQ ID NO: 127469 - DNA, 30 bp, Artificial Sequence
  Synthetic oligonucleotide
taacacattaggataacgcccaacaataga

SEQ ID NO: 127470 - DNA, 30 bp, Artificial Sequence
  Synthetic oligonucleotide
tagttcagtaggatcaatcattgcaataga

SEQ ID NO: 127471 - DNA, 30 bp, Artificial Sequence
  Synthetic oligonucleotide
ggtaggttcggattccctcgaaataataga

SEQ ID NO: 127472 - DNA, 30 bp, Artificial Sequence
  Synthetic oligonucleotide
ccgatggactagaggtgctgtaataataga

SEQ ID NO: 127473 - DNA, 30 bp, Artificial Sequence
  Synthetic oligonucleotide
ccctgagaagtacaccgcacgacacataga

SEQ ID NO: 127474 - DNA, 30 bp, Artificial Sequence
  Synthetic oligonucleotide
ggtaatgtacctagaaatcactgccataga

SEQ ID NO: 127475 - DNA, 30 bp, Artificial Sequence
  Synthetic oligonucleotide
gtctcaaaggcccgagcgaaagcggataga

SEQ ID NO: 127476 - DNA, 30 bp, Artificial Sequence
  Synthetic oligonucleotide
aagtcacgttcaagaagattgtctgataga

SEQ ID NO: 127477 - DNA, 30 bp, Artificial Sequence
  Synthetic oligonucleotide
tctgaggtgcaaaatctgcttgtatataga

SEQ ID NO: 127478 - DNA, 30 bp, Artificial Sequence
  Synthetic oligonucleotide
catgctggaagtagaaggtggttctataga

SEQ ID NO: 127479 - DNA, 30 bp, Artificial Sequence
  Synthetic oligonucleotide
agtagtcgcatctcagggacgacaactaga

SEQ ID NO: 127480 - DNA, 30 bp, Artificial Sequence
  Synthetic oligonucleotide
atcgggcacttatcaagaccgaccactaga

SEQ ID NO: 127481 - DNA, 30 bp, Artificial Sequence
  Synthetic oligonucleotide
gcgatagccaatcgtaatttgcgcactaga

SEQ ID NO: 127482 - DNA, 30 bp, Artificial Sequence
  Synthetic oligonucleotide
gcgtttgatgaagtaagcagcaagcctaga

SEQ ID NO: 127483 - DNA, 30 bp, Artificial Sequence
  Synthetic oligonucleotide
tgaggggaggtgcttcgactcgcgcctaga

SEQ ID NO: 127484 - DNA, 30 bp, Artificial Sequence
  Synthetic oligonucleotide
acccgaaagaaagggaatctctgggctaga

SEQ ID NO: 127485 - DNA, 30 bp, Artificial Sequence
  Synthetic oligonucleotide
caggaggataaggatctgttgtgggctaga

SEQ ID NO: 127486 - DNA, 30 bp, Artificial Sequence
  Synthetic oligonucleotide
aggagcagcccatgggggtaaactgctaga

SEQ ID NO: 127487 - DNA, 30 bp, Artificial Sequence
  Synthetic oligonucleotide
ctcttgtaccatcgttgattcacatctaga

SEQ ID NO: 127488 - DNA, 30 bp, Artificial Sequence
  Synthetic oligonucleotide
atataagcgatattggtcgaatactctaga

SEQ ID NO: 127489 - DNA, 30 bp, Artificial Sequence
  Synthetic oligonucleotide
acaacacgggttgtagactgaaaaagtaga

SEQ ID NO: 127490 - DNA, 30 bp, Artificial Sequence
  Synthetic oligonucleotide
taaagagtcgccacggtaaaccaaagtaga

SEQ ID NO: 127491 - DNA, 30 bp, Artificial Sequence
  Synthetic oligonucleotide
cattgtctacaggttagtctaaagagtaga

SEQ ID NO: 127492 - DNA, 30 bp, Artificial Sequence
  Synthetic oligonucleotide
cggttagcctaattctatgcgtatcgtaga

SEQ ID NO: 127493 - DNA, 30 bp, Artificial Sequence
  Synthetic oligonucleotide
ccgtggggaaaggcataagcgtaaggtaga

SEQ ID NO: 127494 - DNA, 30 bp, Artificial Sequence
  Synthetic oligonucleotide
aagtaacccggcttacttcactcaggtaga

SEQ ID NO: 127495 - DNA, 30 bp, Artificial Sequence
  Synthetic oligonucleotide
tgtggctagggaattagtgcgagaggtaga

SEQ ID NO: 127496 - DNA, 30 bp, Artificial Sequence
  Synthetic oligonucleotide
gatcgcgcgacggaggtgtgtcccggtaga

SEQ ID NO: 127497 - DNA, 30 bp, Artificial Sequence
  Synthetic oligonucleotide
gtatcggctccataaacggcgaagggtaga

SEQ ID NO: 127498 - DNA, 30 bp, Artificial Sequence
  Synthetic oligonucleotide
tgttaatatgggtattaggtcgcgggtaga

SEQ ID NO: 127499 - DNA, 30 bp, Artificial Sequence
  Synthetic oligonucleotide
tagccagatactaagactcttaggggtaga

SEQ ID NO: 127500 - DNA, 31 bp, Artificial Sequence
  Synthetic oligonucleotide
tgaagtcgagtgtcggggtacctaatgtaga

SEQ ID NO: 127501 - DNA, 30 bp, Artificial Sequence
  Synthetic oligonucleotide
gagatagcgtggtgacggggttaatgtaga

SEQ ID NO: 127502 - DNA, 30 bp, Artificial Sequence
  Synthetic oligonucleotide
ccggggtcctatcacgtgcacgaaattaga

SEQ ID NO: 127503 - DNA, 30 bp, Artificial Sequence
  Synthetic oligonucleotide
gggtataagttctgacgggatggaattaga

SEQ ID NO: 127504 - DNA, 30 bp, Artificial Sequence
  Synthetic oligonucleotide
tcgactacacttagtacgtaagagattaga

SEQ ID NO: 127505 - DNA, 30 bp, Artificial Sequence
  Synthetic oligonucleotide
tcgagtgataaaagagaaaccaatattaga

SEQ ID NO: 127506 - DNA, 30 bp, Artificial Sequence
  Synthetic oligonucleotide
tgcgcttgagaggcgcaatatagacttaga

SEQ ID NO: 127507 - DNA, 30 bp, Artificial Sequence
  Synthetic oligonucleotide
ttcggttttgaagggtggcgtaacgttaga

SEQ ID NO: 127508 - DNA, 30 bp, Artificial Sequence
  Synthetic oligonucleotide
aagcgagctaactagcgacactaggttaga

SEQ ID NO: 127509 - DNA, 30 bp, Artificial Sequence
  Synthetic oligonucleotide
caatgcggcggttccaagggccctgttaga

SEQ ID NO: 127510 - DNA, 30 bp, Artificial Sequence
  Synthetic oligonucleotide
cattaggagtggggcagaggataaaaacga

SEQ ID NO: 127511 - DNA, 30 bp, Artificial Sequence
  Synthetic oligonucleotide
cagcgtggactggcccgttacgcaaaacga

SEQ ID NO: 127512 - DNA, 30 bp, Artificial Sequence
  Synthetic oligonucleotide
ggttgaaggtgaattcgtcgcctcaaacga

SEQ ID NO: 127513 - DNA, 30 bp, Artificial Sequence
  Synthetic oligonucleotide
ggttagaaattccaggcactaattaaacga

SEQ ID NO: 127514 - DNA, 30 bp, Artificial Sequence
  Synthetic oligonucleotide
tgcggttccgagagattattggggcaacga

SEQ ID NO: 127515 - DNA, 30 bp, Artificial Sequence
  Synthetic oligonucleotide
agaatgctaagatgatagaaaatcgaacga

SEQ ID NO: 127516 - DNA, 30 bp, Artificial Sequence
  Synthetic oligonucleotide
aaataacatgtaaggaggaattaggaacga

SEQ ID NO: 127517 - DNA, 30 bp, Artificial Sequence
  Synthetic oligonucleotide
atcaggctctcccactaatacgtggaacga

SEQ ID NO: 127518 - DNA, 30 bp, Artificial Sequence
  Synthetic oligonucleotide
aaggccatagcgagagccacgccataacga

SEQ ID NO: 127519 - DNA, 30 bp, Artificial Sequence
  Synthetic oligonucleotide
aagcaactagcctagggtgatacttaacga

SEQ ID NO: 127520 - DNA, 30 bp, Artificial Sequence
  Synthetic oligonucleotide
cgtaatacgggcgtagttaggtaaacacga

SEQ ID NO: 127521 - DNA, 30 bp, Artificial Sequence
  Synthetic oligonucleotide
aaggtaggccgtccgcaccatagaacacga

SEQ ID NO: 127522 - DNA, 30 bp, Artificial Sequence
  Synthetic oligonucleotide
tgactaatatcgcataacaaggtaacacga

SEQ ID NO: 127523 - DNA, 30 bp, Artificial Sequence
  Synthetic oligonucleotide
tggaccggttaaaccgttacaagcacacga

SEQ ID NO: 127524 - DNA, 30 bp, Artificial Sequence
  Synthetic oligonucleotide
gcatgttgcgctcaatagtcagctacacga

SEQ ID NO: 127525 - DNA, 30 bp, Artificial Sequence
  Synthetic oligonucleotide
acggtacgtgttctgctggacacaccacga

SEQ ID NO: 127526 - DNA, 30 bp, Artificial Sequence
  Synthetic oligonucleotide
caaaccaaatccgaacataagttcccacga

SEQ ID NO: 127527 - DNA, 30 bp, Artificial Sequence
  Synthetic oligonucleotide
aagggaggcacctacagtaaatctccacga

SEQ ID NO: 127528 - DNA, 30 bp, Artificial Sequence
  Synthetic oligonucleotide
tatggtgggctgatgactgcttctccacga

SEQ ID NO: 127529 - DNA, 30 bp, Artificial Sequence
  Synthetic oligonucleotide
agtttcgtatagaagggtatgcgtccacga

SEQ ID NO: 127530 - DNA, 30 bp, Artificial Sequence
  Synthetic oligonucleotide
aacgcgtcctttgcgagtcaggagtcacga

SEQ ID NO: 127531 - DNA, 30 bp, Artificial Sequence
  Synthetic oligonucleotide
agtcattagagagacttggtggcgtcacga

SEQ ID NO: 127532 - DNA, 30 bp, Artificial Sequence
  Synthetic oligonucleotide
taacacgtactaaccctgagctcgagacga

SEQ ID NO: 127533 - DNA, 30 bp, Artificial Sequence
  Synthetic oligonucleotide
ctagggttgctcaggcgcaaaaggagacga

SEQ ID NO: 127534 - DNA, 30 bp, Artificial Sequence
  Synthetic oligonucleotide
ttagggtagatgtgctacgaagaaggacga

SEQ ID NO: 127535 - DNA, 30 bp, Artificial Sequence
  Synthetic oligonucleotide
tagtagagtattcgataaacactaggacga

SEQ ID NO: 127536 - DNA, 30 bp, Artificial Sequence
  Synthetic oligonucleotide
agccgaatatcgcttttgaaattaggacga

SEQ ID NO: 127537 - DNA, 30 bp, Artificial Sequence
  Synthetic oligonucleotide
aggaatccttacgttcgcttttacggacga

SEQ ID NO: 127538 - DNA, 30 bp, Artificial Sequence
  Synthetic oligonucleotide
agggacgcattagcggactagaccggacga

SEQ ID NO: 127539 - DNA, 30 bp, Artificial Sequence
  Synthetic oligonucleotide
ctggtagctaaatacgtggggcagggacga

SEQ ID NO: 127540 - DNA, 30 bp, Artificial Sequence
  Synthetic oligonucleotide
tacgcacagacctcagtaccaatgggacga

SEQ ID NO: 127541 - DNA, 30 bp, Artificial Sequence
  Synthetic oligonucleotide
gcagagcgagctgcaactgggttgggacga

SEQ ID NO: 127542 - DNA, 30 bp, Artificial Sequence
  Synthetic oligonucleotide
cgtaggttcctagatactgcatatggacga

SEQ ID NO: 127543 - DNA, 30 bp, Artificial Sequence
  Synthetic oligonucleotide
gatcacgacgtaaaaggaaggggtggacga

SEQ ID NO: 127544 - DNA, 30 bp, Artificial Sequence
  Synthetic oligonucleotide
ttagtcgaggagcctcagtgcgcatgacga

SEQ ID NO: 127545 - DNA, 30 bp, Artificial Sequence
  Synthetic oligonucleotide
cgaaatagcacgcttgggtcgcagtgacga

SEQ ID NO: 127546 - DNA, 30 bp, Artificial Sequence
  Synthetic oligonucleotide
ggcaactagggtttaagtatgcagtgacga

SEQ ID NO: 127547 - DNA, 30 bp, Artificial Sequence
  Synthetic oligonucleotide
gagggctgatatggggcgtgaaattgacga

SEQ ID NO: 127548 - DNA, 30 bp, Artificial Sequence
  Synthetic oligonucleotide
cacgtggtgtgaaccgtctccctttgacga

SEQ ID NO: 127549 - DNA, 30 bp, Artificial Sequence
  Synthetic oligonucleotide
agggatttttaactaagtcatcacatacga

SEQ ID NO: 127550 - DNA, 30 bp, Artificial Sequence
  Synthetic oligonucleotide
gcgcgaagtccgttgttccgtgtcatacga

SEQ ID NO: 127551 - DNA, 28 bp, Artificial Sequence
  Synthetic oligonucleotide
tctctgaacgaccaactaaaggatacga

SEQ ID NO: 127552 - DNA, 30 bp, Artificial Sequence
  Synthetic oligonucleotide
acatctttgagtaccaacgatgtgatacga

SEQ ID NO: 127553 - DNA, 30 bp, Artificial Sequence
  Synthetic oligonucleotide
gtcgtgggactacaccgttgaccactacga

SEQ ID NO: 127554 - DNA, 30 bp, Artificial Sequence
  Synthetic oligonucleotide
acatagcggtgcttcacaatggcactacga

SEQ ID NO: 127555 - DNA, 30 bp, Artificial Sequence
  Synthetic oligonucleotide
acggctccggtaccggtccccgatctacga

SEQ ID NO: 127556 - DNA, 30 bp, Artificial Sequence
  Synthetic oligonucleotide
caagtgaacctagtgccagcatcagtacga

SEQ ID NO: 127557 - DNA, 30 bp, Artificial Sequence
  Synthetic oligonucleotide
ccgaggataacggaaaggcagcgcgtacga

SEQ ID NO: 127558 - DNA, 30 bp, Artificial Sequence
  Synthetic oligonucleotide
gccgcagaaacgagtgatattcgtgtacga

SEQ ID NO: 127559 - DNA, 30 bp, Artificial Sequence
  Synthetic oligonucleotide
gggcgcctatagctaggcggaacattacga

SEQ ID NO: 127560 - DNA, 30 bp, Artificial Sequence
  Synthetic oligonucleotide
accaaatggaagactccctagcagttacga

SEQ ID NO: 127561 - DNA, 30 bp, Artificial Sequence
  Synthetic oligonucleotide
ttgggatgttgagttaagataaaaaaccga

SEQ ID NO: 127562 - DNA, 30 bp, Artificial Sequence
  Synthetic oligonucleotide
gtagtgctgatgaaaagacagggaaaccga

SEQ ID NO: 127563 - DNA, 30 bp, Artificial Sequence
  Synthetic oligonucleotide
attttaacggggacaattgattagaaccga

SEQ ID NO: 127564 - DNA, 30 bp, Artificial Sequence
  Synthetic oligonucleotide
catcaaacccgaactttagcacgacaccga

SEQ ID NO: 127565 - DNA, 30 bp, Artificial Sequence
  Synthetic oligonucleotide
aggccgaagaggaactggcattgacaccga

SEQ ID NO: 127566 - DNA, 30 bp, Artificial Sequence
  Synthetic oligonucleotide
tttcggaaacggcgtttgagagtccaccga

SEQ ID NO: 127567 - DNA, 30 bp, Artificial Sequence
  Synthetic oligonucleotide
cgcgtgttgtccaggcttccgttgcaccga

SEQ ID NO: 127568 - DNA, 30 bp, Artificial Sequence
  Synthetic oligonucleotide
tcaaaggggttatcagttgttcgcgaccga

SEQ ID NO: 127569 - DNA, 30 bp, Artificial Sequence
  Synthetic oligonucleotide
atttacaaaaaccaactacaagaggaccga

SEQ ID NO: 127570 - DNA, 30 bp, Artificial Sequence
  Synthetic oligonucleotide
tgcaacgattcaaacgcttgtcaataccga

SEQ ID NO: 127571 - DNA, 30 bp, Artificial Sequence
  Synthetic oligonucleotide
cagtccatttggtcgacaactggctaccga

SEQ ID NO: 127572 - DNA, 30 bp, Artificial Sequence
  Synthetic oligonucleotide
agggccaccgagcaggggactttgtaccga

SEQ ID NO: 127573 - DNA, 30 bp, Artificial Sequence
  Synthetic oligonucleotide
ggaaatggacatgaaacagcttcttaccga

SEQ ID NO: 127574 - DNA, 30 bp, Artificial Sequence
  Synthetic oligonucleotide
gtatcgtggatctcaggtctaggttaccga

SEQ ID NO: 127575 - DNA, 30 bp, Artificial Sequence
  Synthetic oligonucleotide
ccgaggggtaatgatccgcgcactacccga

SEQ ID NO: 127576 - DNA, 30 bp, Artificial Sequence
  Synthetic oligonucleotide
caggaccggggaactcttaccatagcccga

SEQ ID NO: 127577 - DNA, 30 bp, Artificial Sequence
  Synthetic oligonucleotide
acggatacctgacaccttggtgtcgcccga

SEQ ID NO: 127578 - DNA, 30 bp, Artificial Sequence
  Synthetic oligonucleotide
acaaaccagggtcattttcttcgggcccga

SEQ ID NO: 127579 - DNA, 30 bp, Artificial Sequence
  Synthetic oligonucleotide
acacaccccgctcgtgaaaaacgttcccga

SEQ ID NO: 127580 - DNA, 30 bp, Artificial Sequence
  Synthetic oligonucleotide
gaatagggcgacaacacaagcccaagccga

SEQ ID NO: 127581 - DNA, 30 bp, Artificial Sequence
  Synthetic oligonucleotide
ggttcgccgggggtgtacgaggtaagccga

SEQ ID NO: 127582 - DNA, 30 bp, Artificial Sequence
  Synthetic oligonucleotide
aggatacgaccgacggctccgcgtagccga

SEQ ID NO: 127583 - DNA, 30 bp, Artificial Sequence
  Synthetic oligonucleotide
tcatcatcggaacgaggcatgtgtcgccga

SEQ ID NO: 127584 - DNA, 30 bp, Artificial Sequence
  Synthetic oligonucleotide
gataacgtgagtatttagtagtagggccga

SEQ ID NO: 127585 - DNA, 30 bp, Artificial Sequence
  Synthetic oligonucleotide
agagtagttatactcctctcagatggccga

SEQ ID NO: 127586 - DNA, 30 bp, Artificial Sequence
  Synthetic oligonucleotide
gtcccgggctggggaatcaagaactgccga

SEQ ID NO: 127587 - DNA, 30 bp, Artificial Sequence
  Synthetic oligonucleotide
ctaagatacgtgcacaggttaggctgccga

SEQ ID NO: 127588 - DNA, 30 bp, Artificial Sequence
  Synthetic oligonucleotide
ttggaacgtagaccaccctggtagtgccga

SEQ ID NO: 127589 - DNA, 30 bp, Artificial Sequence
  Synthetic oligonucleotide
attgcacctgatacagtcgacgggtgccga

SEQ ID NO: 127590 - DNA, 30 bp, Artificial Sequence
  Synthetic oligonucleotide
tcggcgtgttgtgaaagagtgggttgccga

SEQ ID NO: 127591 - DNA, 30 bp, Artificial Sequence
  Synthetic oligonucleotide
gctaagctcaatgcgtgggcgaaaatccga

SEQ ID NO: 127592 - DNA, 30 bp, Artificial Sequence
  Synthetic oligonucleotide
gcgttaccgtccagaagacatctaatccga

SEQ ID NO: 127593 - DNA, 30 bp, Artificial Sequence
  Synthetic oligonucleotide
ggcgtcagtcagtaaatctggcacatccga

SEQ ID NO: 127594 - DNA, 30 bp, Artificial Sequence
  Synthetic oligonucleotide
tcacaccacagttgccgcttcaccatccga

SEQ ID NO: 127595 - DNA, 30 bp, Artificial Sequence
  Synthetic oligonucleotide
aatatggcgatggtgcgcggttcgatccga

SEQ ID NO: 127596 - DNA, 30 bp, Artificial Sequence
  Synthetic oligonucleotide
tcaaaaaataggggtaaagggggtatccga

SEQ ID NO: 127597 - DNA, 30 bp, Artificial Sequence
  Synthetic oligonucleotide
tccaatgcagtcgggctcacctaagtccga

SEQ ID NO: 127598 - DNA, 30 bp, Artificial Sequence
  Synthetic oligonucleotide
caagtctgcggtcggcgtgccatattccga

SEQ ID NO: 127599 - DNA, 30 bp, Artificial Sequence
  Synthetic oligonucleotide
atcgagatcccattaaacgactccttccga

SEQ ID NO: 127600 - DNA, 30 bp, Artificial Sequence
  Synthetic oligonucleotide
cacaatcaaaccccagtcccaaatttccga

SEQ ID NO: 127601 - DNA, 30 bp, Artificial Sequence
  Synthetic oligonucleotide
atctaaacgcaaccaatgacaggaaagcga

SEQ ID NO: 127602 - DNA, 30 bp, Artificial Sequence
  Synthetic oligonucleotide
gccacacaccatcatcaagatataaagcga

SEQ ID NO: 127603 - DNA, 30 bp, Artificial Sequence
  Synthetic oligonucleotide
acttaatcaactgctcgccggctaaagcga

SEQ ID NO: 127604 - DNA, 30 bp, Artificial Sequence
  Synthetic oligonucleotide
tcacgcctgggttacatctataccaagcga

SEQ ID NO: 127605 - DNA, 30 bp, Artificial Sequence
  Synthetic oligonucleotide
aaataccgctaaccaaggcaatagcagcga

SEQ ID NO: 127606 - DNA, 30 bp, Artificial Sequence
  Synthetic oligonucleotide
acgctctgttcttagcacagaggtcagcga

SEQ ID NO: 127607 - DNA, 30 bp, Artificial Sequence
  Synthetic oligonucleotide
cggtccggcgtctaacatgttggagagcga

SEQ ID NO: 127608 - DNA, 30 bp, Artificial Sequence
  Synthetic oligonucleotide
tagtatatgaatgaaaacatttaggagcga

SEQ ID NO: 127609 - DNA, 31 bp, Artificial Sequence
  Synthetic oligonucleotide
agtatgaactagcgcaaagggatgatagcga

SEQ ID NO: 127610 - DNA, 30 bp, Artificial Sequence
  Synthetic oligonucleotide
gcagctaagtgtgcaattgttgtatagcga

SEQ ID NO: 127611 - DNA, 30 bp, Artificial Sequence
  Synthetic oligonucleotide
tgcggtgacaatctatagggtgtctagcga

SEQ ID NO: 127612 - DNA, 30 bp, Artificial Sequence
  Synthetic oligonucleotide
tggaggtgtcagaaacctgacttctagcga

SEQ ID NO: 127613 - DNA, 30 bp, Artificial Sequence
  Synthetic oligonucleotide
aaagtatcaactgaagctacccagtagcga

SEQ ID NO: 127614 - DNA, 31 bp, Artificial Sequence
  Synthetic oligonucleotide
ccgaagtcaccgtgcgcaatagcagtagcga

SEQ ID NO: 127615 - DNA, 30 bp, Artificial Sequence
  Synthetic oligonucleotide
tgaactccaccatctcgaaaatcttagcga

SEQ ID NO: 127616 - DNA, 30 bp, Artificial Sequence
  Synthetic oligonucleotide
tcgctgcgcggatcggtaccagtaacgcga

SEQ ID NO: 127617 - DNA, 30 bp, Artificial Sequence
  Synthetic oligonucleotide
cactgagttggtgctggggccgtaacgcga

SEQ ID NO: 127618 - DNA, 30 bp, Artificial Sequence
  Synthetic oligonucleotide
atccagagaagtgggtacgctactacgcga

SEQ ID NO: 127619 - DNA, 30 bp, Artificial Sequence
  Synthetic oligonucleotide
atataactgtaggatgtcgttaacccgcga

SEQ ID NO: 127620 - DNA, 30 bp, Artificial Sequence
  Synthetic oligonucleotide
cgaaggacccttgtaggaacgttcccgcga

SEQ ID NO: 127621 - DNA, 30 bp, Artificial Sequence
  Synthetic oligonucleotide
agggaggagacccatcgatcgtatgcgcga

SEQ ID NO: 127622 - DNA, 30 bp, Artificial Sequence
  Synthetic oligonucleotide
ggaaaagcgcaaactggcgtaactgcgcga

SEQ ID NO: 127623 - DNA, 30 bp, Artificial Sequence
  Synthetic oligonucleotide
cggtattaactcaactagcagggtgcgcga

SEQ ID NO: 127624 - DNA, 31 bp, Artificial Sequence
  Synthetic oligonucleotide
ccaggaacgtgcagtaccctctacgtcgcga

SEQ ID NO: 127625 - DNA, 30 bp, Artificial Sequence
  Synthetic oligonucleotide
tggatccgcccggtatctaaagaaaggcga

SEQ ID NO: 127626 - DNA, 30 bp, Artificial Sequence
  Synthetic oligonucleotide
acggttacgtgggtgtccgaacgaaggcga

SEQ ID NO: 127627 - DNA, 30 bp, Artificial Sequence
  Synthetic oligonucleotide
ttgctaatcgtaaggacttgctgaaggcga

SEQ ID NO: 127628 - DNA, 30 bp, Artificial Sequence
  Synthetic oligonucleotide
gatcggggcgcctgagagctttgaaggcga

SEQ ID NO: 127629 - DNA, 30 bp, Artificial Sequence
  Synthetic oligonucleotide
aaaggtgttgtcctaaatggaaacaggcga

SEQ ID NO: 127630 - DNA, 30 bp, Artificial Sequence
  Synthetic oligonucleotide
ccaaataaccatggcataaccaacaggcga

SEQ ID NO: 127631 - DNA, 30 bp, Artificial Sequence
  Synthetic oligonucleotide
atgccgatacatgattggctctgtaggcga

SEQ ID NO: 127632 - DNA, 31 bp, Artificial Sequence
  Synthetic oligonucleotide
tgcagacggaatgatctcgtgcccacggcga

SEQ ID NO: 127633 - DNA, 30 bp, Artificial Sequence
  Synthetic oligonucleotide
gtacgccaggagaccccaataagccggcga

SEQ ID NO: 127634 - DNA, 30 bp, Artificial Sequence
  Synthetic oligonucleotide
tgaaataacttgtcgcgcacagtccggcga

SEQ ID NO: 127635 - DNA, 30 bp, Artificial Sequence
  Synthetic oligonucleotide
ccatagtacgggactcaaatgaagcggcga

SEQ ID NO: 127636 - DNA, 30 bp, Artificial Sequence
  Synthetic oligonucleotide
ctgtacggcaaggcgttttgtatagggcga

SEQ ID NO: 127637 - DNA, 30 bp, Artificial Sequence
  Synthetic oligonucleotide
gcttaggcttccatataggctctagggcga

SEQ ID NO: 127638 - DNA, 30 bp, Artificial Sequence
  Synthetic oligonucleotide
ccatactccaatcgtttcaaatacgggcga

SEQ ID NO: 127639 - DNA, 30 bp, Artificial Sequence
  Synthetic oligonucleotide
gtaatatacctgctgattcagtccgggcga

SEQ ID NO: 127640 - DNA, 30 bp, Artificial Sequence
  Synthetic oligonucleotide
ccacacccaatattattgctaagggggcga

SEQ ID NO: 127641 - DNA, 30 bp, Artificial Sequence
  Synthetic oligonucleotide
tcttattagcgagttatcgtctgggggcga

SEQ ID NO: 127642 - DNA, 30 bp, Artificial Sequence
  Synthetic oligonucleotide
ttaaggagctggaatgctaaatctgggcga

SEQ ID NO: 127643 - DNA, 30 bp, Artificial Sequence
  Synthetic oligonucleotide
gggtccggtggaaacttttgtcaatggcga

SEQ ID NO: 127644 - DNA, 30 bp, Artificial Sequence
  Synthetic oligonucleotide
gccatcgggaactaagttataaagtggcga

SEQ ID NO: 127645 - DNA, 30 bp, Artificial Sequence
  Synthetic oligonucleotide
aggggagccacaacaccgatccaaatgcga

SEQ ID NO: 127646 - DNA, 30 bp, Artificial Sequence
  Synthetic oligonucleotide
atataggcgatcgtccccaggcacatgcga

SEQ ID NO: 127647 - DNA, 30 bp, Artificial Sequence
  Synthetic oligonucleotide
acaggtgaatttataagcgttgggatgcga

SEQ ID NO: 127648 - DNA, 30 bp, Artificial Sequence
  Synthetic oligonucleotide
ctacgtcacgctaatgagtgaggtatgcga

SEQ ID NO: 127649 - DNA, 30 bp, Artificial Sequence
  Synthetic oligonucleotide
agcgcagtagacggcggtgatcaactgcga

SEQ ID NO: 127650 - DNA, 30 bp, Artificial Sequence
  Synthetic oligonucleotide
agcctatattcacatttggctgcactgcga

SEQ ID NO: 127651 - DNA, 30 bp, Artificial Sequence
  Synthetic oligonucleotide
gataggtcgattactttctacagtctgcga

SEQ ID NO: 127652 - DNA, 30 bp, Artificial Sequence
  Synthetic oligonucleotide
taaagtctatatagagagggtcgtctgcga

SEQ ID NO: 127653 - DNA, 30 bp, Artificial Sequence
  Synthetic oligonucleotide
acttgcttcacgtgtatgtccttagtgcga

SEQ ID NO: 127654 - DNA, 30 bp, Artificial Sequence
  Synthetic oligonucleotide
ttgcattagatgagccatatcctcgtgcga

SEQ ID NO: 127655 - DNA, 30 bp, Artificial Sequence
  Synthetic oligonucleotide
atctacagaacggctcagctagaggtgcga

SEQ ID NO: 127656 - DNA, 30 bp, Artificial Sequence
  Synthetic oligonucleotide
catacaagtcaaattgattgatttgtgcga

SEQ ID NO: 127657 - DNA, 30 bp, Artificial Sequence
  Synthetic oligonucleotide
tctggtcctcatcacccatatcacttgcga

SEQ ID NO: 127658 - DNA, 30 bp, Artificial Sequence
  Synthetic oligonucleotide
ggcctcacgtgtgcctaatccatgttgcga

SEQ ID NO: 127659 - DNA, 30 bp, Artificial Sequence
  Synthetic oligonucleotide
ttgctccaaggtgtggtgtcaatcaatcga

SEQ ID NO: 127660 - DNA, 30 bp, Artificial Sequence
  Synthetic oligonucleotide
atacttagatcccgtgagctattcaatcga

SEQ ID NO: 127661 - DNA, 30 bp, Artificial Sequence
  Synthetic oligonucleotide
gttcgccacaaccgaactacgttcaatcga

SEQ ID NO: 127662 - DNA, 30 bp, Artificial Sequence
  Synthetic oligonucleotide
taacgaggattgcgtcaacccgttaatcga

SEQ ID NO: 127663 - DNA, 30 bp, Artificial Sequence
  Synthetic oligonucleotide
ccatgaacaacggctttcgccgcacatcga

SEQ ID NO: 127664 - DNA, 30 bp, Artificial Sequence
  Synthetic oligonucleotide
cctcgttagagggccaacaaaaagcatcga

SEQ ID NO: 127665 - DNA, 30 bp, Artificial Sequence
  Synthetic oligonucleotide
tcataagaatgccatcacactcatcatcga

SEQ ID NO: 127666 - DNA, 30 bp, Artificial Sequence
  Synthetic oligonucleotide
cataaacgccatctgtgtaggaaagatcga

SEQ ID NO: 127667 - DNA, 30 bp, Artificial Sequence
  Synthetic oligonucleotide
tcagtagccatggacgtgttaagagatcga

SEQ ID NO: 127668 - DNA, 30 bp, Artificial Sequence
  Synthetic oligonucleotide
ttctccgaggggatcagtgtgttcgatcga

SEQ ID NO: 127669 - DNA, 30 bp, Artificial Sequence
  Synthetic oligonucleotide
taataagattatggtagcgggacatatcga

SEQ ID NO: 127670 - DNA, 30 bp, Artificial Sequence
  Synthetic oligonucleotide
gggagatatgtgaacccttgcctctatcga

SEQ ID NO: 127671 - DNA, 30 bp, Artificial Sequence
  Synthetic oligonucleotide
aagagaaaggtctggtagcaatgacctcga

SEQ ID NO: 127672 - DNA, 30 bp, Artificial Sequence
  Synthetic oligonucleotide
caggattgaaggatgattgagcagcctcga

SEQ ID NO: 127673 - DNA, 30 bp, Artificial Sequence
  Synthetic oligonucleotide
cccaccataagcggaagacactctgctcga

SEQ ID NO: 127674 - DNA, 30 bp, Artificial Sequence
  Synthetic oligonucleotide
ggcgtggaaatatatttcctgcttgctcga

SEQ ID NO: 127675 - DNA, 30 bp, Artificial Sequence
  Synthetic oligonucleotide
gcctaagggcaagcgtcttatacatctcga

SEQ ID NO: 127676 - DNA, 30 bp, Artificial Sequence
  Synthetic oligonucleotide
cgatgtacactgtcatgtaacaccagtcga

SEQ ID NO: 127677 - DNA, 30 bp, Artificial Sequence
  Synthetic oligonucleotide
aagagggaggggtgaacctgaatgagtcga

SEQ ID NO: 127678 - DNA, 30 bp, Artificial Sequence
  Synthetic oligonucleotide
cccatatagcgtacgtaccctatgagtcga

SEQ ID NO: 127679 - DNA, 30 bp, Artificial Sequence
  Synthetic oligonucleotide
tcggctggcaaggaaaagccatatagtcga

SEQ ID NO: 127680 - DNA, 30 bp, Artificial Sequence
  Synthetic oligonucleotide
ggacactgtgcagctttcattcaacgtcga

SEQ ID NO: 127681 - DNA, 30 bp, Artificial Sequence
  Synthetic oligonucleotide
agcacttagacgacacatccaagcggtcga

SEQ ID NO: 127682 - DNA, 30 bp, Artificial Sequence
  Synthetic oligonucleotide
ttgttccgactaggtgccccgaatggtcga

SEQ ID NO: 127683 - DNA, 30 bp, Artificial Sequence
  Synthetic oligonucleotide
caagccggccacactggagatcattgtcga

SEQ ID NO: 127684 - DNA, 30 bp, Artificial Sequence
  Synthetic oligonucleotide
taaccgtgaattttggggactagttgtcga

SEQ ID NO: 127685 - DNA, 30 bp, Artificial Sequence
  Synthetic oligonucleotide
ccgacaatgacatccatcaggaaaattcga

SEQ ID NO: 127686 - DNA, 30 bp, Artificial Sequence
  Synthetic oligonucleotide
gatgggataacctcaacacaaggaattcga

SEQ ID NO: 127687 - DNA, 30 bp, Artificial Sequence
  Synthetic oligonucleotide
ttgaccgtatggatgaaagaacaacttcga

SEQ ID NO: 127688 - DNA, 30 bp, Artificial Sequence
  Synthetic oligonucleotide
acggcccccatggatgtgtgctcacttcga

SEQ ID NO: 127689 - DNA, 30 bp, Artificial Sequence
  Synthetic oligonucleotide
atacggtattctccaaaacgttcagttcga

SEQ ID NO: 127690 - DNA, 30 bp, Artificial Sequence
  Synthetic oligonucleotide
agattgttcatgagactgtaccactttcga

SEQ ID NO: 127691 - DNA, 30 bp, Artificial Sequence
  Synthetic oligonucleotide
acgtattgtgtggcgtttcgatcttttcga

SEQ ID NO: 127692 - DNA, 30 bp, Artificial Sequence
  Synthetic oligonucleotide
tcgactcgtaaaaacgctcgtaccaaagga

SEQ ID NO: 127693 - DNA, 30 bp, Artificial Sequence
  Synthetic oligonucleotide
ggtgcttcttatgatagcaacggacaagga

SEQ ID NO: 127694 - DNA, 30 bp, Artificial Sequence
  Synthetic oligonucleotide
aaacaaaggggattcaaacaaccccaagga

SEQ ID NO: 127695 - DNA, 30 bp, Artificial Sequence
  Synthetic oligonucleotide
acgcatgtgcagacgcttcggtggcaagga

SEQ ID NO: 127696 - DNA, 30 bp, Artificial Sequence
  Synthetic oligonucleotide
tactataggcacagaaactaggctcaagga

SEQ ID NO: 127697 - DNA, 30 bp, Artificial Sequence
  Synthetic oligonucleotide
cagggggaggttttgagacaaagcgaagga

SEQ ID NO: 127698 - DNA, 30 bp, Artificial Sequence
  Synthetic oligonucleotide
agtaactgttacgactacgtcccggaagga

SEQ ID NO: 127699 - DNA, 30 bp, Artificial Sequence
  Synthetic oligonucleotide
gagaatgcccgggcgagccaggcggaagga

SEQ ID NO: 127700 - DNA, 30 bp, Artificial Sequence
  Synthetic oligonucleotide
acaaggtggcttggatcagtccgggaagga

SEQ ID NO: 127701 - DNA, 30 bp, Artificial Sequence
  Synthetic oligonucleotide
tcgagatgctagtaccgaaaatgggaagga

SEQ ID NO: 127702 - DNA, 30 bp, Artificial Sequence
  Synthetic oligonucleotide
ggaatttcataactctacagtcttgaagga

SEQ ID NO: 127703 - DNA, 30 bp, Artificial Sequence
  Synthetic oligonucleotide
cgaatctcaatagaccgtctagtataagga

SEQ ID NO: 127704 - DNA, 30 bp, Artificial Sequence
  Synthetic oligonucleotide
ttaagaggagacatcgggaaaaactaagga

SEQ ID NO: 127705 - DNA, 30 bp, Artificial Sequence
  Synthetic oligonucleotide
gcgttagctacttaaccgaaatggtaagga

SEQ ID NO: 127706 - DNA, 30 bp, Artificial Sequence
  Synthetic oligonucleotide
gtgttatcccccgaaacggggtaaacagga

SEQ ID NO: 127707 - DNA, 30 bp, Artificial Sequence
  Synthetic oligonucleotide
cgctgtggcaaatgtatgactccaacagga

SEQ ID NO: 127708 - DNA, 30 bp, Artificial Sequence
  Synthetic oligonucleotide
acggacagtattgtaaattccgcaacagga

SEQ ID NO: 127709 - DNA, 30 bp, Artificial Sequence
  Synthetic oligonucleotide
atcacgtgacataacagatgcttaacagga

SEQ ID NO: 127710 - DNA, 30 bp, Artificial Sequence
  Synthetic oligonucleotide
aagcgaatttgcctacttcgatccacagga

SEQ ID NO: 127711 - DNA, 30 bp, Artificial Sequence
  Synthetic oligonucleotide
agggataatcagactggattgagcacagga

SEQ ID NO: 127712 - DNA, 30 bp, Artificial Sequence
  Synthetic oligonucleotide
cgaaaaccgtcggaagtatgtgtgacagga

SEQ ID NO: 127713 - DNA, 30 bp, Artificial Sequence
  Synthetic oligonucleotide
actcaataaggtacttgtggcagcccagga

SEQ ID NO: 127714 - DNA, 30 bp, Artificial Sequence
  Synthetic oligonucleotide
ggcaacgcgattcggtccgtgaaggcagga

SEQ ID NO: 127715 - DNA, 30 bp, Artificial Sequence
  Synthetic oligonucleotide
tacgtcacggatgtggtaggtgcatcagga

SEQ ID NO: 127716 - DNA, 30 bp, Artificial Sequence
  Synthetic oligonucleotide
ctacaatgtaaagtggcttcttcttcagga

SEQ ID NO: 127717 - DNA, 30 bp, Artificial Sequence
  Synthetic oligonucleotide
tagcgttgtcgtttagtaggaaagagagga

SEQ ID NO: 127718 - DNA, 30 bp, Artificial Sequence
  Synthetic oligonucleotide
gagtaagacataacgcgcgctaatagagga

SEQ ID NO: 127719 - DNA, 30 bp, Artificial Sequence
  Synthetic oligonucleotide
caaagcccaagagacgagtgcatgcgagga

SEQ ID NO: 127720 - DNA, 30 bp, Artificial Sequence
  Synthetic oligonucleotide
tgcagggcgctatggccgtccctgcgagga

SEQ ID NO: 127721 - DNA, 30 bp, Artificial Sequence
  Synthetic oligonucleotide
cacaaacggagcatggaacaattaggagga

SEQ ID NO: 127722 - DNA, 30 bp, Artificial Sequence
  Synthetic oligonucleotide
gaacaggcgggcgcaatagagcccggagga

SEQ ID NO: 127723 - DNA, 30 bp, Artificial Sequence
  Synthetic oligonucleotide
aggatgagttaggtaggtgcagggggagga

SEQ ID NO: 127724 - DNA, 30 bp, Artificial Sequence
  Synthetic oligonucleotide
tcggaaggctcgctgttggagatgggagga

SEQ ID NO: 127725 - DNA, 30 bp, Artificial Sequence
  Synthetic oligonucleotide
ctaaccggaagtcgtagtggacagtgagga

SEQ ID NO: 127726 - DNA, 30 bp, Artificial Sequence
  Synthetic oligonucleotide
cgagcgagctcgctcctacgaaattgagga

SEQ ID NO: 127727 - DNA, 30 bp, Artificial Sequence
  Synthetic oligonucleotide
gaaagatgagttcgtaaagaagtaatagga

SEQ ID NO: 127728 - DNA, 30 bp, Artificial Sequence
  Synthetic oligonucleotide
ggtagtgggttcatgcaagtgcatatagga

SEQ ID NO: 127729 - DNA, 30 bp, Artificial Sequence
  Synthetic oligonucleotide
aagcctcggcagatggggagcgatatagga

SEQ ID NO: 127730 - DNA, 30 bp, Artificial Sequence
  Synthetic oligonucleotide
cgaaacaaaagggtttagggtagtatagga

SEQ ID NO: 127731 - DNA, 30 bp, Artificial Sequence
  Synthetic oligonucleotide
aggctaatggggatgggtgcggttatagga

SEQ ID NO: 127732 - DNA, 30 bp, Artificial Sequence
  Synthetic oligonucleotide
gcaagcttttagagttcgattcatctagga

SEQ ID NO: 127733 - DNA, 30 bp, Artificial Sequence
  Synthetic oligonucleotide
tcacgggtatctgtccaagtagccgtagga

SEQ ID NO: 127734 - DNA, 30 bp, Artificial Sequence
  Synthetic oligonucleotide
tgtgacacaacgtggtcaggtaaggtagga

SEQ ID NO: 127735 - DNA, 30 bp, Artificial Sequence
  Synthetic oligonucleotide
tgataataaactgtagtgcattgggtagga

SEQ ID NO: 127736 - DNA, 30 bp, Artificial Sequence
  Synthetic oligonucleotide
tcactaagggtacgtcactcatttgtagga

SEQ ID NO: 127737 - DNA, 30 bp, Artificial Sequence
  Synthetic oligonucleotide
ggttggattacacagaaaccgtagttagga

SEQ ID NO: 127738 - DNA, 30 bp, Artificial Sequence
  Synthetic oligonucleotide
ggacctggcgtaaccttcctgctgttagga

SEQ ID NO: 127739 - DNA, 30 bp, Artificial Sequence
  Synthetic oligonucleotide
ccgcatcaaagcgttggtatcgatttagga

SEQ ID NO: 127740 - DNA, 30 bp, Artificial Sequence
  Synthetic oligonucleotide
tggacataagtagcgttattgtaaaacgga

SEQ ID NO: 127741 - DNA, 30 bp, Artificial Sequence
  Synthetic oligonucleotide
cccaattgaataggtttttactcaaacgga

SEQ ID NO: 127742 - DNA, 30 bp, Artificial Sequence
  Synthetic oligonucleotide
ctcgcttgtggttctagatgcctaaacgga

SEQ ID NO: 127743 - DNA, 30 bp, Artificial Sequence
  Synthetic oligonucleotide
tggaaattgagtagcaactgtcggaacgga

SEQ ID NO: 127744 - DNA, 30 bp, Artificial Sequence
  Synthetic oligonucleotide
ggcgttcactaactggtgcatattaacgga

SEQ ID NO: 127745 - DNA, 30 bp, Artificial Sequence
  Synthetic oligonucleotide
gatacagcttagggtggcccccttaacgga

SEQ ID NO: 127746 - DNA, 30 bp, Artificial Sequence
  Synthetic oligonucleotide
ttactaaggttgaggtctagccaccacgga

SEQ ID NO: 127747 - DNA, 30 bp, Artificial Sequence
  Synthetic oligonucleotide
ccgttagacaagtgtgggcggtatcacgga

SEQ ID NO: 127748 - DNA, 30 bp, Artificial Sequence
  Synthetic oligonucleotide
agcaactcagctgataggtgtgcatacgga

SEQ ID NO: 127749 - DNA, 30 bp, Artificial Sequence
  Synthetic oligonucleotide
ggggtagttctgtaagcatgagtatacgga

SEQ ID NO: 127750 - DNA, 30 bp, Artificial Sequence
  Synthetic oligonucleotide
aaggcgaatttggctagcttggcgtacgga

SEQ ID NO: 127751 - DNA, 30 bp, Artificial Sequence
  Synthetic oligonucleotide
gtgttgagcaaatgtaagttatggtacgga

SEQ ID NO: 127752 - DNA, 30 bp, Artificial Sequence
  Synthetic oligonucleotide
ctgacaatgtaactgaaaaggggttacgga

SEQ ID NO: 127753 - DNA, 30 bp, Artificial Sequence
  Synthetic oligonucleotide
agctcgtgcgttcgggaaatagtttacgga

SEQ ID NO: 127754 - DNA, 30 bp, Artificial Sequence
  Synthetic oligonucleotide
gtgcagacacaaacggttgggaccaccgga

SEQ ID NO: 127755 - DNA, 30 bp, Artificial Sequence
  Synthetic oligonucleotide
aattggaagtcattataaaactagaccgga

SEQ ID NO: 127756 - DNA, 30 bp, Artificial Sequence
  Synthetic oligonucleotide
aagccgacaccgcacgataatggccccgga

SEQ ID NO: 127757 - DNA, 30 bp, Artificial Sequence
  Synthetic oligonucleotide
cggtgttgtaagaacatttattcagccgga

SEQ ID NO: 127758 - DNA, 30 bp, Artificial Sequence
  Synthetic oligonucleotide
agcgctatttttgagtgtgggttagccgga

SEQ ID NO: 127759 - DNA, 30 bp, Artificial Sequence
  Synthetic oligonucleotide
ccatgatgtgtaccgatttgcaacgccgga

SEQ ID NO: 127760 - DNA, 30 bp, Artificial Sequence
  Synthetic oligonucleotide
tgggtaataatcaattccgctgtctccgga

SEQ ID NO: 127761 - DNA, 30 bp, Artificial Sequence
  Synthetic oligonucleotide
agagtagaataccgcgctagctggtccgga

SEQ ID NO: 127762 - DNA, 30 bp, Artificial Sequence
  Synthetic oligonucleotide
tcctcagcaactaaagttaacacttccgga

SEQ ID NO: 127763 - DNA, 30 bp, Artificial Sequence
  Synthetic oligonucleotide
agagtctaaaactttaagaggccttccgga

SEQ ID NO: 127764 - DNA, 30 bp, Artificial Sequence
  Synthetic oligonucleotide
cacgccaacatgcaaacacggtgttccgga

SEQ ID NO: 127765 - DNA, 30 bp, Artificial Sequence
  Synthetic oligonucleotide
aggactcggagcgcgctactcaaaagcgga

SEQ ID NO: 127766 - DNA, 30 bp, Artificial Sequence
  Synthetic oligonucleotide
tcaagggagatcaatttctatacaagcgga

SEQ ID NO: 127767 - DNA, 30 bp, Artificial Sequence
  Synthetic oligonucleotide
ttgacgattaatcgtaggggggacagcgga

SEQ ID NO: 127768 - DNA, 30 bp, Artificial Sequence
  Synthetic oligonucleotide
acggttggctccttcataaagacgagcgga

SEQ ID NO: 127769 - DNA, 30 bp, Artificial Sequence
  Synthetic oligonucleotide
ctatattgaccggggccaataccgagcgga

SEQ ID NO: 127770 - DNA, 30 bp, Artificial Sequence
  Synthetic oligonucleotide
atctatcgacatttaattgaaaatagcgga

SEQ ID NO: 127771 - DNA, 30 bp, Artificial Sequence
  Synthetic oligonucleotide
cccttagcaatcaatcttaccgcacgcgga

SEQ ID NO: 127772 - DNA, 30 bp, Artificial Sequence
  Synthetic oligonucleotide
atgccgttgaggggagctgtcgtgcgcgga

SEQ ID NO: 127773 - DNA, 30 bp, Artificial Sequence
  Synthetic oligonucleotide
acatgttaggaatcgtctggggatcgcgga

SEQ ID NO: 127774 - DNA, 30 bp, Artificial Sequence
  Synthetic oligonucleotide
gcattcaagactaggatcgatccaggcgga

SEQ ID NO: 127775 - DNA, 30 bp, Artificial Sequence
  Synthetic oligonucleotide
ctagctgagccactttagtgtgacggcgga

SEQ ID NO: 127776 - DNA, 30 bp, Artificial Sequence
  Synthetic oligonucleotide
caacccatttcgattgggaaagccggcgga

SEQ ID NO: 127777 - DNA, 30 bp, Artificial Sequence
  Synthetic oligonucleotide
cacacgctagagcacaagcatatgggcgga

SEQ ID NO: 127778 - DNA, 30 bp, Artificial Sequence
  Synthetic oligonucleotide
cgaagtgacgtcagtccgatccaatgcgga

SEQ ID NO: 127779 - DNA, 30 bp, Artificial Sequence
  Synthetic oligonucleotide
gggcaacaggggaagggagggttgtgcgga

SEQ ID NO: 127780 - DNA, 30 bp, Artificial Sequence
  Synthetic oligonucleotide
ttcggtcaacctacgtaatccgattgcgga

SEQ ID NO: 127781 - DNA, 30 bp, Artificial Sequence
  Synthetic oligonucleotide
cttaggtcatgggaactgctaaacatcgga

SEQ ID NO: 127782 - DNA, 30 bp, Artificial Sequence
  Synthetic oligonucleotide
tctgtagatcagcgccaaacgacactcgga

SEQ ID NO: 127783 - DNA, 30 bp, Artificial Sequence
  Synthetic oligonucleotide
tgccgagggaatgcacaatctgtactcgga

SEQ ID NO: 127784 - DNA, 30 bp, Artificial Sequence
  Synthetic oligonucleotide
cgtaacctctaccgacagtattgtctcgga

SEQ ID NO: 127785 - DNA, 30 bp, Artificial Sequence
  Synthetic oligonucleotide
aaacaaggcgaagaggcagggaatgtcgga

SEQ ID NO: 127786 - DNA, 30 bp, Artificial Sequence
  Synthetic oligonucleotide
actagaatgttacacccatcctgtgtcgga

SEQ ID NO: 127787 - DNA, 30 bp, Artificial Sequence
  Synthetic oligonucleotide
ctgtgaaacagtgttcacgcccaattcgga

SEQ ID NO: 127788 - DNA, 30 bp, Artificial Sequence
  Synthetic oligonucleotide
cggcctactaggggtatgcgactaaaggga

SEQ ID NO: 127789 - DNA, 31 bp, Artificial Sequence
  Synthetic oligonucleotide
gcaagtccccaaaaacagggtgttaaaggga

SEQ ID NO: 127790 - DNA, 30 bp, Artificial Sequence
  Synthetic oligonucleotide
cttcgtcattagtgcgccatcaacaaggga

SEQ ID NO: 127791 - DNA, 30 bp, Artificial Sequence
  Synthetic oligonucleotide
ggccacgttctgttcggaagccctaaggga

SEQ ID NO: 127792 - DNA, 30 bp, Artificial Sequence
  Synthetic oligonucleotide
ccagatggctattggccgttagtacaggga

SEQ ID NO: 127793 - DNA, 30 bp, Artificial Sequence
  Synthetic oligonucleotide
tggtggctatcaaaccggactcaccaggga

SEQ ID NO: 127794 - DNA, 30 bp, Artificial Sequence
  Synthetic oligonucleotide
ctgccgggagcgcacgaacccagccaggga

SEQ ID NO: 127795 - DNA, 30 bp, Artificial Sequence
  Synthetic oligonucleotide
tgttgtgaggatcagaatgtaggggaggga

SEQ ID NO: 127796 - DNA, 30 bp, Artificial Sequence
  Synthetic oligonucleotide
caacgggtggggacgccgttacaataggga

SEQ ID NO: 127797 - DNA, 30 bp, Artificial Sequence
  Synthetic oligonucleotide
atgtgcagtggtggttagggcttctaggga

SEQ ID NO: 127798 - DNA, 30 bp, Artificial Sequence
  Synthetic oligonucleotide
cctgtatacggtggttcgggacattaggga

SEQ ID NO: 127799 - DNA, 30 bp, Artificial Sequence
  Synthetic oligonucleotide
tctatcatcttgccaatgaagcggacggga

SEQ ID NO: 127800 - DNA, 30 bp, Artificial Sequence
  Synthetic oligonucleotide
tgggcctacggggagaagcaggggacggga

SEQ ID NO: 127801 - DNA, 30 bp, Artificial Sequence
  Synthetic oligonucleotide
gatgggctacttgcctgcctagatacggga

SEQ ID NO: 127802 - DNA, 30 bp, Artificial Sequence
  Synthetic oligonucleotide
cacgagtctggcccattccatagcccggga

SEQ ID NO: 127803 - DNA, 30 bp, Artificial Sequence
  Synthetic oligonucleotide
atacaaagacgattgatatcatcagcggga

SEQ ID NO: 127804 - DNA, 30 bp, Artificial Sequence
  Synthetic oligonucleotide
gtccgcgtcgggaccggatacatagcggga

SEQ ID NO: 127805 - DNA, 30 bp, Artificial Sequence
  Synthetic oligonucleotide
ctcgtgcgcgttattagcaagaaatcggga

SEQ ID NO: 127806 - DNA, 30 bp, Artificial Sequence
  Synthetic oligonucleotide
ggtcggttagtatcgcagtgcaagtcggga

SEQ ID NO: 127807 - DNA, 30 bp, Artificial Sequence
  Synthetic oligonucleotide
gcgggagtcggttcaactgtcaagtcggga

SEQ ID NO: 127808 - DNA, 30 bp, Artificial Sequence
  Synthetic oligonucleotide
cggcagaccagggtttacagtcgttcggga

SEQ ID NO: 127809 - DNA, 30 bp, Artificial Sequence
  Synthetic oligonucleotide
cgactacagacaggaggaggactttcggga

SEQ ID NO: 127810 - DNA, 30 bp, Artificial Sequence
  Synthetic oligonucleotide
gccgaaaagtgctttagacacataagggga

SEQ ID NO: 127811 - DNA, 30 bp, Artificial Sequence
  Synthetic oligonucleotide
acctttcaaaagtgcatctagttcagggga

SEQ ID NO: 127812 - DNA, 30 bp, Artificial Sequence
  Synthetic oligonucleotide
ggctacgtgagccgctgatgtcggagggga

SEQ ID NO: 127813 - DNA, 30 bp, Artificial Sequence
  Synthetic oligonucleotide
taaaacgagcttaggagagattagcgggga

SEQ ID NO: 127814 - DNA, 30 bp, Artificial Sequence
  Synthetic oligonucleotide
gcgacctgtccaattacgaaacagggggga

SEQ ID NO: 127815 - DNA, 30 bp, Artificial Sequence
  Synthetic oligonucleotide
gccggtcttagtggaagttaagagggggga

SEQ ID NO: 127816 - DNA, 40 bp, Artificial Sequence
  Synthetic oligonucleotide
aagataatacattcatgggatggtcggggatcggggggga

SEQ ID NO: 127817 - DNA, 30 bp, Artificial Sequence
  Synthetic oligonucleotide
aagtctgagtgttttaaggggcttggggga

SEQ ID NO: 127818 - DNA, 30 bp, Artificial Sequence
  Synthetic oligonucleotide
agagatgccccacggactagaaaatgggga

SEQ ID NO: 127819 - DNA, 30 bp, Artificial Sequence
  Synthetic oligonucleotide
ttaacatttaggctactacttaactgggga

SEQ ID NO: 127820 - DNA, 30 bp, Artificial Sequence
  Synthetic oligonucleotide
acacttacaagatacatatcccgctgggga

SEQ ID NO: 127821 - DNA, 30 bp, Artificial Sequence
  Synthetic oligonucleotide
taataggtggctattcgtccgatctgggga

SEQ ID NO: 127822 - DNA, 30 bp, Artificial Sequence
  Synthetic oligonucleotide
agagggcaatgggagctataacagtgggga

SEQ ID NO: 127823 - DNA, 30 bp, Artificial Sequence
  Synthetic oligonucleotide
ggcagtcagatagatgaggtactaatggga

SEQ ID NO: 127824 - DNA, 30 bp, Artificial Sequence
  Synthetic oligonucleotide
agaattagtgagattaaggcccatatggga

SEQ ID NO: 127825 - DNA, 30 bp, Artificial Sequence
  Synthetic oligonucleotide
ctgaagggacccgagcggcgatccctggga

SEQ ID NO: 127826 - DNA, 30 bp, Artificial Sequence
  Synthetic oligonucleotide
gcgaactctactggagggacgttcctggga

SEQ ID NO: 127827 - DNA, 30 bp, Artificial Sequence
  Synthetic oligonucleotide
agctaggaaaaccgtagttctcagctggga

SEQ ID NO: 127828 - DNA, 30 bp, Artificial Sequence
  Synthetic oligonucleotide
cggagctctgatgggtgagggtagctggga

SEQ ID NO: 127829 - DNA, 30 bp, Artificial Sequence
  Synthetic oligonucleotide
gtgcatatacttggtggaagtgaagtggga

SEQ ID NO: 127830 - DNA, 30 bp, Artificial Sequence
  Synthetic oligonucleotide
gtacatccggttagggcctcaccagtggga

SEQ ID NO: 127831 - DNA, 31 bp, Artificial Sequence
  Synthetic oligonucleotide
gtacgggattgtatagcgctcactagtggga

SEQ ID NO: 127832 - DNA, 30 bp, Artificial Sequence
  Synthetic oligonucleotide
atgacgaggcagcgttagcgtgtagtggga

SEQ ID NO: 127833 - DNA, 30 bp, Artificial Sequence
  Synthetic oligonucleotide
tctgtgaatgtaacacaaatgctcgtggga

SEQ ID NO: 127834 - DNA, 30 bp, Artificial Sequence
  Synthetic oligonucleotide
ggagtgagcgggccctcacaagtcgtggga

SEQ ID NO: 127835 - DNA, 30 bp, Artificial Sequence
  Synthetic oligonucleotide
aggaggttattagccgtagtaaaggtggga

SEQ ID NO: 127836 - DNA, 29 bp, Artificial Sequence
  Synthetic oligonucleotide
tcttcatgtactgctctactttggtggga

SEQ ID NO: 127837 - DNA, 30 bp, Artificial Sequence
  Synthetic oligonucleotide
acagctcaggcgggatttcatcatgtggga

SEQ ID NO: 127838 - DNA, 30 bp, Artificial Sequence
  Synthetic oligonucleotide
ttagttaagccttcgtgagtttctgtggga

SEQ ID NO: 127839 - DNA, 30 bp, Artificial Sequence
  Synthetic oligonucleotide
catgggatcgcatagtccgtataattggga

SEQ ID NO: 127840 - DNA, 30 bp, Artificial Sequence
  Synthetic oligonucleotide
accgtatgccacatcaatcggttattggga

SEQ ID NO: 127841 - DNA, 30 bp, Artificial Sequence
  Synthetic oligonucleotide
cccgaagaacgtgcgcgtctacttttggga

SEQ ID NO: 127842 - DNA, 30 bp, Artificial Sequence
  Synthetic oligonucleotide
tcggtacaccctcccgcatcttcaaatgga

SEQ ID NO: 127843 - DNA, 30 bp, Artificial Sequence
  Synthetic oligonucleotide
atgttgaatggatgatgagcgcacaatgga

SEQ ID NO: 127844 - DNA, 30 bp, Artificial Sequence
  Synthetic oligonucleotide
gagcaagtcgaggtcgtttaggataatgga

SEQ ID NO: 127845 - DNA, 30 bp, Artificial Sequence
  Synthetic oligonucleotide
atggaagcattatagtagtgctgacatgga

SEQ ID NO: 127846 - DNA, 30 bp, Artificial Sequence
  Synthetic oligonucleotide
atgaaaaggaccagcacgggagtgcatgga

SEQ ID NO: 127847 - DNA, 30 bp, Artificial Sequence
  Synthetic oligonucleotide
tgggaatgcaggttgcgagtgcctcatgga

SEQ ID NO: 127848 - DNA, 30 bp, Artificial Sequence
  Synthetic oligonucleotide
ctagtttgccacgtatggtagagagatgga

SEQ ID NO: 127849 - DNA, 30 bp, Artificial Sequence
  Synthetic oligonucleotide
ggttcaccggcagtgcacgttcctgatgga

SEQ ID NO: 127850 - DNA, 30 bp, Artificial Sequence
  Synthetic oligonucleotide
ttgcattggccaagaaatggaagatatgga

SEQ ID NO: 127851 - DNA, 30 bp, Artificial Sequence
  Synthetic oligonucleotide
gttggaggatcaactgaaagggactatgga

SEQ ID NO: 127852 - DNA, 30 bp, Artificial Sequence
  Synthetic oligonucleotide
aacggagagtattggggttggagcactgga

SEQ ID NO: 127853 - DNA, 30 bp, Artificial Sequence
  Synthetic oligonucleotide
cggcgaccatagttggcgccctagcctgga

SEQ ID NO: 127854 - DNA, 30 bp, Artificial Sequence
  Synthetic oligonucleotide
caattaatccgaggaatgtgcgggcctgga

SEQ ID NO: 127855 - DNA, 30 bp, Artificial Sequence
  Synthetic oligonucleotide
gggtacatttgaaaacccgacgtgcctgga

SEQ ID NO: 127856 - DNA, 30 bp, Artificial Sequence
  Synthetic oligonucleotide
agggccaaaattacggcacgcaccgctgga

SEQ ID NO: 127857 - DNA, 30 bp, Artificial Sequence
  Synthetic oligonucleotide
actctgagcgttgagtgaataagtgctgga

SEQ ID NO: 127858 - DNA, 30 bp, Artificial Sequence
  Synthetic oligonucleotide
tgcggagcgcatttaggtggctactctgga

SEQ ID NO: 127859 - DNA, 30 bp, Artificial Sequence
  Synthetic oligonucleotide
agagacccaggccactactcgagttctgga

SEQ ID NO: 127860 - DNA, 30 bp, Artificial Sequence
  Synthetic oligonucleotide
catgcaacctctaagagtttggaaagtgga

SEQ ID NO: 127861 - DNA, 30 bp, Artificial Sequence
  Synthetic oligonucleotide
tgatgtgaatggtccaagtctgcaagtgga

SEQ ID NO: 127862 - DNA, 30 bp, Artificial Sequence
  Synthetic oligonucleotide
ctacgaacgtcaaacatttgcatcagtgga

SEQ ID NO: 127863 - DNA, 30 bp, Artificial Sequence
  Synthetic oligonucleotide
ggctgaacaagaaagagccaactcagtgga

SEQ ID NO: 127864 - DNA, 30 bp, Artificial Sequence
  Synthetic oligonucleotide
cgcgcgacgtacattaccagaccgagtgga

SEQ ID NO: 127865 - DNA, 30 bp, Artificial Sequence
  Synthetic oligonucleotide
gcgtggctctagacgaacatccgtagtgga

SEQ ID NO: 127866 - DNA, 30 bp, Artificial Sequence
  Synthetic oligonucleotide
tcggtctagctgaggccaccactgcgtgga

SEQ ID NO: 127867 - DNA, 30 bp, Artificial Sequence
  Synthetic oligonucleotide
gtgaagagtgcatctgttttggtgcgtgga

SEQ ID NO: 127868 - DNA, 30 bp, Artificial Sequence
  Synthetic oligonucleotide
catttcgagtactagtgacctcaaggtgga

SEQ ID NO: 127869 - DNA, 30 bp, Artificial Sequence
  Synthetic oligonucleotide
tatgaggcatgagcccggttgctaggtgga

SEQ ID NO: 127870 - DNA, 30 bp, Artificial Sequence
  Synthetic oligonucleotide
cacgttgaacactagaggatacgcggtgga

SEQ ID NO: 127871 - DNA, 30 bp, Artificial Sequence
  Synthetic oligonucleotide
ggatctcaattagtgagggctcagggtgga

SEQ ID NO: 127872 - DNA, 30 bp, Artificial Sequence
  Synthetic oligonucleotide
acggcggcgggggaggggtgacgtggtgga

SEQ ID NO: 127873 - DNA, 30 bp, Artificial Sequence
  Synthetic oligonucleotide
cgagagtatcttctcagaggaattggtgga

SEQ ID NO: 127874 - DNA, 30 bp, Artificial Sequence
  Synthetic oligonucleotide
tcagctgaacttttatagaagctatgtgga

SEQ ID NO: 127875 - DNA, 30 bp, Artificial Sequence
  Synthetic oligonucleotide
tgtaactcgtcgtgaacatgggtgtgtgga

SEQ ID NO: 127876 - DNA, 30 bp, Artificial Sequence
  Synthetic oligonucleotide
aacgaatcgacactgtggtcgggaattgga

SEQ ID NO: 127877 - DNA, 30 bp, Artificial Sequence
  Synthetic oligonucleotide
gctggggctccagaaacatgtgcgattgga

SEQ ID NO: 127878 - DNA, 30 bp, Artificial Sequence
  Synthetic oligonucleotide
gtataatcacatctgggttccgggattgga

SEQ ID NO: 127879 - DNA, 30 bp, Artificial Sequence
  Synthetic oligonucleotide
agccttgggccagtaggtctccatattgga

SEQ ID NO: 127880 - DNA, 30 bp, Artificial Sequence
  Synthetic oligonucleotide
tggacagcgtgaatcgaggcctgccttgga

SEQ ID NO: 127881 - DNA, 30 bp, Artificial Sequence
  Synthetic oligonucleotide
cgctaaaactgattcaaactgtggtttgga

SEQ ID NO: 127882 - DNA, 30 bp, Artificial Sequence
  Synthetic oligonucleotide
aaccttgaacctcgaatttaactaaaatga

SEQ ID NO: 127883 - DNA, 30 bp, Artificial Sequence
  Synthetic oligonucleotide
atgctgtgtggaggactcttgttaaaatga

SEQ ID NO: 127884 - DNA, 30 bp, Artificial Sequence
  Synthetic oligonucleotide
aaaactggatacaatggaaaacccaaatga

SEQ ID NO: 127885 - DNA, 30 bp, Artificial Sequence
  Synthetic oligonucleotide
aggtgctattatgaaccttgacccaaatga

SEQ ID NO: 127886 - DNA, 30 bp, Artificial Sequence
  Synthetic oligonucleotide
agccgacgcttggagaacacgtccaaatga

SEQ ID NO: 127887 - DNA, 30 bp, Artificial Sequence
  Synthetic oligonucleotide
tataagcttagtgtgtgtgcaagcaaatga

SEQ ID NO: 127888 - DNA, 30 bp, Artificial Sequence
  Synthetic oligonucleotide
ttaagagatacctacggtttcgtgaaatga

SEQ ID NO: 127889 - DNA, 30 bp, Artificial Sequence
  Synthetic oligonucleotide
ttcgcattctataaagtgacatataaatga

SEQ ID NO: 127890 - DNA, 30 bp, Artificial Sequence
  Synthetic oligonucleotide
aacggaacttccgtcccccagagtcaatga

SEQ ID NO: 127891 - DNA, 30 bp, Artificial Sequence
  Synthetic oligonucleotide
ggggtagccgctcggcagcaaggtcaatga

SEQ ID NO: 127892 - DNA, 31 bp, Artificial Sequence
  Synthetic oligonucleotide
agggcgccttttgtccgttggataagaatga

SEQ ID NO: 127893 - DNA, 30 bp, Artificial Sequence
  Synthetic oligonucleotide
cgaaaccccaaagattaggcacaggaatga

SEQ ID NO: 127894 - DNA, 30 bp, Artificial Sequence
  Synthetic oligonucleotide
ggcttgtacgaggtgaggaagtaataatga

SEQ ID NO: 127895 - DNA, 30 bp, Artificial Sequence
  Synthetic oligonucleotide
ggagatctatttatcgaaaaggactaatga

SEQ ID NO: 127896 - DNA, 30 bp, Artificial Sequence
  Synthetic oligonucleotide
gtgcacggtttgatatctcgccggtaatga

SEQ ID NO: 127897 - DNA, 30 bp, Artificial Sequence
  Synthetic oligonucleotide
acattcgcgattcgcgcctaagcttaatga

SEQ ID NO: 127898 - DNA, 30 bp, Artificial Sequence
  Synthetic oligonucleotide
tgcatggaagcgtctggcccaacaacatga

SEQ ID NO: 127899 - DNA, 30 bp, Artificial Sequence
  Synthetic oligonucleotide
gaggtacaagaaggtagggaacacccatga

SEQ ID NO: 127900 - DNA, 30 bp, Artificial Sequence
  Synthetic oligonucleotide
ccatgacatgggacaggctgatagccatga

SEQ ID NO: 127901 - DNA, 30 bp, Artificial Sequence
  Synthetic oligonucleotide
accctcggtccaaacgccaaggtgccatga

SEQ ID NO: 127902 - DNA, 30 bp, Artificial Sequence
  Synthetic oligonucleotide
tcccaggagggagatatacattatccatga

SEQ ID NO: 127903 - DNA, 30 bp, Artificial Sequence
  Synthetic oligonucleotide
accgactgcatattcgtttcttgatcatga

SEQ ID NO: 127904 - DNA, 30 bp, Artificial Sequence
  Synthetic oligonucleotide
catcccccagacatggatgcctagagatga

SEQ ID NO: 127905 - DNA, 30 bp, Artificial Sequence
  Synthetic oligonucleotide
cctgttcttgtggagtgcgaaggacgatga

SEQ ID NO: 127906 - DNA, 30 bp, Artificial Sequence
  Synthetic oligonucleotide
tcgatgtaatatgaacacttttaccgatga

SEQ ID NO: 127907 - DNA, 30 bp, Artificial Sequence
  Synthetic oligonucleotide
gaagctatttaatggagaaaccgccgatga

SEQ ID NO: 127908 - DNA, 30 bp, Artificial Sequence
  Synthetic oligonucleotide
cggttctgaggcgttgggctgctccgatga

SEQ ID NO: 127909 - DNA, 30 bp, Artificial Sequence
  Synthetic oligonucleotide
gtgtggtcaggccctaagagcattcgatga

SEQ ID NO: 127910 - DNA, 30 bp, Artificial Sequence
  Synthetic oligonucleotide
aggtcgctcgcgaggcctaggttaggatga

SEQ ID NO: 127911 - DNA, 30 bp, Artificial Sequence
  Synthetic oligonucleotide
gcacaaatcgacaataacatacctggatga

SEQ ID NO: 127912 - DNA, 30 bp, Artificial Sequence
  Synthetic oligonucleotide
taacccccgaaacgttggataatatgatga

SEQ ID NO: 127913 - DNA, 30 bp, Artificial Sequence
  Synthetic oligonucleotide
aggaaacaggcgcagaccccctacctatga

SEQ ID NO: 127914 - DNA, 30 bp, Artificial Sequence
  Synthetic oligonucleotide
tcccgcgaggcacggttagttaagctatga

SEQ ID NO: 127915 - DNA, 30 bp, Artificial Sequence
  Synthetic oligonucleotide
acactccgtagtaagtcgagcaggctatga

SEQ ID NO: 127916 - DNA, 30 bp, Artificial Sequence
  Synthetic oligonucleotide
gccaaactttggccggttgaatgagtatga

SEQ ID NO: 127917 - DNA, 30 bp, Artificial Sequence
  Synthetic oligonucleotide
cctagcctcgtaaaggcaaagacattatga

SEQ ID NO: 127918 - DNA, 30 bp, Artificial Sequence
  Synthetic oligonucleotide
cgaaataactgaaaccagtcgcccttatga

SEQ ID NO: 127919 - DNA, 30 bp, Artificial Sequence
  Synthetic oligonucleotide
tcacaagcacaaagtgtcttaatgttatga

SEQ ID NO: 127920 - DNA, 30 bp, Artificial Sequence
  Synthetic oligonucleotide
cgataaaaattctattggttgccaaactga

SEQ ID NO: 127921 - DNA, 30 bp, Artificial Sequence
  Synthetic oligonucleotide
tgagtatagttgggctgagcccgaaactga

SEQ ID NO: 127922 - DNA, 29 bp, Artificial Sequence
  Synthetic oligonucleotide
ttgattgattcaatcaaggatccgactga

SEQ ID NO: 127923 - DNA, 30 bp, Artificial Sequence
  Synthetic oligonucleotide
cgacatcggggatgatgtgctctcgactga

SEQ ID NO: 127924 - DNA, 30 bp, Artificial Sequence
  Synthetic oligonucleotide
acgcaacggggtggttataagctggactga

SEQ ID NO: 127925 - DNA, 30 bp, Artificial Sequence
  Synthetic oligonucleotide
ggaggtgacacgaatccatttactgactga

SEQ ID NO: 127926 - DNA, 30 bp, Artificial Sequence
  Synthetic oligonucleotide
aagtaactattcttcggtgaacagtactga

SEQ ID NO: 127927 - DNA, 30 bp, Artificial Sequence
  Synthetic oligonucleotide
cggtattagaacaggagaacgtcaacctga

SEQ ID NO: 127928 - DNA, 30 bp, Artificial Sequence
  Synthetic oligonucleotide
aagatatcactcacagccggaattacctga

SEQ ID NO: 127929 - DNA, 30 bp, Artificial Sequence
  Synthetic oligonucleotide
tcgtacacgtggtcggacagatagccctga

SEQ ID NO: 127930 - DNA, 30 bp, Artificial Sequence
  Synthetic oligonucleotide
aggtaggactccttgcgccggatagcctga

SEQ ID NO: 127931 - DNA, 30 bp, Artificial Sequence
  Synthetic oligonucleotide
agcaatacatcaaaagtcgtgaaggcctga

SEQ ID NO: 127932 - DNA, 30 bp, Artificial Sequence
  Synthetic oligonucleotide
atgagttcaggctcgagcatgtgtgcctga

SEQ ID NO: 127933 - DNA, 30 bp, Artificial Sequence
  Synthetic oligonucleotide
tcacgtatccgcaaaggtcaggcatcctga

SEQ ID NO: 127934 - DNA, 30 bp, Artificial Sequence
  Synthetic oligonucleotide
gctaattagttagcctaccgaaactcctga

SEQ ID NO: 127935 - DNA, 30 bp, Artificial Sequence
  Synthetic oligonucleotide
agaagccaattgggagtgagggactcctga

SEQ ID NO: 127936 - DNA, 30 bp, Artificial Sequence
  Synthetic oligonucleotide
aatgacaggtttaggttcgaggcctcctga

SEQ ID NO: 127937 - DNA, 30 bp, Artificial Sequence
  Synthetic oligonucleotide
agaaacgcgtgtgcgatatacctttcctga

SEQ ID NO: 127938 - DNA, 30 bp, Artificial Sequence
  Synthetic oligonucleotide
gcgatagctggccctaacgacaagagctga

SEQ ID NO: 127939 - DNA, 30 bp, Artificial Sequence
  Synthetic oligonucleotide
ctgaatagagagcagttggtgagtagctga

SEQ ID NO: 127940 - DNA, 30 bp, Artificial Sequence
  Synthetic oligonucleotide
aagggatccaccgcgggctggggtagctga

SEQ ID NO: 127941 - DNA, 30 bp, Artificial Sequence
  Synthetic oligonucleotide
gaacactaacggctgagggagggtcgctga

SEQ ID NO: 127942 - DNA, 30 bp, Artificial Sequence
  Synthetic oligonucleotide
ctcgcgccgagtgtggaagttttaggctga

SEQ ID NO: 127943 - DNA, 30 bp, Artificial Sequence
  Synthetic oligonucleotide
ctagttgtagctagactcatggttggctga

SEQ ID NO: 127944 - DNA, 30 bp, Artificial Sequence
  Synthetic oligonucleotide
acgtgctaacatgccttatcaagatgctga

SEQ ID NO: 127945 - DNA, 30 bp, Artificial Sequence
  Synthetic oligonucleotide
cgaatccttcagaagttcgggtagtgctga

SEQ ID NO: 127946 - DNA, 30 bp, Artificial Sequence
  Synthetic oligonucleotide
ttgcggcgagtgcacgccctcactatctga

SEQ ID NO: 127947 - DNA, 30 bp, Artificial Sequence
  Synthetic oligonucleotide
gctttggtcgatatacaacatcctatctga

SEQ ID NO: 127948 - DNA, 30 bp, Artificial Sequence
  Synthetic oligonucleotide
tggtgagggaccacgacgagtctcctctga

SEQ ID NO: 127949 - DNA, 30 bp, Artificial Sequence
  Synthetic oligonucleotide
tgaacatgctaagattaatgtaagctctga

SEQ ID NO: 127950 - DNA, 30 bp, Artificial Sequence
  Synthetic oligonucleotide
taggatattcatagcccgggcatagtctga

SEQ ID NO: 127951 - DNA, 30 bp, Artificial Sequence
  Synthetic oligonucleotide
ttgcagtcaaaggcaaaagagcgtgtctga

SEQ ID NO: 127952 - DNA, 30 bp, Artificial Sequence
  Synthetic oligonucleotide
agacaatcccagcagggaggaaaattctga

SEQ ID NO: 127953 - DNA, 30 bp, Artificial Sequence
  Synthetic oligonucleotide
cgttgagaaagatacgattgtaaattctga

SEQ ID NO: 127954 - DNA, 30 bp, Artificial Sequence
  Synthetic oligonucleotide
tcacatatctagctagtacgtcacttctga

SEQ ID NO: 127955 - DNA, 30 bp, Artificial Sequence
  Synthetic oligonucleotide
cgtaaggtggggtggtgtggcaaaaagtga

SEQ ID NO: 127956 - DNA, 30 bp, Artificial Sequence
  Synthetic oligonucleotide
agggtgttcgacttcgcgaatgtaaagtga

SEQ ID NO: 127957 - DNA, 30 bp, Artificial Sequence
  Synthetic oligonucleotide
agcgcgtacgggtcatgagctcctaagtga

SEQ ID NO: 127958 - DNA, 30 bp, Artificial Sequence
  Synthetic oligonucleotide
aggtgggttcgagtgaccagtgctaagtga

SEQ ID NO: 127959 - DNA, 30 bp, Artificial Sequence
  Synthetic oligonucleotide
gcccgagcacgaaccccctggcttaagtga

SEQ ID NO: 127960 - DNA, 30 bp, Artificial Sequence
  Synthetic oligonucleotide
gaagtcatggtgctataccatccggagtga

SEQ ID NO: 127961 - DNA, 30 bp, Artificial Sequence
  Synthetic oligonucleotide
aaaatttgagcacaaggctagatggagtga

SEQ ID NO: 127962 - DNA, 30 bp, Artificial Sequence
  Synthetic oligonucleotide
tgcgttagcctttgggtgcgtgtggagtga

SEQ ID NO: 127963 - DNA, 30 bp, Artificial Sequence
  Synthetic oligonucleotide
gcgggtaataatgttaagagtcaatagtga

SEQ ID NO: 127964 - DNA, 30 bp, Artificial Sequence
  Synthetic oligonucleotide
tccatagccgtcatgtcttgaccatagtga

SEQ ID NO: 127965 - DNA, 30 bp, Artificial Sequence
  Synthetic oligonucleotide
caccccgccggaatcagcataaccacgtga

SEQ ID NO: 127966 - DNA, 30 bp, Artificial Sequence
  Synthetic oligonucleotide
taaaggtagtcccacagtgggaggacgtga

SEQ ID NO: 127967 - DNA, 30 bp, Artificial Sequence
  Synthetic oligonucleotide
cgtagcctgttgggggagtagtggacgtga

SEQ ID NO: 127968 - DNA, 30 bp, Artificial Sequence
  Synthetic oligonucleotide
agagtgcaacaacctggagtgtttccgtga

SEQ ID NO: 127969 - DNA, 30 bp, Artificial Sequence
  Synthetic oligonucleotide
agtggcacacccgcgtgaaagcctgcgtga

SEQ ID NO: 127970 - DNA, 30 bp, Artificial Sequence
  Synthetic oligonucleotide
ccagcgtaggcgttatcggggcattcgtga

SEQ ID NO: 127971 - DNA, 30 bp, Artificial Sequence
  Synthetic oligonucleotide
tagccaggaattatctggtaacgttcgtga

SEQ ID NO: 127972 - DNA, 30 bp, Artificial Sequence
  Synthetic oligonucleotide
aggataggatgccgtttaaatttttcgtga

SEQ ID NO: 127973 - DNA, 30 bp, Artificial Sequence
  Synthetic oligonucleotide
ttggaagttcagttagaaacataaaggtga

SEQ ID NO: 127974 - DNA, 30 bp, Artificial Sequence
  Synthetic oligonucleotide
gacgcatgattcggatacagcgggaggtga

SEQ ID NO: 127975 - DNA, 30 bp, Artificial Sequence
  Synthetic oligonucleotide
acgaaacaaaggtatttaggcccacggtga

SEQ ID NO: 127976 - DNA, 30 bp, Artificial Sequence
  Synthetic oligonucleotide
gttaaacgtcatcgtagataccagcggtga

SEQ ID NO: 127977 - DNA, 30 bp, Artificial Sequence
  Synthetic oligonucleotide
gtgacttgcgtatagtgagtgcaggggtga

SEQ ID NO: 127978 - DNA, 30 bp, Artificial Sequence
  Synthetic oligonucleotide
tgtgaacgacgaactacgaagccggggtga

SEQ ID NO: 127979 - DNA, 30 bp, Artificial Sequence
  Synthetic oligonucleotide
aagcgcttgggggatagaatgtctgggtga

SEQ ID NO: 127980 - DNA, 30 bp, Artificial Sequence
  Synthetic oligonucleotide
agtagcagtagtcttttcgacacatggtga

SEQ ID NO: 127981 - DNA, 30 bp, Artificial Sequence
  Synthetic oligonucleotide
ggggggtcctgaaagagcatcgcgtggtga

SEQ ID NO: 127982 - DNA, 30 bp, Artificial Sequence
  Synthetic oligonucleotide
actcgaggttcaatgggtacctacatgtga

SEQ ID NO: 127983 - DNA, 30 bp, Artificial Sequence
  Synthetic oligonucleotide
cgcgatcgtcccgtccttatggctatgtga

SEQ ID NO: 127984 - DNA, 30 bp, Artificial Sequence
  Synthetic oligonucleotide
cagaaattaactaacctgattgctatgtga

SEQ ID NO: 127985 - DNA, 30 bp, Artificial Sequence
  Synthetic oligonucleotide
gcgtgatttacagtttgctttaacctgtga

SEQ ID NO: 127986 - DNA, 30 bp, Artificial Sequence
  Synthetic oligonucleotide
ccagacgagccacgatcaggaacgctgtga

SEQ ID NO: 127987 - DNA, 30 bp, Artificial Sequence
  Synthetic oligonucleotide
ggcaaccatattctcgtaagatgtctgtga

SEQ ID NO: 127988 - DNA, 30 bp, Artificial Sequence
  Synthetic oligonucleotide
ctacctcaataagttaaagtgctagtgtga

SEQ ID NO: 127989 - DNA, 30 bp, Artificial Sequence
  Synthetic oligonucleotide
gtctaaagatctagatatgacctcgtgtga

SEQ ID NO: 127990 - DNA, 30 bp, Artificial Sequence
  Synthetic oligonucleotide
gggccgagaggaatggatcttctcgtgtga

SEQ ID NO: 127991 - DNA, 29 bp, Artificial Sequence
  Synthetic oligonucleotide
cagatcaaatcacggagtgctgattgtga

SEQ ID NO: 127992 - DNA, 30 bp, Artificial Sequence
  Synthetic oligonucleotide
tcgacagatgccctacatgcgaatttgtga

SEQ ID NO: 127993 - DNA, 30 bp, Artificial Sequence
  Synthetic oligonucleotide
tcggcttggaagtaattactatctttgtga

SEQ ID NO: 127994 - DNA, 30 bp, Artificial Sequence
  Synthetic oligonucleotide
taagcaacggcatggcgtgtcgaaaattga

SEQ ID NO: 127995 - DNA, 30 bp, Artificial Sequence
  Synthetic oligonucleotide
gttcgcttacggataaccaaaagcaattga

SEQ ID NO: 127996 - DNA, 30 bp, Artificial Sequence
  Synthetic oligonucleotide
tggcctagacacaagcgcttcacagattga

SEQ ID NO: 127997 - DNA, 30 bp, Artificial Sequence
  Synthetic oligonucleotide
tcgggcatgggcgggatgtgcgatgattga

SEQ ID NO: 127998 - DNA, 30 bp, Artificial Sequence
  Synthetic oligonucleotide
gggccgatgtcgcgtttttgatgtgattga

SEQ ID NO: 127999 - DNA, 30 bp, Artificial Sequence
  Synthetic oligonucleotide
gaatgcttaggcacgaaggcagattattga

SEQ ID NO: 128000 - DNA, 30 bp, Artificial Sequence
  Synthetic oligonucleotide
tccggaatgcctagagtgaaaagcacttga

SEQ ID NO: 128001 - DNA, 30 bp, Artificial Sequence
  Synthetic oligonucleotide
atagaaaggagaaattgcctcacagcttga

SEQ ID NO: 128002 - DNA, 30 bp, Artificial Sequence
  Synthetic oligonucleotide
gacggtactgacttgacattaagagcttga

SEQ ID NO: 128003 - DNA, 30 bp, Artificial Sequence
  Synthetic oligonucleotide
ggttcacacggtaagcgggcagaggcttga

SEQ ID NO: 128004 - DNA, 30 bp, Artificial Sequence
  Synthetic oligonucleotide
ccggatatggagtctggacgttatgcttga

SEQ ID NO: 128005 - DNA, 30 bp, Artificial Sequence
  Synthetic oligonucleotide
cgtgcgccccgcgatcggtttggatcttga

SEQ ID NO: 128006 - DNA, 30 bp, Artificial Sequence
  Synthetic oligonucleotide
tacggcagaatgcttgttgagttctcttga

SEQ ID NO: 128007 - DNA, 30 bp, Artificial Sequence
  Synthetic oligonucleotide
caggcgtcgtccattcttcccagttcttga

SEQ ID NO: 128008 - DNA, 31 bp, Artificial Sequence
  Synthetic oligonucleotide
catgcgtatggttcctgagaagagtagttga

SEQ ID NO: 128009 - DNA, 30 bp, Artificial Sequence
  Synthetic oligonucleotide
tctgagggggagttaataatgtcacgttga

SEQ ID NO: 128010 - DNA, 30 bp, Artificial Sequence
  Synthetic oligonucleotide
aagtttcgctcgtcgttggactggcgttga

SEQ ID NO: 128011 - DNA, 30 bp, Artificial Sequence
  Synthetic oligonucleotide
ctcaagaggcatttatgtaggcaaggttga

SEQ ID NO: 128012 - DNA, 30 bp, Artificial Sequence
  Synthetic oligonucleotide
cacccaggggggaaacggtaagagggttga

SEQ ID NO: 128013 - DNA, 30 bp, Artificial Sequence
  Synthetic oligonucleotide
cgaccctaacgtcggttaccgctatgttga

SEQ ID NO: 128014 - DNA, 30 bp, Artificial Sequence
  Synthetic oligonucleotide
agccggatggacgaaaccagtcactgttga

SEQ ID NO: 128015 - DNA, 30 bp, Artificial Sequence
  Synthetic oligonucleotide
gggaactcctgtccctagcaagactgttga

SEQ ID NO: 128016 - DNA, 30 bp, Artificial Sequence
  Synthetic oligonucleotide
tctcagggatttgaccgaaccagctgttga

SEQ ID NO: 128017 - DNA, 30 bp, Artificial Sequence
  Synthetic oligonucleotide
gtacagcttaggacaatgaatggctgttga

SEQ ID NO: 128018 - DNA, 30 bp, Artificial Sequence
  Synthetic oligonucleotide
ctgggagactgggagcgatattgctgttga

SEQ ID NO: 128019 - DNA, 30 bp, Artificial Sequence
  Synthetic oligonucleotide
acataggcgtgtgaaaagcacgattgttga

SEQ ID NO: 128020 - DNA, 30 bp, Artificial Sequence
  Synthetic oligonucleotide
ctgttggctgagtatgtcattaccatttga

SEQ ID NO: 128021 - DNA, 30 bp, Artificial Sequence
  Synthetic oligonucleotide
agcgatttagtcggtccactgtggatttga

SEQ ID NO: 128022 - DNA, 30 bp, Artificial Sequence
  Synthetic oligonucleotide
tcacctgcatacggaggcgcacgactttga

SEQ ID NO: 128023 - DNA, 30 bp, Artificial Sequence
  Synthetic oligonucleotide
acgtttcggtcgtgcttgattctagtttga

SEQ ID NO: 128024 - DNA, 30 bp, Artificial Sequence
  Synthetic oligonucleotide
gcctccagcaaagcattacaaaaggtttga

SEQ ID NO: 128025 - DNA, 30 bp, Artificial Sequence
  Synthetic oligonucleotide
ggggctcaccggattagcctaacggtttga

SEQ ID NO: 128026 - DNA, 30 bp, Artificial Sequence
  Synthetic oligonucleotide
gcgagctagagatacaatgtaacggtttga

SEQ ID NO: 128027 - DNA, 30 bp, Artificial Sequence
  Synthetic oligonucleotide
accaccctcgcataaatgactgatgtttga

SEQ ID NO: 128028 - DNA, 30 bp, Artificial Sequence
  Synthetic oligonucleotide
gaagggaaggcgcgtatataggaattttga

SEQ ID NO: 128029 - DNA, 30 bp, Artificial Sequence
  Synthetic oligonucleotide
atagggactgtggtattgtgcgtgttttga

SEQ ID NO: 128030 - DNA, 30 bp, Artificial Sequence
  Synthetic oligonucleotide
gtaacgggtatctccaaaggaacaaaaata

SEQ ID NO: 128031 - DNA, 30 bp, Artificial Sequence
  Synthetic oligonucleotide
ttacagaatgacccgtgacgtggaaaaata

SEQ ID NO: 128032 - DNA, 30 bp, Artificial Sequence
  Synthetic oligonucleotide
acgagttaagtgagattcctacacaaaata

SEQ ID NO: 128033 - DNA, 30 bp, Artificial Sequence
  Synthetic oligonucleotide
tcacaagtccgtagagttgtgcgcaaaata

SEQ ID NO: 128034 - DNA, 30 bp, Artificial Sequence
  Synthetic oligonucleotide
gttgagcctgttaaagtgcgatcgaaaata

SEQ ID NO: 128035 - DNA, 30 bp, Artificial Sequence
  Synthetic oligonucleotide
gagagtagaacgagtacgcatgctaaaata

SEQ ID NO: 128036 - DNA, 30 bp, Artificial Sequence
  Synthetic oligonucleotide
acacaaagactcgtttataaggttaaaata

SEQ ID NO: 128037 - DNA, 30 bp, Artificial Sequence
  Synthetic oligonucleotide
ggaaataaatagcaatgacattcacaaata

SEQ ID NO: 128038 - DNA, 30 bp, Artificial Sequence
  Synthetic oligonucleotide
tacgggaggggtacgtgttaggacgaaata

SEQ ID NO: 128039 - DNA, 30 bp, Artificial Sequence
  Synthetic oligonucleotide
taaagaccaagagctatgggcgcataaata

SEQ ID NO: 128040 - DNA, 30 bp, Artificial Sequence
  Synthetic oligonucleotide
aagggtcatggtgactatccctcataaata

SEQ ID NO: 128041 - DNA, 30 bp, Artificial Sequence
  Synthetic oligonucleotide
atgtctcgtaggatcaaacaatagtaaata

SEQ ID NO: 128042 - DNA, 30 bp, Artificial Sequence
  Synthetic oligonucleotide
atcgaatgctgggttcagtggataacaata

SEQ ID NO: 128043 - DNA, 30 bp, Artificial Sequence
  Synthetic oligonucleotide
cgtcgcaatgcttcaaatatgttcacaata

SEQ ID NO: 128044 - DNA, 30 bp, Artificial Sequence
  Synthetic oligonucleotide
agagtagtaaaaccagggcctcctacaata

SEQ ID NO: 128045 - DNA, 30 bp, Artificial Sequence
  Synthetic oligonucleotide
ggtggcggattacaatgataggctacaata

SEQ ID NO: 128046 - DNA, 30 bp, Artificial Sequence
  Synthetic oligonucleotide
aagatatatggaaaaaattaagtgccaata

SEQ ID NO: 128047 - DNA, 31 bp, Artificial Sequence
  Synthetic oligonucleotide
ctgaaggtaagtacgcacgggtaatccaata

SEQ ID NO: 128048 - DNA, 30 bp, Artificial Sequence
  Synthetic oligonucleotide
gagctggggggccaaggcaggtgagcaata

SEQ ID NO: 128049 - DNA, 30 bp, Artificial Sequence
  Synthetic oligonucleotide
tcactaccaaagggcaagataatcgcaata

SEQ ID NO: 128050 - DNA, 30 bp, Artificial Sequence
  Synthetic oligonucleotide
caggcacccttcagctttccttgggcaata

SEQ ID NO: 128051 - DNA, 30 bp, Artificial Sequence
  Synthetic oligonucleotide
cttagttctaaggtcatgaccatggcaata

SEQ ID NO: 128052 - DNA, 30 bp, Artificial Sequence
  Synthetic oligonucleotide
acagttagcgaaagctaggtggctgcaata

SEQ ID NO: 128053 - DNA, 30 bp, Artificial Sequence
  Synthetic oligonucleotide
aagccgaaaactcccttttaaagtgcaata

SEQ ID NO: 128054 - DNA, 30 bp, Artificial Sequence
  Synthetic oligonucleotide
gtgcccgccaatctaaattcgacatcaata

SEQ ID NO: 128055 - DNA, 30 bp, Artificial Sequence
  Synthetic oligonucleotide
tactcacagtcatctacgtggaactcaata

SEQ ID NO: 128056 - DNA, 30 bp, Artificial Sequence
  Synthetic oligonucleotide
tacttcgagacaacatcagtggcttcaata

SEQ ID NO: 128057 - DNA, 30 bp, Artificial Sequence
  Synthetic oligonucleotide
cagggggctgtgttcctataggaaagaata

SEQ ID NO: 128058 - DNA, 30 bp, Artificial Sequence
  Synthetic oligonucleotide
acctcacattccagcggcctacgaagaata

SEQ ID NO: 128059 - DNA, 30 bp, Artificial Sequence
  Synthetic oligonucleotide
ccaactaaggttggaacaatcagcagaata

SEQ ID NO: 128060 - DNA, 30 bp, Artificial Sequence
  Synthetic oligonucleotide
tctgacttgccgcctatcaagatgagaata

SEQ ID NO: 128061 - DNA, 30 bp, Artificial Sequence
  Synthetic oligonucleotide
acaacataaggggtcaacgaatgtagaata

SEQ ID NO: 128062 - DNA, 30 bp, Artificial Sequence
  Synthetic oligonucleotide
aagacaaagtcgtcttatgtagggcgaata

SEQ ID NO: 128063 - DNA, 30 bp, Artificial Sequence
  Synthetic oligonucleotide
tacggctattttctctctcgaaatcgaata

SEQ ID NO: 128064 - DNA, 30 bp, Artificial Sequence
  Synthetic oligonucleotide
tggtaccaaggtactccctaactcggaata

SEQ ID NO: 128065 - DNA, 30 bp, Artificial Sequence
  Synthetic oligonucleotide
taggaaacctatgacgtgtctaatggaata

SEQ ID NO: 128066 - DNA, 30 bp, Artificial Sequence
  Synthetic oligonucleotide
ctcagagtctttagctttcaaacatgaata

SEQ ID NO: 128067 - DNA, 30 bp, Artificial Sequence
  Synthetic oligonucleotide
ggagatggcactatgtatagtcggtgaata

SEQ ID NO: 128068 - DNA, 30 bp, Artificial Sequence
  Synthetic oligonucleotide
ggagaaagacaatttaaaatattgtgaata

SEQ ID NO: 128069 - DNA, 30 bp, Artificial Sequence
  Synthetic oligonucleotide
aatgtgtgataaacgagaagcagttgaata

SEQ ID NO: 128070 - DNA, 30 bp, Artificial Sequence
  Synthetic oligonucleotide
taccataaatgggctcgaggccgaataata

SEQ ID NO: 128071 - DNA, 30 bp, Artificial Sequence
  Synthetic oligonucleotide
aatcggcggattgctcgccaagcgataata

SEQ ID NO: 128072 - DNA, 30 bp, Artificial Sequence
  Synthetic oligonucleotide
ccgtctcatggccacataagtcctataata

SEQ ID NO: 128073 - DNA, 30 bp, Artificial Sequence
  Synthetic oligonucleotide
agtagcatcgccaagcccctcatgctaata

SEQ ID NO: 128074 - DNA, 30 bp, Artificial Sequence
  Synthetic oligonucleotide
aacgcaatgtgggatgactttattctaata

SEQ ID NO: 128075 - DNA, 30 bp, Artificial Sequence
  Synthetic oligonucleotide
tcaaacattaaagggaaccgagaagtaata

SEQ ID NO: 128076 - DNA, 30 bp, Artificial Sequence
  Synthetic oligonucleotide
acttgtcggagatttcagaattaagtaata

SEQ ID NO: 128077 - DNA, 30 bp, Artificial Sequence
  Synthetic oligonucleotide
gccagaatagtgttgagttatctcgtaata

SEQ ID NO: 128078 - DNA, 30 bp, Artificial Sequence
  Synthetic oligonucleotide
ggcccacagtacgatggtagtaagttaata

SEQ ID NO: 128079 - DNA, 30 bp, Artificial Sequence
  Synthetic oligonucleotide
ggacactaatagtacgctcaatcgttaata

SEQ ID NO: 128080 - DNA, 30 bp, Artificial Sequence
  Synthetic oligonucleotide
tgcgctcaacctcgtcagtgcactttaata

SEQ ID NO: 128081 - DNA, 30 bp, Artificial Sequence
  Synthetic oligonucleotide
aacactaatcgggaaggcggaaaaaacata

SEQ ID NO: 128082 - DNA, 30 bp, Artificial Sequence
  Synthetic oligonucleotide
ggctctgtaacatggggatcctcaaacata

SEQ ID NO: 128083 - DNA, 30 bp, Artificial Sequence
  Synthetic oligonucleotide
ataacagagcgtccggtagatttaaacata

SEQ ID NO: 128084 - DNA, 30 bp, Artificial Sequence
  Synthetic oligonucleotide
ggaccgacaggctaagttgggggcaacata

SEQ ID NO: 128085 - DNA, 30 bp, Artificial Sequence
  Synthetic oligonucleotide
aggggttcttatatagtgctgtggaacata

SEQ ID NO: 128086 - DNA, 30 bp, Artificial Sequence
  Synthetic oligonucleotide
cggaatagtgcgtccagcttatataacata

SEQ ID NO: 128087 - DNA, 30 bp, Artificial Sequence
  Synthetic oligonucleotide
ggcacgacatctaggctggaccgccacata

SEQ ID NO: 128088 - DNA, 30 bp, Artificial Sequence
  Synthetic oligonucleotide
tctggctggacacaactccacttccacata

SEQ ID NO: 128089 - DNA, 30 bp, Artificial Sequence
  Synthetic oligonucleotide
gtgggatgctcatatcttttgctgcacata

SEQ ID NO: 128090 - DNA, 30 bp, Artificial Sequence
  Synthetic oligonucleotide
gtgccgaatgagggcaatacttaagacata

SEQ ID NO: 128091 - DNA, 30 bp, Artificial Sequence
  Synthetic oligonucleotide
gctaagaataaaaccgtgagaatcgacata

SEQ ID NO: 128092 - DNA, 30 bp, Artificial Sequence
  Synthetic oligonucleotide
cgattgactaagctgctcgaatttgacata

SEQ ID NO: 128093 - DNA, 30 bp, Artificial Sequence
  Synthetic oligonucleotide
cgcatcaaacaggtcctactgtgatacata

SEQ ID NO: 128094 - DNA, 30 bp, Artificial Sequence
  Synthetic oligonucleotide
gtaggaccgctctgatcttcgttaaccata

SEQ ID NO: 128095 - DNA, 30 bp, Artificial Sequence
  Synthetic oligonucleotide
cttagctaagttaatcaaacgagcaccata

SEQ ID NO: 128096 - DNA, 30 bp, Artificial Sequence
  Synthetic oligonucleotide
aggggcccgggaccgcgtctaaagaccata

SEQ ID NO: 128097 - DNA, 30 bp, Artificial Sequence
  Synthetic oligonucleotide
gatcctaaaataaaggtgggcccctccata

SEQ ID NO: 128098 - DNA, 30 bp, Artificial Sequence
  Synthetic oligonucleotide
ccttccgaaaccaaacacgtgctttccata

SEQ ID NO: 128099 - DNA, 30 bp, Artificial Sequence
  Synthetic oligonucleotide
taatcggagagataggtgcccggcagcata

SEQ ID NO: 128100 - DNA, 30 bp, Artificial Sequence
  Synthetic oligonucleotide
tgtgagaggctgacgggggccatcagcata

SEQ ID NO: 128101 - DNA, 30 bp, Artificial Sequence
  Synthetic oligonucleotide
ggattccctgaacctagagatatacgcata

SEQ ID NO: 128102 - DNA, 30 bp, Artificial Sequence
  Synthetic oligonucleotide
cgtgccgaacgttcatgcagggtacgcata

SEQ ID NO: 128103 - DNA, 30 bp, Artificial Sequence
  Synthetic oligonucleotide
gaggaataatgtttaatactagggcgcata

SEQ ID NO: 128104 - DNA, 30 bp, Artificial Sequence
  Synthetic oligonucleotide
taacgagcactcccttgatcatgtggcata

SEQ ID NO: 128105 - DNA, 30 bp, Artificial Sequence
  Synthetic oligonucleotide
gtcgcgttcatcgggtaatatgcatgcata

SEQ ID NO: 128106 - DNA, 30 bp, Artificial Sequence
  Synthetic oligonucleotide
gtaaactagggggctctgcctctatgcata

SEQ ID NO: 128107 - DNA, 30 bp, Artificial Sequence
  Synthetic oligonucleotide
cacattgagaagtgcgccagtacctgcata

SEQ ID NO: 128108 - DNA, 30 bp, Artificial Sequence
  Synthetic oligonucleotide
atcgggtcgcataggatcctcaagtgcata

SEQ ID NO: 128109 - DNA, 30 bp, Artificial Sequence
  Synthetic oligonucleotide
ataggttataggttcaagtaagcgtgcata

SEQ ID NO: 128110 - DNA, 30 bp, Artificial Sequence
  Synthetic oligonucleotide
aatgaccaagattcaattaccaggtgcata

SEQ ID NO: 128111 - DNA, 31 bp, Artificial Sequence
  Synthetic oligonucleotide
tgtctagccaatggataaaatccggtgcata

SEQ ID NO: 128112 - DNA, 30 bp, Artificial Sequence
  Synthetic oligonucleotide
tacgctaggtattaggctcaacaaatcata

SEQ ID NO: 128113 - DNA, 29 bp, Artificial Sequence
  Synthetic oligonucleotide
tggagaatcgatagtttacgtcgatcata

SEQ ID NO: 128114 - DNA, 30 bp, Artificial Sequence
  Synthetic oligonucleotide
agtcagcttgtatgactagttcatatcata

SEQ ID NO: 128115 - DNA, 30 bp, Artificial Sequence
  Synthetic oligonucleotide
tccctagtaaagagcgagttgtgtatcata

SEQ ID NO: 128116 - DNA, 30 bp, Artificial Sequence
  Synthetic oligonucleotide
ggaaagagaaacaggctgcctgcactcata

SEQ ID NO: 128117 - DNA, 30 bp, Artificial Sequence
  Synthetic oligonucleotide
actatcgtggcgaacatatggtgtctcata

SEQ ID NO: 128118 - DNA, 30 bp, Artificial Sequence
  Synthetic oligonucleotide
ccgcacggccgtcccatatgttgtctcata

SEQ ID NO: 128119 - DNA, 30 bp, Artificial Sequence
  Synthetic oligonucleotide
gaagcatgaaagattcatggcctggtcata

SEQ ID NO: 128120 - DNA, 30 bp, Artificial Sequence
  Synthetic oligonucleotide
cgtcatgtccgtccttcatttcctgtcata

SEQ ID NO: 128121 - DNA, 30 bp, Artificial Sequence
  Synthetic oligonucleotide
gaaagattcacgtggtagtaaacgttcata

SEQ ID NO: 128122 - DNA, 30 bp, Artificial Sequence
  Synthetic oligonucleotide
aatatcgaacgttacgatccgcctttcata

SEQ ID NO: 128123 - DNA, 30 bp, Artificial Sequence
  Synthetic oligonucleotide
gacaacataaaggcatcgtctggaaagata

SEQ ID NO: 128124 - DNA, 30 bp, Artificial Sequence
  Synthetic oligonucleotide
gttgggctactttccggaaagagcaagata

SEQ ID NO: 128125 - DNA, 30 bp, Artificial Sequence
  Synthetic oligonucleotide
ttctgaccgcgtgctataagaagccagata

SEQ ID NO: 128126 - DNA, 30 bp, Artificial Sequence
  Synthetic oligonucleotide
aatagtaaggcatacggctaactgcagata

SEQ ID NO: 128127 - DNA, 30 bp, Artificial Sequence
  Synthetic oligonucleotide
ccacccgctagtcataccatatctcagata

SEQ ID NO: 128128 - DNA, 30 bp, Artificial Sequence
  Synthetic oligonucleotide
tcagccgcaccgcggaggaccggcgagata

SEQ ID NO: 128129 - DNA, 30 bp, Artificial Sequence
  Synthetic oligonucleotide
ggctagtagtatttcgggcatcgggagata

SEQ ID NO: 128130 - DNA, 30 bp, Artificial Sequence
  Synthetic oligonucleotide
tagtcaggttgtacaccatgcttggagata

SEQ ID NO: 128131 - DNA, 30 bp, Artificial Sequence
  Synthetic oligonucleotide
gcaccaagtgctgcggtattgccatagata

SEQ ID NO: 128132 - DNA, 30 bp, Artificial Sequence
  Synthetic oligonucleotide
gacggtcaagaacatccgaaccagtagata

SEQ ID NO: 128133 - DNA, 30 bp, Artificial Sequence
  Synthetic oligonucleotide
ccagaacctcaaaacaggctcgagtagata

SEQ ID NO: 128134 - DNA, 30 bp, Artificial Sequence
  Synthetic oligonucleotide
ctcatgcaacgagcaaataaaatgtagata

SEQ ID NO: 128135 - DNA, 30 bp, Artificial Sequence
  Synthetic oligonucleotide
tgttacccatgcaaagagagatgcacgata

SEQ ID NO: 128136 - DNA, 30 bp, Artificial Sequence
  Synthetic oligonucleotide
agactatactcctatctcattaatacgata

SEQ ID NO: 128137 - DNA, 30 bp, Artificial Sequence
  Synthetic oligonucleotide
gagcacttggcgaccaaggccactacgata

SEQ ID NO: 128138 - DNA, 30 bp, Artificial Sequence
  Synthetic oligonucleotide
caaaatggcagaatacagaccgttacgata

SEQ ID NO: 128139 - DNA, 30 bp, Artificial Sequence
  Synthetic oligonucleotide
ttgaggtaacgactaacacgcaaaccgata

SEQ ID NO: 128140 - DNA, 30 bp, Artificial Sequence
  Synthetic oligonucleotide
accgctggagtggaaagctcgaaaccgata

SEQ ID NO: 128141 - DNA, 30 bp, Artificial Sequence
  Synthetic oligonucleotide
aacacgtcatcgaaggaggtcgaaccgata

SEQ ID NO: 128142 - DNA, 30 bp, Artificial Sequence
  Synthetic oligonucleotide
tcttggccagtggtaaaaatcagggcgata

SEQ ID NO: 128143 - DNA, 30 bp, Artificial Sequence
  Synthetic oligonucleotide
ggatcatttagcgtaaaggctgtggcgata

SEQ ID NO: 128144 - DNA, 30 bp, Artificial Sequence
  Synthetic oligonucleotide
agatgcatctagcggttatatccctcgata

SEQ ID NO: 128145 - DNA, 30 bp, Artificial Sequence
  Synthetic oligonucleotide
actgacgagtaacaggccatacattcgata

SEQ ID NO: 128146 - DNA, 30 bp, Artificial Sequence
  Synthetic oligonucleotide
tgatacggctaccgacattcggacaggata

SEQ ID NO: 128147 - DNA, 30 bp, Artificial Sequence
  Synthetic oligonucleotide
agagggcggggcaacgcagaaccacggata

SEQ ID NO: 128148 - DNA, 30 bp, Artificial Sequence
  Synthetic oligonucleotide
cgtgtgcgattttcgaacacaggacggata

SEQ ID NO: 128149 - DNA, 30 bp, Artificial Sequence
  Synthetic oligonucleotide
ctggacgggtcatcgcgacctaagcggata

SEQ ID NO: 128150 - DNA, 30 bp, Artificial Sequence
  Synthetic oligonucleotide
ccgttgcgcatctccaatggcatgcggata

SEQ ID NO: 128151 - DNA, 30 bp, Artificial Sequence
  Synthetic oligonucleotide
ggatcacgacgacatataggagtgcggata

SEQ ID NO: 128152 - DNA, 30 bp, Artificial Sequence
  Synthetic oligonucleotide
taagaggtgagacttcagtccgatcggata

SEQ ID NO: 128153 - DNA, 30 bp, Artificial Sequence
  Synthetic oligonucleotide
caaaagcgattgggacaggatccagggata

SEQ ID NO: 128154 - DNA, 30 bp, Artificial Sequence
  Synthetic oligonucleotide
tagataaatggtgtccgatccagagggata

SEQ ID NO: 128155 - DNA, 30 bp, Artificial Sequence
  Synthetic oligonucleotide
gaaagggaccgacagcgcaaaatagggata

SEQ ID NO: 128156 - DNA, 30 bp, Artificial Sequence
  Synthetic oligonucleotide
gctggggttgtttgaccaggtgtagggata

SEQ ID NO: 128157 - DNA, 30 bp, Artificial Sequence
  Synthetic oligonucleotide
ggtagaagcgccgtcacgtcgtagtggata

SEQ ID NO: 128158 - DNA, 30 bp, Artificial Sequence
  Synthetic oligonucleotide
ggaaagatcaaacaggtttaaaaaatgata

SEQ ID NO: 128159 - DNA, 30 bp, Artificial Sequence
  Synthetic oligonucleotide
tcgggataccttggctcagaggaaatgata

SEQ ID NO: 128160 - DNA, 30 bp, Artificial Sequence
  Synthetic oligonucleotide
taagaagcggttgagtgcggatcaatgata

SEQ ID NO: 128161 - DNA, 30 bp, Artificial Sequence
  Synthetic oligonucleotide
tcgggcagtacaacccatctaaccatgata

SEQ ID NO: 128162 - DNA, 30 bp, Artificial Sequence
  Synthetic oligonucleotide
gccgtaagagcgcttatgaggtggatgata

SEQ ID NO: 128163 - DNA, 30 bp, Artificial Sequence
  Synthetic oligonucleotide
atcatggatgccgggaccccacatctgata

SEQ ID NO: 128164 - DNA, 30 bp, Artificial Sequence
  Synthetic oligonucleotide
ggaaggatattcacgtatgttaaagtgata

SEQ ID NO: 128165 - DNA, 30 bp, Artificial Sequence
  Synthetic oligonucleotide
tggagcgaggtcagttaatatcgagtgata

SEQ ID NO: 128166 - DNA, 30 bp, Artificial Sequence
  Synthetic oligonucleotide
aaatcgtgcggggtgtacgatcaggtgata

SEQ ID NO: 128167 - DNA, 30 bp, Artificial Sequence
  Synthetic oligonucleotide
agtcaaactcgagggttatctactgtgata

SEQ ID NO: 128168 - DNA, 30 bp, Artificial Sequence
  Synthetic oligonucleotide
tcagtccgcgccacacggatataattgata

SEQ ID NO: 128169 - DNA, 30 bp, Artificial Sequence
  Synthetic oligonucleotide
acagcagtgggaagtccaacaggattgata

SEQ ID NO: 128170 - DNA, 30 bp, Artificial Sequence
  Synthetic oligonucleotide
tctgaccactcacgtttaagaatcttgata

SEQ ID NO: 128171 - DNA, 30 bp, Artificial Sequence
  Synthetic oligonucleotide
tgaaaagaaataaggaatgtcggcaatata

SEQ ID NO: 128172 - DNA, 30 bp, Artificial Sequence
  Synthetic oligonucleotide
cttgacctggagccacgagattagaatata

SEQ ID NO: 128173 - DNA, 30 bp, Artificial Sequence
  Synthetic oligonucleotide
ctggagttgtgaatcagcacggaacatata

SEQ ID NO: 128174 - DNA, 30 bp, Artificial Sequence
  Synthetic oligonucleotide
acgtcgtttaaagggcgacccctagatata

SEQ ID NO: 128175 - DNA, 30 bp, Artificial Sequence
  Synthetic oligonucleotide
aaatggtgcacgcataaagaacgcgatata

SEQ ID NO: 128176 - DNA, 30 bp, Artificial Sequence
  Synthetic oligonucleotide
tcgaaagcgagcagatttaccgctgatata

SEQ ID NO: 128177 - DNA, 30 bp, Artificial Sequence
  Synthetic oligonucleotide
gcagcgtgcatcctgaatagaccaactata

SEQ ID NO: 128178 - DNA, 30 bp, Artificial Sequence
  Synthetic oligonucleotide
gtaaaggtaataaacgggcgtgcaactata

SEQ ID NO: 128179 - DNA, 30 bp, Artificial Sequence
  Synthetic oligonucleotide
gagccacatggctaaaggtctggaactata

SEQ ID NO: 128180 - DNA, 30 bp, Artificial Sequence
  Synthetic oligonucleotide
cgaggtcccaactgacgagagggtactata

SEQ ID NO: 128181 - DNA, 30 bp, Artificial Sequence
  Synthetic oligonucleotide
ccagcagtaccacttcaataatgtactata

SEQ ID NO: 128182 - DNA, 30 bp, Artificial Sequence
  Synthetic oligonucleotide
tcgtcaagacgattttagagtgaacctata

SEQ ID NO: 128183 - DNA, 30 bp, Artificial Sequence
  Synthetic oligonucleotide
gtaagagcttttgaactaaccatgcctata

SEQ ID NO: 128184 - DNA, 30 bp, Artificial Sequence
  Synthetic oligonucleotide
gtagatcatagaacatataaaatagctata

SEQ ID NO: 128185 - DNA, 30 bp, Artificial Sequence
  Synthetic oligonucleotide
gtaagcacactgtgttcagtacaggctata

SEQ ID NO: 128186 - DNA, 30 bp, Artificial Sequence
  Synthetic oligonucleotide
cagaagcgcaatgtgggggaaacggctata

SEQ ID NO: 128187 - DNA, 30 bp, Artificial Sequence
  Synthetic oligonucleotide
acgctagggtgactcaaactctcggctata

SEQ ID NO: 128188 - DNA, 30 bp, Artificial Sequence
  Synthetic oligonucleotide
atgcggtgtaaccctcagtatggggctata

SEQ ID NO: 128189 - DNA, 30 bp, Artificial Sequence
  Synthetic oligonucleotide
tcgggggaccgtaggacatggagtgctata

SEQ ID NO: 128190 - DNA, 30 bp, Artificial Sequence
  Synthetic oligonucleotide
ggtagagcaccgccttatgtgaaaagtata

SEQ ID NO: 128191 - DNA, 30 bp, Artificial Sequence
  Synthetic oligonucleotide
acgtcagacatcccaaaaatacaaagtata

SEQ ID NO: 128192 - DNA, 30 bp, Artificial Sequence
  Synthetic oligonucleotide
ataagagacattacagatgaccaaagtata

SEQ ID NO: 128193 - DNA, 30 bp, Artificial Sequence
  Synthetic oligonucleotide
aagtgtgaatgccctgattcggaaagtata

SEQ ID NO: 128194 - DNA, 30 bp, Artificial Sequence
  Synthetic oligonucleotide
gtaatccatcatccgcggatcagaagtata

SEQ ID NO: 128195 - DNA, 30 bp, Artificial Sequence
  Synthetic oligonucleotide
cagcgccgaattactaagctacacagtata

SEQ ID NO: 128196 - DNA, 30 bp, Artificial Sequence
  Synthetic oligonucleotide
gcatgaaatgccaagtgcgatgggagtata

SEQ ID NO: 128197 - DNA, 30 bp, Artificial Sequence
  Synthetic oligonucleotide
cgccgacgaacccctagacagggacgtata

SEQ ID NO: 128198 - DNA, 30 bp, Artificial Sequence
  Synthetic oligonucleotide
atacgttactgcgtgacaggaaagcgtata

SEQ ID NO: 128199 - DNA, 30 bp, Artificial Sequence
  Synthetic oligonucleotide
tgcgctgagaagaatgaggggccgcgtata

SEQ ID NO: 128200 - DNA, 30 bp, Artificial Sequence
  Synthetic oligonucleotide
tgaaagagccaggtagcgttaaggcgtata

SEQ ID NO: 128201 - DNA, 30 bp, Artificial Sequence
  Synthetic oligonucleotide
aaatcggtgcgccaagttctaagtcgtata

SEQ ID NO: 128202 - DNA, 30 bp, Artificial Sequence
  Synthetic oligonucleotide
ctgcgtcggaaaatagctgttcgaggtata

SEQ ID NO: 128203 - DNA, 30 bp, Artificial Sequence
  Synthetic oligonucleotide
ggatatgcgaaatcccgctcatgaggtata

SEQ ID NO: 128204 - DNA, 30 bp, Artificial Sequence
  Synthetic oligonucleotide
acagtcgaggggtgtgagtgtccgtgtata

SEQ ID NO: 128205 - DNA, 30 bp, Artificial Sequence
  Synthetic oligonucleotide
aatggcagcttacggactaggcggtgtata

SEQ ID NO: 128206 - DNA, 30 bp, Artificial Sequence
  Synthetic oligonucleotide
cggtgaagaaatagttcagcactttgtata

SEQ ID NO: 128207 - DNA, 30 bp, Artificial Sequence
  Synthetic oligonucleotide
aggtattatggtccagcgaaacacattata

SEQ ID NO: 128208 - DNA, 30 bp, Artificial Sequence
  Synthetic oligonucleotide
cgaggaggaatatgctgcacatgcattata

SEQ ID NO: 128209 - DNA, 30 bp, Artificial Sequence
  Synthetic oligonucleotide
cgaaaacattgaggtgatgatctcattata

SEQ ID NO: 128210 - DNA, 30 bp, Artificial Sequence
  Synthetic oligonucleotide
atctcagcaaagagcctagacgaccttata

SEQ ID NO: 128211 - DNA, 30 bp, Artificial Sequence
  Synthetic oligonucleotide
tggtaaagggttgggatgttttgccttata

SEQ ID NO: 128212 - DNA, 30 bp, Artificial Sequence
  Synthetic oligonucleotide
gtcacaagcgcatatcgctgtagagttata

SEQ ID NO: 128213 - DNA, 30 bp, Artificial Sequence
  Synthetic oligonucleotide
gaactggacgaaaggactttagatgttata

SEQ ID NO: 128214 - DNA, 30 bp, Artificial Sequence
  Synthetic oligonucleotide
tcaagggaaagctgcaggtcatgttttata

SEQ ID NO: 128215 - DNA, 30 bp, Artificial Sequence
  Synthetic oligonucleotide
aaaaccgtccgcacatgaaaggcaaaacta

SEQ ID NO: 128216 - DNA, 30 bp, Artificial Sequence
  Synthetic oligonucleotide
cctgcgatccgtctgaggctcataaaacta

SEQ ID NO: 128217 - DNA, 30 bp, Artificial Sequence
  Synthetic oligonucleotide
aatggggagaacacgcaatcaggcaaacta

SEQ ID NO: 128218 - DNA, 30 bp, Artificial Sequence
  Synthetic oligonucleotide
atgtaccatacattggtctaaaggcaacta

SEQ ID NO: 128219 - DNA, 30 bp, Artificial Sequence
  Synthetic oligonucleotide
ccgatcaagatagctcaagtcttgcaacta

SEQ ID NO: 128220 - DNA, 30 bp, Artificial Sequence
  Synthetic oligonucleotide
tgtagcgacaggagagtgggggcagaacta

SEQ ID NO: 128221 - DNA, 30 bp, Artificial Sequence
  Synthetic oligonucleotide
tgcactggtaaaactggtacttcggaacta

SEQ ID NO: 128222 - DNA, 30 bp, Artificial Sequence
  Synthetic oligonucleotide
taagccaccagaagcttacgtcatgaacta

SEQ ID NO: 128223 - DNA, 30 bp, Artificial Sequence
  Synthetic oligonucleotide
caccacgcgccgggtgagaggctataacta

SEQ ID NO: 128224 - DNA, 30 bp, Artificial Sequence
  Synthetic oligonucleotide
caggtgcctcggtaatcagtcttataacta

SEQ ID NO: 128225 - DNA, 30 bp, Artificial Sequence
  Synthetic oligonucleotide
accgagcatgtggcacaaaaagggtaacta

SEQ ID NO: 128226 - DNA, 30 bp, Artificial Sequence
  Synthetic oligonucleotide
atctatgccgacgggcaggccggttaacta

SEQ ID NO: 128227 - DNA, 30 bp, Artificial Sequence
  Synthetic oligonucleotide
ccgcgtgggttatctattactgcgacacta

SEQ ID NO: 128228 - DNA, 30 bp, Artificial Sequence
  Synthetic oligonucleotide
taggccggaattgctaattcaggtacacta

SEQ ID NO: 128229 - DNA, 30 bp, Artificial Sequence
  Synthetic oligonucleotide
ccgtaagcgcagtcgctatgcatgccacta

SEQ ID NO: 128230 - DNA, 30 bp, Artificial Sequence
  Synthetic oligonucleotide
gttgagcataaaagcagtgtaggtccacta

SEQ ID NO: 128231 - DNA, 30 bp, Artificial Sequence
  Synthetic oligonucleotide
tgtacctcggtcggaacggactgtccacta

SEQ ID NO: 128232 - DNA, 30 bp, Artificial Sequence
  Synthetic oligonucleotide
tttaacgtgacggaatgcaattcagcacta

SEQ ID NO: 128233 - DNA, 30 bp, Artificial Sequence
  Synthetic oligonucleotide
gagagacaaacgtaacgccttgtagcacta

SEQ ID NO: 128234 - DNA, 30 bp, Artificial Sequence
  Synthetic oligonucleotide
cgcgtagagtatgacggcgcgggggcacta

SEQ ID NO: 128235 - DNA, 30 bp, Artificial Sequence
  Synthetic oligonucleotide
aagtataagggtcagggtacgatggcacta

SEQ ID NO: 128236 - DNA, 30 bp, Artificial Sequence
  Synthetic oligonucleotide
cggataccaaagtggcaaattagatcacta

SEQ ID NO: 128237 - DNA, 30 bp, Artificial Sequence
  Synthetic oligonucleotide
tcgatttcgtggcgagatgcgaactcacta

SEQ ID NO: 128238 - DNA, 30 bp, Artificial Sequence
  Synthetic oligonucleotide
gactggtaatccaaggcaggatactcacta

SEQ ID NO: 128239 - DNA, 30 bp, Artificial Sequence
  Synthetic oligonucleotide
gttactacaagagagaaggcaacaagacta

SEQ ID NO: 128240 - DNA, 30 bp, Artificial Sequence
  Synthetic oligonucleotide
cgggtttgctttagcggtccaaccagacta

SEQ ID NO: 128241 - DNA, 30 bp, Artificial Sequence
  Synthetic oligonucleotide
tgtggcagatgtcatacgcgacaacgacta

SEQ ID NO: 128242 - DNA, 30 bp, Artificial Sequence
  Synthetic oligonucleotide
acgacgactaaaccatgtccagcccgacta

SEQ ID NO: 128243 - DNA, 30 bp, Artificial Sequence
  Synthetic oligonucleotide
gaaggacatataatgatgcaccctcgacta

SEQ ID NO: 128244 - DNA, 30 bp, Artificial Sequence
  Synthetic oligonucleotide
cggtaggtccccgtagaaattcaaggacta

SEQ ID NO: 128245 - DNA, 30 bp, Artificial Sequence
  Synthetic oligonucleotide
ccatacaaatataagcgtcggacaggacta

SEQ ID NO: 128246 - DNA, 30 bp, Artificial Sequence
  Synthetic oligonucleotide
agttatgcgcgggtgggaaatcagtgacta

SEQ ID NO: 128247 - DNA, 30 bp, Artificial Sequence
  Synthetic oligonucleotide
caaaaattcaataagggcagcatgtgacta

SEQ ID NO: 128248 - DNA, 30 bp, Artificial Sequence
  Synthetic oligonucleotide
tcaggtaaggccggtgctgttccttgacta

SEQ ID NO: 128249 - DNA, 30 bp, Artificial Sequence
  Synthetic oligonucleotide
cttggataccacggaaactacaccatacta

SEQ ID NO: 128250 - DNA, 30 bp, Artificial Sequence
  Synthetic oligonucleotide
ctggagtaaacacactcgtcagggatacta

SEQ ID NO: 128251 - DNA, 30 bp, Artificial Sequence
  Synthetic oligonucleotide
caaattatgaagagccctcgcggtatacta

SEQ ID NO: 128252 - DNA, 30 bp, Artificial Sequence
  Synthetic oligonucleotide
acgctttgcacattggttacttcactacta

SEQ ID NO: 128253 - DNA, 30 bp, Artificial Sequence
  Synthetic oligonucleotide
ctaagcagttacggacttgtgcacctacta

SEQ ID NO: 128254 - DNA, 30 bp, Artificial Sequence
  Synthetic oligonucleotide
gggagagccgacgggcatactcggctacta

SEQ ID NO: 128255 - DNA, 30 bp, Artificial Sequence
  Synthetic oligonucleotide
cgagtagaaactaatacagaaattctacta

SEQ ID NO: 128256 - DNA, 30 bp, Artificial Sequence
  Synthetic oligonucleotide
atcgttaggtgtctaataataccagtacta

SEQ ID NO: 128257 - DNA, 30 bp, Artificial Sequence
  Synthetic oligonucleotide
aaggcaaggtagacgtatatacgagtacta

SEQ ID NO: 128258 - DNA, 30 bp, Artificial Sequence
  Synthetic oligonucleotide
tcgaaccgagccccaccacccaacgtacta

SEQ ID NO: 128259 - DNA, 30 bp, Artificial Sequence
  Synthetic oligonucleotide
aactgagagtaccggagtcgcttggtacta

SEQ ID NO: 128260 - DNA, 30 bp, Artificial Sequence
  Synthetic oligonucleotide
agtcattctcacccaccttcctatgtacta

SEQ ID NO: 128261 - DNA, 30 bp, Artificial Sequence
  Synthetic oligonucleotide
ccgggggcgctgcggttccaaagattacta

SEQ ID NO: 128262 - DNA, 30 bp, Artificial Sequence
  Synthetic oligonucleotide
aatcgaaaaagttaccgggtaacgttacta

SEQ ID NO: 128263 - DNA, 30 bp, Artificial Sequence
  Synthetic oligonucleotide
attgggtgacgtgtcacgtggcggttacta

SEQ ID NO: 128264 - DNA, 30 bp, Artificial Sequence
  Synthetic oligonucleotide
tgaatgacacaagcccgatgagggttacta

SEQ ID NO: 128265 - DNA, 30 bp, Artificial Sequence
  Synthetic oligonucleotide
gatgacaaagtacagcgtaggcaaaaccta

SEQ ID NO: 128266 - DNA, 30 bp, Artificial Sequence
  Synthetic oligonucleotide
cattaatagagttgatccgcaagccaccta

SEQ ID NO: 128267 - DNA, 30 bp, Artificial Sequence
  Synthetic oligonucleotide
catgtgcgtttaatctggtggctgcaccta

SEQ ID NO: 128268 - DNA, 30 bp, Artificial Sequence
  Synthetic oligonucleotide
cacgacctagggtagtgcgtgaaagaccta

SEQ ID NO: 128269 - DNA, 29 bp, Artificial Sequence
  Synthetic oligonucleotide
caccagagcgaacagacagggcagaccta

SEQ ID NO: 128270 - DNA, 30 bp, Artificial Sequence
  Synthetic oligonucleotide
aaattcaggaacattcacagaagagaccta

SEQ ID NO: 128271 - DNA, 30 bp, Artificial Sequence
  Synthetic oligonucleotide
ggggcacagccaggatcactagtcgaccta

SEQ ID NO: 128272 - DNA, 30 bp, Artificial Sequence
  Synthetic oligonucleotide
gctacacgaattgctcatcaacgggaccta

SEQ ID NO: 128273 - DNA, 30 bp, Artificial Sequence
  Synthetic oligonucleotide
gctcagtacgtcacatcgaggtctgaccta

SEQ ID NO: 128274 - DNA, 30 bp, Artificial Sequence
  Synthetic oligonucleotide
atggggcatgtggatgttgcagaaacccta

SEQ ID NO: 128275 - DNA, 30 bp, Artificial Sequence
  Synthetic oligonucleotide
aagcgaccctagcagtcagatcacacccta

SEQ ID NO: 128276 - DNA, 30 bp, Artificial Sequence
  Synthetic oligonucleotide
gagcatggtgaggcttaccggaagacccta

SEQ ID NO: 128277 - DNA, 30 bp, Artificial Sequence
  Synthetic oligonucleotide
ttgtattgaggaaatcggctatcgacccta

SEQ ID NO: 128278 - DNA, 30 bp, Artificial Sequence
  Synthetic oligonucleotide
acgttagcacgaaccgacatccttccccta

SEQ ID NO: 128279 - DNA, 30 bp, Artificial Sequence
  Synthetic oligonucleotide
aacaagcgagcaggtagagaatgcgcccta

SEQ ID NO: 128280 - DNA, 30 bp, Artificial Sequence
  Synthetic oligonucleotide
gaggacagtgtgcccgagaatacggcccta

SEQ ID NO: 128281 - DNA, 30 bp, Artificial Sequence
  Synthetic oligonucleotide
gcgatggtttggtatctgaactgtgcccta

SEQ ID NO: 128282 - DNA, 30 bp, Artificial Sequence
  Synthetic oligonucleotide
cgtatgatgtcgggtggaacgatatcccta

SEQ ID NO: 128283 - DNA, 30 bp, Artificial Sequence
  Synthetic oligonucleotide
cgcggtcgaaccccgggtacgatgtcccta

SEQ ID NO: 128284 - DNA, 30 bp, Artificial Sequence
  Synthetic oligonucleotide
ccacgacttaatgatacctgggtccgccta

SEQ ID NO: 128285 - DNA, 30 bp, Artificial Sequence
  Synthetic oligonucleotide
cccccgtcgcctaagggcagatgtcgccta

SEQ ID NO: 128286 - DNA, 30 bp, Artificial Sequence
  Synthetic oligonucleotide
ggtctgggagaggtggacgtaagaggccta

SEQ ID NO: 128287 - DNA, 30 bp, Artificial Sequence
  Synthetic oligonucleotide
taaagcaatatgtgtcaagggagcggccta

SEQ ID NO: 128288 - DNA, 30 bp, Artificial Sequence
  Synthetic oligonucleotide
cgtctcttggccagtaaaaataggggccta

SEQ ID NO: 128289 - DNA, 30 bp, Artificial Sequence
  Synthetic oligonucleotide
gacggaatcttgaccagcgtatgtggccta

SEQ ID NO: 128290 - DNA, 30 bp, Artificial Sequence
  Synthetic oligonucleotide
cagtaagaataacccgcataatactgccta

SEQ ID NO: 128291 - DNA, 30 bp, Artificial Sequence
  Synthetic oligonucleotide
agagcgggaatgaccaagtcgcaaatccta

SEQ ID NO: 128292 - DNA, 30 bp, Artificial Sequence
  Synthetic oligonucleotide
ccaccgctgccagaatcacgtagaatccta

SEQ ID NO: 128293 - DNA, 30 bp, Artificial Sequence
  Synthetic oligonucleotide
cgtggaaggcactgtttgggatacatccta

SEQ ID NO: 128294 - DNA, 30 bp, Artificial Sequence
  Synthetic oligonucleotide
ggagagaggattataacttcagggatccta

SEQ ID NO: 128295 - DNA, 30 bp, Artificial Sequence
  Synthetic oligonucleotide
aggcactacttcacgtgacatcatatccta

SEQ ID NO: 128296 - DNA, 30 bp, Artificial Sequence
  Synthetic oligonucleotide
gggggcgatctaattctaccgtttatccta

SEQ ID NO: 128297 - DNA, 30 bp, Artificial Sequence
  Synthetic oligonucleotide
gaagttaccgtcaagtctaatggcctccta

SEQ ID NO: 128298 - DNA, 30 bp, Artificial Sequence
  Synthetic oligonucleotide
ctacttctggcagagtagtcacaagtccta

SEQ ID NO: 128299 - DNA, 30 bp, Artificial Sequence
  Synthetic oligonucleotide
agtcaagaaaaagtggacgtgcacgtccta

SEQ ID NO: 128300 - DNA, 30 bp, Artificial Sequence
  Synthetic oligonucleotide
gggtggtggcatcgttcgccgagcttccta

SEQ ID NO: 128301 - DNA, 30 bp, Artificial Sequence
  Synthetic oligonucleotide
ccgaggcagggattattatgaggaaagcta

SEQ ID NO: 128302 - DNA, 30 bp, Artificial Sequence
  Synthetic oligonucleotide
taccggaacatcctagttggcaccaagcta

SEQ ID NO: 128303 - DNA, 30 bp, Artificial Sequence
  Synthetic oligonucleotide
taagacaaggagggccatagtacgaagcta

SEQ ID NO: 128304 - DNA, 30 bp, Artificial Sequence
  Synthetic oligonucleotide
ttggtctcaggtgggcaggtccggaagcta

SEQ ID NO: 128305 - DNA, 30 bp, Artificial Sequence
  Synthetic oligonucleotide
gggctttgctaagttggacatggtaagcta

SEQ ID NO: 128306 - DNA, 30 bp, Artificial Sequence
  Synthetic oligonucleotide
tctcgatggctgcgtggctgtgtccagcta

SEQ ID NO: 128307 - DNA, 30 bp, Artificial Sequence
  Synthetic oligonucleotide
gttggcgaactcaataggccacatcagcta

SEQ ID NO: 128308 - DNA, 30 bp, Artificial Sequence
  Synthetic oligonucleotide
gccaccatagcacaaacagattttcagcta

SEQ ID NO: 128309 - DNA, 30 bp, Artificial Sequence
  Synthetic oligonucleotide
ttggtctataattagactacacgagagcta

SEQ ID NO: 128310 - DNA, 30 bp, Artificial Sequence
  Synthetic oligonucleotide
tctgagatacgcggacttagtggagagcta

SEQ ID NO: 128311 - DNA, 30 bp, Artificial Sequence
  Synthetic oligonucleotide
ctaacaccccgaaaggatgaccgatagcta

SEQ ID NO: 128312 - DNA, 30 bp, Artificial Sequence
  Synthetic oligonucleotide
gacatcgtcacgatggtagagggatagcta

SEQ ID NO: 128313 - DNA, 30 bp, Artificial Sequence
  Synthetic oligonucleotide
cctggaagcaattccgaagttccgtagcta

SEQ ID NO: 128314 - DNA, 30 bp, Artificial Sequence
  Synthetic oligonucleotide
caagaccgactaggtaggccattgtagcta

SEQ ID NO: 128315 - DNA, 30 bp, Artificial Sequence
  Synthetic oligonucleotide
ggagtgtcacccaactgagtgttgtagcta

SEQ ID NO: 128316 - DNA, 30 bp, Artificial Sequence
  Synthetic oligonucleotide
gcctttggacatgacggaatgagttagcta

SEQ ID NO: 128317 - DNA, 30 bp, Artificial Sequence
  Synthetic oligonucleotide
tggacctggtttcgttttagtcctgcgcta

SEQ ID NO: 128318 - DNA, 30 bp, Artificial Sequence
  Synthetic oligonucleotide
caggaaatcaacagcgacgagttttcgcta

SEQ ID NO: 128319 - DNA, 30 bp, Artificial Sequence
  Synthetic oligonucleotide
ggcgtaaatttggtagacaactaaaggcta

SEQ ID NO: 128320 - DNA, 30 bp, Artificial Sequence
  Synthetic oligonucleotide
gacaggttatgagcggaagactataggcta

SEQ ID NO: 128321 - DNA, 30 bp, Artificial Sequence
  Synthetic oligonucleotide
gattaaggagaatcccatgaagctcggcta

SEQ ID NO: 128322 - DNA, 30 bp, Artificial Sequence
  Synthetic oligonucleotide
agcctcaacttgctgaatggccgtcggcta

SEQ ID NO: 128323 - DNA, 30 bp, Artificial Sequence
  Synthetic oligonucleotide
cccgactatgaacgtagttgtgcggggcta

SEQ ID NO: 128324 - DNA, 30 bp, Artificial Sequence
  Synthetic oligonucleotide
cgatagcaagtgagcatggtctatgggcta

SEQ ID NO: 128325 - DNA, 30 bp, Artificial Sequence
  Synthetic oligonucleotide
gcatacaacctaacattaaataactggcta

SEQ ID NO: 128326 - DNA, 30 bp, Artificial Sequence
  Synthetic oligonucleotide
tcttagactacacgtacatcgagttggcta

SEQ ID NO: 128327 - DNA, 30 bp, Artificial Sequence
  Synthetic oligonucleotide
ggtagaaaggtgtcacattcgtaaatgcta

SEQ ID NO: 128328 - DNA, 30 bp, Artificial Sequence
  Synthetic oligonucleotide
ccgttatgtgataatcatagctacatgcta

SEQ ID NO: 128329 - DNA, 30 bp, Artificial Sequence
  Synthetic oligonucleotide
caaataatcgtgaccacttgcatcctgcta

SEQ ID NO: 128330 - DNA, 30 bp, Artificial Sequence
  Synthetic oligonucleotide
gtacgaccgccaggtctacctaagctgcta

SEQ ID NO: 128331 - DNA, 30 bp, Artificial Sequence
  Synthetic oligonucleotide
gcactagatccttggtgcagagttctgcta

SEQ ID NO: 128332 - DNA, 31 bp, Artificial Sequence
  Synthetic oligonucleotide
atgagtgcacaatcggggtgatagagtgcta

SEQ ID NO: 128333 - DNA, 30 bp, Artificial Sequence
  Synthetic oligonucleotide
agggccgatttcggctgctacaagaatcta

SEQ ID NO: 128334 - DNA, 30 bp, Artificial Sequence
  Synthetic oligonucleotide
gggttaggagagtagggactatataatcta

SEQ ID NO: 128335 - DNA, 30 bp, Artificial Sequence
  Synthetic oligonucleotide
tatcagacactgccccgaccgacacatcta

SEQ ID NO: 128336 - DNA, 30 bp, Artificial Sequence
  Synthetic oligonucleotide
taaaacaccagccagtcgttatcccatcta

SEQ ID NO: 128337 - DNA, 30 bp, Artificial Sequence
  Synthetic oligonucleotide
caacagataaccgaacaccgtccgcatcta

SEQ ID NO: 128338 - DNA, 30 bp, Artificial Sequence
  Synthetic oligonucleotide
ttggggccatttccgcacacgggagatcta

SEQ ID NO: 128339 - DNA, 30 bp, Artificial Sequence
  Synthetic oligonucleotide
catattacatggatcaaccacgtagatcta

SEQ ID NO: 128340 - DNA, 30 bp, Artificial Sequence
  Synthetic oligonucleotide
gggatctagtgtcgaaactagttagatcta

SEQ ID NO: 128341 - DNA, 30 bp, Artificial Sequence
  Synthetic oligonucleotide
acgcctaacgagcggggtccgatcgatcta

SEQ ID NO: 128342 - DNA, 30 bp, Artificial Sequence
  Synthetic oligonucleotide
gcgatccaattaaccaacaggcggtatcta

SEQ ID NO: 128343 - DNA, 30 bp, Artificial Sequence
  Synthetic oligonucleotide
gaaacaggagttacgacggtaatgtatcta

SEQ ID NO: 128344 - DNA, 30 bp, Artificial Sequence
  Synthetic oligonucleotide
ggacctaggcatggatatgttttgactcta

SEQ ID NO: 128345 - DNA, 30 bp, Artificial Sequence
  Synthetic oligonucleotide
cgactgcggccgtggatatgtttgcctcta

SEQ ID NO: 128346 - DNA, 30 bp, Artificial Sequence
  Synthetic oligonucleotide
aaagcctcacagcaagcgaggggagctcta

SEQ ID NO: 128347 - DNA, 30 bp, Artificial Sequence
  Synthetic oligonucleotide
acaccggtaataaaatcatgtttagctcta

SEQ ID NO: 128348 - DNA, 30 bp, Artificial Sequence
  Synthetic oligonucleotide
ttaccgggagttctatgttcaaaatctcta

SEQ ID NO: 128349 - DNA, 30 bp, Artificial Sequence
  Synthetic oligonucleotide
ctttctaaacttaagctggaacaatctcta

SEQ ID NO: 128350 - DNA, 30 bp, Artificial Sequence
  Synthetic oligonucleotide
aagatctgtaccattggggtcggatctcta

SEQ ID NO: 128351 - DNA, 30 bp, Artificial Sequence
  Synthetic oligonucleotide
cccctgaaatcatcaaacccgaattctcta

SEQ ID NO: 128352 - DNA, 30 bp, Artificial Sequence
  Synthetic oligonucleotide
tcccaactactgggccagcctcctcgtcta

SEQ ID NO: 128353 - DNA, 30 bp, Artificial Sequence
  Synthetic oligonucleotide
aagcgcttcgtaagagggataattcgtcta

SEQ ID NO: 128354 - DNA, 30 bp, Artificial Sequence
  Synthetic oligonucleotide
tcctgaagcccttgcgcaccgagcggtcta

SEQ ID NO: 128355 - DNA, 30 bp, Artificial Sequence
  Synthetic oligonucleotide
ttacagtccatgacttcggacttgtgtcta

SEQ ID NO: 128356 - DNA, 30 bp, Artificial Sequence
  Synthetic oligonucleotide
gccgccaaagtaacggcattgtgcattcta

SEQ ID NO: 128357 - DNA, 30 bp, Artificial Sequence
  Synthetic oligonucleotide
cctaggccaggttggggcataatcattcta

SEQ ID NO: 128358 - DNA, 30 bp, Artificial Sequence
  Synthetic oligonucleotide
atgcagacaatcaatatgctttcgattcta

SEQ ID NO: 128359 - DNA, 30 bp, Artificial Sequence
  Synthetic oligonucleotide
gtatacatcgtcgtgcggaccgtgattcta

SEQ ID NO: 128360 - DNA, 30 bp, Artificial Sequence
  Synthetic oligonucleotide
gtgcctggaccaataagactgtatattcta

SEQ ID NO: 128361 - DNA, 30 bp, Artificial Sequence
  Synthetic oligonucleotide
cttcaaccgaatataggtccaatacttcta

SEQ ID NO: 128362 - DNA, 30 bp, Artificial Sequence
  Synthetic oligonucleotide
tacaaccaaaaatggtattgttctgttcta

SEQ ID NO: 128363 - DNA, 30 bp, Artificial Sequence
  Synthetic oligonucleotide
ggttcggtccatataacgaggatatttcta

SEQ ID NO: 128364 - DNA, 30 bp, Artificial Sequence
  Synthetic oligonucleotide
gtgtactgaaagcatccagctgataaagta

SEQ ID NO: 128365 - DNA, 30 bp, Artificial Sequence
  Synthetic oligonucleotide
ggtctcggtgcgtattagtgaactaaagta

SEQ ID NO: 128366 - DNA, 30 bp, Artificial Sequence
  Synthetic oligonucleotide
gtgaaggtaagcctaagtaacagtaaagta

SEQ ID NO: 128367 - DNA, 30 bp, Artificial Sequence
  Synthetic oligonucleotide
ctacgggaaaatgccatttggagacaagta

SEQ ID NO: 128368 - DNA, 30 bp, Artificial Sequence
  Synthetic oligonucleotide
catcctttaggccacgaccagcgccaagta

SEQ ID NO: 128369 - DNA, 30 bp, Artificial Sequence
  Synthetic oligonucleotide
atcggactccccctggaatggtagcaagta

SEQ ID NO: 128370 - DNA, 30 bp, Artificial Sequence
  Synthetic oligonucleotide
ggttcaagctcacctagagcgatgcaagta

SEQ ID NO: 128371 - DNA, 30 bp, Artificial Sequence
  Synthetic oligonucleotide
aagacacttaggtccgaacattaagaagta

SEQ ID NO: 128372 - DNA, 30 bp, Artificial Sequence
  Synthetic oligonucleotide
aagcaccaacatgtggcactcggcgaagta

SEQ ID NO: 128373 - DNA, 30 bp, Artificial Sequence
  Synthetic oligonucleotide
cctggaatgttttaggagtaacgtgaagta

SEQ ID NO: 128374 - DNA, 30 bp, Artificial Sequence
  Synthetic oligonucleotide
tcacaaactgaccttccaaccgaataagta

SEQ ID NO: 128375 - DNA, 30 bp, Artificial Sequence
  Synthetic oligonucleotide
tcggtacgaacgcgggggacactgtaagta

SEQ ID NO: 128376 - DNA, 30 bp, Artificial Sequence
  Synthetic oligonucleotide
taacatcggatctcgcaaatccattaagta

SEQ ID NO: 128377 - DNA, 30 bp, Artificial Sequence
  Synthetic oligonucleotide
tcattgggcataggctagaccccttaagta

SEQ ID NO: 128378 - DNA, 30 bp, Artificial Sequence
  Synthetic oligonucleotide
tttccgatggttagcggaccaagaacagta

SEQ ID NO: 128379 - DNA, 30 bp, Artificial Sequence
  Synthetic oligonucleotide
tccggaagtgtttcgacataagccacagta

SEQ ID NO: 128380 - DNA, 30 bp, Artificial Sequence
  Synthetic oligonucleotide
gctaaagaaaatggggtgtccgccacagta

SEQ ID NO: 128381 - DNA, 30 bp, Artificial Sequence
  Synthetic oligonucleotide
aataccatccagacgatatcgccgacagta

SEQ ID NO: 128382 - DNA, 30 bp, Artificial Sequence
  Synthetic oligonucleotide
tggccctaagccattgcgttgcggacagta

SEQ ID NO: 128383 - DNA, 30 bp, Artificial Sequence
  Synthetic oligonucleotide
caaaggcagtcccaatgaacctggacagta

SEQ ID NO: 128384 - DNA, 30 bp, Artificial Sequence
  Synthetic oligonucleotide
ggcgtgtgaagcaaatccagagatacagta

SEQ ID NO: 128385 - DNA, 30 bp, Artificial Sequence
  Synthetic oligonucleotide
ttccacacttggtgctagaaatatccagta

SEQ ID NO: 128386 - DNA, 30 bp, Artificial Sequence
  Synthetic oligonucleotide
tagacgtaggtccatagcaatattccagta

SEQ ID NO: 128387 - DNA, 30 bp, Artificial Sequence
  Synthetic oligonucleotide
cgccatgcgagccctagattgaaagcagta

SEQ ID NO: 128388 - DNA, 30 bp, Artificial Sequence
  Synthetic oligonucleotide
gcgaatgaaatgagtttaggctacgcagta

SEQ ID NO: 128389 - DNA, 30 bp, Artificial Sequence
  Synthetic oligonucleotide
cagaagaatcctttagccaaaaaggcagta

SEQ ID NO: 128390 - DNA, 30 bp, Artificial Sequence
  Synthetic oligonucleotide
aatgtacaagtgactcacaatatggcagta

SEQ ID NO: 128391 - DNA, 30 bp, Artificial Sequence
  Synthetic oligonucleotide
atttggatcgacttgagcaaggctgcagta

SEQ ID NO: 128392 - DNA, 30 bp, Artificial Sequence
  Synthetic oligonucleotide
tcgcatagggcctaattacgttaatcagta

SEQ ID NO: 128393 - DNA, 30 bp, Artificial Sequence
  Synthetic oligonucleotide
accggacgcaccgatcacgccttatcagta

SEQ ID NO: 128394 - DNA, 30 bp, Artificial Sequence
  Synthetic oligonucleotide
aagttggataaacaaattaaactttcagta

SEQ ID NO: 128395 - DNA, 30 bp, Artificial Sequence
  Synthetic oligonucleotide
tgcgtaacggcggtggcaaggagaagagta

SEQ ID NO: 128396 - DNA, 30 bp, Artificial Sequence
  Synthetic oligonucleotide
tgaacaccgtattatagtgcgttaagagta

SEQ ID NO: 128397 - DNA, 30 bp, Artificial Sequence
  Synthetic oligonucleotide
cgcattattgcgtagttcggggcgagagta

SEQ ID NO: 128398 - DNA, 30 bp, Artificial Sequence
  Synthetic oligonucleotide
atcctcaacggggacgttcattgccgagta

SEQ ID NO: 128399 - DNA, 30 bp, Artificial Sequence
  Synthetic oligonucleotide
acacggcactcagcatagcttcatcgagta

SEQ ID NO: 128400 - DNA, 30 bp, Artificial Sequence
  Synthetic oligonucleotide
tatcgaagaaaatatagttaagttcgagta

SEQ ID NO: 128401 - DNA, 30 bp, Artificial Sequence
  Synthetic oligonucleotide
ctttgcgcaagtacaagatatccaggagta

SEQ ID NO: 128402 - DNA, 30 bp, Artificial Sequence
  Synthetic oligonucleotide
actacgaaatgaagggtatggataggagta

SEQ ID NO: 128403 - DNA, 30 bp, Artificial Sequence
  Synthetic oligonucleotide
tctggctgtgagaggacatgcctaggagta

SEQ ID NO: 128404 - DNA, 30 bp, Artificial Sequence
  Synthetic oligonucleotide
agcaacacggccatgccaagacggggagta

SEQ ID NO: 128405 - DNA, 30 bp, Artificial Sequence
  Synthetic oligonucleotide
agagaaagtcgcgtgataggcagtggagta

SEQ ID NO: 128406 - DNA, 30 bp, Artificial Sequence
  Synthetic oligonucleotide
gggtgtcgccatgttttcgatgagtgagta

SEQ ID NO: 128407 - DNA, 30 bp, Artificial Sequence
  Synthetic oligonucleotide
tggcaatgatcaagtccggcgttttgagta

SEQ ID NO: 128408 - DNA, 30 bp, Artificial Sequence
  Synthetic oligonucleotide
taagaaaaggattcaggggcaatcatagta

SEQ ID NO: 128409 - DNA, 30 bp, Artificial Sequence
  Synthetic oligonucleotide
cggtatagcctcgatctacgggtcatagta

SEQ ID NO: 128410 - DNA, 30 bp, Artificial Sequence
  Synthetic oligonucleotide
agagggaagaccagggtcagatttatagta

SEQ ID NO: 128411 - DNA, 30 bp, Artificial Sequence
  Synthetic oligonucleotide
aagctcgaagtgtttcaggagcagctagta

SEQ ID NO: 128412 - DNA, 30 bp, Artificial Sequence
  Synthetic oligonucleotide
tagcccactgtcgggtcaaataggctagta

SEQ ID NO: 128413 - DNA, 30 bp, Artificial Sequence
  Synthetic oligonucleotide
tccgagagtcagaatacacaccatctagta

SEQ ID NO: 128414 - DNA, 30 bp, Artificial Sequence
  Synthetic oligonucleotide
gcatcaagagaagccaaaaccgtagtagta

SEQ ID NO: 128415 - DNA, 29 bp, Artificial Sequence
  Synthetic oligonucleotide
accaagaccgtgtaataatgtaggtagta

SEQ ID NO: 128416 - DNA, 30 bp, Artificial Sequence
  Synthetic oligonucleotide
atggcggatatgctaggtgccagggtagta

SEQ ID NO: 128417 - DNA, 30 bp, Artificial Sequence
  Synthetic oligonucleotide
taagtactcgattgtgggtttgaattagta

SEQ ID NO: 128418 - DNA, 30 bp, Artificial Sequence
  Synthetic oligonucleotide
cgcgagataagcggaattcatgtgttagta

SEQ ID NO: 128419 - DNA, 30 bp, Artificial Sequence
  Synthetic oligonucleotide
cggcacgacgagggtctggcgcatttagta

SEQ ID NO: 128420 - DNA, 29 bp, Artificial Sequence
  Synthetic oligonucleotide
atagcactccaatgagcataattttagta

SEQ ID NO: 128421 - DNA, 30 bp, Artificial Sequence
  Synthetic oligonucleotide
tagatgaagggtgcgcggtactaaaacgta

SEQ ID NO: 128422 - DNA, 30 bp, Artificial Sequence
  Synthetic oligonucleotide
ccttcgaacatctccggccgagtaaacgta

SEQ ID NO: 128423 - DNA, 30 bp, Artificial Sequence
  Synthetic oligonucleotide
agaccagcaatttgatcaaccgtaaacgta

SEQ ID NO: 128424 - DNA, 30 bp, Artificial Sequence
  Synthetic oligonucleotide
tctaactgccgtaccgaaaacgggaacgta

SEQ ID NO: 128425 - DNA, 30 bp, Artificial Sequence
  Synthetic oligonucleotide
gctggatgaaggaagagggcatataacgta

SEQ ID NO: 128426 - DNA, 30 bp, Artificial Sequence
  Synthetic oligonucleotide
acgcgcttccatccaatcctaacccacgta

SEQ ID NO: 128427 - DNA, 30 bp, Artificial Sequence
  Synthetic oligonucleotide
gacgatgtggttagaaaaacgtatcacgta

SEQ ID NO: 128428 - DNA, 30 bp, Artificial Sequence
  Synthetic oligonucleotide
tcgaacgatagacggatctgacgcgacgta

SEQ ID NO: 128429 - DNA, 30 bp, Artificial Sequence
  Synthetic oligonucleotide
tgagggaacactcattggaccagggacgta

SEQ ID NO: 128430 - DNA, 30 bp, Artificial Sequence
  Synthetic oligonucleotide
ggtatcgggacaatcccatactgggacgta

SEQ ID NO: 128431 - DNA, 30 bp, Artificial Sequence
  Synthetic oligonucleotide
cttgtgatgagacagactgtgctggacgta

SEQ ID NO: 128432 - DNA, 30 bp, Artificial Sequence
  Synthetic oligonucleotide
gctaaaaaatgatattgttgaggacccgta

SEQ ID NO: 128433 - DNA, 30 bp, Artificial Sequence
  Synthetic oligonucleotide
atgcgaacgcccggaagtaggcaccccgta

SEQ ID NO: 128434 - DNA, 30 bp, Artificial Sequence
  Synthetic oligonucleotide
caccgccggcaacctgtatactgatccgta

SEQ ID NO: 128435 - DNA, 30 bp, Artificial Sequence
  Synthetic oligonucleotide
ctaggattccgtgcggttcaatcctccgta

SEQ ID NO: 128436 - DNA, 30 bp, Artificial Sequence
  Synthetic oligonucleotide
ttagtgcgataacttatttattacagcgta

SEQ ID NO: 128437 - DNA, 30 bp, Artificial Sequence
  Synthetic oligonucleotide
tacctcaatagagatatgagttacagcgta

SEQ ID NO: 128438 - DNA, 30 bp, Artificial Sequence
  Synthetic oligonucleotide
cggttgctgctcttcgaattcactcgcgta

SEQ ID NO: 128439 - DNA, 30 bp, Artificial Sequence
  Synthetic oligonucleotide
ggacggataaacgtttggatgtttcgcgta

SEQ ID NO: 128440 - DNA, 30 bp, Artificial Sequence
  Synthetic oligonucleotide
gaccgcccacactcaaatcatcccggcgta

SEQ ID NO: 128441 - DNA, 30 bp, Artificial Sequence
  Synthetic oligonucleotide
tgccgtgcctagtgcgatctcctcggcgta

SEQ ID NO: 128442 - DNA, 30 bp, Artificial Sequence
  Synthetic oligonucleotide
ttacatagccagggtacacaaccgggcgta

SEQ ID NO: 128443 - DNA, 30 bp, Artificial Sequence
  Synthetic oligonucleotide
tgggatagggcggatcgctacccgggcgta

SEQ ID NO: 128444 - DNA, 31 bp, Artificial Sequence
  Synthetic oligonucleotide
tgataaagcaccaaatggagaagcgggcgta

SEQ ID NO: 128445 - DNA, 30 bp, Artificial Sequence
  Synthetic oligonucleotide
ggacatcttcagtaggagttccatggcgta

SEQ ID NO: 128446 - DNA, 30 bp, Artificial Sequence
  Synthetic oligonucleotide
tcgaatgcaccgtctctaatataatgcgta

SEQ ID NO: 128447 - DNA, 30 bp, Artificial Sequence
  Synthetic oligonucleotide
gaagatctagtcacgtcttcagagtgcgta

SEQ ID NO: 128448 - DNA, 30 bp, Artificial Sequence
  Synthetic oligonucleotide
cttctatcatagatggagggcaggtgcgta

SEQ ID NO: 128449 - DNA, 30 bp, Artificial Sequence
  Synthetic oligonucleotide
atgtaagtatgttattgaggatcgctcgta

SEQ ID NO: 128450 - DNA, 30 bp, Artificial Sequence
  Synthetic oligonucleotide
gcagtgctcaaaaattgtacagtgctcgta

SEQ ID NO: 128451 - DNA, 30 bp, Artificial Sequence
  Synthetic oligonucleotide
gacgtcggatagctcagggcgaatctcgta

SEQ ID NO: 128452 - DNA, 30 bp, Artificial Sequence
  Synthetic oligonucleotide
gcgcagtgcgatatgcgtgatgaagtcgta

SEQ ID NO: 128453 - DNA, 30 bp, Artificial Sequence
  Synthetic oligonucleotide
aagggtgtcgtaaaagtatctcccgtcgta

SEQ ID NO: 128454 - DNA, 30 bp, Artificial Sequence
  Synthetic oligonucleotide
agcttgtgatctctcgcggtatgggtcgta

SEQ ID NO: 128455 - DNA, 30 bp, Artificial Sequence
  Synthetic oligonucleotide
aaagatgattaggagggagtattggtcgta

SEQ ID NO: 128456 - DNA, 30 bp, Artificial Sequence
  Synthetic oligonucleotide
tgattttaaataaattactgcacattcgta

SEQ ID NO: 128457 - DNA, 30 bp, Artificial Sequence
  Synthetic oligonucleotide
cgtttaatataggggaactcggtcttcgta

SEQ ID NO: 128458 - DNA, 30 bp, Artificial Sequence
  Synthetic oligonucleotide
cccagacagcgcaggagcactacaaaggta

SEQ ID NO: 128459 - DNA, 30 bp, Artificial Sequence
  Synthetic oligonucleotide
atctttgtctgaggtatacctgcgaaggta

SEQ ID NO: 128460 - DNA, 30 bp, Artificial Sequence
  Synthetic oligonucleotide
tacgggttaaaattgtgggattctaaggta

SEQ ID NO: 128461 - DNA, 30 bp, Artificial Sequence
  Synthetic oligonucleotide
atgattactgtggacctacactaccaggta

SEQ ID NO: 128462 - DNA, 30 bp, Artificial Sequence
  Synthetic oligonucleotide
tgcatcgaaaaaaactcccggcgccaggta

SEQ ID NO: 128463 - DNA, 30 bp, Artificial Sequence
  Synthetic oligonucleotide
gaagaagtcgtgttagtgaaaaatcaggta

SEQ ID NO: 128464 - DNA, 30 bp, Artificial Sequence
  Synthetic oligonucleotide
ccaccgacatgctttggtcattttcaggta

SEQ ID NO: 128465 - DNA, 30 bp, Artificial Sequence
  Synthetic oligonucleotide
aaatcgcatatcgagacgatataagaggta

SEQ ID NO: 128466 - DNA, 30 bp, Artificial Sequence
  Synthetic oligonucleotide
gtctgccatcctaagtaataaatagaggta

SEQ ID NO: 128467 - DNA, 30 bp, Artificial Sequence
  Synthetic oligonucleotide
cattaataagagagaagacactacgaggta

SEQ ID NO: 128468 - DNA, 30 bp, Artificial Sequence
  Synthetic oligonucleotide
tgccaacgtcaccaacttctgcccgaggta

SEQ ID NO: 128469 - DNA, 30 bp, Artificial Sequence
  Synthetic oligonucleotide
gcatatagctaataaagtaatatggaggta

SEQ ID NO: 128470 - DNA, 30 bp, Artificial Sequence
  Synthetic oligonucleotide
accggcagtgagcgatcgacgcgataggta

SEQ ID NO: 128471 - DNA, 30 bp, Artificial Sequence
  Synthetic oligonucleotide
gatgagccggcatagctagtctacacggta

SEQ ID NO: 128472 - DNA, 30 bp, Artificial Sequence
  Synthetic oligonucleotide
cacttgaaaacctcggagaggccgacggta

SEQ ID NO: 128473 - DNA, 30 bp, Artificial Sequence
  Synthetic oligonucleotide
agcggaatcttgagaggatgtgctccggta

SEQ ID NO: 128474 - DNA, 30 bp, Artificial Sequence
  Synthetic oligonucleotide
acgggaggcttagacctcgagtacgcggta

SEQ ID NO: 128475 - DNA, 30 bp, Artificial Sequence
  Synthetic oligonucleotide
ttgaggaggtgtaactacctcactgcggta

SEQ ID NO: 128476 - DNA, 30 bp, Artificial Sequence
  Synthetic oligonucleotide
gtacctctcaaaagcattaaataatcggta

SEQ ID NO: 128477 - DNA, 30 bp, Artificial Sequence
  Synthetic oligonucleotide
gtacgacgtgcgtatataggtaagtcggta

SEQ ID NO: 128478 - DNA, 30 bp, Artificial Sequence
  Synthetic oligonucleotide
ggcttaaacactataatggaagtgtcggta

SEQ ID NO: 128479 - DNA, 30 bp, Artificial Sequence
  Synthetic oligonucleotide
tgagataacaacataaactttagaagggta

SEQ ID NO: 128480 - DNA, 30 bp, Artificial Sequence
  Synthetic oligonucleotide
agtgaaatacaagactcgttttacagggta

SEQ ID NO: 128481 - DNA, 30 bp, Artificial Sequence
  Synthetic oligonucleotide
gacaagaccctcaacaaatggaggagggta

SEQ ID NO: 128482 - DNA, 30 bp, Artificial Sequence
  Synthetic oligonucleotide
tagcatcgttgaaggggagtagggagggta

SEQ ID NO: 128483 - DNA, 30 bp, Artificial Sequence
  Synthetic oligonucleotide
cgataacaaaacgagccggttacacgggta

SEQ ID NO: 128484 - DNA, 30 bp, Artificial Sequence
  Synthetic oligonucleotide
cgctcccatctgggaacagctattcgggta

SEQ ID NO: 128485 - DNA, 30 bp, Artificial Sequence
  Synthetic oligonucleotide
agattagtggaatccccaagcagaggggta

SEQ ID NO: 128486 - DNA, 30 bp, Artificial Sequence
  Synthetic oligonucleotide
gcacatcgattgacgtcgatcagaggggta

SEQ ID NO: 128487 - DNA, 30 bp, Artificial Sequence
  Synthetic oligonucleotide
attcgtacaatattgggccaaagtggggta

SEQ ID NO: 128488 - DNA, 30 bp, Artificial Sequence
  Synthetic oligonucleotide
gcatgtgtgaaacatacgtgcatatgggta

SEQ ID NO: 128489 - DNA, 30 bp, Artificial Sequence
  Synthetic oligonucleotide
ctaggatgatatctcgggtgagcctgggta

SEQ ID NO: 128490 - DNA, 30 bp, Artificial Sequence
  Synthetic oligonucleotide
tggattggtgagaacatgttatggtgggta

SEQ ID NO: 128491 - DNA, 30 bp, Artificial Sequence
  Synthetic oligonucleotide
aggcatgaagttaatctgtataattgggta

SEQ ID NO: 128492 - DNA, 30 bp, Artificial Sequence
  Synthetic oligonucleotide
agaaggactccggttagaatgtattgggta

SEQ ID NO: 128493 - DNA, 30 bp, Artificial Sequence
  Synthetic oligonucleotide
aggtatagaaggtcacacatcgtttgggta

SEQ ID NO: 128494 - DNA, 30 bp, Artificial Sequence
  Synthetic oligonucleotide
atggcaaagacggggaaagcggcgatggta

SEQ ID NO: 128495 - DNA, 30 bp, Artificial Sequence
  Synthetic oligonucleotide
atcatcagttcaacgtgtaccacactggta

SEQ ID NO: 128496 - DNA, 30 bp, Artificial Sequence
  Synthetic oligonucleotide
cgcgtatggcgcgtttgagagatgctggta

SEQ ID NO: 128497 - DNA, 30 bp, Artificial Sequence
  Synthetic oligonucleotide
acatttggtggcgaaaagccacaattggta

SEQ ID NO: 128498 - DNA, 30 bp, Artificial Sequence
  Synthetic oligonucleotide
cgtgtgagggctcgagagcagctgttggta

SEQ ID NO: 128499 - DNA, 30 bp, Artificial Sequence
  Synthetic oligonucleotide
agagacatcgttaactccatttatttggta

SEQ ID NO: 128500 - DNA, 30 bp, Artificial Sequence
  Synthetic oligonucleotide
gtcaagctaatgtctaggtctgatgatgta

SEQ ID NO: 128501 - DNA, 30 bp, Artificial Sequence
  Synthetic oligonucleotide
tcgcatggtacggcgcgaatccctgatgta

SEQ ID NO: 128502 - DNA, 30 bp, Artificial Sequence
  Synthetic oligonucleotide
tcgcttgtgggagtggcaaccggtgatgta

SEQ ID NO: 128503 - DNA, 30 bp, Artificial Sequence
  Synthetic oligonucleotide
ggaccggtgagacggcccactcgatatgta

SEQ ID NO: 128504 - DNA, 30 bp, Artificial Sequence
  Synthetic oligonucleotide
gggtaattacccagacagtccctctatgta

SEQ ID NO: 128505 - DNA, 30 bp, Artificial Sequence
  Synthetic oligonucleotide
tgaactttggggcggaaagcaggttatgta

SEQ ID NO: 128506 - DNA, 30 bp, Artificial Sequence
  Synthetic oligonucleotide
caaggctcaccttccgcatgcgcaactgta

SEQ ID NO: 128507 - DNA, 30 bp, Artificial Sequence
  Synthetic oligonucleotide
ggtgtcgcaattcgagcgtgaatcactgta

SEQ ID NO: 128508 - DNA, 30 bp, Artificial Sequence
  Synthetic oligonucleotide
agggtctgaacagcgaatcgggggactgta

SEQ ID NO: 128509 - DNA, 30 bp, Artificial Sequence
  Synthetic oligonucleotide
tgtgcacatggacgaaagcaggagcctgta

SEQ ID NO: 128510 - DNA, 30 bp, Artificial Sequence
  Synthetic oligonucleotide
aaggctaggttatcggaagcttggcctgta

SEQ ID NO: 128511 - DNA, 30 bp, Artificial Sequence
  Synthetic oligonucleotide
gggtatcacgcacaatcgatccctcctgta

SEQ ID NO: 128512 - DNA, 30 bp, Artificial Sequence
  Synthetic oligonucleotide
cacgaatgaatgtggatggaagttgctgta

SEQ ID NO: 128513 - DNA, 30 bp, Artificial Sequence
  Synthetic oligonucleotide
tcaaggagttctttaaggcaaaacagtgta

SEQ ID NO: 128514 - DNA, 30 bp, Artificial Sequence
  Synthetic oligonucleotide
agcccgaggtcataagatcactacagtgta

SEQ ID NO: 128515 - DNA, 30 bp, Artificial Sequence
  Synthetic oligonucleotide
taagatcacaagcggcaaagcagcagtgta

SEQ ID NO: 128516 - DNA, 30 bp, Artificial Sequence
  Synthetic oligonucleotide
caatagcattggcttttgtcatagagtgta

SEQ ID NO: 128517 - DNA, 30 bp, Artificial Sequence
  Synthetic oligonucleotide
tgaagctgtaagcaggctaactttcgtgta

SEQ ID NO: 128518 - DNA, 30 bp, Artificial Sequence
  Synthetic oligonucleotide
taagggcttccgcaaaaggtcataggtgta

SEQ ID NO: 128519 - DNA, 30 bp, Artificial Sequence
  Synthetic oligonucleotide
acgttcgggtaccaaactcagcacggtgta

SEQ ID NO: 128520 - DNA, 30 bp, Artificial Sequence
  Synthetic oligonucleotide
ggcaaatgcctcatctccctggttggtgta

SEQ ID NO: 128521 - DNA, 30 bp, Artificial Sequence
  Synthetic oligonucleotide
gggacagcacatcttagagtatattgtgta

SEQ ID NO: 128522 - DNA, 30 bp, Artificial Sequence
  Synthetic oligonucleotide
agtggggtactcaccgaatcagttattgta

SEQ ID NO: 128523 - DNA, 30 bp, Artificial Sequence
  Synthetic oligonucleotide
gacagcggatatgaaacatgacagcttgta

SEQ ID NO: 128524 - DNA, 30 bp, Artificial Sequence
  Synthetic oligonucleotide
taacggcttaattctgggcgggtagttgta

SEQ ID NO: 128525 - DNA, 30 bp, Artificial Sequence
  Synthetic oligonucleotide
tgggctacgataactcgctggcgcgttgta

SEQ ID NO: 128526 - DNA, 30 bp, Artificial Sequence
  Synthetic oligonucleotide
gtaaacaataattcgatcagcgttgttgta

SEQ ID NO: 128527 - DNA, 30 bp, Artificial Sequence
  Synthetic oligonucleotide
ccgagttgtaccgagtcactttagtttgta

SEQ ID NO: 128528 - DNA, 30 bp, Artificial Sequence
  Synthetic oligonucleotide
acaacaattgaagtgaatcccgtgtttgta

SEQ ID NO: 128529 - DNA, 30 bp, Artificial Sequence
  Synthetic oligonucleotide
gtggagactcggtgcgtaggcaacaaatta

SEQ ID NO: 128530 - DNA, 30 bp, Artificial Sequence
  Synthetic oligonucleotide
attgtggagactcagtaccgactcaaatta

SEQ ID NO: 128531 - DNA, 30 bp, Artificial Sequence
  Synthetic oligonucleotide
gtcaacgctaagaactatcctcgtaaatta

SEQ ID NO: 128532 - DNA, 30 bp, Artificial Sequence
  Synthetic oligonucleotide
ggctccgaaccaatgaagtatgaacaatta

SEQ ID NO: 128533 - DNA, 30 bp, Artificial Sequence
  Synthetic oligonucleotide
ccgaaaaccttatgagtgtgtggacaatta

SEQ ID NO: 128534 - DNA, 30 bp, Artificial Sequence
  Synthetic oligonucleotide
tctacccaactggggacctaccgtcaatta

SEQ ID NO: 128535 - DNA, 30 bp, Artificial Sequence
  Synthetic oligonucleotide
tacggtgcgggcgaaaacctcggtcaatta

SEQ ID NO: 128536 - DNA, 30 bp, Artificial Sequence
  Synthetic oligonucleotide
gagggtcatacgagggtaaagcttgaatta

SEQ ID NO: 128537 - DNA, 30 bp, Artificial Sequence
  Synthetic oligonucleotide
tggaccaattagccacctagcgattaatta

SEQ ID NO: 128538 - DNA, 30 bp, Artificial Sequence
  Synthetic oligonucleotide
aagaagggcggttaggcatcggttacatta

SEQ ID NO: 128539 - DNA, 30 bp, Artificial Sequence
  Synthetic oligonucleotide
aggtcgcgtgcgtctcccactgttacatta

SEQ ID NO: 128540 - DNA, 30 bp, Artificial Sequence
  Synthetic oligonucleotide
aaggcaacaccttggtaaaatagaccatta

SEQ ID NO: 128541 - DNA, 30 bp, Artificial Sequence
  Synthetic oligonucleotide
aggctatactattatatagatctaccatta

SEQ ID NO: 128542 - DNA, 30 bp, Artificial Sequence
  Synthetic oligonucleotide
gcgcgacatggatttgagcataatgcatta

SEQ ID NO: 128543 - DNA, 30 bp, Artificial Sequence
  Synthetic oligonucleotide
accatgacgagaaatggcaccagtgcatta

SEQ ID NO: 128544 - DNA, 30 bp, Artificial Sequence
  Synthetic oligonucleotide
agcacgagccagatggctttttagtcatta

SEQ ID NO: 128545 - DNA, 30 bp, Artificial Sequence
  Synthetic oligonucleotide
gttagacgtggagtccccaacgcaagatta

SEQ ID NO: 128546 - DNA, 30 bp, Artificial Sequence
  Synthetic oligonucleotide
gaaggctggcaccctaatcaaataagatta

SEQ ID NO: 128547 - DNA, 30 bp, Artificial Sequence
  Synthetic oligonucleotide
gtccaaacataccggcattataagagatta

SEQ ID NO: 128548 - DNA, 30 bp, Artificial Sequence
  Synthetic oligonucleotide
aaagtaaggggcaaggccgtaaatagatta

SEQ ID NO: 128549 - DNA, 30 bp, Artificial Sequence
  Synthetic oligonucleotide
cggggaccacggtatgatttacttagatta

SEQ ID NO: 128550 - DNA, 30 bp, Artificial Sequence
  Synthetic oligonucleotide
aggaacaataatggacgttacggacgatta

SEQ ID NO: 128551 - DNA, 30 bp, Artificial Sequence
  Synthetic oligonucleotide
tagttaaccatgaagcatgggcatcgatta

SEQ ID NO: 128552 - DNA, 30 bp, Artificial Sequence
  Synthetic oligonucleotide
ggccgtcactgtgcgcgtcaaatcggatta

SEQ ID NO: 128553 - DNA, 30 bp, Artificial Sequence
  Synthetic oligonucleotide
gctgcacaagggcacggacgttggggatta

SEQ ID NO: 128554 - DNA, 30 bp, Artificial Sequence
  Synthetic oligonucleotide
cagggtccattgcctgcgaaattgggatta

SEQ ID NO: 128555 - DNA, 30 bp, Artificial Sequence
  Synthetic oligonucleotide
ggagacgttctggaacttggcgtctgatta

SEQ ID NO: 128556 - DNA, 30 bp, Artificial Sequence
  Synthetic oligonucleotide
cccgtaatgccaggctgtagagggtgatta

SEQ ID NO: 128557 - DNA, 30 bp, Artificial Sequence
  Synthetic oligonucleotide
aaacaaaagagggcattgaatcgcatatta

SEQ ID NO: 128558 - DNA, 30 bp, Artificial Sequence
  Synthetic oligonucleotide
cgcacctgctcgttcggggtcggtatatta

SEQ ID NO: 128559 - DNA, 30 bp, Artificial Sequence
  Synthetic oligonucleotide
aggcgcgggaatggctgtccagttatatta

SEQ ID NO: 128560 - DNA, 30 bp, Artificial Sequence
  Synthetic oligonucleotide
aggtcaagaaaaaaacgccgaacactatta

SEQ ID NO: 128561 - DNA, 30 bp, Artificial Sequence
  Synthetic oligonucleotide
gtcgaaccccgaggattcagatgactatta

SEQ ID NO: 128562 - DNA, 30 bp, Artificial Sequence
  Synthetic oligonucleotide
gcgctcactaaataattccgaaagctatta

SEQ ID NO: 128563 - DNA, 30 bp, Artificial Sequence
  Synthetic oligonucleotide
acgccagagctagcaactgtcgagctatta

SEQ ID NO: 128564 - DNA, 30 bp, Artificial Sequence
  Synthetic oligonucleotide
ggcgcaagagctaccaacgtccctctatta

SEQ ID NO: 128565 - DNA, 30 bp, Artificial Sequence
  Synthetic oligonucleotide
cacatcctttaagaggtactcgaagtatta

SEQ ID NO: 128566 - DNA, 30 bp, Artificial Sequence
  Synthetic oligonucleotide
tcgacagtgaacgaaatgacaccccactta

SEQ ID NO: 128567 - DNA, 31 bp, Artificial Sequence
  Synthetic oligonucleotide
atcaatgcgaggatagttggttttcgactta

SEQ ID NO: 128568 - DNA, 30 bp, Artificial Sequence
  Synthetic oligonucleotide
catgtataacgggtcgagcagccatactta

SEQ ID NO: 128569 - DNA, 30 bp, Artificial Sequence
  Synthetic oligonucleotide
attggggtacggatattctgtgtctactta

SEQ ID NO: 128570 - DNA, 30 bp, Artificial Sequence
  Synthetic oligonucleotide
acgaggcaaactactcgctctaagacctta

SEQ ID NO: 128571 - DNA, 30 bp, Artificial Sequence
  Synthetic oligonucleotide
tccgccggccaccacaggccaattacctta

SEQ ID NO: 128572 - DNA, 30 bp, Artificial Sequence
  Synthetic oligonucleotide
acgtaccaggggtaattctttggctcctta

SEQ ID NO: 128573 - DNA, 30 bp, Artificial Sequence
  Synthetic oligonucleotide
caccgaacagagtagaagcttaggtcctta

SEQ ID NO: 128574 - DNA, 30 bp, Artificial Sequence
  Synthetic oligonucleotide
gaggcctgacgctggatcgtgcaaagctta

SEQ ID NO: 128575 - DNA, 30 bp, Artificial Sequence
  Synthetic oligonucleotide
cggctagcgatccctgcggtaatcagctta

SEQ ID NO: 128576 - DNA, 30 bp, Artificial Sequence
  Synthetic oligonucleotide
ctacgggctcgatctagattaaaacgctta

SEQ ID NO: 128577 - DNA, 30 bp, Artificial Sequence
  Synthetic oligonucleotide
gttccacttccgaatgtatccatcggctta

SEQ ID NO: 128578 - DNA, 30 bp, Artificial Sequence
  Synthetic oligonucleotide
gattggagtaatgaaatattgaggggctta

SEQ ID NO: 128579 - DNA, 30 bp, Artificial Sequence
  Synthetic oligonucleotide
acaaaggttcatcgtatttagcttggctta

SEQ ID NO: 128580 - DNA, 30 bp, Artificial Sequence
  Synthetic oligonucleotide
gtacctggggcggactcgtgggtaatctta

SEQ ID NO: 128581 - DNA, 30 bp, Artificial Sequence
  Synthetic oligonucleotide
ctaccgatggatctagacccgtatatctta

SEQ ID NO: 128582 - DNA, 30 bp, Artificial Sequence
  Synthetic oligonucleotide
aggcgtaatcgtcttgggccgcgagtctta

SEQ ID NO: 128583 - DNA, 30 bp, Artificial Sequence
  Synthetic oligonucleotide
aagtgcaacgttgaacgtggggacgtctta

SEQ ID NO: 128584 - DNA, 30 bp, Artificial Sequence
  Synthetic oligonucleotide
agcgctgagcgtagaattcctaccgtctta

SEQ ID NO: 128585 - DNA, 30 bp, Artificial Sequence
  Synthetic oligonucleotide
cctcggtaatgacaggcagtccccgtctta

SEQ ID NO: 128586 - DNA, 30 bp, Artificial Sequence
  Synthetic oligonucleotide
ataggatctagagagtgaaaatgcgtctta

SEQ ID NO: 128587 - DNA, 30 bp, Artificial Sequence
  Synthetic oligonucleotide
ttgagggcgtgtaaccagggagcggtctta

SEQ ID NO: 128588 - DNA, 30 bp, Artificial Sequence
  Synthetic oligonucleotide
tcggggttggagataaaattgatggtctta

SEQ ID NO: 128589 - DNA, 30 bp, Artificial Sequence
  Synthetic oligonucleotide
cctggcaccactgaggactatcccttctta

SEQ ID NO: 128590 - DNA, 30 bp, Artificial Sequence
  Synthetic oligonucleotide
gccggacaggttaacagtaccgaaaagtta

SEQ ID NO: 128591 - DNA, 30 bp, Artificial Sequence
  Synthetic oligonucleotide
gtcgtttaggcgtaggatcatggcaagtta

SEQ ID NO: 128592 - DNA, 30 bp, Artificial Sequence
  Synthetic oligonucleotide
ggttcaacttacacccgatacatcaagtta

SEQ ID NO: 128593 - DNA, 30 bp, Artificial Sequence
  Synthetic oligonucleotide
cgatgaccgcggacatttcgtcggaagtta

SEQ ID NO: 128594 - DNA, 30 bp, Artificial Sequence
  Synthetic oligonucleotide
agaaacatagggcgtatagaaaataagtta

SEQ ID NO: 128595 - DNA, 30 bp, Artificial Sequence
  Synthetic oligonucleotide
aaggaggcgcgtccgggaagatgtcagtta

SEQ ID NO: 128596 - DNA, 30 bp, Artificial Sequence
  Synthetic oligonucleotide
gctggagaaccatttaccctatgagagtta

SEQ ID NO: 128597 - DNA, 30 bp, Artificial Sequence
  Synthetic oligonucleotide
ccaatacagtcgtcacggaaattagagtta

SEQ ID NO: 128598 - DNA, 30 bp, Artificial Sequence
  Synthetic oligonucleotide
agcggggtaaataggcgagcctgcgagtta

SEQ ID NO: 128599 - DNA, 30 bp, Artificial Sequence
  Synthetic oligonucleotide
caacactgtaagtgacctgtcacggagtta

SEQ ID NO: 128600 - DNA, 30 bp, Artificial Sequence
  Synthetic oligonucleotide
cttaaacaatcaagcctcaattactagtta

SEQ ID NO: 128601 - DNA, 30 bp, Artificial Sequence
  Synthetic oligonucleotide
gaggtgacaaggggtacaccctggtagtta

SEQ ID NO: 128602 - DNA, 30 bp, Artificial Sequence
  Synthetic oligonucleotide
gagagggcgacaacaggcttgagttagtta

SEQ ID NO: 128603 - DNA, 30 bp, Artificial Sequence
  Synthetic oligonucleotide
ggcaactctcactggtgtctaggttagtta

SEQ ID NO: 128604 - DNA, 30 bp, Artificial Sequence
  Synthetic oligonucleotide
cgaaatgagggcacgcaggatccaacgtta

SEQ ID NO: 128605 - DNA, 30 bp, Artificial Sequence
  Synthetic oligonucleotide
gcttcaaaaaacaaggataggaaagcgtta

SEQ ID NO: 128606 - DNA, 30 bp, Artificial Sequence
  Synthetic oligonucleotide
agcgaggtagggttggactatccagcgtta

SEQ ID NO: 128607 - DNA, 30 bp, Artificial Sequence
  Synthetic oligonucleotide
gggtggaacaaagtaaccggtgtcgcgtta

SEQ ID NO: 128608 - DNA, 30 bp, Artificial Sequence
  Synthetic oligonucleotide
gtttggaccctaaacaattcacgtgcgtta

SEQ ID NO: 128609 - DNA, 30 bp, Artificial Sequence
  Synthetic oligonucleotide
agcgtagggagagttaaaaaaccgtcgtta

SEQ ID NO: 128610 - DNA, 30 bp, Artificial Sequence
  Synthetic oligonucleotide
ttgggaggtgtctggaacatatgttcgtta

SEQ ID NO: 128611 - DNA, 30 bp, Artificial Sequence
  Synthetic oligonucleotide
tggcactagagcgtcacccagaaaaggtta

SEQ ID NO: 128612 - DNA, 30 bp, Artificial Sequence
  Synthetic oligonucleotide
tcatcggaacggtgattccattgaaggtta

SEQ ID NO: 128613 - DNA, 30 bp, Artificial Sequence
  Synthetic oligonucleotide
taggatgacctgccagtgccctcgaggtta

SEQ ID NO: 128614 - DNA, 30 bp, Artificial Sequence
  Synthetic oligonucleotide
caagtcgatgttgagtaaaagacccggtta

SEQ ID NO: 128615 - DNA, 30 bp, Artificial Sequence
  Synthetic oligonucleotide
gcaccgtgcacgaataagcgagtccggtta

SEQ ID NO: 128616 - DNA, 30 bp, Artificial Sequence
  Synthetic oligonucleotide
aagaagtaattatggaggtgattagggtta

SEQ ID NO: 128617 - DNA, 30 bp, Artificial Sequence
  Synthetic oligonucleotide
cgttgccggaggtctgtatacattgggtta

SEQ ID NO: 128618 - DNA, 30 bp, Artificial Sequence
  Synthetic oligonucleotide
ttcggggagctaatcgtccgcgtatggtta

SEQ ID NO: 128619 - DNA, 30 bp, Artificial Sequence
  Synthetic oligonucleotide
catcattgtggctagatactcatctggtta

SEQ ID NO: 128620 - DNA, 30 bp, Artificial Sequence
  Synthetic oligonucleotide
tcaacgctcgtgcagatggcccgcatgtta

SEQ ID NO: 128621 - DNA, 30 bp, Artificial Sequence
  Synthetic oligonucleotide
ctagggccagattgcccgggatggatgtta

SEQ ID NO: 128622 - DNA, 30 bp, Artificial Sequence
  Synthetic oligonucleotide
tcggacgccagagttcccggctttatgtta

SEQ ID NO: 128623 - DNA, 30 bp, Artificial Sequence
  Synthetic oligonucleotide
gttgtgccgatgtaaaagaggtaactgtta

SEQ ID NO: 128624 - DNA, 30 bp, Artificial Sequence
  Synthetic oligonucleotide
tacttaagcaaggtggccatacagctgtta

SEQ ID NO: 128625 - DNA, 30 bp, Artificial Sequence
  Synthetic oligonucleotide
cacgagctacaataggttgagccgctgtta

SEQ ID NO: 128626 - DNA, 30 bp, Artificial Sequence
  Synthetic oligonucleotide
taagaggggatgacagtagatcaagtgtta

SEQ ID NO: 128627 - DNA, 30 bp, Artificial Sequence
  Synthetic oligonucleotide
ggcgtagtgacggatataaacgtagtgtta

SEQ ID NO: 128628 - DNA, 30 bp, Artificial Sequence
  Synthetic oligonucleotide
ggtctagccaaacctcaagaaagcgtgtta

SEQ ID NO: 128629 - DNA, 30 bp, Artificial Sequence
  Synthetic oligonucleotide
tgctgcgcattgaagaagacaatggtgtta

SEQ ID NO: 128630 - DNA, 30 bp, Artificial Sequence
  Synthetic oligonucleotide
acggtacttgctatgctcataatcttgtta

SEQ ID NO: 128631 - DNA, 30 bp, Artificial Sequence
  Synthetic oligonucleotide
gcatgtaaatcacattctgggtcaaattta

SEQ ID NO: 128632 - DNA, 30 bp, Artificial Sequence
  Synthetic oligonucleotide
cgagatcccgccctatgttcaggcaattta

SEQ ID NO: 128633 - DNA, 30 bp, Artificial Sequence
  Synthetic oligonucleotide
tcgacaacccatatagttgggcgacattta

SEQ ID NO: 128634 - DNA, 30 bp, Artificial Sequence
  Synthetic oligonucleotide
gatcgaccactgcagaggccggttgattta

SEQ ID NO: 128635 - DNA, 30 bp, Artificial Sequence
  Synthetic oligonucleotide
tgggctcctacacacacttgagagtattta

SEQ ID NO: 128636 - DNA, 30 bp, Artificial Sequence
  Synthetic oligonucleotide
gcctccccgagggcgcgcgggcgaacttta

SEQ ID NO: 128637 - DNA, 30 bp, Artificial Sequence
  Synthetic oligonucleotide
caggtcaaagtgctcgggatgaaaccttta

SEQ ID NO: 128638 - DNA, 30 bp, Artificial Sequence
  Synthetic oligonucleotide
ggctgccaattaagactgagagaaccttta

SEQ ID NO: 128639 - DNA, 30 bp, Artificial Sequence
  Synthetic oligonucleotide
aaaggggcagggtggcgtaccatatcttta

SEQ ID NO: 128640 - DNA, 30 bp, Artificial Sequence
  Synthetic oligonucleotide
tagagcaagaattgctatagaacctcttta

SEQ ID NO: 128641 - DNA, 30 bp, Artificial Sequence
  Synthetic oligonucleotide
cgggcatcagtcggcacaatatagtcttta

SEQ ID NO: 128642 - DNA, 30 bp, Artificial Sequence
  Synthetic oligonucleotide
gcagaggaaccgtaaatttacttaagttta

SEQ ID NO: 128643 - DNA, 30 bp, Artificial Sequence
  Synthetic oligonucleotide
caggcttgtgggtacacaggtcacagttta

SEQ ID NO: 128644 - DNA, 30 bp, Artificial Sequence
  Synthetic oligonucleotide
ggagtcctacagggaaattttctgagttta

SEQ ID NO: 128645 - DNA, 30 bp, Artificial Sequence
  Synthetic oligonucleotide
gacagggacatgtgtttgaggcatagttta

SEQ ID NO: 128646 - DNA, 30 bp, Artificial Sequence
  Synthetic oligonucleotide
accagagtttctcagctggcagatagttta

SEQ ID NO: 128647 - DNA, 30 bp, Artificial Sequence
  Synthetic oligonucleotide
cgatgggatggatgttcaaggaaccgttta

SEQ ID NO: 128648 - DNA, 30 bp, Artificial Sequence
  Synthetic oligonucleotide
atcctgatcagacgaacgatgttccgttta

SEQ ID NO: 128649 - DNA, 30 bp, Artificial Sequence
  Synthetic oligonucleotide
ttcgtggtatgtgaacctttccagcgttta

SEQ ID NO: 128650 - DNA, 30 bp, Artificial Sequence
  Synthetic oligonucleotide
cgttggccgactgccgttggaagtggttta

SEQ ID NO: 128651 - DNA, 30 bp, Artificial Sequence
  Synthetic oligonucleotide
cgaagtaagttgtatgatggcaagtgttta

SEQ ID NO: 128652 - DNA, 30 bp, Artificial Sequence
  Synthetic oligonucleotide
acgtccgccctggataataccggcatttta

SEQ ID NO: 128653 - DNA, 30 bp, Artificial Sequence
  Synthetic oligonucleotide
gctggctggctgacattcaggactatttta

SEQ ID NO: 128654 - DNA, 30 bp, Artificial Sequence
  Synthetic oligonucleotide
aacctcattgtggcgaggtatgcactttta

SEQ ID NO: 128655 - DNA, 30 bp, Artificial Sequence
  Synthetic oligonucleotide
ctgcggtacgtgcacgctaactggctttta

SEQ ID NO: 128656 - DNA, 30 bp, Artificial Sequence
  Synthetic oligonucleotide
ggacactatgtctgctcggcgaaagtttta

SEQ ID NO: 128657 - DNA, 30 bp, Artificial Sequence
  Synthetic oligonucleotide
gcatcggacgaaaaataagcttgagtttta

SEQ ID NO: 128658 - DNA, 30 bp, Artificial Sequence
  Synthetic oligonucleotide
aacgcgtcagtctcgagaagcaaggtttta

SEQ ID NO: 128659 - DNA, 30 bp, Artificial Sequence
  Synthetic oligonucleotide
agtggggtacccgcaaagatcggtttttta

SEQ ID NO: 128660 - DNA, 30 bp, Artificial Sequence
  Synthetic oligonucleotide
ccaccgtggtcgggaccgtaaccgaaaaac

SEQ ID NO: 128661 - DNA, 30 bp, Artificial Sequence
  Synthetic oligonucleotide
cgtcactcaacaggagagggagtgaaaaac

SEQ ID NO: 128662 - DNA, 30 bp, Artificial Sequence
  Synthetic oligonucleotide
accgaattcataagcctggaacttaaaaac

SEQ ID NO: 128663 - DNA, 30 bp, Artificial Sequence
  Synthetic oligonucleotide
cttccgcaacgtcagagggggtagcaaaac

SEQ ID NO: 128664 - DNA, 30 bp, Artificial Sequence
  Synthetic oligonucleotide
taacataagtgtgctggagagggcgaaaac

SEQ ID NO: 128665 - DNA, 30 bp, Artificial Sequence
  Synthetic oligonucleotide
ggatgcagggggcctgcgattgcggaaaac

SEQ ID NO: 128666 - DNA, 30 bp, Artificial Sequence
  Synthetic oligonucleotide
acgaataggataagcgagcctagtgaaaac

SEQ ID NO: 128667 - DNA, 30 bp, Artificial Sequence
  Synthetic oligonucleotide
ccacctcgggaaattccgtagaactaaaac

SEQ ID NO: 128668 - DNA, 30 bp, Artificial Sequence
  Synthetic oligonucleotide
tttcagtatctttcctaaccgcactaaaac

SEQ ID NO: 128669 - DNA, 30 bp, Artificial Sequence
  Synthetic oligonucleotide
aaaactgacgcccagaaggtcacttaaaac

SEQ ID NO: 128670 - DNA, 30 bp, Artificial Sequence
  Synthetic oligonucleotide
gtaaacaagccctgcgcaacaggcacaaac

SEQ ID NO: 128671 - DNA, 30 bp, Artificial Sequence
  Synthetic oligonucleotide
gtacgatcagcataatcgacattgacaaac

SEQ ID NO: 128672 - DNA, 30 bp, Artificial Sequence
  Synthetic oligonucleotide
ggccttaatcgtatgtacgtccacccaaac

SEQ ID NO: 128673 - DNA, 30 bp, Artificial Sequence
  Synthetic oligonucleotide
atttatgcgaaaaggcacctaaccccaaac

SEQ ID NO: 128674 - DNA, 30 bp, Artificial Sequence
  Synthetic oligonucleotide
cagatggaaagcagcaactcatcgccaaac

SEQ ID NO: 128675 - DNA, 30 bp, Artificial Sequence
  Synthetic oligonucleotide
cttagtcctatgcatcctaaatcagcaaac

SEQ ID NO: 128676 - DNA, 30 bp, Artificial Sequence
  Synthetic oligonucleotide
tggatctgatcaagggtcattatggcaaac

SEQ ID NO: 128677 - DNA, 30 bp, Artificial Sequence
  Synthetic oligonucleotide
gatgttgggatctggaaagtgctggcaaac

SEQ ID NO: 128678 - DNA, 30 bp, Artificial Sequence
  Synthetic oligonucleotide
gatcccgacttgagggaagatgttgcaaac

SEQ ID NO: 128679 - DNA, 30 bp, Artificial Sequence
  Synthetic oligonucleotide
ataggacatctacaattacctgtctcaaac

SEQ ID NO: 128680 - DNA, 30 bp, Artificial Sequence
  Synthetic oligonucleotide
gagcgaaggaagaaagtgccaatttcaaac

SEQ ID NO: 128681 - DNA, 30 bp, Artificial Sequence
  Synthetic oligonucleotide
aatggccacatggttggagtgaaaagaaac

SEQ ID NO: 128682 - DNA, 30 bp, Artificial Sequence
  Synthetic oligonucleotide
gggagaggctccgaaggctgctaaagaaac

SEQ ID NO: 128683 - DNA, 30 bp, Artificial Sequence
  Synthetic oligonucleotide
ctacgagggatggaggggatgctaagaaac

SEQ ID NO: 128684 - DNA, 30 bp, Artificial Sequence
  Synthetic oligonucleotide
ggtctacgagaccccgggtgccgcagaaac

SEQ ID NO: 128685 - DNA, 30 bp, Artificial Sequence
  Synthetic oligonucleotide
taccgagagatggagcggagagcgagaaac

SEQ ID NO: 128686 - DNA, 30 bp, Artificial Sequence
  Synthetic oligonucleotide
aatcggcataagccaagtacctggagaaac

SEQ ID NO: 128687 - DNA, 30 bp, Artificial Sequence
  Synthetic oligonucleotide
tttaggactgggctttggggggtgagaaac

SEQ ID NO: 128688 - DNA, 30 bp, Artificial Sequence
  Synthetic oligonucleotide
aagacttcgcccggaaatctgagtagaaac

SEQ ID NO: 128689 - DNA, 30 bp, Artificial Sequence
  Synthetic oligonucleotide
ccggttagacagagtgcaacggttagaaac

SEQ ID NO: 128690 - DNA, 30 bp, Artificial Sequence
  Synthetic oligonucleotide
cgccggatttatgattctccgcatcgaaac

SEQ ID NO: 128691 - DNA, 30 bp, Artificial Sequence
  Synthetic oligonucleotide
aaccatcgtcaactggggtaacctcgaaac

SEQ ID NO: 128692 - DNA, 30 bp, Artificial Sequence
  Synthetic oligonucleotide
tacgggtagcggcacctacgcttaggaaac

SEQ ID NO: 128693 - DNA, 30 bp, Artificial Sequence
  Synthetic oligonucleotide
caggccacttcgaacaagataggcggaaac

SEQ ID NO: 128694 - DNA, 30 bp, Artificial Sequence
  Synthetic oligonucleotide
tcgacattgaaccccatagatattggaaac

SEQ ID NO: 128695 - DNA, 30 bp, Artificial Sequence
  Synthetic oligonucleotide
ctatggtgaggggacttacaacaaataaac

SEQ ID NO: 128696 - DNA, 30 bp, Artificial Sequence
  Synthetic oligonucleotide
tgcggggccggggtaggcaaaataataaac

SEQ ID NO: 128697 - DNA, 30 bp, Artificial Sequence
  Synthetic oligonucleotide
tctagacttaaataaaagacaagcataaac

SEQ ID NO: 128698 - DNA, 30 bp, Artificial Sequence
  Synthetic oligonucleotide
taacagggtgatgagacgatggggataaac

SEQ ID NO: 128699 - DNA, 30 bp, Artificial Sequence
  Synthetic oligonucleotide
gcacgaacgctcggatgggttgaactaaac

SEQ ID NO: 128700 - DNA, 30 bp, Artificial Sequence
  Synthetic oligonucleotide
gaaacaccgtaccacaaggagcgactaaac

SEQ ID NO: 128701 - DNA, 30 bp, Artificial Sequence
  Synthetic oligonucleotide
gcagtggcgatatacgaaaggtgactaaac

SEQ ID NO: 128702 - DNA, 30 bp, Artificial Sequence
  Synthetic oligonucleotide
atgcgtcacacctagggatcttagctaaac

SEQ ID NO: 128703 - DNA, 30 bp, Artificial Sequence
  Synthetic oligonucleotide
gtaggacaaaactgaacaaacctggtaaac

SEQ ID NO: 128704 - DNA, 30 bp, Artificial Sequence
  Synthetic oligonucleotide
agtgtaaagggcgttaagcggtctgtaaac

SEQ ID NO: 128705 - DNA, 30 bp, Artificial Sequence
  Synthetic oligonucleotide
cggtaggcatggcagtaggcacaattaaac

SEQ ID NO: 128706 - DNA, 30 bp, Artificial Sequence
  Synthetic oligonucleotide
acatcgccaactatgctatgcctcttaaac

SEQ ID NO: 128707 - DNA, 30 bp, Artificial Sequence
  Synthetic oligonucleotide
ccaagaccgcgtcggtcatcccaaaacaac

SEQ ID NO: 128708 - DNA, 30 bp, Artificial Sequence
  Synthetic oligonucleotide
agcgcacgtgtgcagaatctaggaaacaac

SEQ ID NO: 128709 - DNA, 30 bp, Artificial Sequence
  Synthetic oligonucleotide
cagtcataagcgtatgtgtctgtaaacaac

SEQ ID NO: 128710 - DNA, 30 bp, Artificial Sequence
  Synthetic oligonucleotide
cagtacggtactgtaactcagactaacaac

SEQ ID NO: 128711 - DNA, 30 bp, Artificial Sequence
  Synthetic oligonucleotide
atcatgtctcgataaaagtgcgaacacaac

SEQ ID NO: 128712 - DNA, 30 bp, Artificial Sequence
  Synthetic oligonucleotide
gctgggaagcttggctagatacaccacaac

SEQ ID NO: 128713 - DNA, 30 bp, Artificial Sequence
  Synthetic oligonucleotide
aattcaactaaggtactagacagagacaac

SEQ ID NO: 128714 - DNA, 30 bp, Artificial Sequence
  Synthetic oligonucleotide
gacctagccagcaaccaacttggcgacaac

SEQ ID NO: 128715 - DNA, 30 bp, Artificial Sequence
  Synthetic oligonucleotide
gataaatgctagacagatcaataatacaac

SEQ ID NO: 128716 - DNA, 30 bp, Artificial Sequence
  Synthetic oligonucleotide
gcaacaaagcaggaaccgaattcctacaac

SEQ ID NO: 128717 - DNA, 30 bp, Artificial Sequence
  Synthetic oligonucleotide
cttgtcccaccgctcaatcgcccttacaac

SEQ ID NO: 128718 - DNA, 30 bp, Artificial Sequence
  Synthetic oligonucleotide
gccgagtaggtagcaccgagggcttacaac

SEQ ID NO: 128719 - DNA, 30 bp, Artificial Sequence
  Synthetic oligonucleotide
gctagacataatgatgttatctgttacaac

SEQ ID NO: 128720 - DNA, 30 bp, Artificial Sequence
  Synthetic oligonucleotide
ttattctcaataacggtaaggctcaccaac

SEQ ID NO: 128721 - DNA, 30 bp, Artificial Sequence
  Synthetic oligonucleotide
gcaggccggtagtgaatcgtagagaccaac

SEQ ID NO: 128722 - DNA, 29 bp, Artificial Sequence
  Synthetic oligonucleotide
atggctcactacgctccgaactgaccaac

SEQ ID NO: 128723 - DNA, 30 bp, Artificial Sequence
  Synthetic oligonucleotide
accctcaagagtgtgtgttttgtgaccaac

SEQ ID NO: 128724 - DNA, 30 bp, Artificial Sequence
  Synthetic oligonucleotide
aaggggatggaacggactatacgtaccaac

SEQ ID NO: 128725 - DNA, 30 bp, Artificial Sequence
  Synthetic oligonucleotide
gcccccgaagactaggaactctcacccaac

SEQ ID NO: 128726 - DNA, 30 bp, Artificial Sequence
  Synthetic oligonucleotide
cgaactcacaggaggccataaagccccaac

SEQ ID NO: 128727 - DNA, 30 bp, Artificial Sequence
  Synthetic oligonucleotide
tcggccaatgggcaaattatagccgccaac

SEQ ID NO: 128728 - DNA, 30 bp, Artificial Sequence
  Synthetic oligonucleotide
agatgcgcgctggtaaatgccttcgccaac

SEQ ID NO: 128729 - DNA, 30 bp, Artificial Sequence
  Synthetic oligonucleotide
aggaggataaaatgctcctcaatatccaac

SEQ ID NO: 128730 - DNA, 30 bp, Artificial Sequence
  Synthetic oligonucleotide
cacgagtcttatccgatccccagctccaac

SEQ ID NO: 128731 - DNA, 30 bp, Artificial Sequence
  Synthetic oligonucleotide
gccgtcaggctagaaatttattagtccaac

SEQ ID NO: 128732 - DNA, 30 bp, Artificial Sequence
  Synthetic oligonucleotide
acagcggcgaatcattccatcataagcaac

SEQ ID NO: 128733 - DNA, 30 bp, Artificial Sequence
  Synthetic oligonucleotide
gtgactgttgccgtcgggtggcctagcaac

SEQ ID NO: 128734 - DNA, 30 bp, Artificial Sequence
  Synthetic oligonucleotide
aggaaacttacacagagacattttagcaac

SEQ ID NO: 128735 - DNA, 30 bp, Artificial Sequence
  Synthetic oligonucleotide
ttgcaacacacgacttatgagcagcgcaac

SEQ ID NO: 128736 - DNA, 30 bp, Artificial Sequence
  Synthetic oligonucleotide
acaacacgcggcatagtaggaacgcgcaac

SEQ ID NO: 128737 - DNA, 30 bp, Artificial Sequence
  Synthetic oligonucleotide
acaaggtccgggactgcttattgcggcaac

SEQ ID NO: 128738 - DNA, 30 bp, Artificial Sequence
  Synthetic oligonucleotide
cggtagggatagtaaataccggagggcaac

SEQ ID NO: 128739 - DNA, 30 bp, Artificial Sequence
  Synthetic oligonucleotide
acgtgattgtgggaataaagcgtgggcaac

SEQ ID NO: 128740 - DNA, 30 bp, Artificial Sequence
  Synthetic oligonucleotide
cgcatgtactcttaggaatgggtatgcaac

SEQ ID NO: 128741 - DNA, 30 bp, Artificial Sequence
  Synthetic oligonucleotide
ttcgggcacatcaatatagataactgcaac

SEQ ID NO: 128742 - DNA, 30 bp, Artificial Sequence
  Synthetic oligonucleotide
ggagcacaattggctagggatcgcatcaac

SEQ ID NO: 128743 - DNA, 30 bp, Artificial Sequence
  Synthetic oligonucleotide
ggcggttcaatcgtatcgttactcatcaac

SEQ ID NO: 128744 - DNA, 30 bp, Artificial Sequence
  Synthetic oligonucleotide
agaattaaagatacaaaaagagcactcaac

SEQ ID NO: 128745 - DNA, 30 bp, Artificial Sequence
  Synthetic oligonucleotide
atcgggagcgtgcgtagaagttgactcaac

SEQ ID NO: 128746 - DNA, 30 bp, Artificial Sequence
  Synthetic oligonucleotide
tgatgaaccttcagcaatcttcggctcaac

SEQ ID NO: 128747 - DNA, 30 bp, Artificial Sequence
  Synthetic oligonucleotide
tgtacagcggggttgggtgattaggtcaac

SEQ ID NO: 128748 - DNA, 30 bp, Artificial Sequence
  Synthetic oligonucleotide
caatcagagggggtaatcctaccggtcaac

SEQ ID NO: 128749 - DNA, 30 bp, Artificial Sequence
  Synthetic oligonucleotide
ctcggaatgagacgaagtacctgcttcaac

SEQ ID NO: 128750 - DNA, 30 bp, Artificial Sequence
  Synthetic oligonucleotide
cgccccattcggtgtggcgtgaatttcaac

SEQ ID NO: 128751 - DNA, 30 bp, Artificial Sequence
  Synthetic oligonucleotide
ccggaggacgtggatgaaggaattttcaac

SEQ ID NO: 128752 - DNA, 30 bp, Artificial Sequence
  Synthetic oligonucleotide
gcgaagagttaagacaaatcatcaaagaac

SEQ ID NO: 128753 - DNA, 30 bp, Artificial Sequence
  Synthetic oligonucleotide
tgctccataataggggggagattcaagaac

SEQ ID NO: 128754 - DNA, 30 bp, Artificial Sequence
  Synthetic oligonucleotide
gccatcagcgctaggtgattggtgcagaac

SEQ ID NO: 128755 - DNA, 30 bp, Artificial Sequence
  Synthetic oligonucleotide
gaattgcgttcacaggctcgtaacgagaac

SEQ ID NO: 128756 - DNA, 30 bp, Artificial Sequence
  Synthetic oligonucleotide
tcttgtttgcgtacttgctgaaattagaac

SEQ ID NO: 128757 - DNA, 30 bp, Artificial Sequence
  Synthetic oligonucleotide
cggaaggccacgccccaaacttggacgaac

SEQ ID NO: 128758 - DNA, 30 bp, Artificial Sequence
  Synthetic oligonucleotide
ctacagccttgcacaccattctggccgaac

SEQ ID NO: 128759 - DNA, 30 bp, Artificial Sequence
  Synthetic oligonucleotide
cacggtatatgtctcgctagtcgagcgaac

SEQ ID NO: 128760 - DNA, 30 bp, Artificial Sequence
  Synthetic oligonucleotide
tcatccggcgagtagccgtattcggcgaac

SEQ ID NO: 128761 - DNA, 30 bp, Artificial Sequence
  Synthetic oligonucleotide
agtaacattgaggcaaaggttgctgcgaac

SEQ ID NO: 128762 - DNA, 30 bp, Artificial Sequence
  Synthetic oligonucleotide
gcgtctcaagtcgggtgccggccctcgaac

SEQ ID NO: 128763 - DNA, 30 bp, Artificial Sequence
  Synthetic oligonucleotide
acaaacgcatccgggggggtgagctcgaac

SEQ ID NO: 128764 - DNA, 30 bp, Artificial Sequence
  Synthetic oligonucleotide
catttattgtccaggatatcagagtcgaac

SEQ ID NO: 128765 - DNA, 30 bp, Artificial Sequence
  Synthetic oligonucleotide
cggacatgccgaattttataagcgaggaac

SEQ ID NO: 128766 - DNA, 30 bp, Artificial Sequence
  Synthetic oligonucleotide
gatcatatgctctgagaacactggcggaac

SEQ ID NO: 128767 - DNA, 30 bp, Artificial Sequence
  Synthetic oligonucleotide
cttcaggggcatatggcactagtgcggaac

SEQ ID NO: 128768 - DNA, 30 bp, Artificial Sequence
  Synthetic oligonucleotide
cagtatcgtgtagtcagtcaaactcggaac

SEQ ID NO: 128769 - DNA, 30 bp, Artificial Sequence
  Synthetic oligonucleotide
tgatcgcgaagtaatcctcgtgtcgggaac

SEQ ID NO: 128770 - DNA, 30 bp, Artificial Sequence
  Synthetic oligonucleotide
acacaaaaaagtatgcgacggggggggaac

SEQ ID NO: 128771 - DNA, 30 bp, Artificial Sequence
  Synthetic oligonucleotide
cggttgactggataagggtaatgggggaac

SEQ ID NO: 128772 - DNA, 30 bp, Artificial Sequence
  Synthetic oligonucleotide
cttagctgcccaatggtcaggggcatgaac

SEQ ID NO: 128773 - DNA, 30 bp, Artificial Sequence
  Synthetic oligonucleotide
gcgccatagtgatcctagttatggatgaac

SEQ ID NO: 128774 - DNA, 30 bp, Artificial Sequence
  Synthetic oligonucleotide
ctgccgaaggaaagaaaggccgaactgaac

SEQ ID NO: 128775 - DNA, 30 bp, Artificial Sequence
  Synthetic oligonucleotide
aatgggctaggacagcgcgtgcaagtgaac

SEQ ID NO: 128776 - DNA, 30 bp, Artificial Sequence
  Synthetic oligonucleotide
agggacactaagctgaggccctaagtgaac

SEQ ID NO: 128777 - DNA, 30 bp, Artificial Sequence
  Synthetic oligonucleotide
ctcgcgattgatgtgacacaaacggtgaac

SEQ ID NO: 128778 - DNA, 30 bp, Artificial Sequence
  Synthetic oligonucleotide
aaggtctcataaatggtgtggttggtgaac

SEQ ID NO: 128779 - DNA, 30 bp, Artificial Sequence
  Synthetic oligonucleotide
agacccagcgcgcgttcgaaccacttgaac

SEQ ID NO: 128780 - DNA, 30 bp, Artificial Sequence
  Synthetic oligonucleotide
tagggcaatggtctataccaatcaaataac

SEQ ID NO: 128781 - DNA, 30 bp, Artificial Sequence
  Synthetic oligonucleotide
gcatccttacatgcgaggaacacgaataac

SEQ ID NO: 128782 - DNA, 30 bp, Artificial Sequence
  Synthetic oligonucleotide
gtacgtctgctcacaagtgcgatccataac

SEQ ID NO: 128783 - DNA, 30 bp, Artificial Sequence
  Synthetic oligonucleotide
agcgaaattggtgctaaaagtattcataac

SEQ ID NO: 128784 - DNA, 30 bp, Artificial Sequence
  Synthetic oligonucleotide
gcatccaacatcaaggaggcatacgataac

SEQ ID NO: 128785 - DNA, 30 bp, Artificial Sequence
  Synthetic oligonucleotide
aaggataaaatctggaatacggtggataac

SEQ ID NO: 128786 - DNA, 30 bp, Artificial Sequence
  Synthetic oligonucleotide
gaaataaggggggtccatcgtttggataac

SEQ ID NO: 128787 - DNA, 30 bp, Artificial Sequence
  Synthetic oligonucleotide
cgtggtattaaagctcccaagatatataac

SEQ ID NO: 128788 - DNA, 30 bp, Artificial Sequence
  Synthetic oligonucleotide
actcaatcgtaactcttcaactccactaac

SEQ ID NO: 128789 - DNA, 30 bp, Artificial Sequence
  Synthetic oligonucleotide
acctggactgataaaagaacatatactaac

SEQ ID NO: 128790 - DNA, 30 bp, Artificial Sequence
  Synthetic oligonucleotide
gagaccgataacgcacgataatagcctaac

SEQ ID NO: 128791 - DNA, 30 bp, Artificial Sequence
  Synthetic oligonucleotide
cacgactatccgcgcaaatcacatcctaac

SEQ ID NO: 128792 - DNA, 30 bp, Artificial Sequence
  Synthetic oligonucleotide
tgggaatgcaccgaccggtagattcctaac

SEQ ID NO: 128793 - DNA, 30 bp, Artificial Sequence
  Synthetic oligonucleotide
tagaaacagataacggttagtattcctaac

SEQ ID NO: 128794 - DNA, 30 bp, Artificial Sequence
  Synthetic oligonucleotide
gatggggtccgaccgttctctgttcctaac

SEQ ID NO: 128795 - DNA, 30 bp, Artificial Sequence
  Synthetic oligonucleotide
tcggaggcatgacaatatcctcttgctaac

SEQ ID NO: 128796 - DNA, 30 bp, Artificial Sequence
  Synthetic oligonucleotide
ttaaccgtctcagtacataaaagatctaac

SEQ ID NO: 128797 - DNA, 30 bp, Artificial Sequence
  Synthetic oligonucleotide
agacggccttgagaatgaagcttaagtaac

SEQ ID NO: 128798 - DNA, 30 bp, Artificial Sequence
  Synthetic oligonucleotide
cgtccaagactaggttcattgcaccgtaac

SEQ ID NO: 128799 - DNA, 30 bp, Artificial Sequence
  Synthetic oligonucleotide
aaggcatcgactttgattgctgcccgtaac

SEQ ID NO: 128800 - DNA, 30 bp, Artificial Sequence
  Synthetic oligonucleotide
cagctgcggaagattaggtaaaaaggtaac

SEQ ID NO: 128801 - DNA, 30 bp, Artificial Sequence
  Synthetic oligonucleotide
ttggactcgatgcatagcgtctggggtaac

SEQ ID NO: 128802 - DNA, 30 bp, Artificial Sequence
  Synthetic oligonucleotide
tgagtggctcaaatgtcgatgaatggtaac

SEQ ID NO: 128803 - DNA, 30 bp, Artificial Sequence
  Synthetic oligonucleotide
ggggacccagatcttacgtacccaattaac

SEQ ID NO: 128804 - DNA, 30 bp, Artificial Sequence
  Synthetic oligonucleotide
aagagggctgtctcagtgtgcgtgattaac

SEQ ID NO: 128805 - DNA, 30 bp, Artificial Sequence
  Synthetic oligonucleotide
taaccgtggggaaagatgatgggtattaac

SEQ ID NO: 128806 - DNA, 30 bp, Artificial Sequence
  Synthetic oligonucleotide
aggttgcctgtgggcaaggcgggtcttaac

SEQ ID NO: 128807 - DNA, 30 bp, Artificial Sequence
  Synthetic oligonucleotide
gcatacaatgctccgtcctagggagttaac

SEQ ID NO: 128808 - DNA, 30 bp, Artificial Sequence
  Synthetic oligonucleotide
agcggatccagggtaggtatagatgttaac

SEQ ID NO: 128809 - DNA, 30 bp, Artificial Sequence
  Synthetic oligonucleotide
caggtacgtttgtatagagaacttgttaac

SEQ ID NO: 128810 - DNA, 30 bp, Artificial Sequence
  Synthetic oligonucleotide
aaatgcaagtatgagagagagatatttaac

SEQ ID NO: 128811 - DNA, 30 bp, Artificial Sequence
  Synthetic oligonucleotide
attcagccaagtctgagttcgaaaaaacac

SEQ ID NO: 128812 - DNA, 30 bp, Artificial Sequence
  Synthetic oligonucleotide
acccgataggaaccaactaacacaaaacac

SEQ ID NO: 128813 - DNA, 30 bp, Artificial Sequence
  Synthetic oligonucleotide
tcaatgtcgtcgatgcgtatttcaaaacac

SEQ ID NO: 128814 - DNA, 34 bp, Artificial Sequence
  Synthetic oligonucleotide
gatactagaccaccacgggtccatcagaaaacac

SEQ ID NO: 128815 - DNA, 30 bp, Artificial Sequence
  Synthetic oligonucleotide
cgaccggtgagggagatctcgagaaaacac

SEQ ID NO: 128816 - DNA, 30 bp, Artificial Sequence
  Synthetic oligonucleotide
gccagatagaaagccccggcctacaaacac

SEQ ID NO: 128817 - DNA, 30 bp, Artificial Sequence
  Synthetic oligonucleotide
gcttagaaaaaggtatatgaactcaaacac

SEQ ID NO: 128818 - DNA, 30 bp, Artificial Sequence
  Synthetic oligonucleotide
catgcggggggttgcctcgagttcaaacac

SEQ ID NO: 128819 - DNA, 31 bp, Artificial Sequence
  Synthetic oligonucleotide
gcacacagtcagcagtgaggcttcgaaacac

SEQ ID NO: 128820 - DNA, 30 bp, Artificial Sequence
  Synthetic oligonucleotide
attaccacttcgaataggatactgaaacac

SEQ ID NO: 128821 - DNA, 30 bp, Artificial Sequence
  Synthetic oligonucleotide
taaacgtgtgtcaatcaagtagctaaacac

SEQ ID NO: 128822 - DNA, 30 bp, Artificial Sequence
  Synthetic oligonucleotide
gtcgcgtcgcctggcgcacctgagcaacac

SEQ ID NO: 128823 - DNA, 30 bp, Artificial Sequence
  Synthetic oligonucleotide
tgggagaagggatattttgacgattaacac

SEQ ID NO: 128824 - DNA, 30 bp, Artificial Sequence
  Synthetic oligonucleotide
aggcaggggcggcttttttcaagttaacac

SEQ ID NO: 128825 - DNA, 30 bp, Artificial Sequence
  Synthetic oligonucleotide
tgttaacatcagaggtgactactttaacac

SEQ ID NO: 128826 - DNA, 30 bp, Artificial Sequence
  Synthetic oligonucleotide
actagggtggattaccaaaactacacacac

SEQ ID NO: 128827 - DNA, 30 bp, Artificial Sequence
  Synthetic oligonucleotide
cgttgcggggtaataggagagagtacacac

SEQ ID NO: 128828 - DNA, 30 bp, Artificial Sequence
  Synthetic oligonucleotide
agagacttccggaaattaacatggccacac

SEQ ID NO: 128829 - DNA, 30 bp, Artificial Sequence
  Synthetic oligonucleotide
aggggacggtgaatggtactcgtagcacac

SEQ ID NO: 128830 - DNA, 30 bp, Artificial Sequence
  Synthetic oligonucleotide
cggttgataccgctgtgtaaattagcacac

SEQ ID NO: 128831 - DNA, 30 bp, Artificial Sequence
  Synthetic oligonucleotide
ttaccgagatatctctcggccagctcacac

SEQ ID NO: 128832 - DNA, 30 bp, Artificial Sequence
  Synthetic oligonucleotide
aaggcaaatctaacggttatgctgtcacac

SEQ ID NO: 128833 - DNA, 30 bp, Artificial Sequence
  Synthetic oligonucleotide
ataagcacttagggaatagcccattcacac

SEQ ID NO: 128834 - DNA, 30 bp, Artificial Sequence
  Synthetic oligonucleotide
agcctcataaatatattcgcacccagacac

SEQ ID NO: 128835 - DNA, 30 bp, Artificial Sequence
  Synthetic oligonucleotide
ccgttataacgtaagttcgcgtcgagacac

SEQ ID NO: 128836 - DNA, 30 bp, Artificial Sequence
  Synthetic oligonucleotide
agctaatggtaaggagcctacaggcgacac

SEQ ID NO: 128837 - DNA, 30 bp, Artificial Sequence
  Synthetic oligonucleotide
aatctctgaagacaatgttcacatcgacac

SEQ ID NO: 128838 - DNA, 30 bp, Artificial Sequence
  Synthetic oligonucleotide
agggatgggccgtcgtttcatcgcggacac

SEQ ID NO: 128839 - DNA, 30 bp, Artificial Sequence
  Synthetic oligonucleotide
caaaggcttattacaggaggagaatgacac

SEQ ID NO: 128840 - DNA, 30 bp, Artificial Sequence
  Synthetic oligonucleotide
caggtcataataacgttcctaatgtgacac

SEQ ID NO: 128841 - DNA, 30 bp, Artificial Sequence
  Synthetic oligonucleotide
gtcgagctggcagtaatgaagttgctacac

SEQ ID NO: 128842 - DNA, 30 bp, Artificial Sequence
  Synthetic oligonucleotide
attagattgcaacttcagactcatctacac

SEQ ID NO: 128843 - DNA, 30 bp, Artificial Sequence
  Synthetic oligonucleotide
gggaaccgcattcagagaaagagtctacac

SEQ ID NO: 128844 - DNA, 30 bp, Artificial Sequence
  Synthetic oligonucleotide
cactcccgttttaaattgccctgagtacac

SEQ ID NO: 128845 - DNA, 30 bp, Artificial Sequence
  Synthetic oligonucleotide
tacgcggttctcgataacggctaggtacac

SEQ ID NO: 128846 - DNA, 30 bp, Artificial Sequence
  Synthetic oligonucleotide
aacatcgctgtgaacgggctattcttacac

SEQ ID NO: 128847 - DNA, 30 bp, Artificial Sequence
  Synthetic oligonucleotide
ggctaatcaaactcacctggtcagttacac

SEQ ID NO: 128848 - DNA, 30 bp, Artificial Sequence
  Synthetic oligonucleotide
caacagccgaatcggttgctgctaaaccac

SEQ ID NO: 128849 - DNA, 30 bp, Artificial Sequence
  Synthetic oligonucleotide
cctgcaccgtgtacgataatgctcaaccac

SEQ ID NO: 128850 - DNA, 30 bp, Artificial Sequence
  Synthetic oligonucleotide
agagcatgtctgcgcgtaggagcgaaccac

SEQ ID NO: 128851 - DNA, 31 bp, Artificial Sequence
  Synthetic oligonucleotide
ttgtaggtcggtagagtaatcatataaccac

SEQ ID NO: 128852 - DNA, 30 bp, Artificial Sequence
  Synthetic oligonucleotide
catcggttaccgatatcatttactgaccac

SEQ ID NO: 128853 - DNA, 30 bp, Artificial Sequence
  Synthetic oligonucleotide
ggccggagactggtggaaagtgaataccac

SEQ ID NO: 128854 - DNA, 30 bp, Artificial Sequence
  Synthetic oligonucleotide
tatgcataaaagagtcatctcatctaccac

SEQ ID NO: 128855 - DNA, 30 bp, Artificial Sequence
  Synthetic oligonucleotide
acgtcctgtcaaggctgaactcagtaccac

SEQ ID NO: 128856 - DNA, 30 bp, Artificial Sequence
  Synthetic oligonucleotide
gtgcgcgacaggctaagatgtgccacccac

SEQ ID NO: 128857 - DNA, 30 bp, Artificial Sequence
  Synthetic oligonucleotide
tgcaatggacggttggttaccactacccac

SEQ ID NO: 128858 - DNA, 30 bp, Artificial Sequence
  Synthetic oligonucleotide
tgatgcgcatatagatggataacctcccac

SEQ ID NO: 128859 - DNA, 30 bp, Artificial Sequence
  Synthetic oligonucleotide
ccagctctattaggccaggtaaagtcccac

SEQ ID NO: 128860 - DNA, 30 bp, Artificial Sequence
  Synthetic oligonucleotide
gcggcttctagcaggagtacgctaagccac

SEQ ID NO: 128861 - DNA, 30 bp, Artificial Sequence
  Synthetic oligonucleotide
acggtggagagaggaagttagtacagccac

SEQ ID NO: 128862 - DNA, 30 bp, Artificial Sequence
  Synthetic oligonucleotide
actcgcgaataaaactattaagagagccac

SEQ ID NO: 128863 - DNA, 30 bp, Artificial Sequence
  Synthetic oligonucleotide
tagaaatatacactagtagatacgagccac

SEQ ID NO: 128864 - DNA, 30 bp, Artificial Sequence
  Synthetic oligonucleotide
atggcggcctaatgtgcgaacgttagccac

SEQ ID NO: 128865 - DNA, 30 bp, Artificial Sequence
  Synthetic oligonucleotide
ttaaaataaggttacggccccgttagccac

SEQ ID NO: 128866 - DNA, 30 bp, Artificial Sequence
  Synthetic oligonucleotide
taaagtacgtcataaataacataccgccac

SEQ ID NO: 128867 - DNA, 30 bp, Artificial Sequence
  Synthetic oligonucleotide
ctaagcaggaagagaaccgagcaaggccac

SEQ ID NO: 128868 - DNA, 30 bp, Artificial Sequence
  Synthetic oligonucleotide
tgacgataggctaaaactcgccctggccac

SEQ ID NO: 128869 - DNA, 30 bp, Artificial Sequence
  Synthetic oligonucleotide
ggcctaaactctgaaaagcttatgctccac

SEQ ID NO: 128870 - DNA, 30 bp, Artificial Sequence
  Synthetic oligonucleotide
gcgaagggtttactccaggcagcggtccac

SEQ ID NO: 128871 - DNA, 30 bp, Artificial Sequence
  Synthetic oligonucleotide
cttgcgagtccctcagccaccacattccac

SEQ ID NO: 128872 - DNA, 30 bp, Artificial Sequence
  Synthetic oligonucleotide
ggtgcatagacaggtttgccggcattccac

SEQ ID NO: 128873 - DNA, 30 bp, Artificial Sequence
  Synthetic oligonucleotide
acgtgggctatacacaggagtgccttccac

SEQ ID NO: 128874 - DNA, 30 bp, Artificial Sequence
  Synthetic oligonucleotide
aagtggactcatccagcgtgtgccttccac

SEQ ID NO: 128875 - DNA, 30 bp, Artificial Sequence
  Synthetic oligonucleotide
tagatcccgaattcacggccaattttccac

SEQ ID NO: 128876 - DNA, 30 bp, Artificial Sequence
  Synthetic oligonucleotide
ttaaagtactcaccgatttacatgaagcac

SEQ ID NO: 128877 - DNA, 30 bp, Artificial Sequence
  Synthetic oligonucleotide
ggtgggatgagcttgtgatgatgtaagcac

SEQ ID NO: 128878 - DNA, 30 bp, Artificial Sequence
  Synthetic oligonucleotide
gggtgtctagactaagagctccagtagcac

SEQ ID NO: 128879 - DNA, 30 bp, Artificial Sequence
  Synthetic oligonucleotide
gcgggggcaagttgatggcaatgttagcac

SEQ ID NO: 128880 - DNA, 30 bp, Artificial Sequence
  Synthetic oligonucleotide
gacaaacgcccctgcgtcctgtaaccgcac

SEQ ID NO: 128881 - DNA, 30 bp, Artificial Sequence
  Synthetic oligonucleotide
aaagcaggacttcagactaccagaccgcac

SEQ ID NO: 128882 - DNA, 30 bp, Artificial Sequence
  Synthetic oligonucleotide
ggcttcataggctttgaatgtgagccgcac

SEQ ID NO: 128883 - DNA, 30 bp, Artificial Sequence
  Synthetic oligonucleotide
tggtcaggactattaatgccaaatccgcac

SEQ ID NO: 128884 - DNA, 30 bp, Artificial Sequence
  Synthetic oligonucleotide
acgtattagattgtcaggaggagcgcgcac

SEQ ID NO: 128885 - DNA, 30 bp, Artificial Sequence
  Synthetic oligonucleotide
ggaaaccgtgctcggtccacggatgcgcac

SEQ ID NO: 128886 - DNA, 30 bp, Artificial Sequence
  Synthetic oligonucleotide
gagacatattcgtgtgcaccgaagtcgcac

SEQ ID NO: 128887 - DNA, 30 bp, Artificial Sequence
  Synthetic oligonucleotide
cccctgtgaggagaagcgaacatgtcgcac

SEQ ID NO: 128888 - DNA, 30 bp, Artificial Sequence
  Synthetic oligonucleotide
ggtaaacatagcgtcctttatgtgtcgcac

SEQ ID NO: 128889 - DNA, 30 bp, Artificial Sequence
  Synthetic oligonucleotide
cgactggtatgaaggagtgattcttcgcac

SEQ ID NO: 128890 - DNA, 30 bp, Artificial Sequence
  Synthetic oligonucleotide
aggaatcaagtcggtagactttaaaggcac

SEQ ID NO: 128891 - DNA, 30 bp, Artificial Sequence
  Synthetic oligonucleotide
aaaatactcctgtaaaacctaagcaggcac

SEQ ID NO: 128892 - DNA, 30 bp, Artificial Sequence
  Synthetic oligonucleotide
tgcgggtgctgcaaggtctatcggcggcac

SEQ ID NO: 128893 - DNA, 30 bp, Artificial Sequence
  Synthetic oligonucleotide
agacactatgtcaattcgagccaagggcac

SEQ ID NO: 128894 - DNA, 30 bp, Artificial Sequence
  Synthetic oligonucleotide
cgggacacgtacgaaaaccgctgagggcac

SEQ ID NO: 128895 - DNA, 30 bp, Artificial Sequence
  Synthetic oligonucleotide
aagatctccatgttcccctaatactggcac

SEQ ID NO: 128896 - DNA, 30 bp, Artificial Sequence
  Synthetic oligonucleotide
ttgagataaaaacaacaagtgccttggcac

SEQ ID NO: 128897 - DNA, 30 bp, Artificial Sequence
  Synthetic oligonucleotide
gcgtgcatagagaaaagagttaggatgcac

SEQ ID NO: 128898 - DNA, 30 bp, Artificial Sequence
  Synthetic oligonucleotide
acgaaaataagattctgctcacatctgcac

SEQ ID NO: 128899 - DNA, 30 bp, Artificial Sequence
  Synthetic oligonucleotide
tgacataggtgagagtgtagagttctgcac

SEQ ID NO: 128900 - DNA, 30 bp, Artificial Sequence
  Synthetic oligonucleotide
cataagacgtgttgaccatgccccgtgcac

SEQ ID NO: 128901 - DNA, 30 bp, Artificial Sequence
  Synthetic oligonucleotide
aaaatccattacccatatagtgccgtgcac

SEQ ID NO: 128902 - DNA, 30 bp, Artificial Sequence
  Synthetic oligonucleotide
tggcccaaaatctgctaacctggcgtgcac

SEQ ID NO: 128903 - DNA, 30 bp, Artificial Sequence
  Synthetic oligonucleotide
ggagtagcccagaaacgtcggcgggtgcac

SEQ ID NO: 128904 - DNA, 30 bp, Artificial Sequence
  Synthetic oligonucleotide
ctggctggctaagtctgggggtgattgcac

SEQ ID NO: 128905 - DNA, 30 bp, Artificial Sequence
  Synthetic oligonucleotide
caagttgtcagcgttaatgaagaaaatcac

SEQ ID NO: 128906 - DNA, 30 bp, Artificial Sequence
  Synthetic oligonucleotide
tcgaaccaatgatgtacatataccaatcac

SEQ ID NO: 128907 - DNA, 30 bp, Artificial Sequence
  Synthetic oligonucleotide
ctcctacaatcagcacgaaaattcaatcac

SEQ ID NO: 128908 - DNA, 30 bp, Artificial Sequence
  Synthetic oligonucleotide
caaaggggtcggaaattgtaacataatcac

SEQ ID NO: 128909 - DNA, 30 bp, Artificial Sequence
  Synthetic oligonucleotide
ggacttaagacctctcgcaacctacatcac

SEQ ID NO: 128910 - DNA, 30 bp, Artificial Sequence
  Synthetic oligonucleotide
cgaatagtttcaaagggtggtccccatcac

SEQ ID NO: 128911 - DNA, 30 bp, Artificial Sequence
  Synthetic oligonucleotide
gggggcacggcaaggatagagctagatcac

SEQ ID NO: 128912 - DNA, 30 bp, Artificial Sequence
  Synthetic oligonucleotide
acatacaggaaaccatggaaggcggatcac

SEQ ID NO: 128913 - DNA, 30 bp, Artificial Sequence
  Synthetic oligonucleotide
gcaatgcgaagtcaaattacggatgatcac

SEQ ID NO: 128914 - DNA, 30 bp, Artificial Sequence
  Synthetic oligonucleotide
acatcccgtggatcgaacgacgcctatcac

SEQ ID NO: 128915 - DNA, 30 bp, Artificial Sequence
  Synthetic oligonucleotide
atagtaaaaagttagcatgtccgctatcac

SEQ ID NO: 128916 - DNA, 30 bp, Artificial Sequence
  Synthetic oligonucleotide
tggtcctctagagctaaagaacagtatcac

SEQ ID NO: 128917 - DNA, 30 bp, Artificial Sequence
  Synthetic oligonucleotide
ggcaggttcggaatgatgaggcgtactcac

SEQ ID NO: 128918 - DNA, 30 bp, Artificial Sequence
  Synthetic oligonucleotide
cgaacgcccgataagatagcaatacctcac

SEQ ID NO: 128919 - DNA, 30 bp, Artificial Sequence
  Synthetic oligonucleotide
gggcacagtcatggatgagttgcggctcac

SEQ ID NO: 128920 - DNA, 30 bp, Artificial Sequence
  Synthetic oligonucleotide
tacatcgggatatctgagtccgtggctcac

SEQ ID NO: 128921 - DNA, 30 bp, Artificial Sequence
  Synthetic oligonucleotide
atattaaacataaggcgattgtgaagtcac

SEQ ID NO: 128922 - DNA, 30 bp, Artificial Sequence
  Synthetic oligonucleotide
accaaaaacacgctaggaaactccagtcac

SEQ ID NO: 128923 - DNA, 31 bp, Artificial Sequence
  Synthetic oligonucleotide
tgaaagggtacagcgaccggaggggagtcac

SEQ ID NO: 128924 - DNA, 30 bp, Artificial Sequence
  Synthetic oligonucleotide
tttggagatgtggttatctagcgcggtcac

SEQ ID NO: 128925 - DNA, 30 bp, Artificial Sequence
  Synthetic oligonucleotide
accgaattgtttacaggggcataatgtcac

SEQ ID NO: 128926 - DNA, 30 bp, Artificial Sequence
  Synthetic oligonucleotide
cgagtcatactagcttgcttcagatgtcac

SEQ ID NO: 128927 - DNA, 30 bp, Artificial Sequence
  Synthetic oligonucleotide
ctggcagagataagacgtaaaatatgtcac

SEQ ID NO: 128928 - DNA, 30 bp, Artificial Sequence
  Synthetic oligonucleotide
ggcacagctgtagggggagtaatgtgtcac

SEQ ID NO: 128929 - DNA, 30 bp, Artificial Sequence
  Synthetic oligonucleotide
ccgggtcgagtgacatgtcgatggattcac

SEQ ID NO: 128930 - DNA, 30 bp, Artificial Sequence
  Synthetic oligonucleotide
cagtagtggcgactaagcattgaccttcac

SEQ ID NO: 128931 - DNA, 30 bp, Artificial Sequence
  Synthetic oligonucleotide
caaagtagacaaactccattacagcttcac

SEQ ID NO: 128932 - DNA, 30 bp, Artificial Sequence
  Synthetic oligonucleotide
tgatcaatgaaaggggagagataagttcac

SEQ ID NO: 128933 - DNA, 30 bp, Artificial Sequence
  Synthetic oligonucleotide
gtaatatgtgcgaaagtgggatgggttcac

SEQ ID NO: 128934 - DNA, 30 bp, Artificial Sequence
  Synthetic oligonucleotide
ttaacgtccgagcgcgaatataatgttcac

SEQ ID NO: 128935 - DNA, 30 bp, Artificial Sequence
  Synthetic oligonucleotide
taacggcataggtaatttaagtgtgttcac

SEQ ID NO: 128936 - DNA, 30 bp, Artificial Sequence
  Synthetic oligonucleotide
gaagaatgtcaagggtgggccaaatttcac

SEQ ID NO: 128937 - DNA, 30 bp, Artificial Sequence
  Synthetic oligonucleotide
atccgaaggaggccctgagtcgaaaaagac

SEQ ID NO: 128938 - DNA, 34 bp, Artificial Sequence
  Synthetic oligonucleotide
gatactagcccaccacgtgtccatcacaaaagac

SEQ ID NO: 128939 - DNA, 34 bp, Artificial Sequence
  Synthetic oligonucleotide
gatactacaccaccacgtgtccctcacaaaagac

SEQ ID NO: 128940 - DNA, 34 bp, Artificial Sequence
  Synthetic oligonucleotide
gatactagaccaccacgtgtctatcagaaaagac

SEQ ID NO: 128941 - DNA, 30 bp, Artificial Sequence
  Synthetic oligonucleotide
tggaggaggcgctacactgatcagaaagac

SEQ ID NO: 128942 - DNA, 30 bp, Artificial Sequence
  Synthetic oligonucleotide
caggggcgatgtgaattatgcaggaaagac

SEQ ID NO: 128943 - DNA, 30 bp, Artificial Sequence
  Synthetic oligonucleotide
taagcaatggctactcaattgtctaaagac

SEQ ID NO: 128944 - DNA, 30 bp, Artificial Sequence
  Synthetic oligonucleotide
ggtcctggaccaacagatcatcaccaagac

SEQ ID NO: 128945 - DNA, 30 bp, Artificial Sequence
  Synthetic oligonucleotide
gggagcgactccgtcaatgatactcaagac

SEQ ID NO: 128946 - DNA, 30 bp, Artificial Sequence
  Synthetic oligonucleotide
gcgtatggcgcggggcatgaggttcaagac

SEQ ID NO: 128947 - DNA, 30 bp, Artificial Sequence
  Synthetic oligonucleotide
ggcactatctaatcaactaaacaagaagac

SEQ ID NO: 128948 - DNA, 30 bp, Artificial Sequence
  Synthetic oligonucleotide
tgtcaggaaagggcgaaattataggaagac

SEQ ID NO: 128949 - DNA, 30 bp, Artificial Sequence
  Synthetic oligonucleotide
gtcactgcggcatatatgattcgggaagac

SEQ ID NO: 128950 - DNA, 30 bp, Artificial Sequence
  Synthetic oligonucleotide
acagatggcaatggtcgggagacataagac

SEQ ID NO: 128951 - DNA, 30 bp, Artificial Sequence
  Synthetic oligonucleotide
atctcactattgtatgatacacactaagac

SEQ ID NO: 128952 - DNA, 30 bp, Artificial Sequence
  Synthetic oligonucleotide
ggggcagacgcgacctcctcgtgctaagac

SEQ ID NO: 128953 - DNA, 30 bp, Artificial Sequence
  Synthetic oligonucleotide
ggggatccttgccgtctcctgctctaagac

SEQ ID NO: 128954 - DNA, 30 bp, Artificial Sequence
  Synthetic oligonucleotide
cttagcctcgggacaggcgcgtgttaagac

SEQ ID NO: 128955 - DNA, 30 bp, Artificial Sequence
  Synthetic oligonucleotide
ttgttgcaagcgacaacataagtcacagac

SEQ ID NO: 128956 - DNA, 30 bp, Artificial Sequence
  Synthetic oligonucleotide
acaagatccgcgatggaactaacgacagac

SEQ ID NO: 128957 - DNA, 30 bp, Artificial Sequence
  Synthetic oligonucleotide
tattgaattgggttcgaaaataatacagac

SEQ ID NO: 128958 - DNA, 30 bp, Artificial Sequence
  Synthetic oligonucleotide
gcagcacaatactcgatagtattaccagac

SEQ ID NO: 128959 - DNA, 30 bp, Artificial Sequence
  Synthetic oligonucleotide
tcaccttaataagctaaccctcccccagac

SEQ ID NO: 128960 - DNA, 30 bp, Artificial Sequence
  Synthetic oligonucleotide
cacgcctacgtgcatgctggggttccagac

SEQ ID NO: 128961 - DNA, 30 bp, Artificial Sequence
  Synthetic oligonucleotide
actgcgtaaggtaagagagactccagagac

SEQ ID NO: 128962 - DNA, 30 bp, Artificial Sequence
  Synthetic oligonucleotide
cagctaggtcgcaatattatcatgagagac

SEQ ID NO: 128963 - DNA, 30 bp, Artificial Sequence
  Synthetic oligonucleotide
tgcaaattgcgcaggcaggaccctagagac

SEQ ID NO: 128964 - DNA, 30 bp, Artificial Sequence
  Synthetic oligonucleotide
ctatagcctaatcaatagtgcgctagagac

SEQ ID NO: 128965 - DNA, 30 bp, Artificial Sequence
  Synthetic oligonucleotide
taggatttaagcaggagggataatcgagac

SEQ ID NO: 128966 - DNA, 30 bp, Artificial Sequence
  Synthetic oligonucleotide
cataaaggcggtacacacatacggggagac

SEQ ID NO: 128967 - DNA, 30 bp, Artificial Sequence
  Synthetic oligonucleotide
tggcataggcttaggcgggaaagtggagac

SEQ ID NO: 128968 - DNA, 30 bp, Artificial Sequence
  Synthetic oligonucleotide
aaaaaataggcggaccgatcgatctgagac

SEQ ID NO: 128969 - DNA, 30 bp, Artificial Sequence
  Synthetic oligonucleotide
gaggaggccatctgaagctaggtgtgagac

SEQ ID NO: 128970 - DNA, 30 bp, Artificial Sequence
  Synthetic oligonucleotide
gcggtttaggaggatcatatgcgaatagac

SEQ ID NO: 128971 - DNA, 30 bp, Artificial Sequence
  Synthetic oligonucleotide
gttaagtagcagaagactaacgcactagac

SEQ ID NO: 128972 - DNA, 30 bp, Artificial Sequence
  Synthetic oligonucleotide
tgggtacgatattagactactggactagac

SEQ ID NO: 128973 - DNA, 30 bp, Artificial Sequence
  Synthetic oligonucleotide
ggtacctggttatcgtcacaaatcctagac

SEQ ID NO: 128974 - DNA, 30 bp, Artificial Sequence
  Synthetic oligonucleotide
aagggggcaagccgaaatagtcggctagac

SEQ ID NO: 128975 - DNA, 30 bp, Artificial Sequence
  Synthetic oligonucleotide
aatggattcagagcgtacctatgagtagac

SEQ ID NO: 128976 - DNA, 30 bp, Artificial Sequence
  Synthetic oligonucleotide
gtagtacggaaacggaacgttgtagtagac

SEQ ID NO: 128977 - DNA, 30 bp, Artificial Sequence
  Synthetic oligonucleotide
tatggaattatgccgcgccatggcgtagac

SEQ ID NO: 128978 - DNA, 30 bp, Artificial Sequence
  Synthetic oligonucleotide
agagcaagtgagcgcgcctggtatgtagac

SEQ ID NO: 128979 - DNA, 30 bp, Artificial Sequence
  Synthetic oligonucleotide
gcccagtatgaaaaagatcggcagttagac

SEQ ID NO: 128980 - DNA, 30 bp, Artificial Sequence
  Synthetic oligonucleotide
catgggtaatatatgataaataaaaacgac

SEQ ID NO: 128981 - DNA, 30 bp, Artificial Sequence
  Synthetic oligonucleotide
gctaggatcaacatggaacataaaaacgac

SEQ ID NO: 128982 - DNA, 30 bp, Artificial Sequence
  Synthetic oligonucleotide
cactgtaacaacgtcgagggagtcaacgac

SEQ ID NO: 128983 - DNA, 30 bp, Artificial Sequence
  Synthetic oligonucleotide
aggccaacagcgagagtcgttaggaacgac

SEQ ID NO: 128984 - DNA, 30 bp, Artificial Sequence
  Synthetic oligonucleotide
ataaactagatcgcgcgagtatgcgacgac

SEQ ID NO: 128985 - DNA, 30 bp, Artificial Sequence
  Synthetic oligonucleotide
gatccataatctggcaagccccgggacgac

SEQ ID NO: 128986 - DNA, 31 bp, Artificial Sequence
  Synthetic oligonucleotide
tccacatcgatacggtagggaccatgacgac

SEQ ID NO: 128987 - DNA, 30 bp, Artificial Sequence
  Synthetic oligonucleotide
atttcttaggcgataagaagcggtgacgac

SEQ ID NO: 128988 - DNA, 30 bp, Artificial Sequence
  Synthetic oligonucleotide
ttaaggacgggccgtacatccacttacgac

SEQ ID NO: 128989 - DNA, 30 bp, Artificial Sequence
  Synthetic oligonucleotide
tcaacactttctcatcgatacgtttacgac

SEQ ID NO: 128990 - DNA, 30 bp, Artificial Sequence
  Synthetic oligonucleotide
cagccgagggcgtcaatcggaaataccgac

SEQ ID NO: 128991 - DNA, 30 bp, Artificial Sequence
  Synthetic oligonucleotide
ctcgacggattgccaatacttatcgccgac

SEQ ID NO: 128992 - DNA, 30 bp, Artificial Sequence
  Synthetic oligonucleotide
tattcccatccctaaccgttaattgccgac

SEQ ID NO: 128993 - DNA, 30 bp, Artificial Sequence
  Synthetic oligonucleotide
taacacatccatgaccgggcgccatccgac

SEQ ID NO: 128994 - DNA, 31 bp, Artificial Sequence
  Synthetic oligonucleotide
ggtcagaggagtagttaacccatactccgac

SEQ ID NO: 128995 - DNA, 30 bp, Artificial Sequence
  Synthetic oligonucleotide
ttatcaagggaataagccacttactccgac

SEQ ID NO: 128996 - DNA, 30 bp, Artificial Sequence
  Synthetic oligonucleotide
ctgcccagacgaacaattataccgtccgac

SEQ ID NO: 128997 - DNA, 30 bp, Artificial Sequence
  Synthetic oligonucleotide
ggtaacgtgtcaaaaaatcctcattccgac

SEQ ID NO: 128998 - DNA, 30 bp, Artificial Sequence
  Synthetic oligonucleotide
accattggcacctaaaccgagaaaagcgac

SEQ ID NO: 128999 - DNA, 30 bp, Artificial Sequence
  Synthetic oligonucleotide
ctgtggattccagcatagtctacaagcgac

SEQ ID NO: 129000 - DNA, 30 bp, Artificial Sequence
  Synthetic oligonucleotide
cagttgctgcaattaatcaacttcagcgac

SEQ ID NO: 129001 - DNA, 30 bp, Artificial Sequence
  Synthetic oligonucleotide
ggctgcgagggtaggattatacgacgcgac

SEQ ID NO: 129002 - DNA, 30 bp, Artificial Sequence
  Synthetic oligonucleotide
ggtcactgaactcctcaacacccccgcgac

SEQ ID NO: 129003 - DNA, 30 bp, Artificial Sequence
  Synthetic oligonucleotide
cactgtgaaccgtaatattcattccgcgac

SEQ ID NO: 129004 - DNA, 29 bp, Artificial Sequence
  Synthetic oligonucleotide
catcactgtggacatatattcagcgcgac

SEQ ID NO: 129005 - DNA, 30 bp, Artificial Sequence
  Synthetic oligonucleotide
tcctccacgtccccgtacaacagaggcgac

SEQ ID NO: 129006 - DNA, 30 bp, Artificial Sequence
  Synthetic oligonucleotide
tggtgtcaggtgcatcgtctatgaggcgac

SEQ ID NO: 129007 - DNA, 30 bp, Artificial Sequence
  Synthetic oligonucleotide
cacggttattcttaccgttaaagcggcgac

SEQ ID NO: 129008 - DNA, 30 bp, Artificial Sequence
  Synthetic oligonucleotide
agagagttacttcggtaactgcactgcgac

SEQ ID NO: 129009 - DNA, 30 bp, Artificial Sequence
  Synthetic oligonucleotide
acgagctagccagcccccacgtgctgcgac

SEQ ID NO: 129010 - DNA, 30 bp, Artificial Sequence
  Synthetic oligonucleotide
tatcagataggggtaacaagtggtctcgac

SEQ ID NO: 129011 - DNA, 30 bp, Artificial Sequence
  Synthetic oligonucleotide
gtgtaagttgggacaaaacgccaggtcgac

SEQ ID NO: 129012 - DNA, 30 bp, Artificial Sequence
  Synthetic oligonucleotide
cgaagcccgagttcctcgtcccaattcgac

SEQ ID NO: 129013 - DNA, 30 bp, Artificial Sequence
  Synthetic oligonucleotide
aggtctaggatgaatgaaaacacaaaggac

SEQ ID NO: 129014 - DNA, 30 bp, Artificial Sequence
  Synthetic oligonucleotide
cgagtgaagatcctatattaacgcaaggac

SEQ ID NO: 129015 - DNA, 30 bp, Artificial Sequence
  Synthetic oligonucleotide
actggcagggctcgtgcactgtttaaggac

SEQ ID NO: 129016 - DNA, 30 bp, Artificial Sequence
  Synthetic oligonucleotide
cgatcaaattggccttataaggaacaggac

SEQ ID NO: 129017 - DNA, 30 bp, Artificial Sequence
  Synthetic oligonucleotide
atgatagccctacgggcgggcaaccaggac

SEQ ID NO: 129018 - DNA, 30 bp, Artificial Sequence
  Synthetic oligonucleotide
catcatggatttacctcaaactgccaggac

SEQ ID NO: 129019 - DNA, 30 bp, Artificial Sequence
  Synthetic oligonucleotide
cagggcggattggtggcgcggaaagaggac

SEQ ID NO: 129020 - DNA, 30 bp, Artificial Sequence
  Synthetic oligonucleotide
aaacacgggcggcagacgagcgaagaggac

SEQ ID NO: 129021 - DNA, 30 bp, Artificial Sequence
  Synthetic oligonucleotide
cctttatcatggacataattggtagaggac

SEQ ID NO: 129022 - DNA, 30 bp, Artificial Sequence
  Synthetic oligonucleotide
agtcactccacacggcgagagcccgaggac

SEQ ID NO: 129023 - DNA, 30 bp, Artificial Sequence
  Synthetic oligonucleotide
caggttacccttggaggtatgtccgaggac

SEQ ID NO: 129024 - DNA, 30 bp, Artificial Sequence
  Synthetic oligonucleotide
tgaaagtaattgcaatggcgggtcgaggac

SEQ ID NO: 129025 - DNA, 30 bp, Artificial Sequence
  Synthetic oligonucleotide
tggccgacgggtcaatgactacttgaggac

SEQ ID NO: 129026 - DNA, 30 bp, Artificial Sequence
  Synthetic oligonucleotide
cgaaaggaggatagtactaggtcctaggac

SEQ ID NO: 129027 - DNA, 30 bp, Artificial Sequence
  Synthetic oligonucleotide
cgtcaggtcaggacaaggtctggctaggac

SEQ ID NO: 129028 - DNA, 30 bp, Artificial Sequence
  Synthetic oligonucleotide
cggatacataaaactatataatgctaggac

SEQ ID NO: 129029 - DNA, 30 bp, Artificial Sequence
  Synthetic oligonucleotide
taccatgatcacacgctcccaggaacggac

SEQ ID NO: 129030 - DNA, 30 bp, Artificial Sequence
  Synthetic oligonucleotide
aacacatcccaggtgatttagaacacggac

SEQ ID NO: 129031 - DNA, 30 bp, Artificial Sequence
  Synthetic oligonucleotide
ggttgatgagaggatgggaatggtacggac

SEQ ID NO: 129032 - DNA, 30 bp, Artificial Sequence
  Synthetic oligonucleotide
atcgcgaatgctggtggggagataccggac

SEQ ID NO: 129033 - DNA, 30 bp, Artificial Sequence
  Synthetic oligonucleotide
tgtgaggcccttccaccaacagcgccggac

SEQ ID NO: 129034 - DNA, 30 bp, Artificial Sequence
  Synthetic oligonucleotide
tgcatccggtcgggtatgaatgttgcggac

SEQ ID NO: 129035 - DNA, 30 bp, Artificial Sequence
  Synthetic oligonucleotide
atagacattgcttgtacggttcgatcggac

SEQ ID NO: 129036 - DNA, 30 bp, Artificial Sequence
  Synthetic oligonucleotide
acttgactgtggtgcttaggaccgtcggac

SEQ ID NO: 129037 - DNA, 30 bp, Artificial Sequence
  Synthetic oligonucleotide
acgtatacaaaaagagtataggcttcggac

SEQ ID NO: 129038 - DNA, 30 bp, Artificial Sequence
  Synthetic oligonucleotide
ttgggaggggaaagttcgtgccgttcggac

SEQ ID NO: 129039 - DNA, 30 bp, Artificial Sequence
  Synthetic oligonucleotide
acccgtgtgtatacttccctgcaaagggac

SEQ ID NO: 129040 - DNA, 30 bp, Artificial Sequence
  Synthetic oligonucleotide
gtcaatgacttctgagacactgtaagggac

SEQ ID NO: 129041 - DNA, 30 bp, Artificial Sequence
  Synthetic oligonucleotide
gctggaacagcgctcggcctgtacagggac

SEQ ID NO: 129042 - DNA, 30 bp, Artificial Sequence
  Synthetic oligonucleotide
aaatgttctaataggaacgtcgtgagggac

SEQ ID NO: 129043 - DNA, 40 bp, Artificial Sequence
  Synthetic oligonucleotide
tttcctcaacagccaagcggccgccacaaagaatagggac

SEQ ID NO: 129044 - DNA, 30 bp, Artificial Sequence
  Synthetic oligonucleotide
atagtatatctgcgagatcaggatggggac

SEQ ID NO: 129045 - DNA, 30 bp, Artificial Sequence
  Synthetic oligonucleotide
atcgggattataaagtgaattcttggggac

SEQ ID NO: 129046 - DNA, 30 bp, Artificial Sequence
  Synthetic oligonucleotide
gtggattagaatagggaaccagaatgggac

SEQ ID NO: 129047 - DNA, 30 bp, Artificial Sequence
  Synthetic oligonucleotide
acctatcaagagctcgacaatcactgggac

SEQ ID NO: 129048 - DNA, 30 bp, Artificial Sequence
  Synthetic oligonucleotide
gagacgatggcgctttcaagaccctgggac

SEQ ID NO: 129049 - DNA, 30 bp, Artificial Sequence
  Synthetic oligonucleotide
ccagaggacactagtctcccgcgctgggac

SEQ ID NO: 129050 - DNA, 30 bp, Artificial Sequence
  Synthetic oligonucleotide
gacagtgcgacagaacataaagtttgggac

SEQ ID NO: 129051 - DNA, 30 bp, Artificial Sequence
  Synthetic oligonucleotide
ctcaacacggagtagcgtacctaaatggac

SEQ ID NO: 129052 - DNA, 30 bp, Artificial Sequence
  Synthetic oligonucleotide
cctcccccggcatacccaatgaccatggac

SEQ ID NO: 129053 - DNA, 30 bp, Artificial Sequence
  Synthetic oligonucleotide
gagatagtaacgaggggccgtaagatggac

SEQ ID NO: 129054 - DNA, 30 bp, Artificial Sequence
  Synthetic oligonucleotide
cgtgtccgccttatcatggatgcgatggac

SEQ ID NO: 129055 - DNA, 30 bp, Artificial Sequence
  Synthetic oligonucleotide
tatccgtggggcttgaaaagtgagctggac

SEQ ID NO: 129056 - DNA, 30 bp, Artificial Sequence
  Synthetic oligonucleotide
gttcttagccgcgtcaataggaatgtggac

SEQ ID NO: 129057 - DNA, 30 bp, Artificial Sequence
  Synthetic oligonucleotide
catatgacaatgaacaagggatttgtggac

SEQ ID NO: 129058 - DNA, 30 bp, Artificial Sequence
  Synthetic oligonucleotide
agcggtcaatcagaaaccgtgcaattggac

SEQ ID NO: 129059 - DNA, 30 bp, Artificial Sequence
  Synthetic oligonucleotide
gagcacgaataggcacaagttcaattggac

SEQ ID NO: 129060 - DNA, 30 bp, Artificial Sequence
  Synthetic oligonucleotide
gcatcctcaagtgaaaaaggatggttggac

SEQ ID NO: 129061 - DNA, 30 bp, Artificial Sequence
  Synthetic oligonucleotide
tgatccggacgtgccaaataggtcaatgac

SEQ ID NO: 129062 - DNA, 30 bp, Artificial Sequence
  Synthetic oligonucleotide
ggaagtaagaggctagtccaatctcatgac

SEQ ID NO: 129063 - DNA, 30 bp, Artificial Sequence
  Synthetic oligonucleotide
tcattactacacccctaagagcgtcatgac

SEQ ID NO: 129064 - DNA, 30 bp, Artificial Sequence
  Synthetic oligonucleotide
gaagcgtggtgcgggggagcatcggatgac

SEQ ID NO: 129065 - DNA, 30 bp, Artificial Sequence
  Synthetic oligonucleotide
cctggataggaggtctttcatattgatgac

SEQ ID NO: 129066 - DNA, 30 bp, Artificial Sequence
  Synthetic oligonucleotide
gggagttgcaaggagtcgtaggactatgac

SEQ ID NO: 129067 - DNA, 30 bp, Artificial Sequence
  Synthetic oligonucleotide
tggcaactctaggctaatcaatcctatgac

SEQ ID NO: 129068 - DNA, 30 bp, Artificial Sequence
  Synthetic oligonucleotide
cgggagggaaaggggataaggagaactgac

SEQ ID NO: 129069 - DNA, 30 bp, Artificial Sequence
  Synthetic oligonucleotide
ctgacaacaggcaccggcttgaccactgac

SEQ ID NO: 129070 - DNA, 30 bp, Artificial Sequence
  Synthetic oligonucleotide
tcttcggtgaactgtgaccaaggtactgac

SEQ ID NO: 129071 - DNA, 30 bp, Artificial Sequence
  Synthetic oligonucleotide
gagcgaatgggacgcgcaaagggcgctgac

SEQ ID NO: 129072 - DNA, 30 bp, Artificial Sequence
  Synthetic oligonucleotide
gccatagggagatcgcattgggcggctgac

SEQ ID NO: 129073 - DNA, 30 bp, Artificial Sequence
  Synthetic oligonucleotide
ggcgcaagtttcgactaccaggaatctgac

SEQ ID NO: 129074 - DNA, 31 bp, Artificial Sequence
  Synthetic oligonucleotide
acttttaaccaagaaaaaatgcctatctgac

SEQ ID NO: 129075 - DNA, 30 bp, Artificial Sequence
  Synthetic oligonucleotide
gaggaacttaattgagttcaagtgtctgac

SEQ ID NO: 129076 - DNA, 30 bp, Artificial Sequence
  Synthetic oligonucleotide
gcggatcccgatggatacgagttgtctgac

SEQ ID NO: 129077 - DNA, 30 bp, Artificial Sequence
  Synthetic oligonucleotide
cacattcgaaccttaaacagtaatagtgac

SEQ ID NO: 129078 - DNA, 30 bp, Artificial Sequence
  Synthetic oligonucleotide
gagctagctgaaatggcgggggatagtgac

SEQ ID NO: 129079 - DNA, 30 bp, Artificial Sequence
  Synthetic oligonucleotide
ggtggtagttattcatcgatttcccgtgac

SEQ ID NO: 129080 - DNA, 30 bp, Artificial Sequence
  Synthetic oligonucleotide
ggctgtgagatcataagtgagccgcgtgac

SEQ ID NO: 129081 - DNA, 30 bp, Artificial Sequence
  Synthetic oligonucleotide
gtgcgcagagggtattcttgcggaggtgac

SEQ ID NO: 129082 - DNA, 30 bp, Artificial Sequence
  Synthetic oligonucleotide
cgaagtgccttagtggtacccttcggtgac

SEQ ID NO: 129083 - DNA, 30 bp, Artificial Sequence
  Synthetic oligonucleotide
tatcccgaattcttgcaaacaaagggtgac

SEQ ID NO: 129084 - DNA, 30 bp, Artificial Sequence
  Synthetic oligonucleotide
gacgtgggacgcccgttcattgctggtgac

SEQ ID NO: 129085 - DNA, 30 bp, Artificial Sequence
  Synthetic oligonucleotide
tggaccagtggatgtatcccacactgtgac

SEQ ID NO: 129086 - DNA, 30 bp, Artificial Sequence
  Synthetic oligonucleotide
gaatatggggaaacccgcagaggctgtgac

SEQ ID NO: 129087 - DNA, 30 bp, Artificial Sequence
  Synthetic oligonucleotide
gcggctgaacaggtctacacacgaattgac

SEQ ID NO: 129088 - DNA, 30 bp, Artificial Sequence
  Synthetic oligonucleotide
ggcgtcataatgtgataggtggacattgac

SEQ ID NO: 129089 - DNA, 30 bp, Artificial Sequence
  Synthetic oligonucleotide
agacactggctaggcttcacaccccttgac

SEQ ID NO: 129090 - DNA, 30 bp, Artificial Sequence
  Synthetic oligonucleotide
ttctagtcggttttcacgagtccgcttgac

SEQ ID NO: 129091 - DNA, 30 bp, Artificial Sequence
  Synthetic oligonucleotide
ctggacgggggaagtgctcacaggcttgac

SEQ ID NO: 129092 - DNA, 30 bp, Artificial Sequence
  Synthetic oligonucleotide
gaacaatacgcagattgactggggcttgac

SEQ ID NO: 129093 - DNA, 30 bp, Artificial Sequence
  Synthetic oligonucleotide
gctgcactggataaacttctgaatcttgac

SEQ ID NO: 129094 - DNA, 30 bp, Artificial Sequence
  Synthetic oligonucleotide
acgcgacgttgaagagctaacagtcttgac

SEQ ID NO: 129095 - DNA, 30 bp, Artificial Sequence
  Synthetic oligonucleotide
acccacgccagactgcaagccatcgttgac

SEQ ID NO: 129096 - DNA, 30 bp, Artificial Sequence
  Synthetic oligonucleotide
cgatcctggcaatacgtgtccggggttgac

SEQ ID NO: 129097 - DNA, 30 bp, Artificial Sequence
  Synthetic oligonucleotide
acgtgctgtaataatcccctccatgttgac

SEQ ID NO: 129098 - DNA, 30 bp, Artificial Sequence
  Synthetic oligonucleotide
agtacatggcgatcggtaacgggatttgac

SEQ ID NO: 129099 - DNA, 30 bp, Artificial Sequence
  Synthetic oligonucleotide
gacccatcgcaccgggaaggcacaaaatac

SEQ ID NO: 129100 - DNA, 30 bp, Artificial Sequence
  Synthetic oligonucleotide
cccgcgatccgcaatatggctagcaaatac

SEQ ID NO: 129101 - DNA, 30 bp, Artificial Sequence
  Synthetic oligonucleotide
ttgttcgcgcccccgacaacataacaatac

SEQ ID NO: 129102 - DNA, 30 bp, Artificial Sequence
  Synthetic oligonucleotide
tatgaatcagtactgaggccgaaagaatac

SEQ ID NO: 129103 - DNA, 30 bp, Artificial Sequence
  Synthetic oligonucleotide
ataagtaagcgagtgcaaagaggagaatac

SEQ ID NO: 129104 - DNA, 30 bp, Artificial Sequence
  Synthetic oligonucleotide
cgtaaggtatatacgtccaattcggaatac

SEQ ID NO: 129105 - DNA, 30 bp, Artificial Sequence
  Synthetic oligonucleotide
ccagaggttataaaggagagcagtgaatac

SEQ ID NO: 129106 - DNA, 30 bp, Artificial Sequence
  Synthetic oligonucleotide
atcaagccaaaccgcactgcgagtgaatac

SEQ ID NO: 129107 - DNA, 30 bp, Artificial Sequence
  Synthetic oligonucleotide
gaatcatgctaatccgagcgccaataatac

SEQ ID NO: 129108 - DNA, 30 bp, Artificial Sequence
  Synthetic oligonucleotide
cacaaaatgcaaattgagttagcgtaatac

SEQ ID NO: 129109 - DNA, 30 bp, Artificial Sequence
  Synthetic oligonucleotide
ccctaacgcaattggagagtcaacacatac

SEQ ID NO: 129110 - DNA, 30 bp, Artificial Sequence
  Synthetic oligonucleotide
actgatacacagtgaactatctgcacatac

SEQ ID NO: 129111 - DNA, 30 bp, Artificial Sequence
  Synthetic oligonucleotide
cactaactacttgtggatttgtggacatac

SEQ ID NO: 129112 - DNA, 30 bp, Artificial Sequence
  Synthetic oligonucleotide
aagatatgaatcgtcactaccgtaccatac

SEQ ID NO: 129113 - DNA, 30 bp, Artificial Sequence
  Synthetic oligonucleotide
atcaatgtgatccggtgtgggaatgcatac

SEQ ID NO: 129114 - DNA, 30 bp, Artificial Sequence
  Synthetic oligonucleotide
cagcgtcgtagccgagtcttaaaacgatac

SEQ ID NO: 129115 - DNA, 30 bp, Artificial Sequence
  Synthetic oligonucleotide
aaggacgtgccgtctcaatcctggcgatac

SEQ ID NO: 129116 - DNA, 29 bp, Artificial Sequence
  Synthetic oligonucleotide
aggggcctcatttgttgttgccaggatac

SEQ ID NO: 129117 - DNA, 30 bp, Artificial Sequence
  Synthetic oligonucleotide
cggtccgtgcatagagtatcgagaggatac

SEQ ID NO: 129118 - DNA, 30 bp, Artificial Sequence
  Synthetic oligonucleotide
ctgggacttaactgtgctaaaatcggatac

SEQ ID NO: 129119 - DNA, 30 bp, Artificial Sequence
  Synthetic oligonucleotide
ccaacagaatgcatggacgacaggggatac

SEQ ID NO: 129120 - DNA, 30 bp, Artificial Sequence
  Synthetic oligonucleotide
agagcaatttgaacgcctagatactgatac

SEQ ID NO: 129121 - DNA, 30 bp, Artificial Sequence
  Synthetic oligonucleotide
ggctctccaacgactcactgccgaatatac

SEQ ID NO: 129122 - DNA, 30 bp, Artificial Sequence
  Synthetic oligonucleotide
tagggtacgttggatgcgatatacctatac

SEQ ID NO: 129123 - DNA, 30 bp, Artificial Sequence
  Synthetic oligonucleotide
tgcagggatgcaattaaacccccgctatac

SEQ ID NO: 129124 - DNA, 30 bp, Artificial Sequence
  Synthetic oligonucleotide
ggtgtgtgattatctctcaggcgagtatac

SEQ ID NO: 129125 - DNA, 30 bp, Artificial Sequence
  Synthetic oligonucleotide
gacgagtatatttcgttactgaatgtatac

SEQ ID NO: 129126 - DNA, 30 bp, Artificial Sequence
  Synthetic oligonucleotide
gacgctaagggcaacgatatcgttttatac

SEQ ID NO: 129127 - DNA, 30 bp, Artificial Sequence
  Synthetic oligonucleotide
gctagccggacatgtcacgatgtaaactac

SEQ ID NO: 129128 - DNA, 30 bp, Artificial Sequence
  Synthetic oligonucleotide
ctggtccggcaatacacataaaggcactac

SEQ ID NO: 129129 - DNA, 30 bp, Artificial Sequence
  Synthetic oligonucleotide
aactccacatatcgacctggaccatactac

SEQ ID NO: 129130 - DNA, 30 bp, Artificial Sequence
  Synthetic oligonucleotide
ctcgatgggaacagtgataaatgatactac

SEQ ID NO: 129131 - DNA, 30 bp, Artificial Sequence
  Synthetic oligonucleotide
cttcaaccccatcgcgcgagacactactac

SEQ ID NO: 129132 - DNA, 30 bp, Artificial Sequence
  Synthetic oligonucleotide
ttcaggcaggtggaggcctcgatcacctac

SEQ ID NO: 129133 - DNA, 30 bp, Artificial Sequence
  Synthetic oligonucleotide
ggggaattaagttgtaatggtggaccctac

SEQ ID NO: 129134 - DNA, 30 bp, Artificial Sequence
  Synthetic oligonucleotide
cagacattaaggctggtattgttctcctac

SEQ ID NO: 129135 - DNA, 30 bp, Artificial Sequence
  Synthetic oligonucleotide
taatcgatgtcatgggagtcgcggcgctac

SEQ ID NO: 129136 - DNA, 30 bp, Artificial Sequence
  Synthetic oligonucleotide
ggggtaacaacaccgagaaggtgtcgctac

SEQ ID NO: 129137 - DNA, 30 bp, Artificial Sequence
  Synthetic oligonucleotide
tcgctcccgcgtaagagttcaagaatctac

SEQ ID NO: 129138 - DNA, 30 bp, Artificial Sequence
  Synthetic oligonucleotide
atgcgttgggggcatggtcggaaagtctac

SEQ ID NO: 129139 - DNA, 30 bp, Artificial Sequence
  Synthetic oligonucleotide
tgtactacaggtggccaaaggaccgtctac

SEQ ID NO: 129140 - DNA, 30 bp, Artificial Sequence
  Synthetic oligonucleotide
cgttgcgaacatgtatggatagatttctac

SEQ ID NO: 129141 - DNA, 30 bp, Artificial Sequence
  Synthetic oligonucleotide
gcggcgcatattcaagtatagggtttctac

SEQ ID NO: 129142 - DNA, 30 bp, Artificial Sequence
  Synthetic oligonucleotide
tactccaccaagcgacacgttaaaaagtac

SEQ ID NO: 129143 - DNA, 30 bp, Artificial Sequence
  Synthetic oligonucleotide
gaattggcagagatcggtgatcgcaagtac

SEQ ID NO: 129144 - DNA, 30 bp, Artificial Sequence
  Synthetic oligonucleotide
gggagagcgccggggtcgcttcggaagtac

SEQ ID NO: 129145 - DNA, 30 bp, Artificial Sequence
  Synthetic oligonucleotide
gtcgagggcgtccattagcccgggaagtac

SEQ ID NO: 129146 - DNA, 30 bp, Artificial Sequence
  Synthetic oligonucleotide
tgtcatttgggcggatgggtgtcagagtac

SEQ ID NO: 129147 - DNA, 30 bp, Artificial Sequence
  Synthetic oligonucleotide
cgatagagatcgttctactgctccgagtac

SEQ ID NO: 129148 - DNA, 30 bp, Artificial Sequence
  Synthetic oligonucleotide
gggtaagaacgagttgctcctttggagtac

SEQ ID NO: 129149 - DNA, 30 bp, Artificial Sequence
  Synthetic oligonucleotide
acagctcagtggcctttgagtacatagtac

SEQ ID NO: 129150 - DNA, 30 bp, Artificial Sequence
  Synthetic oligonucleotide
catcggggcccagtccatcagaaaacgtac

SEQ ID NO: 129151 - DNA, 30 bp, Artificial Sequence
  Synthetic oligonucleotide
tccagccacacagataaatgcagaacgtac

SEQ ID NO: 129152 - DNA, 30 bp, Artificial Sequence
  Synthetic oligonucleotide
taaatactccaattgtgctaaggaccgtac

SEQ ID NO: 129153 - DNA, 30 bp, Artificial Sequence
  Synthetic oligonucleotide
ctgtattgggttgggcgacttgccccgtac

SEQ ID NO: 129154 - DNA, 30 bp, Artificial Sequence
  Synthetic oligonucleotide
cacactagactcacgctagaaatgccgtac

SEQ ID NO: 129155 - DNA, 30 bp, Artificial Sequence
  Synthetic oligonucleotide
cgaatgccactgtcctgtgatgtagcgtac

SEQ ID NO: 129156 - DNA, 30 bp, Artificial Sequence
  Synthetic oligonucleotide
gctaggggatacctggatcaggaggcgtac

SEQ ID NO: 129157 - DNA, 30 bp, Artificial Sequence
  Synthetic oligonucleotide
caaggaaattaggtactgacttttgcgtac

SEQ ID NO: 129158 - DNA, 30 bp, Artificial Sequence
  Synthetic oligonucleotide
catacaggattcttaccggacaggtcgtac

SEQ ID NO: 129159 - DNA, 30 bp, Artificial Sequence
  Synthetic oligonucleotide
taattcaccagggctgttaggagaaggtac

SEQ ID NO: 129160 - DNA, 30 bp, Artificial Sequence
  Synthetic oligonucleotide
cttatggacagcgatctgcaatccaggtac

SEQ ID NO: 129161 - DNA, 31 bp, Artificial Sequence
  Synthetic oligonucleotide
cttggtttcatcggtacttctaggcaggtac

SEQ ID NO: 129162 - DNA, 30 bp, Artificial Sequence
  Synthetic oligonucleotide
ggacacaactacattgcattaattaggtac

SEQ ID NO: 129163 - DNA, 30 bp, Artificial Sequence
  Synthetic oligonucleotide
caagcaagctctaggtagacttcacggtac

SEQ ID NO: 129164 - DNA, 30 bp, Artificial Sequence
  Synthetic oligonucleotide
ctaagagtaagtacgtcctggagacggtac

SEQ ID NO: 129165 - DNA, 30 bp, Artificial Sequence
  Synthetic oligonucleotide
aagtagcgcacattggcctcagggcggtac

SEQ ID NO: 129166 - DNA, 30 bp, Artificial Sequence
  Synthetic oligonucleotide
cctaaagcaaccttagaaaacggagggtac

SEQ ID NO: 129167 - DNA, 30 bp, Artificial Sequence
  Synthetic oligonucleotide
ggtgggcataaaaatattcaccctgggtac

SEQ ID NO: 129168 - DNA, 30 bp, Artificial Sequence
  Synthetic oligonucleotide
agaagacatcgagaccgttggaagtggtac

SEQ ID NO: 129169 - DNA, 30 bp, Artificial Sequence
  Synthetic oligonucleotide
gatggctccatgatatctcatgggtggtac

SEQ ID NO: 129170 - DNA, 30 bp, Artificial Sequence
  Synthetic oligonucleotide
gctggggctgcatctttcggctcttggtac

SEQ ID NO: 129171 - DNA, 30 bp, Artificial Sequence
  Synthetic oligonucleotide
atgattagtggtactgcacacccaatgtac

SEQ ID NO: 129172 - DNA, 30 bp, Artificial Sequence
  Synthetic oligonucleotide
caccgtccggctggttttagaaagatgtac

SEQ ID NO: 129173 - DNA, 30 bp, Artificial Sequence
  Synthetic oligonucleotide
gtgctgttagattgtcacatcggtatgtac

SEQ ID NO: 129174 - DNA, 30 bp, Artificial Sequence
  Synthetic oligonucleotide
acgtattaggataacactgagtgtatgtac

SEQ ID NO: 129175 - DNA, 30 bp, Artificial Sequence
  Synthetic oligonucleotide
acctgtgagatagcgagatttctgctgtac

SEQ ID NO: 129176 - DNA, 30 bp, Artificial Sequence
  Synthetic oligonucleotide
attggctgaactcaagactaacagttgtac

SEQ ID NO: 129177 - DNA, 30 bp, Artificial Sequence
  Synthetic oligonucleotide
aacatgagacacagctcgactgaaaattac

SEQ ID NO: 129178 - DNA, 30 bp, Artificial Sequence
  Synthetic oligonucleotide
gcgcgggaccacgatgcgtctggccattac

SEQ ID NO: 129179 - DNA, 30 bp, Artificial Sequence
  Synthetic oligonucleotide
ggatgcggatatcatagatcgtagcattac

SEQ ID NO: 129180 - DNA, 30 bp, Artificial Sequence
  Synthetic oligonucleotide
cggcgtacgttagtgcaatgaccgcattac

SEQ ID NO: 129181 - DNA, 30 bp, Artificial Sequence
  Synthetic oligonucleotide
acttgaggagacgttatactggggcattac

SEQ ID NO: 129182 - DNA, 30 bp, Artificial Sequence
  Synthetic oligonucleotide
cgccattcacctatttaccgacctcattac

SEQ ID NO: 129183 - DNA, 29 bp, Artificial Sequence
  Synthetic oligonucleotide
caggcacgaaggacttctctcaggattac

SEQ ID NO: 129184 - DNA, 28 bp, Artificial Sequence
  Synthetic oligonucleotide
tcgatctcaaacctactcctctgattac

SEQ ID NO: 129185 - DNA, 30 bp, Artificial Sequence
  Synthetic oligonucleotide
gttgggcgagagagccgtagtaaatattac

SEQ ID NO: 129186 - DNA, 30 bp, Artificial Sequence
  Synthetic oligonucleotide
gtggagtgagagagaaactatccatattac

SEQ ID NO: 129187 - DNA, 30 bp, Artificial Sequence
  Synthetic oligonucleotide
ctcgaaggaggatatttcacaacgtattac

SEQ ID NO: 129188 - DNA, 30 bp, Artificial Sequence
  Synthetic oligonucleotide
ggatcgcggcgatcgtcgtctttgtattac

SEQ ID NO: 129189 - DNA, 30 bp, Artificial Sequence
  Synthetic oligonucleotide
caggcgaaatgcattggtccctacccttac

SEQ ID NO: 129190 - DNA, 30 bp, Artificial Sequence
  Synthetic oligonucleotide
cctgagtagaatgagagaaggatgccttac

SEQ ID NO: 129191 - DNA, 30 bp, Artificial Sequence
  Synthetic oligonucleotide
agcctcactagcgaagatactgcagcttac

SEQ ID NO: 129192 - DNA, 30 bp, Artificial Sequence
  Synthetic oligonucleotide
ggacaagggtcgagtcccactcgagcttac

SEQ ID NO: 129193 - DNA, 30 bp, Artificial Sequence
  Synthetic oligonucleotide
tgttcaagggggggccaaagcatggcttac

SEQ ID NO: 129194 - DNA, 30 bp, Artificial Sequence
  Synthetic oligonucleotide
cagacacaacaaactgaaagtattgcttac

SEQ ID NO: 129195 - DNA, 30 bp, Artificial Sequence
  Synthetic oligonucleotide
cgccgttcgcaaccaggactaagctcttac

SEQ ID NO: 129196 - DNA, 30 bp, Artificial Sequence
  Synthetic oligonucleotide
agcacacgtaactggcctagaaggtcttac

SEQ ID NO: 129197 - DNA, 31 bp, Artificial Sequence
  Synthetic oligonucleotide
tcttcggcagggtctcacttggagaagttac

SEQ ID NO: 129198 - DNA, 30 bp, Artificial Sequence
  Synthetic oligonucleotide
caggaaagaaatattatatttctaagttac

SEQ ID NO: 129199 - DNA, 30 bp, Artificial Sequence
  Synthetic oligonucleotide
aacttcaaaacggctaataagacgagttac

SEQ ID NO: 129200 - DNA, 30 bp, Artificial Sequence
  Synthetic oligonucleotide
tcaatgtgaattcgccgggatacgagttac

SEQ ID NO: 129201 - DNA, 30 bp, Artificial Sequence
  Synthetic oligonucleotide
tggttgcgacgagtggtaaggtttagttac

SEQ ID NO: 129202 - DNA, 30 bp, Artificial Sequence
  Synthetic oligonucleotide
tactgagttgatgtagacagagtgcgttac

SEQ ID NO: 129203 - DNA, 30 bp, Artificial Sequence
  Synthetic oligonucleotide
cccgaaaacgactgatattggtcaggttac

SEQ ID NO: 129204 - DNA, 30 bp, Artificial Sequence
  Synthetic oligonucleotide
tctaagcgccttcgagaatgtttaggttac

SEQ ID NO: 129205 - DNA, 30 bp, Artificial Sequence
  Synthetic oligonucleotide
ggaggattaattatggtcatatagggttac

SEQ ID NO: 129206 - DNA, 30 bp, Artificial Sequence
  Synthetic oligonucleotide
aacttcatgctaaggaaatgcccgggttac

SEQ ID NO: 129207 - DNA, 30 bp, Artificial Sequence
  Synthetic oligonucleotide
gcatcaatatcgcgtcgatacgggggttac

SEQ ID NO: 129208 - DNA, 30 bp, Artificial Sequence
  Synthetic oligonucleotide
tgagtagttgtggaccgaattcctggttac

SEQ ID NO: 129209 - DNA, 30 bp, Artificial Sequence
  Synthetic oligonucleotide
tggtgtagctctatcggtgacgattgttac

SEQ ID NO: 129210 - DNA, 30 bp, Artificial Sequence
  Synthetic oligonucleotide
tgtagtcatgaacaaggtgtggcgatttac

SEQ ID NO: 129211 - DNA, 29 bp, Artificial Sequence
  Synthetic oligonucleotide
tcaacagatttatccgtatacaggtttac

SEQ ID NO: 129212 - DNA, 30 bp, Artificial Sequence
  Synthetic oligonucleotide
acttcgacaggagaccccttaggtgtttac

SEQ ID NO: 129213 - DNA, 30 bp, Artificial Sequence
  Synthetic oligonucleotide
gttacaagcaaagaaaccagtccaaaaacc

SEQ ID NO: 129214 - DNA, 30 bp, Artificial Sequence
  Synthetic oligonucleotide
gggactgatggaaacctcctttgaaaaacc

SEQ ID NO: 129215 - DNA, 30 bp, Artificial Sequence
  Synthetic oligonucleotide
ttaggacagcgttgtactgaagataaaacc

SEQ ID NO: 129216 - DNA, 30 bp, Artificial Sequence
  Synthetic oligonucleotide
gattcggggacggtagcgcaaattaaaacc

SEQ ID NO: 129217 - DNA, 30 bp, Artificial Sequence
  Synthetic oligonucleotide
gaggcccaggatcggcgagaaaaagaaacc

SEQ ID NO: 129218 - DNA, 30 bp, Artificial Sequence
  Synthetic oligonucleotide
gtctgctggtactagtgctgttcagaaacc

SEQ ID NO: 129219 - DNA, 30 bp, Artificial Sequence
  Synthetic oligonucleotide
cgttcttatcgggcacctacttgagaaacc

SEQ ID NO: 129220 - DNA, 30 bp, Artificial Sequence
  Synthetic oligonucleotide
tgataataagggccagtccccgccgaaacc

SEQ ID NO: 129221 - DNA, 30 bp, Artificial Sequence
  Synthetic oligonucleotide
ctggcaagcacaatttgtggcgccgaaacc

SEQ ID NO: 129222 - DNA, 30 bp, Artificial Sequence
  Synthetic oligonucleotide
ggctcaagctacagtgtcccttgttaaacc

SEQ ID NO: 129223 - DNA, 30 bp, Artificial Sequence
  Synthetic oligonucleotide
ttgtagagggacacgataagccgcacaacc

SEQ ID NO: 129224 - DNA, 30 bp, Artificial Sequence
  Synthetic oligonucleotide
gacgtcctatggcatcgtaaggtcacaacc

SEQ ID NO: 129225 - DNA, 30 bp, Artificial Sequence
  Synthetic oligonucleotide
acccagctggagaaagcaccgaggacaacc

SEQ ID NO: 129226 - DNA, 30 bp, Artificial Sequence
  Synthetic oligonucleotide
cggagctctcaaagctatggtctgacaacc

SEQ ID NO: 129227 - DNA, 30 bp, Artificial Sequence
  Synthetic oligonucleotide
cacgtaccgaaattgatggattgcccaacc

SEQ ID NO: 129228 - DNA, 30 bp, Artificial Sequence
  Synthetic oligonucleotide
cttggatacctggaagaaacctcgccaacc

SEQ ID NO: 129229 - DNA, 30 bp, Artificial Sequence
  Synthetic oligonucleotide
gctactaccgaggtactggagtacgcaacc

SEQ ID NO: 129230 - DNA, 30 bp, Artificial Sequence
  Synthetic oligonucleotide
taggtgtaatgactggaaagcatcgcaacc

SEQ ID NO: 129231 - DNA, 30 bp, Artificial Sequence
  Synthetic oligonucleotide
gaacggtatgctactcagaccacgtcaacc

SEQ ID NO: 129232 - DNA, 30 bp, Artificial Sequence
  Synthetic oligonucleotide
gcgaatccgtatctgtctatcccgtcaacc

SEQ ID NO: 129233 - DNA, 30 bp, Artificial Sequence
  Synthetic oligonucleotide
aaagaggatctttgcgtaatgtcaagaacc

SEQ ID NO: 129234 - DNA, 30 bp, Artificial Sequence
  Synthetic oligonucleotide
aaaggaaagaggcaatagctacgcagaacc

SEQ ID NO: 129235 - DNA, 30 bp, Artificial Sequence
  Synthetic oligonucleotide
gatcaccaacagcagccgcacgcgcgaacc

SEQ ID NO: 129236 - DNA, 30 bp, Artificial Sequence
  Synthetic oligonucleotide
agggaggtcagcggcaaataggcgcgaacc

SEQ ID NO: 129237 - DNA, 30 bp, Artificial Sequence
  Synthetic oligonucleotide
tggggtaaggaaatcacccgcatgcgaacc

SEQ ID NO: 129238 - DNA, 30 bp, Artificial Sequence
  Synthetic oligonucleotide
aacacagcagcgccagagcgatagtgaacc

SEQ ID NO: 129239 - DNA, 30 bp, Artificial Sequence
  Synthetic oligonucleotide
tcaaccgggcgtaaagacagccgttgaacc

SEQ ID NO: 129240 - DNA, 30 bp, Artificial Sequence
  Synthetic oligonucleotide
cgttaggaccgatgaattaatccaataacc

SEQ ID NO: 129241 - DNA, 30 bp, Artificial Sequence
  Synthetic oligonucleotide
ccaaattaccttctctaacaaagaataacc

SEQ ID NO: 129242 - DNA, 30 bp, Artificial Sequence
  Synthetic oligonucleotide
gagggcgatctccatgcaaaaaacataacc

SEQ ID NO: 129243 - DNA, 30 bp, Artificial Sequence
  Synthetic oligonucleotide
agaacagcggggggcaatgtcgacataacc

SEQ ID NO: 129244 - DNA, 30 bp, Artificial Sequence
  Synthetic oligonucleotide
caggcgtaacgaattagatatagactaacc

SEQ ID NO: 129245 - DNA, 30 bp, Artificial Sequence
  Synthetic oligonucleotide
atactgagatctggaccgtggcagctaacc

SEQ ID NO: 129246 - DNA, 31 bp, Artificial Sequence
  Synthetic oligonucleotide
tggattcgagcatgtcataagtaggctaacc

SEQ ID NO: 129247 - DNA, 30 bp, Artificial Sequence
  Synthetic oligonucleotide
gacggatctgatgggctaataggagtaacc

SEQ ID NO: 129248 - DNA, 30 bp, Artificial Sequence
  Synthetic oligonucleotide
tcgagcccccctattacagtacgcgtaacc

SEQ ID NO: 129249 - DNA, 30 bp, Artificial Sequence
  Synthetic oligonucleotide
agacaaggtacagagttacggtgggtaacc

SEQ ID NO: 129250 - DNA, 29 bp, Artificial Sequence
  Synthetic oligonucleotide
cgacagcggatgcgggcttagatgtaacc

SEQ ID NO: 129251 - DNA, 30 bp, Artificial Sequence
  Synthetic oligonucleotide
tgtccgagcttcttgcaacgtaaattaacc

SEQ ID NO: 129252 - DNA, 30 bp, Artificial Sequence
  Synthetic oligonucleotide
acgggattgggtgcgtgacagggcttaacc

SEQ ID NO: 129253 - DNA, 30 bp, Artificial Sequence
  Synthetic oligonucleotide
gggctggagtaatagaagtctcatttaacc

SEQ ID NO: 129254 - DNA, 30 bp, Artificial Sequence
  Synthetic oligonucleotide
tccgtgtggcggagcaaactccttttaacc

SEQ ID NO: 129255 - DNA, 30 bp, Artificial Sequence
  Synthetic oligonucleotide
ggctcccgtcctcaggtggggtcaaacacc

SEQ ID NO: 129256 - DNA, 30 bp, Artificial Sequence
  Synthetic oligonucleotide
gtggaaaacagtaggaaagactataacacc

SEQ ID NO: 129257 - DNA, 30 bp, Artificial Sequence
  Synthetic oligonucleotide
gtccaggggaaccagcaaggtactaacacc

SEQ ID NO: 129258 - DNA, 30 bp, Artificial Sequence
  Synthetic oligonucleotide
gagaggtaagtaagaagcaaaaaagacacc

SEQ ID NO: 129259 - DNA, 30 bp, Artificial Sequence
  Synthetic oligonucleotide
cgagtgatgattggaaagattatcgacacc

SEQ ID NO: 129260 - DNA, 30 bp, Artificial Sequence
  Synthetic oligonucleotide
gcgctagatactagccattgtggtgacacc

SEQ ID NO: 129261 - DNA, 30 bp, Artificial Sequence
  Synthetic oligonucleotide
cgtcgatattccctatccggtgtgtacacc

SEQ ID NO: 129262 - DNA, 30 bp, Artificial Sequence
  Synthetic oligonucleotide
acattaccgagttactacttctaaaccacc

SEQ ID NO: 129263 - DNA, 30 bp, Artificial Sequence
  Synthetic oligonucleotide
gaagggcgagtgaagagtagaacacccacc

SEQ ID NO: 129264 - DNA, 31 bp, Artificial Sequence
  Synthetic oligonucleotide
ggagaccttttcaagtcacggggtccccacc

SEQ ID NO: 129265 - DNA, 30 bp, Artificial Sequence
  Synthetic oligonucleotide
tgtgtaagatcagaggttcgctcgcccacc

SEQ ID NO: 129266 - DNA, 30 bp, Artificial Sequence
  Synthetic oligonucleotide
acaaaacggttttgaactgacttgcccacc

SEQ ID NO: 129267 - DNA, 30 bp, Artificial Sequence
  Synthetic oligonucleotide
ggcgcgggttcagttagtgccaatcccacc

SEQ ID NO: 129268 - DNA, 30 bp, Artificial Sequence
  Synthetic oligonucleotide
ctgagacgcacattgaacactgaagccacc

SEQ ID NO: 129269 - DNA, 30 bp, Artificial Sequence
  Synthetic oligonucleotide
gagattaggaatgcatctttgagctccacc

SEQ ID NO: 129270 - DNA, 30 bp, Artificial Sequence
  Synthetic oligonucleotide
catggagatagcccagtacagggttccacc

SEQ ID NO: 129271 - DNA, 30 bp, Artificial Sequence
  Synthetic oligonucleotide
cagggtcgactcctactaacggtttccacc

SEQ ID NO: 129272 - DNA, 30 bp, Artificial Sequence
  Synthetic oligonucleotide
tcctcagttgacgacgaagtcaacagcacc

SEQ ID NO: 129273 - DNA, 31 bp, Artificial Sequence
  Synthetic oligonucleotide
cacgttgggattaataaaagagtatagcacc

SEQ ID NO: 129274 - DNA, 30 bp, Artificial Sequence
  Synthetic oligonucleotide
taataaacgggggtcgttatgcaacgcacc

SEQ ID NO: 129275 - DNA, 30 bp, Artificial Sequence
  Synthetic oligonucleotide
gtcaggccctgacgtgaaaaaacacgcacc

SEQ ID NO: 129276 - DNA, 30 bp, Artificial Sequence
  Synthetic oligonucleotide
tgagatggagtatactcttagggtcgcacc

SEQ ID NO: 129277 - DNA, 30 bp, Artificial Sequence
  Synthetic oligonucleotide
actttatgacgagggcttagcgagtgcacc

SEQ ID NO: 129278 - DNA, 30 bp, Artificial Sequence
  Synthetic oligonucleotide
ccgctgtcgtaccgacgtctaagaatcacc

SEQ ID NO: 129279 - DNA, 30 bp, Artificial Sequence
  Synthetic oligonucleotide
tctaccacatgtaatgtcaaatacatcacc

SEQ ID NO: 129280 - DNA, 30 bp, Artificial Sequence
  Synthetic oligonucleotide
ccacattctccgttatggcttcaactcacc

SEQ ID NO: 129281 - DNA, 30 bp, Artificial Sequence
  Synthetic oligonucleotide
aggcccggctgatgagcagttaaagtcacc

SEQ ID NO: 129282 - DNA, 30 bp, Artificial Sequence
  Synthetic oligonucleotide
tacgtggattgggttgaatctatggtcacc

SEQ ID NO: 129283 - DNA, 30 bp, Artificial Sequence
  Synthetic oligonucleotide
agatggcccgcgtttgatttcaatgtcacc

SEQ ID NO: 129284 - DNA, 30 bp, Artificial Sequence
  Synthetic oligonucleotide
tggagtgcgcgtgccggccgcagattcacc

SEQ ID NO: 129285 - DNA, 30 bp, Artificial Sequence
  Synthetic oligonucleotide
cgcaaatcgagcggaatactgatattcacc

SEQ ID NO: 129286 - DNA, 30 bp, Artificial Sequence
  Synthetic oligonucleotide
tgggattccccaacatgaccgacaaagacc

SEQ ID NO: 129287 - DNA, 30 bp, Artificial Sequence
  Synthetic oligonucleotide
cttatgcttatcttgaagggaggacagacc

SEQ ID NO: 129288 - DNA, 31 bp, Artificial Sequence
  Synthetic oligonucleotide
caaaagcccgccgtttgtaaggtgccagacc

SEQ ID NO: 129289 - DNA, 30 bp, Artificial Sequence
  Synthetic oligonucleotide
ttcaggagtaaaaatttaactgtgcagacc

SEQ ID NO: 129290 - DNA, 30 bp, Artificial Sequence
  Synthetic oligonucleotide
accgagacatgctcgcaattagatcagacc

SEQ ID NO: 129291 - DNA, 30 bp, Artificial Sequence
  Synthetic oligonucleotide
gttagacataggttaatactagtcgagacc

SEQ ID NO: 129292 - DNA, 30 bp, Artificial Sequence
  Synthetic oligonucleotide
gcgggatcaagtccataaagctatgagacc

SEQ ID NO: 129293 - DNA, 30 bp, Artificial Sequence
  Synthetic oligonucleotide
gataggggaagggtccatgtacgatagacc

SEQ ID NO: 129294 - DNA, 30 bp, Artificial Sequence
  Synthetic oligonucleotide
acctaatcaggggacgctaagttgtagacc

SEQ ID NO: 129295 - DNA, 30 bp, Artificial Sequence
  Synthetic oligonucleotide
ccgcgagtgtgaaattactatttgtagacc

SEQ ID NO: 129296 - DNA, 30 bp, Artificial Sequence
  Synthetic oligonucleotide
aacgagcggtgagtgctgatgtattagacc

SEQ ID NO: 129297 - DNA, 30 bp, Artificial Sequence
  Synthetic oligonucleotide
atagatccagttcccacgttacgttagacc

SEQ ID NO: 129298 - DNA, 30 bp, Artificial Sequence
  Synthetic oligonucleotide
ctgtaagaattccgtttcgttaccacgacc

SEQ ID NO: 129299 - DNA, 30 bp, Artificial Sequence
  Synthetic oligonucleotide
gccaggggatagcgctaaagtggcacgacc

SEQ ID NO: 129300 - DNA, 30 bp, Artificial Sequence
  Synthetic oligonucleotide
aaaacaggacaattggcgtatatgacgacc

SEQ ID NO: 129301 - DNA, 30 bp, Artificial Sequence
  Synthetic oligonucleotide
aattggaaaagaggccgaatctatacgacc

SEQ ID NO: 129302 - DNA, 30 bp, Artificial Sequence
  Synthetic oligonucleotide
gagccgctgtctgaatgcacctccccgacc

SEQ ID NO: 129303 - DNA, 30 bp, Artificial Sequence
  Synthetic oligonucleotide
acgatgagctcgcaagggtttcggccgacc

SEQ ID NO: 129304 - DNA, 30 bp, Artificial Sequence
  Synthetic oligonucleotide
attgggccgggatttgggacgtacgcgacc

SEQ ID NO: 129305 - DNA, 30 bp, Artificial Sequence
  Synthetic oligonucleotide
cgatgtctcgatcgtaggggagtggcgacc

SEQ ID NO: 129306 - DNA, 30 bp, Artificial Sequence
  Synthetic oligonucleotide
actggcataatcgggtcctaggttgcgacc

SEQ ID NO: 129307 - DNA, 30 bp, Artificial Sequence
  Synthetic oligonucleotide
tcgtaacgagcttcatactgtagatcgacc

SEQ ID NO: 129308 - DNA, 30 bp, Artificial Sequence
  Synthetic oligonucleotide
aaacacctaacgtcagtggttacgaggacc

SEQ ID NO: 129309 - DNA, 30 bp, Artificial Sequence
  Synthetic oligonucleotide
caagcactcccagggagtcgagctaggacc

SEQ ID NO: 129310 - DNA, 30 bp, Artificial Sequence
  Synthetic oligonucleotide
attgacatagtgcggatggtggcgcggacc

SEQ ID NO: 129311 - DNA, 30 bp, Artificial Sequence
  Synthetic oligonucleotide
aaatccagctatacgtaccagcggcggacc

SEQ ID NO: 129312 - DNA, 30 bp, Artificial Sequence
  Synthetic oligonucleotide
attaggggaacctcggcttacatgcggacc

SEQ ID NO: 129313 - DNA, 31 bp, Artificial Sequence
  Synthetic oligonucleotide
gaacggcaagtgcattattcgttctcggacc

SEQ ID NO: 129314 - DNA, 30 bp, Artificial Sequence
  Synthetic oligonucleotide
gaatgaaagcacagaggaaaaggtcggacc

SEQ ID NO: 129315 - DNA, 30 bp, Artificial Sequence
  Synthetic oligonucleotide
agctctcccagggggtctcgggaagggacc

SEQ ID NO: 129316 - DNA, 30 bp, Artificial Sequence
  Synthetic oligonucleotide
catcggggccaacagtaaccttaagggacc

SEQ ID NO: 129317 - DNA, 30 bp, Artificial Sequence
  Synthetic oligonucleotide
agctacgggaacgatcaatgccacgggacc

SEQ ID NO: 129318 - DNA, 30 bp, Artificial Sequence
  Synthetic oligonucleotide
cgagcgggtatcacagcaagggccgggacc

SEQ ID NO: 129319 - DNA, 30 bp, Artificial Sequence
  Synthetic oligonucleotide
tcgggtaacaagtgaactctagcgtggacc

SEQ ID NO: 129320 - DNA, 30 bp, Artificial Sequence
  Synthetic oligonucleotide
ttatcgacttatagtcaacgtaacatgacc

SEQ ID NO: 129321 - DNA, 30 bp, Artificial Sequence
  Synthetic oligonucleotide
taaagtgaactagccagagcgctgctgacc

SEQ ID NO: 129322 - DNA, 30 bp, Artificial Sequence
  Synthetic oligonucleotide
cgaattgtactctgaggcttcatattgacc

SEQ ID NO: 129323 - DNA, 30 bp, Artificial Sequence
  Synthetic oligonucleotide
tcatcaaaaaaattgcaagccgtcttgacc

SEQ ID NO: 129324 - DNA, 30 bp, Artificial Sequence
  Synthetic oligonucleotide
ctgagaagtgatgctgccccagggttgacc

SEQ ID NO: 129325 - DNA, 30 bp, Artificial Sequence
  Synthetic oligonucleotide
tccggcgtagaggcgtgacaagtcaatacc

SEQ ID NO: 129326 - DNA, 30 bp, Artificial Sequence
  Synthetic oligonucleotide
caacaagaaggcgtcagtagagcacatacc

SEQ ID NO: 129327 - DNA, 30 bp, Artificial Sequence
  Synthetic oligonucleotide
cgatggcagatacgaatatgcatacatacc

SEQ ID NO: 129328 - DNA, 30 bp, Artificial Sequence
  Synthetic oligonucleotide
cggtaagggtaaagctagtgtgtccatacc

SEQ ID NO: 129329 - DNA, 30 bp, Artificial Sequence
  Synthetic oligonucleotide
ttctcgcgcggtcgatcgtgtgcagatacc

SEQ ID NO: 129330 - DNA, 30 bp, Artificial Sequence
  Synthetic oligonucleotide
cgcgaggtccgggcggagggagatgatacc

SEQ ID NO: 129331 - DNA, 30 bp, Artificial Sequence
  Synthetic oligonucleotide
gagcggacgtttagtaccagcattgatacc

SEQ ID NO: 129332 - DNA, 30 bp, Artificial Sequence
  Synthetic oligonucleotide
tgcattgaaaacaccgacactgtttatacc

SEQ ID NO: 129333 - DNA, 30 bp, Artificial Sequence
  Synthetic oligonucleotide
tgataggcgagtccaagagtcttcactacc

SEQ ID NO: 129334 - DNA, 30 bp, Artificial Sequence
  Synthetic oligonucleotide
cgcggaggcagatggcacgctttccctacc

SEQ ID NO: 129335 - DNA, 30 bp, Artificial Sequence
  Synthetic oligonucleotide
taaggtacctgtaacgtgttaattcctacc

SEQ ID NO: 129336 - DNA, 30 bp, Artificial Sequence
  Synthetic oligonucleotide
gtcagggaaaaggtatccactgcggctacc

SEQ ID NO: 129337 - DNA, 30 bp, Artificial Sequence
  Synthetic oligonucleotide
aaaaccaaaccctcagacgaaggatctacc

SEQ ID NO: 129338 - DNA, 30 bp, Artificial Sequence
  Synthetic oligonucleotide
aggtacaggcgccaattgaaggcttctacc

SEQ ID NO: 129339 - DNA, 30 bp, Artificial Sequence
  Synthetic oligonucleotide
tagaacgactaggacatgccagcgagtacc

SEQ ID NO: 129340 - DNA, 30 bp, Artificial Sequence
  Synthetic oligonucleotide
gatataagggcgacaggcgaaactagtacc

SEQ ID NO: 129341 - DNA, 30 bp, Artificial Sequence
  Synthetic oligonucleotide
ccggtacccccacaaaacgagtcgggtacc

SEQ ID NO: 129342 - DNA, 30 bp, Artificial Sequence
  Synthetic oligonucleotide
aaaggatagacatagcctcggtcatgtacc

SEQ ID NO: 129343 - DNA, 30 bp, Artificial Sequence
  Synthetic oligonucleotide
caaagccaggaatgttgatggaagtgtacc

SEQ ID NO: 129344 - DNA, 30 bp, Artificial Sequence
  Synthetic oligonucleotide
acgtcataatatgtcataacggcgtgtacc

SEQ ID NO: 129345 - DNA, 30 bp, Artificial Sequence
  Synthetic oligonucleotide
tactgcacaatgaagccgggcccgattacc

SEQ ID NO: 129346 - DNA, 30 bp, Artificial Sequence
  Synthetic oligonucleotide
cctcagacacgcgcccgacggagggttacc

SEQ ID NO: 129347 - DNA, 30 bp, Artificial Sequence
  Synthetic oligonucleotide
gacaacaagcccgaagtggcacgggttacc

SEQ ID NO: 129348 - DNA, 30 bp, Artificial Sequence
  Synthetic oligonucleotide
atcatctggccaagactgccttcaaaaccc

SEQ ID NO: 129349 - DNA, 30 bp, Artificial Sequence
  Synthetic oligonucleotide
tgggtgaaagcgttgaatgatcagaaaccc

SEQ ID NO: 129350 - DNA, 30 bp, Artificial Sequence
  Synthetic oligonucleotide
ccaggaatgcaggtctgcatggaacaaccc

SEQ ID NO: 129351 - DNA, 30 bp, Artificial Sequence
  Synthetic oligonucleotide
atgtggggtacgtaagcctccaagcaaccc

SEQ ID NO: 129352 - DNA, 30 bp, Artificial Sequence
  Synthetic oligonucleotide
acgaatccaaggcaaatccatcctcaaccc

SEQ ID NO: 129353 - DNA, 30 bp, Artificial Sequence
  Synthetic oligonucleotide
cacagtatagatatttgatggcgggaaccc

SEQ ID NO: 129354 - DNA, 30 bp, Artificial Sequence
  Synthetic oligonucleotide
aaagaaagtagagggcatgatatggaaccc

SEQ ID NO: 129355 - DNA, 30 bp, Artificial Sequence
  Synthetic oligonucleotide
gatgacagtaaagagcgtatttgtgaaccc

SEQ ID NO: 129356 - DNA, 30 bp, Artificial Sequence
  Synthetic oligonucleotide
ctgtccgtagttctcgcctcaagctaaccc

SEQ ID NO: 129357 - DNA, 30 bp, Artificial Sequence
  Synthetic oligonucleotide
agttcgcgagattagcggcgcgagacaccc

SEQ ID NO: 129358 - DNA, 30 bp, Artificial Sequence
  Synthetic oligonucleotide
acgtgtacgtaggacccacaactgccaccc

SEQ ID NO: 129359 - DNA, 29 bp, Artificial Sequence
  Synthetic oligonucleotide
aggacagccggggcgaccaagtggcaccc

SEQ ID NO: 129360 - DNA, 30 bp, Artificial Sequence
  Synthetic oligonucleotide
cgtatgaatgtggagcctaaggttgcaccc

SEQ ID NO: 129361 - DNA, 30 bp, Artificial Sequence
  Synthetic oligonucleotide
agcggaatggccatacggacgtgtagaccc

SEQ ID NO: 129362 - DNA, 30 bp, Artificial Sequence
  Synthetic oligonucleotide
ggatggggctcatgcacctgaagactaccc

SEQ ID NO: 129363 - DNA, 31 bp, Artificial Sequence
  Synthetic oligonucleotide
cggtgagaagtgggttattgccgctctaccc

SEQ ID NO: 129364 - DNA, 30 bp, Artificial Sequence
  Synthetic oligonucleotide
gcggtatctgcgacagtgtaccggaacccc

SEQ ID NO: 129365 - DNA, 29 bp, Artificial Sequence
  Synthetic oligonucleotide
cagcaccggcaggcatcagcgaccacccc

SEQ ID NO: 129366 - DNA, 30 bp, Artificial Sequence
  Synthetic oligonucleotide
gcatcgagaaaccagcacagttaagacccc

SEQ ID NO: 129367 - DNA, 30 bp, Artificial Sequence
  Synthetic oligonucleotide
ggtgaaaagcaggaagggttactcgacccc

SEQ ID NO: 129368 - DNA, 30 bp, Artificial Sequence
  Synthetic oligonucleotide
acgtcgacattacccagtggtttaaccccc

SEQ ID NO: 129369 - DNA, 30 bp, Artificial Sequence
  Synthetic oligonucleotide
gactggatcggtttttagctcgctcccccc

SEQ ID NO: 129370 - DNA, 30 bp, Artificial Sequence
  Synthetic oligonucleotide
acctactaccgatagctaggtggcgccccc

SEQ ID NO: 129371 - DNA, 30 bp, Artificial Sequence
  Synthetic oligonucleotide
gggacgcttgcgtctatgggagatcgcccc

SEQ ID NO: 129372 - DNA, 30 bp, Artificial Sequence
  Synthetic oligonucleotide
ccccaatcgggcgtactcaagcaatgcccc

SEQ ID NO: 129373 - DNA, 30 bp, Artificial Sequence
  Synthetic oligonucleotide
ggcttgtcgctataagcggacaggtgcccc

SEQ ID NO: 129374 - DNA, 30 bp, Artificial Sequence
  Synthetic oligonucleotide
acgatcccagtttcgcgtcgtgtcctcccc

SEQ ID NO: 129375 - DNA, 30 bp, Artificial Sequence
  Synthetic oligonucleotide
tataaggcagtcgatagtaacagagtcccc

SEQ ID NO: 129376 - DNA, 30 bp, Artificial Sequence
  Synthetic oligonucleotide
tgagatagctatagttcaggtccggtcccc

SEQ ID NO: 129377 - DNA, 30 bp, Artificial Sequence
  Synthetic oligonucleotide
gggactctcggacctgggaatgcgttcccc

SEQ ID NO: 129378 - DNA, 30 bp, Artificial Sequence
  Synthetic oligonucleotide
aaacggcaattcgtcagaaaagcaaagccc

SEQ ID NO: 129379 - DNA, 30 bp, Artificial Sequence
  Synthetic oligonucleotide
aattgaaacacgaggtgcatgtcaaagccc

SEQ ID NO: 129380 - DNA, 30 bp, Artificial Sequence
  Synthetic oligonucleotide
taacggtatgcgtatggtcaacataagccc

SEQ ID NO: 129381 - DNA, 30 bp, Artificial Sequence
  Synthetic oligonucleotide
ccaccgacttagtcattcggggaacagccc

SEQ ID NO: 129382 - DNA, 30 bp, Artificial Sequence
  Synthetic oligonucleotide
taactatacatgtgacgtggcactcagccc

SEQ ID NO: 129383 - DNA, 30 bp, Artificial Sequence
  Synthetic oligonucleotide
tcactgagcgtattagtttaatcagagccc

SEQ ID NO: 129384 - DNA, 30 bp, Artificial Sequence
  Synthetic oligonucleotide
agaaggcaattgcacatattactcgagccc

SEQ ID NO: 129385 - DNA, 30 bp, Artificial Sequence
  Synthetic oligonucleotide
aggaaaaagacgttatgaacacaggagccc

SEQ ID NO: 129386 - DNA, 30 bp, Artificial Sequence
  Synthetic oligonucleotide
tacagttcgaattcggactctaacacgccc

SEQ ID NO: 129387 - DNA, 30 bp, Artificial Sequence
  Synthetic oligonucleotide
gtgtaaacttttcgggctcgcgggacgccc

SEQ ID NO: 129388 - DNA, 30 bp, Artificial Sequence
  Synthetic oligonucleotide
ctccgaagcgccaaattgctagaaccgccc

SEQ ID NO: 129389 - DNA, 30 bp, Artificial Sequence
  Synthetic oligonucleotide
ggcatgtcgggttagactatattagcgccc

SEQ ID NO: 129390 - DNA, 30 bp, Artificial Sequence
  Synthetic oligonucleotide
gggtcgtggcatacgtaagtctagtcgccc

SEQ ID NO: 129391 - DNA, 30 bp, Artificial Sequence
  Synthetic oligonucleotide
cttggtccttcaaatcgtaggattcggccc

SEQ ID NO: 129392 - DNA, 30 bp, Artificial Sequence
  Synthetic oligonucleotide
cagtatagacaagaaatggacttgtggccc

SEQ ID NO: 129393 - DNA, 30 bp, Artificial Sequence
  Synthetic oligonucleotide
ctaatgtacatgattccaacgtaaatgccc

SEQ ID NO: 129394 - DNA, 30 bp, Artificial Sequence
  Synthetic oligonucleotide
catcaaggactagagggcgagatcatgccc

SEQ ID NO: 129395 - DNA, 30 bp, Artificial Sequence
  Synthetic oligonucleotide
tagatccttataaagccagcgcaactgccc

SEQ ID NO: 129396 - DNA, 30 bp, Artificial Sequence
  Synthetic oligonucleotide
aggggacttcgcctagcgcgtgtagtgccc

SEQ ID NO: 129397 - DNA, 30 bp, Artificial Sequence
  Synthetic oligonucleotide
ctaacgagtgatcgtggtatgaacgtgccc

SEQ ID NO: 129398 - DNA, 30 bp, Artificial Sequence
  Synthetic oligonucleotide
ccattggtgataatcaccgacaaggtgccc

SEQ ID NO: 129399 - DNA, 30 bp, Artificial Sequence
  Synthetic oligonucleotide
gtgctaacaagtcaaccagcgggggtgccc

SEQ ID NO: 129400 - DNA, 30 bp, Artificial Sequence
  Synthetic oligonucleotide
atacctacgaaaagctatgggtcaaatccc

SEQ ID NO: 129401 - DNA, 30 bp, Artificial Sequence
  Synthetic oligonucleotide
ttcgtgtgggtagtggatttaagcaatccc

SEQ ID NO: 129402 - DNA, 30 bp, Artificial Sequence
  Synthetic oligonucleotide
ggtgacagcgtttgagtgagaaaacatccc

SEQ ID NO: 129403 - DNA, 30 bp, Artificial Sequence
  Synthetic oligonucleotide
cgcggattaaagtcggagttgtcgtatccc

SEQ ID NO: 129404 - DNA, 30 bp, Artificial Sequence
  Synthetic oligonucleotide
gtggccgcaagctcgagactggtgtatccc

SEQ ID NO: 129405 - DNA, 30 bp, Artificial Sequence
  Synthetic oligonucleotide
cgccgagccgcacgtaataaccgttatccc

SEQ ID NO: 129406 - DNA, 30 bp, Artificial Sequence
  Synthetic oligonucleotide
acctcggcagtcgggggcgatacacctccc

SEQ ID NO: 129407 - DNA, 30 bp, Artificial Sequence
  Synthetic oligonucleotide
cacagactagtctggcacgtgagtcctccc

SEQ ID NO: 129408 - DNA, 30 bp, Artificial Sequence
  Synthetic oligonucleotide
aagggaactacttcacgtcatcgcgctccc

SEQ ID NO: 129409 - DNA, 30 bp, Artificial Sequence
  Synthetic oligonucleotide
atgcagggggaatacaacttcgaggctccc

SEQ ID NO: 129410 - DNA, 30 bp, Artificial Sequence
  Synthetic oligonucleotide
accaagtttggactggttaattaggctccc

SEQ ID NO: 129411 - DNA, 30 bp, Artificial Sequence
  Synthetic oligonucleotide
caaatagcataagggagatcgtttgctccc

SEQ ID NO: 129412 - DNA, 30 bp, Artificial Sequence
  Synthetic oligonucleotide
tcaaggcaaacgaaatttacaggttctccc

SEQ ID NO: 129413 - DNA, 30 bp, Artificial Sequence
  Synthetic oligonucleotide
cgcgtggttttgggaaaaaggacacgtccc

SEQ ID NO: 129414 - DNA, 30 bp, Artificial Sequence
  Synthetic oligonucleotide
caactaggggcacgttagacgttccgtccc

SEQ ID NO: 129415 - DNA, 30 bp, Artificial Sequence
  Synthetic oligonucleotide
agcgctcgggcggtcaacgagccaggtccc

SEQ ID NO: 129416 - DNA, 30 bp, Artificial Sequence
  Synthetic oligonucleotide
tgtcggcttcagtccacggctgggggtccc

SEQ ID NO: 129417 - DNA, 30 bp, Artificial Sequence
  Synthetic oligonucleotide
ggaggggatggacctatgtcggggtgtccc

SEQ ID NO: 129418 - DNA, 30 bp, Artificial Sequence
  Synthetic oligonucleotide
acccagacacgcacccaccgccccattccc

SEQ ID NO: 129419 - DNA, 30 bp, Artificial Sequence
  Synthetic oligonucleotide
accagtacgacggaggggcgggcgattccc

SEQ ID NO: 129420 - DNA, 30 bp, Artificial Sequence
  Synthetic oligonucleotide
ggtcgtgtataggaggggacttgagttccc

SEQ ID NO: 129421 - DNA, 31 bp, Artificial Sequence
  Synthetic oligonucleotide
cactgatctgcggctcatcaacggtgttccc

SEQ ID NO: 129422 - DNA, 30 bp, Artificial Sequence
  Synthetic oligonucleotide
cctaaagatcggatcgagcgtaaaaaagcc

SEQ ID NO: 129423 - DNA, 34 bp, Artificial Sequence
  Synthetic oligonucleotide
gatactagaccaccacgtgtccatcagaaaagcc

SEQ ID NO: 129424 - DNA, 30 bp, Artificial Sequence
  Synthetic oligonucleotide
acatccctcccgcgtaaagatcagaaagcc

SEQ ID NO: 129425 - DNA, 30 bp, Artificial Sequence
  Synthetic oligonucleotide
acgaatcgccgaaagtatgaacataaagcc

SEQ ID NO: 129426 - DNA, 30 bp, Artificial Sequence
  Synthetic oligonucleotide
acacggagtcaggatcaataacataaagcc

SEQ ID NO: 129427 - DNA, 29 bp, Artificial Sequence
  Synthetic oligonucleotide
attcaaggaggaacaagaggactaaagcc

SEQ ID NO: 129428 - DNA, 30 bp, Artificial Sequence
  Synthetic oligonucleotide
gcgatctggctccacactaaaagtcaagcc

SEQ ID NO: 129429 - DNA, 30 bp, Artificial Sequence
  Synthetic oligonucleotide
tcaatgtcgcttcacaaaggaatcgaagcc

SEQ ID NO: 129430 - DNA, 30 bp, Artificial Sequence
  Synthetic oligonucleotide
gagagggtcaattgcagaagcaatgaagcc

SEQ ID NO: 129431 - DNA, 30 bp, Artificial Sequence
  Synthetic oligonucleotide
agttaacaggcccggaaagaatgctaagcc

SEQ ID NO: 129432 - DNA, 30 bp, Artificial Sequence
  Synthetic oligonucleotide
gtattttaccattcgctcgatatttaagcc

SEQ ID NO: 129433 - DNA, 30 bp, Artificial Sequence
  Synthetic oligonucleotide
gagcctacggacggtatgtgcaacacagcc

SEQ ID NO: 129434 - DNA, 30 bp, Artificial Sequence
  Synthetic oligonucleotide
acgaatagcgggcgtactagatcgacagcc

SEQ ID NO: 129435 - DNA, 30 bp, Artificial Sequence
  Synthetic oligonucleotide
tgaaatgaagttgagggagacgttacagcc

SEQ ID NO: 129436 - DNA, 30 bp, Artificial Sequence
  Synthetic oligonucleotide
ggtgaagcatgacctaacggccagccagcc

SEQ ID NO: 129437 - DNA, 30 bp, Artificial Sequence
  Synthetic oligonucleotide
cttagggcagtaagagttagaaaggcagcc

SEQ ID NO: 129438 - DNA, 30 bp, Artificial Sequence
  Synthetic oligonucleotide
gtacttacctgacagggttccgtggcagcc

SEQ ID NO: 129439 - DNA, 30 bp, Artificial Sequence
  Synthetic oligonucleotide
cgattatactggtcaagaggagcctcagcc

SEQ ID NO: 129440 - DNA, 30 bp, Artificial Sequence
  Synthetic oligonucleotide
tccaatgttactcgcgaaaaagcgtcagcc

SEQ ID NO: 129441 - DNA, 30 bp, Artificial Sequence
  Synthetic oligonucleotide
ttctgccggaatgcgccggatcggtcagcc

SEQ ID NO: 129442 - DNA, 30 bp, Artificial Sequence
  Synthetic oligonucleotide
tgtacatacattggcatagtagggtcagcc

SEQ ID NO: 129443 - DNA, 30 bp, Artificial Sequence
  Synthetic oligonucleotide
atcactgaacaagggataaggcgttcagcc

SEQ ID NO: 129444 - DNA, 30 bp, Artificial Sequence
  Synthetic oligonucleotide
aagctcacgatcagtaggcgcattagagcc

SEQ ID NO: 129445 - DNA, 30 bp, Artificial Sequence
  Synthetic oligonucleotide
cattataccgctaacgtgtgggatcgagcc

SEQ ID NO: 129446 - DNA, 30 bp, Artificial Sequence
  Synthetic oligonucleotide
aggcgaccgcagactgatcaaaatggagcc

SEQ ID NO: 129447 - DNA, 30 bp, Artificial Sequence
  Synthetic oligonucleotide
tatgcattgcaactcgtggacggtggagcc

SEQ ID NO: 129448 - DNA, 30 bp, Artificial Sequence
  Synthetic oligonucleotide
gcactatacgacacttgctacacttgagcc

SEQ ID NO: 129449 - DNA, 30 bp, Artificial Sequence
  Synthetic oligonucleotide
tggtgtgcatctgttatcaagttttgagcc

SEQ ID NO: 129450 - DNA, 30 bp, Artificial Sequence
  Synthetic oligonucleotide
cgtgtagggccacggaaaataaaaatagcc

SEQ ID NO: 129451 - DNA, 30 bp, Artificial Sequence
  Synthetic oligonucleotide
acaggggactgtgccaaagaccacatagcc

SEQ ID NO: 129452 - DNA, 30 bp, Artificial Sequence
  Synthetic oligonucleotide
acgtgatatatatgagcaagaagactagcc

SEQ ID NO: 129453 - DNA, 30 bp, Artificial Sequence
  Synthetic oligonucleotide
cgtcggtaaatgaaaagtccgagggtagcc

SEQ ID NO: 129454 - DNA, 30 bp, Artificial Sequence
  Synthetic oligonucleotide
tgggctcccgaccgatccagaatggtagcc

SEQ ID NO: 129455 - DNA, 30 bp, Artificial Sequence
  Synthetic oligonucleotide
tagtaagcagtcagaatactgcgattagcc

SEQ ID NO: 129456 - DNA, 30 bp, Artificial Sequence
  Synthetic oligonucleotide
gatgactcgattaaagtgggacacaacgcc

SEQ ID NO: 129457 - DNA, 30 bp, Artificial Sequence
  Synthetic oligonucleotide
gaaagcggatagatactattgagcaacgcc

SEQ ID NO: 129458 - DNA, 30 bp, Artificial Sequence
  Synthetic oligonucleotide
cttgtcaataccggtagttagcataacgcc

SEQ ID NO: 129459 - DNA, 30 bp, Artificial Sequence
  Synthetic oligonucleotide
tcgagagtgaaaatccgcgtgaaccacgcc

SEQ ID NO: 129460 - DNA, 30 bp, Artificial Sequence
  Synthetic oligonucleotide
aaatagatcctgaaccgaatccgtcacgcc

SEQ ID NO: 129461 - DNA, 30 bp, Artificial Sequence
  Synthetic oligonucleotide
cctgcaacttagctacgtctcacctacgcc

SEQ ID NO: 129462 - DNA, 30 bp, Artificial Sequence
  Synthetic oligonucleotide
tctggcttacattgtgtcagctggcccgcc

SEQ ID NO: 129463 - DNA, 30 bp, Artificial Sequence
  Synthetic oligonucleotide
accagacaacgggagtgacaagtgtccgcc

SEQ ID NO: 129464 - DNA, 30 bp, Artificial Sequence
  Synthetic oligonucleotide
ataatgtggaaaaggaacaggtaaagcgcc

SEQ ID NO: 129465 - DNA, 30 bp, Artificial Sequence
  Synthetic oligonucleotide
catgggaaccggctggcagatacaagcgcc

SEQ ID NO: 129466 - DNA, 30 bp, Artificial Sequence
  Synthetic oligonucleotide
taagcgtcggtaaaccgacatccatgcgcc

SEQ ID NO: 129467 - DNA, 30 bp, Artificial Sequence
  Synthetic oligonucleotide
ataggggaacgcgaatcattaacctgcgcc

SEQ ID NO: 129468 - DNA, 30 bp, Artificial Sequence
  Synthetic oligonucleotide
cattagggccgggtgactaaccagtgcgcc

SEQ ID NO: 129469 - DNA, 30 bp, Artificial Sequence
  Synthetic oligonucleotide
gaatcaccagttacgaatttaccaatcgcc

SEQ ID NO: 129470 - DNA, 30 bp, Artificial Sequence
  Synthetic oligonucleotide
cctctacttctacgaggagagttgatcgcc

SEQ ID NO: 129471 - DNA, 30 bp, Artificial Sequence
  Synthetic oligonucleotide
tatgggatatgtgggagtccacagctcgcc

SEQ ID NO: 129472 - DNA, 30 bp, Artificial Sequence
  Synthetic oligonucleotide
cgtggagttagatatatgtccgtagtcgcc

SEQ ID NO: 129473 - DNA, 30 bp, Artificial Sequence
  Synthetic oligonucleotide
gacagttgtatagcacgtggtacggtcgcc

SEQ ID NO: 129474 - DNA, 30 bp, Artificial Sequence
  Synthetic oligonucleotide
aacaaagacagcattgtgcaaaatgtcgcc

SEQ ID NO: 129475 - DNA, 30 bp, Artificial Sequence
  Synthetic oligonucleotide
gtaagaggcataagtcgtgagagcttcgcc

SEQ ID NO: 129476 - DNA, 30 bp, Artificial Sequence
  Synthetic oligonucleotide
aatgtagaactatttcaagacctcttcgcc

SEQ ID NO: 129477 - DNA, 30 bp, Artificial Sequence
  Synthetic oligonucleotide
acgaaaactcaccatcaggacccgttcgcc

SEQ ID NO: 129478 - DNA, 30 bp, Artificial Sequence
  Synthetic oligonucleotide
aacgtatagtaaggccaggaaacgaaggcc

SEQ ID NO: 129479 - DNA, 30 bp, Artificial Sequence
  Synthetic oligonucleotide
gatggcaccactatcatcctccataaggcc

SEQ ID NO: 129480 - DNA, 31 bp, Artificial Sequence
  Synthetic oligonucleotide
cacggatcgacactcggcccattataaggcc

SEQ ID NO: 129481 - DNA, 30 bp, Artificial Sequence
  Synthetic oligonucleotide
atggcaccacctgagttaaattgtaaggcc

SEQ ID NO: 129482 - DNA, 30 bp, Artificial Sequence
  Synthetic oligonucleotide
cgttacacatggatgaataacgtgcaggcc

SEQ ID NO: 129483 - DNA, 30 bp, Artificial Sequence
  Synthetic oligonucleotide
gcataggggtatagaaagcatattcaggcc

SEQ ID NO: 129484 - DNA, 30 bp, Artificial Sequence
  Synthetic oligonucleotide
ggaagcactcagaggcaccgaaagtaggcc

SEQ ID NO: 129485 - DNA, 30 bp, Artificial Sequence
  Synthetic oligonucleotide
aggactaggtttatcgcccgcctgtaggcc

SEQ ID NO: 129486 - DNA, 30 bp, Artificial Sequence
  Synthetic oligonucleotide
aggctcgattagaacaggcataattaggcc

SEQ ID NO: 129487 - DNA, 30 bp, Artificial Sequence
  Synthetic oligonucleotide
aggacaaggagcatcggaagcggttaggcc

SEQ ID NO: 129488 - DNA, 30 bp, Artificial Sequence
  Synthetic oligonucleotide
ggatcgacttaactaagaagtctttaggcc

SEQ ID NO: 129489 - DNA, 30 bp, Artificial Sequence
  Synthetic oligonucleotide
ctgagaggatcgtgcgtaagcgctccggcc

SEQ ID NO: 129490 - DNA, 30 bp, Artificial Sequence
  Synthetic oligonucleotide
ccgaatatcgctggcgacacccttccggcc

SEQ ID NO: 129491 - DNA, 30 bp, Artificial Sequence
  Synthetic oligonucleotide
ccgaaactggacagttgaccgtgttcggcc

SEQ ID NO: 129492 - DNA, 30 bp, Artificial Sequence
  Synthetic oligonucleotide
cgccgaggttaacggtcgtaagcaagggcc

SEQ ID NO: 129493 - DNA, 30 bp, Artificial Sequence
  Synthetic oligonucleotide
cctcagagtccgcgctgcgggaacagggcc

SEQ ID NO: 129494 - DNA, 30 bp, Artificial Sequence
  Synthetic oligonucleotide
tggagcggtaaggtgtaagacgacagggcc

SEQ ID NO: 129495 - DNA, 30 bp, Artificial Sequence
  Synthetic oligonucleotide
gtcctaaaagaatcaaaaaaaaggagggcc

SEQ ID NO: 129496 - DNA, 30 bp, Artificial Sequence
  Synthetic oligonucleotide
gcgtcttctttgagtacgatggtaggggcc

SEQ ID NO: 129497 - DNA, 30 bp, Artificial Sequence
  Synthetic oligonucleotide
gggagcgagtccacctcgccatagggggcc

SEQ ID NO: 129498 - DNA, 30 bp, Artificial Sequence
  Synthetic oligonucleotide
atggaggaccgctctggggcacgatgggcc

SEQ ID NO: 129499 - DNA, 30 bp, Artificial Sequence
  Synthetic oligonucleotide
agggagtgcaaagtactaaatatttgggcc

SEQ ID NO: 129500 - DNA, 30 bp, Artificial Sequence
  Synthetic oligonucleotide
cacatagtgttgtgcagggcagaaatggcc

SEQ ID NO: 129501 - DNA, 30 bp, Artificial Sequence
  Synthetic oligonucleotide
gttatacgaggacaaaactggggcctggcc

SEQ ID NO: 129502 - DNA, 30 bp, Artificial Sequence
  Synthetic oligonucleotide
gggtcgatgctagtcgaagtatcgctggcc

SEQ ID NO: 129503 - DNA, 30 bp, Artificial Sequence
  Synthetic oligonucleotide
atgttgcattgtcatacctagaggctggcc

SEQ ID NO: 129504 - DNA, 30 bp, Artificial Sequence
  Synthetic oligonucleotide
acaacactggacgaacctgggaacgtggcc

SEQ ID NO: 129505 - DNA, 30 bp, Artificial Sequence
  Synthetic oligonucleotide
ccagataggggtccgatacaagccgtggcc

SEQ ID NO: 129506 - DNA, 30 bp, Artificial Sequence
  Synthetic oligonucleotide
gcagacaactaaactaaactctgcgtggcc

SEQ ID NO: 129507 - DNA, 30 bp, Artificial Sequence
  Synthetic oligonucleotide
gtgaggggggctccataatagatggtggcc

SEQ ID NO: 129508 - DNA, 30 bp, Artificial Sequence
  Synthetic oligonucleotide
tctaagccacataatgcaaaagtattggcc

SEQ ID NO: 129509 - DNA, 30 bp, Artificial Sequence
  Synthetic oligonucleotide
agtgagagacggagtaacttagtattggcc

SEQ ID NO: 129510 - DNA, 30 bp, Artificial Sequence
  Synthetic oligonucleotide
catagagatacctaattagatttcttggcc

SEQ ID NO: 129511 - DNA, 30 bp, Artificial Sequence
  Synthetic oligonucleotide
cgtgtcagatacggttgcagtatgttggcc

SEQ ID NO: 129512 - DNA, 30 bp, Artificial Sequence
  Synthetic oligonucleotide
aaataaattgatacatcgcggaaaaatgcc

SEQ ID NO: 129513 - DNA, 31 bp, Artificial Sequence
  Synthetic oligonucleotide
aagatgtagataaaaatgaagacacaatgcc

SEQ ID NO: 129514 - DNA, 31 bp, Artificial Sequence
  Synthetic oligonucleotide
aaggggtatgaggtgagtgggctccaatgcc

SEQ ID NO: 129515 - DNA, 30 bp, Artificial Sequence
  Synthetic oligonucleotide
gctcagacgtccctcgagcgcaggaatgcc

SEQ ID NO: 129516 - DNA, 30 bp, Artificial Sequence
  Synthetic oligonucleotide
tgcccgtgtaatcgcctgcgacaagatgcc

SEQ ID NO: 129517 - DNA, 30 bp, Artificial Sequence
  Synthetic oligonucleotide
atcgatcatgttaatgccctaccagatgcc

SEQ ID NO: 129518 - DNA, 30 bp, Artificial Sequence
  Synthetic oligonucleotide
cggcgctaagttcgccagacatacgatgcc

SEQ ID NO: 129519 - DNA, 30 bp, Artificial Sequence
  Synthetic oligonucleotide
caacggaagggcactttcggagtcgatgcc

SEQ ID NO: 129520 - DNA, 30 bp, Artificial Sequence
  Synthetic oligonucleotide
acgcctgagtgcactacgtatccaactgcc

SEQ ID NO: 129521 - DNA, 30 bp, Artificial Sequence
  Synthetic oligonucleotide
gcgagcgaagccactgatgtcgagactgcc

SEQ ID NO: 129522 - DNA, 30 bp, Artificial Sequence
  Synthetic oligonucleotide
gatgcgtaaaattaaaggcgctggactgcc

SEQ ID NO: 129523 - DNA, 30 bp, Artificial Sequence
  Synthetic oligonucleotide
atcgaaggtagtgcgacggtggtacctgcc

SEQ ID NO: 129524 - DNA, 30 bp, Artificial Sequence
  Synthetic oligonucleotide
cattagcgtcagcgtcgatgtatccctgcc

SEQ ID NO: 129525 - DNA, 30 bp, Artificial Sequence
  Synthetic oligonucleotide
cattatacattctctcaaaatgatcctgcc

SEQ ID NO: 129526 - DNA, 30 bp, Artificial Sequence
  Synthetic oligonucleotide
gcgataatcgaccgtatgtcccaggctgcc

SEQ ID NO: 129527 - DNA, 30 bp, Artificial Sequence
  Synthetic oligonucleotide
cgccacggggcgaatcgctggttctctgcc

SEQ ID NO: 129528 - DNA, 30 bp, Artificial Sequence
  Synthetic oligonucleotide
gaattgagcggccaaggagtgcagtctgcc

SEQ ID NO: 129529 - DNA, 30 bp, Artificial Sequence
  Synthetic oligonucleotide
tatgcgacatccgacttatacccgtctgcc

SEQ ID NO: 129530 - DNA, 30 bp, Artificial Sequence
  Synthetic oligonucleotide
gtaagcgctaaaaaattctgatcgagtgcc

SEQ ID NO: 129531 - DNA, 30 bp, Artificial Sequence
  Synthetic oligonucleotide
cgtgattcatggatgtcatccaatagtgcc

SEQ ID NO: 129532 - DNA, 30 bp, Artificial Sequence
  Synthetic oligonucleotide
gaacacatggggaattgggaggcaggtgcc

SEQ ID NO: 129533 - DNA, 30 bp, Artificial Sequence
  Synthetic oligonucleotide
gccacagagcaaattgaaagatagtgtgcc

SEQ ID NO: 129534 - DNA, 30 bp, Artificial Sequence
  Synthetic oligonucleotide
tgggcggtggagatataaaccacttgtgcc

SEQ ID NO: 129535 - DNA, 30 bp, Artificial Sequence
  Synthetic oligonucleotide
acacaagggtgtttagaggccagaattgcc

SEQ ID NO: 129536 - DNA, 30 bp, Artificial Sequence
  Synthetic oligonucleotide
aaacatatatacaatctggtatcccttgcc

SEQ ID NO: 129537 - DNA, 31 bp, Artificial Sequence
  Synthetic oligonucleotide
ctaaatggacaaagcggttcatacgcttgcc

SEQ ID NO: 129538 - DNA, 30 bp, Artificial Sequence
  Synthetic oligonucleotide
gactgattgtcggcttctaactgcgttgcc

SEQ ID NO: 129539 - DNA, 30 bp, Artificial Sequence
  Synthetic oligonucleotide
gcaacaaggattaccgtaactgcatttgcc

SEQ ID NO: 129540 - DNA, 30 bp, Artificial Sequence
  Synthetic oligonucleotide
acaaagcgttcccatgtcggcggaaaatcc

SEQ ID NO: 129541 - DNA, 30 bp, Artificial Sequence
  Synthetic oligonucleotide
cgaattcgataagaataaaacatcaaatcc

SEQ ID NO: 129542 - DNA, 30 bp, Artificial Sequence
  Synthetic oligonucleotide
ctggaatctgagcatttagagacgaaatcc

SEQ ID NO: 129543 - DNA, 30 bp, Artificial Sequence
  Synthetic oligonucleotide
acaaaagtgcctttcagaatatttaaatcc

SEQ ID NO: 129544 - DNA, 30 bp, Artificial Sequence
  Synthetic oligonucleotide
caagagatgaacagaaatgacggccaatcc

SEQ ID NO: 129545 - DNA, 30 bp, Artificial Sequence
  Synthetic oligonucleotide
cttatatgtggggtgcctagacagcaatcc

SEQ ID NO: 129546 - DNA, 30 bp, Artificial Sequence
  Synthetic oligonucleotide
cctagtgcttaatcgttattactagaatcc

SEQ ID NO: 129547 - DNA, 30 bp, Artificial Sequence
  Synthetic oligonucleotide
gtatagcatcaggggattagtgagtaatcc

SEQ ID NO: 129548 - DNA, 30 bp, Artificial Sequence
  Synthetic oligonucleotide
acccgtaccacgtacagcttcccaacatcc

SEQ ID NO: 129549 - DNA, 30 bp, Artificial Sequence
  Synthetic oligonucleotide
actaagttaggctccaacggagacacatcc

SEQ ID NO: 129550 - DNA, 30 bp, Artificial Sequence
  Synthetic oligonucleotide
cgaaatccggttagatgctatccaccatcc

SEQ ID NO: 129551 - DNA, 30 bp, Artificial Sequence
  Synthetic oligonucleotide
cgatggtaagaaaccactaaacaggcatcc

SEQ ID NO: 129552 - DNA, 30 bp, Artificial Sequence
  Synthetic oligonucleotide
agggcacaacaatgggtctgaaatgcatcc

SEQ ID NO: 129553 - DNA, 30 bp, Artificial Sequence
  Synthetic oligonucleotide
accatgagcaatagttggggttgtgcatcc

SEQ ID NO: 129554 - DNA, 30 bp, Artificial Sequence
  Synthetic oligonucleotide
cgggagcagctgtctcaagtgcgatcatcc

SEQ ID NO: 129555 - DNA, 30 bp, Artificial Sequence
  Synthetic oligonucleotide
cagggaatgacgacttgagccagctcatcc

SEQ ID NO: 129556 - DNA, 30 bp, Artificial Sequence
  Synthetic oligonucleotide
aggatatgatgccatcagacattctcatcc

SEQ ID NO: 129557 - DNA, 30 bp, Artificial Sequence
  Synthetic oligonucleotide
ggaggcagactactttcatatgcgtcatcc

SEQ ID NO: 129558 - DNA, 30 bp, Artificial Sequence
  Synthetic oligonucleotide
gacggccacaaaactcgactgtcgtcatcc

SEQ ID NO: 129559 - DNA, 30 bp, Artificial Sequence
  Synthetic oligonucleotide
cagacctaccgttttcaagtggacagatcc

SEQ ID NO: 129560 - DNA, 30 bp, Artificial Sequence
  Synthetic oligonucleotide
taagcctcgcattgcgactaaacacgatcc

SEQ ID NO: 129561 - DNA, 30 bp, Artificial Sequence
  Synthetic oligonucleotide
cgaggtacgatgcacacttgtacacgatcc

SEQ ID NO: 129562 - DNA, 30 bp, Artificial Sequence
  Synthetic oligonucleotide
ggtgtagtcgctaaggagacacaccgatcc

SEQ ID NO: 129563 - DNA, 30 bp, Artificial Sequence
  Synthetic oligonucleotide
tactaccccatgtgtcttccatgccgatcc

SEQ ID NO: 129564 - DNA, 30 bp, Artificial Sequence
  Synthetic oligonucleotide
atgtcgcatgtagagctgtcatggggatcc

SEQ ID NO: 129565 - DNA, 30 bp, Artificial Sequence
  Synthetic oligonucleotide
tcccggggcctagcctcttggggtggatcc

SEQ ID NO: 129566 - DNA, 30 bp, Artificial Sequence
  Synthetic oligonucleotide
tgctggttatgtaagcaaacataatgatcc

SEQ ID NO: 129567 - DNA, 30 bp, Artificial Sequence
  Synthetic oligonucleotide
tgacccaggcccaacttattggcatgatcc

SEQ ID NO: 129568 - DNA, 30 bp, Artificial Sequence
  Synthetic oligonucleotide
ggcgttaatagcataacgaatttcatatcc

SEQ ID NO: 129569 - DNA, 30 bp, Artificial Sequence
  Synthetic oligonucleotide
gctaaaatgtgggttgaaagaaggatatcc

SEQ ID NO: 129570 - DNA, 30 bp, Artificial Sequence
  Synthetic oligonucleotide
gtaaggggatgcgggctattatggatatcc

SEQ ID NO: 129571 - DNA, 30 bp, Artificial Sequence
  Synthetic oligonucleotide
agtaggcggaagtcttgagcttggatatcc

SEQ ID NO: 129572 - DNA, 30 bp, Artificial Sequence
  Synthetic oligonucleotide
ggacctcatcaagtatcctgaacactatcc

SEQ ID NO: 129573 - DNA, 30 bp, Artificial Sequence
  Synthetic oligonucleotide
cgggtaccatctagccgtttaggcctatcc

SEQ ID NO: 129574 - DNA, 30 bp, Artificial Sequence
  Synthetic oligonucleotide
tccggggccagtgctggagaccatctatcc

SEQ ID NO: 129575 - DNA, 30 bp, Artificial Sequence
  Synthetic oligonucleotide
ctgagcaacgtgacccacctggtagtatcc

SEQ ID NO: 129576 - DNA, 30 bp, Artificial Sequence
  Synthetic oligonucleotide
cgataaggtcgcccttggtcggtggtatcc

SEQ ID NO: 129577 - DNA, 30 bp, Artificial Sequence
  Synthetic oligonucleotide
acttgaaccggatcagagctcattaactcc

SEQ ID NO: 129578 - DNA, 30 bp, Artificial Sequence
  Synthetic oligonucleotide
tggaaactggttcacccagctaaagactcc

SEQ ID NO: 129579 - DNA, 30 bp, Artificial Sequence
  Synthetic oligonucleotide
acgcatgaggtcgattgttaggtggactcc

SEQ ID NO: 129580 - DNA, 30 bp, Artificial Sequence
  Synthetic oligonucleotide
ttaagtgccgttggcttggaacgtgactcc

SEQ ID NO: 129581 - DNA, 30 bp, Artificial Sequence
  Synthetic oligonucleotide
agggatacatcacaagttcgtacatactcc

SEQ ID NO: 129582 - DNA, 30 bp, Artificial Sequence
  Synthetic oligonucleotide
gtcccgggaactccgatggcaagctactcc

SEQ ID NO: 129583 - DNA, 30 bp, Artificial Sequence
  Synthetic oligonucleotide
cgagtgcagcacgataaatcggccacctcc

SEQ ID NO: 129584 - DNA, 30 bp, Artificial Sequence
  Synthetic oligonucleotide
tttgaatctgagaggagaaccgtaccctcc

SEQ ID NO: 129585 - DNA, 30 bp, Artificial Sequence
  Synthetic oligonucleotide
gacgagccgggtaaaggctgaggtccctcc

SEQ ID NO: 129586 - DNA, 30 bp, Artificial Sequence
  Synthetic oligonucleotide
tgaatcaggtgatctcatgctcctgcctcc

SEQ ID NO: 129587 - DNA, 30 bp, Artificial Sequence
  Synthetic oligonucleotide
cttctgtgttgggtagcgtctcgttcctcc

SEQ ID NO: 129588 - DNA, 30 bp, Artificial Sequence
  Synthetic oligonucleotide
ttagtacaatagatcgtgagaaccagctcc

SEQ ID NO: 129589 - DNA, 30 bp, Artificial Sequence
  Synthetic oligonucleotide
tcctagtgtgcatatagctgagcgagctcc

SEQ ID NO: 129590 - DNA, 30 bp, Artificial Sequence
  Synthetic oligonucleotide
cgaaatgcgactcataaagtggtccgctcc

SEQ ID NO: 129591 - DNA, 30 bp, Artificial Sequence
  Synthetic oligonucleotide
tcgcatagttaaccgccgtttgtgcgctcc

SEQ ID NO: 129592 - DNA, 30 bp, Artificial Sequence
  Synthetic oligonucleotide
cagaggtagattgggatgctcgtctgctcc

SEQ ID NO: 129593 - DNA, 30 bp, Artificial Sequence
  Synthetic oligonucleotide
cgactaactaggtaacaatattattgctcc

SEQ ID NO: 129594 - DNA, 30 bp, Artificial Sequence
  Synthetic oligonucleotide
agaacagggtgcgctccagatgaaatctcc

SEQ ID NO: 129595 - DNA, 30 bp, Artificial Sequence
  Synthetic oligonucleotide
gccgccctgtatctgcattaagtaatctcc

SEQ ID NO: 129596 - DNA, 30 bp, Artificial Sequence
  Synthetic oligonucleotide
gtgaggtacatcatgaataatatcatctcc

SEQ ID NO: 129597 - DNA, 30 bp, Artificial Sequence
  Synthetic oligonucleotide
ctgaccgcgatcaattcataggatatctcc

SEQ ID NO: 129598 - DNA, 30 bp, Artificial Sequence
  Synthetic oligonucleotide
cataatgctgcccctcaaagattagtctcc

SEQ ID NO: 129599 - DNA, 30 bp, Artificial Sequence
  Synthetic oligonucleotide
gatggattgagaagtttgatcagtaagtcc

SEQ ID NO: 129600 - DNA, 30 bp, Artificial Sequence
  Synthetic oligonucleotide
caggcaattaatcgccctgaaagagagtcc

SEQ ID NO: 129601 - DNA, 30 bp, Artificial Sequence
  Synthetic oligonucleotide
tggatacatggacgccagtaattcgagtcc

SEQ ID NO: 129602 - DNA, 30 bp, Artificial Sequence
  Synthetic oligonucleotide
gcacaggtaagttcggccttaagggagtcc

SEQ ID NO: 129603 - DNA, 30 bp, Artificial Sequence
  Synthetic oligonucleotide
cagacgcggagggtatgtttcccttagtcc

SEQ ID NO: 129604 - DNA, 30 bp, Artificial Sequence
  Synthetic oligonucleotide
cagatcccaaacgaagtgatctacacgtcc

SEQ ID NO: 129605 - DNA, 30 bp, Artificial Sequence
  Synthetic oligonucleotide
gtggaaagtatgatggggggttacccgtcc

SEQ ID NO: 129606 - DNA, 30 bp, Artificial Sequence
  Synthetic oligonucleotide
acgacaggcactggggccaaacaatcgtcc

SEQ ID NO: 129607 - DNA, 30 bp, Artificial Sequence
  Synthetic oligonucleotide
gcgcgacaaggtgcgcgccagaaaaggtcc

SEQ ID NO: 129608 - DNA, 30 bp, Artificial Sequence
  Synthetic oligonucleotide
gctaagctacacatgagataggcaaggtcc

SEQ ID NO: 129609 - DNA, 30 bp, Artificial Sequence
  Synthetic oligonucleotide
ggaacagagggtgctcaggattccaggtcc

SEQ ID NO: 129610 - DNA, 30 bp, Artificial Sequence
  Synthetic oligonucleotide
gttgacaaaaggttgcagccaatcaggtcc

SEQ ID NO: 129611 - DNA, 30 bp, Artificial Sequence
  Synthetic oligonucleotide
caatccacattcaattaaaattctaggtcc

SEQ ID NO: 129612 - DNA, 30 bp, Artificial Sequence
  Synthetic oligonucleotide
gggcatcgtcgtgagaggctattgcggtcc

SEQ ID NO: 129613 - DNA, 30 bp, Artificial Sequence
  Synthetic oligonucleotide
ccaaaacaatgtaccgacgccaatcggtcc

SEQ ID NO: 129614 - DNA, 30 bp, Artificial Sequence
  Synthetic oligonucleotide
cttcagaatcagacctgaaacgaagggtcc

SEQ ID NO: 129615 - DNA, 30 bp, Artificial Sequence
  Synthetic oligonucleotide
caataaatgaataccatcccccaggggtcc

SEQ ID NO: 129616 - DNA, 30 bp, Artificial Sequence
  Synthetic oligonucleotide
accttcagatcctgataaaacgtatggtcc

SEQ ID NO: 129617 - DNA, 30 bp, Artificial Sequence
  Synthetic oligonucleotide
catcaagagaacagtagggcctcctggtcc

SEQ ID NO: 129618 - DNA, 30 bp, Artificial Sequence
  Synthetic oligonucleotide
cgagacattatctggaacatcttgtggtcc

SEQ ID NO: 129619 - DNA, 30 bp, Artificial Sequence
  Synthetic oligonucleotide
ccgaaaggggcattccgaatacgttggtcc

SEQ ID NO: 129620 - DNA, 30 bp, Artificial Sequence
  Synthetic oligonucleotide
agaaagtaagtagggattgctcgaatgtcc

SEQ ID NO: 129621 - DNA, 30 bp, Artificial Sequence
  Synthetic oligonucleotide
tgcgttaagcatgtttttcggcccatgtcc

SEQ ID NO: 129622 - DNA, 30 bp, Artificial Sequence
  Synthetic oligonucleotide
acttccgatccccggtaatagccactgtcc

SEQ ID NO: 129623 - DNA, 30 bp, Artificial Sequence
  Synthetic oligonucleotide
cttaggaaaacgctggcaacccagctgtcc

SEQ ID NO: 129624 - DNA, 30 bp, Artificial Sequence
  Synthetic oligonucleotide
cgattacataagaacgaaggttaagtgtcc

SEQ ID NO: 129625 - DNA, 30 bp, Artificial Sequence
  Synthetic oligonucleotide
aacgaatggattgcctccctggaggtgtcc

SEQ ID NO: 129626 - DNA, 30 bp, Artificial Sequence
  Synthetic oligonucleotide
ctgagggactgggattgttaatgggtgtcc

SEQ ID NO: 129627 - DNA, 30 bp, Artificial Sequence
  Synthetic oligonucleotide
cacaaatgtagatacgttactcttgtgtcc

SEQ ID NO: 129628 - DNA, 30 bp, Artificial Sequence
  Synthetic oligonucleotide
atcaaagacgagtatactcggaaattgtcc

SEQ ID NO: 129629 - DNA, 30 bp, Artificial Sequence
  Synthetic oligonucleotide
gggccccacattgcgccataaatattgtcc

SEQ ID NO: 129630 - DNA, 30 bp, Artificial Sequence
  Synthetic oligonucleotide
ctgagcgttggtcatcgaccgcccaattcc

SEQ ID NO: 129631 - DNA, 30 bp, Artificial Sequence
  Synthetic oligonucleotide
accggggtgcgtcaaaacaatatcaattcc

SEQ ID NO: 129632 - DNA, 30 bp, Artificial Sequence
  Synthetic oligonucleotide
agtgagtagcgcaaatcgtagttcaattcc

SEQ ID NO: 129633 - DNA, 30 bp, Artificial Sequence
  Synthetic oligonucleotide
caccctggacaagtcgaagtcaataattcc

SEQ ID NO: 129634 - DNA, 30 bp, Artificial Sequence
  Synthetic oligonucleotide
gacataggttacaacaggcgacctaattcc

SEQ ID NO: 129635 - DNA, 30 bp, Artificial Sequence
  Synthetic oligonucleotide
accacagacccgacaaataccagtgattcc

SEQ ID NO: 129636 - DNA, 30 bp, Artificial Sequence
  Synthetic oligonucleotide
atggacgtcaggggacaaaaggggtattcc

SEQ ID NO: 129637 - DNA, 30 bp, Artificial Sequence
  Synthetic oligonucleotide
acatcgtaatgcattaacgaactgtattcc

SEQ ID NO: 129638 - DNA, 30 bp, Artificial Sequence
  Synthetic oligonucleotide
cgttaaatagggatgtataactcaacttcc

SEQ ID NO: 129639 - DNA, 30 bp, Artificial Sequence
  Synthetic oligonucleotide
ggggctcccgacgttccagtgaatacttcc

SEQ ID NO: 129640 - DNA, 30 bp, Artificial Sequence
  Synthetic oligonucleotide
ccgacacgctgtgagtactcgtctacttcc

SEQ ID NO: 129641 - DNA, 30 bp, Artificial Sequence
  Synthetic oligonucleotide
aaaaagttcagatacgacaagcgagcttcc

SEQ ID NO: 129642 - DNA, 30 bp, Artificial Sequence
  Synthetic oligonucleotide
tgcgattctggagcggaaaggagtgcttcc

SEQ ID NO: 129643 - DNA, 30 bp, Artificial Sequence
  Synthetic oligonucleotide
agcgtacacacgcaactgaatcagtcttcc

SEQ ID NO: 129644 - DNA, 30 bp, Artificial Sequence
  Synthetic oligonucleotide
tccttgaagttatgctctatccggtcttcc

SEQ ID NO: 129645 - DNA, 30 bp, Artificial Sequence
  Synthetic oligonucleotide
acgcgggatatgttgaaagtacccagttcc

SEQ ID NO: 129646 - DNA, 30 bp, Artificial Sequence
  Synthetic oligonucleotide
cgacggcctccacgttagcaccgacgttcc

SEQ ID NO: 129647 - DNA, 30 bp, Artificial Sequence
  Synthetic oligonucleotide
cgatcaaggccgatttggttgtagcgttcc

SEQ ID NO: 129648 - DNA, 30 bp, Artificial Sequence
  Synthetic oligonucleotide
aacggatgcaccatggggtcaacgcgttcc

SEQ ID NO: 129649 - DNA, 30 bp, Artificial Sequence
  Synthetic oligonucleotide
atcgattaggacttaaaatggcctcgttcc

SEQ ID NO: 129650 - DNA, 30 bp, Artificial Sequence
  Synthetic oligonucleotide
tgacgaagcaaaacgtaggcaaggggttcc

SEQ ID NO: 129651 - DNA, 30 bp, Artificial Sequence
  Synthetic oligonucleotide
caagaaatcagcccaggagagatgggttcc

SEQ ID NO: 129652 - DNA, 30 bp, Artificial Sequence
  Synthetic oligonucleotide
gtgtgtcgtatcaattccgggagatgttcc

SEQ ID NO: 129653 - DNA, 30 bp, Artificial Sequence
  Synthetic oligonucleotide
caaaaagagaaatgtctctcaatctgttcc

SEQ ID NO: 129654 - DNA, 30 bp, Artificial Sequence
  Synthetic oligonucleotide
ttgttgcgagagaaggaggctaagtgttcc

SEQ ID NO: 129655 - DNA, 30 bp, Artificial Sequence
  Synthetic oligonucleotide
aggattacgaggctggtgtgccaggtttcc

SEQ ID NO: 129656 - DNA, 30 bp, Artificial Sequence
  Synthetic oligonucleotide
gccgacgatagtagttaggttagtgtttcc

SEQ ID NO: 129657 - DNA, 30 bp, Artificial Sequence
  Synthetic oligonucleotide
tctgcttcttgcacaaagccgtcattttcc

SEQ ID NO: 129658 - DNA, 30 bp, Artificial Sequence
  Synthetic oligonucleotide
tacggggatgggagctattaagccttttcc

SEQ ID NO: 129659 - DNA, 30 bp, Artificial Sequence
  Synthetic oligonucleotide
aagtgagtcttattgccgggagagaaaagc

SEQ ID NO: 129660 - DNA, 30 bp, Artificial Sequence
  Synthetic oligonucleotide
cccataatcgggtagctagacccgaaaagc

SEQ ID NO: 129661 - DNA, 30 bp, Artificial Sequence
  Synthetic oligonucleotide
gaaacgtcgatgcaggtaaggccgaaaagc

SEQ ID NO: 129662 - DNA, 30 bp, Artificial Sequence
  Synthetic oligonucleotide
gtggaataaattaacacatgcggaacaagc

SEQ ID NO: 129663 - DNA, 30 bp, Artificial Sequence
  Synthetic oligonucleotide
gggaggcgttcatggtagccgagcacaagc

SEQ ID NO: 129664 - DNA, 30 bp, Artificial Sequence
  Synthetic oligonucleotide
tataagcatgtagtttacgatggtacaagc

SEQ ID NO: 129665 - DNA, 30 bp, Artificial Sequence
  Synthetic oligonucleotide
cttgaaggttacaattcgtgatacccaagc

SEQ ID NO: 129666 - DNA, 30 bp, Artificial Sequence
  Synthetic oligonucleotide
taaggcgtgatttgataaggatgagcaagc

SEQ ID NO: 129667 - DNA, 30 bp, Artificial Sequence
  Synthetic oligonucleotide
tacgtaatcttatggactgggccggcaagc

SEQ ID NO: 129668 - DNA, 30 bp, Artificial Sequence
  Synthetic oligonucleotide
gttcgcattactccaataatcaatgcaagc

SEQ ID NO: 129669 - DNA, 30 bp, Artificial Sequence
  Synthetic oligonucleotide
gggacgataggttccatgtcgccctcaagc

SEQ ID NO: 129670 - DNA, 30 bp, Artificial Sequence
  Synthetic oligonucleotide
acggctaaagcatataggctgtcaagaagc

SEQ ID NO: 129671 - DNA, 30 bp, Artificial Sequence
  Synthetic oligonucleotide
ttccggtgggcattagtggtcataagaagc

SEQ ID NO: 129672 - DNA, 30 bp, Artificial Sequence
  Synthetic oligonucleotide
aagggcaccgttaacttcccattaagaagc

SEQ ID NO: 129673 - DNA, 30 bp, Artificial Sequence
  Synthetic oligonucleotide
gccaggctccaaatagctcgcttcagaagc

SEQ ID NO: 129674 - DNA, 30 bp, Artificial Sequence
  Synthetic oligonucleotide
aggactcataatgatccatacgatagaagc

SEQ ID NO: 129675 - DNA, 30 bp, Artificial Sequence
  Synthetic oligonucleotide
actgaaaattcatgcaatcctcgtagaagc

SEQ ID NO: 129676 - DNA, 30 bp, Artificial Sequence
  Synthetic oligonucleotide
cacttaggctaggcccatatataccgaagc

SEQ ID NO: 129677 - DNA, 30 bp, Artificial Sequence
  Synthetic oligonucleotide
gtgggccggacctcctgtaacggccgaagc

SEQ ID NO: 129678 - DNA, 30 bp, Artificial Sequence
  Synthetic oligonucleotide
gggtttgaacccaacatgtggctcggaagc

SEQ ID NO: 129679 - DNA, 30 bp, Artificial Sequence
  Synthetic oligonucleotide
gttgctgagagtgagaaattccagggaagc

SEQ ID NO: 129680 - DNA, 30 bp, Artificial Sequence
  Synthetic oligonucleotide
gccttagccacgctaccaagggtgggaagc

SEQ ID NO: 129681 - DNA, 30 bp, Artificial Sequence
  Synthetic oligonucleotide
tggtcattgcgcaagttcacctatggaagc

SEQ ID NO: 129682 - DNA, 30 bp, Artificial Sequence
  Synthetic oligonucleotide
actccgacggcatctgaattcagtggaagc

SEQ ID NO: 129683 - DNA, 30 bp, Artificial Sequence
  Synthetic oligonucleotide
actaagactgcggacaataatcacctaagc

SEQ ID NO: 129684 - DNA, 30 bp, Artificial Sequence
  Synthetic oligonucleotide
tcgtctccatgcggtccgtgatagctaagc

SEQ ID NO: 129685 - DNA, 30 bp, Artificial Sequence
  Synthetic oligonucleotide
taaaatagtgacatggccgagctgctaagc

SEQ ID NO: 129686 - DNA, 30 bp, Artificial Sequence
  Synthetic oligonucleotide
agggaccaaatgaacccaccaggtctaagc

SEQ ID NO: 129687 - DNA, 30 bp, Artificial Sequence
  Synthetic oligonucleotide
tgatcagtgacttgttaggcgatagtaagc

SEQ ID NO: 129688 - DNA, 30 bp, Artificial Sequence
  Synthetic oligonucleotide
cacaatattaatctgtcgtataacgtaagc

SEQ ID NO: 129689 - DNA, 30 bp, Artificial Sequence
  Synthetic oligonucleotide
tagtgatgcgtttaagggtcaccattaagc

SEQ ID NO: 129690 - DNA, 30 bp, Artificial Sequence
  Synthetic oligonucleotide
tcgttggatactcggatgacgggattaagc

SEQ ID NO: 129691 - DNA, 30 bp, Artificial Sequence
  Synthetic oligonucleotide
gacataagagactggaaaaattgattaagc

SEQ ID NO: 129692 - DNA, 30 bp, Artificial Sequence
  Synthetic oligonucleotide
attagaacgatcccattacgtgtattaagc

SEQ ID NO: 129693 - DNA, 30 bp, Artificial Sequence
  Synthetic oligonucleotide
agcccgggttgcatgtcattaggcttaagc

SEQ ID NO: 129694 - DNA, 30 bp, Artificial Sequence
  Synthetic oligonucleotide
ccaggttgccctagctgggcgggcttaagc

SEQ ID NO: 129695 - DNA, 30 bp, Artificial Sequence
  Synthetic oligonucleotide
atgagggcgcgtatgtcgcaaagcaacagc

SEQ ID NO: 129696 - DNA, 30 bp, Artificial Sequence
  Synthetic oligonucleotide
atacaccctttatggtcaatttcacacagc

SEQ ID NO: 129697 - DNA, 30 bp, Artificial Sequence
  Synthetic oligonucleotide
ccgatccgcgttaagcacaaaacccacagc

SEQ ID NO: 129698 - DNA, 30 bp, Artificial Sequence
  Synthetic oligonucleotide
aaagcatgccatgtctaaaccaggcacagc

SEQ ID NO: 129699 - DNA, 30 bp, Artificial Sequence
  Synthetic oligonucleotide
atagccgagcacaaacttgtaatgcacagc

SEQ ID NO: 129700 - DNA, 30 bp, Artificial Sequence
  Synthetic oligonucleotide
gtacagccgggccccagacagtctcacagc

SEQ ID NO: 129701 - DNA, 30 bp, Artificial Sequence
  Synthetic oligonucleotide
gcgtgcatagaaaggggtgtggcctacagc

SEQ ID NO: 129702 - DNA, 30 bp, Artificial Sequence
  Synthetic oligonucleotide
cgctccaggacaggcgcagaagagtacagc

SEQ ID NO: 129703 - DNA, 30 bp, Artificial Sequence
  Synthetic oligonucleotide
tggccagtggggcaatggtcgacgtacagc

SEQ ID NO: 129704 - DNA, 30 bp, Artificial Sequence
  Synthetic oligonucleotide
ggaacaatctcaaagctgcctagttacagc

SEQ ID NO: 129705 - DNA, 30 bp, Artificial Sequence
  Synthetic oligonucleotide
tgacgtctgggattttgcgcgaaggccagc

SEQ ID NO: 129706 - DNA, 30 bp, Artificial Sequence
  Synthetic oligonucleotide
aaaggcgaataattggtagatttatccagc

SEQ ID NO: 129707 - DNA, 30 bp, Artificial Sequence
  Synthetic oligonucleotide
tactaattgggttattgcaaggactccagc

SEQ ID NO: 129708 - DNA, 30 bp, Artificial Sequence
  Synthetic oligonucleotide
catgtttagggccatagtggttcgtccagc

SEQ ID NO: 129709 - DNA, 30 bp, Artificial Sequence
  Synthetic oligonucleotide
gccagtgttccggagggcacttaaagcagc

SEQ ID NO: 129710 - DNA, 30 bp, Artificial Sequence
  Synthetic oligonucleotide
acgctacgacgcgcaagatataacagcagc

SEQ ID NO: 129711 - DNA, 30 bp, Artificial Sequence
  Synthetic oligonucleotide
acgcttgtgcgacccagctaacttagcagc

SEQ ID NO: 129712 - DNA, 30 bp, Artificial Sequence
  Synthetic oligonucleotide
taaagaatctaaccatccgatctacgcagc

SEQ ID NO: 129713 - DNA, 30 bp, Artificial Sequence
  Synthetic oligonucleotide
gaaacggagttatcaatggtagcccgcagc

SEQ ID NO: 129714 - DNA, 30 bp, Artificial Sequence
  Synthetic oligonucleotide
atgaacacattattttcaggaccaggcagc

SEQ ID NO: 129715 - DNA, 30 bp, Artificial Sequence
  Synthetic oligonucleotide
gcgtaaatgaatcattatcatttaggcagc

SEQ ID NO: 129716 - DNA, 30 bp, Artificial Sequence
  Synthetic oligonucleotide
tgagaagtaggggccatgtatgagggcagc

SEQ ID NO: 129717 - DNA, 30 bp, Artificial Sequence
  Synthetic oligonucleotide
gcgaagtttctatccatcatcccgtgcagc

SEQ ID NO: 129718 - DNA, 30 bp, Artificial Sequence
  Synthetic oligonucleotide
gccaatagttacgcgatccgtagtatcagc

SEQ ID NO: 129719 - DNA, 30 bp, Artificial Sequence
  Synthetic oligonucleotide
actcacatatcggggaccacgaatctcagc

SEQ ID NO: 129720 - DNA, 30 bp, Artificial Sequence
  Synthetic oligonucleotide
ctgtcacagtgcgatccgacgaaagtcagc

SEQ ID NO: 129721 - DNA, 31 bp, Artificial Sequence
  Synthetic oligonucleotide
tcttgctactggactaattccgaaagtcagc

SEQ ID NO: 129722 - DNA, 30 bp, Artificial Sequence
  Synthetic oligonucleotide
tctttgggtcaagcttaccgagtagtcagc

SEQ ID NO: 129723 - DNA, 30 bp, Artificial Sequence
  Synthetic oligonucleotide
agggcattcccccagtaatttcgggtcagc

SEQ ID NO: 129724 - DNA, 30 bp, Artificial Sequence
  Synthetic oligonucleotide
gacagaataaacctatggcaaggggtcagc

SEQ ID NO: 129725 - DNA, 30 bp, Artificial Sequence
  Synthetic oligonucleotide
agacctgtacctaaccttaaccagttcagc

SEQ ID NO: 129726 - DNA, 30 bp, Artificial Sequence
  Synthetic oligonucleotide
gtcgctacgtgcttcgtcgacctgttcagc

SEQ ID NO: 129727 - DNA, 30 bp, Artificial Sequence
  Synthetic oligonucleotide
tcgcgcgggatgtgcaaagtggaaaagagc

SEQ ID NO: 129728 - DNA, 30 bp, Artificial Sequence
  Synthetic oligonucleotide
atgatctcaccctccgtctgccccaagagc

SEQ ID NO: 129729 - DNA, 30 bp, Artificial Sequence
  Synthetic oligonucleotide
tcctactagaattactaagtaaagaagagc

SEQ ID NO: 129730 - DNA, 30 bp, Artificial Sequence
  Synthetic oligonucleotide
ggttgcaggctaggaacgaagacgaagagc

SEQ ID NO: 129731 - DNA, 30 bp, Artificial Sequence
  Synthetic oligonucleotide
ataaccggctacgcttatggaatacagagc

SEQ ID NO: 129732 - DNA, 29 bp, Artificial Sequence
  Synthetic oligonucleotide
gtcaatctacgcgtgtataggtacagagc

SEQ ID NO: 129733 - DNA, 30 bp, Artificial Sequence
  Synthetic oligonucleotide
accataataaacagtcggaccctccagagc

SEQ ID NO: 129734 - DNA, 30 bp, Artificial Sequence
  Synthetic oligonucleotide
gtgtgagtaacaccgaaactggatcagagc

SEQ ID NO: 129735 - DNA, 30 bp, Artificial Sequence
  Synthetic oligonucleotide
cgggggttggtactatcaggaacagagagc

SEQ ID NO: 129736 - DNA, 30 bp, Artificial Sequence
  Synthetic oligonucleotide
ggtgaagggccgaaacctagaatggagagc

SEQ ID NO: 129737 - DNA, 30 bp, Artificial Sequence
  Synthetic oligonucleotide
tgaaattggccctctatcgctacatagagc

SEQ ID NO: 129738 - DNA, 30 bp, Artificial Sequence
  Synthetic oligonucleotide
gcgccacagacagcgagtccaggatagagc

SEQ ID NO: 129739 - DNA, 30 bp, Artificial Sequence
  Synthetic oligonucleotide
tatctacaccggtagagtcctgactagagc

SEQ ID NO: 129740 - DNA, 30 bp, Artificial Sequence
  Synthetic oligonucleotide
cgccagaagcgggtgtaaataccgacgagc

SEQ ID NO: 129741 - DNA, 30 bp, Artificial Sequence
  Synthetic oligonucleotide
acgactggatgaccgttggcaactacgagc

SEQ ID NO: 129742 - DNA, 30 bp, Artificial Sequence
  Synthetic oligonucleotide
ccacaaatctggctggctctcaggccgagc

SEQ ID NO: 129743 - DNA, 30 bp, Artificial Sequence
  Synthetic oligonucleotide
ggtcaatacgtcggtgtagctgaagcgagc

SEQ ID NO: 129744 - DNA, 30 bp, Artificial Sequence
  Synthetic oligonucleotide
aggccaacctagagtagtccatgctcgagc

SEQ ID NO: 129745 - DNA, 30 bp, Artificial Sequence
  Synthetic oligonucleotide
attaccgaaaaatcttaacgcgtgtcgagc

SEQ ID NO: 129746 - DNA, 30 bp, Artificial Sequence
  Synthetic oligonucleotide
tcaagtacccgttaaggatcaggttcgagc

SEQ ID NO: 129747 - DNA, 30 bp, Artificial Sequence
  Synthetic oligonucleotide
acaattacagataattaatgaatttcgagc

SEQ ID NO: 129748 - DNA, 30 bp, Artificial Sequence
  Synthetic oligonucleotide
gtagagtcgggatgagcaagttaaaggagc

SEQ ID NO: 129749 - DNA, 30 bp, Artificial Sequence
  Synthetic oligonucleotide
aaaacgcgactatacagtgctatcgggagc

SEQ ID NO: 129750 - DNA, 30 bp, Artificial Sequence
  Synthetic oligonucleotide
ctagataggcaacccacactacgggggagc

SEQ ID NO: 129751 - DNA, 29 bp, Artificial Sequence
  Synthetic oligonucleotide
tagtgatacatcattattgagcatggagc

SEQ ID NO: 129752 - DNA, 30 bp, Artificial Sequence
  Synthetic oligonucleotide
cgagatctctcgtaaccacatggctggagc

SEQ ID NO: 129753 - DNA, 30 bp, Artificial Sequence
  Synthetic oligonucleotide
ttgacggcaattaaacgtacaaagtggagc

SEQ ID NO: 129754 - DNA, 30 bp, Artificial Sequence
  Synthetic oligonucleotide
atgagaaggaaccgggtgcgacattggagc

SEQ ID NO: 129755 - DNA, 30 bp, Artificial Sequence
  Synthetic oligonucleotide
ctgtcgacaacagagtttaaaagaatgagc

SEQ ID NO: 129756 - DNA, 29 bp, Artificial Sequence
  Synthetic oligonucleotide
gaatgtggaaataagcggattacatgagc

SEQ ID NO: 129757 - DNA, 30 bp, Artificial Sequence
  Synthetic oligonucleotide
ggagggagcatttaatgcacaatcatgagc

SEQ ID NO: 129758 - DNA, 30 bp, Artificial Sequence
  Synthetic oligonucleotide
tcactataaatgacatctgagttcatgagc

SEQ ID NO: 129759 - DNA, 30 bp, Artificial Sequence
  Synthetic oligonucleotide
tcgaataggggttcaactcacgggatgagc

SEQ ID NO: 129760 - DNA, 30 bp, Artificial Sequence
  Synthetic oligonucleotide
cacatgttttcaaagagtgaactgatgagc

SEQ ID NO: 129761 - DNA, 30 bp, Artificial Sequence
  Synthetic oligonucleotide
caacattagagggctaagaatcttatgagc

SEQ ID NO: 129762 - DNA, 30 bp, Artificial Sequence
  Synthetic oligonucleotide
agagagggtgaatggtccttcctactgagc

SEQ ID NO: 129763 - DNA, 30 bp, Artificial Sequence
  Synthetic oligonucleotide
cagcgaatcacacattggaattgtctgagc

SEQ ID NO: 129764 - DNA, 30 bp, Artificial Sequence
  Synthetic oligonucleotide
ctaagttggggatagtgtgtttgagtgagc

SEQ ID NO: 129765 - DNA, 30 bp, Artificial Sequence
  Synthetic oligonucleotide
ggtaaaaggagcatcttttgactcttgagc

SEQ ID NO: 129766 - DNA, 30 bp, Artificial Sequence
  Synthetic oligonucleotide
cagagagccgtgtcatatagttatttgagc

SEQ ID NO: 129767 - DNA, 30 bp, Artificial Sequence
  Synthetic oligonucleotide
aggctggtatgcttgtttaaccggaatagc

SEQ ID NO: 129768 - DNA, 30 bp, Artificial Sequence
  Synthetic oligonucleotide
gcgtacccgtcgagcactgaaaataatagc

SEQ ID NO: 129769 - DNA, 30 bp, Artificial Sequence
  Synthetic oligonucleotide
ttgaagccgtgtaagtggcgtcaccatagc

SEQ ID NO: 129770 - DNA, 30 bp, Artificial Sequence
  Synthetic oligonucleotide
gggaattcgactagcattaatatagatagc

SEQ ID NO: 129771 - DNA, 30 bp, Artificial Sequence
  Synthetic oligonucleotide
ttccatagtagacgtcgacaagtagatagc

SEQ ID NO: 129772 - DNA, 30 bp, Artificial Sequence
  Synthetic oligonucleotide
ggggggatggctagagaatgttatgatagc

SEQ ID NO: 129773 - DNA, 30 bp, Artificial Sequence
  Synthetic oligonucleotide
gggggggcaatagagcgggtgcattatagc

SEQ ID NO: 129774 - DNA, 30 bp, Artificial Sequence
  Synthetic oligonucleotide
ggctacgggagcccttccgcgcaaactagc

SEQ ID NO: 129775 - DNA, 30 bp, Artificial Sequence
  Synthetic oligonucleotide
agcttaccatgcgcaacttactgaactagc

SEQ ID NO: 129776 - DNA, 30 bp, Artificial Sequence
  Synthetic oligonucleotide
ggactaataacgtcggcagggcccactagc

SEQ ID NO: 129777 - DNA, 30 bp, Artificial Sequence
  Synthetic oligonucleotide
gctcccgtctaatgtaagaccagtactagc

SEQ ID NO: 129778 - DNA, 30 bp, Artificial Sequence
  Synthetic oligonucleotide
tgattacaatatagtcctagtttacctagc

SEQ ID NO: 129779 - DNA, 30 bp, Artificial Sequence
  Synthetic oligonucleotide
ggtggaagacaataataataatgccctagc

SEQ ID NO: 129780 - DNA, 30 bp, Artificial Sequence
  Synthetic oligonucleotide
gtgctttcgagggggagaggcgagcctagc

SEQ ID NO: 129781 - DNA, 30 bp, Artificial Sequence
  Synthetic oligonucleotide
ggtccggcaatgtagctgaccaggcctagc

SEQ ID NO: 129782 - DNA, 30 bp, Artificial Sequence
  Synthetic oligonucleotide
ctaaccactggagacagtcaaacagctagc

SEQ ID NO: 129783 - DNA, 30 bp, Artificial Sequence
  Synthetic oligonucleotide
tgacccgagtaaggagcaacacgagctagc

SEQ ID NO: 129784 - DNA, 30 bp, Artificial Sequence
  Synthetic oligonucleotide
gggaaaaccgttgtatgtggcttagctagc

SEQ ID NO: 129785 - DNA, 30 bp, Artificial Sequence
  Synthetic oligonucleotide
gaggtaaaatacgtttgatcatacgctagc

SEQ ID NO: 129786 - DNA, 30 bp, Artificial Sequence
  Synthetic oligonucleotide
cagaacggtgggggcaggcacatcgctagc

SEQ ID NO: 129787 - DNA, 30 bp, Artificial Sequence
  Synthetic oligonucleotide
tgaccgtaagcttctcacccattcgctagc

SEQ ID NO: 129788 - DNA, 30 bp, Artificial Sequence
  Synthetic oligonucleotide
aagttggacagacggtcgatccgtgctagc

SEQ ID NO: 129789 - DNA, 30 bp, Artificial Sequence
  Synthetic oligonucleotide
ctcttcaaagaagcgatctatcttgctagc

SEQ ID NO: 129790 - DNA, 30 bp, Artificial Sequence
  Synthetic oligonucleotide
catttgaccctccaacttgagccgtctagc

SEQ ID NO: 129791 - DNA, 30 bp, Artificial Sequence
  Synthetic oligonucleotide
gcgtataccaagatcatcaattcgtctagc

SEQ ID NO: 129792 - DNA, 30 bp, Artificial Sequence
  Synthetic oligonucleotide
agaaaagcgaggggtctagtgacaagtagc

SEQ ID NO: 129793 - DNA, 30 bp, Artificial Sequence
  Synthetic oligonucleotide
gtggatccagccagtgggcgattaagtagc

SEQ ID NO: 129794 - DNA, 30 bp, Artificial Sequence
  Synthetic oligonucleotide
acttacgtaaggaatttagacccgagtagc

SEQ ID NO: 129795 - DNA, 30 bp, Artificial Sequence
  Synthetic oligonucleotide
ctcaagcttttcgattagctacatagtagc

SEQ ID NO: 129796 - DNA, 30 bp, Artificial Sequence
  Synthetic oligonucleotide
cgaaaacgagctgatttatctcgtcgtagc

SEQ ID NO: 129797 - DNA, 30 bp, Artificial Sequence
  Synthetic oligonucleotide
ttggttagaacgactcggcttcccggtagc

SEQ ID NO: 129798 - DNA, 30 bp, Artificial Sequence
  Synthetic oligonucleotide
ctatcgcgcatccggacaatcatcggtagc

SEQ ID NO: 129799 - DNA, 30 bp, Artificial Sequence
  Synthetic oligonucleotide
cgacgaagggcgtcagctgccttgtgtagc

SEQ ID NO: 129800 - DNA, 31 bp, Artificial Sequence
  Synthetic oligonucleotide
taaaattccggcagcgaaccgtgtcattagc

SEQ ID NO: 129801 - DNA, 30 bp, Artificial Sequence
  Synthetic oligonucleotide
ggacccgtgagcgtacaacatagccttagc

SEQ ID NO: 129802 - DNA, 29 bp, Artificial Sequence
  Synthetic oligonucleotide
taagtcgtgaggccaccccccagcttagc

SEQ ID NO: 129803 - DNA, 30 bp, Artificial Sequence
  Synthetic oligonucleotide
cgaaaccaggtcaaggttattcctcttagc

SEQ ID NO: 129804 - DNA, 30 bp, Artificial Sequence
  Synthetic oligonucleotide
tggacatcgcgttacaggcggggagttagc

SEQ ID NO: 129805 - DNA, 30 bp, Artificial Sequence
  Synthetic oligonucleotide
aacaattggggggggactagcacctttagc

SEQ ID NO: 129806 - DNA, 30 bp, Artificial Sequence
  Synthetic oligonucleotide
cacggtaccgttcaatacgaacgctttagc

SEQ ID NO: 129807 - DNA, 30 bp, Artificial Sequence
  Synthetic oligonucleotide
aacagaacttccgtcatcgctccgaaacgc

SEQ ID NO: 129808 - DNA, 30 bp, Artificial Sequence
  Synthetic oligonucleotide
aagctgacgaacaacaggcgaacccaacgc

SEQ ID NO: 129809 - DNA, 30 bp, Artificial Sequence
  Synthetic oligonucleotide
cgttcaacagatcttagagttctgcaacgc

SEQ ID NO: 129810 - DNA, 30 bp, Artificial Sequence
  Synthetic oligonucleotide
acatgggactattaatggtcgctcgaacgc

SEQ ID NO: 129811 - DNA, 30 bp, Artificial Sequence
  Synthetic oligonucleotide
gcggattactgcggaatactggcggaacgc

SEQ ID NO: 129812 - DNA, 30 bp, Artificial Sequence
  Synthetic oligonucleotide
aaccgttggaaacggttggagaatgaacgc

SEQ ID NO: 129813 - DNA, 30 bp, Artificial Sequence
  Synthetic oligonucleotide
ctgaaacaacaggtagcgcagttctaacgc

SEQ ID NO: 129814 - DNA, 30 bp, Artificial Sequence
  Synthetic oligonucleotide
agatagtgatcgaggccatgaagaccacgc

SEQ ID NO: 129815 - DNA, 30 bp, Artificial Sequence
  Synthetic oligonucleotide
agaggaacatattgtgaccgggcagcacgc

SEQ ID NO: 129816 - DNA, 30 bp, Artificial Sequence
  Synthetic oligonucleotide
taacggtccttgcgagtagaacaatcacgc

SEQ ID NO: 129817 - DNA, 30 bp, Artificial Sequence
  Synthetic oligonucleotide
atgtgagggacacacttagcgcgctcacgc

SEQ ID NO: 129818 - DNA, 30 bp, Artificial Sequence
  Synthetic oligonucleotide
ttgctctggtaatagatccggatctcacgc

SEQ ID NO: 129819 - DNA, 30 bp, Artificial Sequence
  Synthetic oligonucleotide
tcggaggaaaaaatggacgacaagcgacgc

SEQ ID NO: 129820 - DNA, 30 bp, Artificial Sequence
  Synthetic oligonucleotide
gcatactatgatcgccgggaccgcatacgc

SEQ ID NO: 129821 - DNA, 30 bp, Artificial Sequence
  Synthetic oligonucleotide
gattctaggaaaggataaggggggatacgc

SEQ ID NO: 129822 - DNA, 30 bp, Artificial Sequence
  Synthetic oligonucleotide
taaccccattatcatcaaatggggatacgc

SEQ ID NO: 129823 - DNA, 30 bp, Artificial Sequence
  Synthetic oligonucleotide
ctcaaggatatcgaccacccgagtatacgc

SEQ ID NO: 129824 - DNA, 30 bp, Artificial Sequence
  Synthetic oligonucleotide
aaaagggggtagacgttgcgatgcctacgc

SEQ ID NO: 129825 - DNA, 30 bp, Artificial Sequence
  Synthetic oligonucleotide
cgttgacgactcgatgcgattggcgtacgc

SEQ ID NO: 129826 - DNA, 30 bp, Artificial Sequence
  Synthetic oligonucleotide
cgtacggaatctgtgcgtggccgggtacgc

SEQ ID NO: 129827 - DNA, 30 bp, Artificial Sequence
  Synthetic oligonucleotide
taaggccggtccccgcacaccacgttacgc

SEQ ID NO: 129828 - DNA, 30 bp, Artificial Sequence
  Synthetic oligonucleotide
ccgtatcgtttagcgtgtgatcggttacgc

SEQ ID NO: 129829 - DNA, 30 bp, Artificial Sequence
  Synthetic oligonucleotide
agtaatggaggacatgcgatcatcaaccgc

SEQ ID NO: 129830 - DNA, 30 bp, Artificial Sequence
  Synthetic oligonucleotide
tggccggctcaatgcacctttgtacaccgc

SEQ ID NO: 129831 - DNA, 30 bp, Artificial Sequence
  Synthetic oligonucleotide
ggcgccccaggttttgccatcgaccaccgc

SEQ ID NO: 129832 - DNA, 30 bp, Artificial Sequence
  Synthetic oligonucleotide
gaaatcgtgaacaatagcaggtctcaccgc

SEQ ID NO: 129833 - DNA, 30 bp, Artificial Sequence
  Synthetic oligonucleotide
ctcatctaaagtattcggatcgttcaccgc

SEQ ID NO: 129834 - DNA, 30 bp, Artificial Sequence
  Synthetic oligonucleotide
acaggtaaccgattgctaggataagaccgc

SEQ ID NO: 129835 - DNA, 30 bp, Artificial Sequence
  Synthetic oligonucleotide
agcgactctaggagtgctgatcatgaccgc

SEQ ID NO: 129836 - DNA, 30 bp, Artificial Sequence
  Synthetic oligonucleotide
gtcaacaaggtgccggcctgaacctaccgc

SEQ ID NO: 129837 - DNA, 30 bp, Artificial Sequence
  Synthetic oligonucleotide
gtacacactatgttataaaaggcctaccgc

SEQ ID NO: 129838 - DNA, 30 bp, Artificial Sequence
  Synthetic oligonucleotide
actggggggacagacgcaaactgttaccgc

SEQ ID NO: 129839 - DNA, 30 bp, Artificial Sequence
  Synthetic oligonucleotide
ttaggcggatactaaagacgtctttaccgc

SEQ ID NO: 129840 - DNA, 30 bp, Artificial Sequence
  Synthetic oligonucleotide
cacggcgtcccacgcaagggggtgccccgc

SEQ ID NO: 129841 - DNA, 30 bp, Artificial Sequence
  Synthetic oligonucleotide
gcccgaattgaatggtagttaaatccccgc

SEQ ID NO: 129842 - DNA, 30 bp, Artificial Sequence
  Synthetic oligonucleotide
caagtccttaagcctgaaaaatctgcccgc

SEQ ID NO: 129843 - DNA, 30 bp, Artificial Sequence
  Synthetic oligonucleotide
agtgcactgaggaatcgttctttttcccgc

SEQ ID NO: 129844 - DNA, 30 bp, Artificial Sequence
  Synthetic oligonucleotide
ttctgggggtaggactttcaaaaaagccgc

SEQ ID NO: 129845 - DNA, 30 bp, Artificial Sequence
  Synthetic oligonucleotide
ggcgcactgggttgctccaccaaaagccgc

SEQ ID NO: 129846 - DNA, 30 bp, Artificial Sequence
  Synthetic oligonucleotide
ggacgccaccgaacacacacctggagccgc

SEQ ID NO: 129847 - DNA, 30 bp, Artificial Sequence
  Synthetic oligonucleotide
ctgcatgattccggaatacggccgggccgc

SEQ ID NO: 129848 - DNA, 30 bp, Artificial Sequence
  Synthetic oligonucleotide
cactcataatggtaaaactagatgtgccgc

SEQ ID NO: 129849 - DNA, 30 bp, Artificial Sequence
  Synthetic oligonucleotide
ggcaccaaccggggggcaacactttgccgc

SEQ ID NO: 129850 - DNA, 30 bp, Artificial Sequence
  Synthetic oligonucleotide
tgaagtaataatcgtaaccgggtttgccgc

SEQ ID NO: 129851 - DNA, 30 bp, Artificial Sequence
  Synthetic oligonucleotide
acgaacattaaagtcacggcaaggatccgc

SEQ ID NO: 129852 - DNA, 30 bp, Artificial Sequence
  Synthetic oligonucleotide
agacagttttaagtgtttgttgtcctccgc

SEQ ID NO: 129853 - DNA, 30 bp, Artificial Sequence
  Synthetic oligonucleotide
gaagcccttggaattatcgcgacattccgc

SEQ ID NO: 129854 - DNA, 30 bp, Artificial Sequence
  Synthetic oligonucleotide
taaaaaaggttggggtgaaggaagttccgc

SEQ ID NO: 129855 - DNA, 30 bp, Artificial Sequence
  Synthetic oligonucleotide
gcagacaggttagcccgttgaagaaagcgc

SEQ ID NO: 129856 - DNA, 30 bp, Artificial Sequence
  Synthetic oligonucleotide
gaccttggaaaggcagcaaacattcagcgc

SEQ ID NO: 129857 - DNA, 30 bp, Artificial Sequence
  Synthetic oligonucleotide
tgagctaattggagcaactagacagagcgc

SEQ ID NO: 129858 - DNA, 30 bp, Artificial Sequence
  Synthetic oligonucleotide
tgggggtaaccaaatggtaacgacgagcgc

SEQ ID NO: 129859 - DNA, 30 bp, Artificial Sequence
  Synthetic oligonucleotide
tattatgttgcggggatagtggagtagcgc

SEQ ID NO: 129860 - DNA, 30 bp, Artificial Sequence
  Synthetic oligonucleotide
acggctaaacgtcaaagttcctgaacgcgc

SEQ ID NO: 129861 - DNA, 30 bp, Artificial Sequence
  Synthetic oligonucleotide
ccaaaaccggagtccaaaaatccaccgcgc

SEQ ID NO: 129862 - DNA, 30 bp, Artificial Sequence
  Synthetic oligonucleotide
tcagtcgggtctcgctaaccggtgtcgcgc

SEQ ID NO: 129863 - DNA, 30 bp, Artificial Sequence
  Synthetic oligonucleotide
gcatgcaaaagacgtgttcagaaaaggcgc

SEQ ID NO: 129864 - DNA, 30 bp, Artificial Sequence
  Synthetic oligonucleotide
caaattagacggctaacaagcgaaaggcgc

SEQ ID NO: 129865 - DNA, 30 bp, Artificial Sequence
  Synthetic oligonucleotide
caccacggctattacgaatcaagtaggcgc

SEQ ID NO: 129866 - DNA, 30 bp, Artificial Sequence
  Synthetic oligonucleotide
ccaaataagtctactgtgaaagagcggcgc

SEQ ID NO: 129867 - DNA, 30 bp, Artificial Sequence
  Synthetic oligonucleotide
tcttacgcaggcgtggaagtcacagggcgc

SEQ ID NO: 129868 - DNA, 30 bp, Artificial Sequence
  Synthetic oligonucleotide
taaagtcacccagttggagagccagggcgc

SEQ ID NO: 129869 - DNA, 30 bp, Artificial Sequence
  Synthetic oligonucleotide
gtaaggttgacctgtaaaaccaatgggcgc

SEQ ID NO: 129870 - DNA, 30 bp, Artificial Sequence
  Synthetic oligonucleotide
cataacggtgaacatgacacagcgatgcgc

SEQ ID NO: 129871 - DNA, 30 bp, Artificial Sequence
  Synthetic oligonucleotide
tgttcgttggtatcaaacctcacagtgcgc

SEQ ID NO: 129872 - DNA, 30 bp, Artificial Sequence
  Synthetic oligonucleotide
aggcaattagcgcaatactagcgcgtgcgc

SEQ ID NO: 129873 - DNA, 30 bp, Artificial Sequence
  Synthetic oligonucleotide
acgattcagatagtaactatagcgttgcgc

SEQ ID NO: 129874 - DNA, 30 bp, Artificial Sequence
  Synthetic oligonucleotide
aggggggatcgccaataaacctctttgcgc

SEQ ID NO: 129875 - DNA, 30 bp, Artificial Sequence
  Synthetic oligonucleotide
tacatgataacattttcttagagtttgcgc

SEQ ID NO: 129876 - DNA, 30 bp, Artificial Sequence
  Synthetic oligonucleotide
ggctaaaattggcgacgatgtgttttgcgc

SEQ ID NO: 129877 - DNA, 30 bp, Artificial Sequence
  Synthetic oligonucleotide
tcggaattaactcagcatactcccaatcgc

SEQ ID NO: 129878 - DNA, 30 bp, Artificial Sequence
  Synthetic oligonucleotide
gggtgcgttgaacggaagctaggcaatcgc

SEQ ID NO: 129879 - DNA, 30 bp, Artificial Sequence
  Synthetic oligonucleotide
acaattgtattagcccgagccattaatcgc

SEQ ID NO: 129880 - DNA, 30 bp, Artificial Sequence
  Synthetic oligonucleotide
gccagagcatgcggtcgctatgcacatcgc

SEQ ID NO: 129881 - DNA, 29 bp, Artificial Sequence
  Synthetic oligonucleotide
acttaatgtacatatacaatcaccatcgc

SEQ ID NO: 129882 - DNA, 30 bp, Artificial Sequence
  Synthetic oligonucleotide
tcgcacggcccaagagaggttatccatcgc

SEQ ID NO: 129883 - DNA, 30 bp, Artificial Sequence
  Synthetic oligonucleotide
gtcgtcatggtatgcccccgaaggcatcgc

SEQ ID NO: 129884 - DNA, 30 bp, Artificial Sequence
  Synthetic oligonucleotide
cataagtgagttactggggcgaccgatcgc

SEQ ID NO: 129885 - DNA, 30 bp, Artificial Sequence
  Synthetic oligonucleotide
gtgagacacgtttcatgaaaaaaatatcgc

SEQ ID NO: 129886 - DNA, 30 bp, Artificial Sequence
  Synthetic oligonucleotide
gggccgcaatgataagccgcacactatcgc

SEQ ID NO: 129887 - DNA, 30 bp, Artificial Sequence
  Synthetic oligonucleotide
gaaagggcctacagcgtccgagcaactcgc

SEQ ID NO: 129888 - DNA, 30 bp, Artificial Sequence
  Synthetic oligonucleotide
atggacttcaacttttacttgatcactcgc

SEQ ID NO: 129889 - DNA, 30 bp, Artificial Sequence
  Synthetic oligonucleotide
gactacgaatccgtgcgatacgcgtctcgc

SEQ ID NO: 129890 - DNA, 30 bp, Artificial Sequence
  Synthetic oligonucleotide
agcacggagattttttcgaactgaagtcgc

SEQ ID NO: 129891 - DNA, 30 bp, Artificial Sequence
  Synthetic oligonucleotide
taagagttagtagaacaccaaaggagtcgc

SEQ ID NO: 129892 - DNA, 30 bp, Artificial Sequence
  Synthetic oligonucleotide
tatgtgggaaccccactcaacttacgtcgc

SEQ ID NO: 129893 - DNA, 30 bp, Artificial Sequence
  Synthetic oligonucleotide
tgtgcacgtggtcaaagcatcggccgtcgc

SEQ ID NO: 129894 - DNA, 30 bp, Artificial Sequence
  Synthetic oligonucleotide
gatatcactaagtgcgctgtgtaaggtcgc

SEQ ID NO: 129895 - DNA, 30 bp, Artificial Sequence
  Synthetic oligonucleotide
gagatacacacatgtccatgcataggtcgc

SEQ ID NO: 129896 - DNA, 30 bp, Artificial Sequence
  Synthetic oligonucleotide
acgcagggccaaaacgagagtctaggtcgc

SEQ ID NO: 129897 - DNA, 30 bp, Artificial Sequence
  Synthetic oligonucleotide
ctgccgcatatgtcatggcctcagggtcgc

SEQ ID NO: 129898 - DNA, 30 bp, Artificial Sequence
  Synthetic oligonucleotide
tagctagaggcacgagtcttgtatggtcgc

SEQ ID NO: 129899 - DNA, 30 bp, Artificial Sequence
  Synthetic oligonucleotide
ggccaccagatatagaaaacaacctgtcgc

SEQ ID NO: 129900 - DNA, 30 bp, Artificial Sequence
  Synthetic oligonucleotide
ctgtgtctcgcaaccctccgctagtgtcgc

SEQ ID NO: 129901 - DNA, 30 bp, Artificial Sequence
  Synthetic oligonucleotide
ctcgctggttggctgagggcagtgtgtcgc

SEQ ID NO: 129902 - DNA, 30 bp, Artificial Sequence
  Synthetic oligonucleotide
gttcgcgcggactggatcctcttgtgtcgc

SEQ ID NO: 129903 - DNA, 30 bp, Artificial Sequence
  Synthetic oligonucleotide
acgccacaacttgttctttgtactattcgc

SEQ ID NO: 129904 - DNA, 30 bp, Artificial Sequence
  Synthetic oligonucleotide
gtgcgccgcggaggtcttaattccgttcgc

SEQ ID NO: 129905 - DNA, 30 bp, Artificial Sequence
  Synthetic oligonucleotide
gccctagggcaatatgcgcgacaggttcgc

SEQ ID NO: 129906 - DNA, 30 bp, Artificial Sequence
  Synthetic oligonucleotide
gatacccagctgggcagtaggagatttcgc

SEQ ID NO: 129907 - DNA, 30 bp, Artificial Sequence
  Synthetic oligonucleotide
tcgcccagatcaagaagttagctctttcgc

SEQ ID NO: 129908 - DNA, 30 bp, Artificial Sequence
  Synthetic oligonucleotide
accgcctgtcacatcggctcaaattttcgc

SEQ ID NO: 129909 - DNA, 30 bp, Artificial Sequence
  Synthetic oligonucleotide
tgtgttatcgaaagaaacgggtcaaaaggc

SEQ ID NO: 129910 - DNA, 30 bp, Artificial Sequence
  Synthetic oligonucleotide
gacacgagaatagggcgtctaatccaaggc

SEQ ID NO: 129911 - DNA, 30 bp, Artificial Sequence
  Synthetic oligonucleotide
taggccaacaaaattatgtttgggcaaggc

SEQ ID NO: 129912 - DNA, 30 bp, Artificial Sequence
  Synthetic oligonucleotide
gggaggctgctccagttggaaggtcaaggc

SEQ ID NO: 129913 - DNA, 30 bp, Artificial Sequence
  Synthetic oligonucleotide
atggcgaaggtgtcagaattgtgagaaggc

SEQ ID NO: 129914 - DNA, 30 bp, Artificial Sequence
  Synthetic oligonucleotide
tcatcgggggtggtttttgtgtgttaaggc

SEQ ID NO: 129915 - DNA, 30 bp, Artificial Sequence
  Synthetic oligonucleotide
tggactcataagaatcgtatcataacaggc

SEQ ID NO: 129916 - DNA, 30 bp, Artificial Sequence
  Synthetic oligonucleotide
agtaacacggggggagaccgggagacaggc

SEQ ID NO: 129917 - DNA, 31 bp, Artificial Sequence
  Synthetic oligonucleotide
agatccagcgctcatcgacttaaggacaggc

SEQ ID NO: 129918 - DNA, 30 bp, Artificial Sequence
  Synthetic oligonucleotide
cgaaagtgtctgagctcatggcccccaggc

SEQ ID NO: 129919 - DNA, 30 bp, Artificial Sequence
  Synthetic oligonucleotide
acttaactgttttagcatgtgagtccaggc

SEQ ID NO: 129920 - DNA, 30 bp, Artificial Sequence
  Synthetic oligonucleotide
actcggaaaccggctggattacgagcaggc

SEQ ID NO: 129921 - DNA, 30 bp, Artificial Sequence
  Synthetic oligonucleotide
caaacttagacattctgctcaactgcaggc

SEQ ID NO: 129922 - DNA, 30 bp, Artificial Sequence
  Synthetic oligonucleotide
tacacttagtgaggtatcgatactgcaggc

SEQ ID NO: 129923 - DNA, 30 bp, Artificial Sequence
  Synthetic oligonucleotide
gctggtgcgggcgcgccactcagtgcaggc

SEQ ID NO: 129924 - DNA, 30 bp, Artificial Sequence
  Synthetic oligonucleotide
agacttggtcgagtatgtcttcgtgcaggc

SEQ ID NO: 129925 - DNA, 30 bp, Artificial Sequence
  Synthetic oligonucleotide
gttggtcgttactgttcagagcgatcaggc

SEQ ID NO: 129926 - DNA, 30 bp, Artificial Sequence
  Synthetic oligonucleotide
gataacccgagacacacttattactcaggc

SEQ ID NO: 129927 - DNA, 30 bp, Artificial Sequence
  Synthetic oligonucleotide
gcatttggctagatgtgacgattaagaggc

SEQ ID NO: 129928 - DNA, 30 bp, Artificial Sequence
  Synthetic oligonucleotide
cagcaaggtacattagtcattacgagaggc

SEQ ID NO: 129929 - DNA, 30 bp, Artificial Sequence
  Synthetic oligonucleotide
ccgctgccggggggaggaccgacaggaggc

SEQ ID NO: 129930 - DNA, 30 bp, Artificial Sequence
  Synthetic oligonucleotide
ctctgcgaagctagagccgggccaggaggc

SEQ ID NO: 129931 - DNA, 30 bp, Artificial Sequence
  Synthetic oligonucleotide
ttggatttgtcaggcgacgagaggggaggc

SEQ ID NO: 129932 - DNA, 30 bp, Artificial Sequence
  Synthetic oligonucleotide
agcgcatgttacttggtacggattggaggc

SEQ ID NO: 129933 - DNA, 30 bp, Artificial Sequence
  Synthetic oligonucleotide
ccggggagtgatagttgattgtagtgaggc

SEQ ID NO: 129934 - DNA, 30 bp, Artificial Sequence
  Synthetic oligonucleotide
gcggacaagatcgtgggtattcattgaggc

SEQ ID NO: 129935 - DNA, 30 bp, Artificial Sequence
  Synthetic oligonucleotide
acgggatatacttcagtgtgctgttgaggc

SEQ ID NO: 129936 - DNA, 30 bp, Artificial Sequence
  Synthetic oligonucleotide
gtgcatgccctactcatttcggtgctaggc

SEQ ID NO: 129937 - DNA, 30 bp, Artificial Sequence
  Synthetic oligonucleotide
cagggttgtacaggacttagagtcttaggc

SEQ ID NO: 129938 - DNA, 30 bp, Artificial Sequence
  Synthetic oligonucleotide
ttgcggcgtccaatatgagccgatttaggc

SEQ ID NO: 129939 - DNA, 30 bp, Artificial Sequence
  Synthetic oligonucleotide
ggcggaaaacaactaaactacaaaaacggc

SEQ ID NO: 129940 - DNA, 30 bp, Artificial Sequence
  Synthetic oligonucleotide
aggtaatatcattgaaaattcggaaacggc

SEQ ID NO: 129941 - DNA, 30 bp, Artificial Sequence
  Synthetic oligonucleotide
acccgaggtcgagatgaataacgcaacggc

SEQ ID NO: 129942 - DNA, 30 bp, Artificial Sequence
  Synthetic oligonucleotide
caggcaaaatagccgtgcattaagaacggc

SEQ ID NO: 129943 - DNA, 30 bp, Artificial Sequence
  Synthetic oligonucleotide
acgccttaacggtatatacttagtaacggc

SEQ ID NO: 129944 - DNA, 30 bp, Artificial Sequence
  Synthetic oligonucleotide
agttctagtgaggacctggcacagcacggc

SEQ ID NO: 129945 - DNA, 30 bp, Artificial Sequence
  Synthetic oligonucleotide
ttgtaaggcgagaatgtcgctggcgacggc

SEQ ID NO: 129946 - DNA, 30 bp, Artificial Sequence
  Synthetic oligonucleotide
actagtaacaagccttaaggacgggacggc

SEQ ID NO: 129947 - DNA, 30 bp, Artificial Sequence
  Synthetic oligonucleotide
gcgccaaataaaactcccgtttgtgacggc

SEQ ID NO: 129948 - DNA, 30 bp, Artificial Sequence
  Synthetic oligonucleotide
cgcacagggatttaccataaccaatacggc

SEQ ID NO: 129949 - DNA, 30 bp, Artificial Sequence
  Synthetic oligonucleotide
agatgactagaggctacgcgctcatacggc

SEQ ID NO: 129950 - DNA, 30 bp, Artificial Sequence
  Synthetic oligonucleotide
acgtatgcgtgctaagtgcagcagtacggc

SEQ ID NO: 129951 - DNA, 30 bp, Artificial Sequence
  Synthetic oligonucleotide
gataaaccattaatcagcgaactgaccggc

SEQ ID NO: 129952 - DNA, 30 bp, Artificial Sequence
  Synthetic oligonucleotide
aggcgctagaggggatcggcttctcccggc

SEQ ID NO: 129953 - DNA, 30 bp, Artificial Sequence
  Synthetic oligonucleotide
gagactagagtgaggacgtatctagccggc

SEQ ID NO: 129954 - DNA, 30 bp, Artificial Sequence
  Synthetic oligonucleotide
tgaccaatactaaagggtcttattgccggc

SEQ ID NO: 129955 - DNA, 30 bp, Artificial Sequence
  Synthetic oligonucleotide
cttagcgtcagtttctaaatgcgatccggc

SEQ ID NO: 129956 - DNA, 30 bp, Artificial Sequence
  Synthetic oligonucleotide
atggtggcagttcactagcaaccgtccggc

SEQ ID NO: 129957 - DNA, 30 bp, Artificial Sequence
  Synthetic oligonucleotide
caaaacaatcttgcaacagttcagagcggc

SEQ ID NO: 129958 - DNA, 30 bp, Artificial Sequence
  Synthetic oligonucleotide
acgtggtaggccctggttcaatggagcggc

SEQ ID NO: 129959 - DNA, 30 bp, Artificial Sequence
  Synthetic oligonucleotide
aaagttgaaatagtcgtggtagctagcggc

SEQ ID NO: 129960 - DNA, 30 bp, Artificial Sequence
  Synthetic oligonucleotide
ggaaatcaggggggataagcaagccgcggc

SEQ ID NO: 129961 - DNA, 30 bp, Artificial Sequence
  Synthetic oligonucleotide
acaacactctaaacctattgactgcgcggc

SEQ ID NO: 129962 - DNA, 30 bp, Artificial Sequence
  Synthetic oligonucleotide
gagctctcaagtcgtcaagatcatcgcggc

SEQ ID NO: 129963 - DNA, 30 bp, Artificial Sequence
  Synthetic oligonucleotide
attgtctgctatgtctagtcggtaggcggc

SEQ ID NO: 129964 - DNA, 30 bp, Artificial Sequence
  Synthetic oligonucleotide
taccgaataaaaagtgtgactagcggcggc

SEQ ID NO: 129965 - DNA, 30 bp, Artificial Sequence
  Synthetic oligonucleotide
taacctttctctggagggcacaattgcggc

SEQ ID NO: 129966 - DNA, 30 bp, Artificial Sequence
  Synthetic oligonucleotide
aaggtctccatcgacttacgtttaatcggc

SEQ ID NO: 129967 - DNA, 30 bp, Artificial Sequence
  Synthetic oligonucleotide
gtataaattctccaaccgtaggacatcggc

SEQ ID NO: 129968 - DNA, 30 bp, Artificial Sequence
  Synthetic oligonucleotide
tgggtgtaccgttaaagaccgcccatcggc

SEQ ID NO: 129969 - DNA, 31 bp, Artificial Sequence
  Synthetic oligonucleotide
cggtcgagccaagcagatacgcgagatcggc

SEQ ID NO: 129970 - DNA, 30 bp, Artificial Sequence
  Synthetic oligonucleotide
ccattaagatcacaccgtactgagatcggc

SEQ ID NO: 129971 - DNA, 30 bp, Artificial Sequence
  Synthetic oligonucleotide
gtctcagtcacggcacaatagccgatcggc

SEQ ID NO: 129972 - DNA, 30 bp, Artificial Sequence
  Synthetic oligonucleotide
cagatattagacagtgaggtgctgatcggc

SEQ ID NO: 129973 - DNA, 30 bp, Artificial Sequence
  Synthetic oligonucleotide
agcatgcactacggagaactagatatcggc

SEQ ID NO: 129974 - DNA, 30 bp, Artificial Sequence
  Synthetic oligonucleotide
gatcagatccatatgtccaaaggtgtcggc

SEQ ID NO: 129975 - DNA, 30 bp, Artificial Sequence
  Synthetic oligonucleotide
atcatatcgggacaagtcatttcaaagggc

SEQ ID NO: 129976 - DNA, 30 bp, Artificial Sequence
  Synthetic oligonucleotide
tgtggtacaatatttaccgtatgaaagggc

SEQ ID NO: 129977 - DNA, 30 bp, Artificial Sequence
  Synthetic oligonucleotide
aattgagtcacgatatgaaccatcaagggc

SEQ ID NO: 129978 - DNA, 30 bp, Artificial Sequence
  Synthetic oligonucleotide
tcagagtcgtagtaaggctaaacgaagggc

SEQ ID NO: 129979 - DNA, 30 bp, Artificial Sequence
  Synthetic oligonucleotide
cgtgtgttatagcaagacctatcgaagggc

SEQ ID NO: 129980 - DNA, 30 bp, Artificial Sequence
  Synthetic oligonucleotide
tgacaggaaaagtataccgaattacagggc

SEQ ID NO: 129981 - DNA, 30 bp, Artificial Sequence
  Synthetic oligonucleotide
ggtgataaggacatactatcataccagggc

SEQ ID NO: 129982 - DNA, 30 bp, Artificial Sequence
  Synthetic oligonucleotide
gtcttgggaaaagactaggccttccagggc

SEQ ID NO: 129983 - DNA, 30 bp, Artificial Sequence
  Synthetic oligonucleotide
ttgggtcgaaaagaaccatacactcagggc

SEQ ID NO: 129984 - DNA, 30 bp, Artificial Sequence
  Synthetic oligonucleotide
acatttgggcgagaggtaactttctagggc

SEQ ID NO: 129985 - DNA, 30 bp, Artificial Sequence
  Synthetic oligonucleotide
tataacacaccaacggccacatacacgggc

SEQ ID NO: 129986 - DNA, 30 bp, Artificial Sequence
  Synthetic oligonucleotide
aaacgtggaactaaagatcgtgttacgggc

SEQ ID NO: 129987 - DNA, 30 bp, Artificial Sequence
  Synthetic oligonucleotide
ataacagcacaactctggcgcggcccgggc

SEQ ID NO: 129988 - DNA, 30 bp, Artificial Sequence
  Synthetic oligonucleotide
aaggtccgccgtttaccaaggcacgcgggc

SEQ ID NO: 129989 - DNA, 30 bp, Artificial Sequence
  Synthetic oligonucleotide
gtgatgtctaaggccggaccgaccgcgggc

SEQ ID NO: 129990 - DNA, 30 bp, Artificial Sequence
  Synthetic oligonucleotide
gtccaagcagtcttacgataccttgcgggc

SEQ ID NO: 129991 - DNA, 30 bp, Artificial Sequence
  Synthetic oligonucleotide
tacataactatgccaagaaccgaatcgggc

SEQ ID NO: 129992 - DNA, 30 bp, Artificial Sequence
  Synthetic oligonucleotide
aaggagatcgacggttacagacattcgggc

SEQ ID NO: 129993 - DNA, 30 bp, Artificial Sequence
  Synthetic oligonucleotide
tagggtctaattgtattacaagattcgggc

SEQ ID NO: 129994 - DNA, 30 bp, Artificial Sequence
  Synthetic oligonucleotide
ttcgtaaaggggcataaaactcaaaggggc

SEQ ID NO: 129995 - DNA, 30 bp, Artificial Sequence
  Synthetic oligonucleotide
gcgacggcccacgatctcgtgataaggggc

SEQ ID NO: 129996 - DNA, 30 bp, Artificial Sequence
  Synthetic oligonucleotide
agtgtgcgtgaggatcgatgtggcaggggc

SEQ ID NO: 129997 - DNA, 30 bp, Artificial Sequence
  Synthetic oligonucleotide
ggagtagtacgtatgggcacggctaggggc

SEQ ID NO: 129998 - DNA, 30 bp, Artificial Sequence
  Synthetic oligonucleotide
atcccaccgtcaggatgactgaaagggggc

SEQ ID NO: 129999 - DNA, 30 bp, Artificial Sequence
  Synthetic oligonucleotide
cacaatgtagtggtgaggcgatgggggggc

SEQ ID NO: 130000 - DNA, 30 bp, Artificial Sequence
  Synthetic oligonucleotide
gggaatccgagggcgggtaagcatgggggc

SEQ ID NO: 130001 - DNA, 30 bp, Artificial Sequence
  Synthetic oligonucleotide
ggaagatacggcagagaattgcgtgggggc

SEQ ID NO: 130002 - DNA, 30 bp, Artificial Sequence
  Synthetic oligonucleotide
attcgggggctagcatgcgataaatggggc

SEQ ID NO: 130003 - DNA, 30 bp, Artificial Sequence
  Synthetic oligonucleotide
tggtccgacaaagccgttagcgcatggggc

SEQ ID NO: 130004 - DNA, 30 bp, Artificial Sequence
  Synthetic oligonucleotide
gacaacattgctgcataattaagctggggc

SEQ ID NO: 130005 - DNA, 30 bp, Artificial Sequence
  Synthetic oligonucleotide
ggcttacacccgctggatgttatgtggggc

SEQ ID NO: 130006 - DNA, 30 bp, Artificial Sequence
  Synthetic oligonucleotide
ggccataagtgagccgaccccgcgctgggc

SEQ ID NO: 130007 - DNA, 30 bp, Artificial Sequence
  Synthetic oligonucleotide
taggggggcgagagaaccgggttgctgggc

SEQ ID NO: 130008 - DNA, 30 bp, Artificial Sequence
  Synthetic oligonucleotide
ctgaccggaaacccttagcgctaagtgggc

SEQ ID NO: 130009 - DNA, 30 bp, Artificial Sequence
  Synthetic oligonucleotide
ctgttagtgattatgcgtcgggccgtgggc

SEQ ID NO: 130010 - DNA, 30 bp, Artificial Sequence
  Synthetic oligonucleotide
gcttggcttcccaagggtacgagtttgggc

SEQ ID NO: 130011 - DNA, 30 bp, Artificial Sequence
  Synthetic oligonucleotide
ggaaagcggacctttttctggaccaatggc

SEQ ID NO: 130012 - DNA, 30 bp, Artificial Sequence
  Synthetic oligonucleotide
agaccggagggaacttagctatccaatggc

SEQ ID NO: 130013 - DNA, 30 bp, Artificial Sequence
  Synthetic oligonucleotide
gatgcaggagagactaggcgtactaatggc

SEQ ID NO: 130014 - DNA, 30 bp, Artificial Sequence
  Synthetic oligonucleotide
cgcgctcaaggtgacaatgcattacatggc

SEQ ID NO: 130015 - DNA, 30 bp, Artificial Sequence
  Synthetic oligonucleotide
gtgcaatatcggacatggtctaaccatggc

SEQ ID NO: 130016 - DNA, 25 bp, Artificial Sequence
  Synthetic oligonucleotide
ttgggatcactgggtccagcatggc

SEQ ID NO: 130017 - DNA, 30 bp, Artificial Sequence
  Synthetic oligonucleotide
aatgataacaaatttacaatacacgatggc

SEQ ID NO: 130018 - DNA, 30 bp, Artificial Sequence
  Synthetic oligonucleotide
acgctatgaaagcggctttcggaatatggc

SEQ ID NO: 130019 - DNA, 30 bp, Artificial Sequence
  Synthetic oligonucleotide
actgtgcatggaattgtcggttaaactggc

SEQ ID NO: 130020 - DNA, 30 bp, Artificial Sequence
  Synthetic oligonucleotide
gtatggaggatcgccgaagttacaactggc

SEQ ID NO: 130021 - DNA, 30 bp, Artificial Sequence
  Synthetic oligonucleotide
tcctcattgctccctaacggttcaactggc

SEQ ID NO: 130022 - DNA, 30 bp, Artificial Sequence
  Synthetic oligonucleotide
tacttaatcagtagtggtggtgggactggc

SEQ ID NO: 130023 - DNA, 30 bp, Artificial Sequence
  Synthetic oligonucleotide
caccttggttgcagtgagcaagccgctggc

SEQ ID NO: 130024 - DNA, 30 bp, Artificial Sequence
  Synthetic oligonucleotide
acacgtcattaccgggcaaagaatgctggc

SEQ ID NO: 130025 - DNA, 30 bp, Artificial Sequence
  Synthetic oligonucleotide
ccaaaggtcagattgtaagcccgtgctggc

SEQ ID NO: 130026 - DNA, 31 bp, Artificial Sequence
  Synthetic oligonucleotide
ggaacggggttcgcccgagctgtagtctggc

SEQ ID NO: 130027 - DNA, 30 bp, Artificial Sequence
  Synthetic oligonucleotide
ttccagagaagttatgatcttcaaagtggc

SEQ ID NO: 130028 - DNA, 30 bp, Artificial Sequence
  Synthetic oligonucleotide
cacgcctgcttggggacacagacgagtggc

SEQ ID NO: 130029 - DNA, 30 bp, Artificial Sequence
  Synthetic oligonucleotide
tactaacttgggtctgagctattgcgtggc

SEQ ID NO: 130030 - DNA, 30 bp, Artificial Sequence
  Synthetic oligonucleotide
cactcgcgagtattgggatcgatcggtggc

SEQ ID NO: 130031 - DNA, 30 bp, Artificial Sequence
  Synthetic oligonucleotide
tgggcaattgggattggtcaatagggtggc

SEQ ID NO: 130032 - DNA, 30 bp, Artificial Sequence
  Synthetic oligonucleotide
gcaacatgccgtgaaccgacatactgtggc

SEQ ID NO: 130033 - DNA, 30 bp, Artificial Sequence
  Synthetic oligonucleotide
agccgtagagacgtttcgcgaccttgtggc

SEQ ID NO: 130034 - DNA, 30 bp, Artificial Sequence
  Synthetic oligonucleotide
gcggaccagactagtggattaggtattggc

SEQ ID NO: 130035 - DNA, 30 bp, Artificial Sequence
  Synthetic oligonucleotide
cgtagtatgttccctttttggtgacttggc

SEQ ID NO: 130036 - DNA, 30 bp, Artificial Sequence
  Synthetic oligonucleotide
tcaggaaacggaatttcttggactcttggc

SEQ ID NO: 130037 - DNA, 30 bp, Artificial Sequence
  Synthetic oligonucleotide
agggttaatcatcccagaaggggtcttggc

SEQ ID NO: 130038 - DNA, 30 bp, Artificial Sequence
  Synthetic oligonucleotide
gagaggcaacctcttagtgctggcgttggc

SEQ ID NO: 130039 - DNA, 30 bp, Artificial Sequence
  Synthetic oligonucleotide
agatcgatatctaaatcctcaaatgttggc

SEQ ID NO: 130040 - DNA, 30 bp, Artificial Sequence
  Synthetic oligonucleotide
gcaaactgggtaaggcaaagtaaatttggc

SEQ ID NO: 130041 - DNA, 30 bp, Artificial Sequence
  Synthetic oligonucleotide
cttgggatcaggaggggggctgaatttggc

SEQ ID NO: 130042 - DNA, 30 bp, Artificial Sequence
  Synthetic oligonucleotide
actcagggcgcgtacgttgtctaatttggc

SEQ ID NO: 130043 - DNA, 30 bp, Artificial Sequence
  Synthetic oligonucleotide
ggctctaaggcatcaccgccgtgctttggc

SEQ ID NO: 130044 - DNA, 30 bp, Artificial Sequence
  Synthetic oligonucleotide
acaaggcaggcgtagcagtagctgaaatgc

SEQ ID NO: 130045 - DNA, 30 bp, Artificial Sequence
  Synthetic oligonucleotide
acacaaatcacagcaacctctcctaaatgc

SEQ ID NO: 130046 - DNA, 30 bp, Artificial Sequence
  Synthetic oligonucleotide
atacacgtcgttctacatgtctggcaatgc

SEQ ID NO: 130047 - DNA, 30 bp, Artificial Sequence
  Synthetic oligonucleotide
catggatacatttacccccgccgagaatgc

SEQ ID NO: 130048 - DNA, 30 bp, Artificial Sequence
  Synthetic oligonucleotide
gcacagcgaacgtcaacgggcgtcgaatgc

SEQ ID NO: 130049 - DNA, 30 bp, Artificial Sequence
  Synthetic oligonucleotide
ttccggacatgcagtgatatctgggaatgc

SEQ ID NO: 130050 - DNA, 30 bp, Artificial Sequence
  Synthetic oligonucleotide
agttcgaggaatggtcccttccttgaatgc

SEQ ID NO: 130051 - DNA, 30 bp, Artificial Sequence
  Synthetic oligonucleotide
tgtaggaggccgtcccctacctcataatgc

SEQ ID NO: 130052 - DNA, 30 bp, Artificial Sequence
  Synthetic oligonucleotide
tgatagttaataggtagtcaaagataatgc

SEQ ID NO: 130053 - DNA, 30 bp, Artificial Sequence
  Synthetic oligonucleotide
aggcccgtcttgcaaactgtaagaacatgc

SEQ ID NO: 130054 - DNA, 30 bp, Artificial Sequence
  Synthetic oligonucleotide
gaggcgttgatagagatagggataacatgc

SEQ ID NO: 130055 - DNA, 30 bp, Artificial Sequence
  Synthetic oligonucleotide
ccggctaagggaatcacaaagttcacatgc

SEQ ID NO: 130056 - DNA, 30 bp, Artificial Sequence
  Synthetic oligonucleotide
gggtgatagtataggattatttggacatgc

SEQ ID NO: 130057 - DNA, 30 bp, Artificial Sequence
  Synthetic oligonucleotide
tcggcctaaacaccatgccctataccatgc

SEQ ID NO: 130058 - DNA, 30 bp, Artificial Sequence
  Synthetic oligonucleotide
aacacccgccaggagacccttaaggcatgc

SEQ ID NO: 130059 - DNA, 30 bp, Artificial Sequence
  Synthetic oligonucleotide
cggtgctgatatgttgtgtcaaatgcatgc

SEQ ID NO: 130060 - DNA, 30 bp, Artificial Sequence
  Synthetic oligonucleotide
aaactgcgagaaagtggtgaactatcatgc

SEQ ID NO: 130061 - DNA, 30 bp, Artificial Sequence
  Synthetic oligonucleotide
cgggccaatgtaatgagatgttcgtcatgc

SEQ ID NO: 130062 - DNA, 30 bp, Artificial Sequence
  Synthetic oligonucleotide
cgccgtggtccttaccatggaacaagatgc

SEQ ID NO: 130063 - DNA, 30 bp, Artificial Sequence
  Synthetic oligonucleotide
tgcaacggactcgttcgctccagcagatgc

SEQ ID NO: 130064 - DNA, 30 bp, Artificial Sequence
  Synthetic oligonucleotide
tgcatgaaggttgctggaagcaagcgatgc

SEQ ID NO: 130065 - DNA, 30 bp, Artificial Sequence
  Synthetic oligonucleotide
gggcagagtctaatcaccatacagcgatgc

SEQ ID NO: 130066 - DNA, 30 bp, Artificial Sequence
  Synthetic oligonucleotide
aaggatggggagatgcattcaaatcgatgc

SEQ ID NO: 130067 - DNA, 30 bp, Artificial Sequence
  Synthetic oligonucleotide
ccaagggaggggtaagtaaggcttcgatgc

SEQ ID NO: 130068 - DNA, 30 bp, Artificial Sequence
  Synthetic oligonucleotide
gcatacgttaaaacaggtgggtaaggatgc

SEQ ID NO: 130069 - DNA, 30 bp, Artificial Sequence
  Synthetic oligonucleotide
tcgtggagaacaaggcggtgcccaggatgc

SEQ ID NO: 130070 - DNA, 30 bp, Artificial Sequence
  Synthetic oligonucleotide
ccatagtgctaatgattcatttagggatgc

SEQ ID NO: 130071 - DNA, 30 bp, Artificial Sequence
  Synthetic oligonucleotide
gttgaaaagtgagtgcagaaacgttgatgc

SEQ ID NO: 130072 - DNA, 30 bp, Artificial Sequence
  Synthetic oligonucleotide
gataagtgtaatggatgggtcgaaatatgc

SEQ ID NO: 130073 - DNA, 30 bp, Artificial Sequence
  Synthetic oligonucleotide
gcgatcgtaatcaaggggggatggatatgc

SEQ ID NO: 130074 - DNA, 30 bp, Artificial Sequence
  Synthetic oligonucleotide
taaggcaatgctgctaacccatccctatgc

SEQ ID NO: 130075 - DNA, 30 bp, Artificial Sequence
  Synthetic oligonucleotide
catggtaaagtaaccccggacggagtatgc

SEQ ID NO: 130076 - DNA, 30 bp, Artificial Sequence
  Synthetic oligonucleotide
aactatagtcaccaaggatggttagtatgc

SEQ ID NO: 130077 - DNA, 30 bp, Artificial Sequence
  Synthetic oligonucleotide
cgtttcgtaaccacactatctgcattatgc

SEQ ID NO: 130078 - DNA, 30 bp, Artificial Sequence
  Synthetic oligonucleotide
atcaaaaatgtgggagtgtggcgcttatgc

SEQ ID NO: 130079 - DNA, 30 bp, Artificial Sequence
  Synthetic oligonucleotide
gacggcataccgaaatgtatcggcttatgc

SEQ ID NO: 130080 - DNA, 30 bp, Artificial Sequence
  Synthetic oligonucleotide
gagaactaatttgtcccttctgctttatgc

SEQ ID NO: 130081 - DNA, 30 bp, Artificial Sequence
  Synthetic oligonucleotide
gtatgacaagtagtggcactcgccaactgc

SEQ ID NO: 130082 - DNA, 30 bp, Artificial Sequence
  Synthetic oligonucleotide
cgggacgggatctgacagcgctctaactgc

SEQ ID NO: 130083 - DNA, 30 bp, Artificial Sequence
  Synthetic oligonucleotide
gtcttcgtaccgctataagtagatcactgc

SEQ ID NO: 130084 - DNA, 30 bp, Artificial Sequence
  Synthetic oligonucleotide
ctcacaaattgcatcaagatggctgactgc

SEQ ID NO: 130085 - DNA, 30 bp, Artificial Sequence
  Synthetic oligonucleotide
atcgatgccccgtcactcaatgcatactgc

SEQ ID NO: 130086 - DNA, 30 bp, Artificial Sequence
  Synthetic oligonucleotide
ggacgaaggtctatacactcacattactgc

SEQ ID NO: 130087 - DNA, 30 bp, Artificial Sequence
  Synthetic oligonucleotide
atagactaaggtccgtcaagagacacctgc

SEQ ID NO: 130088 - DNA, 30 bp, Artificial Sequence
  Synthetic oligonucleotide
tcaccacacagtgagtgaaagaccacctgc

SEQ ID NO: 130089 - DNA, 30 bp, Artificial Sequence
  Synthetic oligonucleotide
gggaacacatctgttctaagtaccacctgc

SEQ ID NO: 130090 - DNA, 30 bp, Artificial Sequence
  Synthetic oligonucleotide
tgggtcttaaaggtatacagcgccacctgc

SEQ ID NO: 130091 - DNA, 31 bp, Artificial Sequence
  Synthetic oligonucleotide
cccgtactaggagggactacggtacccctgc

SEQ ID NO: 130092 - DNA, 30 bp, Artificial Sequence
  Synthetic oligonucleotide
ggcgtaggatacggcaaagagtagtcctgc

SEQ ID NO: 130093 - DNA, 30 bp, Artificial Sequence
  Synthetic oligonucleotide
tgcaaggaagctcagcaacaccggtcctgc

SEQ ID NO: 130094 - DNA, 30 bp, Artificial Sequence
  Synthetic oligonucleotide
aagactaattacggcataaaagttagctgc

SEQ ID NO: 130095 - DNA, 30 bp, Artificial Sequence
  Synthetic oligonucleotide
actaatttaacatagtcagatttacgctgc

SEQ ID NO: 130096 - DNA, 30 bp, Artificial Sequence
  Synthetic oligonucleotide
gataccgggaacattaaattagacatctgc

SEQ ID NO: 130097 - DNA, 29 bp, Artificial Sequence
  Synthetic oligonucleotide
tgcgcatgagaggcgataggcctatctgc

SEQ ID NO: 130098 - DNA, 30 bp, Artificial Sequence
  Synthetic oligonucleotide
ctgagctggtgtggtagtcaaatactctgc

SEQ ID NO: 130099 - DNA, 30 bp, Artificial Sequence
  Synthetic oligonucleotide
tggactgtaatcgttacaaacacagtctgc

SEQ ID NO: 130100 - DNA, 30 bp, Artificial Sequence
  Synthetic oligonucleotide
aggctgtatcttgtgacagcacgggtctgc

SEQ ID NO: 130101 - DNA, 30 bp, Artificial Sequence
  Synthetic oligonucleotide
tcgttccaatgagtagtgacgactgtctgc

SEQ ID NO: 130102 - DNA, 30 bp, Artificial Sequence
  Synthetic oligonucleotide
agcaattcacgtgatcagaagtatttctgc

SEQ ID NO: 130103 - DNA, 29 bp, Artificial Sequence
  Synthetic oligonucleotide
catcacaggccggtagcctacttttctgc

SEQ ID NO: 130104 - DNA, 30 bp, Artificial Sequence
  Synthetic oligonucleotide
gcctaaaacgtcatggtctagactaagtgc

SEQ ID NO: 130105 - DNA, 30 bp, Artificial Sequence
  Synthetic oligonucleotide
tggtctatgcttcgaggcgtcatagagtgc

SEQ ID NO: 130106 - DNA, 30 bp, Artificial Sequence
  Synthetic oligonucleotide
cctagggggtcctcgcaatcgcggtagtgc

SEQ ID NO: 130107 - DNA, 30 bp, Artificial Sequence
  Synthetic oligonucleotide
aaactaggtgcccgtaattgtctaacgtgc

SEQ ID NO: 130108 - DNA, 30 bp, Artificial Sequence
  Synthetic oligonucleotide
ccgcactaggattcaggccatggagcgtgc

SEQ ID NO: 130109 - DNA, 30 bp, Artificial Sequence
  Synthetic oligonucleotide
acaacatcatacttcttcatttaggcgtgc

SEQ ID NO: 130110 - DNA, 30 bp, Artificial Sequence
  Synthetic oligonucleotide
tcctagttccgagaagaagtttcggcgtgc

SEQ ID NO: 130111 - DNA, 30 bp, Artificial Sequence
  Synthetic oligonucleotide
atattcgtccgtaagaggaatgcatcgtgc

SEQ ID NO: 130112 - DNA, 30 bp, Artificial Sequence
  Synthetic oligonucleotide
aggttacatggaagctcgaccctgtcgtgc

SEQ ID NO: 130113 - DNA, 30 bp, Artificial Sequence
  Synthetic oligonucleotide
gagagtgcgtacgtagaattattgtcgtgc

SEQ ID NO: 130114 - DNA, 30 bp, Artificial Sequence
  Synthetic oligonucleotide
ttgcaagatcagggaacgccggattcgtgc

SEQ ID NO: 130115 - DNA, 30 bp, Artificial Sequence
  Synthetic oligonucleotide
cgtctttaggcattgagtcgtttttcgtgc

SEQ ID NO: 130116 - DNA, 30 bp, Artificial Sequence
  Synthetic oligonucleotide
acggacgcgtgcatcaggctgagtaggtgc

SEQ ID NO: 130117 - DNA, 30 bp, Artificial Sequence
  Synthetic oligonucleotide
gcgaaggaagtaggggacgcgttccggtgc

SEQ ID NO: 130118 - DNA, 30 bp, Artificial Sequence
  Synthetic oligonucleotide
cgcgagcccgcaaagaggcccgtagggtgc

SEQ ID NO: 130119 - DNA, 30 bp, Artificial Sequence
  Synthetic oligonucleotide
ccagtcatgggttgtcgacaattcgggtgc

SEQ ID NO: 130120 - DNA, 30 bp, Artificial Sequence
  Synthetic oligonucleotide
gctgaagtcgagcttaatggattcgggtgc

SEQ ID NO: 130121 - DNA, 30 bp, Artificial Sequence
  Synthetic oligonucleotide
gctgagggtgccgggaagtagaatgggtgc

SEQ ID NO: 130122 - DNA, 30 bp, Artificial Sequence
  Synthetic oligonucleotide
aaggcactatgtctccgaagaattgggtgc

SEQ ID NO: 130123 - DNA, 30 bp, Artificial Sequence
  Synthetic oligonucleotide
gcttacacttagaccacataatttgggtgc

SEQ ID NO: 130124 - DNA, 30 bp, Artificial Sequence
  Synthetic oligonucleotide
atcgtatctatcaatgacccctaatggtgc

SEQ ID NO: 130125 - DNA, 30 bp, Artificial Sequence
  Synthetic oligonucleotide
tatacagtcacatttagcccaatatggtgc

SEQ ID NO: 130126 - DNA, 30 bp, Artificial Sequence
  Synthetic oligonucleotide
aacatgtcgaaggctatttcagggtggtgc

SEQ ID NO: 130127 - DNA, 30 bp, Artificial Sequence
  Synthetic oligonucleotide
cactatcaataccaggagctagtttggtgc

SEQ ID NO: 130128 - DNA, 30 bp, Artificial Sequence
  Synthetic oligonucleotide
gggtcggagatagcccgttcggccatgtgc

SEQ ID NO: 130129 - DNA, 30 bp, Artificial Sequence
  Synthetic oligonucleotide
actcacccttatggcgtaaagtccatgtgc

SEQ ID NO: 130130 - DNA, 30 bp, Artificial Sequence
  Synthetic oligonucleotide
aacgtatggttttccaggtcacctatgtgc

SEQ ID NO: 130131 - DNA, 30 bp, Artificial Sequence
  Synthetic oligonucleotide
caaaagaactatgatgtcttagaactgtgc

SEQ ID NO: 130132 - DNA, 30 bp, Artificial Sequence
  Synthetic oligonucleotide
ccctgtgtttctcatgcccttctactgtgc

SEQ ID NO: 130133 - DNA, 30 bp, Artificial Sequence
  Synthetic oligonucleotide
aggcccacaatactcagacgaggggtgtgc

SEQ ID NO: 130134 - DNA, 30 bp, Artificial Sequence
  Synthetic oligonucleotide
ggacaggttaggcagagaaccatggtgtgc

SEQ ID NO: 130135 - DNA, 30 bp, Artificial Sequence
  Synthetic oligonucleotide
agcagatggacccaagttacggatgtgtgc

SEQ ID NO: 130136 - DNA, 30 bp, Artificial Sequence
  Synthetic oligonucleotide
ctcactatcaaccgtgggtagaaattgtgc

SEQ ID NO: 130137 - DNA, 30 bp, Artificial Sequence
  Synthetic oligonucleotide
cgggtgagtccctcggtaagcgatttgtgc

SEQ ID NO: 130138 - DNA, 30 bp, Artificial Sequence
  Synthetic oligonucleotide
tgataatgggcggtataagggctaaattgc

SEQ ID NO: 130139 - DNA, 31 bp, Artificial Sequence
  Synthetic oligonucleotide
cacaaacgaaaaatatcaagccttaaattgc

SEQ ID NO: 130140 - DNA, 30 bp, Artificial Sequence
  Synthetic oligonucleotide
aacgtggaccctatttggaggaccaattgc

SEQ ID NO: 130141 - DNA, 30 bp, Artificial Sequence
  Synthetic oligonucleotide
taccacacatctcaaactacatctcattgc

SEQ ID NO: 130142 - DNA, 30 bp, Artificial Sequence
  Synthetic oligonucleotide
cacaaacacgagtacccctctagagattgc

SEQ ID NO: 130143 - DNA, 30 bp, Artificial Sequence
  Synthetic oligonucleotide
caagcacctttagtgatacgataggattgc

SEQ ID NO: 130144 - DNA, 30 bp, Artificial Sequence
  Synthetic oligonucleotide
ctcacggcatcttccagaggagatgattgc

SEQ ID NO: 130145 - DNA, 30 bp, Artificial Sequence
  Synthetic oligonucleotide
cgaaaaggacgatcactttatcttacttgc

SEQ ID NO: 130146 - DNA, 30 bp, Artificial Sequence
  Synthetic oligonucleotide
aaccggtcatggggagtaaataaaccttgc

SEQ ID NO: 130147 - DNA, 30 bp, Artificial Sequence
  Synthetic oligonucleotide
gatgccgaactgggccgaaaggcaccttgc

SEQ ID NO: 130148 - DNA, 30 bp, Artificial Sequence
  Synthetic oligonucleotide
acgtagtgtcgccgagcaaagctaccttgc

SEQ ID NO: 130149 - DNA, 30 bp, Artificial Sequence
  Synthetic oligonucleotide
gcaagggttaggacgcatccggtagcttgc

SEQ ID NO: 130150 - DNA, 30 bp, Artificial Sequence
  Synthetic oligonucleotide
gctaaaactagggaaagtgtaggcgcttgc

SEQ ID NO: 130151 - DNA, 30 bp, Artificial Sequence
  Synthetic oligonucleotide
tatcggacatagcaataatcatttgcttgc

SEQ ID NO: 130152 - DNA, 30 bp, Artificial Sequence
  Synthetic oligonucleotide
agcgaacgtgcattcgtttttgtctcttgc

SEQ ID NO: 130153 - DNA, 30 bp, Artificial Sequence
  Synthetic oligonucleotide
cttgtagcaagtgacaaccttcaaagttgc

SEQ ID NO: 130154 - DNA, 30 bp, Artificial Sequence
  Synthetic oligonucleotide
gtctaaggggactagagggggtgcagttgc

SEQ ID NO: 130155 - DNA, 30 bp, Artificial Sequence
  Synthetic oligonucleotide
tgtgcgggggggtgtaggagctcgcgttgc

SEQ ID NO: 130156 - DNA, 30 bp, Artificial Sequence
  Synthetic oligonucleotide
gaataagcactgcggactggtattcgttgc

SEQ ID NO: 130157 - DNA, 30 bp, Artificial Sequence
  Synthetic oligonucleotide
ttgtgcattgaaaaaccatcatgctgttgc

SEQ ID NO: 130158 - DNA, 30 bp, Artificial Sequence
  Synthetic oligonucleotide
ggtaacgagagagcgcactcggcttgttgc

SEQ ID NO: 130159 - DNA, 30 bp, Artificial Sequence
  Synthetic oligonucleotide
acccgaggctacggacccaagtaactttgc

SEQ ID NO: 130160 - DNA, 30 bp, Artificial Sequence
  Synthetic oligonucleotide
ccggaaccgatctggtccggaaagctttgc

SEQ ID NO: 130161 - DNA, 30 bp, Artificial Sequence
  Synthetic oligonucleotide
catacccaatgcgggtgtcaacatctttgc

SEQ ID NO: 130162 - DNA, 30 bp, Artificial Sequence
  Synthetic oligonucleotide
tgacggcgcggatttgacgaacgattttgc

SEQ ID NO: 130163 - DNA, 30 bp, Artificial Sequence
  Synthetic oligonucleotide
ctgccgagtggggagttataggatttttgc

SEQ ID NO: 130164 - DNA, 30 bp, Artificial Sequence
  Synthetic oligonucleotide
gggtaagcagtcagctcatcccgaaaaatc

SEQ ID NO: 130165 - DNA, 30 bp, Artificial Sequence
  Synthetic oligonucleotide
acgacttctatacacacgttagtcaaaatc

SEQ ID NO: 130166 - DNA, 30 bp, Artificial Sequence
  Synthetic oligonucleotide
aggcacggccgacgtggccgagagcaaatc

SEQ ID NO: 130167 - DNA, 30 bp, Artificial Sequence
  Synthetic oligonucleotide
gctaattccaagcgatatagagcagaaatc

SEQ ID NO: 130168 - DNA, 30 bp, Artificial Sequence
  Synthetic oligonucleotide
gcgatacacatgatgaagcatatcgaaatc

SEQ ID NO: 130169 - DNA, 30 bp, Artificial Sequence
  Synthetic oligonucleotide
accttggggtgccggacatcatgggaaatc

SEQ ID NO: 130170 - DNA, 30 bp, Artificial Sequence
  Synthetic oligonucleotide
acgccattaacgaggattaggatggaaatc

SEQ ID NO: 130171 - DNA, 30 bp, Artificial Sequence
  Synthetic oligonucleotide
tacaaatgcgtgccgtgcaagcaataaatc

SEQ ID NO: 130172 - DNA, 30 bp, Artificial Sequence
  Synthetic oligonucleotide
agactccacaccgcgtgacgagaataaatc

SEQ ID NO: 130173 - DNA, 30 bp, Artificial Sequence
  Synthetic oligonucleotide
tcctagtctgcttgggggccagcctaaatc

SEQ ID NO: 130174 - DNA, 30 bp, Artificial Sequence
  Synthetic oligonucleotide
agcctgacaaagtgctccttctaaacaatc

SEQ ID NO: 130175 - DNA, 30 bp, Artificial Sequence
  Synthetic oligonucleotide
cctgaaccatctggcggacaacacacaatc

SEQ ID NO: 130176 - DNA, 30 bp, Artificial Sequence
  Synthetic oligonucleotide
ggggatttggggaaggaccagtcagcaatc

SEQ ID NO: 130177 - DNA, 30 bp, Artificial Sequence
  Synthetic oligonucleotide
ttctcaaccattcgggcggatagagcaatc

SEQ ID NO: 130178 - DNA, 30 bp, Artificial Sequence
  Synthetic oligonucleotide
cttaccaagtcacacttctgttccgcaatc

SEQ ID NO: 130179 - DNA, 30 bp, Artificial Sequence
  Synthetic oligonucleotide
tgttgtgatggtccaagtggtttaagaatc

SEQ ID NO: 130180 - DNA, 30 bp, Artificial Sequence
  Synthetic oligonucleotide
gaaaaagcgggaggtttgtaaagtagaatc

SEQ ID NO: 130181 - DNA, 30 bp, Artificial Sequence
  Synthetic oligonucleotide
taaggtataggaattgaggtagttagaatc

SEQ ID NO: 130182 - DNA, 30 bp, Artificial Sequence
  Synthetic oligonucleotide
caaattacgagtaccgaccatttacgaatc

SEQ ID NO: 130183 - DNA, 30 bp, Artificial Sequence
  Synthetic oligonucleotide
cttggaaaggactcggaacccgttcgaatc

SEQ ID NO: 130184 - DNA, 30 bp, Artificial Sequence
  Synthetic oligonucleotide
ggcactcactgtaccatggctaacggaatc

SEQ ID NO: 130185 - DNA, 30 bp, Artificial Sequence
  Synthetic oligonucleotide
tgtcggatcatcatgtaggtactgggaatc

SEQ ID NO: 130186 - DNA, 30 bp, Artificial Sequence
  Synthetic oligonucleotide
cctgcaggagacatcggtgcgatatgaatc

SEQ ID NO: 130187 - DNA, 30 bp, Artificial Sequence
  Synthetic oligonucleotide
atgagacattcctgcaggttactatgaatc

SEQ ID NO: 130188 - DNA, 30 bp, Artificial Sequence
  Synthetic oligonucleotide
agctacaggtgggcactaattcattgaatc

SEQ ID NO: 130189 - DNA, 30 bp, Artificial Sequence
  Synthetic oligonucleotide
ctcgcaacgtaagcgcgtccaagaataatc

SEQ ID NO: 130190 - DNA, 30 bp, Artificial Sequence
  Synthetic oligonucleotide
ttccatgtccctaggaatagcaacgtaatc

SEQ ID NO: 130191 - DNA, 30 bp, Artificial Sequence
  Synthetic oligonucleotide
gtttaatgcaacacacaacggttcgtaatc

SEQ ID NO: 130192 - DNA, 30 bp, Artificial Sequence
  Synthetic oligonucleotide
cacgtcgctagtgcgtgggaatgcttaatc

SEQ ID NO: 130193 - DNA, 30 bp, Artificial Sequence
  Synthetic oligonucleotide
gaagtgaaaacaagcactgccctgttaatc

SEQ ID NO: 130194 - DNA, 30 bp, Artificial Sequence
  Synthetic oligonucleotide
gcttgctgagtgttaattggcgatttaatc

SEQ ID NO: 130195 - DNA, 30 bp, Artificial Sequence
  Synthetic oligonucleotide
cgcgtctaaggctactatgtggctttaatc

SEQ ID NO: 130196 - DNA, 30 bp, Artificial Sequence
  Synthetic oligonucleotide
tatcggagcaaaccaatatagttcaacatc

SEQ ID NO: 130197 - DNA, 30 bp, Artificial Sequence
  Synthetic oligonucleotide
gctgccccaccgaaaaccgtcttgaacatc

SEQ ID NO: 130198 - DNA, 30 bp, Artificial Sequence
  Synthetic oligonucleotide
caagaagtcttcactctgatagctaacatc

SEQ ID NO: 130199 - DNA, 30 bp, Artificial Sequence
  Synthetic oligonucleotide
tccactcctggggagagtggacaacacatc

SEQ ID NO: 130200 - DNA, 30 bp, Artificial Sequence
  Synthetic oligonucleotide
cttctcacagggagaaaacccacgcacatc

SEQ ID NO: 130201 - DNA, 30 bp, Artificial Sequence
  Synthetic oligonucleotide
gtcccagagctagtaatttaagtgcacatc

SEQ ID NO: 130202 - DNA, 30 bp, Artificial Sequence
  Synthetic oligonucleotide
tcaacgaccagacccacgggttgagacatc

SEQ ID NO: 130203 - DNA, 30 bp, Artificial Sequence
  Synthetic oligonucleotide
ccccgtagtggaacaaaatctaatgacatc

SEQ ID NO: 130204 - DNA, 30 bp, Artificial Sequence
  Synthetic oligonucleotide
tcactagatcattatcggcttctatacatc

SEQ ID NO: 130205 - DNA, 30 bp, Artificial Sequence
  Synthetic oligonucleotide
ccggtgcaatacgaggatggacgctacatc

SEQ ID NO: 130206 - DNA, 30 bp, Artificial Sequence
  Synthetic oligonucleotide
aactcccatacagactattcatgctacatc

SEQ ID NO: 130207 - DNA, 30 bp, Artificial Sequence
  Synthetic oligonucleotide
gaatgtgtgatcacaggggcatggtacatc

SEQ ID NO: 130208 - DNA, 30 bp, Artificial Sequence
  Synthetic oligonucleotide
tgcactcattcaacaccagcgaattacatc

SEQ ID NO: 130209 - DNA, 30 bp, Artificial Sequence
  Synthetic oligonucleotide
tgcatacggggagtatcttcttacaccatc

SEQ ID NO: 130210 - DNA, 30 bp, Artificial Sequence
  Synthetic oligonucleotide
ctcgcccgagaggtagtttagcccaccatc

SEQ ID NO: 130211 - DNA, 30 bp, Artificial Sequence
  Synthetic oligonucleotide
tggattatactagcttggagtttgaccatc

SEQ ID NO: 130212 - DNA, 30 bp, Artificial Sequence
  Synthetic oligonucleotide
caaccacgcaccacgcttactccccccatc

SEQ ID NO: 130213 - DNA, 30 bp, Artificial Sequence
  Synthetic oligonucleotide
tagtatgcgtctacaggttcacttcccatc

SEQ ID NO: 130214 - DNA, 30 bp, Artificial Sequence
  Synthetic oligonucleotide
gtacgggtcactatcctataatggtccatc

SEQ ID NO: 130215 - DNA, 30 bp, Artificial Sequence
  Synthetic oligonucleotide
ttatgcaaccagctagcgggaaagagcatc

SEQ ID NO: 130216 - DNA, 30 bp, Artificial Sequence
  Synthetic oligonucleotide
gtgatggtccttcctaagcgggagagcatc

SEQ ID NO: 130217 - DNA, 30 bp, Artificial Sequence
  Synthetic oligonucleotide
gaaaagaaagtgtaggccaaaacgagcatc

SEQ ID NO: 130218 - DNA, 30 bp, Artificial Sequence
  Synthetic oligonucleotide
gtgccagtcggtgtgtaactcttgagcatc

SEQ ID NO: 130219 - DNA, 30 bp, Artificial Sequence
  Synthetic oligonucleotide
gcggaccgcgggggaatagcatcacgcatc

SEQ ID NO: 130220 - DNA, 30 bp, Artificial Sequence
  Synthetic oligonucleotide
cagtgcgtgaaccggaaatacctacgcatc

SEQ ID NO: 130221 - DNA, 30 bp, Artificial Sequence
  Synthetic oligonucleotide
tcataatgtgacgggtcattagaccgcatc

SEQ ID NO: 130222 - DNA, 30 bp, Artificial Sequence
  Synthetic oligonucleotide
gatcgcccagggggggattgtaggcgcatc

SEQ ID NO: 130223 - DNA, 30 bp, Artificial Sequence
  Synthetic oligonucleotide
gcgcgggttggatggattccactatgcatc

SEQ ID NO: 130224 - DNA, 30 bp, Artificial Sequence
  Synthetic oligonucleotide
gcatcgcgcgccttgcacggacttatcatc

SEQ ID NO: 130225 - DNA, 30 bp, Artificial Sequence
  Synthetic oligonucleotide
taccgtccggggtagacctaaaaactcatc

SEQ ID NO: 130226 - DNA, 30 bp, Artificial Sequence
  Synthetic oligonucleotide
cccacgggcagtgcttatcagatcctcatc

SEQ ID NO: 130227 - DNA, 30 bp, Artificial Sequence
  Synthetic oligonucleotide
tgccttaaactaaattgccagcaagtcatc

SEQ ID NO: 130228 - DNA, 30 bp, Artificial Sequence
  Synthetic oligonucleotide
tggatcaggggtactctcacactagtcatc

SEQ ID NO: 130229 - DNA, 30 bp, Artificial Sequence
  Synthetic oligonucleotide
aagcaatggctgagaacaagcgacgtcatc

SEQ ID NO: 130230 - DNA, 30 bp, Artificial Sequence
  Synthetic oligonucleotide
ctcagggggcttgagcagtgtcagttcatc

SEQ ID NO: 130231 - DNA, 30 bp, Artificial Sequence
  Synthetic oligonucleotide
tacgaccgaagagtttccacaatgttcatc

SEQ ID NO: 130232 - DNA, 30 bp, Artificial Sequence
  Synthetic oligonucleotide
tcggcggcgtcccctctaagtcataagatc

SEQ ID NO: 130233 - DNA, 30 bp, Artificial Sequence
  Synthetic oligonucleotide
tagtttcatcgaatgaaagatcgtaagatc

SEQ ID NO: 130234 - DNA, 30 bp, Artificial Sequence
  Synthetic oligonucleotide
agcacgggggacattattagaacagagatc

SEQ ID NO: 130235 - DNA, 30 bp, Artificial Sequence
  Synthetic oligonucleotide
acagttcgccaacggaggacccacgagatc

SEQ ID NO: 130236 - DNA, 30 bp, Artificial Sequence
  Synthetic oligonucleotide
acaggtgtagattggtatggtagatagatc

SEQ ID NO: 130237 - DNA, 30 bp, Artificial Sequence
  Synthetic oligonucleotide
ctagtatcaagtgtcgtgcaaatgtagatc

SEQ ID NO: 130238 - DNA, 30 bp, Artificial Sequence
  Synthetic oligonucleotide
gcaaattcagtgtgatttggtggaacgatc

SEQ ID NO: 130239 - DNA, 30 bp, Artificial Sequence
  Synthetic oligonucleotide
ggggcccgcggactaaatgactgaacgatc

SEQ ID NO: 130240 - DNA, 30 bp, Artificial Sequence
  Synthetic oligonucleotide
aacacgggtaggatgcagttaagcacgatc

SEQ ID NO: 130241 - DNA, 30 bp, Artificial Sequence
  Synthetic oligonucleotide
cctgctcccagtagattaagggcagcgatc

SEQ ID NO: 130242 - DNA, 30 bp, Artificial Sequence
  Synthetic oligonucleotide
ccgattttacccagcgaaatgcgagcgatc

SEQ ID NO: 130243 - DNA, 30 bp, Artificial Sequence
  Synthetic oligonucleotide
catgatcgaaggtagtatgcctgagcgatc

SEQ ID NO: 130244 - DNA, 30 bp, Artificial Sequence
  Synthetic oligonucleotide
ccaggacacgttactgatgagctggcgatc

SEQ ID NO: 130245 - DNA, 30 bp, Artificial Sequence
  Synthetic oligonucleotide
tggaaatcctcgcattttaaggtatcgatc

SEQ ID NO: 130246 - DNA, 30 bp, Artificial Sequence
  Synthetic oligonucleotide
aattaagaatagtctgactgtaggtcgatc

SEQ ID NO: 130247 - DNA, 30 bp, Artificial Sequence
  Synthetic oligonucleotide
tgggttactataaatgacggggtaaggatc

SEQ ID NO: 130248 - DNA, 30 bp, Artificial Sequence
  Synthetic oligonucleotide
tatgtgcgacggtgcccccggatcaggatc

SEQ ID NO: 130249 - DNA, 30 bp, Artificial Sequence
  Synthetic oligonucleotide
catcagtcacgtaacgggacccataggatc

SEQ ID NO: 130250 - DNA, 30 bp, Artificial Sequence
  Synthetic oligonucleotide
gatcgtttaaagctatctaccggagggatc

SEQ ID NO: 130251 - DNA, 30 bp, Artificial Sequence
  Synthetic oligonucleotide
aaacggatttcgaaatcatcgctagggatc

SEQ ID NO: 130252 - DNA, 30 bp, Artificial Sequence
  Synthetic oligonucleotide
aatttacccgatggacatggagacgggatc

SEQ ID NO: 130253 - DNA, 30 bp, Artificial Sequence
  Synthetic oligonucleotide
tcatgcaagcagaacatggaaggcgggatc

SEQ ID NO: 130254 - DNA, 30 bp, Artificial Sequence
  Synthetic oligonucleotide
aatggcgagctgtgacgatatccggggatc

SEQ ID NO: 130255 - DNA, 30 bp, Artificial Sequence
  Synthetic oligonucleotide
aacgtccgaaatgcgttcaccggtgggatc

SEQ ID NO: 130256 - DNA, 30 bp, Artificial Sequence
  Synthetic oligonucleotide
ccagcctaaggtcgttaaacacagtggatc

SEQ ID NO: 130257 - DNA, 30 bp, Artificial Sequence
  Synthetic oligonucleotide
cgtcaatagggtcgaattcctctttggatc

SEQ ID NO: 130258 - DNA, 30 bp, Artificial Sequence
  Synthetic oligonucleotide
ctgggaaagagctcccgacttttttggatc

SEQ ID NO: 130259 - DNA, 30 bp, Artificial Sequence
  Synthetic oligonucleotide
ctatgcggaaaccggaaggatcaaatgatc

SEQ ID NO: 130260 - DNA, 30 bp, Artificial Sequence
  Synthetic oligonucleotide
acgaattttaaactagaaattgaaatgatc

SEQ ID NO: 130261 - DNA, 30 bp, Artificial Sequence
  Synthetic oligonucleotide
gaaacattggaacagagtaaggctatgatc

SEQ ID NO: 130262 - DNA, 30 bp, Artificial Sequence
  Synthetic oligonucleotide
ctaaggacggtatcggtaagacgactgatc

SEQ ID NO: 130263 - DNA, 30 bp, Artificial Sequence
  Synthetic oligonucleotide
taatatgcgagctaacctgacctggtgatc

SEQ ID NO: 130264 - DNA, 30 bp, Artificial Sequence
  Synthetic oligonucleotide
ctagcggaaagaaggctgggtcctgtgatc

SEQ ID NO: 130265 - DNA, 30 bp, Artificial Sequence
  Synthetic oligonucleotide
gaggggaattacctcatgaaagtcaatatc

SEQ ID NO: 130266 - DNA, 30 bp, Artificial Sequence
  Synthetic oligonucleotide
tggtaaagtatatcttataaagaacatatc

SEQ ID NO: 130267 - DNA, 30 bp, Artificial Sequence
  Synthetic oligonucleotide
tataagaggaccctaggaaagttagatatc

SEQ ID NO: 130268 - DNA, 30 bp, Artificial Sequence
  Synthetic oligonucleotide
ctgtcgcaacacaacttatctctcgatatc

SEQ ID NO: 130269 - DNA, 30 bp, Artificial Sequence
  Synthetic oligonucleotide
gtgcatcagcgtaggggggatatatatatc

SEQ ID NO: 130270 - DNA, 30 bp, Artificial Sequence
  Synthetic oligonucleotide
cgtggaggtcactatcagtgtacttatatc

SEQ ID NO: 130271 - DNA, 30 bp, Artificial Sequence
  Synthetic oligonucleotide
aagtccatcgatccaataagtgtgactatc

SEQ ID NO: 130272 - DNA, 30 bp, Artificial Sequence
  Synthetic oligonucleotide
tgtgatgtctcagtgaatgtgcacgctatc

SEQ ID NO: 130273 - DNA, 30 bp, Artificial Sequence
  Synthetic oligonucleotide
gtggggtgcgtacaaagcttttaggctatc

SEQ ID NO: 130274 - DNA, 30 bp, Artificial Sequence
  Synthetic oligonucleotide
catggtggtgcggatactgtgtgaagtatc

SEQ ID NO: 130275 - DNA, 30 bp, Artificial Sequence
  Synthetic oligonucleotide
gcgcatcatctaacttaggaagccagtatc

SEQ ID NO: 130276 - DNA, 30 bp, Artificial Sequence
  Synthetic oligonucleotide
gtgaaacattaccgtgccctccagagtatc

SEQ ID NO: 130277 - DNA, 30 bp, Artificial Sequence
  Synthetic oligonucleotide
cgacgagcacattaagtaagctctagtatc

SEQ ID NO: 130278 - DNA, 30 bp, Artificial Sequence
  Synthetic oligonucleotide
tgatcctgtctagtcgttccggctcgtatc

SEQ ID NO: 130279 - DNA, 30 bp, Artificial Sequence
  Synthetic oligonucleotide
ttcacgagaaaagggcttcagagaggtatc

SEQ ID NO: 130280 - DNA, 30 bp, Artificial Sequence
  Synthetic oligonucleotide
aggggatctacattggcggcaaggggtatc

SEQ ID NO: 130281 - DNA, 30 bp, Artificial Sequence
  Synthetic oligonucleotide
ctaccaagactctatctcaggacatgtatc

SEQ ID NO: 130282 - DNA, 30 bp, Artificial Sequence
  Synthetic oligonucleotide
ggagaaggtacagtatagcgggtatgtatc

SEQ ID NO: 130283 - DNA, 30 bp, Artificial Sequence
  Synthetic oligonucleotide
gtcagggtaaaagccatgttaaggtgtatc

SEQ ID NO: 130284 - DNA, 30 bp, Artificial Sequence
  Synthetic oligonucleotide
ctgttagacgggttcatgaaaacgattatc

SEQ ID NO: 130285 - DNA, 30 bp, Artificial Sequence
  Synthetic oligonucleotide
ggtgccagatgtttggaaagcaggattatc

SEQ ID NO: 130286 - DNA, 30 bp, Artificial Sequence
  Synthetic oligonucleotide
ggaaaacttgattatgcaagggaacttatc

SEQ ID NO: 130287 - DNA, 30 bp, Artificial Sequence
  Synthetic oligonucleotide
aacacacgggagtgcgtgggaacacttatc

SEQ ID NO: 130288 - DNA, 30 bp, Artificial Sequence
  Synthetic oligonucleotide
gcgattggacggcgtcctgaagaagttatc

SEQ ID NO: 130289 - DNA, 30 bp, Artificial Sequence
  Synthetic oligonucleotide
tcgacctatttttcgatagggagatttatc

SEQ ID NO: 130290 - DNA, 30 bp, Artificial Sequence
  Synthetic oligonucleotide
tagaagtggatgccttagaagacgtttatc

SEQ ID NO: 130291 - DNA, 30 bp, Artificial Sequence
  Synthetic oligonucleotide
aggccacatatgttagacccggtgtttatc

SEQ ID NO: 130292 - DNA, 30 bp, Artificial Sequence
  Synthetic oligonucleotide
tcgtcaccactattaccggctcaaaaactc

SEQ ID NO: 130293 - DNA, 30 bp, Artificial Sequence
  Synthetic oligonucleotide
gtcgtggtccggcgacaagatggcaaactc

SEQ ID NO: 130294 - DNA, 30 bp, Artificial Sequence
  Synthetic oligonucleotide
ggcatcaattaagagtgcgtccggcaactc

SEQ ID NO: 130295 - DNA, 30 bp, Artificial Sequence
  Synthetic oligonucleotide
ccataaagtggacgaaagtaaaaggaactc

SEQ ID NO: 130296 - DNA, 30 bp, Artificial Sequence
  Synthetic oligonucleotide
tagacatgtgcgtatcgaataatgtaactc

SEQ ID NO: 130297 - DNA, 30 bp, Artificial Sequence
  Synthetic oligonucleotide
gcaaacgagattgtgtagtgtcggccactc

SEQ ID NO: 130298 - DNA, 30 bp, Artificial Sequence
  Synthetic oligonucleotide
taccataagaaattcgccgttatagcactc

SEQ ID NO: 130299 - DNA, 30 bp, Artificial Sequence
  Synthetic oligonucleotide
aaacaaccagctatacaagttgactcactc

SEQ ID NO: 130300 - DNA, 30 bp, Artificial Sequence
  Synthetic oligonucleotide
tagtaagaggccaatgcacataacagactc

SEQ ID NO: 130301 - DNA, 30 bp, Artificial Sequence
  Synthetic oligonucleotide
gcgaaaagagttaggtgcctcgctagactc

SEQ ID NO: 130302 - DNA, 30 bp, Artificial Sequence
  Synthetic oligonucleotide
ccgatccaaggaataaccaaaatgggactc

SEQ ID NO: 130303 - DNA, 30 bp, Artificial Sequence
  Synthetic oligonucleotide
taacgatgcgagaggtggaagtctatactc

SEQ ID NO: 130304 - DNA, 30 bp, Artificial Sequence
  Synthetic oligonucleotide
taagtggtctcataaaggccgacactactc

SEQ ID NO: 130305 - DNA, 30 bp, Artificial Sequence
  Synthetic oligonucleotide
ccgacttgcaagcaaacaccgatactactc

SEQ ID NO: 130306 - DNA, 30 bp, Artificial Sequence
  Synthetic oligonucleotide
agctcgatacatggctgccaggtactactc

SEQ ID NO: 130307 - DNA, 30 bp, Artificial Sequence
  Synthetic oligonucleotide
aaggataccacatggtccgacccgttactc

SEQ ID NO: 130308 - DNA, 30 bp, Artificial Sequence
  Synthetic oligonucleotide
ttcacagggtgttcgagcaggggaaacctc

SEQ ID NO: 130309 - DNA, 30 bp, Artificial Sequence
  Synthetic oligonucleotide
tgaggcgcaagagtatctggaaacaacctc

SEQ ID NO: 130310 - DNA, 30 bp, Artificial Sequence
  Synthetic oligonucleotide
cacgtgctcgcgtaatcctacaacaacctc

SEQ ID NO: 130311 - DNA, 30 bp, Artificial Sequence
  Synthetic oligonucleotide
gttgggatagtctaggaaacacctcacctc

SEQ ID NO: 130312 - DNA, 30 bp, Artificial Sequence
  Synthetic oligonucleotide
taaaagtccgattcttaagcagtagacctc

SEQ ID NO: 130313 - DNA, 30 bp, Artificial Sequence
  Synthetic oligonucleotide
agagcagtgccaagcggtatgaccgacctc

SEQ ID NO: 130314 - DNA, 30 bp, Artificial Sequence
  Synthetic oligonucleotide
gctggtatcgtattgcggtgccccgacctc

SEQ ID NO: 130315 - DNA, 30 bp, Artificial Sequence
  Synthetic oligonucleotide
tcgcgcaacgacagctcgcacactgacctc

SEQ ID NO: 130316 - DNA, 30 bp, Artificial Sequence
  Synthetic oligonucleotide
attgcgcgtggcaacaaacgagttgacctc

SEQ ID NO: 130317 - DNA, 30 bp, Artificial Sequence
  Synthetic oligonucleotide
ggtcgatactcctggcattaagcgtacctc

SEQ ID NO: 130318 - DNA, 30 bp, Artificial Sequence
  Synthetic oligonucleotide
acaggtccgccagtctcaaaaatgtacctc

SEQ ID NO: 130319 - DNA, 30 bp, Artificial Sequence
  Synthetic oligonucleotide
atacggaggggtatcaacaagcgtcccctc

SEQ ID NO: 130320 - DNA, 30 bp, Artificial Sequence
  Synthetic oligonucleotide
ttactatggcaccaatcaaagagcgccctc

SEQ ID NO: 130321 - DNA, 30 bp, Artificial Sequence
  Synthetic oligonucleotide
taaaggcttcgacacctgttattatccctc

SEQ ID NO: 130322 - DNA, 30 bp, Artificial Sequence
  Synthetic oligonucleotide
gtcacggcagggtggaaatagcgcagcctc

SEQ ID NO: 130323 - DNA, 30 bp, Artificial Sequence
  Synthetic oligonucleotide
aacggcttgcaacacgtctatctcagcctc

SEQ ID NO: 130324 - DNA, 30 bp, Artificial Sequence
  Synthetic oligonucleotide
caaaacaagatgtggcatattggtagcctc

SEQ ID NO: 130325 - DNA, 30 bp, Artificial Sequence
  Synthetic oligonucleotide
gggaggtgtgacccgtagccaattagcctc

SEQ ID NO: 130326 - DNA, 30 bp, Artificial Sequence
  Synthetic oligonucleotide
acgagaaatctcggtcaggtgcatcgcctc

SEQ ID NO: 130327 - DNA, 30 bp, Artificial Sequence
  Synthetic oligonucleotide
atcgtgaggacatacagcagcggaggcctc

SEQ ID NO: 130328 - DNA, 30 bp, Artificial Sequence
  Synthetic oligonucleotide
gatcgcggggaagaacgctatgtcggcctc

SEQ ID NO: 130329 - DNA, 30 bp, Artificial Sequence
  Synthetic oligonucleotide
ggggagaccaaccatcacgatcggggcctc

SEQ ID NO: 130330 - DNA, 30 bp, Artificial Sequence
  Synthetic oligonucleotide
ttaccatttccagggcacggtacatgcctc

SEQ ID NO: 130331 - DNA, 30 bp, Artificial Sequence
  Synthetic oligonucleotide
ggctggtcaagcctcgcggagtcgtgcctc

SEQ ID NO: 130332 - DNA, 30 bp, Artificial Sequence
  Synthetic oligonucleotide
cggactgggaagtagtcgagacccatcctc

SEQ ID NO: 130333 - DNA, 30 bp, Artificial Sequence
  Synthetic oligonucleotide
aaaggtgaggctaaatgatgttatttcctc

SEQ ID NO: 130334 - DNA, 30 bp, Artificial Sequence
  Synthetic oligonucleotide
gcatcgcgggagtaattctgtgtgaagctc

SEQ ID NO: 130335 - DNA, 30 bp, Artificial Sequence
  Synthetic oligonucleotide
tatcggtcagagtgtagaatagagcagctc

SEQ ID NO: 130336 - DNA, 30 bp, Artificial Sequence
  Synthetic oligonucleotide
gcatgctgtggttatgatttttgtcagctc

SEQ ID NO: 130337 - DNA, 30 bp, Artificial Sequence
  Synthetic oligonucleotide
cgtaagaagagttggcttaggaacgagctc

SEQ ID NO: 130338 - DNA, 30 bp, Artificial Sequence
  Synthetic oligonucleotide
actcgaagtacagacttcctcattgagctc

SEQ ID NO: 130339 - DNA, 30 bp, Artificial Sequence
  Synthetic oligonucleotide
tggtgcgcgctacactttggccttgagctc

SEQ ID NO: 130340 - DNA, 30 bp, Artificial Sequence
  Synthetic oligonucleotide
atgggcgtagtgatcactgactacccgctc

SEQ ID NO: 130341 - DNA, 30 bp, Artificial Sequence
  Synthetic oligonucleotide
cattagtgattaatggatcgctcggcgctc

SEQ ID NO: 130342 - DNA, 30 bp, Artificial Sequence
  Synthetic oligonucleotide
ataagtcaggatttggcgttcagctcgctc

SEQ ID NO: 130343 - DNA, 30 bp, Artificial Sequence
  Synthetic oligonucleotide
gtacgaggggagctagatgcacgacggctc

SEQ ID NO: 130344 - DNA, 30 bp, Artificial Sequence
  Synthetic oligonucleotide
actaggcactggaagcgtcatagagggctc

SEQ ID NO: 130345 - DNA, 30 bp, Artificial Sequence
  Synthetic oligonucleotide
gtgtccagaaagagagtgtgaattgggctc

SEQ ID NO: 130346 - DNA, 30 bp, Artificial Sequence
  Synthetic oligonucleotide
tcaagtgcacacgcgacaggaccctggctc

SEQ ID NO: 130347 - DNA, 30 bp, Artificial Sequence
  Synthetic oligonucleotide
cagatctatcacttgtctcggtcctggctc

SEQ ID NO: 130348 - DNA, 30 bp, Artificial Sequence
  Synthetic oligonucleotide
cctgtaaaggaaatttgatgctagtggctc

SEQ ID NO: 130349 - DNA, 30 bp, Artificial Sequence
  Synthetic oligonucleotide
agtagcctaatcttactgtcagcgtggctc

SEQ ID NO: 130350 - DNA, 30 bp, Artificial Sequence
  Synthetic oligonucleotide
gcggtggtgtaagggagtcgctgcatgctc

SEQ ID NO: 130351 - DNA, 30 bp, Artificial Sequence
  Synthetic oligonucleotide
aggtatgaagacaccgcaaatgccctgctc

SEQ ID NO: 130352 - DNA, 30 bp, Artificial Sequence
  Synthetic oligonucleotide
ttggtagcagggggagatctatgcaatctc

SEQ ID NO: 130353 - DNA, 30 bp, Artificial Sequence
  Synthetic oligonucleotide
gatcacgtcaagatttaaaattgcaatctc

SEQ ID NO: 130354 - DNA, 30 bp, Artificial Sequence
  Synthetic oligonucleotide
cttaagccgcatcctgcgtaacctaatctc

SEQ ID NO: 130355 - DNA, 30 bp, Artificial Sequence
  Synthetic oligonucleotide
cggagcctagcttgaaagaaaccccatctc

SEQ ID NO: 130356 - DNA, 31 bp, Artificial Sequence
  Synthetic oligonucleotide
ggcgagcttcgtcttaggccttctcgatctc

SEQ ID NO: 130357 - DNA, 30 bp, Artificial Sequence
  Synthetic oligonucleotide
gggcgggctaataacccgcttgtcgatctc

SEQ ID NO: 130358 - DNA, 30 bp, Artificial Sequence
  Synthetic oligonucleotide
acacgtacatcctgagggggcgtgactctc

SEQ ID NO: 130359 - DNA, 30 bp, Artificial Sequence
  Synthetic oligonucleotide
acagtggagatcattgcgatgagtgctctc

SEQ ID NO: 130360 - DNA, 30 bp, Artificial Sequence
  Synthetic oligonucleotide
tgtccgagggtgtcagattaaattagtctc

SEQ ID NO: 130361 - DNA, 30 bp, Artificial Sequence
  Synthetic oligonucleotide
tcggttgtattcaaaccagaagtacgtctc

SEQ ID NO: 130362 - DNA, 30 bp, Artificial Sequence
  Synthetic oligonucleotide
tcaaacatgtagatgaatctagccggtctc

SEQ ID NO: 130363 - DNA, 30 bp, Artificial Sequence
  Synthetic oligonucleotide
aggcacagagtgtattatcgggccggtctc

SEQ ID NO: 130364 - DNA, 30 bp, Artificial Sequence
  Synthetic oligonucleotide
ttgacaacggatgaacgacgagcaattctc

SEQ ID NO: 130365 - DNA, 30 bp, Artificial Sequence
  Synthetic oligonucleotide
caagcctacgggtgattgtggtatattctc

SEQ ID NO: 130366 - DNA, 30 bp, Artificial Sequence
  Synthetic oligonucleotide
tcgtcattcacatggagaaaaatccttctc

SEQ ID NO: 130367 - DNA, 30 bp, Artificial Sequence
  Synthetic oligonucleotide
aacaattgagtgtggtagaagagcgttctc

SEQ ID NO: 130368 - DNA, 30 bp, Artificial Sequence
  Synthetic oligonucleotide
tgcaatctggtttcaaatggtctaaaagtc

SEQ ID NO: 130369 - DNA, 30 bp, Artificial Sequence
  Synthetic oligonucleotide
agaaacatcagggatctactttccaaagtc

SEQ ID NO: 130370 - DNA, 30 bp, Artificial Sequence
  Synthetic oligonucleotide
agttattaggcagacaaacaaccgaaagtc

SEQ ID NO: 130371 - DNA, 30 bp, Artificial Sequence
  Synthetic oligonucleotide
tgatgcaatgatatgacgaggtggaaagtc

SEQ ID NO: 130372 - DNA, 30 bp, Artificial Sequence
  Synthetic oligonucleotide
ccagtgcattgaggtatgacgattcaagtc

SEQ ID NO: 130373 - DNA, 30 bp, Artificial Sequence
  Synthetic oligonucleotide
gaattggcctcagaacaattcgacgaagtc

SEQ ID NO: 130374 - DNA, 30 bp, Artificial Sequence
  Synthetic oligonucleotide
cacttgccatccacaagactttccgaagtc

SEQ ID NO: 130375 - DNA, 30 bp, Artificial Sequence
  Synthetic oligonucleotide
gcggctaagtaggcattaacccaggaagtc

SEQ ID NO: 130376 - DNA, 30 bp, Artificial Sequence
  Synthetic oligonucleotide
atgacctacgttatcgagagttcggaagtc

SEQ ID NO: 130377 - DNA, 30 bp, Artificial Sequence
  Synthetic oligonucleotide
tgcactgccatcggacatcaacgtgaagtc

SEQ ID NO: 130378 - DNA, 30 bp, Artificial Sequence
  Synthetic oligonucleotide
ataacgtagactagcataacggcataagtc

SEQ ID NO: 130379 - DNA, 30 bp, Artificial Sequence
  Synthetic oligonucleotide
tcattagtgtttgctgaatttgcataagtc

SEQ ID NO: 130380 - DNA, 30 bp, Artificial Sequence
  Synthetic oligonucleotide
ggccaaaagtatgtgacacgatactaagtc

SEQ ID NO: 130381 - DNA, 31 bp, Artificial Sequence
  Synthetic oligonucleotide
agaatgccgtggacaaatccgtgtgtaagtc

SEQ ID NO: 130382 - DNA, 30 bp, Artificial Sequence
  Synthetic oligonucleotide
agccgatagctaacgcgtcaattttaagtc

SEQ ID NO: 130383 - DNA, 30 bp, Artificial Sequence
  Synthetic oligonucleotide
aactccacttggtattaaataattacagtc

SEQ ID NO: 130384 - DNA, 30 bp, Artificial Sequence
  Synthetic oligonucleotide
aagagtccccatttgcatgcaggcccagtc

SEQ ID NO: 130385 - DNA, 30 bp, Artificial Sequence
  Synthetic oligonucleotide
gggagttttaaagccaccccgaatccagtc

SEQ ID NO: 130386 - DNA, 30 bp, Artificial Sequence
  Synthetic oligonucleotide
gaccctcaataccgtagcaacacagcagtc

SEQ ID NO: 130387 - DNA, 30 bp, Artificial Sequence
  Synthetic oligonucleotide
aggcccaaggtcaaagcagaggcagcagtc

SEQ ID NO: 130388 - DNA, 30 bp, Artificial Sequence
  Synthetic oligonucleotide
tataaagatctagacgaaaaaagggcagtc

SEQ ID NO: 130389 - DNA, 30 bp, Artificial Sequence
  Synthetic oligonucleotide
tcatagacaagatttcatgacgactcagtc

SEQ ID NO: 130390 - DNA, 30 bp, Artificial Sequence
  Synthetic oligonucleotide
taatcagtcaggctgttatatccctcagtc

SEQ ID NO: 130391 - DNA, 30 bp, Artificial Sequence
  Synthetic oligonucleotide
agggctgagcggtttggaggcaattcagtc

SEQ ID NO: 130392 - DNA, 30 bp, Artificial Sequence
  Synthetic oligonucleotide
cttgggccgtcggaagtaagataaagagtc

SEQ ID NO: 130393 - DNA, 30 bp, Artificial Sequence
  Synthetic oligonucleotide
atcactatcatctcgagatttcggcgagtc

SEQ ID NO: 130394 - DNA, 30 bp, Artificial Sequence
  Synthetic oligonucleotide
atgggtagattgtaacgggggatgcgagtc

SEQ ID NO: 130395 - DNA, 30 bp, Artificial Sequence
  Synthetic oligonucleotide
tcaagttgtcataccctccggaatcgagtc

SEQ ID NO: 130396 - DNA, 30 bp, Artificial Sequence
  Synthetic oligonucleotide
ggctacgtcataacagggatcggtcgagtc

SEQ ID NO: 130397 - DNA, 30 bp, Artificial Sequence
  Synthetic oligonucleotide
acgtgaaaatgggctttattctacggagtc

SEQ ID NO: 130398 - DNA, 31 bp, Artificial Sequence
  Synthetic oligonucleotide
tactaggctggatgtaacgacgttatgagtc

SEQ ID NO: 130399 - DNA, 30 bp, Artificial Sequence
  Synthetic oligonucleotide
tgcgaacagtggactcaaagtgtactagtc

SEQ ID NO: 130400 - DNA, 30 bp, Artificial Sequence
  Synthetic oligonucleotide
ttcctgctggacgaaactgccactctagtc

SEQ ID NO: 130401 - DNA, 30 bp, Artificial Sequence
  Synthetic oligonucleotide
aagcgagttgtatggctacgaaatgtagtc

SEQ ID NO: 130402 - DNA, 30 bp, Artificial Sequence
  Synthetic oligonucleotide
tggtaactacggaactggggtgatttagtc

SEQ ID NO: 130403 - DNA, 30 bp, Artificial Sequence
  Synthetic oligonucleotide
caggacaggcgggaaacgaatcgtttagtc

SEQ ID NO: 130404 - DNA, 31 bp, Artificial Sequence
  Synthetic oligonucleotide
aaatagataaagtaaggccagcaccaacgtc

SEQ ID NO: 130405 - DNA, 30 bp, Artificial Sequence
  Synthetic oligonucleotide
tagcgatgtgaacaggaatcgctcaacgtc

SEQ ID NO: 130406 - DNA, 30 bp, Artificial Sequence
  Synthetic oligonucleotide
ccgaaggaggcttaatcctcgactaacgtc

SEQ ID NO: 130407 - DNA, 30 bp, Artificial Sequence
  Synthetic oligonucleotide
agcgctccattatgcgctggtcatgacgtc

SEQ ID NO: 130408 - DNA, 30 bp, Artificial Sequence
  Synthetic oligonucleotide
aaagtcgttggggttaaattacgatacgtc

SEQ ID NO: 130409 - DNA, 30 bp, Artificial Sequence
  Synthetic oligonucleotide
tgaggtgggcaccgggctcaacactacgtc

SEQ ID NO: 130410 - DNA, 30 bp, Artificial Sequence
  Synthetic oligonucleotide
tcgattgataaaggcagtatgggctacgtc

SEQ ID NO: 130411 - DNA, 30 bp, Artificial Sequence
  Synthetic oligonucleotide
gttgatcgagaccgtggtttggtttacgtc

SEQ ID NO: 130412 - DNA, 30 bp, Artificial Sequence
  Synthetic oligonucleotide
cgcttatacggaggggagagcgcaaccgtc

SEQ ID NO: 130413 - DNA, 30 bp, Artificial Sequence
  Synthetic oligonucleotide
gtataggcaggctcattcaacggtaccgtc

SEQ ID NO: 130414 - DNA, 30 bp, Artificial Sequence
  Synthetic oligonucleotide
cgtacctgacctccgtaatttactcccgtc

SEQ ID NO: 130415 - DNA, 30 bp, Artificial Sequence
  Synthetic oligonucleotide
atgaggagcattccgatggagcctcccgtc

SEQ ID NO: 130416 - DNA, 30 bp, Artificial Sequence
  Synthetic oligonucleotide
gctacaaggatctccttcctgtaagccgtc

SEQ ID NO: 130417 - DNA, 30 bp, Artificial Sequence
  Synthetic oligonucleotide
tgtctgtgcgctacaagaaatgcagccgtc

SEQ ID NO: 130418 - DNA, 30 bp, Artificial Sequence
  Synthetic oligonucleotide
tcacggacacagccgaattctgacgccgtc

SEQ ID NO: 130419 - DNA, 30 bp, Artificial Sequence
  Synthetic oligonucleotide
agcatcaagataaaatgtaagcgcgccgtc

SEQ ID NO: 130420 - DNA, 30 bp, Artificial Sequence
  Synthetic oligonucleotide
ttacaagtctgaacttaacataatgccgtc

SEQ ID NO: 130421 - DNA, 30 bp, Artificial Sequence
  Synthetic oligonucleotide
aggaaattactggagtagtcgggtgccgtc

SEQ ID NO: 130422 - DNA, 30 bp, Artificial Sequence
  Synthetic oligonucleotide
gccactgttccgaagaaatggggctccgtc

SEQ ID NO: 130423 - DNA, 30 bp, Artificial Sequence
  Synthetic oligonucleotide
ctaaccctatatgcattagctgggtccgtc

SEQ ID NO: 130424 - DNA, 30 bp, Artificial Sequence
  Synthetic oligonucleotide
agggagacacacgaccggtggtggtccgtc

SEQ ID NO: 130425 - DNA, 30 bp, Artificial Sequence
  Synthetic oligonucleotide
aggattccagggagctaaagtagaagcgtc

SEQ ID NO: 130426 - DNA, 30 bp, Artificial Sequence
  Synthetic oligonucleotide
ggccaaagcgactgattagtgggtagcgtc

SEQ ID NO: 130427 - DNA, 29 bp, Artificial Sequence
  Synthetic oligonucleotide
aacattccatagggctaagctcaggcgtc

SEQ ID NO: 130428 - DNA, 30 bp, Artificial Sequence
  Synthetic oligonucleotide
agtttaaaagtgcgagttcaacgaggcgtc

SEQ ID NO: 130429 - DNA, 30 bp, Artificial Sequence
  Synthetic oligonucleotide
gtacggaaaacatcggtactgtagggcgtc

SEQ ID NO: 130430 - DNA, 30 bp, Artificial Sequence
  Synthetic oligonucleotide
caatgatagacggatctcgaacggggcgtc

SEQ ID NO: 130431 - DNA, 30 bp, Artificial Sequence
  Synthetic oligonucleotide
gtcaacgtgggttatggtccgtcatgcgtc

SEQ ID NO: 130432 - DNA, 30 bp, Artificial Sequence
  Synthetic oligonucleotide
cttcgggggcccagtttcgacgactgcgtc

SEQ ID NO: 130433 - DNA, 30 bp, Artificial Sequence
  Synthetic oligonucleotide
agtgagaggcgcgcataacttgcgtgcgtc

SEQ ID NO: 130434 - DNA, 30 bp, Artificial Sequence
  Synthetic oligonucleotide
ggcgcgttgtgggtcctgggagggtgcgtc

SEQ ID NO: 130435 - DNA, 30 bp, Artificial Sequence
  Synthetic oligonucleotide
cgtcttgctcaaaccattgcttaaatcgtc

SEQ ID NO: 130436 - DNA, 30 bp, Artificial Sequence
  Synthetic oligonucleotide
ctagccaccggcggcctcgagctcatcgtc

SEQ ID NO: 130437 - DNA, 30 bp, Artificial Sequence
  Synthetic oligonucleotide
cttgtgagtttaacgtggtgtaagatcgtc

SEQ ID NO: 130438 - DNA, 30 bp, Artificial Sequence
  Synthetic oligonucleotide
agtactccagggagcacacattgtatcgtc

SEQ ID NO: 130439 - DNA, 30 bp, Artificial Sequence
  Synthetic oligonucleotide
aagggcttactgaagaagaagggcctcgtc

SEQ ID NO: 130440 - DNA, 30 bp, Artificial Sequence
  Synthetic oligonucleotide
caccaattaaggtaggttaggggtctcgtc

SEQ ID NO: 130441 - DNA, 30 bp, Artificial Sequence
  Synthetic oligonucleotide
ggagcttaagcggttcgaccagaggtcgtc

SEQ ID NO: 130442 - DNA, 30 bp, Artificial Sequence
  Synthetic oligonucleotide
gcacaataacgccacttatccgaattcgtc

SEQ ID NO: 130443 - DNA, 30 bp, Artificial Sequence
  Synthetic oligonucleotide
ttgtcggcaaagtgttcagtcacgttcgtc

SEQ ID NO: 130444 - DNA, 30 bp, Artificial Sequence
  Synthetic oligonucleotide
tgttgaggtgaatgagcatcggcaaaggtc

SEQ ID NO: 130445 - DNA, 30 bp, Artificial Sequence
  Synthetic oligonucleotide
ttaaggaactgaaccaatgacttaaaggtc

SEQ ID NO: 130446 - DNA, 30 bp, Artificial Sequence
  Synthetic oligonucleotide
catctcctgaaaagaaaaaggaagaaggtc

SEQ ID NO: 130447 - DNA, 30 bp, Artificial Sequence
  Synthetic oligonucleotide
gccggcaatccaatttaagtgatgaaggtc

SEQ ID NO: 130448 - DNA, 30 bp, Artificial Sequence
  Synthetic oligonucleotide
gtcaagagtagcatgaacctagatcaggtc

SEQ ID NO: 130449 - DNA, 30 bp, Artificial Sequence
  Synthetic oligonucleotide
gatatgcgagggggaaaattcgctcaggtc

SEQ ID NO: 130450 - DNA, 30 bp, Artificial Sequence
  Synthetic oligonucleotide
ccggaggcggcggcgtgatgtaaagaggtc

SEQ ID NO: 130451 - DNA, 30 bp, Artificial Sequence
  Synthetic oligonucleotide
atagttggtatccggaacaggagggaggtc

SEQ ID NO: 130452 - DNA, 30 bp, Artificial Sequence
  Synthetic oligonucleotide
ccgaagatggtcctcttaactagggaggtc

SEQ ID NO: 130453 - DNA, 30 bp, Artificial Sequence
  Synthetic oligonucleotide
tcatcaggccagccgattacttactaggtc

SEQ ID NO: 130454 - DNA, 30 bp, Artificial Sequence
  Synthetic oligonucleotide
aaagcaatagaccgccgaacggggccggtc

SEQ ID NO: 130455 - DNA, 30 bp, Artificial Sequence
  Synthetic oligonucleotide
tatcgaattaggtggcacagtaatccggtc

SEQ ID NO: 130456 - DNA, 30 bp, Artificial Sequence
  Synthetic oligonucleotide
caacagcgacggcgtggatgccaggcggtc

SEQ ID NO: 130457 - DNA, 30 bp, Artificial Sequence
  Synthetic oligonucleotide
tcatggttataaatgtttcgtagtgcggtc

SEQ ID NO: 130458 - DNA, 30 bp, Artificial Sequence
  Synthetic oligonucleotide
gatagttggggaaacaactattaatcggtc

SEQ ID NO: 130459 - DNA, 30 bp, Artificial Sequence
  Synthetic oligonucleotide
tggtgacttgcgagggcttgaaaaagggtc

SEQ ID NO: 130460 - DNA, 30 bp, Artificial Sequence
  Synthetic oligonucleotide
aaagcattactgtcgagatgtaagagggtc

SEQ ID NO: 130461 - DNA, 30 bp, Artificial Sequence
  Synthetic oligonucleotide
aatgttagctctagaggtttggttagggtc

SEQ ID NO: 130462 - DNA, 30 bp, Artificial Sequence
  Synthetic oligonucleotide
gaccgttgacgaacagtgggccagcgggtc

SEQ ID NO: 130463 - DNA, 30 bp, Artificial Sequence
  Synthetic oligonucleotide
tcatgcaatgggagtgcctgtcctggggtc

SEQ ID NO: 130464 - DNA, 30 bp, Artificial Sequence
  Synthetic oligonucleotide
ctccagcaccgaggttgagggtaatgggtc

SEQ ID NO: 130465 - DNA, 30 bp, Artificial Sequence
  Synthetic oligonucleotide
agcgcaaggagtcggcaaagctggtgggtc

SEQ ID NO: 130466 - DNA, 30 bp, Artificial Sequence
  Synthetic oligonucleotide
agtctggctaaagggtagaggggttgggtc

SEQ ID NO: 130467 - DNA, 30 bp, Artificial Sequence
  Synthetic oligonucleotide
agcgcgtagtatgtagagggcgagatggtc

SEQ ID NO: 130468 - DNA, 30 bp, Artificial Sequence
  Synthetic oligonucleotide
tacggacgtgttggtctgcaatgtatggtc

SEQ ID NO: 130469 - DNA, 30 bp, Artificial Sequence
  Synthetic oligonucleotide
tgcgttagaagttaactgatgagtctggtc

SEQ ID NO: 130470 - DNA, 30 bp, Artificial Sequence
  Synthetic oligonucleotide
aagccccagggatgcacgactcgtgtggtc

SEQ ID NO: 130471 - DNA, 30 bp, Artificial Sequence
  Synthetic oligonucleotide
tcgtcaatgcggggaggaagcctattggtc

SEQ ID NO: 130472 - DNA, 30 bp, Artificial Sequence
  Synthetic oligonucleotide
ttctcgtctaagtcacagtgttttttggtc

SEQ ID NO: 130473 - DNA, 30 bp, Artificial Sequence
  Synthetic oligonucleotide
ttgagccgtagaactgactgcacaaatgtc

SEQ ID NO: 130474 - DNA, 30 bp, Artificial Sequence
  Synthetic oligonucleotide
tgaacgcaaacgcttgaaggcactaatgtc

SEQ ID NO: 130475 - DNA, 30 bp, Artificial Sequence
  Synthetic oligonucleotide
tgggtgctttcgtatgcacctagtaatgtc

SEQ ID NO: 130476 - DNA, 30 bp, Artificial Sequence
  Synthetic oligonucleotide
aataacacgcgtatggccttacgtaatgtc

SEQ ID NO: 130477 - DNA, 30 bp, Artificial Sequence
  Synthetic oligonucleotide
ccgatataagactaatgccatgttaatgtc

SEQ ID NO: 130478 - DNA, 30 bp, Artificial Sequence
  Synthetic oligonucleotide
tgcccaggtgccttggagcttaaacatgtc

SEQ ID NO: 130479 - DNA, 30 bp, Artificial Sequence
  Synthetic oligonucleotide
ggcctgcgttgagccatattacaacatgtc

SEQ ID NO: 130480 - DNA, 30 bp, Artificial Sequence
  Synthetic oligonucleotide
ggcgacttacgataaaaccgtgcacatgtc

SEQ ID NO: 130481 - DNA, 30 bp, Artificial Sequence
  Synthetic oligonucleotide
cgtcgcaggactggctaagggtcgcatgtc

SEQ ID NO: 130482 - DNA, 30 bp, Artificial Sequence
  Synthetic oligonucleotide
tcactacacataagcgctcactacgatgtc

SEQ ID NO: 130483 - DNA, 30 bp, Artificial Sequence
  Synthetic oligonucleotide
gcgcctcgactcatccgggcaaaggatgtc

SEQ ID NO: 130484 - DNA, 30 bp, Artificial Sequence
  Synthetic oligonucleotide
acctcggtatatcacagtattccatatgtc

SEQ ID NO: 130485 - DNA, 30 bp, Artificial Sequence
  Synthetic oligonucleotide
acgcgccctggcacaggtggcgtatatgtc

SEQ ID NO: 130486 - DNA, 30 bp, Artificial Sequence
  Synthetic oligonucleotide
ccgtggaggattaagaaaggcggctatgtc

SEQ ID NO: 130487 - DNA, 30 bp, Artificial Sequence
  Synthetic oligonucleotide
ctcacgtacaaagaaggcattggaactgtc

SEQ ID NO: 130488 - DNA, 30 bp, Artificial Sequence
  Synthetic oligonucleotide
aaatgcgaattcggtaaccagaacactgtc

SEQ ID NO: 130489 - DNA, 30 bp, Artificial Sequence
  Synthetic oligonucleotide
gcccaaaaattgtgcgtgatggatactgtc

SEQ ID NO: 130490 - DNA, 30 bp, Artificial Sequence
  Synthetic oligonucleotide
tgccaggcaagaagattgagcagacctgtc

SEQ ID NO: 130491 - DNA, 30 bp, Artificial Sequence
  Synthetic oligonucleotide
tctggcagtttccggagagcacatcctgtc

SEQ ID NO: 130492 - DNA, 30 bp, Artificial Sequence
  Synthetic oligonucleotide
cgtgatggcaggtctcgaggtaacgctgtc

SEQ ID NO: 130493 - DNA, 30 bp, Artificial Sequence
  Synthetic oligonucleotide
tcaatgggctatccatttaaatacgctgtc

SEQ ID NO: 130494 - DNA, 30 bp, Artificial Sequence
  Synthetic oligonucleotide
agcaacaaaaagggatgccggtcggctgtc

SEQ ID NO: 130495 - DNA, 30 bp, Artificial Sequence
  Synthetic oligonucleotide
tcaactattactagggggcaaaaatctgtc

SEQ ID NO: 130496 - DNA, 30 bp, Artificial Sequence
  Synthetic oligonucleotide
aggataagaaaagcgtcaacaaaatctgtc

SEQ ID NO: 130497 - DNA, 30 bp, Artificial Sequence
  Synthetic oligonucleotide
caagatgcatgaaaggatttccgatctgtc

SEQ ID NO: 130498 - DNA, 30 bp, Artificial Sequence
  Synthetic oligonucleotide
acccgtgatcagactacaaacatatctgtc

SEQ ID NO: 130499 - DNA, 30 bp, Artificial Sequence
  Synthetic oligonucleotide
atggaaaaaaggcttaactaatcctctgtc

SEQ ID NO: 130500 - DNA, 30 bp, Artificial Sequence
  Synthetic oligonucleotide
tctagggtcaatacaatagaagtctctgtc

SEQ ID NO: 130501 - DNA, 30 bp, Artificial Sequence
  Synthetic oligonucleotide
catcgattccccaagtacgacacttctgtc

SEQ ID NO: 130502 - DNA, 30 bp, Artificial Sequence
  Synthetic oligonucleotide
taacgtgtgctagggaggttgacttctgtc

SEQ ID NO: 130503 - DNA, 30 bp, Artificial Sequence
  Synthetic oligonucleotide
gaagtatttgggaacggcgaaaaaagtgtc

SEQ ID NO: 130504 - DNA, 30 bp, Artificial Sequence
  Synthetic oligonucleotide
cagagcgcttagcgtttaaaccatagtgtc

SEQ ID NO: 130505 - DNA, 30 bp, Artificial Sequence
  Synthetic oligonucleotide
acagagaagactgttgaccaggaacgtgtc

SEQ ID NO: 130506 - DNA, 30 bp, Artificial Sequence
  Synthetic oligonucleotide
tggcgaagtagcaaataattaacaggtgtc

SEQ ID NO: 130507 - DNA, 30 bp, Artificial Sequence
  Synthetic oligonucleotide
cgggttattgaacgtcaataggcaggtgtc

SEQ ID NO: 130508 - DNA, 30 bp, Artificial Sequence
  Synthetic oligonucleotide
tgggctcgatgtgtagcgggtagaggtgtc

SEQ ID NO: 130509 - DNA, 30 bp, Artificial Sequence
  Synthetic oligonucleotide
gcgagacttcccggaatgcgggccggtgtc

SEQ ID NO: 130510 - DNA, 30 bp, Artificial Sequence
  Synthetic oligonucleotide
cctgagagccacagtaaacaggactgtgtc

SEQ ID NO: 130511 - DNA, 30 bp, Artificial Sequence
  Synthetic oligonucleotide
ctttggggaaacatcgcaatgaattgtgtc

SEQ ID NO: 130512 - DNA, 30 bp, Artificial Sequence
  Synthetic oligonucleotide
ggttgaaaacgtctgggctgtaacattgtc

SEQ ID NO: 130513 - DNA, 30 bp, Artificial Sequence
  Synthetic oligonucleotide
ggaagtgacttctgcccaagccggattgtc

SEQ ID NO: 130514 - DNA, 30 bp, Artificial Sequence
  Synthetic oligonucleotide
ggcgtaacgtaccacggcatgcatattgtc

SEQ ID NO: 130515 - DNA, 30 bp, Artificial Sequence
  Synthetic oligonucleotide
ggcaccccgaagggcacggcaggtattgtc

SEQ ID NO: 130516 - DNA, 30 bp, Artificial Sequence
  Synthetic oligonucleotide
acatgaggaaacattcgaagatcgcttgtc

SEQ ID NO: 130517 - DNA, 30 bp, Artificial Sequence
  Synthetic oligonucleotide
gaatgaggaattatgttcaggtttcttgtc

SEQ ID NO: 130518 - DNA, 30 bp, Artificial Sequence
  Synthetic oligonucleotide
cgaatacttggaaactgacattacgttgtc

SEQ ID NO: 130519 - DNA, 30 bp, Artificial Sequence
  Synthetic oligonucleotide
ggcataaagacattatcaatcgccgttgtc

SEQ ID NO: 130520 - DNA, 30 bp, Artificial Sequence
  Synthetic oligonucleotide
ggcagacaacggtgaggtaacccctttgtc

SEQ ID NO: 130521 - DNA, 30 bp, Artificial Sequence
  Synthetic oligonucleotide
acgtgatgttttgggtctgtcacgtttgtc

SEQ ID NO: 130522 - DNA, 30 bp, Artificial Sequence
  Synthetic oligonucleotide
accagctgttaatcacgagagaggaaattc

SEQ ID NO: 130523 - DNA, 30 bp, Artificial Sequence
  Synthetic oligonucleotide
agttcgagcgacacatgcgcgatgaaattc

SEQ ID NO: 130524 - DNA, 30 bp, Artificial Sequence
  Synthetic oligonucleotide
acaagtggcgatcacccgtggcaacaattc

SEQ ID NO: 130525 - DNA, 30 bp, Artificial Sequence
  Synthetic oligonucleotide
aatgagtggagagtgatttggccacaattc

SEQ ID NO: 130526 - DNA, 30 bp, Artificial Sequence
  Synthetic oligonucleotide
ataaatacgatatgatcaaaatagcaattc

SEQ ID NO: 130527 - DNA, 30 bp, Artificial Sequence
  Synthetic oligonucleotide
gctggacccgtaaaacgtttccgcgaattc

SEQ ID NO: 130528 - DNA, 30 bp, Artificial Sequence
  Synthetic oligonucleotide
ctgtgtggggcgcaatttgttacggaattc

SEQ ID NO: 130529 - DNA, 30 bp, Artificial Sequence
  Synthetic oligonucleotide
ggagagaggcgaaaagttcggggggaattc

SEQ ID NO: 130530 - DNA, 30 bp, Artificial Sequence
  Synthetic oligonucleotide
ccctgagtgatacgtttcatacggtaattc

SEQ ID NO: 130531 - DNA, 30 bp, Artificial Sequence
  Synthetic oligonucleotide
gtaattcggagaaggaagaaagtttaattc

SEQ ID NO: 130532 - DNA, 30 bp, Artificial Sequence
  Synthetic oligonucleotide
catatattcttcacactcgagaacccattc

SEQ ID NO: 130533 - DNA, 30 bp, Artificial Sequence
  Synthetic oligonucleotide
cgaatgggcatccggtgtcctacagcattc

SEQ ID NO: 130534 - DNA, 30 bp, Artificial Sequence
  Synthetic oligonucleotide
aggcaaggatgcgacaatcaaagaagattc

SEQ ID NO: 130535 - DNA, 30 bp, Artificial Sequence
  Synthetic oligonucleotide
ggtattagtaggggaaacttgaccagattc

SEQ ID NO: 130536 - DNA, 30 bp, Artificial Sequence
  Synthetic oligonucleotide
gcaagcttcggctgaaatcctgagagattc

SEQ ID NO: 130537 - DNA, 30 bp, Artificial Sequence
  Synthetic oligonucleotide
aaaaaaacaccaggcttccaggagcgattc

SEQ ID NO: 130538 - DNA, 30 bp, Artificial Sequence
  Synthetic oligonucleotide
agctgatgttcatcgggggagatgggattc

SEQ ID NO: 130539 - DNA, 30 bp, Artificial Sequence
  Synthetic oligonucleotide
tgtaatgcgatacgcgtgctggtatgattc

SEQ ID NO: 130540 - DNA, 30 bp, Artificial Sequence
  Synthetic oligonucleotide
ctgcggtccgcgggatacacgttatgattc

SEQ ID NO: 130541 - DNA, 30 bp, Artificial Sequence
  Synthetic oligonucleotide
cctgctatcgtccgaggtgtttggtgattc

SEQ ID NO: 130542 - DNA, 30 bp, Artificial Sequence
  Synthetic oligonucleotide
gtgcagatggttgcgcgacatgattgattc

SEQ ID NO: 130543 - DNA, 30 bp, Artificial Sequence
  Synthetic oligonucleotide
tcgatgcaagcgagggccgacgtagtattc

SEQ ID NO: 130544 - DNA, 30 bp, Artificial Sequence
  Synthetic oligonucleotide
taggatggtaatccattacgatacgtattc

SEQ ID NO: 130545 - DNA, 30 bp, Artificial Sequence
  Synthetic oligonucleotide
gcggattccttcacgacacacaaattattc

SEQ ID NO: 130546 - DNA, 30 bp, Artificial Sequence
  Synthetic oligonucleotide
gctacgtaggatcgggagcctaaagacttc

SEQ ID NO: 130547 - DNA, 30 bp, Artificial Sequence
  Synthetic oligonucleotide
gtctaggccagtcgtgtttctcgagacttc

SEQ ID NO: 130548 - DNA, 30 bp, Artificial Sequence
  Synthetic oligonucleotide
tggttgcgattcgaggcaatctatgacttc

SEQ ID NO: 130549 - DNA, 30 bp, Artificial Sequence
  Synthetic oligonucleotide
ggcgcagagcgcatggagaactctgacttc

SEQ ID NO: 130550 - DNA, 30 bp, Artificial Sequence
  Synthetic oligonucleotide
tgcaggggtcatccactaatgaagtacttc

SEQ ID NO: 130551 - DNA, 30 bp, Artificial Sequence
  Synthetic oligonucleotide
tgaagaggggtagtcgcgagggtttacttc

SEQ ID NO: 130552 - DNA, 30 bp, Artificial Sequence
  Synthetic oligonucleotide
accactgcgcggagccaacataccaccttc

SEQ ID NO: 130553 - DNA, 30 bp, Artificial Sequence
  Synthetic oligonucleotide
aacgtcctcttcacggcggaaagcaccttc

SEQ ID NO: 130554 - DNA, 30 bp, Artificial Sequence
  Synthetic oligonucleotide
cgaggaattgccgaacgtctatatcccttc

SEQ ID NO: 130555 - DNA, 30 bp, Artificial Sequence
  Synthetic oligonucleotide
agtgctgataattgacataaatatgccttc

SEQ ID NO: 130556 - DNA, 30 bp, Artificial Sequence
  Synthetic oligonucleotide
tctctaaggaggcttcgtccaacgtccttc

SEQ ID NO: 130557 - DNA, 30 bp, Artificial Sequence
  Synthetic oligonucleotide
gacacacgagttcgtgtagaagcccgcttc

SEQ ID NO: 130558 - DNA, 30 bp, Artificial Sequence
  Synthetic oligonucleotide
agacaatcaccgtaacgtacacggcgcttc

SEQ ID NO: 130559 - DNA, 30 bp, Artificial Sequence
  Synthetic oligonucleotide
cgagcgtatataggatgatggcttcgcttc

SEQ ID NO: 130560 - DNA, 30 bp, Artificial Sequence
  Synthetic oligonucleotide
gcaaacaagcggacacctatagtaggcttc

SEQ ID NO: 130561 - DNA, 30 bp, Artificial Sequence
  Synthetic oligonucleotide
ctcaaggatgatagattacacaggggcttc

SEQ ID NO: 130562 - DNA, 30 bp, Artificial Sequence
  Synthetic oligonucleotide
tgactacgtctagggggttacgggtgcttc

SEQ ID NO: 130563 - DNA, 30 bp, Artificial Sequence
  Synthetic oligonucleotide
agagttcaagaaataaggtaagagatcttc

SEQ ID NO: 130564 - DNA, 30 bp, Artificial Sequence
  Synthetic oligonucleotide
acggtgctgcggcggtctacggtactcttc

SEQ ID NO: 130565 - DNA, 30 bp, Artificial Sequence
  Synthetic oligonucleotide
cgttgggtagtgggagatgcattcgtcttc

SEQ ID NO: 130566 - DNA, 30 bp, Artificial Sequence
  Synthetic oligonucleotide
acgatgagtattggttgcgccacggtcttc

SEQ ID NO: 130567 - DNA, 30 bp, Artificial Sequence
  Synthetic oligonucleotide
tatgggtgtgtgaaatgaaaccttgtcttc

SEQ ID NO: 130568 - DNA, 30 bp, Artificial Sequence
  Synthetic oligonucleotide
aaaggcgggaatcataagcagaaattcttc

SEQ ID NO: 130569 - DNA, 30 bp, Artificial Sequence
  Synthetic oligonucleotide
taccgtcgaagtttagcgatctcaaagttc

SEQ ID NO: 130570 - DNA, 30 bp, Artificial Sequence
  Synthetic oligonucleotide
tagttcggccgtcgggtattaaccaagttc

SEQ ID NO: 130571 - DNA, 30 bp, Artificial Sequence
  Synthetic oligonucleotide
cccttggctacctcaagcagttagaagttc

SEQ ID NO: 130572 - DNA, 30 bp, Artificial Sequence
  Synthetic oligonucleotide
aatggcgaaacattaggactcgctaagttc

SEQ ID NO: 130573 - DNA, 30 bp, Artificial Sequence
  Synthetic oligonucleotide
atcggataacaggcacaaccagcccagttc

SEQ ID NO: 130574 - DNA, 30 bp, Artificial Sequence
  Synthetic oligonucleotide
atggacgtcggtgagggacttaaatagttc

SEQ ID NO: 130575 - DNA, 30 bp, Artificial Sequence
  Synthetic oligonucleotide
ctggagctgagtcgctgttatctgtagttc

SEQ ID NO: 130576 - DNA, 30 bp, Artificial Sequence
  Synthetic oligonucleotide
gtctaatcgtgtcgctaaatgaattagttc

SEQ ID NO: 130577 - DNA, 30 bp, Artificial Sequence
  Synthetic oligonucleotide
gacacaagtgtccgaatttaaggaacgttc

SEQ ID NO: 130578 - DNA, 30 bp, Artificial Sequence
  Synthetic oligonucleotide
gacattcacagtgactcgaataatacgttc

SEQ ID NO: 130579 - DNA, 30 bp, Artificial Sequence
  Synthetic oligonucleotide
atgcagatcataagtcttaccactacgttc

SEQ ID NO: 130580 - DNA, 30 bp, Artificial Sequence
  Synthetic oligonucleotide
atgaatggaatccagaacgcgcgcccgttc

SEQ ID NO: 130581 - DNA, 30 bp, Artificial Sequence
  Synthetic oligonucleotide
tggacgagcgactgcataggatctccgttc

SEQ ID NO: 130582 - DNA, 30 bp, Artificial Sequence
  Synthetic oligonucleotide
gggataacgaaggaggtaccgagtccgttc

SEQ ID NO: 130583 - DNA, 30 bp, Artificial Sequence
  Synthetic oligonucleotide
aggacggagtagctgaagctgtttccgttc

SEQ ID NO: 130584 - DNA, 30 bp, Artificial Sequence
  Synthetic oligonucleotide
caggggtgacccaaagtcagccgggcgttc

SEQ ID NO: 130585 - DNA, 30 bp, Artificial Sequence
  Synthetic oligonucleotide
agatcgctgttaatcataccgtagtcgttc

SEQ ID NO: 130586 - DNA, 30 bp, Artificial Sequence
  Synthetic oligonucleotide
ttgaggaaagagccagccgccaattcgttc

SEQ ID NO: 130587 - DNA, 30 bp, Artificial Sequence
  Synthetic oligonucleotide
tacttacactctcttccgatcagttcgttc

SEQ ID NO: 130588 - DNA, 30 bp, Artificial Sequence
  Synthetic oligonucleotide
aagcccgtaacgccgaagggggaaaggttc

SEQ ID NO: 130589 - DNA, 30 bp, Artificial Sequence
  Synthetic oligonucleotide
acttggtggcgtggatcaacggggaggttc

SEQ ID NO: 130590 - DNA, 30 bp, Artificial Sequence
  Synthetic oligonucleotide
caagccggatggtacaaagaggataggttc

SEQ ID NO: 130591 - DNA, 30 bp, Artificial Sequence
  Synthetic oligonucleotide
cttgacacgctcttctcataccgccggttc

SEQ ID NO: 130592 - DNA, 30 bp, Artificial Sequence
  Synthetic oligonucleotide
aaggatctctatgcaggttagctccggttc

SEQ ID NO: 130593 - DNA, 30 bp, Artificial Sequence
  Synthetic oligonucleotide
gctaatctgtagttagacggatggcggttc

SEQ ID NO: 130594 - DNA, 30 bp, Artificial Sequence
  Synthetic oligonucleotide
tatgttggaagttcttaggagccagggttc

SEQ ID NO: 130595 - DNA, 30 bp, Artificial Sequence
  Synthetic oligonucleotide
gatgaacgttgcattaaatacgccgggttc

SEQ ID NO: 130596 - DNA, 30 bp, Artificial Sequence
  Synthetic oligonucleotide
gtaactaaacgatattcggggctcgggttc

SEQ ID NO: 130597 - DNA, 30 bp, Artificial Sequence
  Synthetic oligonucleotide
agaagatggctggaccatagcgcggggttc

SEQ ID NO: 130598 - DNA, 30 bp, Artificial Sequence
  Synthetic oligonucleotide
gtactgactgggttgcaagccgagtggttc

SEQ ID NO: 130599 - DNA, 30 bp, Artificial Sequence
  Synthetic oligonucleotide
aggctcggcgactacatccgttcgtggttc

SEQ ID NO: 130600 - DNA, 30 bp, Artificial Sequence
  Synthetic oligonucleotide
cgctcactaggctcgagatggtcgatgttc

SEQ ID NO: 130601 - DNA, 30 bp, Artificial Sequence
  Synthetic oligonucleotide
tagcgcatttctttgaaatattggatgttc

SEQ ID NO: 130602 - DNA, 30 bp, Artificial Sequence
  Synthetic oligonucleotide
cgagtgctaagaagacaatggtatatgttc

SEQ ID NO: 130603 - DNA, 30 bp, Artificial Sequence
  Synthetic oligonucleotide
agggacgtaatatgcaatcgtcggctgttc

SEQ ID NO: 130604 - DNA, 30 bp, Artificial Sequence
  Synthetic oligonucleotide
gaggcatgccatctcagggggtaagtgttc

SEQ ID NO: 130605 - DNA, 30 bp, Artificial Sequence
  Synthetic oligonucleotide
agccggatacggaaatggctcacagtgttc

SEQ ID NO: 130606 - DNA, 30 bp, Artificial Sequence
  Synthetic oligonucleotide
agcaatgattgttgattgttgaccgtgttc

SEQ ID NO: 130607 - DNA, 30 bp, Artificial Sequence
  Synthetic oligonucleotide
caagtgcgcaaacacgggaactgccatttc

SEQ ID NO: 130608 - DNA, 30 bp, Artificial Sequence
  Synthetic oligonucleotide
tcatcaggggccgagagtagttaggatttc

SEQ ID NO: 130609 - DNA, 30 bp, Artificial Sequence
  Synthetic oligonucleotide
ggtggaagaacgtaacttgcaccatatttc

SEQ ID NO: 130610 - DNA, 30 bp, Artificial Sequence
  Synthetic oligonucleotide
acaataggatccgtcggcgtaatatatttc

SEQ ID NO: 130611 - DNA, 30 bp, Artificial Sequence
  Synthetic oligonucleotide
ctaggggaatcgcgagagatgttttatttc

SEQ ID NO: 130612 - DNA, 30 bp, Artificial Sequence
  Synthetic oligonucleotide
tcataagggcgcgtgcgagtgtgaactttc

SEQ ID NO: 130613 - DNA, 30 bp, Artificial Sequence
  Synthetic oligonucleotide
taacatctagctatcgtatgcatccctttc

SEQ ID NO: 130614 - DNA, 30 bp, Artificial Sequence
  Synthetic oligonucleotide
ctggaggtacctccgaccagcaaggctttc

SEQ ID NO: 130615 - DNA, 30 bp, Artificial Sequence
  Synthetic oligonucleotide
ggtaacaagtgtgccacccaaccggctttc

SEQ ID NO: 130616 - DNA, 30 bp, Artificial Sequence
  Synthetic oligonucleotide
aggcgagttgtgtcgaggtcgcggagtttc

SEQ ID NO: 130617 - DNA, 30 bp, Artificial Sequence
  Synthetic oligonucleotide
agagagaacgggtcaagacagaatcgtttc

SEQ ID NO: 130618 - DNA, 30 bp, Artificial Sequence
  Synthetic oligonucleotide
aacaccagtttagtcgcgaggtgctgtttc

SEQ ID NO: 130619 - DNA, 30 bp, Artificial Sequence
  Synthetic oligonucleotide
tgcggtccgtgtatagtcggggagtgtttc

SEQ ID NO: 130620 - DNA, 30 bp, Artificial Sequence
  Synthetic oligonucleotide
cacgcaagtcaggccgggtgcgctattttc

SEQ ID NO: 130621 - DNA, 30 bp, Artificial Sequence
  Synthetic oligonucleotide
accgtttaagcagaggaggcggcgtttttc

SEQ ID NO: 130622 - DNA, 30 bp, Artificial Sequence
  Synthetic oligonucleotide
acgatggaatgactgctcctgctaaaaaag

SEQ ID NO: 130623 - DNA, 30 bp, Artificial Sequence
  Synthetic oligonucleotide
acgccgaattttatgccgggaaacaaaaag

SEQ ID NO: 130624 - DNA, 30 bp, Artificial Sequence
  Synthetic oligonucleotide
taacaaatagaaagagcctagcgcaaaaag

SEQ ID NO: 130625 - DNA, 30 bp, Artificial Sequence
  Synthetic oligonucleotide
tctaattcgtatacatgagataagaaaaag

SEQ ID NO: 130626 - DNA, 30 bp, Artificial Sequence
  Synthetic oligonucleotide
ctatggatcattcgaccaccttagaaaaag

SEQ ID NO: 130627 - DNA, 30 bp, Artificial Sequence
  Synthetic oligonucleotide
ttctacggtatgagcacaacatggaaaaag

SEQ ID NO: 130628 - DNA, 30 bp, Artificial Sequence
  Synthetic oligonucleotide
gtttcattacccgtaaaatccgtgaaaaag

SEQ ID NO: 130629 - DNA, 30 bp, Artificial Sequence
  Synthetic oligonucleotide
ccttgaaaaggaatgtgggccggtaaaaag

SEQ ID NO: 130630 - DNA, 30 bp, Artificial Sequence
  Synthetic oligonucleotide
ggtcattaaacgccgataaaaagacaaaag

SEQ ID NO: 130631 - DNA, 30 bp, Artificial Sequence
  Synthetic oligonucleotide
acacgaccccctatgggaaacggacaaaag

SEQ ID NO: 130632 - DNA, 30 bp, Artificial Sequence
  Synthetic oligonucleotide
atcttcgtcagtgggtaatggggacaaaag

SEQ ID NO: 130633 - DNA, 30 bp, Artificial Sequence
  Synthetic oligonucleotide
acataatgttatttcacggagatacaaaag

SEQ ID NO: 130634 - DNA, 30 bp, Artificial Sequence
  Synthetic oligonucleotide
ggcgagatgagttaaagggtttcccaaaag

SEQ ID NO: 130635 - DNA, 30 bp, Artificial Sequence
  Synthetic oligonucleotide
ggatctatgtcgagggatcgcctccaaaag

SEQ ID NO: 130636 - DNA, 30 bp, Artificial Sequence
  Synthetic oligonucleotide
accgacgtgactgaccaatgtaagcaaaag

SEQ ID NO: 130637 - DNA, 30 bp, Artificial Sequence
  Synthetic oligonucleotide
aagagctcggtaaagggtgcgcggcaaaag

SEQ ID NO: 130638 - DNA, 30 bp, Artificial Sequence
  Synthetic oligonucleotide
gagaaagaacgcctgcggggggctcaaaag

SEQ ID NO: 130639 - DNA, 30 bp, Artificial Sequence
  Synthetic oligonucleotide
atcggaacgcacgagtgatggagagaaaag

SEQ ID NO: 130640 - DNA, 30 bp, Artificial Sequence
  Synthetic oligonucleotide
tcaatagagacattgcaggaaaacgaaaag

SEQ ID NO: 130641 - DNA, 30 bp, Artificial Sequence
  Synthetic oligonucleotide
tgtaagccctgtgggcggtgtctcgaaaag

SEQ ID NO: 130642 - DNA, 30 bp, Artificial Sequence
  Synthetic oligonucleotide
tagtgtttaaaacggagaggctatgaaaag

SEQ ID NO: 130643 - DNA, 30 bp, Artificial Sequence
  Synthetic oligonucleotide
cggtcccaaattaaggtactcaagtaaaag

SEQ ID NO: 130644 - DNA, 30 bp, Artificial Sequence
  Synthetic oligonucleotide
ccttagtaatccgagtgtgatacaacaaag

SEQ ID NO: 130645 - DNA, 30 bp, Artificial Sequence
  Synthetic oligonucleotide
ggtgaaagattgaagaccgcttacacaaag

SEQ ID NO: 130646 - DNA, 30 bp, Artificial Sequence
  Synthetic oligonucleotide
ttgcataggagcatggacggggagacaaag

SEQ ID NO: 130647 - DNA, 30 bp, Artificial Sequence
  Synthetic oligonucleotide
aaaactagcataggtcgcgacgtaccaaag

SEQ ID NO: 130648 - DNA, 30 bp, Artificial Sequence
  Synthetic oligonucleotide
gtggataaaaggtggctcagttacccaaag

SEQ ID NO: 130649 - DNA, 30 bp, Artificial Sequence
  Synthetic oligonucleotide
gaataacaaaacgcttgcgtgacgccaaag

SEQ ID NO: 130650 - DNA, 30 bp, Artificial Sequence
  Synthetic oligonucleotide
tcgacggccgagaactctgtaccgccaaag

SEQ ID NO: 130651 - DNA, 30 bp, Artificial Sequence
  Synthetic oligonucleotide
ggattttatcaaagtacatttaggccaaag

SEQ ID NO: 130652 - DNA, 30 bp, Artificial Sequence
  Synthetic oligonucleotide
atcactaggcaatcgcccccgcctccaaag

SEQ ID NO: 130653 - DNA, 30 bp, Artificial Sequence
  Synthetic oligonucleotide
aactcaccggcctaaacaacaaaagcaaag

SEQ ID NO: 130654 - DNA, 30 bp, Artificial Sequence
  Synthetic oligonucleotide
caaataaatatagagccgaaattagcaaag

SEQ ID NO: 130655 - DNA, 30 bp, Artificial Sequence
  Synthetic oligonucleotide
accagtgcgtcagtccgcacacacgcaaag

SEQ ID NO: 130656 - DNA, 30 bp, Artificial Sequence
  Synthetic oligonucleotide
ctacaaaagtgattagtccatcaggcaaag

SEQ ID NO: 130657 - DNA, 30 bp, Artificial Sequence
  Synthetic oligonucleotide
gacagatgattttgttcaactgaggcaaag

SEQ ID NO: 130658 - DNA, 30 bp, Artificial Sequence
  Synthetic oligonucleotide
gggctcgtttgggacttgcgagctgcaaag

SEQ ID NO: 130659 - DNA, 30 bp, Artificial Sequence
  Synthetic oligonucleotide
cgtacaaacggaatccttcgggaatcaaag

SEQ ID NO: 130660 - DNA, 30 bp, Artificial Sequence
  Synthetic oligonucleotide
cgacacgcatcattgggacaagcatcaaag

SEQ ID NO: 130661 - DNA, 30 bp, Artificial Sequence
  Synthetic oligonucleotide
atcctactcctcaacctaaattcatcaaag

SEQ ID NO: 130662 - DNA, 30 bp, Artificial Sequence
  Synthetic oligonucleotide
gaggcgcgggccctgcgatacaattcaaag

SEQ ID NO: 130663 - DNA, 30 bp, Artificial Sequence
  Synthetic oligonucleotide
atagatagcaatttacgctccgacagaaag

SEQ ID NO: 130664 - DNA, 30 bp, Artificial Sequence
  Synthetic oligonucleotide
accggtaaccagtcgttatgtagcagaaag

SEQ ID NO: 130665 - DNA, 30 bp, Artificial Sequence
  Synthetic oligonucleotide
gcccgcgccgactacgcaacgggcagaaag

SEQ ID NO: 130666 - DNA, 30 bp, Artificial Sequence
  Synthetic oligonucleotide
catccaagtcttatcggatacacgagaaag

SEQ ID NO: 130667 - DNA, 30 bp, Artificial Sequence
  Synthetic oligonucleotide
cacattggacgtatcaggtagaatagaaag

SEQ ID NO: 130668 - DNA, 30 bp, Artificial Sequence
  Synthetic oligonucleotide
atctttcattcgtgcgaaagccaccgaaag

SEQ ID NO: 130669 - DNA, 30 bp, Artificial Sequence
  Synthetic oligonucleotide
actttatcagcataagccgtgccccgaaag

SEQ ID NO: 130670 - DNA, 30 bp, Artificial Sequence
  Synthetic oligonucleotide
gagaagccccagattgataggcatcgaaag

SEQ ID NO: 130671 - DNA, 30 bp, Artificial Sequence
  Synthetic oligonucleotide
ttgaggaagtatcagcatatgcatcgaaag

SEQ ID NO: 130672 - DNA, 30 bp, Artificial Sequence
  Synthetic oligonucleotide
tgcagtttacctgatagtgggccaggaaag

SEQ ID NO: 130673 - DNA, 30 bp, Artificial Sequence
  Synthetic oligonucleotide
ccctaacaggaaatctggtaagcaggaaag

SEQ ID NO: 130674 - DNA, 30 bp, Artificial Sequence
  Synthetic oligonucleotide
aaaaggtaggtggccggccattacggaaag

SEQ ID NO: 130675 - DNA, 30 bp, Artificial Sequence
  Synthetic oligonucleotide
caggaactgcgtctcggctcttcgggaaag

SEQ ID NO: 130676 - DNA, 30 bp, Artificial Sequence
  Synthetic oligonucleotide
tgcagccgaagaacgtcgtccctgggaaag

SEQ ID NO: 130677 - DNA, 30 bp, Artificial Sequence
  Synthetic oligonucleotide
ttgatcaaccaactctgtgtctgtggaaag

SEQ ID NO: 130678 - DNA, 30 bp, Artificial Sequence
  Synthetic oligonucleotide
actaagattagtccagcgtccgaatgaaag

SEQ ID NO: 130679 - DNA, 30 bp, Artificial Sequence
  Synthetic oligonucleotide
agggccatgaaagttttggtcctatgaaag

SEQ ID NO: 130680 - DNA, 30 bp, Artificial Sequence
  Synthetic oligonucleotide
acggccgacagttttaactatgcgtgaaag

SEQ ID NO: 130681 - DNA, 30 bp, Artificial Sequence
  Synthetic oligonucleotide
atgttaaacgttttatttctccattgaaag

SEQ ID NO: 130682 - DNA, 30 bp, Artificial Sequence
  Synthetic oligonucleotide
ggatgtcgtatcgccaacaccggttgaaag

SEQ ID NO: 130683 - DNA, 30 bp, Artificial Sequence
  Synthetic oligonucleotide
tattggatcaccggacggtagttttgaaag

SEQ ID NO: 130684 - DNA, 30 bp, Artificial Sequence
  Synthetic oligonucleotide
tcatttaaggatgaccgaccaaagataaag

SEQ ID NO: 130685 - DNA, 30 bp, Artificial Sequence
  Synthetic oligonucleotide
tagtagtgagtccgtagggcacagataaag

SEQ ID NO: 130686 - DNA, 30 bp, Artificial Sequence
  Synthetic oligonucleotide
gagcgtggagatgagagtgtggctataaag

SEQ ID NO: 130687 - DNA, 30 bp, Artificial Sequence
  Synthetic oligonucleotide
cgtttgtagtgcgacgggtatgctataaag

SEQ ID NO: 130688 - DNA, 30 bp, Artificial Sequence
  Synthetic oligonucleotide
cgacgagtttatggcatttaaccagtaaag

SEQ ID NO: 130689 - DNA, 30 bp, Artificial Sequence
  Synthetic oligonucleotide
gggcgcaaagcgtccccgcgaccagtaaag

SEQ ID NO: 130690 - DNA, 30 bp, Artificial Sequence
  Synthetic oligonucleotide
gttagttcgaatagatagtagtacgtaaag

SEQ ID NO: 130691 - DNA, 30 bp, Artificial Sequence
  Synthetic oligonucleotide
taaaccggagtaccgaggagtgtcgtaaag

SEQ ID NO: 130692 - DNA, 30 bp, Artificial Sequence
  Synthetic oligonucleotide
acgcaatgatcaaggctctgccaggtaaag

SEQ ID NO: 130693 - DNA, 30 bp, Artificial Sequence
  Synthetic oligonucleotide
atagggtggttagctcccaagatggtaaag

SEQ ID NO: 130694 - DNA, 30 bp, Artificial Sequence
  Synthetic oligonucleotide
tgggcctataccgatgccccagaattaaag

SEQ ID NO: 130695 - DNA, 30 bp, Artificial Sequence
  Synthetic oligonucleotide
ccgtctcgagtggactacgttccattaaag

SEQ ID NO: 130696 - DNA, 30 bp, Artificial Sequence
  Synthetic oligonucleotide
ggtatcaattcatcttggaaaagcttaaag

SEQ ID NO: 130697 - DNA, 30 bp, Artificial Sequence
  Synthetic oligonucleotide
ggtgtacataactgggatacaaagttaaag

SEQ ID NO: 130698 - DNA, 30 bp, Artificial Sequence
  Synthetic oligonucleotide
gcggacctatatgtgtcggaccagttaaag

SEQ ID NO: 130699 - DNA, 30 bp, Artificial Sequence
  Synthetic oligonucleotide
ggaactctaaggattgtaaaggttttaaag

SEQ ID NO: 130700 - DNA, 30 bp, Artificial Sequence
  Synthetic oligonucleotide
tctcaagttgaccctacacgaacaaacaag

SEQ ID NO: 130701 - DNA, 30 bp, Artificial Sequence
  Synthetic oligonucleotide
ctgactacattaatagtcgattgaaacaag

SEQ ID NO: 130702 - DNA, 30 bp, Artificial Sequence
  Synthetic oligonucleotide
tccgcaagtaagaacgggaagcacaacaag

SEQ ID NO: 130703 - DNA, 30 bp, Artificial Sequence
  Synthetic oligonucleotide
ttgaacaggggggtccaatagcgtaacaag

SEQ ID NO: 130704 - DNA, 30 bp, Artificial Sequence
  Synthetic oligonucleotide
ccaaatctattggtgatcatggttaacaag

SEQ ID NO: 130705 - DNA, 30 bp, Artificial Sequence
  Synthetic oligonucleotide
agagatccgcaatttttgcggaaacacaag

SEQ ID NO: 130706 - DNA, 30 bp, Artificial Sequence
  Synthetic oligonucleotide
ggctttaaggcattatttcaggaccacaag

SEQ ID NO: 130707 - DNA, 30 bp, Artificial Sequence
  Synthetic oligonucleotide
tggcctagtatacctaggagcgctcacaag

SEQ ID NO: 130708 - DNA, 30 bp, Artificial Sequence
  Synthetic oligonucleotide
ccgatgggtcgcttccgtactaacgacaag

SEQ ID NO: 130709 - DNA, 30 bp, Artificial Sequence
  Synthetic oligonucleotide
accgcgagaagggaaataggattggacaag

SEQ ID NO: 130710 - DNA, 30 bp, Artificial Sequence
  Synthetic oligonucleotide
atcgatgaatgcttggcgaaagtctacaag

SEQ ID NO: 130711 - DNA, 30 bp, Artificial Sequence
  Synthetic oligonucleotide
ccgctctgaggaggaagatccgtctacaag

SEQ ID NO: 130712 - DNA, 30 bp, Artificial Sequence
  Synthetic oligonucleotide
tcatactcccttcctgctagtccgtacaag

SEQ ID NO: 130713 - DNA, 30 bp, Artificial Sequence
  Synthetic oligonucleotide
attgcggtgtgctgtccatgagcttacaag

SEQ ID NO: 130714 - DNA, 30 bp, Artificial Sequence
  Synthetic oligonucleotide
cgcaatggacccgcatggtcactaaccaag

SEQ ID NO: 130715 - DNA, 30 bp, Artificial Sequence
  Synthetic oligonucleotide
cgcttattcgacaactacgtttcgaccaag

SEQ ID NO: 130716 - DNA, 30 bp, Artificial Sequence
  Synthetic oligonucleotide
cttcccaatatagtcgtgtaacatcccaag

SEQ ID NO: 130717 - DNA, 30 bp, Artificial Sequence
  Synthetic oligonucleotide
gcacgctggtatatgatcctctaagccaag

SEQ ID NO: 130718 - DNA, 30 bp, Artificial Sequence
  Synthetic oligonucleotide
cgcgaaaatatttttatcgcatcagccaag

SEQ ID NO: 130719 - DNA, 30 bp, Artificial Sequence
  Synthetic oligonucleotide
atagccaggtttacatcagtgctggccaag

SEQ ID NO: 130720 - DNA, 30 bp, Artificial Sequence
  Synthetic oligonucleotide
ccataacttaggtatggccgaccatccaag

SEQ ID NO: 130721 - DNA, 30 bp, Artificial Sequence
  Synthetic oligonucleotide
cggattggttgaggacttgtctgatccaag

SEQ ID NO: 130722 - DNA, 30 bp, Artificial Sequence
  Synthetic oligonucleotide
agtgcatgttcagggtgatggacgtccaag

SEQ ID NO: 130723 - DNA, 30 bp, Artificial Sequence
  Synthetic oligonucleotide
aacctgtactggtaacgtgctagttccaag

SEQ ID NO: 130724 - DNA, 30 bp, Artificial Sequence
  Synthetic oligonucleotide
aacgccggtaaatgcgtttaggtttccaag

SEQ ID NO: 130725 - DNA, 30 bp, Artificial Sequence
  Synthetic oligonucleotide
tcaatttagctcccgcgagtgttttccaag

SEQ ID NO: 130726 - DNA, 30 bp, Artificial Sequence
  Synthetic oligonucleotide
agctgacacgtgatgggccccaaaagcaag

SEQ ID NO: 130727 - DNA, 30 bp, Artificial Sequence
  Synthetic oligonucleotide
agtaacgggacatgttgtttcaacagcaag

SEQ ID NO: 130728 - DNA, 30 bp, Artificial Sequence
  Synthetic oligonucleotide
aagggcccgatttaaatctatgacagcaag

SEQ ID NO: 130729 - DNA, 30 bp, Artificial Sequence
  Synthetic oligonucleotide
ggttgaaagcgccaacccaatctcagcaag

SEQ ID NO: 130730 - DNA, 30 bp, Artificial Sequence
  Synthetic oligonucleotide
ttcaacggagtgtgaaagaagacgagcaag

SEQ ID NO: 130731 - DNA, 30 bp, Artificial Sequence
  Synthetic oligonucleotide
gttaggggagaagccacgctcttgagcaag

SEQ ID NO: 130732 - DNA, 31 bp, Artificial Sequence
  Synthetic oligonucleotide
ggtggggtaacaattaacgcgtcctagcaag

SEQ ID NO: 130733 - DNA, 30 bp, Artificial Sequence
  Synthetic oligonucleotide
tccactgtagggccgatcgctattagcaag

SEQ ID NO: 130734 - DNA, 30 bp, Artificial Sequence
  Synthetic oligonucleotide
cgcttaaccttgccaagggccaaccgcaag

SEQ ID NO: 130735 - DNA, 30 bp, Artificial Sequence
  Synthetic oligonucleotide
ttgggtcaatgactagtaagaacaggcaag

SEQ ID NO: 130736 - DNA, 30 bp, Artificial Sequence
  Synthetic oligonucleotide
tgagggggtcgtcgccatttgtgaggcaag

SEQ ID NO: 130737 - DNA, 30 bp, Artificial Sequence
  Synthetic oligonucleotide
ggccgtggtacaatagttgtctacggcaag

SEQ ID NO: 130738 - DNA, 30 bp, Artificial Sequence
  Synthetic oligonucleotide
gactccatagttgtgcaagcaaagggcaag

SEQ ID NO: 130739 - DNA, 30 bp, Artificial Sequence
  Synthetic oligonucleotide
tggccgttcgtttggttaggtactggcaag

SEQ ID NO: 130740 - DNA, 30 bp, Artificial Sequence
  Synthetic oligonucleotide
ataaagaaagatcatgttaaggaatgcaag

SEQ ID NO: 130741 - DNA, 30 bp, Artificial Sequence
  Synthetic oligonucleotide
agtctataactggggaatgctatctgcaag

SEQ ID NO: 130742 - DNA, 30 bp, Artificial Sequence
  Synthetic oligonucleotide
ggggactatacagacgggttactctgcaag

SEQ ID NO: 130743 - DNA, 30 bp, Artificial Sequence
  Synthetic oligonucleotide
cgtagcagtaccgtcgttaagttttgcaag

SEQ ID NO: 130744 - DNA, 30 bp, Artificial Sequence
  Synthetic oligonucleotide
aagagcacagctggtttattaataatcaag

SEQ ID NO: 130745 - DNA, 30 bp, Artificial Sequence
  Synthetic oligonucleotide
tgcaatctgcgtgagtcatcggcgatcaag

SEQ ID NO: 130746 - DNA, 30 bp, Artificial Sequence
  Synthetic oligonucleotide
agaacctgagcttcttctctcatcgtcaag

SEQ ID NO: 130747 - DNA, 30 bp, Artificial Sequence
  Synthetic oligonucleotide
cccatttgctcggtcaagttccaggtcaag

SEQ ID NO: 130748 - DNA, 30 bp, Artificial Sequence
  Synthetic oligonucleotide
cctgactatatagcaataagtacggtcaag

SEQ ID NO: 130749 - DNA, 30 bp, Artificial Sequence
  Synthetic oligonucleotide
catctagggtatttggcatccgctgtcaag

SEQ ID NO: 130750 - DNA, 30 bp, Artificial Sequence
  Synthetic oligonucleotide
ctaactcttgtggcctggatccgtgtcaag

SEQ ID NO: 130751 - DNA, 30 bp, Artificial Sequence
  Synthetic oligonucleotide
gaagcccgccaccgcgaaagcacattcaag

SEQ ID NO: 130752 - DNA, 30 bp, Artificial Sequence
  Synthetic oligonucleotide
gaggtgcattataaaacagtatcattcaag

SEQ ID NO: 130753 - DNA, 30 bp, Artificial Sequence
  Synthetic oligonucleotide
tgccaggttcaaaagccaatccgattcaag

SEQ ID NO: 130754 - DNA, 30 bp, Artificial Sequence
  Synthetic oligonucleotide
cggttcttctggagagctggatagttcaag

SEQ ID NO: 130755 - DNA, 30 bp, Artificial Sequence
  Synthetic oligonucleotide
gaggctacgataaggtagggtcggttcaag

SEQ ID NO: 130756 - DNA, 30 bp, Artificial Sequence
  Synthetic oligonucleotide
cctatgtgcgttaatcgcatctatttcaag

SEQ ID NO: 130757 - DNA, 30 bp, Artificial Sequence
  Synthetic oligonucleotide
agcgatcaagctactcatggacttttcaag

SEQ ID NO: 130758 - DNA, 30 bp, Artificial Sequence
  Synthetic oligonucleotide
tcggtccatcggaaaatacgtggaaagaag

SEQ ID NO: 130759 - DNA, 30 bp, Artificial Sequence
  Synthetic oligonucleotide
gcctcaagagtcgaatattgctacaagaag

SEQ ID NO: 130760 - DNA, 31 bp, Artificial Sequence
  Synthetic oligonucleotide
cttactattggcgatccaggcaactaagaag

SEQ ID NO: 130761 - DNA, 30 bp, Artificial Sequence
  Synthetic oligonucleotide
ctcctcaccctatatataacgagtaagaag

SEQ ID NO: 130762 - DNA, 30 bp, Artificial Sequence
  Synthetic oligonucleotide
cataagtcgtcttttgtcagttgtaagaag

SEQ ID NO: 130763 - DNA, 30 bp, Artificial Sequence
  Synthetic oligonucleotide
tcagaagtcctattccaggccaaacagaag

SEQ ID NO: 130764 - DNA, 30 bp, Artificial Sequence
  Synthetic oligonucleotide
attagagtcaattcacaggttggacagaag

SEQ ID NO: 130765 - DNA, 30 bp, Artificial Sequence
  Synthetic oligonucleotide
ctctgctgcgttctgactgcctaccagaag

SEQ ID NO: 130766 - DNA, 30 bp, Artificial Sequence
  Synthetic oligonucleotide
gacagaattaaccgcgcaaaatatcagaag

SEQ ID NO: 130767 - DNA, 30 bp, Artificial Sequence
  Synthetic oligonucleotide
tagggacgagttagtcaggtagccgagaag

SEQ ID NO: 130768 - DNA, 30 bp, Artificial Sequence
  Synthetic oligonucleotide
tgtcgtgcgtcgaatgtgggtttcgagaag

SEQ ID NO: 130769 - DNA, 30 bp, Artificial Sequence
  Synthetic oligonucleotide
gggctagtagcggataagttggcggagaag

SEQ ID NO: 130770 - DNA, 30 bp, Artificial Sequence
  Synthetic oligonucleotide
atcactatggcggatccggcgttggagaag

SEQ ID NO: 130771 - DNA, 30 bp, Artificial Sequence
  Synthetic oligonucleotide
tacgtgccgctacacatttactgatagaag

SEQ ID NO: 130772 - DNA, 30 bp, Artificial Sequence
  Synthetic oligonucleotide
tccatcactcaattaccttcagtatagaag

SEQ ID NO: 130773 - DNA, 30 bp, Artificial Sequence
  Synthetic oligonucleotide
agcatcctggcgaactattaggcctagaag

SEQ ID NO: 130774 - DNA, 30 bp, Artificial Sequence
  Synthetic oligonucleotide
ttggtgcagactaaaacaacgtattagaag

SEQ ID NO: 130775 - DNA, 30 bp, Artificial Sequence
  Synthetic oligonucleotide
atcgtaccattacttatgaaagaaacgaag

SEQ ID NO: 130776 - DNA, 30 bp, Artificial Sequence
  Synthetic oligonucleotide
cataggctgggggaggggtatagaacgaag

SEQ ID NO: 130777 - DNA, 30 bp, Artificial Sequence
  Synthetic oligonucleotide
tcgagtggaatcaagttccaaattacgaag

SEQ ID NO: 130778 - DNA, 30 bp, Artificial Sequence
  Synthetic oligonucleotide
agggttttaccatcgatagactttacgaag

SEQ ID NO: 130779 - DNA, 30 bp, Artificial Sequence
  Synthetic oligonucleotide
tggttcaaggtcacggaagatcctccgaag

SEQ ID NO: 130780 - DNA, 30 bp, Artificial Sequence
  Synthetic oligonucleotide
gggccgcatcaaggagaaggtcgcgcgaag

SEQ ID NO: 130781 - DNA, 30 bp, Artificial Sequence
  Synthetic oligonucleotide
accccgcgattagctcgtgtataggcgaag

SEQ ID NO: 130782 - DNA, 30 bp, Artificial Sequence
  Synthetic oligonucleotide
attatacgtgtcaggatgcggagggcgaag

SEQ ID NO: 130783 - DNA, 30 bp, Artificial Sequence
  Synthetic oligonucleotide
cttatgcagttcgaccgagagggtgcgaag

SEQ ID NO: 130784 - DNA, 30 bp, Artificial Sequence
  Synthetic oligonucleotide
agcgaggttggcgtgttaggtatatcgaag

SEQ ID NO: 130785 - DNA, 30 bp, Artificial Sequence
  Synthetic oligonucleotide
agggttcgatgaatggtcaaattcaggaag

SEQ ID NO: 130786 - DNA, 30 bp, Artificial Sequence
  Synthetic oligonucleotide
agccgcagctccgagcaaatgtagaggaag

SEQ ID NO: 130787 - DNA, 30 bp, Artificial Sequence
  Synthetic oligonucleotide
aaagcctaatgcacagtaatgatgaggaag

SEQ ID NO: 130788 - DNA, 30 bp, Artificial Sequence
  Synthetic oligonucleotide
cggaggcgtcgaggtatactagctaggaag

SEQ ID NO: 130789 - DNA, 30 bp, Artificial Sequence
  Synthetic oligonucleotide
ggtagcgttaacttacaagagccacggaag

SEQ ID NO: 130790 - DNA, 30 bp, Artificial Sequence
  Synthetic oligonucleotide
cgacttgatctcactcgagatacccggaag

SEQ ID NO: 130791 - DNA, 30 bp, Artificial Sequence
  Synthetic oligonucleotide
ggctacgcagtagggtgaggtgggcggaag

SEQ ID NO: 130792 - DNA, 30 bp, Artificial Sequence
  Synthetic oligonucleotide
atctcggggtttgtactccgggctcggaag

SEQ ID NO: 130793 - DNA, 30 bp, Artificial Sequence
  Synthetic oligonucleotide
ctcaagttagactcagggctgtaagggaag

SEQ ID NO: 130794 - DNA, 30 bp, Artificial Sequence
  Synthetic oligonucleotide
gcttcaggggaaactccagggagggggaag

SEQ ID NO: 130795 - DNA, 30 bp, Artificial Sequence
  Synthetic oligonucleotide
aatagaacccgtagggccaaacgggggaag

SEQ ID NO: 130796 - DNA, 30 bp, Artificial Sequence
  Synthetic oligonucleotide
aacccggcaagcggatacatcgtggggaag

SEQ ID NO: 130797 - DNA, 30 bp, Artificial Sequence
  Synthetic oligonucleotide
aggatcatggttcgccggtgtttggggaag

SEQ ID NO: 130798 - DNA, 30 bp, Artificial Sequence
  Synthetic oligonucleotide
gggtcatacctgcgggctggctgtgggaag

SEQ ID NO: 130799 - DNA, 30 bp, Artificial Sequence
  Synthetic oligonucleotide
agtgccgaattattcatcgaggcctggaag

SEQ ID NO: 130800 - DNA, 30 bp, Artificial Sequence
  Synthetic oligonucleotide
gattagctctcgaacctcggtagctggaag

SEQ ID NO: 130801 - DNA, 30 bp, Artificial Sequence
  Synthetic oligonucleotide
cgagaggcccgggggcaagtttccatgaag

SEQ ID NO: 130802 - DNA, 31 bp, Artificial Sequence
  Synthetic oligonucleotide
accataatcggagttttccgcgttcatgaag

SEQ ID NO: 130803 - DNA, 30 bp, Artificial Sequence
  Synthetic oligonucleotide
acacacacttgcctgtccattgggatgaag

SEQ ID NO: 130804 - DNA, 30 bp, Artificial Sequence
  Synthetic oligonucleotide
cgattatggtgatcgaaactttatatgaag

SEQ ID NO: 130805 - DNA, 30 bp, Artificial Sequence
  Synthetic oligonucleotide
ggctaccgccagcacaaaccgtctatgaag

SEQ ID NO: 130806 - DNA, 30 bp, Artificial Sequence
  Synthetic oligonucleotide
gcagcaaaaagagcgaggcccagtatgaag

SEQ ID NO: 130807 - DNA, 30 bp, Artificial Sequence
  Synthetic oligonucleotide
gataaggccggcaacttccgcgcactgaag

SEQ ID NO: 130808 - DNA, 30 bp, Artificial Sequence
  Synthetic oligonucleotide
tgtatcgggcgataatccattcgactgaag

SEQ ID NO: 130809 - DNA, 30 bp, Artificial Sequence
  Synthetic oligonucleotide
aaactccgacaccagtaggcgcacctgaag

SEQ ID NO: 130810 - DNA, 30 bp, Artificial Sequence
  Synthetic oligonucleotide
atcgggtgccaagatttgaaagctctgaag

SEQ ID NO: 130811 - DNA, 30 bp, Artificial Sequence
  Synthetic oligonucleotide
cattagcggggcaaattaccgtctctgaag

SEQ ID NO: 130812 - DNA, 30 bp, Artificial Sequence
  Synthetic oligonucleotide
cgatactgagtgaaattaccgtttctgaag

SEQ ID NO: 130813 - DNA, 30 bp, Artificial Sequence
  Synthetic oligonucleotide
actccctcacggaggcagtgataagtgaag

SEQ ID NO: 130814 - DNA, 30 bp, Artificial Sequence
  Synthetic oligonucleotide
ggcgacatagttgcggtagcagcagtgaag

SEQ ID NO: 130815 - DNA, 30 bp, Artificial Sequence
  Synthetic oligonucleotide
tagtattgagggaaccgcaccctcgtgaag

SEQ ID NO: 130816 - DNA, 30 bp, Artificial Sequence
  Synthetic oligonucleotide
tcgaatacaagacgtaccctccctgtgaag

SEQ ID NO: 130817 - DNA, 30 bp, Artificial Sequence
  Synthetic oligonucleotide
taacgttgggcacggtaaaggcttgtgaag

SEQ ID NO: 130818 - DNA, 30 bp, Artificial Sequence
  Synthetic oligonucleotide
tccatcaagattgtggatatacgattgaag

SEQ ID NO: 130819 - DNA, 30 bp, Artificial Sequence
  Synthetic oligonucleotide
tcggggtaaacttctagagcatgattgaag

SEQ ID NO: 130820 - DNA, 30 bp, Artificial Sequence
  Synthetic oligonucleotide
taacgagtaccgctgtcttgctacttgaag

SEQ ID NO: 130821 - DNA, 30 bp, Artificial Sequence
  Synthetic oligonucleotide
aagcgtctacgataacataaaaccttgaag

SEQ ID NO: 130822 - DNA, 30 bp, Artificial Sequence
  Synthetic oligonucleotide
acaccataatctacaatggcaggtttgaag

SEQ ID NO: 130823 - DNA, 30 bp, Artificial Sequence
  Synthetic oligonucleotide
tcattacaaagaggcactagagttttgaag

SEQ ID NO: 130824 - DNA, 30 bp, Artificial Sequence
  Synthetic oligonucleotide
gtgctgatagcttcctggccaacaaataag

SEQ ID NO: 130825 - DNA, 30 bp, Artificial Sequence
  Synthetic oligonucleotide
aatctggtcatgcatgacgacgacaataag

SEQ ID NO: 130826 - DNA, 30 bp, Artificial Sequence
  Synthetic oligonucleotide
taggacagatggatactactaatgaataag

SEQ ID NO: 130827 - DNA, 30 bp, Artificial Sequence
  Synthetic oligonucleotide
atctgcggatgtcaagatacgggtaataag

SEQ ID NO: 130828 - DNA, 30 bp, Artificial Sequence
  Synthetic oligonucleotide
ggaagcggccgtcaagggatgaaacataag

SEQ ID NO: 130829 - DNA, 30 bp, Artificial Sequence
  Synthetic oligonucleotide
cgcgaggcgtgcaatacgcgcgcacataag

SEQ ID NO: 130830 - DNA, 30 bp, Artificial Sequence
  Synthetic oligonucleotide
cattagcctcgtcagtacgatagacataag

SEQ ID NO: 130831 - DNA, 30 bp, Artificial Sequence
  Synthetic oligonucleotide
cataactataaaacactcgggaaccataag

SEQ ID NO: 130832 - DNA, 30 bp, Artificial Sequence
  Synthetic oligonucleotide
accctcggttgggcaaaattcacccataag

SEQ ID NO: 130833 - DNA, 30 bp, Artificial Sequence
  Synthetic oligonucleotide
catgcaaaactactcaatcaccagcataag

SEQ ID NO: 130834 - DNA, 30 bp, Artificial Sequence
  Synthetic oligonucleotide
ggccgaacgcagagaccgtgagagcataag

SEQ ID NO: 130835 - DNA, 30 bp, Artificial Sequence
  Synthetic oligonucleotide
gtccttgagttcgggtatcattggcataag

SEQ ID NO: 130836 - DNA, 30 bp, Artificial Sequence
  Synthetic oligonucleotide
gaggagcgttagatatggtgaaatcataag

SEQ ID NO: 130837 - DNA, 30 bp, Artificial Sequence
  Synthetic oligonucleotide
tgggtggataatcgggccactgttcataag

SEQ ID NO: 130838 - DNA, 30 bp, Artificial Sequence
  Synthetic oligonucleotide
agagtgttatgcccgaggtggcaggataag

SEQ ID NO: 130839 - DNA, 30 bp, Artificial Sequence
  Synthetic oligonucleotide
attcgaaagggacggccggctaatgataag

SEQ ID NO: 130840 - DNA, 30 bp, Artificial Sequence
  Synthetic oligonucleotide
ccaggggtgtgcatgggccatcatgataag

SEQ ID NO: 130841 - DNA, 30 bp, Artificial Sequence
  Synthetic oligonucleotide
gtgcgatcttctagccgctcaaaatataag

SEQ ID NO: 130842 - DNA, 30 bp, Artificial Sequence
  Synthetic oligonucleotide
aaggagtacgggcggctcctcctatataag

SEQ ID NO: 130843 - DNA, 30 bp, Artificial Sequence
  Synthetic oligonucleotide
tcgggggcggtagtcgccatagtatataag

SEQ ID NO: 130844 - DNA, 30 bp, Artificial Sequence
  Synthetic oligonucleotide
ttgcgtaacaatggagactaggtatataag

SEQ ID NO: 130845 - DNA, 30 bp, Artificial Sequence
  Synthetic oligonucleotide
gtccctggccatgggcccggggtctataag

SEQ ID NO: 130846 - DNA, 30 bp, Artificial Sequence
  Synthetic oligonucleotide
gaatctccacaacggatggtgccgtataag

SEQ ID NO: 130847 - DNA, 30 bp, Artificial Sequence
  Synthetic oligonucleotide
ctgattaaggtctgtccttgtgcttataag

SEQ ID NO: 130848 - DNA, 30 bp, Artificial Sequence
  Synthetic oligonucleotide
tgtgcccggaccacgcgggcaagttataag

SEQ ID NO: 130849 - DNA, 30 bp, Artificial Sequence
  Synthetic oligonucleotide
ataataagaagaaacgccagtacaactaag

SEQ ID NO: 130850 - DNA, 30 bp, Artificial Sequence
  Synthetic oligonucleotide
ggctttaacgattcaagatacaatcctaag

SEQ ID NO: 130851 - DNA, 30 bp, Artificial Sequence
  Synthetic oligonucleotide
attatacacgcccggcgatgctttgctaag

SEQ ID NO: 130852 - DNA, 30 bp, Artificial Sequence
  Synthetic oligonucleotide
tacaatagaagaggggatacctcatctaag

SEQ ID NO: 130853 - DNA, 30 bp, Artificial Sequence
  Synthetic oligonucleotide
atgccgcgaatgttgatccgagtgtctaag

SEQ ID NO: 130854 - DNA, 30 bp, Artificial Sequence
  Synthetic oligonucleotide
ttatggccgattgtctgagtcgcgagtaag

SEQ ID NO: 130855 - DNA, 30 bp, Artificial Sequence
  Synthetic oligonucleotide
ggcatgattaccctacccagttgtagtaag

SEQ ID NO: 130856 - DNA, 30 bp, Artificial Sequence
  Synthetic oligonucleotide
tgagaagaccgagatactgggtcccgtaag

SEQ ID NO: 130857 - DNA, 30 bp, Artificial Sequence
  Synthetic oligonucleotide
ttcgagagcccaatccgttcatagcgtaag

SEQ ID NO: 130858 - DNA, 30 bp, Artificial Sequence
  Synthetic oligonucleotide
tggctagtgcccaactctgaaactcgtaag

SEQ ID NO: 130859 - DNA, 30 bp, Artificial Sequence
  Synthetic oligonucleotide
gctgacgccgagagcgagctgagcggtaag

SEQ ID NO: 130860 - DNA, 30 bp, Artificial Sequence
  Synthetic oligonucleotide
agacactcaaaaaggtggtataagggtaag

SEQ ID NO: 130861 - DNA, 30 bp, Artificial Sequence
  Synthetic oligonucleotide
ttcaagcactctgttaaagtggcgggtaag

SEQ ID NO: 130862 - DNA, 30 bp, Artificial Sequence
  Synthetic oligonucleotide
attggtaaaggataagataacgtgggtaag

SEQ ID NO: 130863 - DNA, 30 bp, Artificial Sequence
  Synthetic oligonucleotide
cactgtcaacatcatcgtgcccgtggtaag

SEQ ID NO: 130864 - DNA, 30 bp, Artificial Sequence
  Synthetic oligonucleotide
tggcatcgacaataggcaataaagtgtaag

SEQ ID NO: 130865 - DNA, 30 bp, Artificial Sequence
  Synthetic oligonucleotide
aacttgctaatacgatgtattgcaattaag

SEQ ID NO: 130866 - DNA, 30 bp, Artificial Sequence
  Synthetic oligonucleotide
agatcgctattaatgttaatcaatattaag

SEQ ID NO: 130867 - DNA, 30 bp, Artificial Sequence
  Synthetic oligonucleotide
aacgggagagcctggagcatgcgacttaag

SEQ ID NO: 130868 - DNA, 30 bp, Artificial Sequence
  Synthetic oligonucleotide
ttgctagcctagacgttccttttccttaag

SEQ ID NO: 130869 - DNA, 30 bp, Artificial Sequence
  Synthetic oligonucleotide
ccgcaggtgtcgaattggtgggctcttaag

SEQ ID NO: 130870 - DNA, 30 bp, Artificial Sequence
  Synthetic oligonucleotide
gccagggtctaccatatactcagagttaag

SEQ ID NO: 130871 - DNA, 30 bp, Artificial Sequence
  Synthetic oligonucleotide
atggacgtggagcacactattagagttaag

SEQ ID NO: 130872 - DNA, 30 bp, Artificial Sequence
  Synthetic oligonucleotide
ctattaccgacaaggaatgtcctatttaag

SEQ ID NO: 130873 - DNA, 30 bp, Artificial Sequence
  Synthetic oligonucleotide
ccggaaaagttacatgtaacattgtttaag

SEQ ID NO: 130874 - DNA, 30 bp, Artificial Sequence
  Synthetic oligonucleotide
caagctaactgctctgaacgtagaaaacag

SEQ ID NO: 130875 - DNA, 30 bp, Artificial Sequence
  Synthetic oligonucleotide
atccaaaaattgggatctgcaataaaacag

SEQ ID NO: 130876 - DNA, 30 bp, Artificial Sequence
  Synthetic oligonucleotide
gtcgacgatagcgttctgaacgtaaaacag

SEQ ID NO: 130877 - DNA, 30 bp, Artificial Sequence
  Synthetic oligonucleotide
ttacgagacgttctgtaggaactcaaacag

SEQ ID NO: 130878 - DNA, 30 bp, Artificial Sequence
  Synthetic oligonucleotide
gattgttagcggtcattaacgaaacaacag

SEQ ID NO: 130879 - DNA, 30 bp, Artificial Sequence
  Synthetic oligonucleotide
acaccatctggctccgaacggtttcaacag

SEQ ID NO: 130880 - DNA, 30 bp, Artificial Sequence
  Synthetic oligonucleotide
atcttaggttttgggctaccaaaagaacag

SEQ ID NO: 130881 - DNA, 30 bp, Artificial Sequence
  Synthetic oligonucleotide
gtgggggaaggatcagtgcggggagaacag

SEQ ID NO: 130882 - DNA, 30 bp, Artificial Sequence
  Synthetic oligonucleotide
ttgggtaggccatgctcccatatcgaacag

SEQ ID NO: 130883 - DNA, 30 bp, Artificial Sequence
  Synthetic oligonucleotide
gggcggcataatccgaggtttcaggaacag

SEQ ID NO: 130884 - DNA, 30 bp, Artificial Sequence
  Synthetic oligonucleotide
ggagcaggacatattcgtgtcgctgaacag

SEQ ID NO: 130885 - DNA, 30 bp, Artificial Sequence
  Synthetic oligonucleotide
ggagtgccgagggggtcacatcgtgaacag

SEQ ID NO: 130886 - DNA, 30 bp, Artificial Sequence
  Synthetic oligonucleotide
aaaaagcattctccttcggaagaataacag

SEQ ID NO: 130887 - DNA, 30 bp, Artificial Sequence
  Synthetic oligonucleotide
tccgagtgcccagatagttcaatgtaacag

SEQ ID NO: 130888 - DNA, 30 bp, Artificial Sequence
  Synthetic oligonucleotide
cacgactggctaaagatttctaacacacag

SEQ ID NO: 130889 - DNA, 30 bp, Artificial Sequence
  Synthetic oligonucleotide
gggtacgcatatgttactaggatcacacag

SEQ ID NO: 130890 - DNA, 30 bp, Artificial Sequence
  Synthetic oligonucleotide
gtccagtcaatacgatcaaccgagacacag

SEQ ID NO: 130891 - DNA, 30 bp, Artificial Sequence
  Synthetic oligonucleotide
tctatgagatacaatagtgaggatacacag

SEQ ID NO: 130892 - DNA, 30 bp, Artificial Sequence
  Synthetic oligonucleotide
ggaggtacttggagatttgaacatccacag

SEQ ID NO: 130893 - DNA, 30 bp, Artificial Sequence
  Synthetic oligonucleotide
gatgaatttcaacttcagcattaggcacag

SEQ ID NO: 130894 - DNA, 30 bp, Artificial Sequence
  Synthetic oligonucleotide
cagattgaaggagatttgtgaattgcacag

SEQ ID NO: 130895 - DNA, 30 bp, Artificial Sequence
  Synthetic oligonucleotide
accatcattcgttagctccacgtgtcacag

SEQ ID NO: 130896 - DNA, 30 bp, Artificial Sequence
  Synthetic oligonucleotide
ataggtggttcaatctcatccagttcacag

SEQ ID NO: 130897 - DNA, 30 bp, Artificial Sequence
  Synthetic oligonucleotide
ggtaatcctagacaatgtctaggaagacag

SEQ ID NO: 130898 - DNA, 30 bp, Artificial Sequence
  Synthetic oligonucleotide
agtgtacatcgcatatagggtttcagacag

SEQ ID NO: 130899 - DNA, 30 bp, Artificial Sequence
  Synthetic oligonucleotide
gaatcggcacacatacacgtgttgagacag

SEQ ID NO: 130900 - DNA, 30 bp, Artificial Sequence
  Synthetic oligonucleotide
gtttgtccagggcaacaaaagaggcgacag

SEQ ID NO: 130901 - DNA, 30 bp, Artificial Sequence
  Synthetic oligonucleotide
aaaggtgtggtatacttgaagcggcgacag

SEQ ID NO: 130902 - DNA, 30 bp, Artificial Sequence
  Synthetic oligonucleotide
tggtggtttgcagtccttttttggggacag

SEQ ID NO: 130903 - DNA, 30 bp, Artificial Sequence
  Synthetic oligonucleotide
cgaggggatcaaaaagcttaaagtggacag

SEQ ID NO: 130904 - DNA, 30 bp, Artificial Sequence
  Synthetic oligonucleotide
tgaagttgccaatcctcctagtaatgacag

SEQ ID NO: 130905 - DNA, 30 bp, Artificial Sequence
  Synthetic oligonucleotide
tcagaacttcactggatggctggatgacag

SEQ ID NO: 130906 - DNA, 30 bp, Artificial Sequence
  Synthetic oligonucleotide
gcttatgagagctcaatgttctcctgacag

SEQ ID NO: 130907 - DNA, 30 bp, Artificial Sequence
  Synthetic oligonucleotide
cagactcaaaggaaggggacacgttgacag

SEQ ID NO: 130908 - DNA, 30 bp, Artificial Sequence
  Synthetic oligonucleotide
gaagtcgccggaacagatggtggcatacag

SEQ ID NO: 130909 - DNA, 30 bp, Artificial Sequence
  Synthetic oligonucleotide
atcgatcagcacgaagctcgtgcgatacag

SEQ ID NO: 130910 - DNA, 30 bp, Artificial Sequence
  Synthetic oligonucleotide
gtcacctccgtcacggattgtcatatacag

SEQ ID NO: 130911 - DNA, 30 bp, Artificial Sequence
  Synthetic oligonucleotide
ttgccagtgatacgatgggtgatcctacag

SEQ ID NO: 130912 - DNA, 30 bp, Artificial Sequence
  Synthetic oligonucleotide
gtcagttatgaccagttacacgtcctacag

SEQ ID NO: 130913 - DNA, 30 bp, Artificial Sequence
  Synthetic oligonucleotide
gcgagactacctacattcatcgtagtacag

SEQ ID NO: 130914 - DNA, 30 bp, Artificial Sequence
  Synthetic oligonucleotide
agcccacttgcaatgtaaaccttggtacag

SEQ ID NO: 130915 - DNA, 30 bp, Artificial Sequence
  Synthetic oligonucleotide
gcgcgtcaagctggatactgatatgtacag

SEQ ID NO: 130916 - DNA, 30 bp, Artificial Sequence
  Synthetic oligonucleotide
acggctgctgagtgcagtacattattacag

SEQ ID NO: 130917 - DNA, 30 bp, Artificial Sequence
  Synthetic oligonucleotide
tcgcagttggcgtaccaacgcaccaaccag

SEQ ID NO: 130918 - DNA, 30 bp, Artificial Sequence
  Synthetic oligonucleotide
tgacgaacatcttttcgtgtgcgcaaccag

SEQ ID NO: 130919 - DNA, 30 bp, Artificial Sequence
  Synthetic oligonucleotide
cgctgagagacctaacggagtacgaaccag

SEQ ID NO: 130920 - DNA, 30 bp, Artificial Sequence
  Synthetic oligonucleotide
cgttatcgatacgtcgcttggaggaaccag

SEQ ID NO: 130921 - DNA, 30 bp, Artificial Sequence
  Synthetic oligonucleotide
gcttttagcacatcgagtctacgtaaccag

SEQ ID NO: 130922 - DNA, 30 bp, Artificial Sequence
  Synthetic oligonucleotide
ccaatctatagaatagtttgactacaccag

SEQ ID NO: 130923 - DNA, 30 bp, Artificial Sequence
  Synthetic oligonucleotide
cactaattctgagatcgatgattccaccag

SEQ ID NO: 130924 - DNA, 30 bp, Artificial Sequence
  Synthetic oligonucleotide
ggtactaatatagcggtcaaactgcaccag

SEQ ID NO: 130925 - DNA, 30 bp, Artificial Sequence
  Synthetic oligonucleotide
cgggttcgtgataagctatgatgtcaccag

SEQ ID NO: 130926 - DNA, 30 bp, Artificial Sequence
  Synthetic oligonucleotide
taacagggtctcataaccgcgtttcaccag

SEQ ID NO: 130927 - DNA, 30 bp, Artificial Sequence
  Synthetic oligonucleotide
tcgggtttgtcagaacccaaggcagaccag

SEQ ID NO: 130928 - DNA, 30 bp, Artificial Sequence
  Synthetic oligonucleotide
tcttcactaaagatccaaaaaatagaccag

SEQ ID NO: 130929 - DNA, 30 bp, Artificial Sequence
  Synthetic oligonucleotide
ctccaagagcagaagattggccacgaccag

SEQ ID NO: 130930 - DNA, 30 bp, Artificial Sequence
  Synthetic oligonucleotide
atcccgagtataagggttggatacgaccag

SEQ ID NO: 130931 - DNA, 30 bp, Artificial Sequence
  Synthetic oligonucleotide
gcggatgaaaggggccgctatccataccag

SEQ ID NO: 130932 - DNA, 30 bp, Artificial Sequence
  Synthetic oligonucleotide
ctataattgtaacgaaacgcaagctaccag

SEQ ID NO: 130933 - DNA, 30 bp, Artificial Sequence
  Synthetic oligonucleotide
gtgtaacgtaagaactgtgcactctaccag

SEQ ID NO: 130934 - DNA, 30 bp, Artificial Sequence
  Synthetic oligonucleotide
gttagcgaattgttcttgtcactgtaccag

SEQ ID NO: 130935 - DNA, 30 bp, Artificial Sequence
  Synthetic oligonucleotide
gacatatgttgacaagacggaaattaccag

SEQ ID NO: 130936 - DNA, 30 bp, Artificial Sequence
  Synthetic oligonucleotide
agggaatcacgataagatggttacacccag

SEQ ID NO: 130937 - DNA, 30 bp, Artificial Sequence
  Synthetic oligonucleotide
gacaagtctggtgcagttccacagacccag

SEQ ID NO: 130938 - DNA, 30 bp, Artificial Sequence
  Synthetic oligonucleotide
gggttcgtggttggtcatactattacccag

SEQ ID NO: 130939 - DNA, 30 bp, Artificial Sequence
  Synthetic oligonucleotide
gatgacaagaaatgaaacgcttaaccccag

SEQ ID NO: 130940 - DNA, 30 bp, Artificial Sequence
  Synthetic oligonucleotide
gggactaatgcctaccatatcacaccccag

SEQ ID NO: 130941 - DNA, 30 bp, Artificial Sequence
  Synthetic oligonucleotide
aggacggtattaagattatccgcgccccag

SEQ ID NO: 130942 - DNA, 30 bp, Artificial Sequence
  Synthetic oligonucleotide
gacataagggagcgaaaagcgtcgccccag

SEQ ID NO: 130943 - DNA, 30 bp, Artificial Sequence
  Synthetic oligonucleotide
ggaacccgtgctcatcccggtgtcgcccag

SEQ ID NO: 130944 - DNA, 30 bp, Artificial Sequence
  Synthetic oligonucleotide
atgctacccctgcgatccctaactgcccag

SEQ ID NO: 130945 - DNA, 30 bp, Artificial Sequence
  Synthetic oligonucleotide
tcaaaggtggtcttgcgactcgatagccag

SEQ ID NO: 130946 - DNA, 30 bp, Artificial Sequence
  Synthetic oligonucleotide
ggccgtagaggggggtcagccgttagccag

SEQ ID NO: 130947 - DNA, 30 bp, Artificial Sequence
  Synthetic oligonucleotide
aactgccaaagtgccttacgattacgccag

SEQ ID NO: 130948 - DNA, 30 bp, Artificial Sequence
  Synthetic oligonucleotide
tgggtacccataccgcaaggattacgccag

SEQ ID NO: 130949 - DNA, 30 bp, Artificial Sequence
  Synthetic oligonucleotide
cctcatatattacgggttagcattcgccag

SEQ ID NO: 130950 - DNA, 30 bp, Artificial Sequence
  Synthetic oligonucleotide
ttgtccaattaaacaagtgtcagaggccag

SEQ ID NO: 130951 - DNA, 30 bp, Artificial Sequence
  Synthetic oligonucleotide
tagaccgggggggagagatggaacggccag

SEQ ID NO: 130952 - DNA, 30 bp, Artificial Sequence
  Synthetic oligonucleotide
agtagatagcattggttcgtgaacggccag

SEQ ID NO: 130953 - DNA, 30 bp, Artificial Sequence
  Synthetic oligonucleotide
gtaaggaacgcgtgtaacgcccgcggccag

SEQ ID NO: 130954 - DNA, 30 bp, Artificial Sequence
  Synthetic oligonucleotide
ggaaaaacgttaagttgattcactggccag

SEQ ID NO: 130955 - DNA, 30 bp, Artificial Sequence
  Synthetic oligonucleotide
caattcgcaccagcataaagtcaatgccag

SEQ ID NO: 130956 - DNA, 30 bp, Artificial Sequence
  Synthetic oligonucleotide
gaatagttgcgtaccataatcagatgccag

SEQ ID NO: 130957 - DNA, 30 bp, Artificial Sequence
  Synthetic oligonucleotide
catctgaggagaattggcaatagctgccag

SEQ ID NO: 130958 - DNA, 30 bp, Artificial Sequence
  Synthetic oligonucleotide
atagctgacttaaaacggtttggctgccag

SEQ ID NO: 130959 - DNA, 30 bp, Artificial Sequence
  Synthetic oligonucleotide
ggaacgaagttgtgtgttccgtagtgccag

SEQ ID NO: 130960 - DNA, 30 bp, Artificial Sequence
  Synthetic oligonucleotide
agctttcgccacaaggttgggcgaatccag

SEQ ID NO: 130961 - DNA, 30 bp, Artificial Sequence
  Synthetic oligonucleotide
acacagcagtttagtaggagtattatccag

SEQ ID NO: 130962 - DNA, 30 bp, Artificial Sequence
  Synthetic oligonucleotide
tacagagtgcgagcgtttggaccagtccag

SEQ ID NO: 130963 - DNA, 30 bp, Artificial Sequence
  Synthetic oligonucleotide
ataacgctttgttaacacacagcagtccag

SEQ ID NO: 130964 - DNA, 30 bp, Artificial Sequence
  Synthetic oligonucleotide
cagagacagacacggatggaacgagtccag

SEQ ID NO: 130965 - DNA, 30 bp, Artificial Sequence
  Synthetic oligonucleotide
tcaacgccgtggacgggtttcggagtccag

SEQ ID NO: 130966 - DNA, 30 bp, Artificial Sequence
  Synthetic oligonucleotide
gggaatctacttatacggatttccgtccag

SEQ ID NO: 130967 - DNA, 30 bp, Artificial Sequence
  Synthetic oligonucleotide
agtaagcggtagtttctcgggagggtccag

SEQ ID NO: 130968 - DNA, 30 bp, Artificial Sequence
  Synthetic oligonucleotide
gagaaccgcccaagaaaagggtatgtccag

SEQ ID NO: 130969 - DNA, 30 bp, Artificial Sequence
  Synthetic oligonucleotide
gcccagacttggagagagagggaattccag

SEQ ID NO: 130970 - DNA, 30 bp, Artificial Sequence
  Synthetic oligonucleotide
tggtttccaacgagtaagtggccattccag

SEQ ID NO: 130971 - DNA, 30 bp, Artificial Sequence
  Synthetic oligonucleotide
acctggtatacttcagaaagcggattccag

SEQ ID NO: 130972 - DNA, 30 bp, Artificial Sequence
  Synthetic oligonucleotide
agaaagttattgctagccgatatcttccag

SEQ ID NO: 130973 - DNA, 30 bp, Artificial Sequence
  Synthetic oligonucleotide
ttcctgtggggaaaaaaaaatctcttccag

SEQ ID NO: 130974 - DNA, 30 bp, Artificial Sequence
  Synthetic oligonucleotide
tgcgcatatgtatcatatattaagttccag

SEQ ID NO: 130975 - DNA, 30 bp, Artificial Sequence
  Synthetic oligonucleotide
tactgtagacaggcgtagcggaggttccag

SEQ ID NO: 130976 - DNA, 30 bp, Artificial Sequence
  Synthetic oligonucleotide
gcatctgagtacgtattcacaccaaagcag

SEQ ID NO: 130977 - DNA, 30 bp, Artificial Sequence
  Synthetic oligonucleotide
gctcagcgatagggtgatctcggcaagcag

SEQ ID NO: 130978 - DNA, 30 bp, Artificial Sequence
  Synthetic oligonucleotide
tctaagtaatgaattactaagtgcaagcag

SEQ ID NO: 130979 - DNA, 30 bp, Artificial Sequence
  Synthetic oligonucleotide
attagaattattctggcaccgattaagcag

SEQ ID NO: 130980 - DNA, 30 bp, Artificial Sequence
  Synthetic oligonucleotide
cagtgacaacgtgttaggcgactacagcag

SEQ ID NO: 130981 - DNA, 30 bp, Artificial Sequence
  Synthetic oligonucleotide
ataggataacctttcccaaaattacagcag

SEQ ID NO: 130982 - DNA, 30 bp, Artificial Sequence
  Synthetic oligonucleotide
cccagtacactctatgttgcaacccagcag

SEQ ID NO: 130983 - DNA, 30 bp, Artificial Sequence
  Synthetic oligonucleotide
agaccttctaggtggtgctagaagcagcag

SEQ ID NO: 130984 - DNA, 30 bp, Artificial Sequence
  Synthetic oligonucleotide
tgcagacaagaagactacaagtagcagcag

SEQ ID NO: 130985 - DNA, 30 bp, Artificial Sequence
  Synthetic oligonucleotide
tgattctcagtaggtgtcttttgtcagcag

SEQ ID NO: 130986 - DNA, 30 bp, Artificial Sequence
  Synthetic oligonucleotide
cgaaacgttcaaagctttggtcccgagcag

SEQ ID NO: 130987 - DNA, 30 bp, Artificial Sequence
  Synthetic oligonucleotide
gatgtgccatccctacgacaagactagcag

SEQ ID NO: 130988 - DNA, 30 bp, Artificial Sequence
  Synthetic oligonucleotide
atgtgtcaaaaatcacccagcaacacgcag

SEQ ID NO: 130989 - DNA, 30 bp, Artificial Sequence
  Synthetic oligonucleotide
acgcgttcgagtcctaccgcaaatacgcag

SEQ ID NO: 130990 - DNA, 30 bp, Artificial Sequence
  Synthetic oligonucleotide
ggaccacggggtagaccagcatgtacgcag

SEQ ID NO: 130991 - DNA, 30 bp, Artificial Sequence
  Synthetic oligonucleotide
agtcgcgacccatcgggaagatgaccgcag

SEQ ID NO: 130992 - DNA, 30 bp, Artificial Sequence
  Synthetic oligonucleotide
catgtatgaatgaggtagggtgccccgcag

SEQ ID NO: 130993 - DNA, 30 bp, Artificial Sequence
  Synthetic oligonucleotide
gttaaaaggggaccatacgctcatccgcag

SEQ ID NO: 130994 - DNA, 30 bp, Artificial Sequence
  Synthetic oligonucleotide
ccaacgctgaaatcgtgcgtcagtccgcag

SEQ ID NO: 130995 - DNA, 30 bp, Artificial Sequence
  Synthetic oligonucleotide
tgaagtggacgtaagcatacaaaagcgcag

SEQ ID NO: 130996 - DNA, 30 bp, Artificial Sequence
  Synthetic oligonucleotide
taatcagtgattgctgactacattgcgcag

SEQ ID NO: 130997 - DNA, 30 bp, Artificial Sequence
  Synthetic oligonucleotide
tgtgagagcggtattgcagacgttgcgcag

SEQ ID NO: 130998 - DNA, 30 bp, Artificial Sequence
  Synthetic oligonucleotide
gctggtcaccgagggagggatgcctcgcag

SEQ ID NO: 130999 - DNA, 30 bp, Artificial Sequence
  Synthetic oligonucleotide
cacctgagatattagatcggacccaggcag

SEQ ID NO: 131000 - DNA, 30 bp, Artificial Sequence
  Synthetic oligonucleotide
ggggttgtaatggacagtattgagaggcag

SEQ ID NO: 131001 - DNA, 30 bp, Artificial Sequence
  Synthetic oligonucleotide
ctagctgggatgagggcgaggaggaggcag

SEQ ID NO: 131002 - DNA, 30 bp, Artificial Sequence
  Synthetic oligonucleotide
aatatgaccatctctagggaggggaggcag

SEQ ID NO: 131003 - DNA, 30 bp, Artificial Sequence
  Synthetic oligonucleotide
taggatgagcgtaggcatcagaataggcag

SEQ ID NO: 131004 - DNA, 30 bp, Artificial Sequence
  Synthetic oligonucleotide
ttgttcaaatatgtgttgtaaagtaggcag

SEQ ID NO: 131005 - DNA, 30 bp, Artificial Sequence
  Synthetic oligonucleotide
gcagcggtaaggagggggcggatacggcag

SEQ ID NO: 131006 - DNA, 30 bp, Artificial Sequence
  Synthetic oligonucleotide
gagcattatgagctcaatactaaccggcag

SEQ ID NO: 131007 - DNA, 30 bp, Artificial Sequence
  Synthetic oligonucleotide
cagaaccggtgtccagtactaaagcggcag

SEQ ID NO: 131008 - DNA, 30 bp, Artificial Sequence
  Synthetic oligonucleotide
gggacgttactatgccggtcactagggcag

SEQ ID NO: 131009 - DNA, 30 bp, Artificial Sequence
  Synthetic oligonucleotide
aagcatggggaagccatagaatgatggcag

SEQ ID NO: 131010 - DNA, 30 bp, Artificial Sequence
  Synthetic oligonucleotide
cgctggttgaaggaaagtagtttctggcag

SEQ ID NO: 131011 - DNA, 30 bp, Artificial Sequence
  Synthetic oligonucleotide
gtttgcaggcggtagcttcacccttggcag

SEQ ID NO: 131012 - DNA, 30 bp, Artificial Sequence
  Synthetic oligonucleotide
ggcattcgagtacctgggcagtgttggcag

SEQ ID NO: 131013 - DNA, 30 bp, Artificial Sequence
  Synthetic oligonucleotide
agccggagattcttatcattcgaaatgcag

SEQ ID NO: 131014 - DNA, 30 bp, Artificial Sequence
  Synthetic oligonucleotide
aacgatggaactagctaattggcgatgcag

SEQ ID NO: 131015 - DNA, 30 bp, Artificial Sequence
  Synthetic oligonucleotide
acgggggagggcatgtggaccaggatgcag

SEQ ID NO: 131016 - DNA, 30 bp, Artificial Sequence
  Synthetic oligonucleotide
gattggctatcagagcatattgtgatgcag

SEQ ID NO: 131017 - DNA, 30 bp, Artificial Sequence
  Synthetic oligonucleotide
tggtatgaacggaggtcccgagtactgcag

SEQ ID NO: 131018 - DNA, 30 bp, Artificial Sequence
  Synthetic oligonucleotide
agggaagataatcgaatcggcgagctgcag

SEQ ID NO: 131019 - DNA, 30 bp, Artificial Sequence
  Synthetic oligonucleotide
aggtcaactgttaagcgttcgttgctgcag

SEQ ID NO: 131020 - DNA, 30 bp, Artificial Sequence
  Synthetic oligonucleotide
acaaacatctgttggcgttgatctctgcag

SEQ ID NO: 131021 - DNA, 30 bp, Artificial Sequence
  Synthetic oligonucleotide
acgagagcacaagtacgcgcatgtgtgcag

SEQ ID NO: 131022 - DNA, 30 bp, Artificial Sequence
  Synthetic oligonucleotide
ccaattaaacaaaactgccgagctttgcag

SEQ ID NO: 131023 - DNA, 30 bp, Artificial Sequence
  Synthetic oligonucleotide
gcatgcagtaaattgtgtaacagaaatcag

SEQ ID NO: 131024 - DNA, 30 bp, Artificial Sequence
  Synthetic oligonucleotide
cagcggggccgcaatacagctaacaatcag

SEQ ID NO: 131025 - DNA, 30 bp, Artificial Sequence
  Synthetic oligonucleotide
actcgtcttgggtcgcgggggcacaatcag

SEQ ID NO: 131026 - DNA, 30 bp, Artificial Sequence
  Synthetic oligonucleotide
ttacattaatctatgatactggtcaatcag

SEQ ID NO: 131027 - DNA, 30 bp, Artificial Sequence
  Synthetic oligonucleotide
cgatatccgaggagcaccattaagaatcag

SEQ ID NO: 131028 - DNA, 30 bp, Artificial Sequence
  Synthetic oligonucleotide
aaggcaattattcctggctggcagaatcag

SEQ ID NO: 131029 - DNA, 30 bp, Artificial Sequence
  Synthetic oligonucleotide
cattcatcgatcacagacttgtaacatcag

SEQ ID NO: 131030 - DNA, 30 bp, Artificial Sequence
  Synthetic oligonucleotide
acgactcacgttacgcggtgtacacatcag

SEQ ID NO: 131031 - DNA, 30 bp, Artificial Sequence
  Synthetic oligonucleotide
aacattctgatccagattcgcgaccatcag

SEQ ID NO: 131032 - DNA, 30 bp, Artificial Sequence
  Synthetic oligonucleotide
gccttgatgcgagagcccttaactcatcag

SEQ ID NO: 131033 - DNA, 30 bp, Artificial Sequence
  Synthetic oligonucleotide
ccctacttgctcccggattgcgctcatcag

SEQ ID NO: 131034 - DNA, 30 bp, Artificial Sequence
  Synthetic oligonucleotide
actatagggctggacgtcaactttcatcag

SEQ ID NO: 131035 - DNA, 30 bp, Artificial Sequence
  Synthetic oligonucleotide
tagggtcgtggagctacccatgcagatcag

SEQ ID NO: 131036 - DNA, 30 bp, Artificial Sequence
  Synthetic oligonucleotide
gagccttcccaccaccggtaatcggatcag

SEQ ID NO: 131037 - DNA, 30 bp, Artificial Sequence
  Synthetic oligonucleotide
ataaagcacggagtcaatctgtgggatcag

SEQ ID NO: 131038 - DNA, 30 bp, Artificial Sequence
  Synthetic oligonucleotide
taattgatcggccaaaaggccactgatcag

SEQ ID NO: 131039 - DNA, 30 bp, Artificial Sequence
  Synthetic oligonucleotide
gggtcattaacgtttggaccttcatatcag

SEQ ID NO: 131040 - DNA, 30 bp, Artificial Sequence
  Synthetic oligonucleotide
tactggtgcgttgggcatgcgcgatatcag

SEQ ID NO: 131041 - DNA, 30 bp, Artificial Sequence
  Synthetic oligonucleotide
cacaacattcgtctgctaggtcattatcag

SEQ ID NO: 131042 - DNA, 30 bp, Artificial Sequence
  Synthetic oligonucleotide
ttgttgaaaaccctgacaaaaacttatcag

SEQ ID NO: 131043 - DNA, 30 bp, Artificial Sequence
  Synthetic oligonucleotide
cgctgactccggcaaaaacttaacactcag

SEQ ID NO: 131044 - DNA, 30 bp, Artificial Sequence
  Synthetic oligonucleotide
cagcggcagaaacaggcagcggagactcag

SEQ ID NO: 131045 - DNA, 30 bp, Artificial Sequence
  Synthetic oligonucleotide
gaaaacgtcctcgacccgcatatccctcag

SEQ ID NO: 131046 - DNA, 30 bp, Artificial Sequence
  Synthetic oligonucleotide
gagagcatgtatcttccagaaagtcctcag

SEQ ID NO: 131047 - DNA, 30 bp, Artificial Sequence
  Synthetic oligonucleotide
tgccacggacaacatcaatcaaaagctcag

SEQ ID NO: 131048 - DNA, 30 bp, Artificial Sequence
  Synthetic oligonucleotide
gttcactggttaaccggctccacgtctcag

SEQ ID NO: 131049 - DNA, 30 bp, Artificial Sequence
  Synthetic oligonucleotide
aatgttggaaagccctggacagccagtcag

SEQ ID NO: 131050 - DNA, 30 bp, Artificial Sequence
  Synthetic oligonucleotide
tgatgactgtatttccgaggtgccagtcag

SEQ ID NO: 131051 - DNA, 30 bp, Artificial Sequence
  Synthetic oligonucleotide
gatgtgagagtttgtgtatagttcagtcag

SEQ ID NO: 131052 - DNA, 30 bp, Artificial Sequence
  Synthetic oligonucleotide
cgagatcctcacgaacgttattaacgtcag

SEQ ID NO: 131053 - DNA, 30 bp, Artificial Sequence
  Synthetic oligonucleotide
cagcggacggttcggcgcttgagacgtcag

SEQ ID NO: 131054 - DNA, 30 bp, Artificial Sequence
  Synthetic oligonucleotide
cgtgacgaatctctcacttgcggacgtcag

SEQ ID NO: 131055 - DNA, 30 bp, Artificial Sequence
  Synthetic oligonucleotide
ccatacaatatgtcctcgtcaaaccgtcag

SEQ ID NO: 131056 - DNA, 30 bp, Artificial Sequence
  Synthetic oligonucleotide
cagcggattccacgggttcgcaaaggtcag

SEQ ID NO: 131057 - DNA, 30 bp, Artificial Sequence
  Synthetic oligonucleotide
catcgaaatcttgtcggcttaacaggtcag

SEQ ID NO: 131058 - DNA, 30 bp, Artificial Sequence
  Synthetic oligonucleotide
attaggcacaagaacgaatcccgaggtcag

SEQ ID NO: 131059 - DNA, 30 bp, Artificial Sequence
  Synthetic oligonucleotide
caacataagcatcagcaacgattcggtcag

SEQ ID NO: 131060 - DNA, 30 bp, Artificial Sequence
  Synthetic oligonucleotide
cattgggggaatgtagtctaatgtggtcag

SEQ ID NO: 131061 - DNA, 30 bp, Artificial Sequence
  Synthetic oligonucleotide
tagcgtcctgagcggtcgtttacatgtcag

SEQ ID NO: 131062 - DNA, 30 bp, Artificial Sequence
  Synthetic oligonucleotide
acgcacacggctaaatggtgggcctgtcag

SEQ ID NO: 131063 - DNA, 30 bp, Artificial Sequence
  Synthetic oligonucleotide
gagcgttgtacatcgagctgtaggtgtcag

SEQ ID NO: 131064 - DNA, 30 bp, Artificial Sequence
  Synthetic oligonucleotide
tgcatcatatattgtgcgaatccttgtcag

SEQ ID NO: 131065 - DNA, 30 bp, Artificial Sequence
  Synthetic oligonucleotide
ctccgcttgtaaatgattagcgaaattcag

SEQ ID NO: 131066 - DNA, 30 bp, Artificial Sequence
  Synthetic oligonucleotide
agtatacagaatcttttagctgcaattcag

SEQ ID NO: 131067 - DNA, 30 bp, Artificial Sequence
  Synthetic oligonucleotide
cgtagtacatttttaaggacaagcattcag

SEQ ID NO: 131068 - DNA, 30 bp, Artificial Sequence
  Synthetic oligonucleotide
atgctgttactccgggaactcatcattcag

SEQ ID NO: 131069 - DNA, 30 bp, Artificial Sequence
  Synthetic oligonucleotide
agtagcatggagatgcaaagcaggcttcag

SEQ ID NO: 131070 - DNA, 30 bp, Artificial Sequence
  Synthetic oligonucleotide
gggaatttctgggagctcgcggtgcttcag

SEQ ID NO: 131071 - DNA, 30 bp, Artificial Sequence
  Synthetic oligonucleotide
tggttcaaagcatgtggtttaacatttcag

SEQ ID NO: 131072 - DNA, 30 bp, Artificial Sequence
  Synthetic oligonucleotide
taccagggagagtcaagaacttgctttcag

SEQ ID NO: 131073 - DNA, 30 bp, Artificial Sequence
  Synthetic oligonucleotide
tacaggctataaatgtatagggaaaaagag

SEQ ID NO: 131074 - DNA, 30 bp, Artificial Sequence
  Synthetic oligonucleotide
gtggtcattctatacaatatgcacaaagag

SEQ ID NO: 131075 - DNA, 30 bp, Artificial Sequence
  Synthetic oligonucleotide
ccaaccatggactggcagaaatccaaagag

SEQ ID NO: 131076 - DNA, 30 bp, Artificial Sequence
  Synthetic oligonucleotide
gcaaggcccgttcctaggagctgcaaagag

SEQ ID NO: 131077 - DNA, 30 bp, Artificial Sequence
  Synthetic oligonucleotide
ataaaacgaacaacctacggaccgaaagag

SEQ ID NO: 131078 - DNA, 30 bp, Artificial Sequence
  Synthetic oligonucleotide
cttaatcgatcgactgacaccgggaaagag

SEQ ID NO: 131079 - DNA, 30 bp, Artificial Sequence
  Synthetic oligonucleotide
aatcaatcatggttaggtctaggtaaagag

SEQ ID NO: 131080 - DNA, 30 bp, Artificial Sequence
  Synthetic oligonucleotide
tagcagccatcgccaaaggaaattaaagag

SEQ ID NO: 131081 - DNA, 30 bp, Artificial Sequence
  Synthetic oligonucleotide
tttacgtgtttctgcgtaacccttaaagag

SEQ ID NO: 131082 - DNA, 30 bp, Artificial Sequence
  Synthetic oligonucleotide
aatagaacctccgcagtgaagtaccaagag

SEQ ID NO: 131083 - DNA, 30 bp, Artificial Sequence
  Synthetic oligonucleotide
tacgttccccgtacatgaacagatcaagag

SEQ ID NO: 131084 - DNA, 30 bp, Artificial Sequence
  Synthetic oligonucleotide
gccacgccgcccccacatcataaagaagag

SEQ ID NO: 131085 - DNA, 30 bp, Artificial Sequence
  Synthetic oligonucleotide
atctgtcattgaatgacggcccaagaagag

SEQ ID NO: 131086 - DNA, 30 bp, Artificial Sequence
  Synthetic oligonucleotide
cagacgacggtcattccggagttagaagag

SEQ ID NO: 131087 - DNA, 30 bp, Artificial Sequence
  Synthetic oligonucleotide
gatggtcgatttgtgatctgtttcgaagag

SEQ ID NO: 131088 - DNA, 30 bp, Artificial Sequence
  Synthetic oligonucleotide
cccacgtgagccgttgctttatgggaagag

SEQ ID NO: 131089 - DNA, 30 bp, Artificial Sequence
  Synthetic oligonucleotide
cggtgcttcggcttgatgaacatggaagag

SEQ ID NO: 131090 - DNA, 30 bp, Artificial Sequence
  Synthetic oligonucleotide
tgtatacacggattcaaaaaaggtgaagag

SEQ ID NO: 131091 - DNA, 30 bp, Artificial Sequence
  Synthetic oligonucleotide
acatataaaaatgcaacacttggtgaagag

SEQ ID NO: 131092 - DNA, 30 bp, Artificial Sequence
  Synthetic oligonucleotide
gcgcgtaactctgcgctatattaataagag

SEQ ID NO: 131093 - DNA, 30 bp, Artificial Sequence
  Synthetic oligonucleotide
ctaaataagaacactggatgggactaagag

SEQ ID NO: 131094 - DNA, 30 bp, Artificial Sequence
  Synthetic oligonucleotide
tacaatataggtccctgtcatttgtaagag

SEQ ID NO: 131095 - DNA, 30 bp, Artificial Sequence
  Synthetic oligonucleotide
ggcattgtgtagatcgtatatatttaagag

SEQ ID NO: 131096 - DNA, 30 bp, Artificial Sequence
  Synthetic oligonucleotide
tcggatgccgatcctgcggtcaagacagag

SEQ ID NO: 131097 - DNA, 30 bp, Artificial Sequence
  Synthetic oligonucleotide
gagtaccaggtctgaccagtattgacagag

SEQ ID NO: 131098 - DNA, 30 bp, Artificial Sequence
  Synthetic oligonucleotide
ttcgcccaggacggtagggcagtcgcagag

SEQ ID NO: 131099 - DNA, 30 bp, Artificial Sequence
  Synthetic oligonucleotide
tcactccgaagtagctggattaactcagag

SEQ ID NO: 131100 - DNA, 30 bp, Artificial Sequence
  Synthetic oligonucleotide
cacttgggagacgcggttgatacctcagag

SEQ ID NO: 131101 - DNA, 30 bp, Artificial Sequence
  Synthetic oligonucleotide
aaggttccttgattggcgcattaaagagag

SEQ ID NO: 131102 - DNA, 30 bp, Artificial Sequence
  Synthetic oligonucleotide
atggtggggtcttcaggaacgtgaagagag

SEQ ID NO: 131103 - DNA, 30 bp, Artificial Sequence
  Synthetic oligonucleotide
aagcaggccttgttctgaggctgcagagag

SEQ ID NO: 131104 - DNA, 30 bp, Artificial Sequence
  Synthetic oligonucleotide
atggtgagctgccttagtgtggcgagagag

SEQ ID NO: 131105 - DNA, 30 bp, Artificial Sequence
  Synthetic oligonucleotide
gagtttagggctacgcgtatgtatagagag

SEQ ID NO: 131106 - DNA, 30 bp, Artificial Sequence
  Synthetic oligonucleotide
cataatcttaggagacggttaagacgagag

SEQ ID NO: 131107 - DNA, 30 bp, Artificial Sequence
  Synthetic oligonucleotide
agcgatctaaaaaccgtcgcccgacgagag

SEQ ID NO: 131108 - DNA, 30 bp, Artificial Sequence
  Synthetic oligonucleotide
tgaccagtgcgaacatgacgtcgccgagag

SEQ ID NO: 131109 - DNA, 30 bp, Artificial Sequence
  Synthetic oligonucleotide
cactaggcgttagtcctcatctcgcgagag

SEQ ID NO: 131110 - DNA, 30 bp, Artificial Sequence
  Synthetic oligonucleotide
cggtccattggttgacttgtaaggcgagag

SEQ ID NO: 131111 - DNA, 30 bp, Artificial Sequence
  Synthetic oligonucleotide
ggagggttgggttatcacgcggtgcgagag

SEQ ID NO: 131112 - DNA, 30 bp, Artificial Sequence
  Synthetic oligonucleotide
gcgggccgctccgccggaaccattcgagag

SEQ ID NO: 131113 - DNA, 30 bp, Artificial Sequence
  Synthetic oligonucleotide
aggctgttgcggcggcttatgaaaggagag

SEQ ID NO: 131114 - DNA, 30 bp, Artificial Sequence
  Synthetic oligonucleotide
aaatatgagcatgggtgaactcggggagag

SEQ ID NO: 131115 - DNA, 30 bp, Artificial Sequence
  Synthetic oligonucleotide
ggggaaaaataatgcatacattggggagag

SEQ ID NO: 131116 - DNA, 30 bp, Artificial Sequence
  Synthetic oligonucleotide
ctcgtagccaccgtaaagcatggctgagag

SEQ ID NO: 131117 - DNA, 30 bp, Artificial Sequence
  Synthetic oligonucleotide
accaaataactttcgcacggactctgagag

SEQ ID NO: 131118 - DNA, 30 bp, Artificial Sequence
  Synthetic oligonucleotide
tatcgatactgcaatggagacttctgagag

SEQ ID NO: 131119 - DNA, 30 bp, Artificial Sequence
  Synthetic oligonucleotide
attgggccttgtgctggtggtcagtgagag

SEQ ID NO: 131120 - DNA, 30 bp, Artificial Sequence
  Synthetic oligonucleotide
cgaataagacaaaaacaagctgagtgagag

SEQ ID NO: 131121 - DNA, 30 bp, Artificial Sequence
  Synthetic oligonucleotide
tccgttaggcaatcgccgatagcgtgagag

SEQ ID NO: 131122 - DNA, 30 bp, Artificial Sequence
  Synthetic oligonucleotide
gtcgtaatactgaacctaaatcaaatagag

SEQ ID NO: 131123 - DNA, 30 bp, Artificial Sequence
  Synthetic oligonucleotide
ccgtaggtatattagatcagaataatagag

SEQ ID NO: 131124 - DNA, 30 bp, Artificial Sequence
  Synthetic oligonucleotide
gagttctcattcgttatccggcgcatagag

SEQ ID NO: 131125 - DNA, 30 bp, Artificial Sequence
  Synthetic oligonucleotide
attaacagacgtaaagtgatcgcgatagag

SEQ ID NO: 131126 - DNA, 30 bp, Artificial Sequence
  Synthetic oligonucleotide
agtagattagcaatgtctatatcgatagag

SEQ ID NO: 131127 - DNA, 30 bp, Artificial Sequence
  Synthetic oligonucleotide
agggtacggtcgaaagaggcgtggatagag

SEQ ID NO: 131128 - DNA, 30 bp, Artificial Sequence
  Synthetic oligonucleotide
ggctctcattaaggactacttccactagag

SEQ ID NO: 131129 - DNA, 30 bp, Artificial Sequence
  Synthetic oligonucleotide
tggccgtgaagtaataaaggctcactagag

SEQ ID NO: 131130 - DNA, 30 bp, Artificial Sequence
  Synthetic oligonucleotide
ctcggcaccgacaacgacacagtcctagag

SEQ ID NO: 131131 - DNA, 30 bp, Artificial Sequence
  Synthetic oligonucleotide
gttactcacgaacaacgcaagcggctagag

SEQ ID NO: 131132 - DNA, 30 bp, Artificial Sequence
  Synthetic oligonucleotide
gacccgcgggatggccggcggtaagtagag

SEQ ID NO: 131133 - DNA, 30 bp, Artificial Sequence
  Synthetic oligonucleotide
tgtgcggatgacggatcttatatagtagag

SEQ ID NO: 131134 - DNA, 30 bp, Artificial Sequence
  Synthetic oligonucleotide
gttcgtgtgaaggatatcaggttagtagag

SEQ ID NO: 131135 - DNA, 30 bp, Artificial Sequence
  Synthetic oligonucleotide
ggaaaaaccgatatgttgctcaccgtagag

SEQ ID NO: 131136 - DNA, 30 bp, Artificial Sequence
  Synthetic oligonucleotide
gaacctgtagtagtctcttacttcgtagag

SEQ ID NO: 131137 - DNA, 30 bp, Artificial Sequence
  Synthetic oligonucleotide
ttgttagtaatcatggtggtgccattagag

SEQ ID NO: 131138 - DNA, 30 bp, Artificial Sequence
  Synthetic oligonucleotide
agatttggaaagcgtttagtgtagttagag

SEQ ID NO: 131139 - DNA, 30 bp, Artificial Sequence
  Synthetic oligonucleotide
cggggaacttgcaagatgagtagtttagag

SEQ ID NO: 131140 - DNA, 30 bp, Artificial Sequence
  Synthetic oligonucleotide
atgcacgcaaagatcggatatacaaacgag

SEQ ID NO: 131141 - DNA, 30 bp, Artificial Sequence
  Synthetic oligonucleotide
agtatgcccgtggaatacaatcacaacgag

SEQ ID NO: 131142 - DNA, 30 bp, Artificial Sequence
  Synthetic oligonucleotide
cttaagtattaaggtgtgatcggcaacgag

SEQ ID NO: 131143 - DNA, 30 bp, Artificial Sequence
  Synthetic oligonucleotide
atatattaggcgaacttggcttgcaacgag

SEQ ID NO: 131144 - DNA, 30 bp, Artificial Sequence
  Synthetic oligonucleotide
cctcattagagtagggagctccaacacgag

SEQ ID NO: 131145 - DNA, 30 bp, Artificial Sequence
  Synthetic oligonucleotide
ttttacatggctagatgctgatcacacgag

SEQ ID NO: 131146 - DNA, 30 bp, Artificial Sequence
  Synthetic oligonucleotide
ttgatagaggaaaggaccaagatgcacgag

SEQ ID NO: 131147 - DNA, 30 bp, Artificial Sequence
  Synthetic oligonucleotide
tgccattggactaaaagacgtgttcacgag

SEQ ID NO: 131148 - DNA, 30 bp, Artificial Sequence
  Synthetic oligonucleotide
atcgctggtctcctagagaaacccgacgag

SEQ ID NO: 131149 - DNA, 30 bp, Artificial Sequence
  Synthetic oligonucleotide
gttttggttccaactggcaatagggacgag

SEQ ID NO: 131150 - DNA, 30 bp, Artificial Sequence
  Synthetic oligonucleotide
caaccgaacgcaagagaaggtatgtacgag

SEQ ID NO: 131151 - DNA, 30 bp, Artificial Sequence
  Synthetic oligonucleotide
tcgattaatagaaccgtggtggattacgag

SEQ ID NO: 131152 - DNA, 30 bp, Artificial Sequence
  Synthetic oligonucleotide
aataataatgtcggagttaccatttacgag

SEQ ID NO: 131153 - DNA, 30 bp, Artificial Sequence
  Synthetic oligonucleotide
tacgcggaacattgctggggagccaccgag

SEQ ID NO: 131154 - DNA, 30 bp, Artificial Sequence
  Synthetic oligonucleotide
aatagtggtacggtgtaagcgaagaccgag

SEQ ID NO: 131155 - DNA, 30 bp, Artificial Sequence
  Synthetic oligonucleotide
agtgccgatttatccgagtgttcacccgag

SEQ ID NO: 131156 - DNA, 30 bp, Artificial Sequence
  Synthetic oligonucleotide
gcagatgcgggaatgacggaacaccccgag

SEQ ID NO: 131157 - DNA, 30 bp, Artificial Sequence
  Synthetic oligonucleotide
aaatctgtgcaaggttaatatacgcccgag

SEQ ID NO: 131158 - DNA, 30 bp, Artificial Sequence
  Synthetic oligonucleotide
tcatggataccgacggctcggtatcccgag

SEQ ID NO: 131159 - DNA, 30 bp, Artificial Sequence
  Synthetic oligonucleotide
ccgcggatatggtagaatttcaacgccgag

SEQ ID NO: 131160 - DNA, 30 bp, Artificial Sequence
  Synthetic oligonucleotide
tcgaatttgtgttagatgtgatgggccgag

SEQ ID NO: 131161 - DNA, 30 bp, Artificial Sequence
  Synthetic oligonucleotide
ggctgagccgcgtcacgccataatgccgag

SEQ ID NO: 131162 - DNA, 30 bp, Artificial Sequence
  Synthetic oligonucleotide
tacggcgagttcttcgcgtgtgctgccgag

SEQ ID NO: 131163 - DNA, 30 bp, Artificial Sequence
  Synthetic oligonucleotide
acacgagagccctcgagtaattgatccgag

SEQ ID NO: 131164 - DNA, 30 bp, Artificial Sequence
  Synthetic oligonucleotide
aaacggtgacggtccccttttcgctccgag

SEQ ID NO: 131165 - DNA, 30 bp, Artificial Sequence
  Synthetic oligonucleotide
tatagctttcggttcaacccccggagcgag

SEQ ID NO: 131166 - DNA, 30 bp, Artificial Sequence
  Synthetic oligonucleotide
gggatttcgttggaaagacgaaatagcgag

SEQ ID NO: 131167 - DNA, 30 bp, Artificial Sequence
  Synthetic oligonucleotide
ggaaatcggtagcagacagatagtagcgag

SEQ ID NO: 131168 - DNA, 30 bp, Artificial Sequence
  Synthetic oligonucleotide
gcatctgggagtgttggccgaggtagcgag

SEQ ID NO: 131169 - DNA, 30 bp, Artificial Sequence
  Synthetic oligonucleotide
tccttctgatgcttctccgtgtatcgcgag

SEQ ID NO: 131170 - DNA, 30 bp, Artificial Sequence
  Synthetic oligonucleotide
taacgatgggtggtggttgatagaggcgag

SEQ ID NO: 131171 - DNA, 30 bp, Artificial Sequence
  Synthetic oligonucleotide
aagcagaccgtcccatacacaggaggcgag

SEQ ID NO: 131172 - DNA, 30 bp, Artificial Sequence
  Synthetic oligonucleotide
acaagaatttggaaataccctctaggcgag

SEQ ID NO: 131173 - DNA, 30 bp, Artificial Sequence
  Synthetic oligonucleotide
atcagcgttgtttatccactacacggcgag

SEQ ID NO: 131174 - DNA, 30 bp, Artificial Sequence
  Synthetic oligonucleotide
ggcccgtattacagcgggaaggggggcgag

SEQ ID NO: 131175 - DNA, 30 bp, Artificial Sequence
  Synthetic oligonucleotide
tggctcgcaaggcagtagtgacttggcgag

SEQ ID NO: 131176 - DNA, 30 bp, Artificial Sequence
  Synthetic oligonucleotide
ttgatggccagcagtgaaagtatctgcgag

SEQ ID NO: 131177 - DNA, 30 bp, Artificial Sequence
  Synthetic oligonucleotide
agtccgggcagtcgatacaccatgtgcgag

SEQ ID NO: 131178 - DNA, 30 bp, Artificial Sequence
  Synthetic oligonucleotide
gtttagctttgcaaatcgcgtctgtgcgag

SEQ ID NO: 131179 - DNA, 30 bp, Artificial Sequence
  Synthetic oligonucleotide
acaattcaccaagggcatgctgtgtgcgag

SEQ ID NO: 131180 - DNA, 30 bp, Artificial Sequence
  Synthetic oligonucleotide
tgagtcccgtcctgtcttgtcccaatcgag

SEQ ID NO: 131181 - DNA, 30 bp, Artificial Sequence
  Synthetic oligonucleotide
tttggcactaaacaggtgcggtgaatcgag

SEQ ID NO: 131182 - DNA, 30 bp, Artificial Sequence
  Synthetic oligonucleotide
tgtcatgattgcgcgtgaaatttgatcgag

SEQ ID NO: 131183 - DNA, 30 bp, Artificial Sequence
  Synthetic oligonucleotide
aactctcgatagatgggagggttactcgag

SEQ ID NO: 131184 - DNA, 30 bp, Artificial Sequence
  Synthetic oligonucleotide
ctcctcgagcgaggaaagagcaagctcgag

SEQ ID NO: 131185 - DNA, 30 bp, Artificial Sequence
  Synthetic oligonucleotide
actgtttattagagcagtgcagagctcgag

SEQ ID NO: 131186 - DNA, 30 bp, Artificial Sequence
  Synthetic oligonucleotide
gcacacgttggtcttacagagtcgctcgag

SEQ ID NO: 131187 - DNA, 30 bp, Artificial Sequence
  Synthetic oligonucleotide
ggttagttatgccgacaagtgtttctcgag

SEQ ID NO: 131188 - DNA, 30 bp, Artificial Sequence
  Synthetic oligonucleotide
agtcaaatgacggtcacggaggaggtcgag

SEQ ID NO: 131189 - DNA, 30 bp, Artificial Sequence
  Synthetic oligonucleotide
ccggacctatactcggagccatgggtcgag

SEQ ID NO: 131190 - DNA, 30 bp, Artificial Sequence
  Synthetic oligonucleotide
gttttacgaagtgacacaacctgtgtcgag

SEQ ID NO: 131191 - DNA, 30 bp, Artificial Sequence
  Synthetic oligonucleotide
aacaacgttcggtctcacaaagtcttcgag

SEQ ID NO: 131192 - DNA, 30 bp, Artificial Sequence
  Synthetic oligonucleotide
ggatccgagtgatattttgctgtaaaggag

SEQ ID NO: 131193 - DNA, 30 bp, Artificial Sequence
  Synthetic oligonucleotide
cgcgacttattaactacaggacacaaggag

SEQ ID NO: 131194 - DNA, 30 bp, Artificial Sequence
  Synthetic oligonucleotide
tacgcagggaaacgcacgggccacaaggag

SEQ ID NO: 131195 - DNA, 30 bp, Artificial Sequence
  Synthetic oligonucleotide
aatcaagaggtcgagaggcttaataaggag

SEQ ID NO: 131196 - DNA, 30 bp, Artificial Sequence
  Synthetic oligonucleotide
tgtcatattgtgatactaacttataaggag

SEQ ID NO: 131197 - DNA, 30 bp, Artificial Sequence
  Synthetic oligonucleotide
gaactactctgtttcggatcacgtaaggag

SEQ ID NO: 131198 - DNA, 30 bp, Artificial Sequence
  Synthetic oligonucleotide
cagcagtcttaagcaaacgttgaacaggag

SEQ ID NO: 131199 - DNA, 30 bp, Artificial Sequence
  Synthetic oligonucleotide
gatgtacgtaagggttcttgaaaccaggag

SEQ ID NO: 131200 - DNA, 30 bp, Artificial Sequence
  Synthetic oligonucleotide
tcttattacaaaattctccacggccaggag

SEQ ID NO: 131201 - DNA, 30 bp, Artificial Sequence
  Synthetic oligonucleotide
gaaactaatcataaagcgtttctccaggag

SEQ ID NO: 131202 - DNA, 30 bp, Artificial Sequence
  Synthetic oligonucleotide
ggaatggatccaattgatcatttccaggag

SEQ ID NO: 131203 - DNA, 30 bp, Artificial Sequence
  Synthetic oligonucleotide
ttttagctagtatacgccagtcggcaggag

SEQ ID NO: 131204 - DNA, 30 bp, Artificial Sequence
  Synthetic oligonucleotide
tgacacggatggaaattagcatctcaggag

SEQ ID NO: 131205 - DNA, 30 bp, Artificial Sequence
  Synthetic oligonucleotide
tagaggcgggtattgttctagcgtcaggag

SEQ ID NO: 131206 - DNA, 30 bp, Artificial Sequence
  Synthetic oligonucleotide
taccgcaatggtcaagcgcagtaagaggag

SEQ ID NO: 131207 - DNA, 30 bp, Artificial Sequence
  Synthetic oligonucleotide
aggattcagcaccgcagttatatcgaggag

SEQ ID NO: 131208 - DNA, 30 bp, Artificial Sequence
  Synthetic oligonucleotide
accgctgtgtgggccaatgtgacggaggag

SEQ ID NO: 131209 - DNA, 30 bp, Artificial Sequence
  Synthetic oligonucleotide
aatcagggatttggtttggatcgtgaggag

SEQ ID NO: 131210 - DNA, 30 bp, Artificial Sequence
  Synthetic oligonucleotide
cataggctgtggctcctaacaacataggag

SEQ ID NO: 131211 - DNA, 30 bp, Artificial Sequence
  Synthetic oligonucleotide
gtcggaaatacttctattccgccataggag

SEQ ID NO: 131212 - DNA, 30 bp, Artificial Sequence
  Synthetic oligonucleotide
gtcgtgtcgtgtggttcaatttgataggag

SEQ ID NO: 131213 - DNA, 30 bp, Artificial Sequence
  Synthetic oligonucleotide
ttagcttgtggatcatgaccgagctaggag

SEQ ID NO: 131214 - DNA, 30 bp, Artificial Sequence
  Synthetic oligonucleotide
actattattgccactatgcccgggacggag

SEQ ID NO: 131215 - DNA, 30 bp, Artificial Sequence
  Synthetic oligonucleotide
aggcaggcacatacatcgctaggtacggag

SEQ ID NO: 131216 - DNA, 30 bp, Artificial Sequence
  Synthetic oligonucleotide
ctataccagtatttcactcggcttacggag

SEQ ID NO: 131217 - DNA, 30 bp, Artificial Sequence
  Synthetic oligonucleotide
attgcatggccacaccaattttacccggag

SEQ ID NO: 131218 - DNA, 30 bp, Artificial Sequence
  Synthetic oligonucleotide
cgtcgggggtatgaatggatggctccggag

SEQ ID NO: 131219 - DNA, 30 bp, Artificial Sequence
  Synthetic oligonucleotide
ggggatccgccttggcgtgcaatagcggag

SEQ ID NO: 131220 - DNA, 30 bp, Artificial Sequence
  Synthetic oligonucleotide
actgaatttatacaaatagaacgcgcggag

SEQ ID NO: 131221 - DNA, 30 bp, Artificial Sequence
  Synthetic oligonucleotide
taaacagaggcgatacagcacaaggcggag

SEQ ID NO: 131222 - DNA, 30 bp, Artificial Sequence
  Synthetic oligonucleotide
acaactagactgttgagcagtatatcggag

SEQ ID NO: 131223 - DNA, 30 bp, Artificial Sequence
  Synthetic oligonucleotide
ttcggcacagtcaactaatataactcggag

SEQ ID NO: 131224 - DNA, 30 bp, Artificial Sequence
  Synthetic oligonucleotide
aggtcgtgtggcacggcacacgcctcggag

SEQ ID NO: 131225 - DNA, 30 bp, Artificial Sequence
  Synthetic oligonucleotide
ctttggggccctgtcgagctgagctcggag

SEQ ID NO: 131226 - DNA, 30 bp, Artificial Sequence
  Synthetic oligonucleotide
tatggtaatacgaatccatcggattcggag

SEQ ID NO: 131227 - DNA, 30 bp, Artificial Sequence
  Synthetic oligonucleotide
gtcagagtcaaaccctttaaactaagggag

SEQ ID NO: 131228 - DNA, 30 bp, Artificial Sequence
  Synthetic oligonucleotide
tggctgatccgcgaatcccgttggagggag

SEQ ID NO: 131229 - DNA, 30 bp, Artificial Sequence
  Synthetic oligonucleotide
tcgatgggccaaaacaacgggcttagggag

SEQ ID NO: 131230 - DNA, 30 bp, Artificial Sequence
  Synthetic oligonucleotide
gagtacaaggtgtgtgcggaatacggggag

SEQ ID NO: 131231 - DNA, 30 bp, Artificial Sequence
  Synthetic oligonucleotide
taagtcgtcggaccctcgcagttcggggag

SEQ ID NO: 131232 - DNA, 30 bp, Artificial Sequence
  Synthetic oligonucleotide
cgggatttgtggtaggagctgaggggggag

SEQ ID NO: 131233 - DNA, 30 bp, Artificial Sequence
  Synthetic oligonucleotide
gcctcgacacgcatgagttcccagtgggag

SEQ ID NO: 131234 - DNA, 31 bp, Artificial Sequence
  Synthetic oligonucleotide
aaaacaagtcaaagcctgtgaaacttgggag

SEQ ID NO: 131235 - DNA, 30 bp, Artificial Sequence
  Synthetic oligonucleotide
gtagaagtccatattatcgaacgttgggag

SEQ ID NO: 131236 - DNA, 30 bp, Artificial Sequence
  Synthetic oligonucleotide
ccgcgagacgtacgcggtgcgcatatggag

SEQ ID NO: 131237 - DNA, 30 bp, Artificial Sequence
  Synthetic oligonucleotide
accgataaggagccgcgtttagacctggag

SEQ ID NO: 131238 - DNA, 30 bp, Artificial Sequence
  Synthetic oligonucleotide
cggacggatagggatcggataagcctggag

SEQ ID NO: 131239 - DNA, 30 bp, Artificial Sequence
  Synthetic oligonucleotide
accggtataaagaccagattgtcgctggag

SEQ ID NO: 131240 - DNA, 30 bp, Artificial Sequence
  Synthetic oligonucleotide
gcaaacatgcggggtacgtactgggtggag

SEQ ID NO: 131241 - DNA, 30 bp, Artificial Sequence
  Synthetic oligonucleotide
ggggcacacgctagacttccgaatgtggag

SEQ ID NO: 131242 - DNA, 30 bp, Artificial Sequence
  Synthetic oligonucleotide
ttagtgcggccagtattagaggatgtggag

SEQ ID NO: 131243 - DNA, 30 bp, Artificial Sequence
  Synthetic oligonucleotide
ctaggaagtcaaatagaagcgtgcttggag

SEQ ID NO: 131244 - DNA, 30 bp, Artificial Sequence
  Synthetic oligonucleotide
cggccccagttgatcagtggtctcttggag

SEQ ID NO: 131245 - DNA, 30 bp, Artificial Sequence
  Synthetic oligonucleotide
accactaagctgcagttcgtctagttggag

SEQ ID NO: 131246 - DNA, 30 bp, Artificial Sequence
  Synthetic oligonucleotide
cgattcttacgtagaggtagaagtttggag

SEQ ID NO: 131247 - DNA, 30 bp, Artificial Sequence
  Synthetic oligonucleotide
cagtaacgaattcgccatcaaggcaatgag

SEQ ID NO: 131248 - DNA, 30 bp, Artificial Sequence
  Synthetic oligonucleotide
ttaggctcatagtcggtacgaccacatgag

SEQ ID NO: 131249 - DNA, 30 bp, Artificial Sequence
  Synthetic oligonucleotide
cacactcgtaaaagggggaccgagcatgag

SEQ ID NO: 131250 - DNA, 30 bp, Artificial Sequence
  Synthetic oligonucleotide
ggcattagtaattacgttcaccggcatgag

SEQ ID NO: 131251 - DNA, 30 bp, Artificial Sequence
  Synthetic oligonucleotide
tcagaaattggtataggccgacacgatgag

SEQ ID NO: 131252 - DNA, 30 bp, Artificial Sequence
  Synthetic oligonucleotide
aatctgcctatagcagagggagcgtatgag

SEQ ID NO: 131253 - DNA, 30 bp, Artificial Sequence
  Synthetic oligonucleotide
acttgccgttgcgccaaactatgcactgag

SEQ ID NO: 131254 - DNA, 30 bp, Artificial Sequence
  Synthetic oligonucleotide
ggaagacagaattagagcggattcactgag

SEQ ID NO: 131255 - DNA, 30 bp, Artificial Sequence
  Synthetic oligonucleotide
accaggaggttacgtcaaaggacgactgag

SEQ ID NO: 131256 - DNA, 30 bp, Artificial Sequence
  Synthetic oligonucleotide
tgttttagaacgtgagtcagcgggactgag

SEQ ID NO: 131257 - DNA, 30 bp, Artificial Sequence
  Synthetic oligonucleotide
cttatgatcctagagggcaccactactgag

SEQ ID NO: 131258 - DNA, 30 bp, Artificial Sequence
  Synthetic oligonucleotide
aggtctctcaaaccagaggcgagtactgag

SEQ ID NO: 131259 - DNA, 30 bp, Artificial Sequence
  Synthetic oligonucleotide
cctttgctagctgcctatgcaatccctgag

SEQ ID NO: 131260 - DNA, 30 bp, Artificial Sequence
  Synthetic oligonucleotide
tagtgggaagtattctcgcgtctgcctgag

SEQ ID NO: 131261 - DNA, 30 bp, Artificial Sequence
  Synthetic oligonucleotide
agcaaatcaagtgaactggttttgcctgag

SEQ ID NO: 131262 - DNA, 30 bp, Artificial Sequence
  Synthetic oligonucleotide
gtgatttgggtcttgccgttagtagctgag

SEQ ID NO: 131263 - DNA, 30 bp, Artificial Sequence
  Synthetic oligonucleotide
caggctgtaaggctagatgggtgggctgag

SEQ ID NO: 131264 - DNA, 30 bp, Artificial Sequence
  Synthetic oligonucleotide
actggatcagtgaactattagcgtgctgag

SEQ ID NO: 131265 - DNA, 30 bp, Artificial Sequence
  Synthetic oligonucleotide
aaggattgtcgttgcgcttgacttgctgag

SEQ ID NO: 131266 - DNA, 30 bp, Artificial Sequence
  Synthetic oligonucleotide
atccatagggcggaacatatcaactctgag

SEQ ID NO: 131267 - DNA, 30 bp, Artificial Sequence
  Synthetic oligonucleotide
cacttggtgaggatttggggtgtttctgag

SEQ ID NO: 131268 - DNA, 30 bp, Artificial Sequence
  Synthetic oligonucleotide
acaaggagcccccgttcgtgggacagtgag

SEQ ID NO: 131269 - DNA, 30 bp, Artificial Sequence
  Synthetic oligonucleotide
gccttctgtccatctcggatctacagtgag

SEQ ID NO: 131270 - DNA, 30 bp, Artificial Sequence
  Synthetic oligonucleotide
tcgtcaaatagagcgagcgtaaatagtgag

SEQ ID NO: 131271 - DNA, 30 bp, Artificial Sequence
  Synthetic oligonucleotide
cacattttttgcaatccccggagacgtgag

SEQ ID NO: 131272 - DNA, 30 bp, Artificial Sequence
  Synthetic oligonucleotide
ccgataaatgagtttgctcgttaccgtgag

SEQ ID NO: 131273 - DNA, 30 bp, Artificial Sequence
  Synthetic oligonucleotide
atcgatatgtgcctcaaactcctgcgtgag

SEQ ID NO: 131274 - DNA, 30 bp, Artificial Sequence
  Synthetic oligonucleotide
caattgtgaacggcaactcgggcaggtgag

SEQ ID NO: 131275 - DNA, 30 bp, Artificial Sequence
  Synthetic oligonucleotide
aatcgtgaagtatctcagaaggtcggtgag

SEQ ID NO: 131276 - DNA, 30 bp, Artificial Sequence
  Synthetic oligonucleotide
tgagaccactcgagtgcctacttcggtgag

SEQ ID NO: 131277 - DNA, 30 bp, Artificial Sequence
  Synthetic oligonucleotide
agcataggctaaggtggctgatttggtgag

SEQ ID NO: 131278 - DNA, 30 bp, Artificial Sequence
  Synthetic oligonucleotide
cacgtagaggctacaggttcaaaatgtgag

SEQ ID NO: 131279 - DNA, 30 bp, Artificial Sequence
  Synthetic oligonucleotide
gatggcccggtccatcatactacctgtgag

SEQ ID NO: 131280 - DNA, 30 bp, Artificial Sequence
  Synthetic oligonucleotide
atctgttacaccggagatcaagtttgtgag

SEQ ID NO: 131281 - DNA, 30 bp, Artificial Sequence
  Synthetic oligonucleotide
tcctggttaggtagacagggaagaattgag

SEQ ID NO: 131282 - DNA, 30 bp, Artificial Sequence
  Synthetic oligonucleotide
ccccacacagagttatatggacgaattgag

SEQ ID NO: 131283 - DNA, 30 bp, Artificial Sequence
  Synthetic oligonucleotide
actgatcacaacagactgagtttcattgag

SEQ ID NO: 131284 - DNA, 30 bp, Artificial Sequence
  Synthetic oligonucleotide
cacgtgcctctatccgcatcggctattgag

SEQ ID NO: 131285 - DNA, 30 bp, Artificial Sequence
  Synthetic oligonucleotide
aatgccttggggtcgggctttgttcttgag

SEQ ID NO: 131286 - DNA, 30 bp, Artificial Sequence
  Synthetic oligonucleotide
ctaatgtggcaaggccgttaatgcgttgag

SEQ ID NO: 131287 - DNA, 35 bp, Artificial Sequence
  Synthetic oligonucleotide
gttatttcagaaagattacgtaaatagcggttgag

SEQ ID NO: 131288 - DNA, 30 bp, Artificial Sequence
  Synthetic oligonucleotide
agttctaacgcccacacggaacgtgttgag

SEQ ID NO: 131289 - DNA, 30 bp, Artificial Sequence
  Synthetic oligonucleotide
gaaacctgcacataggctggtaactttgag

SEQ ID NO: 131290 - DNA, 30 bp, Artificial Sequence
  Synthetic oligonucleotide
acctgaagagaaggcaggtaatactttgag

SEQ ID NO: 131291 - DNA, 30 bp, Artificial Sequence
  Synthetic oligonucleotide
gccgctggtgagtatacagcgccaaaatag

SEQ ID NO: 131292 - DNA, 30 bp, Artificial Sequence
  Synthetic oligonucleotide
gcataagcagttgagaacatgtctaaatag

SEQ ID NO: 131293 - DNA, 30 bp, Artificial Sequence
  Synthetic oligonucleotide
gtttgggacagcgaggagttggaacaatag

SEQ ID NO: 131294 - DNA, 30 bp, Artificial Sequence
  Synthetic oligonucleotide
cggcgtcaagtccaaaattgcccacaatag

SEQ ID NO: 131295 - DNA, 30 bp, Artificial Sequence
  Synthetic oligonucleotide
ggattgtttagtaatgcccctatacaatag

SEQ ID NO: 131296 - DNA, 30 bp, Artificial Sequence
  Synthetic oligonucleotide
tgtcatagtgtcagctgacaaaaccaatag

SEQ ID NO: 131297 - DNA, 30 bp, Artificial Sequence
  Synthetic oligonucleotide
ctgcgtaagaactttggctaataagaatag

SEQ ID NO: 131298 - DNA, 30 bp, Artificial Sequence
  Synthetic oligonucleotide
agacgctcgaagaaatgtcatgtagaatag

SEQ ID NO: 131299 - DNA, 30 bp, Artificial Sequence
  Synthetic oligonucleotide
tggtgacgaaagctgattctcgtcgaatag

SEQ ID NO: 131300 - DNA, 30 bp, Artificial Sequence
  Synthetic oligonucleotide
ttaggtgaaggcatatctcagcaggaatag

SEQ ID NO: 131301 - DNA, 30 bp, Artificial Sequence
  Synthetic oligonucleotide
tcaataacttcatggataatataggaatag

SEQ ID NO: 131302 - DNA, 30 bp, Artificial Sequence
  Synthetic oligonucleotide
ttgaccgaacggtaggcgagtaatgaatag

SEQ ID NO: 131303 - DNA, 30 bp, Artificial Sequence
  Synthetic oligonucleotide
gatgcgcgagcatacacacccgaaacatag

SEQ ID NO: 131304 - DNA, 30 bp, Artificial Sequence
  Synthetic oligonucleotide
cgtttgagggctagttcgcgcccgacatag

SEQ ID NO: 131305 - DNA, 30 bp, Artificial Sequence
  Synthetic oligonucleotide
aatcgaggccccacgccgatacctacatag

SEQ ID NO: 131306 - DNA, 30 bp, Artificial Sequence
  Synthetic oligonucleotide
aatgtgcaggagtaaaaatgtagtacatag

SEQ ID NO: 131307 - DNA, 30 bp, Artificial Sequence
  Synthetic oligonucleotide
gggctaatgtcatggtctggcacaccatag

SEQ ID NO: 131308 - DNA, 30 bp, Artificial Sequence
  Synthetic oligonucleotide
acaggtgtggtcgactcggggtacccatag

SEQ ID NO: 131309 - DNA, 30 bp, Artificial Sequence
  Synthetic oligonucleotide
tgtgattcgtcacaggccggacatccatag

SEQ ID NO: 131310 - DNA, 30 bp, Artificial Sequence
  Synthetic oligonucleotide
tgatgaatagaatttctggttctggcatag

SEQ ID NO: 131311 - DNA, 30 bp, Artificial Sequence
  Synthetic oligonucleotide
gtccacgcataacgagcccaattggcatag

SEQ ID NO: 131312 - DNA, 30 bp, Artificial Sequence
  Synthetic oligonucleotide
ctggtattatggccttccgactactcatag

SEQ ID NO: 131313 - DNA, 30 bp, Artificial Sequence
  Synthetic oligonucleotide
taacggtaataccagggtgagctctcatag

SEQ ID NO: 131314 - DNA, 30 bp, Artificial Sequence
  Synthetic oligonucleotide
cagctggagatgctttatggctagtcatag

SEQ ID NO: 131315 - DNA, 30 bp, Artificial Sequence
  Synthetic oligonucleotide
ctgaacgcataccaacctacgccgtcatag

SEQ ID NO: 131316 - DNA, 30 bp, Artificial Sequence
  Synthetic oligonucleotide
agcttgattcccttgatgcaagcttcatag

SEQ ID NO: 131317 - DNA, 30 bp, Artificial Sequence
  Synthetic oligonucleotide
ttgccaaatccgcttgacttcgcaagatag

SEQ ID NO: 131318 - DNA, 30 bp, Artificial Sequence
  Synthetic oligonucleotide
gaaatataaaatctcaagacactgagatag

SEQ ID NO: 131319 - DNA, 30 bp, Artificial Sequence
  Synthetic oligonucleotide
tttataggtgatgaatgaaatcaacgatag

SEQ ID NO: 131320 - DNA, 30 bp, Artificial Sequence
  Synthetic oligonucleotide
gaggctaaaacattttaaagtacccgatag

SEQ ID NO: 131321 - DNA, 30 bp, Artificial Sequence
  Synthetic oligonucleotide
gtgtacactgatcgcgaagaatggcgatag

SEQ ID NO: 131322 - DNA, 30 bp, Artificial Sequence
  Synthetic oligonucleotide
cactatataacgctatcgtccggaggatag

SEQ ID NO: 131323 - DNA, 30 bp, Artificial Sequence
  Synthetic oligonucleotide
caagataatgcgttaggcattgtaggatag

SEQ ID NO: 131324 - DNA, 30 bp, Artificial Sequence
  Synthetic oligonucleotide
tagaataataggataaagagcaacggatag

SEQ ID NO: 131325 - DNA, 30 bp, Artificial Sequence
  Synthetic oligonucleotide
agatgggatgatcgtattggtctcggatag

SEQ ID NO: 131326 - DNA, 30 bp, Artificial Sequence
  Synthetic oligonucleotide
gggagcttgcgggatctggattcgggatag

SEQ ID NO: 131327 - DNA, 30 bp, Artificial Sequence
  Synthetic oligonucleotide
gctcttgtccatttgggaatacggggatag

SEQ ID NO: 131328 - DNA, 30 bp, Artificial Sequence
  Synthetic oligonucleotide
cgtgtgttatatccagcttcaatctgatag

SEQ ID NO: 131329 - DNA, 30 bp, Artificial Sequence
  Synthetic oligonucleotide
agatgcagtgccagggcaagtgagtgatag

SEQ ID NO: 131330 - DNA, 30 bp, Artificial Sequence
  Synthetic oligonucleotide
tctccatatcggcggcatcaaacgtgatag

SEQ ID NO: 131331 - DNA, 30 bp, Artificial Sequence
  Synthetic oligonucleotide
ggaatgagatgcatcggggcaatcatatag

SEQ ID NO: 131332 - DNA, 30 bp, Artificial Sequence
  Synthetic oligonucleotide
tggctggcgtaataacttcgttgtatatag

SEQ ID NO: 131333 - DNA, 30 bp, Artificial Sequence
  Synthetic oligonucleotide
acagcgtcaggttgtagcgaatgactatag

SEQ ID NO: 131334 - DNA, 30 bp, Artificial Sequence
  Synthetic oligonucleotide
ggtatgtacacatccgtctattcgctatag

SEQ ID NO: 131335 - DNA, 30 bp, Artificial Sequence
  Synthetic oligonucleotide
aatgtgagtaagactgctgtcacagtatag

SEQ ID NO: 131336 - DNA, 30 bp, Artificial Sequence
  Synthetic oligonucleotide
cctacgtgtggtgtcagtacagttgtatag

SEQ ID NO: 131337 - DNA, 30 bp, Artificial Sequence
  Synthetic oligonucleotide
aaagtcataaccggatcggcaatattatag

SEQ ID NO: 131338 - DNA, 30 bp, Artificial Sequence
  Synthetic oligonucleotide
cgacctcgcgctagctcatctgcgttatag

SEQ ID NO: 131339 - DNA, 30 bp, Artificial Sequence
  Synthetic oligonucleotide
gcgtcggggagtatagtctactgtttatag

SEQ ID NO: 131340 - DNA, 30 bp, Artificial Sequence
  Synthetic oligonucleotide
gcttcgtctagaaccttccgggcaaactag

SEQ ID NO: 131341 - DNA, 30 bp, Artificial Sequence
  Synthetic oligonucleotide
gtaccgcccaacgaaaccactcataactag

SEQ ID NO: 131342 - DNA, 30 bp, Artificial Sequence
  Synthetic oligonucleotide
tgtatggtagttggaatgctaaggcactag

SEQ ID NO: 131343 - DNA, 30 bp, Artificial Sequence
  Synthetic oligonucleotide
tacaggagaaacgtcttctaatgagactag

SEQ ID NO: 131344 - DNA, 30 bp, Artificial Sequence
  Synthetic oligonucleotide
gtatcgtcaagaagggcatgactggactag

SEQ ID NO: 131345 - DNA, 30 bp, Artificial Sequence
  Synthetic oligonucleotide
tcattcttctggtctggaagacgatactag

SEQ ID NO: 131346 - DNA, 30 bp, Artificial Sequence
  Synthetic oligonucleotide
actccatgcaaccaaacatattgatactag

SEQ ID NO: 131347 - DNA, 30 bp, Artificial Sequence
  Synthetic oligonucleotide
aagtttgaagggcgccccgccgcaacctag

SEQ ID NO: 131348 - DNA, 30 bp, Artificial Sequence
  Synthetic oligonucleotide
aggagggggaaacggtggactgcaacctag

SEQ ID NO: 131349 - DNA, 30 bp, Artificial Sequence
  Synthetic oligonucleotide
gtatcgcactgttttactaactggacctag

SEQ ID NO: 131350 - DNA, 30 bp, Artificial Sequence
  Synthetic oligonucleotide
ataagattctacttcgtggacgatacctag

SEQ ID NO: 131351 - DNA, 30 bp, Artificial Sequence
  Synthetic oligonucleotide
gtcgataagctgcgccgtgcacgtacctag

SEQ ID NO: 131352 - DNA, 30 bp, Artificial Sequence
  Synthetic oligonucleotide
tggcaccggtatggtactattggtacctag

SEQ ID NO: 131353 - DNA, 30 bp, Artificial Sequence
  Synthetic oligonucleotide
ggtaaaacgggctcacaattttaaccctag

SEQ ID NO: 131354 - DNA, 30 bp, Artificial Sequence
  Synthetic oligonucleotide
tggcaggaaagcattaacacacagccctag

SEQ ID NO: 131355 - DNA, 30 bp, Artificial Sequence
  Synthetic oligonucleotide
atacgccgccatatcccaatgaggccctag

SEQ ID NO: 131356 - DNA, 30 bp, Artificial Sequence
  Synthetic oligonucleotide
cgtgactggtagtcaagggatgcggcctag

SEQ ID NO: 131357 - DNA, 30 bp, Artificial Sequence
  Synthetic oligonucleotide
acgatctgtgatgccgttccggatgcctag

SEQ ID NO: 131358 - DNA, 30 bp, Artificial Sequence
  Synthetic oligonucleotide
ggcatgctgggagttagttaacttgcctag

SEQ ID NO: 131359 - DNA, 30 bp, Artificial Sequence
  Synthetic oligonucleotide
cctgtcaagtggcccaaataacgctcctag

SEQ ID NO: 131360 - DNA, 30 bp, Artificial Sequence
  Synthetic oligonucleotide
ggtcaaataagaacagaaattccgtcctag

SEQ ID NO: 131361 - DNA, 30 bp, Artificial Sequence
  Synthetic oligonucleotide
cggtattgcgtcgtgtacttgtggtcctag

SEQ ID NO: 131362 - DNA, 30 bp, Artificial Sequence
  Synthetic oligonucleotide
actcgattgatggcaaaaaaggtacgctag

SEQ ID NO: 131363 - DNA, 30 bp, Artificial Sequence
  Synthetic oligonucleotide
ggaaaaaggattaagactacaaatcgctag

SEQ ID NO: 131364 - DNA, 30 bp, Artificial Sequence
  Synthetic oligonucleotide
tactcgccaacgccagttttcactcgctag

SEQ ID NO: 131365 - DNA, 30 bp, Artificial Sequence
  Synthetic oligonucleotide
cttaggcaagcacgcggtagcctcggctag

SEQ ID NO: 131366 - DNA, 30 bp, Artificial Sequence
  Synthetic oligonucleotide
cagtgatcattaaagaatgtggcgggctag

SEQ ID NO: 131367 - DNA, 30 bp, Artificial Sequence
  Synthetic oligonucleotide
ttggtagagtgggatataggagctggctag

SEQ ID NO: 131368 - DNA, 30 bp, Artificial Sequence
  Synthetic oligonucleotide
ggagacgggcatgcattaatcaggtgctag

SEQ ID NO: 131369 - DNA, 30 bp, Artificial Sequence
  Synthetic oligonucleotide
ccttgaattggaaccgtagacctgtgctag

SEQ ID NO: 131370 - DNA, 30 bp, Artificial Sequence
  Synthetic oligonucleotide
gtgaaaaccgtcaaaagaatgctgtgctag

SEQ ID NO: 131371 - DNA, 30 bp, Artificial Sequence
  Synthetic oligonucleotide
attcaaaattaaacggcaggggtgtgctag

SEQ ID NO: 131372 - DNA, 30 bp, Artificial Sequence
  Synthetic oligonucleotide
gggggtggattgtgatttcttttttgctag

SEQ ID NO: 131373 - DNA, 30 bp, Artificial Sequence
  Synthetic oligonucleotide
attcaatgagccagcaattcctaaatctag

SEQ ID NO: 131374 - DNA, 30 bp, Artificial Sequence
  Synthetic oligonucleotide
acttctcacttgacgaagtcgaccatctag

SEQ ID NO: 131375 - DNA, 30 bp, Artificial Sequence
  Synthetic oligonucleotide
gattgggagacgtcggttaccgccatctag

SEQ ID NO: 131376 - DNA, 30 bp, Artificial Sequence
  Synthetic oligonucleotide
cggtacagctacattgccgggtccatctag

SEQ ID NO: 131377 - DNA, 30 bp, Artificial Sequence
  Synthetic oligonucleotide
cagatcaaactaagttgaactcgcctctag

SEQ ID NO: 131378 - DNA, 30 bp, Artificial Sequence
  Synthetic oligonucleotide
acttgggcaacaacgacatattgcctctag

SEQ ID NO: 131379 - DNA, 30 bp, Artificial Sequence
  Synthetic oligonucleotide
cacattgtgtgattgaggacagaagtctag

SEQ ID NO: 131380 - DNA, 30 bp, Artificial Sequence
  Synthetic oligonucleotide
ggtatgcatacagtgtaagggccggtctag

SEQ ID NO: 131381 - DNA, 30 bp, Artificial Sequence
  Synthetic oligonucleotide
tcctgcccaaaatgccttgcatttgtctag

SEQ ID NO: 131382 - DNA, 30 bp, Artificial Sequence
  Synthetic oligonucleotide
gcctcaggagttggaaggtgaaaattctag

SEQ ID NO: 131383 - DNA, 30 bp, Artificial Sequence
  Synthetic oligonucleotide
aagaacagaaatttgatgtcgcccttctag

SEQ ID NO: 131384 - DNA, 30 bp, Artificial Sequence
  Synthetic oligonucleotide
ttccattagcggaggtgcgctcgcttctag

SEQ ID NO: 131385 - DNA, 30 bp, Artificial Sequence
  Synthetic oligonucleotide
taacacacgaggtgacactacaaaaagtag

SEQ ID NO: 131386 - DNA, 30 bp, Artificial Sequence
  Synthetic oligonucleotide
aaattggcgtggtgaatctcgcaaaagtag

SEQ ID NO: 131387 - DNA, 30 bp, Artificial Sequence
  Synthetic oligonucleotide
agagagtcgttcttggagtagcacaagtag

SEQ ID NO: 131388 - DNA, 30 bp, Artificial Sequence
  Synthetic oligonucleotide
aggcgttccagtcgctgtgaatagaagtag

SEQ ID NO: 131389 - DNA, 30 bp, Artificial Sequence
  Synthetic oligonucleotide
atcgtacttcacggtcttcatacgaagtag

SEQ ID NO: 131390 - DNA, 30 bp, Artificial Sequence
  Synthetic oligonucleotide
caacgccggaagccttagcacacacagtag

SEQ ID NO: 131391 - DNA, 30 bp, Artificial Sequence
  Synthetic oligonucleotide
tacagagcgcgtgtgcgtgctagccagtag

SEQ ID NO: 131392 - DNA, 30 bp, Artificial Sequence
  Synthetic oligonucleotide
agatggagcacgaaagagaaacgccagtag

SEQ ID NO: 131393 - DNA, 30 bp, Artificial Sequence
  Synthetic oligonucleotide
gcgacaaacaggatcgggggcgggcagtag

SEQ ID NO: 131394 - DNA, 30 bp, Artificial Sequence
  Synthetic oligonucleotide
cgtccaacaatgccaaggctggggcagtag

SEQ ID NO: 131395 - DNA, 30 bp, Artificial Sequence
  Synthetic oligonucleotide
cagcgggccgagcgtcacgaacgtcagtag

SEQ ID NO: 131396 - DNA, 30 bp, Artificial Sequence
  Synthetic oligonucleotide
tacgacttgacagtgctgaatactgagtag

SEQ ID NO: 131397 - DNA, 30 bp, Artificial Sequence
  Synthetic oligonucleotide
gatactgcacagccaatgcctccatagtag

SEQ ID NO: 131398 - DNA, 30 bp, Artificial Sequence
  Synthetic oligonucleotide
tttgcctaagcgcacgtcctggtgtagtag

SEQ ID NO: 131399 - DNA, 30 bp, Artificial Sequence
  Synthetic oligonucleotide
aactctctggaagaggtaaacgattagtag

SEQ ID NO: 131400 - DNA, 30 bp, Artificial Sequence
  Synthetic oligonucleotide
cccagatcgactggactgttatacacgtag

SEQ ID NO: 131401 - DNA, 30 bp, Artificial Sequence
  Synthetic oligonucleotide
tccctctaaaaagaccaatgcacgacgtag

SEQ ID NO: 131402 - DNA, 30 bp, Artificial Sequence
  Synthetic oligonucleotide
cacctgatacatgtgtaccgtggagcgtag

SEQ ID NO: 131403 - DNA, 30 bp, Artificial Sequence
  Synthetic oligonucleotide
gtccttagatgaagtctggaggaggcgtag

SEQ ID NO: 131404 - DNA, 30 bp, Artificial Sequence
  Synthetic oligonucleotide
cattaggggcactaaagagggcaatcgtag

SEQ ID NO: 131405 - DNA, 30 bp, Artificial Sequence
  Synthetic oligonucleotide
ggcgaagttggcaatatgggtcagtcgtag

SEQ ID NO: 131406 - DNA, 30 bp, Artificial Sequence
  Synthetic oligonucleotide
taaccacttaggtgcgcctctaggtcgtag

SEQ ID NO: 131407 - DNA, 30 bp, Artificial Sequence
  Synthetic oligonucleotide
tgggggagacagggactcatcctgtcgtag

SEQ ID NO: 131408 - DNA, 30 bp, Artificial Sequence
  Synthetic oligonucleotide
agtagaggtgtgcccgtcactggttcgtag

SEQ ID NO: 131409 - DNA, 30 bp, Artificial Sequence
  Synthetic oligonucleotide
gtaccctccatgcccatagtagctaggtag

SEQ ID NO: 131410 - DNA, 30 bp, Artificial Sequence
  Synthetic oligonucleotide
ccgtttagcggtgcacgaaagctacggtag

SEQ ID NO: 131411 - DNA, 30 bp, Artificial Sequence
  Synthetic oligonucleotide
tctgtagggccatataccaggcaccggtag

SEQ ID NO: 131412 - DNA, 30 bp, Artificial Sequence
  Synthetic oligonucleotide
cggtaaacctattccaatgcaggccggtag

SEQ ID NO: 131413 - DNA, 30 bp, Artificial Sequence
  Synthetic oligonucleotide
ggaaggttatctgcagtgccaatgcggtag

SEQ ID NO: 131414 - DNA, 30 bp, Artificial Sequence
  Synthetic oligonucleotide
agccatgtacagatagtttgtcgagggtag

SEQ ID NO: 131415 - DNA, 30 bp, Artificial Sequence
  Synthetic oligonucleotide
tctcatgcagctttgaaataagcggggtag

SEQ ID NO: 131416 - DNA, 30 bp, Artificial Sequence
  Synthetic oligonucleotide
tgatcctacgtaaggtgtgtgtgggggtag

SEQ ID NO: 131417 - DNA, 30 bp, Artificial Sequence
  Synthetic oligonucleotide
ataccacgctgatgggtctagttggggtag

SEQ ID NO: 131418 - DNA, 30 bp, Artificial Sequence
  Synthetic oligonucleotide
cagatgtaatatatctcgataaatgggtag

SEQ ID NO: 131419 - DNA, 30 bp, Artificial Sequence
  Synthetic oligonucleotide
gggtctaggagcacaattaatcctgggtag

SEQ ID NO: 131420 - DNA, 30 bp, Artificial Sequence
  Synthetic oligonucleotide
gggtaagagccgcaggttagtgcctggtag

SEQ ID NO: 131421 - DNA, 30 bp, Artificial Sequence
  Synthetic oligonucleotide
cgtggcttctcattcattagtcgaatgtag

SEQ ID NO: 131422 - DNA, 30 bp, Artificial Sequence
  Synthetic oligonucleotide
ggaactatacagagttgaggtcgaatgtag

SEQ ID NO: 131423 - DNA, 30 bp, Artificial Sequence
  Synthetic oligonucleotide
ccgccacgacaatgacctatctgaatgtag

SEQ ID NO: 131424 - DNA, 30 bp, Artificial Sequence
  Synthetic oligonucleotide
atgagagttttcattagatcgaccatgtag

SEQ ID NO: 131425 - DNA, 30 bp, Artificial Sequence
  Synthetic oligonucleotide
caggtgcttacccgcatgtcctgtatgtag

SEQ ID NO: 131426 - DNA, 30 bp, Artificial Sequence
  Synthetic oligonucleotide
tccaaaggtctaggttccggcagactgtag

SEQ ID NO: 131427 - DNA, 30 bp, Artificial Sequence
  Synthetic oligonucleotide
aacgtctgaatgtgccgctgttggctgtag

SEQ ID NO: 131428 - DNA, 30 bp, Artificial Sequence
  Synthetic oligonucleotide
cccatcaattttgtgatttgtcaagtgtag

SEQ ID NO: 131429 - DNA, 30 bp, Artificial Sequence
  Synthetic oligonucleotide
tgggacataataaaattaagaaacgtgtag

SEQ ID NO: 131430 - DNA, 30 bp, Artificial Sequence
  Synthetic oligonucleotide
aggacagacttactccgttggttcgtgtag

SEQ ID NO: 131431 - DNA, 30 bp, Artificial Sequence
  Synthetic oligonucleotide
aggaagtatataggacgtgggtgtgtgtag

SEQ ID NO: 131432 - DNA, 30 bp, Artificial Sequence
  Synthetic oligonucleotide
ccgccgtctcacggtcaaccggttgtgtag

SEQ ID NO: 131433 - DNA, 31 bp, Artificial Sequence
  Synthetic oligonucleotide
tcgggtagcgggcagcgtgcgcctgttgtag

SEQ ID NO: 131434 - DNA, 30 bp, Artificial Sequence
  Synthetic oligonucleotide
cagtgacggccgatgtagtgatctttgtag

SEQ ID NO: 131435 - DNA, 30 bp, Artificial Sequence
  Synthetic oligonucleotide
gtctggcacgaggactaacgtcaaaattag

SEQ ID NO: 131436 - DNA, 30 bp, Artificial Sequence
  Synthetic oligonucleotide
gcaggggtacggaaggtaatccacaattag

SEQ ID NO: 131437 - DNA, 30 bp, Artificial Sequence
  Synthetic oligonucleotide
gaggcctaattagagtttgttaccaattag

SEQ ID NO: 131438 - DNA, 30 bp, Artificial Sequence
  Synthetic oligonucleotide
gacgcaacggaaattgggactgcgaattag

SEQ ID NO: 131439 - DNA, 30 bp, Artificial Sequence
  Synthetic oligonucleotide
gtgacgggacgtagttgttctgataattag

SEQ ID NO: 131440 - DNA, 30 bp, Artificial Sequence
  Synthetic oligonucleotide
catgggaatgggggaacactcggtaattag

SEQ ID NO: 131441 - DNA, 30 bp, Artificial Sequence
  Synthetic oligonucleotide
cttatagatagtgattgatattgacattag

SEQ ID NO: 131442 - DNA, 30 bp, Artificial Sequence
  Synthetic oligonucleotide
aggcctaatcgagaaatatagatagattag

SEQ ID NO: 131443 - DNA, 30 bp, Artificial Sequence
  Synthetic oligonucleotide
gtaggagctgcatgtagaggcacggattag

SEQ ID NO: 131444 - DNA, 30 bp, Artificial Sequence
  Synthetic oligonucleotide
tcttgcgcatgtgccgggagtcattattag

SEQ ID NO: 131445 - DNA, 30 bp, Artificial Sequence
  Synthetic oligonucleotide
gcataccggcgagcggaacccgaaacttag

SEQ ID NO: 131446 - DNA, 30 bp, Artificial Sequence
  Synthetic oligonucleotide
aagttcaccgagtggattggagtcacttag

SEQ ID NO: 131447 - DNA, 30 bp, Artificial Sequence
  Synthetic oligonucleotide
agcgcaggcttgtggcagctgtgtacttag

SEQ ID NO: 131448 - DNA, 30 bp, Artificial Sequence
  Synthetic oligonucleotide
cgaaggcgtgaaaagtcaagaaacgcttag

SEQ ID NO: 131449 - DNA, 30 bp, Artificial Sequence
  Synthetic oligonucleotide
gctgaatatggagtttcgcgatccgcttag

SEQ ID NO: 131450 - DNA, 30 bp, Artificial Sequence
  Synthetic oligonucleotide
tatcggggttccgcggaagagagcgcttag

SEQ ID NO: 131451 - DNA, 30 bp, Artificial Sequence
  Synthetic oligonucleotide
ggatagaaccacacattaatatgcgcttag

SEQ ID NO: 131452 - DNA, 30 bp, Artificial Sequence
  Synthetic oligonucleotide
gatggggaacgtgtccgcactcgggcttag

SEQ ID NO: 131453 - DNA, 30 bp, Artificial Sequence
  Synthetic oligonucleotide
agcacataacattttgcaattaagtcttag

SEQ ID NO: 131454 - DNA, 30 bp, Artificial Sequence
  Synthetic oligonucleotide
tggatgtaaatggggttgagtcccagttag

SEQ ID NO: 131455 - DNA, 30 bp, Artificial Sequence
  Synthetic oligonucleotide
cccttggagtcacacctcgtaacgagttag

SEQ ID NO: 131456 - DNA, 30 bp, Artificial Sequence
  Synthetic oligonucleotide
agtggggtgacaccccttttaggtagttag

SEQ ID NO: 131457 - DNA, 30 bp, Artificial Sequence
  Synthetic oligonucleotide
cacagatagtcctgtgtatgcgtccgttag

SEQ ID NO: 131458 - DNA, 30 bp, Artificial Sequence
  Synthetic oligonucleotide
aaggcaacgccgacgatggctgtccgttag

SEQ ID NO: 131459 - DNA, 30 bp, Artificial Sequence
  Synthetic oligonucleotide
tcgataaaagtcgccaagtagttccgttag

SEQ ID NO: 131460 - DNA, 30 bp, Artificial Sequence
  Synthetic oligonucleotide
gcggctcaacgaaagaaaaggtagcgttag

SEQ ID NO: 131461 - DNA, 30 bp, Artificial Sequence
  Synthetic oligonucleotide
cggtgttgagcgcactactggactcgttag

SEQ ID NO: 131462 - DNA, 30 bp, Artificial Sequence
  Synthetic oligonucleotide
ggcgtggagtaaaattgaaggataggttag

SEQ ID NO: 131463 - DNA, 30 bp, Artificial Sequence
  Synthetic oligonucleotide
agaatctgcggatcaaagtatgccggttag

SEQ ID NO: 131464 - DNA, 28 bp, Artificial Sequence
  Synthetic oligonucleotide
acggggattgatattgtaaagcggttag

SEQ ID NO: 131465 - DNA, 30 bp, Artificial Sequence
  Synthetic oligonucleotide
gatacgatataataggagcaatggggttag

SEQ ID NO: 131466 - DNA, 30 bp, Artificial Sequence
  Synthetic oligonucleotide
tcgaattacgtaagccccctgattggttag

SEQ ID NO: 131467 - DNA, 30 bp, Artificial Sequence
  Synthetic oligonucleotide
tagactccgaacgccataagtcgatgttag

SEQ ID NO: 131468 - DNA, 30 bp, Artificial Sequence
  Synthetic oligonucleotide
tgtgacattatgcatccgtagatatgttag

SEQ ID NO: 131469 - DNA, 30 bp, Artificial Sequence
  Synthetic oligonucleotide
aagtcgctccacggttccacgggaatttag

SEQ ID NO: 131470 - DNA, 30 bp, Artificial Sequence
  Synthetic oligonucleotide
gataccgaggagacagctcgcttcatttag

SEQ ID NO: 131471 - DNA, 30 bp, Artificial Sequence
  Synthetic oligonucleotide
tacgagtatatgccagaactgtggatttag

SEQ ID NO: 131472 - DNA, 30 bp, Artificial Sequence
  Synthetic oligonucleotide
accatccgcccgcacagccagggtatttag

SEQ ID NO: 131473 - DNA, 30 bp, Artificial Sequence
  Synthetic oligonucleotide
cacaaaccatctagctctcggcaactttag

SEQ ID NO: 131474 - DNA, 30 bp, Artificial Sequence
  Synthetic oligonucleotide
accaccagctgagagcatattcgactttag

SEQ ID NO: 131475 - DNA, 30 bp, Artificial Sequence
  Synthetic oligonucleotide
acgggctacgcgcaatatatatagctttag

SEQ ID NO: 131476 - DNA, 30 bp, Artificial Sequence
  Synthetic oligonucleotide
taactgaaggcacgatcgtcttccgtttag

SEQ ID NO: 131477 - DNA, 30 bp, Artificial Sequence
  Synthetic oligonucleotide
cactcagtcgtttggggtcaacgggtttag

SEQ ID NO: 131478 - DNA, 30 bp, Artificial Sequence
  Synthetic oligonucleotide
cgtaatggcctaacttctaccagattttag

SEQ ID NO: 131479 - DNA, 30 bp, Artificial Sequence
  Synthetic oligonucleotide
gaagatcgggtgctcagtgatcgattttag

SEQ ID NO: 131480 - DNA, 30 bp, Artificial Sequence
  Synthetic oligonucleotide
acgactgttcgtcattcaaggcggttttag

SEQ ID NO: 131481 - DNA, 30 bp, Artificial Sequence
  Synthetic oligonucleotide
ttgcggatcgcatgatgtaaatcaaaaacg

SEQ ID NO: 131482 - DNA, 30 bp, Artificial Sequence
  Synthetic oligonucleotide
caggtgctagcggggcccttggcacaaacg

SEQ ID NO: 131483 - DNA, 30 bp, Artificial Sequence
  Synthetic oligonucleotide
ttctccaggtcatgtttcgtgtgacaaacg

SEQ ID NO: 131484 - DNA, 30 bp, Artificial Sequence
  Synthetic oligonucleotide
gattagtatataagctgcaggtggcaaacg

SEQ ID NO: 131485 - DNA, 30 bp, Artificial Sequence
  Synthetic oligonucleotide
taaagcagtgatccttttattatgcaaacg

SEQ ID NO: 131486 - DNA, 30 bp, Artificial Sequence
  Synthetic oligonucleotide
gctagatttctagttgggactgaagaaacg

SEQ ID NO: 131487 - DNA, 30 bp, Artificial Sequence
  Synthetic oligonucleotide
aacaggatatggagttggacgcacgaaacg

SEQ ID NO: 131488 - DNA, 30 bp, Artificial Sequence
  Synthetic oligonucleotide
gctagggtgttccagtccgcgtccgaaacg

SEQ ID NO: 131489 - DNA, 30 bp, Artificial Sequence
  Synthetic oligonucleotide
gtactgtccgcttcactggggggcgaaacg

SEQ ID NO: 131490 - DNA, 30 bp, Artificial Sequence
  Synthetic oligonucleotide
cgaatacaccgctccatagcatatgaaacg

SEQ ID NO: 131491 - DNA, 30 bp, Artificial Sequence
  Synthetic oligonucleotide
gggtcgaccatacatccagcctatgaaacg

SEQ ID NO: 131492 - DNA, 30 bp, Artificial Sequence
  Synthetic oligonucleotide
ccacaggcctccgaaccgtaatgataaacg

SEQ ID NO: 131493 - DNA, 30 bp, Artificial Sequence
  Synthetic oligonucleotide
tataggacacaaaattgagcatgataaacg

SEQ ID NO: 131494 - DNA, 30 bp, Artificial Sequence
  Synthetic oligonucleotide
gggtggctctattagagtgtcagctaaacg

SEQ ID NO: 131495 - DNA, 30 bp, Artificial Sequence
  Synthetic oligonucleotide
gtttttcgaaacaagaaaacaaagtaaacg

SEQ ID NO: 131496 - DNA, 30 bp, Artificial Sequence
  Synthetic oligonucleotide
atgaagagccactgggagggcttcccaacg

SEQ ID NO: 131497 - DNA, 30 bp, Artificial Sequence
  Synthetic oligonucleotide
ctaataacgatctacttttacgatccaacg

SEQ ID NO: 131498 - DNA, 30 bp, Artificial Sequence
  Synthetic oligonucleotide
agagttgccaagtagcttatgattccaacg

SEQ ID NO: 131499 - DNA, 30 bp, Artificial Sequence
  Synthetic oligonucleotide
gcataatacattaggggccggcgagcaacg

SEQ ID NO: 131500 - DNA, 30 bp, Artificial Sequence
  Synthetic oligonucleotide
taaacacaggttacaagtgtttaggcaacg

SEQ ID NO: 131501 - DNA, 30 bp, Artificial Sequence
  Synthetic oligonucleotide
tcagagtgcgaccacgatgatttggcaacg

SEQ ID NO: 131502 - DNA, 30 bp, Artificial Sequence
  Synthetic oligonucleotide
aacgtcacttattaaaacagttttgcaacg

SEQ ID NO: 131503 - DNA, 30 bp, Artificial Sequence
  Synthetic oligonucleotide
gtactaagggtactcacatccgtctcaacg

SEQ ID NO: 131504 - DNA, 30 bp, Artificial Sequence
  Synthetic oligonucleotide
aggcgtggtgtttattacaaatcgtcaacg

SEQ ID NO: 131505 - DNA, 30 bp, Artificial Sequence
  Synthetic oligonucleotide
cgcccgaagtgccttcggcttaggtcaacg

SEQ ID NO: 131506 - DNA, 30 bp, Artificial Sequence
  Synthetic oligonucleotide
ttattaagttaagacgataaggcaagaacg

SEQ ID NO: 131507 - DNA, 30 bp, Artificial Sequence
  Synthetic oligonucleotide
tcatgtaatgagggggtggaccacagaacg

SEQ ID NO: 131508 - DNA, 30 bp, Artificial Sequence
  Synthetic oligonucleotide
aactatcatcgcaatagtatcagcagaacg

SEQ ID NO: 131509 - DNA, 30 bp, Artificial Sequence
  Synthetic oligonucleotide
tcacgcgggacaggatttatttgcagaacg

SEQ ID NO: 131510 - DNA, 30 bp, Artificial Sequence
  Synthetic oligonucleotide
agtcttctacaggataggctcgcgagaacg

SEQ ID NO: 131511 - DNA, 30 bp, Artificial Sequence
  Synthetic oligonucleotide
ctcaggtgttagcagtggggtttgagaacg

SEQ ID NO: 131512 - DNA, 30 bp, Artificial Sequence
  Synthetic oligonucleotide
gctggtgatacacgacgtcggtatagaacg

SEQ ID NO: 131513 - DNA, 30 bp, Artificial Sequence
  Synthetic oligonucleotide
cgctgagatgcagatggtaacgctcgaacg

SEQ ID NO: 131514 - DNA, 30 bp, Artificial Sequence
  Synthetic oligonucleotide
gtgcgctgaatcggtattggattaggaacg

SEQ ID NO: 131515 - DNA, 30 bp, Artificial Sequence
  Synthetic oligonucleotide
gggacagagctcagcaatccgtccggaacg

SEQ ID NO: 131516 - DNA, 30 bp, Artificial Sequence
  Synthetic oligonucleotide
taagaaaaggcatgtcggcctatcggaacg

SEQ ID NO: 131517 - DNA, 31 bp, Artificial Sequence
  Synthetic oligonucleotide
ttaggttagcatgcaggaggctactggaacg

SEQ ID NO: 131518 - DNA, 30 bp, Artificial Sequence
  Synthetic oligonucleotide
taactcctctcaaacctcatagaatgaacg

SEQ ID NO: 131519 - DNA, 30 bp, Artificial Sequence
  Synthetic oligonucleotide
cggagtgcctcacaactcgggacatgaacg

SEQ ID NO: 131520 - DNA, 30 bp, Artificial Sequence
  Synthetic oligonucleotide
gtcgaacaagaacgtaagcagggatgaacg

SEQ ID NO: 131521 - DNA, 30 bp, Artificial Sequence
  Synthetic oligonucleotide
caatgctgctccacttgacaaaagtgaacg

SEQ ID NO: 131522 - DNA, 30 bp, Artificial Sequence
  Synthetic oligonucleotide
ggtagaagggccctattcagatagtgaacg

SEQ ID NO: 131523 - DNA, 30 bp, Artificial Sequence
  Synthetic oligonucleotide
ggagcgccccaggtgaacgattagtgaacg

SEQ ID NO: 131524 - DNA, 30 bp, Artificial Sequence
  Synthetic oligonucleotide
cccgaactaatctcataacaccaaataacg

SEQ ID NO: 131525 - DNA, 30 bp, Artificial Sequence
  Synthetic oligonucleotide
ccttggttgggggtaccaccgcccataacg

SEQ ID NO: 131526 - DNA, 30 bp, Artificial Sequence
  Synthetic oligonucleotide
ctgattctaaagtcataatcaggcataacg

SEQ ID NO: 131527 - DNA, 30 bp, Artificial Sequence
  Synthetic oligonucleotide
tctaaggatggtattatatatggcataacg

SEQ ID NO: 131528 - DNA, 30 bp, Artificial Sequence
  Synthetic oligonucleotide
cggataatcatacgtggcgtgatcataacg

SEQ ID NO: 131529 - DNA, 30 bp, Artificial Sequence
  Synthetic oligonucleotide
ttcactaccccaagagggtacctgataacg

SEQ ID NO: 131530 - DNA, 30 bp, Artificial Sequence
  Synthetic oligonucleotide
agccctagaagactcatgcccttgataacg

SEQ ID NO: 131531 - DNA, 30 bp, Artificial Sequence
  Synthetic oligonucleotide
agtagcgtcatctgcggcgcactcctaacg

SEQ ID NO: 131532 - DNA, 30 bp, Artificial Sequence
  Synthetic oligonucleotide
taagtgaacgaagtagttctgggtctaacg

SEQ ID NO: 131533 - DNA, 30 bp, Artificial Sequence
  Synthetic oligonucleotide
tgttcacagaaaatcggagcagttctaacg

SEQ ID NO: 131534 - DNA, 30 bp, Artificial Sequence
  Synthetic oligonucleotide
gagaaattcatggtcctgaatacagtaacg

SEQ ID NO: 131535 - DNA, 30 bp, Artificial Sequence
  Synthetic oligonucleotide
tggaatcaaccattgctaataggagtaacg

SEQ ID NO: 131536 - DNA, 30 bp, Artificial Sequence
  Synthetic oligonucleotide
acatcagattgtagtatgatggtcgtaacg

SEQ ID NO: 131537 - DNA, 30 bp, Artificial Sequence
  Synthetic oligonucleotide
tcatccaagcatgtacaaagaggggtaacg

SEQ ID NO: 131538 - DNA, 30 bp, Artificial Sequence
  Synthetic oligonucleotide
tgtatgagacgagaggtgcctcgattaacg

SEQ ID NO: 131539 - DNA, 30 bp, Artificial Sequence
  Synthetic oligonucleotide
gaagggtaaaattaagtctgactaaacacg

SEQ ID NO: 131540 - DNA, 30 bp, Artificial Sequence
  Synthetic oligonucleotide
gacgaagggtgtgaaccctatgtaaacacg

SEQ ID NO: 131541 - DNA, 30 bp, Artificial Sequence
  Synthetic oligonucleotide
aatagggttcaagatcaacagcacaacacg

SEQ ID NO: 131542 - DNA, 30 bp, Artificial Sequence
  Synthetic oligonucleotide
gacggccttctttgtgtggacatgaacacg

SEQ ID NO: 131543 - DNA, 30 bp, Artificial Sequence
  Synthetic oligonucleotide
ttgcctagtacttagaaggcatgacacacg

SEQ ID NO: 131544 - DNA, 30 bp, Artificial Sequence
  Synthetic oligonucleotide
tatgtcgtacgagtgccaaacgcccacacg

SEQ ID NO: 131545 - DNA, 30 bp, Artificial Sequence
  Synthetic oligonucleotide
ccgtctaccagggggtgaaggagagacacg

SEQ ID NO: 131546 - DNA, 30 bp, Artificial Sequence
  Synthetic oligonucleotide
acaacaaatacgtgaacgagtaaggacacg

SEQ ID NO: 131547 - DNA, 30 bp, Artificial Sequence
  Synthetic oligonucleotide
ccgcgagctaccgtgaatgaataggacacg

SEQ ID NO: 131548 - DNA, 30 bp, Artificial Sequence
  Synthetic oligonucleotide
gagacggcccatagtaaggttagggacacg

SEQ ID NO: 131549 - DNA, 30 bp, Artificial Sequence
  Synthetic oligonucleotide
atgagaaggtccctgatactaattgacacg

SEQ ID NO: 131550 - DNA, 30 bp, Artificial Sequence
  Synthetic oligonucleotide
atagaggattccgcaacctcagaatacacg

SEQ ID NO: 131551 - DNA, 30 bp, Artificial Sequence
  Synthetic oligonucleotide
ctggagagtgattaggaatagggctacacg

SEQ ID NO: 131552 - DNA, 30 bp, Artificial Sequence
  Synthetic oligonucleotide
ggttgtcagagatacgcctaatggtacacg

SEQ ID NO: 131553 - DNA, 30 bp, Artificial Sequence
  Synthetic oligonucleotide
ctggcccgactgctaaatggaacttacacg

SEQ ID NO: 131554 - DNA, 30 bp, Artificial Sequence
  Synthetic oligonucleotide
gaggggctgagtggtcctccatataccacg

SEQ ID NO: 131555 - DNA, 30 bp, Artificial Sequence
  Synthetic oligonucleotide
tagaatctagggcgaaatccctgagccacg

SEQ ID NO: 131556 - DNA, 30 bp, Artificial Sequence
  Synthetic oligonucleotide
ttatgagaggtgaaaatggtgagcgccacg

SEQ ID NO: 131557 - DNA, 31 bp, Artificial Sequence
  Synthetic oligonucleotide
gaccgatcttacagcgtctacaggtgccacg

SEQ ID NO: 131558 - DNA, 30 bp, Artificial Sequence
  Synthetic oligonucleotide
ttcagttacaatgtttgatacagatccacg

SEQ ID NO: 131559 - DNA, 30 bp, Artificial Sequence
  Synthetic oligonucleotide
tgtgcgcatcatagtctaggattatccacg

SEQ ID NO: 131560 - DNA, 30 bp, Artificial Sequence
  Synthetic oligonucleotide
gacatcggatgaggttatgtagggtccacg

SEQ ID NO: 131561 - DNA, 30 bp, Artificial Sequence
  Synthetic oligonucleotide
gaggcgtactctgcgtgaaagcattccacg

SEQ ID NO: 131562 - DNA, 30 bp, Artificial Sequence
  Synthetic oligonucleotide
gatcaacgcatttgtaggtcttcaagcacg

SEQ ID NO: 131563 - DNA, 30 bp, Artificial Sequence
  Synthetic oligonucleotide
tgataagcagcgtgtcacatcagtagcacg

SEQ ID NO: 131564 - DNA, 31 bp, Artificial Sequence
  Synthetic oligonucleotide
gggtagggcacatcgggctcactaacgcacg

SEQ ID NO: 131565 - DNA, 30 bp, Artificial Sequence
  Synthetic oligonucleotide
ggccgttcaccgcaagcagggaaccgcacg

SEQ ID NO: 131566 - DNA, 31 bp, Artificial Sequence
  Synthetic oligonucleotide
acacatactagtggcccccagatggcgcacg

SEQ ID NO: 131567 - DNA, 30 bp, Artificial Sequence
  Synthetic oligonucleotide
ggtcacgggatgtcatgctgagcaggcacg

SEQ ID NO: 131568 - DNA, 30 bp, Artificial Sequence
  Synthetic oligonucleotide
gctaatcggatagaatgtcgggcaggcacg

SEQ ID NO: 131569 - DNA, 30 bp, Artificial Sequence
  Synthetic oligonucleotide
atgagtgaatatgtttgtacctcgggcacg

SEQ ID NO: 131570 - DNA, 30 bp, Artificial Sequence
  Synthetic oligonucleotide
aggactacaaaagattgtctgaaatgcacg

SEQ ID NO: 131571 - DNA, 30 bp, Artificial Sequence
  Synthetic oligonucleotide
cgacgctgctccgatctggtctcgtgcacg

SEQ ID NO: 131572 - DNA, 30 bp, Artificial Sequence
  Synthetic oligonucleotide
cgtctgtatgctacctgtatccggtgcacg

SEQ ID NO: 131573 - DNA, 30 bp, Artificial Sequence
  Synthetic oligonucleotide
atcacgacgaatccggatacaggaatcacg

SEQ ID NO: 131574 - DNA, 30 bp, Artificial Sequence
  Synthetic oligonucleotide
ggaaatagaacggagtacatccacatcacg

SEQ ID NO: 131575 - DNA, 30 bp, Artificial Sequence
  Synthetic oligonucleotide
aataggtgctgacttgatcgtgctatcacg

SEQ ID NO: 131576 - DNA, 30 bp, Artificial Sequence
  Synthetic oligonucleotide
tgggaagtacgagtctcactgacactcacg

SEQ ID NO: 131577 - DNA, 30 bp, Artificial Sequence
  Synthetic oligonucleotide
gtcgtactaggagctaggatggcgctcacg

SEQ ID NO: 131578 - DNA, 30 bp, Artificial Sequence
  Synthetic oligonucleotide
tccccagaaggtagaataagtatgctcacg

SEQ ID NO: 131579 - DNA, 30 bp, Artificial Sequence
  Synthetic oligonucleotide
aaagaaattctgtggagtactgcagtcacg

SEQ ID NO: 131580 - DNA, 30 bp, Artificial Sequence
  Synthetic oligonucleotide
atgttatcaactatgtgtagagtagtcacg

SEQ ID NO: 131581 - DNA, 30 bp, Artificial Sequence
  Synthetic oligonucleotide
attgtcaaataagcgtataggctcgtcacg

SEQ ID NO: 131582 - DNA, 30 bp, Artificial Sequence
  Synthetic oligonucleotide
aggaagttagctggggctgggcaggtcacg

SEQ ID NO: 131583 - DNA, 30 bp, Artificial Sequence
  Synthetic oligonucleotide
cgccaagcagacaactaacctttggtcacg

SEQ ID NO: 131584 - DNA, 30 bp, Artificial Sequence
  Synthetic oligonucleotide
agagaattcatcatgattaggccaaagacg

SEQ ID NO: 131585 - DNA, 30 bp, Artificial Sequence
  Synthetic oligonucleotide
ataaaaagcaacataaaatcgattaagacg

SEQ ID NO: 131586 - DNA, 30 bp, Artificial Sequence
  Synthetic oligonucleotide
acttcaagtcttatgtaagcttaccagacg

SEQ ID NO: 131587 - DNA, 30 bp, Artificial Sequence
  Synthetic oligonucleotide
aggtttccgatatattcctgatcccagacg

SEQ ID NO: 131588 - DNA, 30 bp, Artificial Sequence
  Synthetic oligonucleotide
gggaacatgaagtagggtttattgcagacg

SEQ ID NO: 131589 - DNA, 30 bp, Artificial Sequence
  Synthetic oligonucleotide
agctaactgacgcgtggtctaggtcagacg

SEQ ID NO: 131590 - DNA, 30 bp, Artificial Sequence
  Synthetic oligonucleotide
tacgtcactgcggatcattccaaggagacg

SEQ ID NO: 131591 - DNA, 30 bp, Artificial Sequence
  Synthetic oligonucleotide
taggaagtggtgaccttggggggggagacg

SEQ ID NO: 131592 - DNA, 30 bp, Artificial Sequence
  Synthetic oligonucleotide
tacgtaaacccggtcgccgtatagtagacg

SEQ ID NO: 131593 - DNA, 30 bp, Artificial Sequence
  Synthetic oligonucleotide
agtataaggaacacctactattagtagacg

SEQ ID NO: 131594 - DNA, 30 bp, Artificial Sequence
  Synthetic oligonucleotide
tacaggaccgtgcgagtaactcggtagacg

SEQ ID NO: 131595 - DNA, 30 bp, Artificial Sequence
  Synthetic oligonucleotide
tagggttacacaatgaacgagttaacgacg

SEQ ID NO: 131596 - DNA, 30 bp, Artificial Sequence
  Synthetic oligonucleotide
atctacagatataaggaggacagcacgacg

SEQ ID NO: 131597 - DNA, 30 bp, Artificial Sequence
  Synthetic oligonucleotide
cgatcctgagtcacgcgaatgcggacgacg

SEQ ID NO: 131598 - DNA, 30 bp, Artificial Sequence
  Synthetic oligonucleotide
tttgttatccgagagctcctagacccgacg

SEQ ID NO: 131599 - DNA, 30 bp, Artificial Sequence
  Synthetic oligonucleotide
ccactcgtgagggcttatcagaatccgacg

SEQ ID NO: 131600 - DNA, 30 bp, Artificial Sequence
  Synthetic oligonucleotide
cgattccggtgttaatatcgggatgcgacg

SEQ ID NO: 131601 - DNA, 30 bp, Artificial Sequence
  Synthetic oligonucleotide
ccatcgatggtgtgcctacgccactcgacg

SEQ ID NO: 131602 - DNA, 30 bp, Artificial Sequence
  Synthetic oligonucleotide
gaacgacccggctcgagaactctaaggacg

SEQ ID NO: 131603 - DNA, 30 bp, Artificial Sequence
  Synthetic oligonucleotide
ccgaaacaccgtagtggggaagacaggacg

SEQ ID NO: 131604 - DNA, 30 bp, Artificial Sequence
  Synthetic oligonucleotide
tcggaatagggtggaccacttgggaggacg

SEQ ID NO: 131605 - DNA, 30 bp, Artificial Sequence
  Synthetic oligonucleotide
agtcaattcctctgattaaaggggcggacg

SEQ ID NO: 131606 - DNA, 30 bp, Artificial Sequence
  Synthetic oligonucleotide
gatgaaagcggtcgattggcgcctcggacg

SEQ ID NO: 131607 - DNA, 30 bp, Artificial Sequence
  Synthetic oligonucleotide
aagggcggaataagggcgataatagggacg

SEQ ID NO: 131608 - DNA, 30 bp, Artificial Sequence
  Synthetic oligonucleotide
agtttggcggtaacacgatcaaacgggacg

SEQ ID NO: 131609 - DNA, 30 bp, Artificial Sequence
  Synthetic oligonucleotide
tgtatagagggcgccagtgtgcaaatgacg

SEQ ID NO: 131610 - DNA, 30 bp, Artificial Sequence
  Synthetic oligonucleotide
cgaacgtaaatatcctatagtctgatgacg

SEQ ID NO: 131611 - DNA, 30 bp, Artificial Sequence
  Synthetic oligonucleotide
gatcatcaacgagtctcatagcggctgacg

SEQ ID NO: 131612 - DNA, 30 bp, Artificial Sequence
  Synthetic oligonucleotide
ctgaggagagcaagggagaaggctctgacg

SEQ ID NO: 131613 - DNA, 30 bp, Artificial Sequence
  Synthetic oligonucleotide
caatgtatagtcactaagctgaaagtgacg

SEQ ID NO: 131614 - DNA, 30 bp, Artificial Sequence
  Synthetic oligonucleotide
aactgcaccaatgcacaatgagaattgacg

SEQ ID NO: 131615 - DNA, 30 bp, Artificial Sequence
  Synthetic oligonucleotide
cctgcgaatcttaagctcggaaggttgacg

SEQ ID NO: 131616 - DNA, 30 bp, Artificial Sequence
  Synthetic oligonucleotide
taggaaacctcacgctaggctacaaatacg

SEQ ID NO: 131617 - DNA, 30 bp, Artificial Sequence
  Synthetic oligonucleotide
cgctgatttcccgcgagtaatgacaatacg

SEQ ID NO: 131618 - DNA, 30 bp, Artificial Sequence
  Synthetic oligonucleotide
tctaagggaggaaatgtcacctctaatacg

SEQ ID NO: 131619 - DNA, 30 bp, Artificial Sequence
  Synthetic oligonucleotide
gagcgggggctcaaaagtatacatcatacg

SEQ ID NO: 131620 - DNA, 30 bp, Artificial Sequence
  Synthetic oligonucleotide
aaatggccttagctcacattgcccgatacg

SEQ ID NO: 131621 - DNA, 30 bp, Artificial Sequence
  Synthetic oligonucleotide
ccgcggcgcttaagtggggtatgggatacg

SEQ ID NO: 131622 - DNA, 30 bp, Artificial Sequence
  Synthetic oligonucleotide
cgtattgcacttaggtaccaaatggatacg

SEQ ID NO: 131623 - DNA, 30 bp, Artificial Sequence
  Synthetic oligonucleotide
cacaatctcggggtttagaaaaaatatacg

SEQ ID NO: 131624 - DNA, 30 bp, Artificial Sequence
  Synthetic oligonucleotide
tgataccggaccggatacgtggtatatacg

SEQ ID NO: 131625 - DNA, 30 bp, Artificial Sequence
  Synthetic oligonucleotide
ttcgtcgtaatgcactggtctaactatacg

SEQ ID NO: 131626 - DNA, 30 bp, Artificial Sequence
  Synthetic oligonucleotide
acttttcgaccagagcagaggtcaactacg

SEQ ID NO: 131627 - DNA, 30 bp, Artificial Sequence
  Synthetic oligonucleotide
taaaccgttaagtagagtcaaagaactacg

SEQ ID NO: 131628 - DNA, 30 bp, Artificial Sequence
  Synthetic oligonucleotide
cctcggtgaatacaattttcaataactacg

SEQ ID NO: 131629 - DNA, 30 bp, Artificial Sequence
  Synthetic oligonucleotide
acaatcgggctggaactagagccacctacg

SEQ ID NO: 131630 - DNA, 30 bp, Artificial Sequence
  Synthetic oligonucleotide
actttattagaggaaagcgtgccagctacg

SEQ ID NO: 131631 - DNA, 30 bp, Artificial Sequence
  Synthetic oligonucleotide
gagttaaagatattactggatatcgctacg

SEQ ID NO: 131632 - DNA, 30 bp, Artificial Sequence
  Synthetic oligonucleotide
atggcaggatcagcatgacggggtgctacg

SEQ ID NO: 131633 - DNA, 30 bp, Artificial Sequence
  Synthetic oligonucleotide
ggcgtgaattcttgagtgcaaatgtctacg

SEQ ID NO: 131634 - DNA, 30 bp, Artificial Sequence
  Synthetic oligonucleotide
agggttaaactgcaaaatggcacttctacg

SEQ ID NO: 131635 - DNA, 30 bp, Artificial Sequence
  Synthetic oligonucleotide
cccggacttaaagtgagagatccgagtacg

SEQ ID NO: 131636 - DNA, 30 bp, Artificial Sequence
  Synthetic oligonucleotide
aacgcgatatgcggtacggtgggtcgtacg

SEQ ID NO: 131637 - DNA, 30 bp, Artificial Sequence
  Synthetic oligonucleotide
actcgcaacgactgggcgtcgaaaggtacg

SEQ ID NO: 131638 - DNA, 30 bp, Artificial Sequence
  Synthetic oligonucleotide
gctcaaaaggagcacccacaagcaggtacg

SEQ ID NO: 131639 - DNA, 30 bp, Artificial Sequence
  Synthetic oligonucleotide
catgatttcagaaccggaatctgtggtacg

SEQ ID NO: 131640 - DNA, 30 bp, Artificial Sequence
  Synthetic oligonucleotide
ggcacatcccgtgctcccgcaaggtgtacg

SEQ ID NO: 131641 - DNA, 30 bp, Artificial Sequence
  Synthetic oligonucleotide
gcggttagtatgccctggatactgtgtacg

SEQ ID NO: 131642 - DNA, 30 bp, Artificial Sequence
  Synthetic oligonucleotide
aggtaatcaggataaaatattgattgtacg

SEQ ID NO: 131643 - DNA, 30 bp, Artificial Sequence
  Synthetic oligonucleotide
tcggataccccgaacatcttccggattacg

SEQ ID NO: 131644 - DNA, 30 bp, Artificial Sequence
  Synthetic oligonucleotide
ggccccacaggacaaccataatggattacg

SEQ ID NO: 131645 - DNA, 30 bp, Artificial Sequence
  Synthetic oligonucleotide
tgacggcctgatgcgtattgatttattacg

SEQ ID NO: 131646 - DNA, 30 bp, Artificial Sequence
  Synthetic oligonucleotide
tgtgtgatcccaggtagaaactagcttacg

SEQ ID NO: 131647 - DNA, 30 bp, Artificial Sequence
  Synthetic oligonucleotide
aaggtaatcgagcgcggagttcggcttacg

SEQ ID NO: 131648 - DNA, 30 bp, Artificial Sequence
  Synthetic oligonucleotide
tcttgctacaatatattagttcatcttacg

SEQ ID NO: 131649 - DNA, 30 bp, Artificial Sequence
  Synthetic oligonucleotide
aggtaaaactcacatccgttgcgtcttacg

SEQ ID NO: 131650 - DNA, 30 bp, Artificial Sequence
  Synthetic oligonucleotide
ccggcgagaaatttgtagcggcgagttacg

SEQ ID NO: 131651 - DNA, 30 bp, Artificial Sequence
  Synthetic oligonucleotide
agggatccccgcacattcttcgaatttacg

SEQ ID NO: 131652 - DNA, 30 bp, Artificial Sequence
  Synthetic oligonucleotide
gcggaagggctggggaagttgaactttacg

SEQ ID NO: 131653 - DNA, 30 bp, Artificial Sequence
  Synthetic oligonucleotide
aggttagtgtcgcgcgcatggctttttacg

SEQ ID NO: 131654 - DNA, 30 bp, Artificial Sequence
  Synthetic oligonucleotide
taccaaccactgcttttccatcaaaaaccg

SEQ ID NO: 131655 - DNA, 30 bp, Artificial Sequence
  Synthetic oligonucleotide
agagtactttctacgaccaacgaaaaaccg

SEQ ID NO: 131656 - DNA, 30 bp, Artificial Sequence
  Synthetic oligonucleotide
gcaagacgttagagtagcactataaaaccg

SEQ ID NO: 131657 - DNA, 30 bp, Artificial Sequence
  Synthetic oligonucleotide
gctagccgagcaggctttaagctaaaaccg

SEQ ID NO: 131658 - DNA, 30 bp, Artificial Sequence
  Synthetic oligonucleotide
cggcctcaaataactttgtctaccaaaccg

SEQ ID NO: 131659 - DNA, 30 bp, Artificial Sequence
  Synthetic oligonucleotide
cgagtgggaacgcagttctggggcaaaccg

SEQ ID NO: 131660 - DNA, 30 bp, Artificial Sequence
  Synthetic oligonucleotide
ggactgtgctttgcctccatgcggaaaccg

SEQ ID NO: 131661 - DNA, 30 bp, Artificial Sequence
  Synthetic oligonucleotide
taggcatgtcgcatgctcttccataaaccg

SEQ ID NO: 131662 - DNA, 31 bp, Artificial Sequence
  Synthetic oligonucleotide
ttataccattaggggacttaaatacgaaccg

SEQ ID NO: 131663 - DNA, 30 bp, Artificial Sequence
  Synthetic oligonucleotide
atttgcacaaggatggtataaggcgaaccg

SEQ ID NO: 131664 - DNA, 30 bp, Artificial Sequence
  Synthetic oligonucleotide
cgaggcgtgttttaagagtcagtcgaaccg

SEQ ID NO: 131665 - DNA, 29 bp, Artificial Sequence
  Synthetic oligonucleotide
gctcgtgtgggcccacatcgattgaaccg

SEQ ID NO: 131666 - DNA, 30 bp, Artificial Sequence
  Synthetic oligonucleotide
ccttgtagacattacacccgtccctaaccg

SEQ ID NO: 131667 - DNA, 30 bp, Artificial Sequence
  Synthetic oligonucleotide
cgtttaggaaagcgtaaacgtctgtaaccg

SEQ ID NO: 131668 - DNA, 30 bp, Artificial Sequence
  Synthetic oligonucleotide
gaagtagtggaagagtatctacccacaccg

SEQ ID NO: 131669 - DNA, 30 bp, Artificial Sequence
  Synthetic oligonucleotide
tagtcgtctattagctgacttgccacaccg

SEQ ID NO: 131670 - DNA, 30 bp, Artificial Sequence
  Synthetic oligonucleotide
tgagggtacatattgattccaatcacaccg

SEQ ID NO: 131671 - DNA, 30 bp, Artificial Sequence
  Synthetic oligonucleotide
gggccccgtctttcaagggagatcacaccg

SEQ ID NO: 131672 - DNA, 30 bp, Artificial Sequence
  Synthetic oligonucleotide
agtccgagatgtgttaatgaagtcccaccg

SEQ ID NO: 131673 - DNA, 30 bp, Artificial Sequence
  Synthetic oligonucleotide
gtccgagcggaaggcaaaactcttccaccg

SEQ ID NO: 131674 - DNA, 30 bp, Artificial Sequence
  Synthetic oligonucleotide
ttgccgtcaagcgaggtaacaacagcaccg

SEQ ID NO: 131675 - DNA, 30 bp, Artificial Sequence
  Synthetic oligonucleotide
acatgggcctaatgatgacttatggcaccg

SEQ ID NO: 131676 - DNA, 30 bp, Artificial Sequence
  Synthetic oligonucleotide
gtcgacgagcctctctacaaacgtgcaccg

SEQ ID NO: 131677 - DNA, 30 bp, Artificial Sequence
  Synthetic oligonucleotide
agggtcggttcgttgaacttatgatcaccg

SEQ ID NO: 131678 - DNA, 30 bp, Artificial Sequence
  Synthetic oligonucleotide
gcttggttcttcaggtcccattgctcaccg

SEQ ID NO: 131679 - DNA, 30 bp, Artificial Sequence
  Synthetic oligonucleotide
gtaatcctggggacgatgagggtgagaccg

SEQ ID NO: 131680 - DNA, 31 bp, Artificial Sequence
  Synthetic oligonucleotide
atgcccgtcaagacgtaggtctgctagaccg

SEQ ID NO: 131681 - DNA, 30 bp, Artificial Sequence
  Synthetic oligonucleotide
agttttgtccaaatcgcaagaaagcgaccg

SEQ ID NO: 131682 - DNA, 30 bp, Artificial Sequence
  Synthetic oligonucleotide
agcgtaagacgaccgcgctcaccaggaccg

SEQ ID NO: 131683 - DNA, 30 bp, Artificial Sequence
  Synthetic oligonucleotide
aagagctgaagctgactacaatgctgaccg

SEQ ID NO: 131684 - DNA, 30 bp, Artificial Sequence
  Synthetic oligonucleotide
aggccagtgttcgcgaaaaatgcgtgaccg

SEQ ID NO: 131685 - DNA, 30 bp, Artificial Sequence
  Synthetic oligonucleotide
ggtgagttataaaaatccacacaaataccg

SEQ ID NO: 131686 - DNA, 30 bp, Artificial Sequence
  Synthetic oligonucleotide
tggcgaacaaagcaaaatatgtcaataccg

SEQ ID NO: 131687 - DNA, 30 bp, Artificial Sequence
  Synthetic oligonucleotide
agatgagggaggaagtcccttataataccg

SEQ ID NO: 131688 - DNA, 30 bp, Artificial Sequence
  Synthetic oligonucleotide
atatcaccttcaagagaaagagttataccg

SEQ ID NO: 131689 - DNA, 30 bp, Artificial Sequence
  Synthetic oligonucleotide
tcaatggggcagtgtggcgacccactaccg

SEQ ID NO: 131690 - DNA, 30 bp, Artificial Sequence
  Synthetic oligonucleotide
gatcaaggccatacaggacatggcctaccg

SEQ ID NO: 131691 - DNA, 30 bp, Artificial Sequence
  Synthetic oligonucleotide
atgggtactcagagcaatccaaagctaccg

SEQ ID NO: 131692 - DNA, 30 bp, Artificial Sequence
  Synthetic oligonucleotide
actaggcatgagttcagccgctgtctaccg

SEQ ID NO: 131693 - DNA, 30 bp, Artificial Sequence
  Synthetic oligonucleotide
acatgcgaaatgactattgggcaagtaccg

SEQ ID NO: 131694 - DNA, 30 bp, Artificial Sequence
  Synthetic oligonucleotide
gaaatgttgtataaggtcaaaagagtaccg

SEQ ID NO: 131695 - DNA, 30 bp, Artificial Sequence
  Synthetic oligonucleotide
tgatggtatggcaactgaaatcccgtaccg

SEQ ID NO: 131696 - DNA, 30 bp, Artificial Sequence
  Synthetic oligonucleotide
atctaaaggcagtgattaacatgcgtaccg

SEQ ID NO: 131697 - DNA, 30 bp, Artificial Sequence
  Synthetic oligonucleotide
acgtgggtcctaaacgcagactgggtaccg

SEQ ID NO: 131698 - DNA, 30 bp, Artificial Sequence
  Synthetic oligonucleotide
taagagtggttctcgttattggaattaccg

SEQ ID NO: 131699 - DNA, 30 bp, Artificial Sequence
  Synthetic oligonucleotide
gtccatgctcctgcccactccaatttaccg

SEQ ID NO: 131700 - DNA, 30 bp, Artificial Sequence
  Synthetic oligonucleotide
gtggggtaagacgtcccgatccctttaccg

SEQ ID NO: 131701 - DNA, 30 bp, Artificial Sequence
  Synthetic oligonucleotide
tgtcaggatatcgtaaatcagtaaaacccg

SEQ ID NO: 131702 - DNA, 30 bp, Artificial Sequence
  Synthetic oligonucleotide
acctccaacctaatcacatgacagaacccg

SEQ ID NO: 131703 - DNA, 30 bp, Artificial Sequence
  Synthetic oligonucleotide
tcagagcctacatcgataaacggtaacccg

SEQ ID NO: 131704 - DNA, 30 bp, Artificial Sequence
  Synthetic oligonucleotide
tctagagttagccaaatcactaaccacccg

SEQ ID NO: 131705 - DNA, 30 bp, Artificial Sequence
  Synthetic oligonucleotide
gggacgtcatgttcgaggtgcgaggacccg

SEQ ID NO: 131706 - DNA, 30 bp, Artificial Sequence
  Synthetic oligonucleotide
gtaagaggcgagactaaattccctgacccg

SEQ ID NO: 131707 - DNA, 30 bp, Artificial Sequence
  Synthetic oligonucleotide
ttaggaactaatgaacgttcttcatacccg

SEQ ID NO: 131708 - DNA, 30 bp, Artificial Sequence
  Synthetic oligonucleotide
gggtgagctagggccagcaagaggtacccg

SEQ ID NO: 131709 - DNA, 30 bp, Artificial Sequence
  Synthetic oligonucleotide
aataaggattcgagagtagaggggtacccg

SEQ ID NO: 131710 - DNA, 30 bp, Artificial Sequence
  Synthetic oligonucleotide
ataacaatcaggctcaagccattgtacccg

SEQ ID NO: 131711 - DNA, 30 bp, Artificial Sequence
  Synthetic oligonucleotide
gtctggtcgtactccacggctgattacccg

SEQ ID NO: 131712 - DNA, 30 bp, Artificial Sequence
  Synthetic oligonucleotide
tgtgggtgacaagctggtattatttacccg

SEQ ID NO: 131713 - DNA, 30 bp, Artificial Sequence
  Synthetic oligonucleotide
acgaaaagcaaactttgatgttaacccccg

SEQ ID NO: 131714 - DNA, 30 bp, Artificial Sequence
  Synthetic oligonucleotide
cgacttaaagatcactgaagattacccccg

SEQ ID NO: 131715 - DNA, 30 bp, Artificial Sequence
  Synthetic oligonucleotide
gcagagggcactctaaatgtgaaccccccg

SEQ ID NO: 131716 - DNA, 30 bp, Artificial Sequence
  Synthetic oligonucleotide
gttacgatgagtgggcttcgataccccccg

SEQ ID NO: 131717 - DNA, 30 bp, Artificial Sequence
  Synthetic oligonucleotide
cccgtcagcggtcagccctacacgcccccg

SEQ ID NO: 131718 - DNA, 30 bp, Artificial Sequence
  Synthetic oligonucleotide
cgtcgcatttccaaaacagtagcagccccg

SEQ ID NO: 131719 - DNA, 30 bp, Artificial Sequence
  Synthetic oligonucleotide
tggactgcgcgtatttcccattatgccccg

SEQ ID NO: 131720 - DNA, 30 bp, Artificial Sequence
  Synthetic oligonucleotide
tcgggccaatcggacgatggaacttccccg

SEQ ID NO: 131721 - DNA, 30 bp, Artificial Sequence
  Synthetic oligonucleotide
tataggcgggtgatggggcgctgaagcccg

SEQ ID NO: 131722 - DNA, 30 bp, Artificial Sequence
  Synthetic oligonucleotide
tggcacagttttcagcttgatccgcgcccg

SEQ ID NO: 131723 - DNA, 30 bp, Artificial Sequence
  Synthetic oligonucleotide
ctcgtgtagacagacggtgtatccggcccg

SEQ ID NO: 131724 - DNA, 30 bp, Artificial Sequence
  Synthetic oligonucleotide
tccagatatgtggatcctctttcgggcccg

SEQ ID NO: 131725 - DNA, 30 bp, Artificial Sequence
  Synthetic oligonucleotide
cacgagttctagttagaattgaatggcccg

SEQ ID NO: 131726 - DNA, 30 bp, Artificial Sequence
  Synthetic oligonucleotide
gcatcatcaagcgagagcaagtagtgcccg

SEQ ID NO: 131727 - DNA, 30 bp, Artificial Sequence
  Synthetic oligonucleotide
actgtccaggctatgtcaaccaaaatcccg

SEQ ID NO: 131728 - DNA, 30 bp, Artificial Sequence
  Synthetic oligonucleotide
gggtcttgtaacagtctggtagaaatcccg

SEQ ID NO: 131729 - DNA, 30 bp, Artificial Sequence
  Synthetic oligonucleotide
cagtagctacccctgtaagcataaatcccg

SEQ ID NO: 131730 - DNA, 30 bp, Artificial Sequence
  Synthetic oligonucleotide
atcacaccagaagctaaccggttaatcccg

SEQ ID NO: 131731 - DNA, 30 bp, Artificial Sequence
  Synthetic oligonucleotide
ccatttcacatttgatagtgaaacatcccg

SEQ ID NO: 131732 - DNA, 30 bp, Artificial Sequence
  Synthetic oligonucleotide
cttatctgagaggactcttcatccatcccg

SEQ ID NO: 131733 - DNA, 30 bp, Artificial Sequence
  Synthetic oligonucleotide
cgcgaaccttgcatgatccccggcatcccg

SEQ ID NO: 131734 - DNA, 30 bp, Artificial Sequence
  Synthetic oligonucleotide
actccgtgattataggagacttagctcccg

SEQ ID NO: 131735 - DNA, 30 bp, Artificial Sequence
  Synthetic oligonucleotide
taagagattgtagtaggaggccctctcccg

SEQ ID NO: 131736 - DNA, 30 bp, Artificial Sequence
  Synthetic oligonucleotide
agaagttgtatgacttccgtcgccttcccg

SEQ ID NO: 131737 - DNA, 30 bp, Artificial Sequence
  Synthetic oligonucleotide
tgaagacgagggctacgactaaagttcccg

SEQ ID NO: 131738 - DNA, 30 bp, Artificial Sequence
  Synthetic oligonucleotide
cgcactagatgacaagagaatatgaagccg

SEQ ID NO: 131739 - DNA, 30 bp, Artificial Sequence
  Synthetic oligonucleotide
ggaactcaaatcggcgccgcgtctaagccg

SEQ ID NO: 131740 - DNA, 30 bp, Artificial Sequence
  Synthetic oligonucleotide
ccgatatcttttatactgaacccacagccg

SEQ ID NO: 131741 - DNA, 30 bp, Artificial Sequence
  Synthetic oligonucleotide
aatgatctgtaggttatagaagagcagccg

SEQ ID NO: 131742 - DNA, 30 bp, Artificial Sequence
  Synthetic oligonucleotide
gtatgcttgtcggtttggatatcaacgccg

SEQ ID NO: 131743 - DNA, 30 bp, Artificial Sequence
  Synthetic oligonucleotide
cgtaaagttcttgtgtagggaggaacgccg

SEQ ID NO: 131744 - DNA, 30 bp, Artificial Sequence
  Synthetic oligonucleotide
cgattgtaaccgagccccgatagtacgccg

SEQ ID NO: 131745 - DNA, 30 bp, Artificial Sequence
  Synthetic oligonucleotide
catggactcatatgtaatggatcaccgccg

SEQ ID NO: 131746 - DNA, 30 bp, Artificial Sequence
  Synthetic oligonucleotide
actgggaatgaaccgggagttcctccgccg

SEQ ID NO: 131747 - DNA, 30 bp, Artificial Sequence
  Synthetic oligonucleotide
atgcaaggccaagaacattgagttccgccg

SEQ ID NO: 131748 - DNA, 30 bp, Artificial Sequence
  Synthetic oligonucleotide
tcagtgttcgaaacgaaggaataagcgccg

SEQ ID NO: 131749 - DNA, 30 bp, Artificial Sequence
  Synthetic oligonucleotide
gtgactgggaagacgtggcggtgggcgccg

SEQ ID NO: 131750 - DNA, 30 bp, Artificial Sequence
  Synthetic oligonucleotide
tgccgtccgtaaactgcacctatctcgccg

SEQ ID NO: 131751 - DNA, 30 bp, Artificial Sequence
  Synthetic oligonucleotide
tcgtaactccccaccgtaactaagtcgccg

SEQ ID NO: 131752 - DNA, 30 bp, Artificial Sequence
  Synthetic oligonucleotide
ggggactgtcagtgttcgcttcagtcgccg

SEQ ID NO: 131753 - DNA, 31 bp, Artificial Sequence
  Synthetic oligonucleotide
catgtgttgtgggtaagggcatcacaggccg

SEQ ID NO: 131754 - DNA, 30 bp, Artificial Sequence
  Synthetic oligonucleotide
aggcgagtaaaatccagaacgtctaggccg

SEQ ID NO: 131755 - DNA, 30 bp, Artificial Sequence
  Synthetic oligonucleotide
catcgacacgctttagtgcccttccggccg

SEQ ID NO: 131756 - DNA, 30 bp, Artificial Sequence
  Synthetic oligonucleotide
tggcgtgcagtcgacggacggcgggggccg

SEQ ID NO: 131757 - DNA, 30 bp, Artificial Sequence
  Synthetic oligonucleotide
ggacacatataggggcctgacttggggccg

SEQ ID NO: 131758 - DNA, 30 bp, Artificial Sequence
  Synthetic oligonucleotide
ggcctgatgatccgagggtatgtctggccg

SEQ ID NO: 131759 - DNA, 30 bp, Artificial Sequence
  Synthetic oligonucleotide
agggtacaattggtcctcgctcattggccg

SEQ ID NO: 131760 - DNA, 30 bp, Artificial Sequence
  Synthetic oligonucleotide
ctaagctaaagtgcccagagcgaaatgccg

SEQ ID NO: 131761 - DNA, 30 bp, Artificial Sequence
  Synthetic oligonucleotide
tctataaggagcgagtggtatagtatgccg

SEQ ID NO: 131762 - DNA, 30 bp, Artificial Sequence
  Synthetic oligonucleotide
ggcgaagaaaatcggcggttaattatgccg

SEQ ID NO: 131763 - DNA, 30 bp, Artificial Sequence
  Synthetic oligonucleotide
tggagcgcgaggacttagtgtcacctgccg

SEQ ID NO: 131764 - DNA, 30 bp, Artificial Sequence
  Synthetic oligonucleotide
cttctcagatcggtaatggggggcctgccg

SEQ ID NO: 131765 - DNA, 30 bp, Artificial Sequence
  Synthetic oligonucleotide
acgagtcctgtatcaaaggcacgagtgccg

SEQ ID NO: 131766 - DNA, 30 bp, Artificial Sequence
  Synthetic oligonucleotide
cgagagttccttcggcactgatacgtgccg

SEQ ID NO: 131767 - DNA, 30 bp, Artificial Sequence
  Synthetic oligonucleotide
gtgactaggtgaagtccttggtccgtgccg

SEQ ID NO: 131768 - DNA, 30 bp, Artificial Sequence
  Synthetic oligonucleotide
ctctcaagtgcctgtgtacctgcggtgccg

SEQ ID NO: 131769 - DNA, 30 bp, Artificial Sequence
  Synthetic oligonucleotide
tgtaagaaaatacattaggtactcttgccg

SEQ ID NO: 131770 - DNA, 30 bp, Artificial Sequence
  Synthetic oligonucleotide
accaatcgtttcttgtccaatgagttgccg

SEQ ID NO: 131771 - DNA, 30 bp, Artificial Sequence
  Synthetic oligonucleotide
ctagatgcgggccctagggattaaaatccg

SEQ ID NO: 131772 - DNA, 30 bp, Artificial Sequence
  Synthetic oligonucleotide
actacataagctccgtatcatataaatccg

SEQ ID NO: 131773 - DNA, 30 bp, Artificial Sequence
  Synthetic oligonucleotide
ttggaaccgagaaataattcttggaatccg

SEQ ID NO: 131774 - DNA, 30 bp, Artificial Sequence
  Synthetic oligonucleotide
acacgatgttggaaagtttgctcgcatccg

SEQ ID NO: 131775 - DNA, 30 bp, Artificial Sequence
  Synthetic oligonucleotide
actgacttgtgctgaagtgataaagatccg

SEQ ID NO: 131776 - DNA, 30 bp, Artificial Sequence
  Synthetic oligonucleotide
caggaaaagttcgcggggagcatggatccg

SEQ ID NO: 131777 - DNA, 30 bp, Artificial Sequence
  Synthetic oligonucleotide
ggacctgtgcgaactactaataactatccg

SEQ ID NO: 131778 - DNA, 30 bp, Artificial Sequence
  Synthetic oligonucleotide
cggccaatgaatccgccgctggcctatccg

SEQ ID NO: 131779 - DNA, 30 bp, Artificial Sequence
  Synthetic oligonucleotide
tatcggggctaaactgagggccgctatccg

SEQ ID NO: 131780 - DNA, 30 bp, Artificial Sequence
  Synthetic oligonucleotide
acggtgtacgaccgcatacgccggtatccg

SEQ ID NO: 131781 - DNA, 30 bp, Artificial Sequence
  Synthetic oligonucleotide
tgtaaaatacgcaataacgccaacactccg

SEQ ID NO: 131782 - DNA, 30 bp, Artificial Sequence
  Synthetic oligonucleotide
gcccgccggtaacgtctagcttcacctccg

SEQ ID NO: 131783 - DNA, 30 bp, Artificial Sequence
  Synthetic oligonucleotide
atgacagaattgtaaccgaatgttcctccg

SEQ ID NO: 131784 - DNA, 30 bp, Artificial Sequence
  Synthetic oligonucleotide
gacttccgaatatatccggcgaaagctccg

SEQ ID NO: 131785 - DNA, 30 bp, Artificial Sequence
  Synthetic oligonucleotide
ggcatagcaaaagaggggttctatgctccg

SEQ ID NO: 131786 - DNA, 30 bp, Artificial Sequence
  Synthetic oligonucleotide
gataaagggctattccacattaattctccg

SEQ ID NO: 131787 - DNA, 30 bp, Artificial Sequence
  Synthetic oligonucleotide
gtgttggttctccaggctagggacagtccg

SEQ ID NO: 131788 - DNA, 30 bp, Artificial Sequence
  Synthetic oligonucleotide
gataacgccacctgatatcttaagagtccg

SEQ ID NO: 131789 - DNA, 30 bp, Artificial Sequence
  Synthetic oligonucleotide
gtggtaaacattagcctcctataacgtccg

SEQ ID NO: 131790 - DNA, 30 bp, Artificial Sequence
  Synthetic oligonucleotide
cggctgccatctgtgtaagaacgacgtccg

SEQ ID NO: 131791 - DNA, 30 bp, Artificial Sequence
  Synthetic oligonucleotide
agctcagccactactcacaagtagcgtccg

SEQ ID NO: 131792 - DNA, 30 bp, Artificial Sequence
  Synthetic oligonucleotide
cagtatctccatggtgatatggtgcgtccg

SEQ ID NO: 131793 - DNA, 30 bp, Artificial Sequence
  Synthetic oligonucleotide
gactaggtacgaattttgtagggtcgtccg

SEQ ID NO: 131794 - DNA, 30 bp, Artificial Sequence
  Synthetic oligonucleotide
gtcgggaggaactagcgcgcccttcgtccg

SEQ ID NO: 131795 - DNA, 30 bp, Artificial Sequence
  Synthetic oligonucleotide
atcggtgtcaagtaggaccaatttggtccg

SEQ ID NO: 131796 - DNA, 30 bp, Artificial Sequence
  Synthetic oligonucleotide
agggcagaaacgcctggatgtgaatgtccg

SEQ ID NO: 131797 - DNA, 30 bp, Artificial Sequence
  Synthetic oligonucleotide
acgacaactaagttcgagcagtcctgtccg

SEQ ID NO: 131798 - DNA, 30 bp, Artificial Sequence
  Synthetic oligonucleotide
tcaaacgtacagagagggtaatcaattccg

SEQ ID NO: 131799 - DNA, 30 bp, Artificial Sequence
  Synthetic oligonucleotide
agtggagacatctatcaaggtaagattccg

SEQ ID NO: 131800 - DNA, 30 bp, Artificial Sequence
  Synthetic oligonucleotide
tgcaagcggatgcgtcaaaccggtcttccg

SEQ ID NO: 131801 - DNA, 30 bp, Artificial Sequence
  Synthetic oligonucleotide
atcggcatacgtaacaaatcgctcgttccg

SEQ ID NO: 131802 - DNA, 30 bp, Artificial Sequence
  Synthetic oligonucleotide
atgcagagggcagctatatgtccggttccg

SEQ ID NO: 131803 - DNA, 30 bp, Artificial Sequence
  Synthetic oligonucleotide
ggttccgcaactgtgaacattagaaaagcg

SEQ ID NO: 131804 - DNA, 30 bp, Artificial Sequence
  Synthetic oligonucleotide
actcagactcatactgaggagaccaaagcg

SEQ ID NO: 131805 - DNA, 30 bp, Artificial Sequence
  Synthetic oligonucleotide
agacaagtctgataagttttgcgtaaagcg

SEQ ID NO: 131806 - DNA, 30 bp, Artificial Sequence
  Synthetic oligonucleotide
ccaaataaaccacaattcgtcggacaagcg

SEQ ID NO: 131807 - DNA, 31 bp, Artificial Sequence
  Synthetic oligonucleotide
ttcctgtcgataaaatcgaccaagtcaagcg

SEQ ID NO: 131808 - DNA, 30 bp, Artificial Sequence
  Synthetic oligonucleotide
gggtggtttgtaagagtcatgagggaagcg

SEQ ID NO: 131809 - DNA, 30 bp, Artificial Sequence
  Synthetic oligonucleotide
ggggaactgagatagggaggctatgaagcg

SEQ ID NO: 131810 - DNA, 30 bp, Artificial Sequence
  Synthetic oligonucleotide
ggcattggattccggtcaagaagtgaagcg

SEQ ID NO: 131811 - DNA, 30 bp, Artificial Sequence
  Synthetic oligonucleotide
ggtaggagtcgtggccttgaccaataagcg

SEQ ID NO: 131812 - DNA, 30 bp, Artificial Sequence
  Synthetic oligonucleotide
acgtcgcgcaccgaccgttttcaataagcg

SEQ ID NO: 131813 - DNA, 30 bp, Artificial Sequence
  Synthetic oligonucleotide
tacagttgaagtaggcctagataataagcg

SEQ ID NO: 131814 - DNA, 30 bp, Artificial Sequence
  Synthetic oligonucleotide
tatggaagccttgaaggacttccgtaagcg

SEQ ID NO: 131815 - DNA, 30 bp, Artificial Sequence
  Synthetic oligonucleotide
cgactttctaataatcgggtctgttaagcg

SEQ ID NO: 131816 - DNA, 30 bp, Artificial Sequence
  Synthetic oligonucleotide
agtctagacgcgaatcggatggaaacagcg

SEQ ID NO: 131817 - DNA, 30 bp, Artificial Sequence
  Synthetic oligonucleotide
ctggatgaatgcccccgtcgcccgacagcg

SEQ ID NO: 131818 - DNA, 30 bp, Artificial Sequence
  Synthetic oligonucleotide
agtactcactgaactagtatctcgacagcg

SEQ ID NO: 131819 - DNA, 30 bp, Artificial Sequence
  Synthetic oligonucleotide
gggatgtttcgaacctaactaaggacagcg

SEQ ID NO: 131820 - DNA, 30 bp, Artificial Sequence
  Synthetic oligonucleotide
agtaatctggggcaactgacttaaccagcg

SEQ ID NO: 131821 - DNA, 30 bp, Artificial Sequence
  Synthetic oligonucleotide
taggaccctagagattgcctttaaccagcg

SEQ ID NO: 131822 - DNA, 30 bp, Artificial Sequence
  Synthetic oligonucleotide
tttctactaaggacaacgcttaagccagcg

SEQ ID NO: 131823 - DNA, 30 bp, Artificial Sequence
  Synthetic oligonucleotide
catgtgttgtgtgaccgagaatatccagcg

SEQ ID NO: 131824 - DNA, 30 bp, Artificial Sequence
  Synthetic oligonucleotide
gttcattgcttgcgccggttaaaagcagcg

SEQ ID NO: 131825 - DNA, 30 bp, Artificial Sequence
  Synthetic oligonucleotide
tggatcattacctcggaatacctcgcagcg

SEQ ID NO: 131826 - DNA, 30 bp, Artificial Sequence
  Synthetic oligonucleotide
gacgaccgaaggtaaatgcgcgcatcagcg

SEQ ID NO: 131827 - DNA, 30 bp, Artificial Sequence
  Synthetic oligonucleotide
tggttgcgtctgtactggctaatgtcagcg

SEQ ID NO: 131828 - DNA, 30 bp, Artificial Sequence
  Synthetic oligonucleotide
tacggcaggctattggaggtgttttcagcg

SEQ ID NO: 131829 - DNA, 30 bp, Artificial Sequence
  Synthetic oligonucleotide
accgtctaaatacatgtgtatttttcagcg

SEQ ID NO: 131830 - DNA, 30 bp, Artificial Sequence
  Synthetic oligonucleotide
caacctaaagcgttgggaacttagcgagcg

SEQ ID NO: 131831 - DNA, 30 bp, Artificial Sequence
  Synthetic oligonucleotide
ctacgattaaccgcggcgaacatgcgagcg

SEQ ID NO: 131832 - DNA, 30 bp, Artificial Sequence
  Synthetic oligonucleotide
cgagctcgaagctgtgatcgtctgcgagcg

SEQ ID NO: 131833 - DNA, 30 bp, Artificial Sequence
  Synthetic oligonucleotide
agttcgggtcggcgaaatttatgtcgagcg

SEQ ID NO: 131834 - DNA, 30 bp, Artificial Sequence
  Synthetic oligonucleotide
tgagcgacacgcatgatagcggcaggagcg

SEQ ID NO: 131835 - DNA, 30 bp, Artificial Sequence
  Synthetic oligonucleotide
actaatgccagattgccactggcaggagcg

SEQ ID NO: 131836 - DNA, 30 bp, Artificial Sequence
  Synthetic oligonucleotide
attcgggacagggagcatgtagctggagcg

SEQ ID NO: 131837 - DNA, 30 bp, Artificial Sequence
  Synthetic oligonucleotide
taaacggtaggaattcagttaacgtgagcg

SEQ ID NO: 131838 - DNA, 30 bp, Artificial Sequence
  Synthetic oligonucleotide
ctccgggtggaactgcgctagtacatagcg

SEQ ID NO: 131839 - DNA, 30 bp, Artificial Sequence
  Synthetic oligonucleotide
aacggggggtggtaatctttcaccatagcg

SEQ ID NO: 131840 - DNA, 30 bp, Artificial Sequence
  Synthetic oligonucleotide
tcctgccgaagtctcagcgggttactagcg

SEQ ID NO: 131841 - DNA, 30 bp, Artificial Sequence
  Synthetic oligonucleotide
gaatatttgggcacgaatcaaagcctagcg

SEQ ID NO: 131842 - DNA, 30 bp, Artificial Sequence
  Synthetic oligonucleotide
gccgagaccaatcgggacggcaacgtagcg

SEQ ID NO: 131843 - DNA, 30 bp, Artificial Sequence
  Synthetic oligonucleotide
agacagccgccatgcgatcgagcggtagcg

SEQ ID NO: 131844 - DNA, 30 bp, Artificial Sequence
  Synthetic oligonucleotide
tggcggattcatatcatctggaatgtagcg

SEQ ID NO: 131845 - DNA, 30 bp, Artificial Sequence
  Synthetic oligonucleotide
tctcgttgtgtaatgtggcgacgattagcg

SEQ ID NO: 131846 - DNA, 30 bp, Artificial Sequence
  Synthetic oligonucleotide
ggatacggtagttcgactcacatattagcg

SEQ ID NO: 131847 - DNA, 30 bp, Artificial Sequence
  Synthetic oligonucleotide
gtggagaaattgtggtaattggacttagcg

SEQ ID NO: 131848 - DNA, 30 bp, Artificial Sequence
  Synthetic oligonucleotide
tgtaggtttctgatgccaatactgttagcg

SEQ ID NO: 131849 - DNA, 30 bp, Artificial Sequence
  Synthetic oligonucleotide
ggtcagtaggcagatcctcaacatttagcg

SEQ ID NO: 131850 - DNA, 30 bp, Artificial Sequence
  Synthetic oligonucleotide
gcgggccaaaattcgcagccctatttagcg

SEQ ID NO: 131851 - DNA, 30 bp, Artificial Sequence
  Synthetic oligonucleotide
gtacccgacaatggcctgcgcaacaacgcg

SEQ ID NO: 131852 - DNA, 30 bp, Artificial Sequence
  Synthetic oligonucleotide
gacttagcaaaggttgtgcagaggaacgcg

SEQ ID NO: 131853 - DNA, 30 bp, Artificial Sequence
  Synthetic oligonucleotide
acgtggtgtgtttcttggcgggtgaacgcg

SEQ ID NO: 131854 - DNA, 30 bp, Artificial Sequence
  Synthetic oligonucleotide
tattatggggaaatatcaggacgccacgcg

SEQ ID NO: 131855 - DNA, 30 bp, Artificial Sequence
  Synthetic oligonucleotide
cgatgtcaggattcacaagaaagggacgcg

SEQ ID NO: 131856 - DNA, 30 bp, Artificial Sequence
  Synthetic oligonucleotide
gtattaagtaaagagcaagcgtgctacgcg

SEQ ID NO: 131857 - DNA, 30 bp, Artificial Sequence
  Synthetic oligonucleotide
acaagattagatgtttaggtggtttacgcg

SEQ ID NO: 131858 - DNA, 30 bp, Artificial Sequence
  Synthetic oligonucleotide
tccagggcatcccacctgctcagaaccgcg

SEQ ID NO: 131859 - DNA, 30 bp, Artificial Sequence
  Synthetic oligonucleotide
tcggacagcccgccgatggtgtctaccgcg

SEQ ID NO: 131860 - DNA, 30 bp, Artificial Sequence
  Synthetic oligonucleotide
acctggttatctaaataaggtaaacccgcg

SEQ ID NO: 131861 - DNA, 30 bp, Artificial Sequence
  Synthetic oligonucleotide
tacccgagcataagtggacttgaccccgcg

SEQ ID NO: 131862 - DNA, 30 bp, Artificial Sequence
  Synthetic oligonucleotide
acggtaccaccgttcactttcgatcccgcg

SEQ ID NO: 131863 - DNA, 30 bp, Artificial Sequence
  Synthetic oligonucleotide
atcctggaggcaataggtgcatcagccgcg

SEQ ID NO: 131864 - DNA, 30 bp, Artificial Sequence
  Synthetic oligonucleotide
cagtggcacagtgtacggggtcatgccgcg

SEQ ID NO: 131865 - DNA, 30 bp, Artificial Sequence
  Synthetic oligonucleotide
gctcatagccatgtggagacaactgccgcg

SEQ ID NO: 131866 - DNA, 31 bp, Artificial Sequence
  Synthetic oligonucleotide
ctattctttcccggaaagggataagtccgcg

SEQ ID NO: 131867 - DNA, 30 bp, Artificial Sequence
  Synthetic oligonucleotide
catatggcaagctgtgaggggatgtccgcg

SEQ ID NO: 131868 - DNA, 30 bp, Artificial Sequence
  Synthetic oligonucleotide
acgaatcggaccgttccgttggtgtccgcg

SEQ ID NO: 131869 - DNA, 30 bp, Artificial Sequence
  Synthetic oligonucleotide
tttactggaaggtgttaaacgtattccgcg

SEQ ID NO: 131870 - DNA, 30 bp, Artificial Sequence
  Synthetic oligonucleotide
gtattgtggccgagctgtaggacttccgcg

SEQ ID NO: 131871 - DNA, 30 bp, Artificial Sequence
  Synthetic oligonucleotide
gcgctggacggacttgagcggagaagcgcg

SEQ ID NO: 131872 - DNA, 30 bp, Artificial Sequence
  Synthetic oligonucleotide
tagcagtgaaatgcccataaagtgagcgcg

SEQ ID NO: 131873 - DNA, 30 bp, Artificial Sequence
  Synthetic oligonucleotide
ggagtcccgtgacgtatagactggcgcgcg

SEQ ID NO: 131874 - DNA, 30 bp, Artificial Sequence
  Synthetic oligonucleotide
ctacgactggttcgtccgggactgcgcgcg

SEQ ID NO: 131875 - DNA, 30 bp, Artificial Sequence
  Synthetic oligonucleotide
agcattcgtccgtgtcaaggctaaggcgcg

SEQ ID NO: 131876 - DNA, 30 bp, Artificial Sequence
  Synthetic oligonucleotide
taaaacgagggctaagcgcacgggggcgcg

SEQ ID NO: 131877 - DNA, 30 bp, Artificial Sequence
  Synthetic oligonucleotide
aacagacgtgagagattgtgagtgggcgcg

SEQ ID NO: 131878 - DNA, 30 bp, Artificial Sequence
  Synthetic oligonucleotide
agatagtcagtgtagtaagtgccctgcgcg

SEQ ID NO: 131879 - DNA, 30 bp, Artificial Sequence
  Synthetic oligonucleotide
cgaggagcaggttaaaataactcttgcgcg

SEQ ID NO: 131880 - DNA, 30 bp, Artificial Sequence
  Synthetic oligonucleotide
ttcaataggaaagtaggtgagctttgcgcg

SEQ ID NO: 131881 - DNA, 30 bp, Artificial Sequence
  Synthetic oligonucleotide
tagtatcgagtaatatcgcccgagatcgcg

SEQ ID NO: 131882 - DNA, 30 bp, Artificial Sequence
  Synthetic oligonucleotide
acaagaattagtgccatccccaggctcgcg

SEQ ID NO: 131883 - DNA, 30 bp, Artificial Sequence
  Synthetic oligonucleotide
ctactggtgggacctaggtacttattcgcg

SEQ ID NO: 131884 - DNA, 30 bp, Artificial Sequence
  Synthetic oligonucleotide
atctgttgatcatacaacgtggagaaggcg

SEQ ID NO: 131885 - DNA, 30 bp, Artificial Sequence
  Synthetic oligonucleotide
acaaacctctgcgtacactctgggaaggcg

SEQ ID NO: 131886 - DNA, 30 bp, Artificial Sequence
  Synthetic oligonucleotide
cgggcagtcctatatagctggtagcaggcg

SEQ ID NO: 131887 - DNA, 30 bp, Artificial Sequence
  Synthetic oligonucleotide
acgcgttcctgtgcgcggatgtgtcaggcg

SEQ ID NO: 131888 - DNA, 30 bp, Artificial Sequence
  Synthetic oligonucleotide
caaatggtagcactgtcacaccttcaggcg

SEQ ID NO: 131889 - DNA, 30 bp, Artificial Sequence
  Synthetic oligonucleotide
cccggaagatatcttgtcataaaagaggcg

SEQ ID NO: 131890 - DNA, 30 bp, Artificial Sequence
  Synthetic oligonucleotide
cgcaaagcaagtatcggtgataaagaggcg

SEQ ID NO: 131891 - DNA, 30 bp, Artificial Sequence
  Synthetic oligonucleotide
gagacaccacaatgttgcggtgcagaggcg

SEQ ID NO: 131892 - DNA, 30 bp, Artificial Sequence
  Synthetic oligonucleotide
caggggctcgggtataaggtatcagaggcg

SEQ ID NO: 131893 - DNA, 30 bp, Artificial Sequence
  Synthetic oligonucleotide
gttattaatagaaaagcgagccgcgaggcg

SEQ ID NO: 131894 - DNA, 30 bp, Artificial Sequence
  Synthetic oligonucleotide
cataccaaaggggttgtaattatcgaggcg

SEQ ID NO: 131895 - DNA, 30 bp, Artificial Sequence
  Synthetic oligonucleotide
cgagctaaagagatacgctcgtggtaggcg

SEQ ID NO: 131896 - DNA, 30 bp, Artificial Sequence
  Synthetic oligonucleotide
accagagtatgtagcgttagcgtttaggcg

SEQ ID NO: 131897 - DNA, 30 bp, Artificial Sequence
  Synthetic oligonucleotide
aaaacagaaggagatggattacccacggcg

SEQ ID NO: 131898 - DNA, 30 bp, Artificial Sequence
  Synthetic oligonucleotide
gaatttaaagcagtagcagctgtcacggcg

SEQ ID NO: 131899 - DNA, 30 bp, Artificial Sequence
  Synthetic oligonucleotide
gggcccaagcatactctaactcggacggcg

SEQ ID NO: 131900 - DNA, 30 bp, Artificial Sequence
  Synthetic oligonucleotide
ttaggtaaataagaagcgacaaatacggcg

SEQ ID NO: 131901 - DNA, 30 bp, Artificial Sequence
  Synthetic oligonucleotide
ttgggtcactacaacgtgataggaccggcg

SEQ ID NO: 131902 - DNA, 30 bp, Artificial Sequence
  Synthetic oligonucleotide
gtacaattgaaaaactcatactagccggcg

SEQ ID NO: 131903 - DNA, 30 bp, Artificial Sequence
  Synthetic oligonucleotide
cccggcaagcgcgaaggccgaacagcggcg

SEQ ID NO: 131904 - DNA, 30 bp, Artificial Sequence
  Synthetic oligonucleotide
catggaccatagcaatttatgtgcgcggcg

SEQ ID NO: 131905 - DNA, 30 bp, Artificial Sequence
  Synthetic oligonucleotide
aaattagggatagaacagattcaggcggcg

SEQ ID NO: 131906 - DNA, 30 bp, Artificial Sequence
  Synthetic oligonucleotide
tcgaacctggtgtgggcgcagattgcggcg

SEQ ID NO: 131907 - DNA, 30 bp, Artificial Sequence
  Synthetic oligonucleotide
aagcgaccgctggggggagcgattgcggcg

SEQ ID NO: 131908 - DNA, 30 bp, Artificial Sequence
  Synthetic oligonucleotide
ttgtaacaaagcgggtggccgtgatcggcg

SEQ ID NO: 131909 - DNA, 30 bp, Artificial Sequence
  Synthetic oligonucleotide
tttaggcacgaggcggccttttactcggcg

SEQ ID NO: 131910 - DNA, 30 bp, Artificial Sequence
  Synthetic oligonucleotide
gcaaaatttgaattcggcttgtgctcggcg

SEQ ID NO: 131911 - DNA, 30 bp, Artificial Sequence
  Synthetic oligonucleotide
ggcggggtaattcagtgattaagaagggcg

SEQ ID NO: 131912 - DNA, 30 bp, Artificial Sequence
  Synthetic oligonucleotide
gcaggtcggtctttgacaagcataagggcg

SEQ ID NO: 131913 - DNA, 30 bp, Artificial Sequence
  Synthetic oligonucleotide
gtggtagctttggtcggcgtgttaagggcg

SEQ ID NO: 131914 - DNA, 30 bp, Artificial Sequence
  Synthetic oligonucleotide
tgagtagagggtagtttaaatttaagggcg

SEQ ID NO: 131915 - DNA, 30 bp, Artificial Sequence
  Synthetic oligonucleotide
agtcagtcgcgcctagcaaagtgacgggcg

SEQ ID NO: 131916 - DNA, 30 bp, Artificial Sequence
  Synthetic oligonucleotide
gtccgcaattaaagcaacggatgaggggcg

SEQ ID NO: 131917 - DNA, 30 bp, Artificial Sequence
  Synthetic oligonucleotide
ggtaagggacaacgtttaaggaccggggcg

SEQ ID NO: 131918 - DNA, 30 bp, Artificial Sequence
  Synthetic oligonucleotide
cactgaagtgaccaacataaacccggggcg

SEQ ID NO: 131919 - DNA, 30 bp, Artificial Sequence
  Synthetic oligonucleotide
ggttaagcagtccgaagagaaatcggggcg

SEQ ID NO: 131920 - DNA, 30 bp, Artificial Sequence
  Synthetic oligonucleotide
actggtcgaatttttatagctcggggggcg

SEQ ID NO: 131921 - DNA, 30 bp, Artificial Sequence
  Synthetic oligonucleotide
tttgtctcttatgtactaggagtgggggcg

SEQ ID NO: 131922 - DNA, 30 bp, Artificial Sequence
  Synthetic oligonucleotide
tggctacttgggaggaggcaaaatggggcg

SEQ ID NO: 131923 - DNA, 30 bp, Artificial Sequence
  Synthetic oligonucleotide
tcacaaacccgtatataacgtgattgggcg

SEQ ID NO: 131924 - DNA, 30 bp, Artificial Sequence
  Synthetic oligonucleotide
tcgttaaccgcatgtcatgagttttgggcg

SEQ ID NO: 131925 - DNA, 30 bp, Artificial Sequence
  Synthetic oligonucleotide
ggaggaatcaggtactctcctgacatggcg

SEQ ID NO: 131926 - DNA, 30 bp, Artificial Sequence
  Synthetic oligonucleotide
aacgaagtgcctggcatagcaattatggcg

SEQ ID NO: 131927 - DNA, 30 bp, Artificial Sequence
  Synthetic oligonucleotide
tgggttgcgtcaaggcgaggcccactggcg

SEQ ID NO: 131928 - DNA, 30 bp, Artificial Sequence
  Synthetic oligonucleotide
caaggagaagtctgtaagagcgcactggcg

SEQ ID NO: 131929 - DNA, 30 bp, Artificial Sequence
  Synthetic oligonucleotide
aaaggtcagctaaattacaccggcctggcg

SEQ ID NO: 131930 - DNA, 30 bp, Artificial Sequence
  Synthetic oligonucleotide
gtatcttctacagtcacggaggagctggcg

SEQ ID NO: 131931 - DNA, 30 bp, Artificial Sequence
  Synthetic oligonucleotide
ggcgcgggggagaaaaacagaacgctggcg

SEQ ID NO: 131932 - DNA, 30 bp, Artificial Sequence
  Synthetic oligonucleotide
cttgtggttagcatcggaagttggctggcg

SEQ ID NO: 131933 - DNA, 30 bp, Artificial Sequence
  Synthetic oligonucleotide
gaaaataagacaatacgtgaacctctggcg

SEQ ID NO: 131934 - DNA, 30 bp, Artificial Sequence
  Synthetic oligonucleotide
tacttaggggagcgctgataacctctggcg

SEQ ID NO: 131935 - DNA, 30 bp, Artificial Sequence
  Synthetic oligonucleotide
tttcgcaatcgaggtatactagtcttggcg

SEQ ID NO: 131936 - DNA, 30 bp, Artificial Sequence
  Synthetic oligonucleotide
cgtagagtccaccataaggaaatgttggcg

SEQ ID NO: 131937 - DNA, 30 bp, Artificial Sequence
  Synthetic oligonucleotide
gccttggagtaaagctgaattaatttggcg

SEQ ID NO: 131938 - DNA, 30 bp, Artificial Sequence
  Synthetic oligonucleotide
tttgttcaaggccaatccacaggtttggcg

SEQ ID NO: 131939 - DNA, 30 bp, Artificial Sequence
  Synthetic oligonucleotide
cgtgtcacatcaacagctcagttaaatgcg

SEQ ID NO: 131940 - DNA, 30 bp, Artificial Sequence
  Synthetic oligonucleotide
attgggcaatgaaaacctcggtagaatgcg

SEQ ID NO: 131941 - DNA, 30 bp, Artificial Sequence
  Synthetic oligonucleotide
ctaaacagtaagactattggtctacatgcg

SEQ ID NO: 131942 - DNA, 30 bp, Artificial Sequence
  Synthetic oligonucleotide
ggtcgaacaaaaatgctcgcgcatcatgcg

SEQ ID NO: 131943 - DNA, 30 bp, Artificial Sequence
  Synthetic oligonucleotide
gtccatgagggctaacgtacggatcatgcg

SEQ ID NO: 131944 - DNA, 30 bp, Artificial Sequence
  Synthetic oligonucleotide
agatgcgggcagagctgagcaattcatgcg

SEQ ID NO: 131945 - DNA, 30 bp, Artificial Sequence
  Synthetic oligonucleotide
tccatactcaaagcggcacaagcggatgcg

SEQ ID NO: 131946 - DNA, 30 bp, Artificial Sequence
  Synthetic oligonucleotide
aacaccaatacatgatttaatagggatgcg

SEQ ID NO: 131947 - DNA, 30 bp, Artificial Sequence
  Synthetic oligonucleotide
agtcggccccgagaagacttattggatgcg

SEQ ID NO: 131948 - DNA, 30 bp, Artificial Sequence
  Synthetic oligonucleotide
acgtcgggatgataatttggttatgatgcg

SEQ ID NO: 131949 - DNA, 30 bp, Artificial Sequence
  Synthetic oligonucleotide
tgagggacatactggttcatgcgctatgcg

SEQ ID NO: 131950 - DNA, 30 bp, Artificial Sequence
  Synthetic oligonucleotide
aacacctgttagcgtatagacagttatgcg

SEQ ID NO: 131951 - DNA, 30 bp, Artificial Sequence
  Synthetic oligonucleotide
gacaccccggctgtcagaatatgcactgcg

SEQ ID NO: 131952 - DNA, 30 bp, Artificial Sequence
  Synthetic oligonucleotide
actatcggaaagtcaaagaataagactgcg

SEQ ID NO: 131953 - DNA, 30 bp, Artificial Sequence
  Synthetic oligonucleotide
gcctacttgcggggaagataacagactgcg

SEQ ID NO: 131954 - DNA, 30 bp, Artificial Sequence
  Synthetic oligonucleotide
agataaatggatttctaattaaggactgcg

SEQ ID NO: 131955 - DNA, 30 bp, Artificial Sequence
  Synthetic oligonucleotide
cacggcaaatcttatcattaacggcctgcg

SEQ ID NO: 131956 - DNA, 30 bp, Artificial Sequence
  Synthetic oligonucleotide
accctccagagatctccatatcatcctgcg

SEQ ID NO: 131957 - DNA, 30 bp, Artificial Sequence
  Synthetic oligonucleotide
aaggaagtagtaatataaatagttgctgcg

SEQ ID NO: 131958 - DNA, 30 bp, Artificial Sequence
  Synthetic oligonucleotide
agaaatatccaacgtggcgaagaatctgcg

SEQ ID NO: 131959 - DNA, 30 bp, Artificial Sequence
  Synthetic oligonucleotide
aggtagatttttgttagcgggtcatctgcg

SEQ ID NO: 131960 - DNA, 30 bp, Artificial Sequence
  Synthetic oligonucleotide
atattaggccgtctataagaaaagagtgcg

SEQ ID NO: 131961 - DNA, 30 bp, Artificial Sequence
  Synthetic oligonucleotide
tgcggcacagaagatttaatcaggagtgcg

SEQ ID NO: 131962 - DNA, 30 bp, Artificial Sequence
  Synthetic oligonucleotide
tagttacaaaacgttcagtggcctagtgcg

SEQ ID NO: 131963 - DNA, 30 bp, Artificial Sequence
  Synthetic oligonucleotide
agatgtggccgtaaaacacagattagtgcg

SEQ ID NO: 131964 - DNA, 30 bp, Artificial Sequence
  Synthetic oligonucleotide
tttaatgggcctgtgcaagtgtcacgtgcg

SEQ ID NO: 131965 - DNA, 30 bp, Artificial Sequence
  Synthetic oligonucleotide
aggtgccgaggtatacctagtcacggtgcg

SEQ ID NO: 131966 - DNA, 30 bp, Artificial Sequence
  Synthetic oligonucleotide
cggattcgcgtcggtcgtgataggtgtgcg

SEQ ID NO: 131967 - DNA, 30 bp, Artificial Sequence
  Synthetic oligonucleotide
cgccgaagacaaagtaagattggcattgcg

SEQ ID NO: 131968 - DNA, 30 bp, Artificial Sequence
  Synthetic oligonucleotide
atgcggcaattaccgcccgaaatcattgcg

SEQ ID NO: 131969 - DNA, 30 bp, Artificial Sequence
  Synthetic oligonucleotide
tgcaaatggggggaaggggtcccgattgcg

SEQ ID NO: 131970 - DNA, 30 bp, Artificial Sequence
  Synthetic oligonucleotide
aggaggcacgagttgcacttagcgattgcg

SEQ ID NO: 131971 - DNA, 30 bp, Artificial Sequence
  Synthetic oligonucleotide
tgatctggagtatcaggcggacatattgcg

SEQ ID NO: 131972 - DNA, 30 bp, Artificial Sequence
  Synthetic oligonucleotide
gcctgaggatcgtcccacaagattattgcg

SEQ ID NO: 131973 - DNA, 33 bp, Artificial Sequence
  Synthetic oligonucleotide
attagttgtgtaggtttactcctctaccttgcg

SEQ ID NO: 131974 - DNA, 30 bp, Artificial Sequence
  Synthetic oligonucleotide
gggttaagtaagtcaaggaaacccgttgcg

SEQ ID NO: 131975 - DNA, 30 bp, Artificial Sequence
  Synthetic oligonucleotide
taggtaaaaagcgctctataactgtttgcg

SEQ ID NO: 131976 - DNA, 30 bp, Artificial Sequence
  Synthetic oligonucleotide
tatgactcccaatgaaatgtctcaaaatcg

SEQ ID NO: 131977 - DNA, 30 bp, Artificial Sequence
  Synthetic oligonucleotide
ctgcgtcaagctcacgccggtcgaaaatcg

SEQ ID NO: 131978 - DNA, 30 bp, Artificial Sequence
  Synthetic oligonucleotide
tgacgctcaacaggtagtggacacaaatcg

SEQ ID NO: 131979 - DNA, 30 bp, Artificial Sequence
  Synthetic oligonucleotide
agttaggaccgagatcactgtcatcaatcg

SEQ ID NO: 131980 - DNA, 30 bp, Artificial Sequence
  Synthetic oligonucleotide
ggtatctacgaaacatcatgggttcaatcg

SEQ ID NO: 131981 - DNA, 30 bp, Artificial Sequence
  Synthetic oligonucleotide
ccagagacactcgtctcgttagcagaatcg

SEQ ID NO: 131982 - DNA, 30 bp, Artificial Sequence
  Synthetic oligonucleotide
ccggcagggtacgtaggctctagtgaatcg

SEQ ID NO: 131983 - DNA, 30 bp, Artificial Sequence
  Synthetic oligonucleotide
tgccaccattccggtatatcctaataatcg

SEQ ID NO: 131984 - DNA, 30 bp, Artificial Sequence
  Synthetic oligonucleotide
ctcatgggacgagacagttacttataatcg

SEQ ID NO: 131985 - DNA, 30 bp, Artificial Sequence
  Synthetic oligonucleotide
agacgaatgaaaccttgacgattgtaatcg

SEQ ID NO: 131986 - DNA, 30 bp, Artificial Sequence
  Synthetic oligonucleotide
catggtagtctttaagagtgagattaatcg

SEQ ID NO: 131987 - DNA, 30 bp, Artificial Sequence
  Synthetic oligonucleotide
gcaccacgtaccgtcacctagcgttaatcg

SEQ ID NO: 131988 - DNA, 30 bp, Artificial Sequence
  Synthetic oligonucleotide
cgcgcgtgtcctttaaattagaatacatcg

SEQ ID NO: 131989 - DNA, 30 bp, Artificial Sequence
  Synthetic oligonucleotide
ctgcttgtgtggggaatatagtgaccatcg

SEQ ID NO: 131990 - DNA, 30 bp, Artificial Sequence
  Synthetic oligonucleotide
cgggagagcaacaatgtccagcggccatcg

SEQ ID NO: 131991 - DNA, 30 bp, Artificial Sequence
  Synthetic oligonucleotide
tagaacttactgatctcgtaggctccatcg

SEQ ID NO: 131992 - DNA, 30 bp, Artificial Sequence
  Synthetic oligonucleotide
tggagcttatcccggctctagtctccatcg

SEQ ID NO: 131993 - DNA, 30 bp, Artificial Sequence
  Synthetic oligonucleotide
ctcataccgatttcggtaaacggtccatcg

SEQ ID NO: 131994 - DNA, 30 bp, Artificial Sequence
  Synthetic oligonucleotide
gagtaatggccacaagggcgtagagcatcg

SEQ ID NO: 131995 - DNA, 30 bp, Artificial Sequence
  Synthetic oligonucleotide
aaggagaggggaatgggaccccaggcatcg

SEQ ID NO: 131996 - DNA, 30 bp, Artificial Sequence
  Synthetic oligonucleotide
tcatgttaaacatatgcatgcccggcatcg

SEQ ID NO: 131997 - DNA, 30 bp, Artificial Sequence
  Synthetic oligonucleotide
ctcacaaataagcttgatcttggtgcatcg

SEQ ID NO: 131998 - DNA, 31 bp, Artificial Sequence
  Synthetic oligonucleotide
gtgagagctgtgttttcccttgacatcatcg

SEQ ID NO: 131999 - DNA, 30 bp, Artificial Sequence
  Synthetic oligonucleotide
cttgttgttgcgtatcatggcagatcatcg

SEQ ID NO: 132000 - DNA, 30 bp, Artificial Sequence
  Synthetic oligonucleotide
cggcgcgggataaactgaggggcctcatcg

SEQ ID NO: 132001 - DNA, 30 bp, Artificial Sequence
  Synthetic oligonucleotide
ccgccagagggttcgaacggcatctcatcg

SEQ ID NO: 132002 - DNA, 30 bp, Artificial Sequence
  Synthetic oligonucleotide
atcgcgacccgtggtcttaagctgagatcg

SEQ ID NO: 132003 - DNA, 30 bp, Artificial Sequence
  Synthetic oligonucleotide
ttacgggatcacagcagccttgcgcgatcg

SEQ ID NO: 132004 - DNA, 30 bp, Artificial Sequence
  Synthetic oligonucleotide
cgccgaacagcggaatatcattccggatcg

SEQ ID NO: 132005 - DNA, 30 bp, Artificial Sequence
  Synthetic oligonucleotide
gatcaaatacgcgacgtcactatcggatcg

SEQ ID NO: 132006 - DNA, 28 bp, Artificial Sequence
  Synthetic oligonucleotide
acctcaagctggggaacctgggggatcg

SEQ ID NO: 132007 - DNA, 30 bp, Artificial Sequence
  Synthetic oligonucleotide
tgtagatccagaatctaagagcgctgatcg

SEQ ID NO: 132008 - DNA, 30 bp, Artificial Sequence
  Synthetic oligonucleotide
ggggggggcgtctcatataaagtgtgatcg

SEQ ID NO: 132009 - DNA, 30 bp, Artificial Sequence
  Synthetic oligonucleotide
tgaaatagtcgggggtcgcagggttgatcg

SEQ ID NO: 132010 - DNA, 30 bp, Artificial Sequence
  Synthetic oligonucleotide
aacgagacttctctatagaaacaaatatcg

SEQ ID NO: 132011 - DNA, 30 bp, Artificial Sequence
  Synthetic oligonucleotide
attccgtcggatagggcctatggactatcg

SEQ ID NO: 132012 - DNA, 30 bp, Artificial Sequence
  Synthetic oligonucleotide
agacgtatgcccagacattggggcctatcg

SEQ ID NO: 132013 - DNA, 30 bp, Artificial Sequence
  Synthetic oligonucleotide
aactagtttgccctagtgtgacggctatcg

SEQ ID NO: 132014 - DNA, 30 bp, Artificial Sequence
  Synthetic oligonucleotide
atcgtcgagggagtccaatgtaatctatcg

SEQ ID NO: 132015 - DNA, 30 bp, Artificial Sequence
  Synthetic oligonucleotide
tttagacagcgaggtatttggtctctatcg

SEQ ID NO: 132016 - DNA, 30 bp, Artificial Sequence
  Synthetic oligonucleotide
tgaagccacgaattatttcgacccgtatcg

SEQ ID NO: 132017 - DNA, 30 bp, Artificial Sequence
  Synthetic oligonucleotide
acatgccactaaaaattgcagccgttatcg

SEQ ID NO: 132018 - DNA, 30 bp, Artificial Sequence
  Synthetic oligonucleotide
cgcgtagagtaaatgactatctgaaactcg

SEQ ID NO: 132019 - DNA, 30 bp, Artificial Sequence
  Synthetic oligonucleotide
gagtcatatgcatataatgaacagaactcg

SEQ ID NO: 132020 - DNA, 30 bp, Artificial Sequence
  Synthetic oligonucleotide
ttaatcgtatgggttcttcaggcgaactcg

SEQ ID NO: 132021 - DNA, 30 bp, Artificial Sequence
  Synthetic oligonucleotide
aacagaagaaccgaaaagtggggtaactcg

SEQ ID NO: 132022 - DNA, 30 bp, Artificial Sequence
  Synthetic oligonucleotide
cacaactaggcgcagaaggtcggacactcg

SEQ ID NO: 132023 - DNA, 30 bp, Artificial Sequence
  Synthetic oligonucleotide
agggaacgctgcgtcgcgaatggacactcg

SEQ ID NO: 132024 - DNA, 30 bp, Artificial Sequence
  Synthetic oligonucleotide
cgaacgggcctttttaaacacagtcactcg

SEQ ID NO: 132025 - DNA, 30 bp, Artificial Sequence
  Synthetic oligonucleotide
gtatggaattaacccgtgcgaatagactcg

SEQ ID NO: 132026 - DNA, 30 bp, Artificial Sequence
  Synthetic oligonucleotide
actggcgcgtaaagttagctgttagactcg

SEQ ID NO: 132027 - DNA, 30 bp, Artificial Sequence
  Synthetic oligonucleotide
gcaaacataagtggcctaagaggttactcg

SEQ ID NO: 132028 - DNA, 30 bp, Artificial Sequence
  Synthetic oligonucleotide
ctcatgatctaaatgctgtctgccacctcg

SEQ ID NO: 132029 - DNA, 30 bp, Artificial Sequence
  Synthetic oligonucleotide
catcaccatcggtggggtggggagacctcg

SEQ ID NO: 132030 - DNA, 31 bp, Artificial Sequence
  Synthetic oligonucleotide
agtggatttcccgaggtactgatatccctcg

SEQ ID NO: 132031 - DNA, 30 bp, Artificial Sequence
  Synthetic oligonucleotide
tctaggatgacagacccacaatcctcctcg

SEQ ID NO: 132032 - DNA, 30 bp, Artificial Sequence
  Synthetic oligonucleotide
tagtcccaaatcgctttaatcggctcctcg

SEQ ID NO: 132033 - DNA, 30 bp, Artificial Sequence
  Synthetic oligonucleotide
ggactactcgtagagcaagaatgtagctcg

SEQ ID NO: 132034 - DNA, 30 bp, Artificial Sequence
  Synthetic oligonucleotide
aatgaaggttgggaggatcgtacacgctcg

SEQ ID NO: 132035 - DNA, 30 bp, Artificial Sequence
  Synthetic oligonucleotide
ctgcctcccgaaaagggcgtagtgcgctcg

SEQ ID NO: 132036 - DNA, 30 bp, Artificial Sequence
  Synthetic oligonucleotide
tgtaggacatggacgagcactgtgcgctcg

SEQ ID NO: 132037 - DNA, 30 bp, Artificial Sequence
  Synthetic oligonucleotide
ttgaaacgagcaactaagaccggaggctcg

SEQ ID NO: 132038 - DNA, 30 bp, Artificial Sequence
  Synthetic oligonucleotide
cggccgggatgtatacctgggttaggctcg

SEQ ID NO: 132039 - DNA, 30 bp, Artificial Sequence
  Synthetic oligonucleotide
ccttggcagcttcgaaggttaagcggctcg

SEQ ID NO: 132040 - DNA, 30 bp, Artificial Sequence
  Synthetic oligonucleotide
agataagaatcacgaagagcgaggggctcg

SEQ ID NO: 132041 - DNA, 30 bp, Artificial Sequence
  Synthetic oligonucleotide
ttacaacgcaataaccaatactaatgctcg

SEQ ID NO: 132042 - DNA, 30 bp, Artificial Sequence
  Synthetic oligonucleotide
tgccaagacagtttggcctgtgcatgctcg

SEQ ID NO: 132043 - DNA, 30 bp, Artificial Sequence
  Synthetic oligonucleotide
ccacgacagcaaccttgtgataagtgctcg

SEQ ID NO: 132044 - DNA, 30 bp, Artificial Sequence
  Synthetic oligonucleotide
cgttccatcatgtccaaattaatgtgctcg

SEQ ID NO: 132045 - DNA, 30 bp, Artificial Sequence
  Synthetic oligonucleotide
tcgatggcccgttgggagtattaaatctcg

SEQ ID NO: 132046 - DNA, 30 bp, Artificial Sequence
  Synthetic oligonucleotide
catgagaggaagtctacaactccagtctcg

SEQ ID NO: 132047 - DNA, 30 bp, Artificial Sequence
  Synthetic oligonucleotide
accaaactcacgtgtgacttgagagtctcg

SEQ ID NO: 132048 - DNA, 30 bp, Artificial Sequence
  Synthetic oligonucleotide
taaaccggaccgaattctagagtagtctcg

SEQ ID NO: 132049 - DNA, 30 bp, Artificial Sequence
  Synthetic oligonucleotide
gtcataaggtttcacttataccgtttctcg

SEQ ID NO: 132050 - DNA, 30 bp, Artificial Sequence
  Synthetic oligonucleotide
agcggaggacctcgctaggtacgaaagtcg

SEQ ID NO: 132051 - DNA, 30 bp, Artificial Sequence
  Synthetic oligonucleotide
gtcaaccctacacgacgagggctgcagtcg

SEQ ID NO: 132052 - DNA, 30 bp, Artificial Sequence
  Synthetic oligonucleotide
tgcaagcgttccaacctcactcaggagtcg

SEQ ID NO: 132053 - DNA, 30 bp, Artificial Sequence
  Synthetic oligonucleotide
cgagcatactagtacataatatatgagtcg

SEQ ID NO: 132054 - DNA, 30 bp, Artificial Sequence
  Synthetic oligonucleotide
cacacatgttgaaacataatcgctgagtcg

SEQ ID NO: 132055 - DNA, 30 bp, Artificial Sequence
  Synthetic oligonucleotide
aaaccgctgtataggatatctggttagtcg

SEQ ID NO: 132056 - DNA, 30 bp, Artificial Sequence
  Synthetic oligonucleotide
ccagtggaggactaaccagagatttagtcg

SEQ ID NO: 132057 - DNA, 30 bp, Artificial Sequence
  Synthetic oligonucleotide
tgtttcgtgggaccatgtatgccgacgtcg

SEQ ID NO: 132058 - DNA, 30 bp, Artificial Sequence
  Synthetic oligonucleotide
ggtggcaagagacacagggtccggacgtcg

SEQ ID NO: 132059 - DNA, 30 bp, Artificial Sequence
  Synthetic oligonucleotide
atcaggaacgtgagctcaggtattacgtcg

SEQ ID NO: 132060 - DNA, 30 bp, Artificial Sequence
  Synthetic oligonucleotide
acgtctgtttgtctgatgctctttgcgtcg

SEQ ID NO: 132061 - DNA, 30 bp, Artificial Sequence
  Synthetic oligonucleotide
atgtaaatgtagacccaatgatcatcgtcg

SEQ ID NO: 132062 - DNA, 30 bp, Artificial Sequence
  Synthetic oligonucleotide
ggattgcagtcatggtggtctgggtcgtcg

SEQ ID NO: 132063 - DNA, 30 bp, Artificial Sequence
  Synthetic oligonucleotide
atcagggtgatgtgagatttatgttcgtcg

SEQ ID NO: 132064 - DNA, 30 bp, Artificial Sequence
  Synthetic oligonucleotide
cgtttcgtccaaagtcatcgcgtttcgtcg

SEQ ID NO: 132065 - DNA, 30 bp, Artificial Sequence
  Synthetic oligonucleotide
tctaattggaaaccaataggagcaaggtcg

SEQ ID NO: 132066 - DNA, 30 bp, Artificial Sequence
  Synthetic oligonucleotide
acgtatatccgtcattaggcggataggtcg

SEQ ID NO: 132067 - DNA, 30 bp, Artificial Sequence
  Synthetic oligonucleotide
ggaatcagagttaaaaaagtgctgcggtcg

SEQ ID NO: 132068 - DNA, 30 bp, Artificial Sequence
  Synthetic oligonucleotide
ccgggtcattaggtgttatgaagagggtcg

SEQ ID NO: 132069 - DNA, 30 bp, Artificial Sequence
  Synthetic oligonucleotide
tcgataccgatgcagaaagatgaggggtcg

SEQ ID NO: 132070 - DNA, 30 bp, Artificial Sequence
  Synthetic oligonucleotide
ggtgggaatcgtgaactgagtggtgggtcg

SEQ ID NO: 132071 - DNA, 30 bp, Artificial Sequence
  Synthetic oligonucleotide
ggattaaagggactagtgggagcctggtcg

SEQ ID NO: 132072 - DNA, 30 bp, Artificial Sequence
  Synthetic oligonucleotide
ccggctagtgtctgaatgggcttgtggtcg

SEQ ID NO: 132073 - DNA, 30 bp, Artificial Sequence
  Synthetic oligonucleotide
ctaaggataaagattggccttatgatgtcg

SEQ ID NO: 132074 - DNA, 30 bp, Artificial Sequence
  Synthetic oligonucleotide
tatgcccttcgcgaatgcctcattctgtcg

SEQ ID NO: 132075 - DNA, 30 bp, Artificial Sequence
  Synthetic oligonucleotide
taatatctaacttgaactcaaatcgtgtcg

SEQ ID NO: 132076 - DNA, 30 bp, Artificial Sequence
  Synthetic oligonucleotide
gaaatggtagtttttaaccttcaggtgtcg

SEQ ID NO: 132077 - DNA, 30 bp, Artificial Sequence
  Synthetic oligonucleotide
cttggggcgtgttggacctccaatgtgtcg

SEQ ID NO: 132078 - DNA, 30 bp, Artificial Sequence
  Synthetic oligonucleotide
gtgtgagcctaatccagattcgatgtgtcg

SEQ ID NO: 132079 - DNA, 30 bp, Artificial Sequence
  Synthetic oligonucleotide
agacatccctcgtcattcaccacattgtcg

SEQ ID NO: 132080 - DNA, 30 bp, Artificial Sequence
  Synthetic oligonucleotide
gacactaacatgccgcggattccgcattcg

SEQ ID NO: 132081 - DNA, 30 bp, Artificial Sequence
  Synthetic oligonucleotide
atggagtaagctggcctaacacgtcattcg

SEQ ID NO: 132082 - DNA, 30 bp, Artificial Sequence
  Synthetic oligonucleotide
ctgcaactcgtctgggtagttagcgattcg

SEQ ID NO: 132083 - DNA, 30 bp, Artificial Sequence
  Synthetic oligonucleotide
cgttagtaatatgtaaatagtgcaacttcg

SEQ ID NO: 132084 - DNA, 30 bp, Artificial Sequence
  Synthetic oligonucleotide
tcggggttggttcgcatgaaggtaacttcg

SEQ ID NO: 132085 - DNA, 30 bp, Artificial Sequence
  Synthetic oligonucleotide
aaagcatggttgcattagtacaccacttcg

SEQ ID NO: 132086 - DNA, 30 bp, Artificial Sequence
  Synthetic oligonucleotide
aataagataaatggccatcttccaccttcg

SEQ ID NO: 132087 - DNA, 30 bp, Artificial Sequence
  Synthetic oligonucleotide
tgggacgtctgcgcttgaggttcgccttcg

SEQ ID NO: 132088 - DNA, 30 bp, Artificial Sequence
  Synthetic oligonucleotide
cggcgacccggggacatgcttgggccttcg

SEQ ID NO: 132089 - DNA, 30 bp, Artificial Sequence
  Synthetic oligonucleotide
aggccagggatgccgtccagatctccttcg

SEQ ID NO: 132090 - DNA, 30 bp, Artificial Sequence
  Synthetic oligonucleotide
cacaatggcattgaatggctctgggcttcg

SEQ ID NO: 132091 - DNA, 30 bp, Artificial Sequence
  Synthetic oligonucleotide
cttcagaactaaggactacagtttgcttcg

SEQ ID NO: 132092 - DNA, 30 bp, Artificial Sequence
  Synthetic oligonucleotide
tctagatgggtgaaggcccgcacatcttcg

SEQ ID NO: 132093 - DNA, 30 bp, Artificial Sequence
  Synthetic oligonucleotide
tttctgaggcctgtttcgtgaccatcttcg

SEQ ID NO: 132094 - DNA, 30 bp, Artificial Sequence
  Synthetic oligonucleotide
caagctaacggctaaaccagtgagtcttcg

SEQ ID NO: 132095 - DNA, 30 bp, Artificial Sequence
  Synthetic oligonucleotide
actcccccagcgagcccgtgtgagtcttcg

SEQ ID NO: 132096 - DNA, 30 bp, Artificial Sequence
  Synthetic oligonucleotide
gccaaggagtagcagaaatgttggtcttcg

SEQ ID NO: 132097 - DNA, 30 bp, Artificial Sequence
  Synthetic oligonucleotide
gctgcgttctcattgtacctgtacagttcg

SEQ ID NO: 132098 - DNA, 30 bp, Artificial Sequence
  Synthetic oligonucleotide
tacctgccacgttattcaaataggagttcg

SEQ ID NO: 132099 - DNA, 30 bp, Artificial Sequence
  Synthetic oligonucleotide
caggtaccgagtagtttgcttggtagttcg

SEQ ID NO: 132100 - DNA, 30 bp, Artificial Sequence
  Synthetic oligonucleotide
ggtttcagagcgatcaggaaaatccgttcg

SEQ ID NO: 132101 - DNA, 30 bp, Artificial Sequence
  Synthetic oligonucleotide
gtcgggtccaatggaagcgacactcgttcg

SEQ ID NO: 132102 - DNA, 30 bp, Artificial Sequence
  Synthetic oligonucleotide
cgaataatctcaacgcggggaagtggttcg

SEQ ID NO: 132103 - DNA, 30 bp, Artificial Sequence
  Synthetic oligonucleotide
aggttgggaatgtattcaagcggtggttcg

SEQ ID NO: 132104 - DNA, 30 bp, Artificial Sequence
  Synthetic oligonucleotide
cgtctcttaatcgagggtttggtctgttcg

SEQ ID NO: 132105 - DNA, 30 bp, Artificial Sequence
  Synthetic oligonucleotide
tccgagtggacgacgaacctagtgtgttcg

SEQ ID NO: 132106 - DNA, 30 bp, Artificial Sequence
  Synthetic oligonucleotide
cgttaacaatgcttcgtgcccggcatttcg

SEQ ID NO: 132107 - DNA, 30 bp, Artificial Sequence
  Synthetic oligonucleotide
tggagaagcgagaacagtcgttagatttcg

SEQ ID NO: 132108 - DNA, 30 bp, Artificial Sequence
  Synthetic oligonucleotide
cttgcaatatgcattaacataaaactttcg

SEQ ID NO: 132109 - DNA, 31 bp, Artificial Sequence
  Synthetic oligonucleotide
ctatagcggatgtagccaatacatactttcg

SEQ ID NO: 132110 - DNA, 30 bp, Artificial Sequence
  Synthetic oligonucleotide
tagaactagcgattaagtacctgagtttcg

SEQ ID NO: 132111 - DNA, 30 bp, Artificial Sequence
  Synthetic oligonucleotide
tatgccccttcatcgtgtgcaaacgtttcg

SEQ ID NO: 132112 - DNA, 30 bp, Artificial Sequence
  Synthetic oligonucleotide
gggtgcaatatttaggataaagttgtttcg

SEQ ID NO: 132113 - DNA, 30 bp, Artificial Sequence
  Synthetic oligonucleotide
taggactcgggagcttaccgccaattttcg

SEQ ID NO: 132114 - DNA, 30 bp, Artificial Sequence
  Synthetic oligonucleotide
atgtgggcgaggagggacccataattttcg

SEQ ID NO: 132115 - DNA, 30 bp, Artificial Sequence
  Synthetic oligonucleotide
caacagggcgggctccttgagtagttttcg

SEQ ID NO: 132116 - DNA, 30 bp, Artificial Sequence
  Synthetic oligonucleotide
gcggcggtttggcaaaatggactgttttcg

SEQ ID NO: 132117 - DNA, 30 bp, Artificial Sequence
  Synthetic oligonucleotide
tagaggagtcacataggtagtgctttttcg

SEQ ID NO: 132118 - DNA, 30 bp, Artificial Sequence
  Synthetic oligonucleotide
gcaagacgcgcgtcacgaaacgacaaaagg

SEQ ID NO: 132119 - DNA, 30 bp, Artificial Sequence
  Synthetic oligonucleotide
ggggccgcgtcccattataaaccgaaaagg

SEQ ID NO: 132120 - DNA, 30 bp, Artificial Sequence
  Synthetic oligonucleotide
ccaacccatatctggactgacttccaaagg

SEQ ID NO: 132121 - DNA, 30 bp, Artificial Sequence
  Synthetic oligonucleotide
ataatactcaggtgattgcgcttgcaaagg

SEQ ID NO: 132122 - DNA, 30 bp, Artificial Sequence
  Synthetic oligonucleotide
tgatgcacgaaccacacgaccatagaaagg

SEQ ID NO: 132123 - DNA, 30 bp, Artificial Sequence
  Synthetic oligonucleotide
aaaccaactgactactgacccaccgaaagg

SEQ ID NO: 132124 - DNA, 30 bp, Artificial Sequence
  Synthetic oligonucleotide
attgagcagagcgaattctcaagtgaaagg

SEQ ID NO: 132125 - DNA, 30 bp, Artificial Sequence
  Synthetic oligonucleotide
agatccaagtaaggactctggtcctaaagg

SEQ ID NO: 132126 - DNA, 30 bp, Artificial Sequence
  Synthetic oligonucleotide
tcagaatggtgatattatgagcgctaaagg

SEQ ID NO: 132127 - DNA, 30 bp, Artificial Sequence
  Synthetic oligonucleotide
ctaacagagaggtcaacgaagatctaaagg

SEQ ID NO: 132128 - DNA, 30 bp, Artificial Sequence
  Synthetic oligonucleotide
tctttcacttggagaatgggggcgtaaagg

SEQ ID NO: 132129 - DNA, 30 bp, Artificial Sequence
  Synthetic oligonucleotide
cattcttctgcaaaatctgggtgaacaagg

SEQ ID NO: 132130 - DNA, 30 bp, Artificial Sequence
  Synthetic oligonucleotide
gaagaagaatggcctggtcaattgacaagg

SEQ ID NO: 132131 - DNA, 30 bp, Artificial Sequence
  Synthetic oligonucleotide
gtaaggctggtggtccaatctgttacaagg

SEQ ID NO: 132132 - DNA, 30 bp, Artificial Sequence
  Synthetic oligonucleotide
tcagccaccattcatcgagcgtacccaagg

SEQ ID NO: 132133 - DNA, 30 bp, Artificial Sequence
  Synthetic oligonucleotide
tgctgctctaacaaacttatcaccccaagg

SEQ ID NO: 132134 - DNA, 30 bp, Artificial Sequence
  Synthetic oligonucleotide
gaattgccgaatactcgcacttagccaagg

SEQ ID NO: 132135 - DNA, 30 bp, Artificial Sequence
  Synthetic oligonucleotide
gagcgatatgttcaccagcgggcgccaagg

SEQ ID NO: 132136 - DNA, 30 bp, Artificial Sequence
  Synthetic oligonucleotide
gtatactggggaaacggaaattcgccaagg

SEQ ID NO: 132137 - DNA, 30 bp, Artificial Sequence
  Synthetic oligonucleotide
ataccactaacgcttctgaaaaggccaagg

SEQ ID NO: 132138 - DNA, 30 bp, Artificial Sequence
  Synthetic oligonucleotide
aaaatgtaatgatgaccagactggccaagg

SEQ ID NO: 132139 - DNA, 30 bp, Artificial Sequence
  Synthetic oligonucleotide
gggcagaatacagcgtaatagaatccaagg

SEQ ID NO: 132140 - DNA, 30 bp, Artificial Sequence
  Synthetic oligonucleotide
ctcgcggaaggactggacggcttagcaagg

SEQ ID NO: 132141 - DNA, 30 bp, Artificial Sequence
  Synthetic oligonucleotide
gcaacacggtcgacggaattgtaggcaagg

SEQ ID NO: 132142 - DNA, 30 bp, Artificial Sequence
  Synthetic oligonucleotide
ggtcaaactattgagtcagaaagggcaagg

SEQ ID NO: 132143 - DNA, 30 bp, Artificial Sequence
  Synthetic oligonucleotide
taccctaaaccgtttattcgggatgcaagg

SEQ ID NO: 132144 - DNA, 30 bp, Artificial Sequence
  Synthetic oligonucleotide
cgcggcgcgataatcggacatgactcaagg

SEQ ID NO: 132145 - DNA, 30 bp, Artificial Sequence
  Synthetic oligonucleotide
ggaagcctcaacaataaggaagcctcaagg

SEQ ID NO: 132146 - DNA, 30 bp, Artificial Sequence
  Synthetic oligonucleotide
cgcaatgcagctacgggggtttagtcaagg

SEQ ID NO: 132147 - DNA, 30 bp, Artificial Sequence
  Synthetic oligonucleotide
tggtaaacaggcatacgtaataattcaagg

SEQ ID NO: 132148 - DNA, 30 bp, Artificial Sequence
  Synthetic oligonucleotide
agatggccaacagaaatcgttcggagaagg

SEQ ID NO: 132149 - DNA, 30 bp, Artificial Sequence
  Synthetic oligonucleotide
gccttggggtggatgatctatactagaagg

SEQ ID NO: 132150 - DNA, 30 bp, Artificial Sequence
  Synthetic oligonucleotide
acctagtcgtaagcttgaacaataggaagg

SEQ ID NO: 132151 - DNA, 30 bp, Artificial Sequence
  Synthetic oligonucleotide
ctggctggcagcgagaaccatgtaggaagg

SEQ ID NO: 132152 - DNA, 30 bp, Artificial Sequence
  Synthetic oligonucleotide
acaacgcgtaaacattgacccttaggaagg

SEQ ID NO: 132153 - DNA, 30 bp, Artificial Sequence
  Synthetic oligonucleotide
ttgcatctgtgaccaggctggatgggaagg

SEQ ID NO: 132154 - DNA, 30 bp, Artificial Sequence
  Synthetic oligonucleotide
taaggcggtctcgcgttcttaaatggaagg

SEQ ID NO: 132155 - DNA, 30 bp, Artificial Sequence
  Synthetic oligonucleotide
cgtagtacgtttagtcagatgcatggaagg

SEQ ID NO: 132156 - DNA, 30 bp, Artificial Sequence
  Synthetic oligonucleotide
tggccgcatttatcgtaatgcgactgaagg

SEQ ID NO: 132157 - DNA, 30 bp, Artificial Sequence
  Synthetic oligonucleotide
ctattggaatagtgaacagccggaataagg

SEQ ID NO: 132158 - DNA, 30 bp, Artificial Sequence
  Synthetic oligonucleotide
gcagggaaggatctgctgcctcgcataagg

SEQ ID NO: 132159 - DNA, 30 bp, Artificial Sequence
  Synthetic oligonucleotide
cgatccagagcctaaatcagaccactaagg

SEQ ID NO: 132160 - DNA, 30 bp, Artificial Sequence
  Synthetic oligonucleotide
agcacatccggtcctaactagcccctaagg

SEQ ID NO: 132161 - DNA, 30 bp, Artificial Sequence
  Synthetic oligonucleotide
atggaagcggagccagtggaaaagctaagg

SEQ ID NO: 132162 - DNA, 30 bp, Artificial Sequence
  Synthetic oligonucleotide
tagttagctctggtaattccattgctaagg

SEQ ID NO: 132163 - DNA, 30 bp, Artificial Sequence
  Synthetic oligonucleotide
ctcactcacctgtttaattacgctctaagg

SEQ ID NO: 132164 - DNA, 30 bp, Artificial Sequence
  Synthetic oligonucleotide
gaaggacattcatgttctgtcggtctaagg

SEQ ID NO: 132165 - DNA, 30 bp, Artificial Sequence
  Synthetic oligonucleotide
gcgggacccctgcatagtcccgccgtaagg

SEQ ID NO: 132166 - DNA, 30 bp, Artificial Sequence
  Synthetic oligonucleotide
agttaacacgggtctaaaaaccaggtaagg

SEQ ID NO: 132167 - DNA, 30 bp, Artificial Sequence
  Synthetic oligonucleotide
ctactgtgacgcttaatcagatcggtaagg

SEQ ID NO: 132168 - DNA, 30 bp, Artificial Sequence
  Synthetic oligonucleotide
catggacgcgtagatcaattccctgtaagg

SEQ ID NO: 132169 - DNA, 30 bp, Artificial Sequence
  Synthetic oligonucleotide
aaaaaaacggcaactggtatcagattaagg

SEQ ID NO: 132170 - DNA, 30 bp, Artificial Sequence
  Synthetic oligonucleotide
gagatatccccgaatcggagaggattaagg

SEQ ID NO: 132171 - DNA, 30 bp, Artificial Sequence
  Synthetic oligonucleotide
agaagactaggttagtagacatgattaagg

SEQ ID NO: 132172 - DNA, 30 bp, Artificial Sequence
  Synthetic oligonucleotide
aaggggccatcctgcgctccctgattaagg

SEQ ID NO: 132173 - DNA, 30 bp, Artificial Sequence
  Synthetic oligonucleotide
cttcgtaatcaagttcggtgatggaacagg

SEQ ID NO: 132174 - DNA, 30 bp, Artificial Sequence
  Synthetic oligonucleotide
aggtactgtgccgcatacatatggaacagg

SEQ ID NO: 132175 - DNA, 30 bp, Artificial Sequence
  Synthetic oligonucleotide
acccttatccacagggtatgcgataacagg

SEQ ID NO: 132176 - DNA, 30 bp, Artificial Sequence
  Synthetic oligonucleotide
agtgatggtcggtgtgcagcgcgtaacagg

SEQ ID NO: 132177 - DNA, 30 bp, Artificial Sequence
  Synthetic oligonucleotide
aagcgatctttaactctccttgaccacagg

SEQ ID NO: 132178 - DNA, 30 bp, Artificial Sequence
  Synthetic oligonucleotide
ttagggttcgtacttcccggccgccacagg

SEQ ID NO: 132179 - DNA, 30 bp, Artificial Sequence
  Synthetic oligonucleotide
gggcctatcgttgtctgtccctagcacagg

SEQ ID NO: 132180 - DNA, 30 bp, Artificial Sequence
  Synthetic oligonucleotide
tggatcctgatgtgtagcctttgtcacagg

SEQ ID NO: 132181 - DNA, 30 bp, Artificial Sequence
  Synthetic oligonucleotide
ctccagacatcaggtgattggattcacagg

SEQ ID NO: 132182 - DNA, 30 bp, Artificial Sequence
  Synthetic oligonucleotide
ggcggaccgtgctttaacgtgattcacagg

SEQ ID NO: 132183 - DNA, 30 bp, Artificial Sequence
  Synthetic oligonucleotide
ctgacagacacgagcagtggcgttcacagg

SEQ ID NO: 132184 - DNA, 30 bp, Artificial Sequence
  Synthetic oligonucleotide
attcagggtgtactaagaaatttatacagg

SEQ ID NO: 132185 - DNA, 30 bp, Artificial Sequence
  Synthetic oligonucleotide
gttggacttcaatacgggcagaacaccagg

SEQ ID NO: 132186 - DNA, 30 bp, Artificial Sequence
  Synthetic oligonucleotide
atgaacggtccgttcgactcacaacccagg

SEQ ID NO: 132187 - DNA, 30 bp, Artificial Sequence
  Synthetic oligonucleotide
acttatcaggaaaaacgagctacccccagg

SEQ ID NO: 132188 - DNA, 30 bp, Artificial Sequence
  Synthetic oligonucleotide
cgtgacattgacacggccgcgagccccagg

SEQ ID NO: 132189 - DNA, 30 bp, Artificial Sequence
  Synthetic oligonucleotide
cgaccacaaacggagctgcgcccgcccagg

SEQ ID NO: 132190 - DNA, 30 bp, Artificial Sequence
  Synthetic oligonucleotide
taccaacggttgcggatacatcggcccagg

SEQ ID NO: 132191 - DNA, 30 bp, Artificial Sequence
  Synthetic oligonucleotide
taatccagatgtatcgtggcacatcccagg

SEQ ID NO: 132192 - DNA, 30 bp, Artificial Sequence
  Synthetic oligonucleotide
accttaaagaagttatagcgccttcccagg

SEQ ID NO: 132193 - DNA, 30 bp, Artificial Sequence
  Synthetic oligonucleotide
gtcctacgagcatattaattgcacgccagg

SEQ ID NO: 132194 - DNA, 30 bp, Artificial Sequence
  Synthetic oligonucleotide
cgtaccggtcctaacccttcattcgccagg

SEQ ID NO: 132195 - DNA, 30 bp, Artificial Sequence
  Synthetic oligonucleotide
cgttacatttagtcgcctagaaaggccagg

SEQ ID NO: 132196 - DNA, 30 bp, Artificial Sequence
  Synthetic oligonucleotide
ggcataatattgtctgctaggtcggccagg

SEQ ID NO: 132197 - DNA, 30 bp, Artificial Sequence
  Synthetic oligonucleotide
actctatcctcctcggactcttcatccagg

SEQ ID NO: 132198 - DNA, 30 bp, Artificial Sequence
  Synthetic oligonucleotide
gtatcgcaaaagaggctgaagcgctccagg

SEQ ID NO: 132199 - DNA, 30 bp, Artificial Sequence
  Synthetic oligonucleotide
agattacatggtatgcgaaatgggtccagg

SEQ ID NO: 132200 - DNA, 30 bp, Artificial Sequence
  Synthetic oligonucleotide
cttgtatgtcagtatgaaagggcttccagg

SEQ ID NO: 132201 - DNA, 30 bp, Artificial Sequence
  Synthetic oligonucleotide
atagttatggacctcaaaccggtttccagg

SEQ ID NO: 132202 - DNA, 30 bp, Artificial Sequence
  Synthetic oligonucleotide
atttccgggggagagaagaaccccagcagg

SEQ ID NO: 132203 - DNA, 30 bp, Artificial Sequence
  Synthetic oligonucleotide
tccgactgcgtagccactcaaatcggcagg

SEQ ID NO: 132204 - DNA, 30 bp, Artificial Sequence
  Synthetic oligonucleotide
gaacagcaatagttatatggggaatgcagg

SEQ ID NO: 132205 - DNA, 30 bp, Artificial Sequence
  Synthetic oligonucleotide
ccgtgtagatccactttacagtcctgcagg

SEQ ID NO: 132206 - DNA, 30 bp, Artificial Sequence
  Synthetic oligonucleotide
tcccatgttaagtcgtgaacggtgtgcagg

SEQ ID NO: 132207 - DNA, 30 bp, Artificial Sequence
  Synthetic oligonucleotide
tgttacaaagaggttggatgaccgatcagg

SEQ ID NO: 132208 - DNA, 30 bp, Artificial Sequence
  Synthetic oligonucleotide
cgagcggcctattatgccgcgtcgatcagg

SEQ ID NO: 132209 - DNA, 30 bp, Artificial Sequence
  Synthetic oligonucleotide
agtaaggattaagaagcgcagtgactcagg

SEQ ID NO: 132210 - DNA, 30 bp, Artificial Sequence
  Synthetic oligonucleotide
gtgggggcggtagacgcgattcagctcagg

SEQ ID NO: 132211 - DNA, 30 bp, Artificial Sequence
  Synthetic oligonucleotide
agacatgcaaataaacattgagtagtcagg

SEQ ID NO: 132212 - DNA, 30 bp, Artificial Sequence
  Synthetic oligonucleotide
gggcgtttttctacacgtcaaagggtcagg

SEQ ID NO: 132213 - DNA, 30 bp, Artificial Sequence
  Synthetic oligonucleotide
acgttagaacttgaagataaaggattcagg

SEQ ID NO: 132214 - DNA, 30 bp, Artificial Sequence
  Synthetic oligonucleotide
tagatataaagggacatatgtgacttcagg

SEQ ID NO: 132215 - DNA, 30 bp, Artificial Sequence
  Synthetic oligonucleotide
acatacttgtatctaatattgcgcttcagg

SEQ ID NO: 132216 - DNA, 30 bp, Artificial Sequence
  Synthetic oligonucleotide
agatctcgagcactacccagcggcttcagg

SEQ ID NO: 132217 - DNA, 30 bp, Artificial Sequence
  Synthetic oligonucleotide
gggaggagttaactctaacactcgttcagg

SEQ ID NO: 132218 - DNA, 30 bp, Artificial Sequence
  Synthetic oligonucleotide
catgacacactgacttctggaatgttcagg

SEQ ID NO: 132219 - DNA, 30 bp, Artificial Sequence
  Synthetic oligonucleotide
ggatgcacttggcagctatatatgttcagg

SEQ ID NO: 132220 - DNA, 30 bp, Artificial Sequence
  Synthetic oligonucleotide
tgtatgcgtctgaagcaacaaattttcagg

SEQ ID NO: 132221 - DNA, 30 bp, Artificial Sequence
  Synthetic oligonucleotide
gctgttcagcaccagaggcatttcaagagg

SEQ ID NO: 132222 - DNA, 31 bp, Artificial Sequence
  Synthetic oligonucleotide
gaccttgtctttgatgaccatacataagagg

SEQ ID NO: 132223 - DNA, 30 bp, Artificial Sequence
  Synthetic oligonucleotide
tcaaagaaaccgtccaaagaatctaagagg

SEQ ID NO: 132224 - DNA, 30 bp, Artificial Sequence
  Synthetic oligonucleotide
agcagtggggcaccaatttatcttaagagg

SEQ ID NO: 132225 - DNA, 30 bp, Artificial Sequence
  Synthetic oligonucleotide
acagcacagattgggcgtgctagacagagg

SEQ ID NO: 132226 - DNA, 30 bp, Artificial Sequence
  Synthetic oligonucleotide
gtaggcagagagagatatgctctacagagg

SEQ ID NO: 132227 - DNA, 30 bp, Artificial Sequence
  Synthetic oligonucleotide
tcaattgaagtggggtccgttcgccagagg

SEQ ID NO: 132228 - DNA, 30 bp, Artificial Sequence
  Synthetic oligonucleotide
actgtctgttaactgttgtgggagcagagg

SEQ ID NO: 132229 - DNA, 30 bp, Artificial Sequence
  Synthetic oligonucleotide
taatatagtcctcggcaagctatgcagagg

SEQ ID NO: 132230 - DNA, 30 bp, Artificial Sequence
  Synthetic oligonucleotide
ccgcctgacgatgcgacttaccaagagagg

SEQ ID NO: 132231 - DNA, 30 bp, Artificial Sequence
  Synthetic oligonucleotide
cctgggttacacggatgcttgtacgagagg

SEQ ID NO: 132232 - DNA, 30 bp, Artificial Sequence
  Synthetic oligonucleotide
gtgataagcgttctgagaaatggggagagg

SEQ ID NO: 132233 - DNA, 30 bp, Artificial Sequence
  Synthetic oligonucleotide
tcgagaagccaggccccacattgtgagagg

SEQ ID NO: 132234 - DNA, 30 bp, Artificial Sequence
  Synthetic oligonucleotide
ctcgggtacaggaacttgagctttgagagg

SEQ ID NO: 132235 - DNA, 30 bp, Artificial Sequence
  Synthetic oligonucleotide
tgacatataggggttctgagaagatagagg

SEQ ID NO: 132236 - DNA, 30 bp, Artificial Sequence
  Synthetic oligonucleotide
aggttcgcaaccacaaggtacacctagagg

SEQ ID NO: 132237 - DNA, 30 bp, Artificial Sequence
  Synthetic oligonucleotide
ttgactgctatcaactatatcagttagagg

SEQ ID NO: 132238 - DNA, 30 bp, Artificial Sequence
  Synthetic oligonucleotide
ccaagactgggatatataagtatttagagg

SEQ ID NO: 132239 - DNA, 30 bp, Artificial Sequence
  Synthetic oligonucleotide
gcgtgctgctctctaaaatacaaaacgagg

SEQ ID NO: 132240 - DNA, 30 bp, Artificial Sequence
  Synthetic oligonucleotide
gctaaacaaatcctatgtagccacacgagg

SEQ ID NO: 132241 - DNA, 30 bp, Artificial Sequence
  Synthetic oligonucleotide
gcagacgagtctagagccttatgtccgagg

SEQ ID NO: 132242 - DNA, 30 bp, Artificial Sequence
  Synthetic oligonucleotide
gcaacctgttccgtagggtctgccgcgagg

SEQ ID NO: 132243 - DNA, 30 bp, Artificial Sequence
  Synthetic oligonucleotide
ttaattcggaagctttctagcatggcgagg

SEQ ID NO: 132244 - DNA, 31 bp, Artificial Sequence
  Synthetic oligonucleotide
gctaagtcttgtctacaagaccttggcgagg

SEQ ID NO: 132245 - DNA, 30 bp, Artificial Sequence
  Synthetic oligonucleotide
catgatgacgattcgtcaaggacatcgagg

SEQ ID NO: 132246 - DNA, 30 bp, Artificial Sequence
  Synthetic oligonucleotide
gctctcaagcctgcgaacaacatctcgagg

SEQ ID NO: 132247 - DNA, 30 bp, Artificial Sequence
  Synthetic oligonucleotide
gttgtaccgtaaccgattcgcaaaaggagg

SEQ ID NO: 132248 - DNA, 30 bp, Artificial Sequence
  Synthetic oligonucleotide
tcatcggggggccgcccggcgccaaggagg

SEQ ID NO: 132249 - DNA, 30 bp, Artificial Sequence
  Synthetic oligonucleotide
aagcatggttacggcagacgtcgaaggagg

SEQ ID NO: 132250 - DNA, 30 bp, Artificial Sequence
  Synthetic oligonucleotide
gtacgtgtgatgttctccacaataaggagg

SEQ ID NO: 132251 - DNA, 30 bp, Artificial Sequence
  Synthetic oligonucleotide
acaacccaaaagccgccacattagaggagg

SEQ ID NO: 132252 - DNA, 30 bp, Artificial Sequence
  Synthetic oligonucleotide
gtccgccgtatttgttagggtaggaggagg

SEQ ID NO: 132253 - DNA, 30 bp, Artificial Sequence
  Synthetic oligonucleotide
aaatgaactcaatcatttgaaatgaggagg

SEQ ID NO: 132254 - DNA, 30 bp, Artificial Sequence
  Synthetic oligonucleotide
gccgccaattttacaaacgtggaacggagg

SEQ ID NO: 132255 - DNA, 30 bp, Artificial Sequence
  Synthetic oligonucleotide
actctggacagcaactacggaacacggagg

SEQ ID NO: 132256 - DNA, 30 bp, Artificial Sequence
  Synthetic oligonucleotide
ggttagccggtttaagtggtaaaagggagg

SEQ ID NO: 132257 - DNA, 30 bp, Artificial Sequence
  Synthetic oligonucleotide
agaatggaacgagccaggacttaagggagg

SEQ ID NO: 132258 - DNA, 30 bp, Artificial Sequence
  Synthetic oligonucleotide
ttgacagggataaggatacatacggggagg

SEQ ID NO: 132259 - DNA, 30 bp, Artificial Sequence
  Synthetic oligonucleotide
gttcaaggttggaaatccttacgggggagg

SEQ ID NO: 132260 - DNA, 30 bp, Artificial Sequence
  Synthetic oligonucleotide
aaccaaaccacagcgcgagcccgggggagg

SEQ ID NO: 132261 - DNA, 30 bp, Artificial Sequence
  Synthetic oligonucleotide
aaagcatgtgattgcacatcaggggggagg

SEQ ID NO: 132262 - DNA, 30 bp, Artificial Sequence
  Synthetic oligonucleotide
gcatcaattgggttagggacctaatggagg

SEQ ID NO: 132263 - DNA, 30 bp, Artificial Sequence
  Synthetic oligonucleotide
cacgcgaccggaatatttgcacactggagg

SEQ ID NO: 132264 - DNA, 30 bp, Artificial Sequence
  Synthetic oligonucleotide
gaagcccgaaggaaatagaccgacatgagg

SEQ ID NO: 132265 - DNA, 30 bp, Artificial Sequence
  Synthetic oligonucleotide
atgatcgtgccacgggcagataccatgagg

SEQ ID NO: 132266 - DNA, 30 bp, Artificial Sequence
  Synthetic oligonucleotide
gtcctatataggatattaaggtgcatgagg

SEQ ID NO: 132267 - DNA, 30 bp, Artificial Sequence
  Synthetic oligonucleotide
ggtatgattaagggccaagtgtttatgagg

SEQ ID NO: 132268 - DNA, 30 bp, Artificial Sequence
  Synthetic oligonucleotide
gttgtgaatatcggtccgaatcgactgagg

SEQ ID NO: 132269 - DNA, 30 bp, Artificial Sequence
  Synthetic oligonucleotide
gggcaactgtaatgacgggagtgtctgagg

SEQ ID NO: 132270 - DNA, 30 bp, Artificial Sequence
  Synthetic oligonucleotide
acgagggtgaagtgtctcgtgaaagtgagg

SEQ ID NO: 132271 - DNA, 30 bp, Artificial Sequence
  Synthetic oligonucleotide
acctaagttcgctctccagcagcagtgagg

SEQ ID NO: 132272 - DNA, 30 bp, Artificial Sequence
  Synthetic oligonucleotide
ggtaggctggtaagggtcgtctcagtgagg

SEQ ID NO: 132273 - DNA, 30 bp, Artificial Sequence
  Synthetic oligonucleotide
cactgagtatgatgtagtcatgcggtgagg

SEQ ID NO: 132274 - DNA, 30 bp, Artificial Sequence
  Synthetic oligonucleotide
atatcagagcgtaggagcgttgtggtgagg

SEQ ID NO: 132275 - DNA, 30 bp, Artificial Sequence
  Synthetic oligonucleotide
ttaactggcaaggctttattcggtgtgagg

SEQ ID NO: 132276 - DNA, 30 bp, Artificial Sequence
  Synthetic oligonucleotide
cgccgtttgcaaagaactgctcgattgagg

SEQ ID NO: 132277 - DNA, 30 bp, Artificial Sequence
  Synthetic oligonucleotide
aagacacatggcctgaaccggagcaatagg

SEQ ID NO: 132278 - DNA, 30 bp, Artificial Sequence
  Synthetic oligonucleotide
atcgcggaaggtttatgcagtaggaatagg

SEQ ID NO: 132279 - DNA, 30 bp, Artificial Sequence
  Synthetic oligonucleotide
atagaattggtctacagcattcggaatagg

SEQ ID NO: 132280 - DNA, 30 bp, Artificial Sequence
  Synthetic oligonucleotide
tctaaacctgtgtcttcaaacaataatagg

SEQ ID NO: 132281 - DNA, 30 bp, Artificial Sequence
  Synthetic oligonucleotide
cactaagatacctggtttccccataatagg

SEQ ID NO: 132282 - DNA, 30 bp, Artificial Sequence
  Synthetic oligonucleotide
tacaacaggatgtaagtatctaaacatagg

SEQ ID NO: 132283 - DNA, 30 bp, Artificial Sequence
  Synthetic oligonucleotide
aaacaataggtggtcttagcacgccatagg

SEQ ID NO: 132284 - DNA, 30 bp, Artificial Sequence
  Synthetic oligonucleotide
tatcggggtgggacgggcctgcaagatagg

SEQ ID NO: 132285 - DNA, 30 bp, Artificial Sequence
  Synthetic oligonucleotide
cgtcaagttaaatattatcatggagatagg

SEQ ID NO: 132286 - DNA, 30 bp, Artificial Sequence
  Synthetic oligonucleotide
gtgcggcaaatatgatcttctggagatagg

SEQ ID NO: 132287 - DNA, 25 bp, Artificial Sequence
  Synthetic oligonucleotide
agctcaagatgccggcaaggatagg

SEQ ID NO: 132288 - DNA, 30 bp, Artificial Sequence
  Synthetic oligonucleotide
aagccaaggatccacaaggttactgatagg

SEQ ID NO: 132289 - DNA, 30 bp, Artificial Sequence
  Synthetic oligonucleotide
aagctcgcttagtgaagttacagtgatagg

SEQ ID NO: 132290 - DNA, 30 bp, Artificial Sequence
  Synthetic oligonucleotide
gagggcctactcggcgcaatacgaactagg

SEQ ID NO: 132291 - DNA, 30 bp, Artificial Sequence
  Synthetic oligonucleotide
gaggcaggagtcctgatagttctaactagg

SEQ ID NO: 132292 - DNA, 30 bp, Artificial Sequence
  Synthetic oligonucleotide
gtagttgattaatatctaacccagactagg

SEQ ID NO: 132293 - DNA, 30 bp, Artificial Sequence
  Synthetic oligonucleotide
cgattaaatattcaccgcggctgccctagg

SEQ ID NO: 132294 - DNA, 30 bp, Artificial Sequence
  Synthetic oligonucleotide
atggagaggaatgtgattgagatcgctagg

SEQ ID NO: 132295 - DNA, 30 bp, Artificial Sequence
  Synthetic oligonucleotide
agatgctcaggccttcggaattatgctagg

SEQ ID NO: 132296 - DNA, 30 bp, Artificial Sequence
  Synthetic oligonucleotide
acgccagataagcgatgatggagatctagg

SEQ ID NO: 132297 - DNA, 30 bp, Artificial Sequence
  Synthetic oligonucleotide
ggcgggaccgggaatacaaggtgctctagg

SEQ ID NO: 132298 - DNA, 30 bp, Artificial Sequence
  Synthetic oligonucleotide
gtgtggaaaatattagcggttgagtctagg

SEQ ID NO: 132299 - DNA, 30 bp, Artificial Sequence
  Synthetic oligonucleotide
ggcaaagcatcaatgaaaaaagtgtctagg

SEQ ID NO: 132300 - DNA, 30 bp, Artificial Sequence
  Synthetic oligonucleotide
aaagggactgtaccatctgcttccagtagg

SEQ ID NO: 132301 - DNA, 30 bp, Artificial Sequence
  Synthetic oligonucleotide
caaatggcataccttacgttcgagagtagg

SEQ ID NO: 132302 - DNA, 30 bp, Artificial Sequence
  Synthetic oligonucleotide
ccagcaaccagttaattgttccctagtagg

SEQ ID NO: 132303 - DNA, 30 bp, Artificial Sequence
  Synthetic oligonucleotide
gtgccggtgaaatagcgttatacgcgtagg

SEQ ID NO: 132304 - DNA, 30 bp, Artificial Sequence
  Synthetic oligonucleotide
ctagaggggccacaaggttagccgcgtagg

SEQ ID NO: 132305 - DNA, 27 bp, Artificial Sequence
  Synthetic oligonucleotide
taacgcgtcaatagtgggctgcgtagg

SEQ ID NO: 132306 - DNA, 30 bp, Artificial Sequence
  Synthetic oligonucleotide
cgtagttacatggtgcagaatcgcggtagg

SEQ ID NO: 132307 - DNA, 30 bp, Artificial Sequence
  Synthetic oligonucleotide
gcgaaacgcggggttactacagtgggtagg

SEQ ID NO: 132308 - DNA, 30 bp, Artificial Sequence
  Synthetic oligonucleotide
cacggtacgaacacaatgatttgtggtagg

SEQ ID NO: 132309 - DNA, 30 bp, Artificial Sequence
  Synthetic oligonucleotide
gaccaaaaagtgacgcgaataattggtagg

SEQ ID NO: 132310 - DNA, 30 bp, Artificial Sequence
  Synthetic oligonucleotide
tcggtcagctacgttgctcatgttggtagg

SEQ ID NO: 132311 - DNA, 30 bp, Artificial Sequence
  Synthetic oligonucleotide
aattggtgtgcaaggcatatcatttgtagg

SEQ ID NO: 132312 - DNA, 30 bp, Artificial Sequence
  Synthetic oligonucleotide
atgctatcgatgatctgaccgcgaattagg

SEQ ID NO: 132313 - DNA, 30 bp, Artificial Sequence
  Synthetic oligonucleotide
accatggttctatcgggggaatgcattagg

SEQ ID NO: 132314 - DNA, 30 bp, Artificial Sequence
  Synthetic oligonucleotide
ggcgtaggcaacgttgtgaagctcattagg

SEQ ID NO: 132315 - DNA, 30 bp, Artificial Sequence
  Synthetic oligonucleotide
tcctaggtaatacggattcctcagattagg

SEQ ID NO: 132316 - DNA, 30 bp, Artificial Sequence
  Synthetic oligonucleotide
gcgtgcttgttgatgatgctaaggattagg

SEQ ID NO: 132317 - DNA, 30 bp, Artificial Sequence
  Synthetic oligonucleotide
cagggctaggaggagtcataaaatattagg

SEQ ID NO: 132318 - DNA, 30 bp, Artificial Sequence
  Synthetic oligonucleotide
gtttctcaagctggatcgcatgatattagg

SEQ ID NO: 132319 - DNA, 30 bp, Artificial Sequence
  Synthetic oligonucleotide
cacattagggcatcttaataactccttagg

SEQ ID NO: 132320 - DNA, 30 bp, Artificial Sequence
  Synthetic oligonucleotide
cagtatacgttcggataggtaaatcttagg

SEQ ID NO: 132321 - DNA, 30 bp, Artificial Sequence
  Synthetic oligonucleotide
tgtaacattgacagcgtagcttccgttagg

SEQ ID NO: 132322 - DNA, 30 bp, Artificial Sequence
  Synthetic oligonucleotide
taggatgtagaagaatgacagggatttagg

SEQ ID NO: 132323 - DNA, 30 bp, Artificial Sequence
  Synthetic oligonucleotide
aacgcctgggtacgtgagaattagtttagg

SEQ ID NO: 132324 - DNA, 30 bp, Artificial Sequence
  Synthetic oligonucleotide
caatgcagggaacgcgatccccattttagg

SEQ ID NO: 132325 - DNA, 30 bp, Artificial Sequence
  Synthetic oligonucleotide
aaagagggcgtctagacaacgacaaaacgg

SEQ ID NO: 132326 - DNA, 30 bp, Artificial Sequence
  Synthetic oligonucleotide
gaaggttggtccaactcttgtgtcaaacgg

SEQ ID NO: 132327 - DNA, 30 bp, Artificial Sequence
  Synthetic oligonucleotide
aagaaaggctgtaaaaccaaggcgaaacgg

SEQ ID NO: 132328 - DNA, 30 bp, Artificial Sequence
  Synthetic oligonucleotide
tgagagaactctgtttcgttatcgaaacgg

SEQ ID NO: 132329 - DNA, 30 bp, Artificial Sequence
  Synthetic oligonucleotide
caactatgtgaacatgttacctcgaaacgg

SEQ ID NO: 132330 - DNA, 30 bp, Artificial Sequence
  Synthetic oligonucleotide
gtggtacgactcacggtgtgccataaacgg

SEQ ID NO: 132331 - DNA, 30 bp, Artificial Sequence
  Synthetic oligonucleotide
aagtttaattgcacataagaggatcaacgg

SEQ ID NO: 132332 - DNA, 30 bp, Artificial Sequence
  Synthetic oligonucleotide
ggcgtgaaggcgtacgccgggatcgaacgg

SEQ ID NO: 132333 - DNA, 30 bp, Artificial Sequence
  Synthetic oligonucleotide
tgaggacaaagcccctaatgggaaacacgg

SEQ ID NO: 132334 - DNA, 30 bp, Artificial Sequence
  Synthetic oligonucleotide
tgaacatgaacattggtaacacctacacgg

SEQ ID NO: 132335 - DNA, 30 bp, Artificial Sequence
  Synthetic oligonucleotide
caccaggcgccttgagaatcaaaaccacgg

SEQ ID NO: 132336 - DNA, 30 bp, Artificial Sequence
  Synthetic oligonucleotide
gctagcaagcagacagaagttagaccacgg

SEQ ID NO: 132337 - DNA, 30 bp, Artificial Sequence
  Synthetic oligonucleotide
tgcaccaaccattcctcggggtatccacgg

SEQ ID NO: 132338 - DNA, 30 bp, Artificial Sequence
  Synthetic oligonucleotide
accatacgaggaccgatcgataaagcacgg

SEQ ID NO: 132339 - DNA, 30 bp, Artificial Sequence
  Synthetic oligonucleotide
cagttctgcgaataatgcctaagagcacgg

SEQ ID NO: 132340 - DNA, 30 bp, Artificial Sequence
  Synthetic oligonucleotide
ctaataatcggggcattaagccgagcacgg

SEQ ID NO: 132341 - DNA, 30 bp, Artificial Sequence
  Synthetic oligonucleotide
tacgacagaagcttcccgctaactgcacgg

SEQ ID NO: 132342 - DNA, 30 bp, Artificial Sequence
  Synthetic oligonucleotide
ggtcagttatgttaaacgctattctcacgg

SEQ ID NO: 132343 - DNA, 30 bp, Artificial Sequence
  Synthetic oligonucleotide
ccaattgcgttatatgagtcgacacgacgg

SEQ ID NO: 132344 - DNA, 30 bp, Artificial Sequence
  Synthetic oligonucleotide
tagtgctacttgggtcgctgagtgggacgg

SEQ ID NO: 132345 - DNA, 30 bp, Artificial Sequence
  Synthetic oligonucleotide
catcggtacgtagatgctttaaggtgacgg

SEQ ID NO: 132346 - DNA, 30 bp, Artificial Sequence
  Synthetic oligonucleotide
ggtgtcttgatctgattacccaaaatacgg

SEQ ID NO: 132347 - DNA, 30 bp, Artificial Sequence
  Synthetic oligonucleotide
tagtcctcgaatgaggaatgccaaatacgg

SEQ ID NO: 132348 - DNA, 30 bp, Artificial Sequence
  Synthetic oligonucleotide
ggtgactaccggataagcagagttatacgg

SEQ ID NO: 132349 - DNA, 30 bp, Artificial Sequence
  Synthetic oligonucleotide
tcgctggttgtaaatagactcgtactacgg

SEQ ID NO: 132350 - DNA, 30 bp, Artificial Sequence
  Synthetic oligonucleotide
cgaaagtctggccccccatgcaatctacgg

SEQ ID NO: 132351 - DNA, 30 bp, Artificial Sequence
  Synthetic oligonucleotide
gcagtatgtgtgatggacacctacgtacgg

SEQ ID NO: 132352 - DNA, 30 bp, Artificial Sequence
  Synthetic oligonucleotide
taggaaattacacatgacggtagcgtacgg

SEQ ID NO: 132353 - DNA, 30 bp, Artificial Sequence
  Synthetic oligonucleotide
cactcaataggtggctgaggagcggtacgg

SEQ ID NO: 132354 - DNA, 30 bp, Artificial Sequence
  Synthetic oligonucleotide
cctacatgtttgagaactagaccgttacgg

SEQ ID NO: 132355 - DNA, 30 bp, Artificial Sequence
  Synthetic oligonucleotide
gcatcatgaggttaagcagagtggttacgg

SEQ ID NO: 132356 - DNA, 30 bp, Artificial Sequence
  Synthetic oligonucleotide
tacccaggaattgatctgacgccaaaccgg

SEQ ID NO: 132357 - DNA, 30 bp, Artificial Sequence
  Synthetic oligonucleotide
tatagtcggagacttatcgtcacgaaccgg

SEQ ID NO: 132358 - DNA, 30 bp, Artificial Sequence
  Synthetic oligonucleotide
tagaactacggctgcaactgcgcacaccgg

SEQ ID NO: 132359 - DNA, 30 bp, Artificial Sequence
  Synthetic oligonucleotide
aaggcgccagtaagtgatatgaagcaccgg

SEQ ID NO: 132360 - DNA, 30 bp, Artificial Sequence
  Synthetic oligonucleotide
aatagacactctggacaaacgagtcaccgg

SEQ ID NO: 132361 - DNA, 30 bp, Artificial Sequence
  Synthetic oligonucleotide
gcccagaatgagtagaaaagtaaagaccgg

SEQ ID NO: 132362 - DNA, 30 bp, Artificial Sequence
  Synthetic oligonucleotide
gccttaccaatatcaaactaacaagaccgg

SEQ ID NO: 132363 - DNA, 30 bp, Artificial Sequence
  Synthetic oligonucleotide
cattacgcgtgctgtaatgttgatgaccgg

SEQ ID NO: 132364 - DNA, 30 bp, Artificial Sequence
  Synthetic oligonucleotide
cgtgtggtgccagatggtcgtaaataccgg

SEQ ID NO: 132365 - DNA, 30 bp, Artificial Sequence
  Synthetic oligonucleotide
ggctagttcgcgtcacgtttcaagtaccgg

SEQ ID NO: 132366 - DNA, 30 bp, Artificial Sequence
  Synthetic oligonucleotide
ggtacgcatccacagtcgcactggtaccgg

SEQ ID NO: 132367 - DNA, 30 bp, Artificial Sequence
  Synthetic oligonucleotide
gctcgcaacaatgcgcctcgtttgtaccgg

SEQ ID NO: 132368 - DNA, 30 bp, Artificial Sequence
  Synthetic oligonucleotide
ggatatatcaatatgtgtgatggcacccgg

SEQ ID NO: 132369 - DNA, 30 bp, Artificial Sequence
  Synthetic oligonucleotide
tgaccggcatacaacgcgcttgcaccccgg

SEQ ID NO: 132370 - DNA, 30 bp, Artificial Sequence
  Synthetic oligonucleotide
tgaatgagcacacgataagatcgagcccgg

SEQ ID NO: 132371 - DNA, 30 bp, Artificial Sequence
  Synthetic oligonucleotide
ggaagagtttaaaggcggataagcgcccgg

SEQ ID NO: 132372 - DNA, 30 bp, Artificial Sequence
  Synthetic oligonucleotide
caaatcgtgtagtaccactataattcccgg

SEQ ID NO: 132373 - DNA, 30 bp, Artificial Sequence
  Synthetic oligonucleotide
cgaatgagattgaggtcgcctgtaagccgg

SEQ ID NO: 132374 - DNA, 30 bp, Artificial Sequence
  Synthetic oligonucleotide
tcaaaagagcataattagcgttctagccgg

SEQ ID NO: 132375 - DNA, 30 bp, Artificial Sequence
  Synthetic oligonucleotide
ctggtatattggaccaagagcacacgccgg

SEQ ID NO: 132376 - DNA, 30 bp, Artificial Sequence
  Synthetic oligonucleotide
tctattaccccttgctaacgaagtcgccgg

SEQ ID NO: 132377 - DNA, 30 bp, Artificial Sequence
  Synthetic oligonucleotide
atacgatggatttatcctcagtattgccgg

SEQ ID NO: 132378 - DNA, 30 bp, Artificial Sequence
  Synthetic oligonucleotide
accaagtccatgatatagtgggccatccgg

SEQ ID NO: 132379 - DNA, 30 bp, Artificial Sequence
  Synthetic oligonucleotide
aggacatggttccatcaaaggaacctccgg

SEQ ID NO: 132380 - DNA, 30 bp, Artificial Sequence
  Synthetic oligonucleotide
ccccggaattcgacatgacaaaccctccgg

SEQ ID NO: 132381 - DNA, 30 bp, Artificial Sequence
  Synthetic oligonucleotide
ggataactagtcttctgtccagctctccgg

SEQ ID NO: 132382 - DNA, 30 bp, Artificial Sequence
  Synthetic oligonucleotide
tgcctctaatcatctttacgtggagtccgg

SEQ ID NO: 132383 - DNA, 30 bp, Artificial Sequence
  Synthetic oligonucleotide
cgctaagtgagtttttgtactctagtccgg

SEQ ID NO: 132384 - DNA, 30 bp, Artificial Sequence
  Synthetic oligonucleotide
cgaactggtgttaggcctgtccaggtccgg

SEQ ID NO: 132385 - DNA, 30 bp, Artificial Sequence
  Synthetic oligonucleotide
ccgccgagaaacacgggtttggatgtccgg

SEQ ID NO: 132386 - DNA, 30 bp, Artificial Sequence
  Synthetic oligonucleotide
gctaggcgattcccacgacgcattgtccgg

SEQ ID NO: 132387 - DNA, 30 bp, Artificial Sequence
  Synthetic oligonucleotide
gtaaagaggtatatggcaaggtcattccgg

SEQ ID NO: 132388 - DNA, 30 bp, Artificial Sequence
  Synthetic oligonucleotide
tgcgtgctatgttaaataggaggattccgg

SEQ ID NO: 132389 - DNA, 30 bp, Artificial Sequence
  Synthetic oligonucleotide
cacaggacaaagtgaggctaattgttccgg

SEQ ID NO: 132390 - DNA, 30 bp, Artificial Sequence
  Synthetic oligonucleotide
atctggcgccgtttcacaagcaagaagcgg

SEQ ID NO: 132391 - DNA, 30 bp, Artificial Sequence
  Synthetic oligonucleotide
aacggagacgtacctgagtggtttaagcgg

SEQ ID NO: 132392 - DNA, 30 bp, Artificial Sequence
  Synthetic oligonucleotide
tggggtagtagccatgaccatgcacagcgg

SEQ ID NO: 132393 - DNA, 30 bp, Artificial Sequence
  Synthetic oligonucleotide
tcgggcatccaccattgataatcccagcgg

SEQ ID NO: 132394 - DNA, 30 bp, Artificial Sequence
  Synthetic oligonucleotide
ggtgtatgaagatgattacctatgcagcgg

SEQ ID NO: 132395 - DNA, 30 bp, Artificial Sequence
  Synthetic oligonucleotide
ttattcacaatatccgtagccagcgagcgg

SEQ ID NO: 132396 - DNA, 30 bp, Artificial Sequence
  Synthetic oligonucleotide
ggtaggagccaggaaaaggaactggagcgg

SEQ ID NO: 132397 - DNA, 30 bp, Artificial Sequence
  Synthetic oligonucleotide
aggtaattggctataaagatgttggagcgg

SEQ ID NO: 132398 - DNA, 30 bp, Artificial Sequence
  Synthetic oligonucleotide
gtacagatctggccttcgcccactgagcgg

SEQ ID NO: 132399 - DNA, 30 bp, Artificial Sequence
  Synthetic oligonucleotide
tggcgtcatctgcgtcgatcatggtagcgg

SEQ ID NO: 132400 - DNA, 30 bp, Artificial Sequence
  Synthetic oligonucleotide
aagcgggtgaagttcataagtcattagcgg

SEQ ID NO: 132401 - DNA, 30 bp, Artificial Sequence
  Synthetic oligonucleotide
acagagtcgcagcttttacggattacgcgg

SEQ ID NO: 132402 - DNA, 30 bp, Artificial Sequence
  Synthetic oligonucleotide
cgttcatcatcagtaggcaacataccgcgg

SEQ ID NO: 132403 - DNA, 30 bp, Artificial Sequence
  Synthetic oligonucleotide
ccaggacagtggtatagaaaactaccgcgg

SEQ ID NO: 132404 - DNA, 30 bp, Artificial Sequence
  Synthetic oligonucleotide
caggggggtgtgtgtcctgtgcctccgcgg

SEQ ID NO: 132405 - DNA, 30 bp, Artificial Sequence
  Synthetic oligonucleotide
gtaagggtcacgcatctgtagattccgcgg

SEQ ID NO: 132406 - DNA, 30 bp, Artificial Sequence
  Synthetic oligonucleotide
atctacggcaaagaacgaagcggggcgcgg

SEQ ID NO: 132407 - DNA, 30 bp, Artificial Sequence
  Synthetic oligonucleotide
ttaggcgaactggagcaaaatggggcgcgg

SEQ ID NO: 132408 - DNA, 30 bp, Artificial Sequence
  Synthetic oligonucleotide
gcagggagtcgtcatgaggccttctcgcgg

SEQ ID NO: 132409 - DNA, 30 bp, Artificial Sequence
  Synthetic oligonucleotide
ggtagtaaaaacgggaacgcccggaggcgg

SEQ ID NO: 132410 - DNA, 30 bp, Artificial Sequence
  Synthetic oligonucleotide
ctaccggacactaccaggggttataggcgg

SEQ ID NO: 132411 - DNA, 30 bp, Artificial Sequence
  Synthetic oligonucleotide
gcggtggtaaaggtattatggcaccggcgg

SEQ ID NO: 132412 - DNA, 30 bp, Artificial Sequence
  Synthetic oligonucleotide
ttatatccaccaaccaacaatatccggcgg

SEQ ID NO: 132413 - DNA, 30 bp, Artificial Sequence
  Synthetic oligonucleotide
acgttacggatatttctccgccctcggcgg

SEQ ID NO: 132414 - DNA, 30 bp, Artificial Sequence
  Synthetic oligonucleotide
tccaattctgcaataacaacagactggcgg

SEQ ID NO: 132415 - DNA, 30 bp, Artificial Sequence
  Synthetic oligonucleotide
atcgtaaatgaaattggttgtgcctggcgg

SEQ ID NO: 132416 - DNA, 30 bp, Artificial Sequence
  Synthetic oligonucleotide
ggtaaatggaccccgaactcttggctgcgg

SEQ ID NO: 132417 - DNA, 30 bp, Artificial Sequence
  Synthetic oligonucleotide
ccagatctagcctataacacggtagtgcgg

SEQ ID NO: 132418 - DNA, 30 bp, Artificial Sequence
  Synthetic oligonucleotide
tcagcgttaagaaacctggttccattgcgg

SEQ ID NO: 132419 - DNA, 30 bp, Artificial Sequence
  Synthetic oligonucleotide
cggcagtgaacacgtcaatgaggattgcgg

SEQ ID NO: 132420 - DNA, 30 bp, Artificial Sequence
  Synthetic oligonucleotide
ttggggctaccccaaatgtattccttgcgg

SEQ ID NO: 132421 - DNA, 30 bp, Artificial Sequence
  Synthetic oligonucleotide
tgatcgaagataactagtacgtttttgcgg

SEQ ID NO: 132422 - DNA, 30 bp, Artificial Sequence
  Synthetic oligonucleotide
gacctaaattattactaaccaacaaatcgg

SEQ ID NO: 132423 - DNA, 30 bp, Artificial Sequence
  Synthetic oligonucleotide
gctcgtcggtcgagcgaaagtcagaatcgg

SEQ ID NO: 132424 - DNA, 30 bp, Artificial Sequence
  Synthetic oligonucleotide
tcgtgcatggcatcgctcgaggcgaatcgg

SEQ ID NO: 132425 - DNA, 30 bp, Artificial Sequence
  Synthetic oligonucleotide
gtgcgacaacgatgggttgtgacagatcgg

SEQ ID NO: 132426 - DNA, 30 bp, Artificial Sequence
  Synthetic oligonucleotide
cctcggatttcgaatattggatcagatcgg

SEQ ID NO: 132427 - DNA, 30 bp, Artificial Sequence
  Synthetic oligonucleotide
tagtccatggtccgtactcgttgagatcgg

SEQ ID NO: 132428 - DNA, 30 bp, Artificial Sequence
  Synthetic oligonucleotide
tcgataccatgttgcctggttcgctatcgg

SEQ ID NO: 132429 - DNA, 30 bp, Artificial Sequence
  Synthetic oligonucleotide
gagtgcacaaataatggagagtggtatcgg

SEQ ID NO: 132430 - DNA, 30 bp, Artificial Sequence
  Synthetic oligonucleotide
taacacctatagtagcgcgagtattatcgg

SEQ ID NO: 132431 - DNA, 30 bp, Artificial Sequence
  Synthetic oligonucleotide
cgagccaacagataatatcgtaaaactcgg

SEQ ID NO: 132432 - DNA, 30 bp, Artificial Sequence
  Synthetic oligonucleotide
actttagccatgcggaaaggtgaaactcgg

SEQ ID NO: 132433 - DNA, 30 bp, Artificial Sequence
  Synthetic oligonucleotide
caacctgccagacaatcgatttatactcgg

SEQ ID NO: 132434 - DNA, 30 bp, Artificial Sequence
  Synthetic oligonucleotide
ccctcgactgggtgtagcagatgtactcgg

SEQ ID NO: 132435 - DNA, 30 bp, Artificial Sequence
  Synthetic oligonucleotide
tgctgagagggtggacctggtcaacctcgg

SEQ ID NO: 132436 - DNA, 30 bp, Artificial Sequence
  Synthetic oligonucleotide
agattgccgggatatccaccccgacctcgg

SEQ ID NO: 132437 - DNA, 30 bp, Artificial Sequence
  Synthetic oligonucleotide
tatatcgagggcacgtcgcaccacgctcgg

SEQ ID NO: 132438 - DNA, 30 bp, Artificial Sequence
  Synthetic oligonucleotide
aaagtgaaaacgaagtaactgagggctcgg

SEQ ID NO: 132439 - DNA, 30 bp, Artificial Sequence
  Synthetic oligonucleotide
acggtcgcgggtgggccacgcgagtctcgg

SEQ ID NO: 132440 - DNA, 30 bp, Artificial Sequence
  Synthetic oligonucleotide
cgagtagggcgcgaacaatccgtttctcgg

SEQ ID NO: 132441 - DNA, 30 bp, Artificial Sequence
  Synthetic oligonucleotide
tcagtccctttaggaacacacctaagtcgg

SEQ ID NO: 132442 - DNA, 30 bp, Artificial Sequence
  Synthetic oligonucleotide
agtcgagagatgactttaggagccagtcgg

SEQ ID NO: 132443 - DNA, 30 bp, Artificial Sequence
  Synthetic oligonucleotide
actttggagtggatgagacaggtgcgtcgg

SEQ ID NO: 132444 - DNA, 30 bp, Artificial Sequence
  Synthetic oligonucleotide
cacctacccgcgatctagatgttgcgtcgg

SEQ ID NO: 132445 - DNA, 30 bp, Artificial Sequence
  Synthetic oligonucleotide
ccgcgaatggtagcgtacaattttcgtcgg

SEQ ID NO: 132446 - DNA, 30 bp, Artificial Sequence
  Synthetic oligonucleotide
ccttacgagtaccgaaaagctcacggtcgg

SEQ ID NO: 132447 - DNA, 30 bp, Artificial Sequence
  Synthetic oligonucleotide
catcttgcggattaccttcccaatggtcgg

SEQ ID NO: 132448 - DNA, 30 bp, Artificial Sequence
  Synthetic oligonucleotide
tccgtatcaattagactattaggttgtcgg

SEQ ID NO: 132449 - DNA, 30 bp, Artificial Sequence
  Synthetic oligonucleotide
tgctaatccagttaagggtcgccaattcgg

SEQ ID NO: 132450 - DNA, 30 bp, Artificial Sequence
  Synthetic oligonucleotide
cataaggggacaactaggtctagaattcgg

SEQ ID NO: 132451 - DNA, 30 bp, Artificial Sequence
  Synthetic oligonucleotide
cggggtgtcattccaaatagtaatattcgg

SEQ ID NO: 132452 - DNA, 30 bp, Artificial Sequence
  Synthetic oligonucleotide
ctagttgacagatcaaagcaatttattcgg

SEQ ID NO: 132453 - DNA, 30 bp, Artificial Sequence
  Synthetic oligonucleotide
atggcaatcactaagctattcggtcttcgg

SEQ ID NO: 132454 - DNA, 30 bp, Artificial Sequence
  Synthetic oligonucleotide
cgtgagttcactgtatcgagctcagttcgg

SEQ ID NO: 132455 - DNA, 30 bp, Artificial Sequence
  Synthetic oligonucleotide
gccacgtaagccaattcgggaggagttcgg

SEQ ID NO: 132456 - DNA, 30 bp, Artificial Sequence
  Synthetic oligonucleotide
gcgttgtagacattcataaagtgagttcgg

SEQ ID NO: 132457 - DNA, 30 bp, Artificial Sequence
  Synthetic oligonucleotide
gcggcaatggcgcaattaacaaacgttcgg

SEQ ID NO: 132458 - DNA, 30 bp, Artificial Sequence
  Synthetic oligonucleotide
gcgtcgtagatagggcggtaaagcgttcgg

SEQ ID NO: 132459 - DNA, 30 bp, Artificial Sequence
  Synthetic oligonucleotide
tacagaaaaggcggttccctcgttgttcgg

SEQ ID NO: 132460 - DNA, 30 bp, Artificial Sequence
  Synthetic oligonucleotide
aagaccaggctggctgtcataccgtttcgg

SEQ ID NO: 132461 - DNA, 30 bp, Artificial Sequence
  Synthetic oligonucleotide
tgccaagtatgacactcaggtgggtttcgg

SEQ ID NO: 132462 - DNA, 30 bp, Artificial Sequence
  Synthetic oligonucleotide
ctatatacaggagaggattctcagaaaggg

SEQ ID NO: 132463 - DNA, 30 bp, Artificial Sequence
  Synthetic oligonucleotide
tgaaacccaggactccctctgtctaaaggg

SEQ ID NO: 132464 - DNA, 30 bp, Artificial Sequence
  Synthetic oligonucleotide
gcggctttcaacgcctaagagggtaaaggg

SEQ ID NO: 132465 - DNA, 30 bp, Artificial Sequence
  Synthetic oligonucleotide
ctcgcggcctggcgaatctgaattaaaggg

SEQ ID NO: 132466 - DNA, 30 bp, Artificial Sequence
  Synthetic oligonucleotide
atgtctattataattggggagtagcaaggg

SEQ ID NO: 132467 - DNA, 30 bp, Artificial Sequence
  Synthetic oligonucleotide
gggtgtatctgccataactagtgagaaggg

SEQ ID NO: 132468 - DNA, 30 bp, Artificial Sequence
  Synthetic oligonucleotide
acaatgagtgtatagcggctatacgaaggg

SEQ ID NO: 132469 - DNA, 30 bp, Artificial Sequence
  Synthetic oligonucleotide
agcaacgtatccggactcccaggcgaaggg

SEQ ID NO: 132470 - DNA, 30 bp, Artificial Sequence
  Synthetic oligonucleotide
aaacgagcgttggagaagggtgatgaaggg

SEQ ID NO: 132471 - DNA, 30 bp, Artificial Sequence
  Synthetic oligonucleotide
ttaatttgtacttgaatccggagtgaaggg

SEQ ID NO: 132472 - DNA, 30 bp, Artificial Sequence
  Synthetic oligonucleotide
tagcataagttttccgtcgtcagctaaggg

SEQ ID NO: 132473 - DNA, 30 bp, Artificial Sequence
  Synthetic oligonucleotide
tgagtgtgctagacacgattccggtaaggg

SEQ ID NO: 132474 - DNA, 30 bp, Artificial Sequence
  Synthetic oligonucleotide
tagatgggcttactgaagttggtgtaaggg

SEQ ID NO: 132475 - DNA, 30 bp, Artificial Sequence
  Synthetic oligonucleotide
gttaggctataaagcccactcccaacaggg

SEQ ID NO: 132476 - DNA, 30 bp, Artificial Sequence
  Synthetic oligonucleotide
taggccgtttagaagccagggttaacaggg

SEQ ID NO: 132477 - DNA, 30 bp, Artificial Sequence
  Synthetic oligonucleotide
cattagagcaaagaggcggcaagaccaggg

SEQ ID NO: 132478 - DNA, 30 bp, Artificial Sequence
  Synthetic oligonucleotide
ccgttcgctcccgatcaagatctaccaggg

SEQ ID NO: 132479 - DNA, 30 bp, Artificial Sequence
  Synthetic oligonucleotide
ctgaaagtaacgtcgaggcactgcccaggg

SEQ ID NO: 132480 - DNA, 30 bp, Artificial Sequence
  Synthetic oligonucleotide
caggggtagttagttgattcataagcaggg

SEQ ID NO: 132481 - DNA, 30 bp, Artificial Sequence
  Synthetic oligonucleotide
aaaagccgctggcatgatcaaacagcaggg

SEQ ID NO: 132482 - DNA, 30 bp, Artificial Sequence
  Synthetic oligonucleotide
gtacaccacacgattccagtggctgcaggg

SEQ ID NO: 132483 - DNA, 30 bp, Artificial Sequence
  Synthetic oligonucleotide
cagtctgtgaggataacatccatatcaggg

SEQ ID NO: 132484 - DNA, 30 bp, Artificial Sequence
  Synthetic oligonucleotide
cagcagatataagcgacaaccgtatcaggg

SEQ ID NO: 132485 - DNA, 30 bp, Artificial Sequence
  Synthetic oligonucleotide
attgcaaggcggcgagaagtaggctcaggg

SEQ ID NO: 132486 - DNA, 30 bp, Artificial Sequence
  Synthetic oligonucleotide
caggtatttaaagaaagggccctgtcaggg

SEQ ID NO: 132487 - DNA, 30 bp, Artificial Sequence
  Synthetic oligonucleotide
gtaagtcacacgtacaagaatcgttcaggg

SEQ ID NO: 132488 - DNA, 30 bp, Artificial Sequence
  Synthetic oligonucleotide
atgaagggctggtgggatagtttaagaggg

SEQ ID NO: 132489 - DNA, 30 bp, Artificial Sequence
  Synthetic oligonucleotide
tttagagcatagtaatgttcggcacgaggg

SEQ ID NO: 132490 - DNA, 30 bp, Artificial Sequence
  Synthetic oligonucleotide
aggtttatcattgaatgggccgtccgaggg

SEQ ID NO: 132491 - DNA, 30 bp, Artificial Sequence
  Synthetic oligonucleotide
gcagtgcgagattgtttctgtgtccgaggg

SEQ ID NO: 132492 - DNA, 30 bp, Artificial Sequence
  Synthetic oligonucleotide
agagcgtcggtggtcttggcgaggcgaggg

SEQ ID NO: 132493 - DNA, 30 bp, Artificial Sequence
  Synthetic oligonucleotide
agaacttcggcgcatcgggaggggcgaggg

SEQ ID NO: 132494 - DNA, 30 bp, Artificial Sequence
  Synthetic oligonucleotide
gaacccaacggtcattggatcactcgaggg

SEQ ID NO: 132495 - DNA, 30 bp, Artificial Sequence
  Synthetic oligonucleotide
ctcgacactgcccgtggaaagagcggaggg

SEQ ID NO: 132496 - DNA, 30 bp, Artificial Sequence
  Synthetic oligonucleotide
tacttgtttcgatcaggattagtgggaggg

SEQ ID NO: 132497 - DNA, 29 bp, Artificial Sequence
  Synthetic oligonucleotide
gcatagggctaatgcaggatcatggaggg

SEQ ID NO: 132498 - DNA, 30 bp, Artificial Sequence
  Synthetic oligonucleotide
acacgcattttagccattcaccgatgaggg

SEQ ID NO: 132499 - DNA, 30 bp, Artificial Sequence
  Synthetic oligonucleotide
ataaatctgttgctgggacacaactgaggg

SEQ ID NO: 132500 - DNA, 30 bp, Artificial Sequence
  Synthetic oligonucleotide
cttattagagtcgtagactgcgtctgaggg

SEQ ID NO: 132501 - DNA, 30 bp, Artificial Sequence
  Synthetic oligonucleotide
taactggtgaagtcactactgcggtgaggg

SEQ ID NO: 132502 - DNA, 30 bp, Artificial Sequence
  Synthetic oligonucleotide
cttgtgacacaccaaggaaccagttgaggg

SEQ ID NO: 132503 - DNA, 30 bp, Artificial Sequence
  Synthetic oligonucleotide
cggaggtcatttcccgacctacgttgaggg

SEQ ID NO: 132504 - DNA, 30 bp, Artificial Sequence
  Synthetic oligonucleotide
ggacctggggaagagcgggattacataggg

SEQ ID NO: 132505 - DNA, 30 bp, Artificial Sequence
  Synthetic oligonucleotide
tattataaacataagtggagtaggataggg

SEQ ID NO: 132506 - DNA, 30 bp, Artificial Sequence
  Synthetic oligonucleotide
agagggaccaccgtgaccaatgatataggg

SEQ ID NO: 132507 - DNA, 30 bp, Artificial Sequence
  Synthetic oligonucleotide
atatggggttggcacggcattgatataggg

SEQ ID NO: 132508 - DNA, 30 bp, Artificial Sequence
  Synthetic oligonucleotide
cctgtagcaggatatgccaaggttataggg

SEQ ID NO: 132509 - DNA, 30 bp, Artificial Sequence
  Synthetic oligonucleotide
ttatggcccccgtgcgactcaaacctaggg

SEQ ID NO: 132510 - DNA, 30 bp, Artificial Sequence
  Synthetic oligonucleotide
aactcagttcagcctgtgtaactgctaggg

SEQ ID NO: 132511 - DNA, 30 bp, Artificial Sequence
  Synthetic oligonucleotide
agaggctacaatgccgctttaaaagtaggg

SEQ ID NO: 132512 - DNA, 30 bp, Artificial Sequence
  Synthetic oligonucleotide
agctgttcaagcgacactgcggtagtaggg

SEQ ID NO: 132513 - DNA, 30 bp, Artificial Sequence
  Synthetic oligonucleotide
ccaggatagttaagattaagagatgtaggg

SEQ ID NO: 132514 - DNA, 30 bp, Artificial Sequence
  Synthetic oligonucleotide
taggcactagggtctgattggctgttaggg

SEQ ID NO: 132515 - DNA, 30 bp, Artificial Sequence
  Synthetic oligonucleotide
acagatcaacggtagctccgaattttaggg

SEQ ID NO: 132516 - DNA, 30 bp, Artificial Sequence
  Synthetic oligonucleotide
attcgagggtacatgttcgcaagaaacggg

SEQ ID NO: 132517 - DNA, 30 bp, Artificial Sequence
  Synthetic oligonucleotide
gacaatcaaacaccacaagaatgaaacggg

SEQ ID NO: 132518 - DNA, 30 bp, Artificial Sequence
  Synthetic oligonucleotide
tgtctctaagcagcgacatcagtcaacggg

SEQ ID NO: 132519 - DNA, 30 bp, Artificial Sequence
  Synthetic oligonucleotide
gggattaacccagatcttaaacgtaacggg

SEQ ID NO: 132520 - DNA, 30 bp, Artificial Sequence
  Synthetic oligonucleotide
ttgacgtggaaacatatgagctaacacggg

SEQ ID NO: 132521 - DNA, 30 bp, Artificial Sequence
  Synthetic oligonucleotide
agttggccagataaagaggtcccccacggg

SEQ ID NO: 132522 - DNA, 30 bp, Artificial Sequence
  Synthetic oligonucleotide
acgtcttgtaccgatgtttttatccacggg

SEQ ID NO: 132523 - DNA, 30 bp, Artificial Sequence
  Synthetic oligonucleotide
ttgatgggacttaattgctgataagacggg

SEQ ID NO: 132524 - DNA, 30 bp, Artificial Sequence
  Synthetic oligonucleotide
caggtgatgaggagttccccgacggacggg

SEQ ID NO: 132525 - DNA, 30 bp, Artificial Sequence
  Synthetic oligonucleotide
gtcacaagcagagtggtccaggctgacggg

SEQ ID NO: 132526 - DNA, 30 bp, Artificial Sequence
  Synthetic oligonucleotide
actgagtgaagtgacgagatattatacggg

SEQ ID NO: 132527 - DNA, 30 bp, Artificial Sequence
  Synthetic oligonucleotide
ccaagtacagtatcacgcccgagctacggg

SEQ ID NO: 132528 - DNA, 30 bp, Artificial Sequence
  Synthetic oligonucleotide
acgtgtgatgcgtacagcaacacgtacggg

SEQ ID NO: 132529 - DNA, 30 bp, Artificial Sequence
  Synthetic oligonucleotide
cctagatcatgaactctctacccgtacggg

SEQ ID NO: 132530 - DNA, 30 bp, Artificial Sequence
  Synthetic oligonucleotide
gcaggaatgtaaggatgaaaggattacggg

SEQ ID NO: 132531 - DNA, 30 bp, Artificial Sequence
  Synthetic oligonucleotide
cgttagtttgggtgccaaggatgaaccggg

SEQ ID NO: 132532 - DNA, 30 bp, Artificial Sequence
  Synthetic oligonucleotide
tcagtcatctgacgaagtcgtcacaccggg

SEQ ID NO: 132533 - DNA, 30 bp, Artificial Sequence
  Synthetic oligonucleotide
agagggggtagcggagtcggaggcaccggg

SEQ ID NO: 132534 - DNA, 30 bp, Artificial Sequence
  Synthetic oligonucleotide
ttccttgtgataattcgaggggtacccggg

SEQ ID NO: 132535 - DNA, 30 bp, Artificial Sequence
  Synthetic oligonucleotide
cgacagactttgctatagaaacgcgccggg

SEQ ID NO: 132536 - DNA, 30 bp, Artificial Sequence
  Synthetic oligonucleotide
cctacgtattagtctgtcatctgcgccggg

SEQ ID NO: 132537 - DNA, 30 bp, Artificial Sequence
  Synthetic oligonucleotide
ctgctttcatccgaggataggcgggccggg

SEQ ID NO: 132538 - DNA, 30 bp, Artificial Sequence
  Synthetic oligonucleotide
gaaggacgtgttggctaaaagagctccggg

SEQ ID NO: 132539 - DNA, 30 bp, Artificial Sequence
  Synthetic oligonucleotide
gtcgctgatgtccaaggcaagttctccggg

SEQ ID NO: 132540 - DNA, 30 bp, Artificial Sequence
  Synthetic oligonucleotide
aaataaaggaatctctgcaaaacgtccggg

SEQ ID NO: 132541 - DNA, 30 bp, Artificial Sequence
  Synthetic oligonucleotide
gtagctcttttaagttcaacacaaagcggg

SEQ ID NO: 132542 - DNA, 30 bp, Artificial Sequence
  Synthetic oligonucleotide
tgggcgaccggatctagttaaccaagcggg

SEQ ID NO: 132543 - DNA, 30 bp, Artificial Sequence
  Synthetic oligonucleotide
ttactctagtttgcctaactaaacagcggg

SEQ ID NO: 132544 - DNA, 30 bp, Artificial Sequence
  Synthetic oligonucleotide
tgggggcaacacaactgtgcagacggcggg

SEQ ID NO: 132545 - DNA, 30 bp, Artificial Sequence
  Synthetic oligonucleotide
ggagtctcccatatactggccgtcggcggg

SEQ ID NO: 132546 - DNA, 30 bp, Artificial Sequence
  Synthetic oligonucleotide
acagtgagtgcactggcactattgggcggg

SEQ ID NO: 132547 - DNA, 30 bp, Artificial Sequence
  Synthetic oligonucleotide
tctcccaggatatatcaaaactattgcggg

SEQ ID NO: 132548 - DNA, 30 bp, Artificial Sequence
  Synthetic oligonucleotide
acatgtcgaaggtaggcttgtataatcggg

SEQ ID NO: 132549 - DNA, 30 bp, Artificial Sequence
  Synthetic oligonucleotide
ttccgtatggttggccgtcgtctcatcggg

SEQ ID NO: 132550 - DNA, 30 bp, Artificial Sequence
  Synthetic oligonucleotide
ccagaggataatagtcacaatttcatcggg

SEQ ID NO: 132551 - DNA, 30 bp, Artificial Sequence
  Synthetic oligonucleotide
agagacggaaacgcacgcaagaagatcggg

SEQ ID NO: 132552 - DNA, 30 bp, Artificial Sequence
  Synthetic oligonucleotide
ggaagcaaggcttacgagggtaatatcggg

SEQ ID NO: 132553 - DNA, 30 bp, Artificial Sequence
  Synthetic oligonucleotide
ctaaagatagtaattcacaaaagtctcggg

SEQ ID NO: 132554 - DNA, 30 bp, Artificial Sequence
  Synthetic oligonucleotide
acaagtaggtgattcagcggcagggtcggg

SEQ ID NO: 132555 - DNA, 30 bp, Artificial Sequence
  Synthetic oligonucleotide
tattttaggcatcgatgtcactagttcggg

SEQ ID NO: 132556 - DNA, 30 bp, Artificial Sequence
  Synthetic oligonucleotide
gccactggctaacattgcatcaatttcggg

SEQ ID NO: 132557 - DNA, 30 bp, Artificial Sequence
  Synthetic oligonucleotide
acaaagtagtgtccggttaatgctttcggg

SEQ ID NO: 132558 - DNA, 30 bp, Artificial Sequence
  Synthetic oligonucleotide
gggatcgagccacgtcagggatttttcggg

SEQ ID NO: 132559 - DNA, 31 bp, Artificial Sequence
  Synthetic oligonucleotide
aaatacagaacagctggaacagagcaagggg

SEQ ID NO: 132560 - DNA, 30 bp, Artificial Sequence
  Synthetic oligonucleotide
tgatggcaaatcctctgcagtgtacagggg

SEQ ID NO: 132561 - DNA, 30 bp, Artificial Sequence
  Synthetic oligonucleotide
gccatgttggccaactccaccaaccagggg

SEQ ID NO: 132562 - DNA, 30 bp, Artificial Sequence
  Synthetic oligonucleotide
tttgcggtctgcacgcgatcgatccagggg

SEQ ID NO: 132563 - DNA, 30 bp, Artificial Sequence
  Synthetic oligonucleotide
aggcgcgcgagagagtataaccttcagggg

SEQ ID NO: 132564 - DNA, 30 bp, Artificial Sequence
  Synthetic oligonucleotide
ataagtggtgagtcacctctccaagagggg

SEQ ID NO: 132565 - DNA, 30 bp, Artificial Sequence
  Synthetic oligonucleotide
cgatctatggtcgaagcgtccgaagagggg

SEQ ID NO: 132566 - DNA, 30 bp, Artificial Sequence
  Synthetic oligonucleotide
tcaggggccatgcaatggggggacgagggg

SEQ ID NO: 132567 - DNA, 30 bp, Artificial Sequence
  Synthetic oligonucleotide
ttcctacgcgcatacaacgccgccgagggg

SEQ ID NO: 132568 - DNA, 30 bp, Artificial Sequence
  Synthetic oligonucleotide
tttagggctgagatgaacagcatcgagggg

SEQ ID NO: 132569 - DNA, 30 bp, Artificial Sequence
  Synthetic oligonucleotide
taatatacaggctattatcgaaaggagggg

SEQ ID NO: 132570 - DNA, 30 bp, Artificial Sequence
  Synthetic oligonucleotide
aaacgtggaacgcccatatacgaggagggg

SEQ ID NO: 132571 - DNA, 30 bp, Artificial Sequence
  Synthetic oligonucleotide
gttaaccaaggggagcgtataggggagggg

SEQ ID NO: 132572 - DNA, 30 bp, Artificial Sequence
  Synthetic oligonucleotide
ttatatggagctaatcgcaattgggagggg

SEQ ID NO: 132573 - DNA, 30 bp, Artificial Sequence
  Synthetic oligonucleotide
cgccatcttaaatcactgacacggtagggg

SEQ ID NO: 132574 - DNA, 30 bp, Artificial Sequence
  Synthetic oligonucleotide
cgcaggttcactgactgtgaggtgtagggg

SEQ ID NO: 132575 - DNA, 30 bp, Artificial Sequence
  Synthetic oligonucleotide
aaaggccggttagcgtgactgcacacgggg

SEQ ID NO: 132576 - DNA, 30 bp, Artificial Sequence
  Synthetic oligonucleotide
ataagacatgcgacggtcctaacgacgggg

SEQ ID NO: 132577 - DNA, 30 bp, Artificial Sequence
  Synthetic oligonucleotide
ctcgatccgtctaggcaatgggggacgggg

SEQ ID NO: 132578 - DNA, 30 bp, Artificial Sequence
  Synthetic oligonucleotide
ctaaggggagcacacgtatgtgccccgggg

SEQ ID NO: 132579 - DNA, 30 bp, Artificial Sequence
  Synthetic oligonucleotide
attgagggtgtaacattgtgtcggccgggg

SEQ ID NO: 132580 - DNA, 30 bp, Artificial Sequence
  Synthetic oligonucleotide
caatgcctcgccaggcgccaagggccgggg

SEQ ID NO: 132581 - DNA, 30 bp, Artificial Sequence
  Synthetic oligonucleotide
gctacacagcatacacgatcgttgccgggg

SEQ ID NO: 132582 - DNA, 30 bp, Artificial Sequence
  Synthetic oligonucleotide
tgaggatgttggcatacttatgatccgggg

SEQ ID NO: 132583 - DNA, 30 bp, Artificial Sequence
  Synthetic oligonucleotide
gtgagaaacaagttataggccaccgcgggg

SEQ ID NO: 132584 - DNA, 30 bp, Artificial Sequence
  Synthetic oligonucleotide
gtagagtgtccaggtatttgaaatgcgggg

SEQ ID NO: 132585 - DNA, 30 bp, Artificial Sequence
  Synthetic oligonucleotide
agattataagagtccgtgttacctgcgggg

SEQ ID NO: 132586 - DNA, 30 bp, Artificial Sequence
  Synthetic oligonucleotide
tattacgtaaatagccacaacgtatcgggg

SEQ ID NO: 132587 - DNA, 30 bp, Artificial Sequence
  Synthetic oligonucleotide
atcgaggggatactacagtgaggctcgggg

SEQ ID NO: 132588 - DNA, 30 bp, Artificial Sequence
  Synthetic oligonucleotide
ttgggggtagcaacttcagtgcagtcgggg

SEQ ID NO: 132589 - DNA, 30 bp, Artificial Sequence
  Synthetic oligonucleotide
ttagtgaacagtgttataagtgagtcgggg

SEQ ID NO: 132590 - DNA, 30 bp, Artificial Sequence
  Synthetic oligonucleotide
gatgcccaatgagactcacgttagtcgggg

SEQ ID NO: 132591 - DNA, 30 bp, Artificial Sequence
  Synthetic oligonucleotide
ccgattggcttgtcggagatttcgtcgggg

SEQ ID NO: 132592 - DNA, 30 bp, Artificial Sequence
  Synthetic oligonucleotide
tcatttcagtctgggggtgttaattcgggg

SEQ ID NO: 132593 - DNA, 30 bp, Artificial Sequence
  Synthetic oligonucleotide
ctcaaaaccggaccccaccgtgtttcgggg

SEQ ID NO: 132594 - DNA, 30 bp, Artificial Sequence
  Synthetic oligonucleotide
ctgagagaatttgttgataacgtaaggggg

SEQ ID NO: 132595 - DNA, 30 bp, Artificial Sequence
  Synthetic oligonucleotide
tactccgtcatattactcaaacagaggggg

SEQ ID NO: 132596 - DNA, 30 bp, Artificial Sequence
  Synthetic oligonucleotide
tgatcaactcctcctggtgaagcgaggggg

SEQ ID NO: 132597 - DNA, 30 bp, Artificial Sequence
  Synthetic oligonucleotide
tgttaagcacggtggtaatgagcacggggg

SEQ ID NO: 132598 - DNA, 30 bp, Artificial Sequence
  Synthetic oligonucleotide
aagagtgggagtcaaggggtctaccggggg

SEQ ID NO: 132599 - DNA, 30 bp, Artificial Sequence
  Synthetic oligonucleotide
tctggcagaatttactgtgtgggctggggg

SEQ ID NO: 132600 - DNA, 30 bp, Artificial Sequence
  Synthetic oligonucleotide
atgaaaaataataagggacctaggtggggg

SEQ ID NO: 132601 - DNA, 30 bp, Artificial Sequence
  Synthetic oligonucleotide
agtggctcgttgttgtgcggaatgtggggg

SEQ ID NO: 132602 - DNA, 30 bp, Artificial Sequence
  Synthetic oligonucleotide
tctcgtcgggaatggccctactaaatgggg

SEQ ID NO: 132603 - DNA, 30 bp, Artificial Sequence
  Synthetic oligonucleotide
tctggccagatgcactgtcatgacatgggg

SEQ ID NO: 132604 - DNA, 30 bp, Artificial Sequence
  Synthetic oligonucleotide
atgaggatccagacttggcactgcatgggg

SEQ ID NO: 132605 - DNA, 30 bp, Artificial Sequence
  Synthetic oligonucleotide
tggtaaaatgttcgcgagagcactatgggg

SEQ ID NO: 132606 - DNA, 30 bp, Artificial Sequence
  Synthetic oligonucleotide
gatgacagttcgaataaacacactctgggg

SEQ ID NO: 132607 - DNA, 30 bp, Artificial Sequence
  Synthetic oligonucleotide
ctcgaaagctgtggtgtagatccattgggg

SEQ ID NO: 132608 - DNA, 30 bp, Artificial Sequence
  Synthetic oligonucleotide
gctaagccgccgagcagagagttattgggg

SEQ ID NO: 132609 - DNA, 30 bp, Artificial Sequence
  Synthetic oligonucleotide
gcacagcgtctagggttagtgttattgggg

SEQ ID NO: 132610 - DNA, 30 bp, Artificial Sequence
  Synthetic oligonucleotide
ggcttgtgctgtgatagggtcgtgttgggg

SEQ ID NO: 132611 - DNA, 30 bp, Artificial Sequence
  Synthetic oligonucleotide
gcaagattggagaacagaaactatttgggg

SEQ ID NO: 132612 - DNA, 30 bp, Artificial Sequence
  Synthetic oligonucleotide
ggggattgactaagcggcaatgcaaatggg

SEQ ID NO: 132613 - DNA, 31 bp, Artificial Sequence
  Synthetic oligonucleotide
gaggcccggcccaccattaccctcaaatggg

SEQ ID NO: 132614 - DNA, 30 bp, Artificial Sequence
  Synthetic oligonucleotide
cattgtccttgttcgcccgtgtgaaatggg

SEQ ID NO: 132615 - DNA, 30 bp, Artificial Sequence
  Synthetic oligonucleotide
ggggtcgcacgaccttaatctttaaatggg

SEQ ID NO: 132616 - DNA, 30 bp, Artificial Sequence
  Synthetic oligonucleotide
ccaactgtcacctactattccaataatggg

SEQ ID NO: 132617 - DNA, 30 bp, Artificial Sequence
  Synthetic oligonucleotide
tcggctcaagttccgatacgcatgcatggg

SEQ ID NO: 132618 - DNA, 30 bp, Artificial Sequence
  Synthetic oligonucleotide
gccgcgacgtccgcggagagtgcagatggg

SEQ ID NO: 132619 - DNA, 30 bp, Artificial Sequence
  Synthetic oligonucleotide
gtgtcggcataggataacaggggagatggg

SEQ ID NO: 132620 - DNA, 30 bp, Artificial Sequence
  Synthetic oligonucleotide
gctatatttcagatgcaactaaatgatggg

SEQ ID NO: 132621 - DNA, 30 bp, Artificial Sequence
  Synthetic oligonucleotide
tcactgttattttactggctcaagtatggg

SEQ ID NO: 132622 - DNA, 30 bp, Artificial Sequence
  Synthetic oligonucleotide
gaggacagaatgtgtgttcgttcgtatggg

SEQ ID NO: 132623 - DNA, 30 bp, Artificial Sequence
  Synthetic oligonucleotide
attgttcggtaaggcgtaataagttatggg

SEQ ID NO: 132624 - DNA, 30 bp, Artificial Sequence
  Synthetic oligonucleotide
atctgcgagtcccggaacccaagcactggg

SEQ ID NO: 132625 - DNA, 30 bp, Artificial Sequence
  Synthetic oligonucleotide
tctcgttcccagaagcttaagttcactggg

SEQ ID NO: 132626 - DNA, 30 bp, Artificial Sequence
  Synthetic oligonucleotide
agagaccgggctgagggattggagactggg

SEQ ID NO: 132627 - DNA, 30 bp, Artificial Sequence
  Synthetic oligonucleotide
tatgtatataggggcctacaatgacctggg

SEQ ID NO: 132628 - DNA, 30 bp, Artificial Sequence
  Synthetic oligonucleotide
ctgatagcgtgcgcatttcaatcagctggg

SEQ ID NO: 132629 - DNA, 30 bp, Artificial Sequence
  Synthetic oligonucleotide
gcgattacaaggtccgggattgaggctggg

SEQ ID NO: 132630 - DNA, 30 bp, Artificial Sequence
  Synthetic oligonucleotide
gcgctgggctgctcgcgaatggctgctggg

SEQ ID NO: 132631 - DNA, 30 bp, Artificial Sequence
  Synthetic oligonucleotide
ggactaggatttacccgctattgtgctggg

SEQ ID NO: 132632 - DNA, 30 bp, Artificial Sequence
  Synthetic oligonucleotide
gaagtagtcgaaggttaaaatttatctggg

SEQ ID NO: 132633 - DNA, 30 bp, Artificial Sequence
  Synthetic oligonucleotide
tactagtaagagcatcgaggcacctctggg

SEQ ID NO: 132634 - DNA, 30 bp, Artificial Sequence
  Synthetic oligonucleotide
attacaatgctgagaggaagcaagtctggg

SEQ ID NO: 132635 - DNA, 30 bp, Artificial Sequence
  Synthetic oligonucleotide
taacccgaaaagaagtggtgcataagtggg

SEQ ID NO: 132636 - DNA, 30 bp, Artificial Sequence
  Synthetic oligonucleotide
ccatggcgtttcataaagtcggccagtggg

SEQ ID NO: 132637 - DNA, 30 bp, Artificial Sequence
  Synthetic oligonucleotide
ctaatggaaccgacaatatgtagtagtggg

SEQ ID NO: 132638 - DNA, 30 bp, Artificial Sequence
  Synthetic oligonucleotide
gcggagggggagggggaggagaggcgtggg

SEQ ID NO: 132639 - DNA, 30 bp, Artificial Sequence
  Synthetic oligonucleotide
gtggtatgaaagttgtggtcattgcgtggg

SEQ ID NO: 132640 - DNA, 30 bp, Artificial Sequence
  Synthetic oligonucleotide
cgtgctatatcggtagatacctatcgtggg

SEQ ID NO: 132641 - DNA, 30 bp, Artificial Sequence
  Synthetic oligonucleotide
cgacgcgttataagggttcatgtaggtggg

SEQ ID NO: 132642 - DNA, 30 bp, Artificial Sequence
  Synthetic oligonucleotide
cgctcgtcaatagggtatgtaatatgtggg

SEQ ID NO: 132643 - DNA, 30 bp, Artificial Sequence
  Synthetic oligonucleotide
ctccgaccgagccatacgggtaactgtggg

SEQ ID NO: 132644 - DNA, 30 bp, Artificial Sequence
  Synthetic oligonucleotide
gaacaagagactcgtcaacgccgctgtggg

SEQ ID NO: 132645 - DNA, 30 bp, Artificial Sequence
  Synthetic oligonucleotide
cgatacttagtacaaaggtggttctgtggg

SEQ ID NO: 132646 - DNA, 30 bp, Artificial Sequence
  Synthetic oligonucleotide
ccacgggctgtaactggaatatattgtggg

SEQ ID NO: 132647 - DNA, 30 bp, Artificial Sequence
  Synthetic oligonucleotide
gggcgtatgaatctaacggaatacattggg

SEQ ID NO: 132648 - DNA, 30 bp, Artificial Sequence
  Synthetic oligonucleotide
gtaggtgctatgggagtctgcaggattggg

SEQ ID NO: 132649 - DNA, 30 bp, Artificial Sequence
  Synthetic oligonucleotide
aaacggtcgtttccacgttatatgattggg

SEQ ID NO: 132650 - DNA, 30 bp, Artificial Sequence
  Synthetic oligonucleotide
tcaacggacacattaagtgtttagcttggg

SEQ ID NO: 132651 - DNA, 30 bp, Artificial Sequence
  Synthetic oligonucleotide
gcgaaccggttggtgtaagctgggcttggg

SEQ ID NO: 132652 - DNA, 30 bp, Artificial Sequence
  Synthetic oligonucleotide
gaaggcgtaggtacttcccgtcgtcttggg

SEQ ID NO: 132653 - DNA, 30 bp, Artificial Sequence
  Synthetic oligonucleotide
ttggagcctcgctaaccgtaatacgttggg

SEQ ID NO: 132654 - DNA, 30 bp, Artificial Sequence
  Synthetic oligonucleotide
ttgtacgataacaggagcctctgctttggg

SEQ ID NO: 132655 - DNA, 30 bp, Artificial Sequence
  Synthetic oligonucleotide
tcgttgactcgacgatgagacgggtttggg

SEQ ID NO: 132656 - DNA, 30 bp, Artificial Sequence
  Synthetic oligonucleotide
actcagcatcacgacctaggctattttggg

SEQ ID NO: 132657 - DNA, 30 bp, Artificial Sequence
  Synthetic oligonucleotide
cgcaaacggtaatagaccagctaaaaatgg

SEQ ID NO: 132658 - DNA, 30 bp, Artificial Sequence
  Synthetic oligonucleotide
acgaattaagaatgatgggaatcaaaatgg

SEQ ID NO: 132659 - DNA, 30 bp, Artificial Sequence
  Synthetic oligonucleotide
gtagggttagtctagacgtcctgaaaatgg

SEQ ID NO: 132660 - DNA, 30 bp, Artificial Sequence
  Synthetic oligonucleotide
gtcacccaattttaccactacataaaatgg

SEQ ID NO: 132661 - DNA, 30 bp, Artificial Sequence
  Synthetic oligonucleotide
ggattgctacgggtgatacgattaaaatgg

SEQ ID NO: 132662 - DNA, 30 bp, Artificial Sequence
  Synthetic oligonucleotide
taaagcctcacatttacaaacaagaaatgg

SEQ ID NO: 132663 - DNA, 30 bp, Artificial Sequence
  Synthetic oligonucleotide
cacctcttcttaatacaaggtcagaaatgg

SEQ ID NO: 132664 - DNA, 30 bp, Artificial Sequence
  Synthetic oligonucleotide
cgacaccaaaaaattgttgaagagaaatgg

SEQ ID NO: 132665 - DNA, 30 bp, Artificial Sequence
  Synthetic oligonucleotide
tacatgaaaaagcttctcaactggaaatgg

SEQ ID NO: 132666 - DNA, 30 bp, Artificial Sequence
  Synthetic oligonucleotide
aaaataacaacgtggtaacgaggtaaatgg

SEQ ID NO: 132667 - DNA, 30 bp, Artificial Sequence
  Synthetic oligonucleotide
gggacggtaaatactcaacgatcacaatgg

SEQ ID NO: 132668 - DNA, 30 bp, Artificial Sequence
  Synthetic oligonucleotide
ctggtttaatcgaagtcccgggtgcaatgg

SEQ ID NO: 132669 - DNA, 30 bp, Artificial Sequence
  Synthetic oligonucleotide
tgggtagtggcgggcagagtcggcgaatgg

SEQ ID NO: 132670 - DNA, 30 bp, Artificial Sequence
  Synthetic oligonucleotide
ggcaaagccgggcggtttgcgaaggaatgg

SEQ ID NO: 132671 - DNA, 30 bp, Artificial Sequence
  Synthetic oligonucleotide
tagcgcatggcaaaagcctcggaggaatgg

SEQ ID NO: 132672 - DNA, 30 bp, Artificial Sequence
  Synthetic oligonucleotide
tgcggccgaccgaggaacgaatgtgaatgg

SEQ ID NO: 132673 - DNA, 30 bp, Artificial Sequence
  Synthetic oligonucleotide
gaaacagggtgcggaaagaggtaataatgg

SEQ ID NO: 132674 - DNA, 30 bp, Artificial Sequence
  Synthetic oligonucleotide
ctggtacagcgaatgggtatcgtataatgg

SEQ ID NO: 132675 - DNA, 30 bp, Artificial Sequence
  Synthetic oligonucleotide
ccaaatgaggagagaggggtgccttaatgg

SEQ ID NO: 132676 - DNA, 30 bp, Artificial Sequence
  Synthetic oligonucleotide
agatggaacggcggagacggatcaacatgg

SEQ ID NO: 132677 - DNA, 30 bp, Artificial Sequence
  Synthetic oligonucleotide
ggatagcggggtgtcccccgaagaacatgg

SEQ ID NO: 132678 - DNA, 30 bp, Artificial Sequence
  Synthetic oligonucleotide
tcgggatcgacggttcattgaaacacatgg

SEQ ID NO: 132679 - DNA, 30 bp, Artificial Sequence
  Synthetic oligonucleotide
gatatcaacgttttaggaaagaccacatgg

SEQ ID NO: 132680 - DNA, 30 bp, Artificial Sequence
  Synthetic oligonucleotide
tgtccgtccgtctaatattagtgcacatgg

SEQ ID NO: 132681 - DNA, 30 bp, Artificial Sequence
  Synthetic oligonucleotide
cctagggagtgatgacacgcatctacatgg

SEQ ID NO: 132682 - DNA, 30 bp, Artificial Sequence
  Synthetic oligonucleotide
cactccaggcagactgtaaggaaaccatgg

SEQ ID NO: 132683 - DNA, 30 bp, Artificial Sequence
  Synthetic oligonucleotide
cagctcgaagattaaggtaaggcaccatgg

SEQ ID NO: 132684 - DNA, 30 bp, Artificial Sequence
  Synthetic oligonucleotide
ggtaacataggcggcccagcttgaccatgg

SEQ ID NO: 132685 - DNA, 30 bp, Artificial Sequence
  Synthetic oligonucleotide
ttacttagtccactctcgtcaattgcatgg

SEQ ID NO: 132686 - DNA, 30 bp, Artificial Sequence
  Synthetic oligonucleotide
ccaggacaaaggatatcaggctttgcatgg

SEQ ID NO: 132687 - DNA, 30 bp, Artificial Sequence
  Synthetic oligonucleotide
aagtctaacgtacagtgaactccatcatgg

SEQ ID NO: 132688 - DNA, 30 bp, Artificial Sequence
  Synthetic oligonucleotide
gcaagaggctgaagtcagtttgtatcatgg

SEQ ID NO: 132689 - DNA, 30 bp, Artificial Sequence
  Synthetic oligonucleotide
aacaacgccggcagacccgaaaacagatgg

SEQ ID NO: 132690 - DNA, 30 bp, Artificial Sequence
  Synthetic oligonucleotide
cagtcagtcacagctgtctaccacagatgg

SEQ ID NO: 132691 - DNA, 30 bp, Artificial Sequence
  Synthetic oligonucleotide
gaatgtccaatcaactggctagacagatgg

SEQ ID NO: 132692 - DNA, 30 bp, Artificial Sequence
  Synthetic oligonucleotide
cgtatgagatttagtgtccgaagcagatgg

SEQ ID NO: 132693 - DNA, 30 bp, Artificial Sequence
  Synthetic oligonucleotide
ctgggctgtaacgcactatggaagagatgg

SEQ ID NO: 132694 - DNA, 30 bp, Artificial Sequence
  Synthetic oligonucleotide
gttacactaagaaaatcgtctaaacgatgg

SEQ ID NO: 132695 - DNA, 30 bp, Artificial Sequence
  Synthetic oligonucleotide
gttcttactagacataaaaaggcaggatgg

SEQ ID NO: 132696 - DNA, 30 bp, Artificial Sequence
  Synthetic oligonucleotide
ttgctcgactcgtaactggggtacggatgg

SEQ ID NO: 132697 - DNA, 30 bp, Artificial Sequence
  Synthetic oligonucleotide
ccggacatctgaaactgccagatgggatgg

SEQ ID NO: 132698 - DNA, 30 bp, Artificial Sequence
  Synthetic oligonucleotide
tgatatgagcatgacgactacattggatgg

SEQ ID NO: 132699 - DNA, 30 bp, Artificial Sequence
  Synthetic oligonucleotide
aatcaaagatgagaggtcttaaaatgatgg

SEQ ID NO: 132700 - DNA, 30 bp, Artificial Sequence
  Synthetic oligonucleotide
cgaatggtttgaacctacctccaatgatgg

SEQ ID NO: 132701 - DNA, 30 bp, Artificial Sequence
  Synthetic oligonucleotide
cctgccataccactggatctgcgatgatgg

SEQ ID NO: 132702 - DNA, 30 bp, Artificial Sequence
  Synthetic oligonucleotide
gcgctgatcatacatgcccgtgggtgatgg

SEQ ID NO: 132703 - DNA, 30 bp, Artificial Sequence
  Synthetic oligonucleotide
atctccactgaaccagagctgtcaatatgg

SEQ ID NO: 132704 - DNA, 30 bp, Artificial Sequence
  Synthetic oligonucleotide
taccgcagctataaagggaacggaatatgg

SEQ ID NO: 132705 - DNA, 30 bp, Artificial Sequence
  Synthetic oligonucleotide
ataacgttgagaatggcattgaacatatgg

SEQ ID NO: 132706 - DNA, 30 bp, Artificial Sequence
  Synthetic oligonucleotide
tacgtttgagttgttgtgggtcacatatgg

SEQ ID NO: 132707 - DNA, 30 bp, Artificial Sequence
  Synthetic oligonucleotide
attggcaaaccagaatcagggttcatatgg

SEQ ID NO: 132708 - DNA, 30 bp, Artificial Sequence
  Synthetic oligonucleotide
ggccaaacaatggcgcacacggatatatgg

SEQ ID NO: 132709 - DNA, 30 bp, Artificial Sequence
  Synthetic oligonucleotide
ggtagggatatacatatgtccagtatatgg

SEQ ID NO: 132710 - DNA, 30 bp, Artificial Sequence
  Synthetic oligonucleotide
gcgtggtgattacgttgcaagtgtatatgg

SEQ ID NO: 132711 - DNA, 30 bp, Artificial Sequence
  Synthetic oligonucleotide
acgaacgcacaggcagtgtatgtactatgg

SEQ ID NO: 132712 - DNA, 30 bp, Artificial Sequence
  Synthetic oligonucleotide
cgctatcgatgttaagcttgccctctatgg

SEQ ID NO: 132713 - DNA, 30 bp, Artificial Sequence
  Synthetic oligonucleotide
cttgtttgaagtatagtgagaacagtatgg

SEQ ID NO: 132714 - DNA, 30 bp, Artificial Sequence
  Synthetic oligonucleotide
gtagggcgaaaaagcatagggtttgtatgg

SEQ ID NO: 132715 - DNA, 30 bp, Artificial Sequence
  Synthetic oligonucleotide
agtcgtaaggatgagactagtaaattatgg

SEQ ID NO: 132716 - DNA, 30 bp, Artificial Sequence
  Synthetic oligonucleotide
gggtcgacgacgaagaattcgcggttatgg

SEQ ID NO: 132717 - DNA, 30 bp, Artificial Sequence
  Synthetic oligonucleotide
taaagggactacaaccgccttgctttatgg

SEQ ID NO: 132718 - DNA, 30 bp, Artificial Sequence
  Synthetic oligonucleotide
aggcgtccgcctaatatggacagtttatgg

SEQ ID NO: 132719 - DNA, 30 bp, Artificial Sequence
  Synthetic oligonucleotide
taagtataggtgagcttagtttaaaactgg

SEQ ID NO: 132720 - DNA, 30 bp, Artificial Sequence
  Synthetic oligonucleotide
tatgtcctgcggtatcataactcgaactgg

SEQ ID NO: 132721 - DNA, 30 bp, Artificial Sequence
  Synthetic oligonucleotide
tatagtcaaaatgtagctcagctacactgg

SEQ ID NO: 132722 - DNA, 30 bp, Artificial Sequence
  Synthetic oligonucleotide
cgttcgacatgtttcttcccggtagactgg

SEQ ID NO: 132723 - DNA, 30 bp, Artificial Sequence
  Synthetic oligonucleotide
ttattcaagactgtatcctgaaacgactgg

SEQ ID NO: 132724 - DNA, 30 bp, Artificial Sequence
  Synthetic oligonucleotide
actcataacaactacacatgaatcgactgg

SEQ ID NO: 132725 - DNA, 30 bp, Artificial Sequence
  Synthetic oligonucleotide
ttcatcgtggatcatagtagcagatactgg

SEQ ID NO: 132726 - DNA, 30 bp, Artificial Sequence
  Synthetic oligonucleotide
caggtgccaagttacttctagcgatactgg

SEQ ID NO: 132727 - DNA, 30 bp, Artificial Sequence
  Synthetic oligonucleotide
cttcaaaaggagacaaagtcaacgacctgg

SEQ ID NO: 132728 - DNA, 30 bp, Artificial Sequence
  Synthetic oligonucleotide
tttcgaggaatggaattcgctgtgccctgg

SEQ ID NO: 132729 - DNA, 30 bp, Artificial Sequence
  Synthetic oligonucleotide
cggctagaaaaagtagtggtacaagcctgg

SEQ ID NO: 132730 - DNA, 30 bp, Artificial Sequence
  Synthetic oligonucleotide
ctacgaaatcacgcgcaaagggacgcctgg

SEQ ID NO: 132731 - DNA, 30 bp, Artificial Sequence
  Synthetic oligonucleotide
ccggtatgtttggggattggcaccgcctgg

SEQ ID NO: 132732 - DNA, 30 bp, Artificial Sequence
  Synthetic oligonucleotide
accgtcgcagtggcgcacaaagatgcctgg

SEQ ID NO: 132733 - DNA, 30 bp, Artificial Sequence
  Synthetic oligonucleotide
acatggccaacggcaggtgttcactcctgg

SEQ ID NO: 132734 - DNA, 30 bp, Artificial Sequence
  Synthetic oligonucleotide
tgtgtgaagagtcacatgaagccgtcctgg

SEQ ID NO: 132735 - DNA, 30 bp, Artificial Sequence
  Synthetic oligonucleotide
gaccgcgcagtgttcgcttcactttcctgg

SEQ ID NO: 132736 - DNA, 30 bp, Artificial Sequence
  Synthetic oligonucleotide
cgtttatgcggcccgtaagcataaagctgg

SEQ ID NO: 132737 - DNA, 30 bp, Artificial Sequence
  Synthetic oligonucleotide
tggtgcgccaggataaagcctctaagctgg

SEQ ID NO: 132738 - DNA, 30 bp, Artificial Sequence
  Synthetic oligonucleotide
atcataacaggttatactaaatttagctgg

SEQ ID NO: 132739 - DNA, 30 bp, Artificial Sequence
  Synthetic oligonucleotide
ccgcctacaataaaatatggggaccgctgg

SEQ ID NO: 132740 - DNA, 30 bp, Artificial Sequence
  Synthetic oligonucleotide
cgatcgagtattgggtcttttagccgctgg

SEQ ID NO: 132741 - DNA, 30 bp, Artificial Sequence
  Synthetic oligonucleotide
tggggatatttcgatttagggaggcgctgg

SEQ ID NO: 132742 - DNA, 30 bp, Artificial Sequence
  Synthetic oligonucleotide
tagaggggggatcattcttagcgtcgctgg

SEQ ID NO: 132743 - DNA, 29 bp, Artificial Sequence
  Synthetic oligonucleotide
agggccaacacagacgacgctacggctgg

SEQ ID NO: 132744 - DNA, 30 bp, Artificial Sequence
  Synthetic oligonucleotide
tagtgggtgtacatcttgataggcggctgg

SEQ ID NO: 132745 - DNA, 30 bp, Artificial Sequence
  Synthetic oligonucleotide
agatgatgtggtcgagttggccatggctgg

SEQ ID NO: 132746 - DNA, 30 bp, Artificial Sequence
  Synthetic oligonucleotide
ttactgagcaagtgcaaggatctttgctgg

SEQ ID NO: 132747 - DNA, 30 bp, Artificial Sequence
  Synthetic oligonucleotide
acaggctggagtagatctcagggaatctgg

SEQ ID NO: 132748 - DNA, 30 bp, Artificial Sequence
  Synthetic oligonucleotide
catgtgttagtagggatagaggctatctgg

SEQ ID NO: 132749 - DNA, 30 bp, Artificial Sequence
  Synthetic oligonucleotide
gtagcctgcccaggagctcactgtatctgg

SEQ ID NO: 132750 - DNA, 30 bp, Artificial Sequence
  Synthetic oligonucleotide
ctatcatagcgaggtcatgaggtgctctgg

SEQ ID NO: 132751 - DNA, 30 bp, Artificial Sequence
  Synthetic oligonucleotide
atggtggagctaaccttaatacccgtctgg

SEQ ID NO: 132752 - DNA, 30 bp, Artificial Sequence
  Synthetic oligonucleotide
ggctgcggtcgggaagctaaatgcgtctgg

SEQ ID NO: 132753 - DNA, 30 bp, Artificial Sequence
  Synthetic oligonucleotide
tccgagactgctaaagtatttcgattctgg

SEQ ID NO: 132754 - DNA, 30 bp, Artificial Sequence
  Synthetic oligonucleotide
ctcggaaatagacgggtgtgaccgttctgg

SEQ ID NO: 132755 - DNA, 30 bp, Artificial Sequence
  Synthetic oligonucleotide
acatcaagaaagggctctcatccaaagtgg

SEQ ID NO: 132756 - DNA, 30 bp, Artificial Sequence
  Synthetic oligonucleotide
tcatggggtaatcaagtgcacggaaagtgg

SEQ ID NO: 132757 - DNA, 30 bp, Artificial Sequence
  Synthetic oligonucleotide
ggggtcgaagggtattggagtgccaagtgg

SEQ ID NO: 132758 - DNA, 30 bp, Artificial Sequence
  Synthetic oligonucleotide
aagcgaaattacctgttctaggtcaagtgg

SEQ ID NO: 132759 - DNA, 30 bp, Artificial Sequence
  Synthetic oligonucleotide
tcgcactatttaaccggtgcagagaagtgg

SEQ ID NO: 132760 - DNA, 30 bp, Artificial Sequence
  Synthetic oligonucleotide
cgattgttacgctcgggtggggtgaagtgg

SEQ ID NO: 132761 - DNA, 30 bp, Artificial Sequence
  Synthetic oligonucleotide
aggttatcaggccttgcgacctttaagtgg

SEQ ID NO: 132762 - DNA, 30 bp, Artificial Sequence
  Synthetic oligonucleotide
gtgattcagcatttgcccttgcaacagtgg

SEQ ID NO: 132763 - DNA, 30 bp, Artificial Sequence
  Synthetic oligonucleotide
tatgagtaccggctcgggatggaacagtgg

SEQ ID NO: 132764 - DNA, 30 bp, Artificial Sequence
  Synthetic oligonucleotide
ggccagcaatgcagggacggtgcagagtgg

SEQ ID NO: 132765 - DNA, 30 bp, Artificial Sequence
  Synthetic oligonucleotide
catatcagttagttgcttgctggagagtgg

SEQ ID NO: 132766 - DNA, 30 bp, Artificial Sequence
  Synthetic oligonucleotide
agtccagagacccacgagcattgagagtgg

SEQ ID NO: 132767 - DNA, 30 bp, Artificial Sequence
  Synthetic oligonucleotide
cctcgtagtagcattaatagcgcatagtgg

SEQ ID NO: 132768 - DNA, 30 bp, Artificial Sequence
  Synthetic oligonucleotide
ttaccactgcgaacaatatgatgatagtgg

SEQ ID NO: 132769 - DNA, 30 bp, Artificial Sequence
  Synthetic oligonucleotide
atggactacgcaaccgagtctcgctagtgg

SEQ ID NO: 132770 - DNA, 30 bp, Artificial Sequence
  Synthetic oligonucleotide
aggatgagaaattcaatcagtttttagtgg

SEQ ID NO: 132771 - DNA, 30 bp, Artificial Sequence
  Synthetic oligonucleotide
ttagtggattgggaaggtcgtccaacgtgg

SEQ ID NO: 132772 - DNA, 30 bp, Artificial Sequence
  Synthetic oligonucleotide
agggccctgtggaaggcaagaatcacgtgg

SEQ ID NO: 132773 - DNA, 30 bp, Artificial Sequence
  Synthetic oligonucleotide
tcacaagtacatagtgtgctgctcacgtgg

SEQ ID NO: 132774 - DNA, 30 bp, Artificial Sequence
  Synthetic oligonucleotide
gatcgtgattaatgcgaacgggagacgtgg

SEQ ID NO: 132775 - DNA, 30 bp, Artificial Sequence
  Synthetic oligonucleotide
tagcaggggtaaattccgtgcactacgtgg

SEQ ID NO: 132776 - DNA, 30 bp, Artificial Sequence
  Synthetic oligonucleotide
cgtgcagtgtgacaaatagttagaccgtgg

SEQ ID NO: 132777 - DNA, 30 bp, Artificial Sequence
  Synthetic oligonucleotide
acgcgtccatcggaatataaaggcccgtgg

SEQ ID NO: 132778 - DNA, 30 bp, Artificial Sequence
  Synthetic oligonucleotide
cgtgccaacacctccttttccctcccgtgg

SEQ ID NO: 132779 - DNA, 29 bp, Artificial Sequence
  Synthetic oligonucleotide
gggtgctatagcagcaataaaccgcgtgg

SEQ ID NO: 132780 - DNA, 30 bp, Artificial Sequence
  Synthetic oligonucleotide
tcaggcgatgcgttaagcaagagtgcgtgg

SEQ ID NO: 132781 - DNA, 30 bp, Artificial Sequence
  Synthetic oligonucleotide
gtcgcccatctggtattgggacttgcgtgg

SEQ ID NO: 132782 - DNA, 30 bp, Artificial Sequence
  Synthetic oligonucleotide
tcgtcgagctagttctcgagaaactcgtgg

SEQ ID NO: 132783 - DNA, 30 bp, Artificial Sequence
  Synthetic oligonucleotide
accaagcagccggataacgccacctcgtgg

SEQ ID NO: 132784 - DNA, 30 bp, Artificial Sequence
  Synthetic oligonucleotide
ggcgggatatcactttatgagatctcgtgg

SEQ ID NO: 132785 - DNA, 30 bp, Artificial Sequence
  Synthetic oligonucleotide
atataagaaccagtctttcgttcgtcgtgg

SEQ ID NO: 132786 - DNA, 30 bp, Artificial Sequence
  Synthetic oligonucleotide
gaagatgtgccagtaccgccgaataggtgg

SEQ ID NO: 132787 - DNA, 30 bp, Artificial Sequence
  Synthetic oligonucleotide
acgcatatagattgaaccagaccacggtgg

SEQ ID NO: 132788 - DNA, 30 bp, Artificial Sequence
  Synthetic oligonucleotide
tgcgttcacttgaggaaatcaacagggtgg

SEQ ID NO: 132789 - DNA, 30 bp, Artificial Sequence
  Synthetic oligonucleotide
aaccttagcacgtaaggccccatggggtgg

SEQ ID NO: 132790 - DNA, 30 bp, Artificial Sequence
  Synthetic oligonucleotide
agtacattgtaacgtatctgtaaatggtgg

SEQ ID NO: 132791 - DNA, 30 bp, Artificial Sequence
  Synthetic oligonucleotide
tcgggtgggcaactgggaagtacctggtgg

SEQ ID NO: 132792 - DNA, 30 bp, Artificial Sequence
  Synthetic oligonucleotide
tgatgtggggggtcccaaggtgggtggtgg

SEQ ID NO: 132793 - DNA, 30 bp, Artificial Sequence
  Synthetic oligonucleotide
attgatggcgacgggcgtaccctaatgtgg

SEQ ID NO: 132794 - DNA, 31 bp, Artificial Sequence
  Synthetic oligonucleotide
aaattagagcgttactcaataactgatgtgg

SEQ ID NO: 132795 - DNA, 30 bp, Artificial Sequence
  Synthetic oligonucleotide
tgttgaggccatatataggaacatatgtgg

SEQ ID NO: 132796 - DNA, 30 bp, Artificial Sequence
  Synthetic oligonucleotide
cgatttggtacgataagggatcatatgtgg

SEQ ID NO: 132797 - DNA, 30 bp, Artificial Sequence
  Synthetic oligonucleotide
ctgctcctattattggtggaacaactgtgg

SEQ ID NO: 132798 - DNA, 30 bp, Artificial Sequence
  Synthetic oligonucleotide
catgcgttcattatcatagacaacctgtgg

SEQ ID NO: 132799 - DNA, 30 bp, Artificial Sequence
  Synthetic oligonucleotide
gaacttacatggttacagagctatctgtgg

SEQ ID NO: 132800 - DNA, 30 bp, Artificial Sequence
  Synthetic oligonucleotide
ttgcagggtgggagtatgtgggtggtgtgg

SEQ ID NO: 132801 - DNA, 30 bp, Artificial Sequence
  Synthetic oligonucleotide
tctattaacgggctcgtcgacgatgtgtgg

SEQ ID NO: 132802 - DNA, 30 bp, Artificial Sequence
  Synthetic oligonucleotide
cctaattcttaaacaactgtgcttgtgtgg

SEQ ID NO: 132803 - DNA, 30 bp, Artificial Sequence
  Synthetic oligonucleotide
tctctaggccgtgtggtagttagattgtgg

SEQ ID NO: 132804 - DNA, 30 bp, Artificial Sequence
  Synthetic oligonucleotide
aacgacgttaggtggcgaactcgattgtgg

SEQ ID NO: 132805 - DNA, 30 bp, Artificial Sequence
  Synthetic oligonucleotide
aacagttatctgagaagaggtggtttgtgg

SEQ ID NO: 132806 - DNA, 30 bp, Artificial Sequence
  Synthetic oligonucleotide
ccgcgatgatcatacagacgcaaaaattgg

SEQ ID NO: 132807 - DNA, 30 bp, Artificial Sequence
  Synthetic oligonucleotide
gtatgccgcacaaccgagaaggaaaattgg

SEQ ID NO: 132808 - DNA, 30 bp, Artificial Sequence
  Synthetic oligonucleotide
gaacaggcacagagataaggtccaaattgg

SEQ ID NO: 132809 - DNA, 30 bp, Artificial Sequence
  Synthetic oligonucleotide
tacacttgctttaacctgggcgtaaattgg

SEQ ID NO: 132810 - DNA, 30 bp, Artificial Sequence
  Synthetic oligonucleotide
cgacaatcccccgcactgcaattaaattgg

SEQ ID NO: 132811 - DNA, 30 bp, Artificial Sequence
  Synthetic oligonucleotide
taagggctggcatcaaaatactgcaattgg

SEQ ID NO: 132812 - DNA, 30 bp, Artificial Sequence
  Synthetic oligonucleotide
ggttaaatccaactaggaataaggaattgg

SEQ ID NO: 132813 - DNA, 30 bp, Artificial Sequence
  Synthetic oligonucleotide
taacagcggttccacgacatcatccattgg

SEQ ID NO: 132814 - DNA, 30 bp, Artificial Sequence
  Synthetic oligonucleotide
agagaaccattaaacgaaaaattccattgg

SEQ ID NO: 132815 - DNA, 30 bp, Artificial Sequence
  Synthetic oligonucleotide
tacgttataatcttctacttgttccattgg

SEQ ID NO: 132816 - DNA, 30 bp, Artificial Sequence
  Synthetic oligonucleotide
gcaattgcaagacggttgttcactcattgg

SEQ ID NO: 132817 - DNA, 30 bp, Artificial Sequence
  Synthetic oligonucleotide
ggacctgaagtgataaagaaccccgattgg

SEQ ID NO: 132818 - DNA, 30 bp, Artificial Sequence
  Synthetic oligonucleotide
ggggttaaaatgcaatttccatgcgattgg

SEQ ID NO: 132819 - DNA, 30 bp, Artificial Sequence
  Synthetic oligonucleotide
gccagcgtattgtgaacttagacggattgg

SEQ ID NO: 132820 - DNA, 30 bp, Artificial Sequence
  Synthetic oligonucleotide
aaaatgaacagaaggagtgcagcggattgg

SEQ ID NO: 132821 - DNA, 30 bp, Artificial Sequence
  Synthetic oligonucleotide
tagatgggttcgaaaacggggagggattgg

SEQ ID NO: 132822 - DNA, 30 bp, Artificial Sequence
  Synthetic oligonucleotide
ggttgtacagtttaagtgataaaatattgg

SEQ ID NO: 132823 - DNA, 30 bp, Artificial Sequence
  Synthetic oligonucleotide
gtagtcactagagccgtgagtaactattgg

SEQ ID NO: 132824 - DNA, 30 bp, Artificial Sequence
  Synthetic oligonucleotide
gcttatccgatgagctcaagggagtattgg

SEQ ID NO: 132825 - DNA, 30 bp, Artificial Sequence
  Synthetic oligonucleotide
ctgttccccctaaacagcggtatgtattgg

SEQ ID NO: 132826 - DNA, 30 bp, Artificial Sequence
  Synthetic oligonucleotide
acatcctgaaaatacatggggcattattgg

SEQ ID NO: 132827 - DNA, 30 bp, Artificial Sequence
  Synthetic oligonucleotide
atcgcctcttgttaaagttgaagttattgg

SEQ ID NO: 132828 - DNA, 30 bp, Artificial Sequence
  Synthetic oligonucleotide
cctaggggccagacagatactggcacttgg

SEQ ID NO: 132829 - DNA, 30 bp, Artificial Sequence
  Synthetic oligonucleotide
tggaaaaccgaacgaccaactgttacttgg

SEQ ID NO: 132830 - DNA, 30 bp, Artificial Sequence
  Synthetic oligonucleotide
gcaatacgatgaagttactcgaaaccttgg

SEQ ID NO: 132831 - DNA, 30 bp, Artificial Sequence
  Synthetic oligonucleotide
tccatagtccgcgtgcgtttgtcgccttgg

SEQ ID NO: 132832 - DNA, 30 bp, Artificial Sequence
  Synthetic oligonucleotide
tatcagcggagagccgcggaaaggccttgg

SEQ ID NO: 132833 - DNA, 30 bp, Artificial Sequence
  Synthetic oligonucleotide
gataatgaggatcggtatacgtatccttgg

SEQ ID NO: 132834 - DNA, 30 bp, Artificial Sequence
  Synthetic oligonucleotide
acaggccgaatggggggtgaggacgcttgg

SEQ ID NO: 132835 - DNA, 30 bp, Artificial Sequence
  Synthetic oligonucleotide
cacggctgacatatgcaagggcctgcttgg

SEQ ID NO: 132836 - DNA, 30 bp, Artificial Sequence
  Synthetic oligonucleotide
ggtgccgagaccagatagactgagtcttgg

SEQ ID NO: 132837 - DNA, 30 bp, Artificial Sequence
  Synthetic oligonucleotide
cgcccttaagcacagttcagagtgtcttgg

SEQ ID NO: 132838 - DNA, 30 bp, Artificial Sequence
  Synthetic oligonucleotide
tggcatcgactagggttgttttcaagttgg

SEQ ID NO: 132839 - DNA, 30 bp, Artificial Sequence
  Synthetic oligonucleotide
cacacaaagctttgatgcacctgaagttgg

SEQ ID NO: 132840 - DNA, 30 bp, Artificial Sequence
  Synthetic oligonucleotide
tgagacaatccattcctgcccctcagttgg

SEQ ID NO: 132841 - DNA, 30 bp, Artificial Sequence
  Synthetic oligonucleotide
tacacaaggtccaggagaacagcgagttgg

SEQ ID NO: 132842 - DNA, 30 bp, Artificial Sequence
  Synthetic oligonucleotide
gcgtatgaaccatcgcgccgccgacgttgg

SEQ ID NO: 132843 - DNA, 30 bp, Artificial Sequence
  Synthetic oligonucleotide
tggggtacagctaggctagctctacgttgg

SEQ ID NO: 132844 - DNA, 30 bp, Artificial Sequence
  Synthetic oligonucleotide
acccggcacacagagtgagtcgatcgttgg

SEQ ID NO: 132845 - DNA, 30 bp, Artificial Sequence
  Synthetic oligonucleotide
ccggacctcgaaatggaccggaccggttgg

SEQ ID NO: 132846 - DNA, 30 bp, Artificial Sequence
  Synthetic oligonucleotide
aggacttaaatgtttgtaccgtgcggttgg

SEQ ID NO: 132847 - DNA, 30 bp, Artificial Sequence
  Synthetic oligonucleotide
taaaatgggacagaccaatattagggttgg

SEQ ID NO: 132848 - DNA, 30 bp, Artificial Sequence
  Synthetic oligonucleotide
cgtcagctttccccttcaatggcgggttgg

SEQ ID NO: 132849 - DNA, 30 bp, Artificial Sequence
  Synthetic oligonucleotide
tctagttaggttaaacacgaccgctgttgg

SEQ ID NO: 132850 - DNA, 30 bp, Artificial Sequence
  Synthetic oligonucleotide
ggaacacccccgtgtaagcaggaaatttgg

SEQ ID NO: 132851 - DNA, 30 bp, Artificial Sequence
  Synthetic oligonucleotide
tggaatggcgatttgccccatcctatttgg

SEQ ID NO: 132852 - DNA, 30 bp, Artificial Sequence
  Synthetic oligonucleotide
cacgtaatcaagaccgaatgtggtatttgg

SEQ ID NO: 132853 - DNA, 30 bp, Artificial Sequence
  Synthetic oligonucleotide
gtatacgtaccggtgagatctaaactttgg

SEQ ID NO: 132854 - DNA, 30 bp, Artificial Sequence
  Synthetic oligonucleotide
aagcgccattagccagcagttaaactttgg

SEQ ID NO: 132855 - DNA, 30 bp, Artificial Sequence
  Synthetic oligonucleotide
gtccatggatcgcgggcataaatcgtttgg

SEQ ID NO: 132856 - DNA, 30 bp, Artificial Sequence
  Synthetic oligonucleotide
aagggtctaagtctcgtggtgttcgtttgg

SEQ ID NO: 132857 - DNA, 30 bp, Artificial Sequence
  Synthetic oligonucleotide
atgctagtgaacaaattccgtagggtttgg

SEQ ID NO: 132858 - DNA, 30 bp, Artificial Sequence
  Synthetic oligonucleotide
ttgtgtatgcgctgacttgtccctgtttgg

SEQ ID NO: 132859 - DNA, 30 bp, Artificial Sequence
  Synthetic oligonucleotide
cacgcggggctcgccatctgtcctgtttgg

SEQ ID NO: 132860 - DNA, 30 bp, Artificial Sequence
  Synthetic oligonucleotide
ggcggcaacttcagggttagtattgtttgg

SEQ ID NO: 132861 - DNA, 30 bp, Artificial Sequence
  Synthetic oligonucleotide
gaaaaagcagttagcattcgttagttttgg

SEQ ID NO: 132862 - DNA, 30 bp, Artificial Sequence
  Synthetic oligonucleotide
ttcacaaaaggcacatcagctgggttttgg

SEQ ID NO: 132863 - DNA, 30 bp, Artificial Sequence
  Synthetic oligonucleotide
ttagggaagaaaagtaatttgacaaaaatg

SEQ ID NO: 132864 - DNA, 30 bp, Artificial Sequence
  Synthetic oligonucleotide
atggaattgcatgcaagtgaccacaaaatg

SEQ ID NO: 132865 - DNA, 30 bp, Artificial Sequence
  Synthetic oligonucleotide
aaatccactcgggaaaaagaatacaaaatg

SEQ ID NO: 132866 - DNA, 30 bp, Artificial Sequence
  Synthetic oligonucleotide
ggagtgcacagcgttgaatcagggaaaatg

SEQ ID NO: 132867 - DNA, 30 bp, Artificial Sequence
  Synthetic oligonucleotide
aacactcgtatggtgataatggggaaaatg

SEQ ID NO: 132868 - DNA, 30 bp, Artificial Sequence
  Synthetic oligonucleotide
tgttacgagggttagccaaggacccaaatg

SEQ ID NO: 132869 - DNA, 30 bp, Artificial Sequence
  Synthetic oligonucleotide
accggcactgaaaatttaaatcagcaaatg

SEQ ID NO: 132870 - DNA, 30 bp, Artificial Sequence
  Synthetic oligonucleotide
cattgtattagttaccattgatagcaaatg

SEQ ID NO: 132871 - DNA, 30 bp, Artificial Sequence
  Synthetic oligonucleotide
gcgggggctggagacacaggtgatcaaatg

SEQ ID NO: 132872 - DNA, 30 bp, Artificial Sequence
  Synthetic oligonucleotide
ggcagagtaatatgggacaggctagaaatg

SEQ ID NO: 132873 - DNA, 30 bp, Artificial Sequence
  Synthetic oligonucleotide
gcgccaagcgacggcccgaagtgcgaaatg

SEQ ID NO: 132874 - DNA, 30 bp, Artificial Sequence
  Synthetic oligonucleotide
tcgatatcgctgtctaaggtagtcgaaatg

SEQ ID NO: 132875 - DNA, 30 bp, Artificial Sequence
  Synthetic oligonucleotide
aggctatgagagttacctcttatggaaatg

SEQ ID NO: 132876 - DNA, 30 bp, Artificial Sequence
  Synthetic oligonucleotide
ctaggtctgagagacagaactattgaaatg

SEQ ID NO: 132877 - DNA, 30 bp, Artificial Sequence
  Synthetic oligonucleotide
atgaccacattgattcgtgatatataaatg

SEQ ID NO: 132878 - DNA, 30 bp, Artificial Sequence
  Synthetic oligonucleotide
cgaatcctgggcgatgcaacaagctaaatg

SEQ ID NO: 132879 - DNA, 30 bp, Artificial Sequence
  Synthetic oligonucleotide
acttgcattaccccatcgtggccgtaaatg

SEQ ID NO: 132880 - DNA, 30 bp, Artificial Sequence
  Synthetic oligonucleotide
acggctaaccatttgaccgtatcttaaatg

SEQ ID NO: 132881 - DNA, 30 bp, Artificial Sequence
  Synthetic oligonucleotide
aacagttggactcggggaaattgttaaatg

SEQ ID NO: 132882 - DNA, 30 bp, Artificial Sequence
  Synthetic oligonucleotide
atacaagttgaaaccgggcggtgcacaatg

SEQ ID NO: 132883 - DNA, 30 bp, Artificial Sequence
  Synthetic oligonucleotide
ctgtttctcgatcgagggctaaggacaatg

SEQ ID NO: 132884 - DNA, 30 bp, Artificial Sequence
  Synthetic oligonucleotide
agcaccacctgaagctcgacagcaccaatg

SEQ ID NO: 132885 - DNA, 30 bp, Artificial Sequence
  Synthetic oligonucleotide
attcgcgtttgcccgaaactgtcaccaatg

SEQ ID NO: 132886 - DNA, 30 bp, Artificial Sequence
  Synthetic oligonucleotide
ggggagtgatcgtttacacagtcgccaatg

SEQ ID NO: 132887 - DNA, 30 bp, Artificial Sequence
  Synthetic oligonucleotide
cgctaataaagcgaggcacacactccaatg

SEQ ID NO: 132888 - DNA, 30 bp, Artificial Sequence
  Synthetic oligonucleotide
gacagaatcgccttatccacacccgcaatg

SEQ ID NO: 132889 - DNA, 31 bp, Artificial Sequence
  Synthetic oligonucleotide
ccgcggactcgcgccaacactaacatcaatg

SEQ ID NO: 132890 - DNA, 30 bp, Artificial Sequence
  Synthetic oligonucleotide
acggtatcccgccgatatcttaactcaatg

SEQ ID NO: 132891 - DNA, 30 bp, Artificial Sequence
  Synthetic oligonucleotide
taggtcgtaattccaagcggggtctcaatg

SEQ ID NO: 132892 - DNA, 30 bp, Artificial Sequence
  Synthetic oligonucleotide
cactgggccgcgggtatggttttgagaatg

SEQ ID NO: 132893 - DNA, 30 bp, Artificial Sequence
  Synthetic oligonucleotide
aaagtaagatggtccaacacttatagaatg

SEQ ID NO: 132894 - DNA, 30 bp, Artificial Sequence
  Synthetic oligonucleotide
gggatcactaacatgagaaggggtagaatg

SEQ ID NO: 132895 - DNA, 30 bp, Artificial Sequence
  Synthetic oligonucleotide
ccactagtacagtatagagttatacgaatg

SEQ ID NO: 132896 - DNA, 30 bp, Artificial Sequence
  Synthetic oligonucleotide
tcagtgagtaatccgggagagactcgaatg

SEQ ID NO: 132897 - DNA, 30 bp, Artificial Sequence
  Synthetic oligonucleotide
ccgactagggcctgttagccgccaggaatg

SEQ ID NO: 132898 - DNA, 30 bp, Artificial Sequence
  Synthetic oligonucleotide
tacactgccagggggtaacttggaggaatg

SEQ ID NO: 132899 - DNA, 30 bp, Artificial Sequence
  Synthetic oligonucleotide
aagagcgaatgggctacgagagcgggaatg

SEQ ID NO: 132900 - DNA, 30 bp, Artificial Sequence
  Synthetic oligonucleotide
ctgtctagtatagcgtgcctctcgggaatg

SEQ ID NO: 132901 - DNA, 30 bp, Artificial Sequence
  Synthetic oligonucleotide
tgcgagattagtgggtgaatcacatgaatg

SEQ ID NO: 132902 - DNA, 30 bp, Artificial Sequence
  Synthetic oligonucleotide
tcattctgcacagctcttagtcgatgaatg

SEQ ID NO: 132903 - DNA, 30 bp, Artificial Sequence
  Synthetic oligonucleotide
agccgatggaggaatagaaagcactgaatg

SEQ ID NO: 132904 - DNA, 30 bp, Artificial Sequence
  Synthetic oligonucleotide
ctcatccaacaagatgacgcaacctgaatg

SEQ ID NO: 132905 - DNA, 30 bp, Artificial Sequence
  Synthetic oligonucleotide
taacaactgaccagttagggtcagtgaatg

SEQ ID NO: 132906 - DNA, 30 bp, Artificial Sequence
  Synthetic oligonucleotide
acacgtcagcggtggcccggtaattgaatg

SEQ ID NO: 132907 - DNA, 30 bp, Artificial Sequence
  Synthetic oligonucleotide
ctaaccacgcatgttcagatcgagataatg

SEQ ID NO: 132908 - DNA, 30 bp, Artificial Sequence
  Synthetic oligonucleotide
atatgttcgcagatgcaaaggaggataatg

SEQ ID NO: 132909 - DNA, 30 bp, Artificial Sequence
  Synthetic oligonucleotide
agcggggcataataagatccgggtataatg

SEQ ID NO: 132910 - DNA, 30 bp, Artificial Sequence
  Synthetic oligonucleotide
agaaggtcgcgacaaagtacgtacctaatg

SEQ ID NO: 132911 - DNA, 30 bp, Artificial Sequence
  Synthetic oligonucleotide
tcgttagctacaactttccctctcctaatg

SEQ ID NO: 132912 - DNA, 30 bp, Artificial Sequence
  Synthetic oligonucleotide
tagtagtgctgcattcgactgagagtaatg

SEQ ID NO: 132913 - DNA, 30 bp, Artificial Sequence
  Synthetic oligonucleotide
cgccttgtcagtcctgaaaacggagtaatg

SEQ ID NO: 132914 - DNA, 30 bp, Artificial Sequence
  Synthetic oligonucleotide
gaaacaccgatatgacaccttcccgtaatg

SEQ ID NO: 132915 - DNA, 30 bp, Artificial Sequence
  Synthetic oligonucleotide
gctgccaatatcgtaagtcaccctgtaatg

SEQ ID NO: 132916 - DNA, 30 bp, Artificial Sequence
  Synthetic oligonucleotide
cgaggcttgtgggtggtacagattgtaatg

SEQ ID NO: 132917 - DNA, 30 bp, Artificial Sequence
  Synthetic oligonucleotide
gaaatgcgcaatgatgggacttacttaatg

SEQ ID NO: 132918 - DNA, 30 bp, Artificial Sequence
  Synthetic oligonucleotide
ggtagcgagaatacttcaggtagtttaatg

SEQ ID NO: 132919 - DNA, 30 bp, Artificial Sequence
  Synthetic oligonucleotide
gttcggtgaagtagctgcaggggaaacatg

SEQ ID NO: 132920 - DNA, 30 bp, Artificial Sequence
  Synthetic oligonucleotide
attaatgggataacaatccagataaacatg

SEQ ID NO: 132921 - DNA, 30 bp, Artificial Sequence
  Synthetic oligonucleotide
gtcggacactcaaagatgagccagaacatg

SEQ ID NO: 132922 - DNA, 30 bp, Artificial Sequence
  Synthetic oligonucleotide
gtccgaaacttggtgccttgactccacatg

SEQ ID NO: 132923 - DNA, 30 bp, Artificial Sequence
  Synthetic oligonucleotide
gataaacggagttcgaagattgtgcacatg

SEQ ID NO: 132924 - DNA, 30 bp, Artificial Sequence
  Synthetic oligonucleotide
ttagggttagcaggaatcacggatcacatg

SEQ ID NO: 132925 - DNA, 30 bp, Artificial Sequence
  Synthetic oligonucleotide
taacgacttgagttatatcgatatcacatg

SEQ ID NO: 132926 - DNA, 30 bp, Artificial Sequence
  Synthetic oligonucleotide
taagatcggttaggagggtcttacgacatg

SEQ ID NO: 132927 - DNA, 30 bp, Artificial Sequence
  Synthetic oligonucleotide
ggggcgtaattgacctcggacagcgacatg

SEQ ID NO: 132928 - DNA, 30 bp, Artificial Sequence
  Synthetic oligonucleotide
ggtgagggtcaaaagctcacagtctacatg

SEQ ID NO: 132929 - DNA, 30 bp, Artificial Sequence
  Synthetic oligonucleotide
ggacaggtcattactcgtccggcaaccatg

SEQ ID NO: 132930 - DNA, 30 bp, Artificial Sequence
  Synthetic oligonucleotide
gtgctctgtagggtacggtgccgaaccatg

SEQ ID NO: 132931 - DNA, 30 bp, Artificial Sequence
  Synthetic oligonucleotide
acccgcattcactgaacaacggtgaccatg

SEQ ID NO: 132932 - DNA, 30 bp, Artificial Sequence
  Synthetic oligonucleotide
actgcaacggattactttgtgcgacccatg

SEQ ID NO: 132933 - DNA, 30 bp, Artificial Sequence
  Synthetic oligonucleotide
catatgcttgtcatacgctaaaatcccatg

SEQ ID NO: 132934 - DNA, 30 bp, Artificial Sequence
  Synthetic oligonucleotide
gcaggcctatcttgaacgggttgtcccatg

SEQ ID NO: 132935 - DNA, 30 bp, Artificial Sequence
  Synthetic oligonucleotide
gtggcatcttcaaggtaaactaatgccatg

SEQ ID NO: 132936 - DNA, 30 bp, Artificial Sequence
  Synthetic oligonucleotide
cccaatggaggcctgaggccctctgccatg

SEQ ID NO: 132937 - DNA, 30 bp, Artificial Sequence
  Synthetic oligonucleotide
tcattgcataacttcgagggaacatccatg

SEQ ID NO: 132938 - DNA, 30 bp, Artificial Sequence
  Synthetic oligonucleotide
tgcctgacctcggacagtgattgatccatg

SEQ ID NO: 132939 - DNA, 30 bp, Artificial Sequence
  Synthetic oligonucleotide
aggcatggtagctcgacggcgtgctccatg

SEQ ID NO: 132940 - DNA, 30 bp, Artificial Sequence
  Synthetic oligonucleotide
gctagacatcactccgagacaatttccatg

SEQ ID NO: 132941 - DNA, 30 bp, Artificial Sequence
  Synthetic oligonucleotide
tggttcagcctcttttcaggagcaagcatg

SEQ ID NO: 132942 - DNA, 30 bp, Artificial Sequence
  Synthetic oligonucleotide
ttcacaacaaactattacgtgtagagcatg

SEQ ID NO: 132943 - DNA, 30 bp, Artificial Sequence
  Synthetic oligonucleotide
ggcacgacacgaagtttttttcaacgcatg

SEQ ID NO: 132944 - DNA, 35 bp, Artificial Sequence
  Synthetic oligonucleotide
accagaaagtcgcaccagattcagaatgccgcatg

SEQ ID NO: 132945 - DNA, 30 bp, Artificial Sequence
  Synthetic oligonucleotide
tagaaaaagacatgtgtgcatgttcgcatg

SEQ ID NO: 132946 - DNA, 30 bp, Artificial Sequence
  Synthetic oligonucleotide
atcgtgacagggcgtgtcaggcaaggcatg

SEQ ID NO: 132947 - DNA, 30 bp, Artificial Sequence
  Synthetic oligonucleotide
cgttgctatcctttcatggcatcaggcatg

SEQ ID NO: 132948 - DNA, 30 bp, Artificial Sequence
  Synthetic oligonucleotide
gtcaaagggacacaatatgccctaggcatg

SEQ ID NO: 132949 - DNA, 30 bp, Artificial Sequence
  Synthetic oligonucleotide
catatatgggcgcggctttacgtaggcatg

SEQ ID NO: 132950 - DNA, 31 bp, Artificial Sequence
  Synthetic oligonucleotide
ctacgaattgcgtattaaggttcccggcatg

SEQ ID NO: 132951 - DNA, 30 bp, Artificial Sequence
  Synthetic oligonucleotide
ggttcggtccactatattactgagggcatg

SEQ ID NO: 132952 - DNA, 30 bp, Artificial Sequence
  Synthetic oligonucleotide
taaattcgctacaccagcgatccgggcatg

SEQ ID NO: 132953 - DNA, 30 bp, Artificial Sequence
  Synthetic oligonucleotide
gtaggcaggtagaatctctgcttatgcatg

SEQ ID NO: 132954 - DNA, 30 bp, Artificial Sequence
  Synthetic oligonucleotide
caagattcataaggttacggaaattgcatg

SEQ ID NO: 132955 - DNA, 30 bp, Artificial Sequence
  Synthetic oligonucleotide
gacgcagagcgaaacctaaacatttgcatg

SEQ ID NO: 132956 - DNA, 30 bp, Artificial Sequence
  Synthetic oligonucleotide
attggtgaaacgacgacaaccctcatcatg

SEQ ID NO: 132957 - DNA, 30 bp, Artificial Sequence
  Synthetic oligonucleotide
ttgatggatcaaactgaaggctggatcatg

SEQ ID NO: 132958 - DNA, 30 bp, Artificial Sequence
  Synthetic oligonucleotide
agtccttcggtgagagagggtcaactcatg

SEQ ID NO: 132959 - DNA, 30 bp, Artificial Sequence
  Synthetic oligonucleotide
tggtacagaaaataatcgtaggtactcatg

SEQ ID NO: 132960 - DNA, 30 bp, Artificial Sequence
  Synthetic oligonucleotide
gagaaattgggctggggcaataaagtcatg

SEQ ID NO: 132961 - DNA, 30 bp, Artificial Sequence
  Synthetic oligonucleotide
aaggcgagaaagggggccttcgttgtcatg

SEQ ID NO: 132962 - DNA, 30 bp, Artificial Sequence
  Synthetic oligonucleotide
gcagaatgtaagagaatttaacacttcatg

SEQ ID NO: 132963 - DNA, 30 bp, Artificial Sequence
  Synthetic oligonucleotide
caccaccgtaatcgtcaagtacaaaagatg

SEQ ID NO: 132964 - DNA, 30 bp, Artificial Sequence
  Synthetic oligonucleotide
tatggtagcgagactatatgggaaaagatg

SEQ ID NO: 132965 - DNA, 30 bp, Artificial Sequence
  Synthetic oligonucleotide
ctgaccgagacgtatatggcacgtaagatg

SEQ ID NO: 132966 - DNA, 30 bp, Artificial Sequence
  Synthetic oligonucleotide
caacatcatgctgcgggcggggtacagatg

SEQ ID NO: 132967 - DNA, 30 bp, Artificial Sequence
  Synthetic oligonucleotide
cggtgcgggcaccagaacgcagttcagatg

SEQ ID NO: 132968 - DNA, 30 bp, Artificial Sequence
  Synthetic oligonucleotide
tttcaaagattggcctcttcatttcagatg

SEQ ID NO: 132969 - DNA, 30 bp, Artificial Sequence
  Synthetic oligonucleotide
tgcggtagttgactgttgtttggagagatg

SEQ ID NO: 132970 - DNA, 30 bp, Artificial Sequence
  Synthetic oligonucleotide
tggccgtattggtcagcttaggccgagatg

SEQ ID NO: 132971 - DNA, 30 bp, Artificial Sequence
  Synthetic oligonucleotide
gtcggcaactatagtaagtgagctgagatg

SEQ ID NO: 132972 - DNA, 30 bp, Artificial Sequence
  Synthetic oligonucleotide
ttggggaccggagatgtacccagtgagatg

SEQ ID NO: 132973 - DNA, 30 bp, Artificial Sequence
  Synthetic oligonucleotide
aagagggcccgtcggctcggtaactagatg

SEQ ID NO: 132974 - DNA, 30 bp, Artificial Sequence
  Synthetic oligonucleotide
acgacgtcgtcgtcgcggacttattagatg

SEQ ID NO: 132975 - DNA, 30 bp, Artificial Sequence
  Synthetic oligonucleotide
agagactccgaaaagcggtagtcaacgatg

SEQ ID NO: 132976 - DNA, 30 bp, Artificial Sequence
  Synthetic oligonucleotide
acagcgatatctatctttggacagacgatg

SEQ ID NO: 132977 - DNA, 30 bp, Artificial Sequence
  Synthetic oligonucleotide
tcaggagcataatggggatcgtggacgatg

SEQ ID NO: 132978 - DNA, 30 bp, Artificial Sequence
  Synthetic oligonucleotide
cagccaacaatgcaggtgtcccacccgatg

SEQ ID NO: 132979 - DNA, 30 bp, Artificial Sequence
  Synthetic oligonucleotide
gatcccccacaagacggcaaaatcccgatg

SEQ ID NO: 132980 - DNA, 30 bp, Artificial Sequence
  Synthetic oligonucleotide
gcgtaaagcacggattgtgcaaaagcgatg

SEQ ID NO: 132981 - DNA, 30 bp, Artificial Sequence
  Synthetic oligonucleotide
gcaaaacctccatgagaaacgactgcgatg

SEQ ID NO: 132982 - DNA, 30 bp, Artificial Sequence
  Synthetic oligonucleotide
ttgctcaaacgttgtatcaaacaaaggatg

SEQ ID NO: 132983 - DNA, 30 bp, Artificial Sequence
  Synthetic oligonucleotide
agtagtccggatcgtcccgccacaaggatg

SEQ ID NO: 132984 - DNA, 30 bp, Artificial Sequence
  Synthetic oligonucleotide
atggacgcgaatcggaccgagacaaggatg

SEQ ID NO: 132985 - DNA, 30 bp, Artificial Sequence
  Synthetic oligonucleotide
tgtcgatcatgtagaggaaccttaaggatg

SEQ ID NO: 132986 - DNA, 30 bp, Artificial Sequence
  Synthetic oligonucleotide
tcagtgtatgtttcgttcggcaccaggatg

SEQ ID NO: 132987 - DNA, 30 bp, Artificial Sequence
  Synthetic oligonucleotide
atacacgcatatagtgttgcgtataggatg

SEQ ID NO: 132988 - DNA, 30 bp, Artificial Sequence
  Synthetic oligonucleotide
gtagatgggagagtaatgcctcaggggatg

SEQ ID NO: 132989 - DNA, 30 bp, Artificial Sequence
  Synthetic oligonucleotide
taagccagctgcatcaccgtaagcatgatg

SEQ ID NO: 132990 - DNA, 30 bp, Artificial Sequence
  Synthetic oligonucleotide
gagccacgcgcccgtgggtatggcctgatg

SEQ ID NO: 132991 - DNA, 30 bp, Artificial Sequence
  Synthetic oligonucleotide
gcgttgtaaggaaacgtagtcgatctgatg

SEQ ID NO: 132992 - DNA, 30 bp, Artificial Sequence
  Synthetic oligonucleotide
cgttaaggtgagctagagttaatcgtgatg

SEQ ID NO: 132993 - DNA, 30 bp, Artificial Sequence
  Synthetic oligonucleotide
acaatttaatccgcatgggtggatgtgatg

SEQ ID NO: 132994 - DNA, 30 bp, Artificial Sequence
  Synthetic oligonucleotide
agagatgtggacgcgacgctcaaaaatatg

SEQ ID NO: 132995 - DNA, 30 bp, Artificial Sequence
  Synthetic oligonucleotide
aggagatatctagtagttaggggaaatatg

SEQ ID NO: 132996 - DNA, 30 bp, Artificial Sequence
  Synthetic oligonucleotide
actgctgtaaaaattggggggggaaatatg

SEQ ID NO: 132997 - DNA, 30 bp, Artificial Sequence
  Synthetic oligonucleotide
gccacatcttgcacagtctcccacaatatg

SEQ ID NO: 132998 - DNA, 30 bp, Artificial Sequence
  Synthetic oligonucleotide
ccggccctcctgccgagtcgagagaatatg

SEQ ID NO: 132999 - DNA, 30 bp, Artificial Sequence
  Synthetic oligonucleotide
ccaagctgaacgcgcactcggaggaatatg

SEQ ID NO: 133000 - DNA, 30 bp, Artificial Sequence
  Synthetic oligonucleotide
acgtacattctgcgagccgcacgacatatg

SEQ ID NO: 133001 - DNA, 30 bp, Artificial Sequence
  Synthetic oligonucleotide
ggtgtccccagacattcaagaccgcatatg

SEQ ID NO: 133002 - DNA, 30 bp, Artificial Sequence
  Synthetic oligonucleotide
ggcttgctcaggagtgaaatttctcatatg

SEQ ID NO: 133003 - DNA, 30 bp, Artificial Sequence
  Synthetic oligonucleotide
tctaaggcacgctcgcggtcgcttcatatg

SEQ ID NO: 133004 - DNA, 30 bp, Artificial Sequence
  Synthetic oligonucleotide
aacggtcatgagttttgcgacgtagatatg

SEQ ID NO: 133005 - DNA, 30 bp, Artificial Sequence
  Synthetic oligonucleotide
cttggctgctgtgcacccgctaccgatatg

SEQ ID NO: 133006 - DNA, 30 bp, Artificial Sequence
  Synthetic oligonucleotide
ggacaagattagaacgcgagttccgatatg

SEQ ID NO: 133007 - DNA, 30 bp, Artificial Sequence
  Synthetic oligonucleotide
cgttaagactgtcagggttgtagcgatatg

SEQ ID NO: 133008 - DNA, 30 bp, Artificial Sequence
  Synthetic oligonucleotide
tcatcactcggaaccgtttacgtcgatatg

SEQ ID NO: 133009 - DNA, 30 bp, Artificial Sequence
  Synthetic oligonucleotide
cgcctgtttagctaagtgttagaggatatg

SEQ ID NO: 133010 - DNA, 30 bp, Artificial Sequence
  Synthetic oligonucleotide
ggcttatgtgaccaccattaggatgatatg

SEQ ID NO: 133011 - DNA, 30 bp, Artificial Sequence
  Synthetic oligonucleotide
taagggatttgggacttggcttcgtatatg

SEQ ID NO: 133012 - DNA, 30 bp, Artificial Sequence
  Synthetic oligonucleotide
tcctgatccttacgtcgtccgagttatatg

SEQ ID NO: 133013 - DNA, 30 bp, Artificial Sequence
  Synthetic oligonucleotide
catgatagcacacataaccatcgaactatg

SEQ ID NO: 133014 - DNA, 30 bp, Artificial Sequence
  Synthetic oligonucleotide
agaaaaacaagcggtctagtaggaactatg

SEQ ID NO: 133015 - DNA, 30 bp, Artificial Sequence
  Synthetic oligonucleotide
ttgcttcagcgttctcgccggagacctatg

SEQ ID NO: 133016 - DNA, 30 bp, Artificial Sequence
  Synthetic oligonucleotide
gaaagacaagggattgaccttgggcctatg

SEQ ID NO: 133017 - DNA, 30 bp, Artificial Sequence
  Synthetic oligonucleotide
ggtctgagagagcaaacgtagatgcctatg

SEQ ID NO: 133018 - DNA, 31 bp, Artificial Sequence
  Synthetic oligonucleotide
gctcattcctatcgatcgtatgcgtcctatg

SEQ ID NO: 133019 - DNA, 30 bp, Artificial Sequence
  Synthetic oligonucleotide
aaaacactagatcttcgaatcgttcctatg

SEQ ID NO: 133020 - DNA, 31 bp, Artificial Sequence
  Synthetic oligonucleotide
caattcctgtatcgagcgtatgaaggctatg

SEQ ID NO: 133021 - DNA, 30 bp, Artificial Sequence
  Synthetic oligonucleotide
atagtttcgggaacgtgtggtccggctatg

SEQ ID NO: 133022 - DNA, 30 bp, Artificial Sequence
  Synthetic oligonucleotide
atcggtaatcgaccgatacagtcatctatg

SEQ ID NO: 133023 - DNA, 30 bp, Artificial Sequence
  Synthetic oligonucleotide
cttcgtgcgaaccaatcagtgtcttctatg

SEQ ID NO: 133024 - DNA, 30 bp, Artificial Sequence
  Synthetic oligonucleotide
gcagtacggtgagtggtgcgtgtttctatg

SEQ ID NO: 133025 - DNA, 30 bp, Artificial Sequence
  Synthetic oligonucleotide
caaaccggatacaagggttcttaaagtatg

SEQ ID NO: 133026 - DNA, 30 bp, Artificial Sequence
  Synthetic oligonucleotide
acgcgcagacgcatttggctaagcagtatg

SEQ ID NO: 133027 - DNA, 30 bp, Artificial Sequence
  Synthetic oligonucleotide
ccgtcccatgtatttgaggtaatgagtatg

SEQ ID NO: 133028 - DNA, 30 bp, Artificial Sequence
  Synthetic oligonucleotide
gcggaatactcaagaaatcgcatgagtatg

SEQ ID NO: 133029 - DNA, 30 bp, Artificial Sequence
  Synthetic oligonucleotide
ttcatccaggcgtataaaatcatgagtatg

SEQ ID NO: 133030 - DNA, 30 bp, Artificial Sequence
  Synthetic oligonucleotide
ctgatgaagctacgagcctgaaagcgtatg

SEQ ID NO: 133031 - DNA, 30 bp, Artificial Sequence
  Synthetic oligonucleotide
ctgtggtcgatatcgcttacagggcgtatg

SEQ ID NO: 133032 - DNA, 30 bp, Artificial Sequence
  Synthetic oligonucleotide
ggtaggtaccgcaggttcgactcaggtatg

SEQ ID NO: 133033 - DNA, 30 bp, Artificial Sequence
  Synthetic oligonucleotide
agagagatacgacatcatcaattaggtatg

SEQ ID NO: 133034 - DNA, 30 bp, Artificial Sequence
  Synthetic oligonucleotide
tctcgtgattaaaatgtaaatggtggtatg

SEQ ID NO: 133035 - DNA, 30 bp, Artificial Sequence
  Synthetic oligonucleotide
ctcggggacccgcgtaccagccttggtatg

SEQ ID NO: 133036 - DNA, 30 bp, Artificial Sequence
  Synthetic oligonucleotide
cggcgcagaatggtgcatctttaaattatg

SEQ ID NO: 133037 - DNA, 30 bp, Artificial Sequence
  Synthetic oligonucleotide
ctgttggcgaactgggtacagagcattatg

SEQ ID NO: 133038 - DNA, 30 bp, Artificial Sequence
  Synthetic oligonucleotide
cgccaaaaccaactctgggtattgattatg

SEQ ID NO: 133039 - DNA, 30 bp, Artificial Sequence
  Synthetic oligonucleotide
tggtgcggaagggtatgttcatgacttatg

SEQ ID NO: 133040 - DNA, 30 bp, Artificial Sequence
  Synthetic oligonucleotide
gtggcccatgatgaattattggtacttatg

SEQ ID NO: 133041 - DNA, 30 bp, Artificial Sequence
  Synthetic oligonucleotide
atacatctactgaacccggttccatttatg

SEQ ID NO: 133042 - DNA, 30 bp, Artificial Sequence
  Synthetic oligonucleotide
cgcagggggtgaggaagcagtgcatttatg

SEQ ID NO: 133043 - DNA, 30 bp, Artificial Sequence
  Synthetic oligonucleotide
accctcaaagactcgtggggtagatttatg

SEQ ID NO: 133044 - DNA, 30 bp, Artificial Sequence
  Synthetic oligonucleotide
actggagagtaactaggtttaaggtttatg

SEQ ID NO: 133045 - DNA, 30 bp, Artificial Sequence
  Synthetic oligonucleotide
agtgcttacctcaatactcaatggtttatg

SEQ ID NO: 133046 - DNA, 30 bp, Artificial Sequence
  Synthetic oligonucleotide
ctcaccgccatttgagaaaccgaaaaactg

SEQ ID NO: 133047 - DNA, 30 bp, Artificial Sequence
  Synthetic oligonucleotide
acggagcgaaagaggctattctcaaaactg

SEQ ID NO: 133048 - DNA, 30 bp, Artificial Sequence
  Synthetic oligonucleotide
cgccgatacgaggcacacatcttaaaactg

SEQ ID NO: 133049 - DNA, 30 bp, Artificial Sequence
  Synthetic oligonucleotide
agcacaggcattatacatttacagaaactg

SEQ ID NO: 133050 - DNA, 30 bp, Artificial Sequence
  Synthetic oligonucleotide
tgaggctcgagaactcaggcagggcaactg

SEQ ID NO: 133051 - DNA, 30 bp, Artificial Sequence
  Synthetic oligonucleotide
aatgggaacaggcatccagtggttcaactg

SEQ ID NO: 133052 - DNA, 30 bp, Artificial Sequence
  Synthetic oligonucleotide
gtgatccaaattgcactttgtccagaactg

SEQ ID NO: 133053 - DNA, 30 bp, Artificial Sequence
  Synthetic oligonucleotide
ggcaacgcgagtacggccatatgcgaactg

SEQ ID NO: 133054 - DNA, 30 bp, Artificial Sequence
  Synthetic oligonucleotide
ggcgcttggaacgtgggatgattcgaactg

SEQ ID NO: 133055 - DNA, 30 bp, Artificial Sequence
  Synthetic oligonucleotide
cgctcaactgtactgcctcgggaggaactg

SEQ ID NO: 133056 - DNA, 30 bp, Artificial Sequence
  Synthetic oligonucleotide
tgtcagtgcgggaggaccgggagataactg

SEQ ID NO: 133057 - DNA, 30 bp, Artificial Sequence
  Synthetic oligonucleotide
tagtgtgatgccaaggcgtggacctaactg

SEQ ID NO: 133058 - DNA, 30 bp, Artificial Sequence
  Synthetic oligonucleotide
tgagaaaagaggtcacgcgtatgctaactg

SEQ ID NO: 133059 - DNA, 30 bp, Artificial Sequence
  Synthetic oligonucleotide
cggtatttggacaaaaggattgagtaactg

SEQ ID NO: 133060 - DNA, 30 bp, Artificial Sequence
  Synthetic oligonucleotide
tggacttcccagagataatgtgcgtaactg

SEQ ID NO: 133061 - DNA, 30 bp, Artificial Sequence
  Synthetic oligonucleotide
aaaagcgtattgctgaggatcagttaactg

SEQ ID NO: 133062 - DNA, 30 bp, Artificial Sequence
  Synthetic oligonucleotide
cgttcttctagatctaccctagaaccactg

SEQ ID NO: 133063 - DNA, 30 bp, Artificial Sequence
  Synthetic oligonucleotide
gttacggcttgatcaagcccatgtccactg

SEQ ID NO: 133064 - DNA, 30 bp, Artificial Sequence
  Synthetic oligonucleotide
ccgtactcgaagtaaacccacgttccactg

SEQ ID NO: 133065 - DNA, 30 bp, Artificial Sequence
  Synthetic oligonucleotide
agatcagtgagaacccgcgaacgggcactg

SEQ ID NO: 133066 - DNA, 31 bp, Artificial Sequence
  Synthetic oligonucleotide
tcacccgaagaatagaaaacacaggtcactg

SEQ ID NO: 133067 - DNA, 30 bp, Artificial Sequence
  Synthetic oligonucleotide
acatactgtacagtcaaaaaattttcactg

SEQ ID NO: 133068 - DNA, 30 bp, Artificial Sequence
  Synthetic oligonucleotide
gatgagaaagcaaggatccaacgaagactg

SEQ ID NO: 133069 - DNA, 30 bp, Artificial Sequence
  Synthetic oligonucleotide
aggttgctgtgggagtcggtatgcagactg

SEQ ID NO: 133070 - DNA, 30 bp, Artificial Sequence
  Synthetic oligonucleotide
ccaagaggacagccggtgacgtgtagactg

SEQ ID NO: 133071 - DNA, 30 bp, Artificial Sequence
  Synthetic oligonucleotide
aggcatggagccctgggaggggtacgactg

SEQ ID NO: 133072 - DNA, 30 bp, Artificial Sequence
  Synthetic oligonucleotide
cggttaacggaccttctacggaccggactg

SEQ ID NO: 133073 - DNA, 30 bp, Artificial Sequence
  Synthetic oligonucleotide
ctgtgacatctatagttcaggcgcggactg

SEQ ID NO: 133074 - DNA, 30 bp, Artificial Sequence
  Synthetic oligonucleotide
atcaagtacgagatacgtacgtttggactg

SEQ ID NO: 133075 - DNA, 30 bp, Artificial Sequence
  Synthetic oligonucleotide
ctatacgtgccaacgtacaagtgctgactg

SEQ ID NO: 133076 - DNA, 30 bp, Artificial Sequence
  Synthetic oligonucleotide
tgccgggagcaccaatatggaatgtgactg

SEQ ID NO: 133077 - DNA, 30 bp, Artificial Sequence
  Synthetic oligonucleotide
cggcgtagggaactaacgcccccaatactg

SEQ ID NO: 133078 - DNA, 30 bp, Artificial Sequence
  Synthetic oligonucleotide
ccggcagtacatcagttgtagatcatactg

SEQ ID NO: 133079 - DNA, 30 bp, Artificial Sequence
  Synthetic oligonucleotide
acgggggttagataagcgtgggctatactg

SEQ ID NO: 133080 - DNA, 30 bp, Artificial Sequence
  Synthetic oligonucleotide
tgggcgcgatttataaaagtatccctactg

SEQ ID NO: 133081 - DNA, 30 bp, Artificial Sequence
  Synthetic oligonucleotide
atcaaagttagatactcaagcagtctactg

SEQ ID NO: 133082 - DNA, 30 bp, Artificial Sequence
  Synthetic oligonucleotide
gtgtcacgggcacccggaatataattactg

SEQ ID NO: 133083 - DNA, 30 bp, Artificial Sequence
  Synthetic oligonucleotide
aattcgagccctacgccgagggcattactg

SEQ ID NO: 133084 - DNA, 30 bp, Artificial Sequence
  Synthetic oligonucleotide
gtgacaccgatgcggggtcaggagttactg

SEQ ID NO: 133085 - DNA, 30 bp, Artificial Sequence
  Synthetic oligonucleotide
aagccctgctaggtgttcaggtggttactg

SEQ ID NO: 133086 - DNA, 30 bp, Artificial Sequence
  Synthetic oligonucleotide
ggtagtgttatgatttgtgtagcgaacctg

SEQ ID NO: 133087 - DNA, 30 bp, Artificial Sequence
  Synthetic oligonucleotide
cgtgagacaattgtctaggtaatgaacctg

SEQ ID NO: 133088 - DNA, 30 bp, Artificial Sequence
  Synthetic oligonucleotide
ccgaatttcgattgaggttgggaccacctg

SEQ ID NO: 133089 - DNA, 30 bp, Artificial Sequence
  Synthetic oligonucleotide
gtccataagagaggtgcgcatcagcacctg

SEQ ID NO: 133090 - DNA, 30 bp, Artificial Sequence
  Synthetic oligonucleotide
tgaagcgagaacgaaacacttccgcacctg

SEQ ID NO: 133091 - DNA, 30 bp, Artificial Sequence
  Synthetic oligonucleotide
aaagagtcgatcgggccaaagctcgacctg

SEQ ID NO: 133092 - DNA, 30 bp, Artificial Sequence
  Synthetic oligonucleotide
agcttgccttttgcaatgcgtagtgacctg

SEQ ID NO: 133093 - DNA, 30 bp, Artificial Sequence
  Synthetic oligonucleotide
atgaagagtaataccccggtacgatacctg

SEQ ID NO: 133094 - DNA, 30 bp, Artificial Sequence
  Synthetic oligonucleotide
gcgtcagggtctaatatagaacagtacctg

SEQ ID NO: 133095 - DNA, 30 bp, Artificial Sequence
  Synthetic oligonucleotide
ctgctgacacaactcccatattcaaccctg

SEQ ID NO: 133096 - DNA, 30 bp, Artificial Sequence
  Synthetic oligonucleotide
gcatcgctatttatagtgatccagaccctg

SEQ ID NO: 133097 - DNA, 30 bp, Artificial Sequence
  Synthetic oligonucleotide
actccatacgaggttcaaacgtggaccctg

SEQ ID NO: 133098 - DNA, 30 bp, Artificial Sequence
  Synthetic oligonucleotide
atctaaagccagtaatgtgtattacccctg

SEQ ID NO: 133099 - DNA, 30 bp, Artificial Sequence
  Synthetic oligonucleotide
atcaggtgagcaagtaatgagcaggccctg

SEQ ID NO: 133100 - DNA, 30 bp, Artificial Sequence
  Synthetic oligonucleotide
aatgagtgagacgaggcatgtgaggccctg

SEQ ID NO: 133101 - DNA, 30 bp, Artificial Sequence
  Synthetic oligonucleotide
ccttgcgccccgttatccacccaaagcctg

SEQ ID NO: 133102 - DNA, 30 bp, Artificial Sequence
  Synthetic oligonucleotide
tcacggaaccgttgcatttggtctagcctg

SEQ ID NO: 133103 - DNA, 30 bp, Artificial Sequence
  Synthetic oligonucleotide
cgatcattgaaagtataataggttagcctg

SEQ ID NO: 133104 - DNA, 30 bp, Artificial Sequence
  Synthetic oligonucleotide
tggaatctgtggtgagcgttctaaggcctg

SEQ ID NO: 133105 - DNA, 30 bp, Artificial Sequence
  Synthetic oligonucleotide
cgattgcgcctgaacctggctgagggcctg

SEQ ID NO: 133106 - DNA, 30 bp, Artificial Sequence
  Synthetic oligonucleotide
attatacctttaggcactctcccgggcctg

SEQ ID NO: 133107 - DNA, 30 bp, Artificial Sequence
  Synthetic oligonucleotide
cgagttaactgaggctggtgattgggcctg

SEQ ID NO: 133108 - DNA, 30 bp, Artificial Sequence
  Synthetic oligonucleotide
ccggtgaacattgaaagtctttaatgcctg

SEQ ID NO: 133109 - DNA, 30 bp, Artificial Sequence
  Synthetic oligonucleotide
ttcgtgtgggttaggaaccggggatgcctg

SEQ ID NO: 133110 - DNA, 30 bp, Artificial Sequence
  Synthetic oligonucleotide
tgctagtgccgcatggtcatctgctgcctg

SEQ ID NO: 133111 - DNA, 30 bp, Artificial Sequence
  Synthetic oligonucleotide
tgctggcgtcatacatgccaggggtgcctg

SEQ ID NO: 133112 - DNA, 30 bp, Artificial Sequence
  Synthetic oligonucleotide
gatggggacctactgaggtcccgaatcctg

SEQ ID NO: 133113 - DNA, 30 bp, Artificial Sequence
  Synthetic oligonucleotide
tcgtatgcggcagatacgattacgatcctg

SEQ ID NO: 133114 - DNA, 30 bp, Artificial Sequence
  Synthetic oligonucleotide
caccggggtttacggataaacagactcctg

SEQ ID NO: 133115 - DNA, 30 bp, Artificial Sequence
  Synthetic oligonucleotide
cctagctcgtcacgatacatttatctcctg

SEQ ID NO: 133116 - DNA, 30 bp, Artificial Sequence
  Synthetic oligonucleotide
aagagattaacagataaccagtgtctcctg

SEQ ID NO: 133117 - DNA, 30 bp, Artificial Sequence
  Synthetic oligonucleotide
ttagcagtatggtgatgcttatccgtcctg

SEQ ID NO: 133118 - DNA, 30 bp, Artificial Sequence
  Synthetic oligonucleotide
gtcatttaggagacgaagacaattgtcctg

SEQ ID NO: 133119 - DNA, 30 bp, Artificial Sequence
  Synthetic oligonucleotide
cgtaagtctgagcatatttaagaattcctg

SEQ ID NO: 133120 - DNA, 30 bp, Artificial Sequence
  Synthetic oligonucleotide
cggagggtcttgaatatacgaggattcctg

SEQ ID NO: 133121 - DNA, 30 bp, Artificial Sequence
  Synthetic oligonucleotide
cagattcatatgggctgtgaaaccttcctg

SEQ ID NO: 133122 - DNA, 30 bp, Artificial Sequence
  Synthetic oligonucleotide
agatcagcagacgagtggcataataagctg

SEQ ID NO: 133123 - DNA, 30 bp, Artificial Sequence
  Synthetic oligonucleotide
gacgaacactcgtgtgcgcataaagagctg

SEQ ID NO: 133124 - DNA, 30 bp, Artificial Sequence
  Synthetic oligonucleotide
gttcaaagatagcttcacgaagcagagctg

SEQ ID NO: 133125 - DNA, 30 bp, Artificial Sequence
  Synthetic oligonucleotide
aacgagagaaattttttaacactagagctg

SEQ ID NO: 133126 - DNA, 30 bp, Artificial Sequence
  Synthetic oligonucleotide
gcagcggttccaacccagagaggcgagctg

SEQ ID NO: 133127 - DNA, 30 bp, Artificial Sequence
  Synthetic oligonucleotide
caaggttaatacatcgtacggcgtgagctg

SEQ ID NO: 133128 - DNA, 30 bp, Artificial Sequence
  Synthetic oligonucleotide
tgctataactgaataggagccgggtagctg

SEQ ID NO: 133129 - DNA, 30 bp, Artificial Sequence
  Synthetic oligonucleotide
agactaactggtcctattgttgtttagctg

SEQ ID NO: 133130 - DNA, 30 bp, Artificial Sequence
  Synthetic oligonucleotide
ttgtggtccttagtaccagagtctacgctg

SEQ ID NO: 133131 - DNA, 30 bp, Artificial Sequence
  Synthetic oligonucleotide
atcccggagtccatgccagaaccaccgctg

SEQ ID NO: 133132 - DNA, 30 bp, Artificial Sequence
  Synthetic oligonucleotide
cgctgagcctgaggcatagaatccccgctg

SEQ ID NO: 133133 - DNA, 30 bp, Artificial Sequence
  Synthetic oligonucleotide
ggaatagcggtccactcagtgaagccgctg

SEQ ID NO: 133134 - DNA, 29 bp, Artificial Sequence
  Synthetic oligonucleotide
tgttgcttcaatgtgtgctgaaagcgctg

SEQ ID NO: 133135 - DNA, 30 bp, Artificial Sequence
  Synthetic oligonucleotide
ggtccggggataccaaagaaagcttcgctg

SEQ ID NO: 133136 - DNA, 30 bp, Artificial Sequence
  Synthetic oligonucleotide
gtatgtgacgcgattgtgggcaggaggctg

SEQ ID NO: 133137 - DNA, 30 bp, Artificial Sequence
  Synthetic oligonucleotide
gcatatggtgattatgacagagaacggctg

SEQ ID NO: 133138 - DNA, 30 bp, Artificial Sequence
  Synthetic oligonucleotide
aaaatgatggccccaacggaaggacggctg

SEQ ID NO: 133139 - DNA, 30 bp, Artificial Sequence
  Synthetic oligonucleotide
gatgacatataacacgggcagggacggctg

SEQ ID NO: 133140 - DNA, 30 bp, Artificial Sequence
  Synthetic oligonucleotide
gcaggtgctagggagggcaactgacggctg

SEQ ID NO: 133141 - DNA, 30 bp, Artificial Sequence
  Synthetic oligonucleotide
tggaagctacagaacgtgtcagaagggctg

SEQ ID NO: 133142 - DNA, 30 bp, Artificial Sequence
  Synthetic oligonucleotide
atgtactcgtacgatccatggcgcgggctg

SEQ ID NO: 133143 - DNA, 30 bp, Artificial Sequence
  Synthetic oligonucleotide
cagaccgttacagtgtgacacctcgggctg

SEQ ID NO: 133144 - DNA, 30 bp, Artificial Sequence
  Synthetic oligonucleotide
ggtggacatcacttagaccgtacggggctg

SEQ ID NO: 133145 - DNA, 30 bp, Artificial Sequence
  Synthetic oligonucleotide
gaggttgtcctgttcaccttctcatggctg

SEQ ID NO: 133146 - DNA, 30 bp, Artificial Sequence
  Synthetic oligonucleotide
aagactggcatactcatagcgctatggctg

SEQ ID NO: 133147 - DNA, 30 bp, Artificial Sequence
  Synthetic oligonucleotide
aggagatgcaagtttaaaggtttctggctg

SEQ ID NO: 133148 - DNA, 30 bp, Artificial Sequence
  Synthetic oligonucleotide
gcatttgtgcacccaacagggcagtggctg

SEQ ID NO: 133149 - DNA, 30 bp, Artificial Sequence
  Synthetic oligonucleotide
taccgcgacacgtgtagttaccgaatgctg

SEQ ID NO: 133150 - DNA, 30 bp, Artificial Sequence
  Synthetic oligonucleotide
tcccaggcttgacgtgtaaggcacatgctg

SEQ ID NO: 133151 - DNA, 30 bp, Artificial Sequence
  Synthetic oligonucleotide
taccatcttaagatcggcccccgtatgctg

SEQ ID NO: 133152 - DNA, 30 bp, Artificial Sequence
  Synthetic oligonucleotide
atggatacgagaccaggaggaattatgctg

SEQ ID NO: 133153 - DNA, 30 bp, Artificial Sequence
  Synthetic oligonucleotide
ggagttataaacaggcatgattaactgctg

SEQ ID NO: 133154 - DNA, 30 bp, Artificial Sequence
  Synthetic oligonucleotide
aaagtgtgagcattgaacatggtcgtgctg

SEQ ID NO: 133155 - DNA, 30 bp, Artificial Sequence
  Synthetic oligonucleotide
ctaacaccttaacacagtggattggtgctg

SEQ ID NO: 133156 - DNA, 30 bp, Artificial Sequence
  Synthetic oligonucleotide
ttcatgcgagattctaaatgagtattgctg

SEQ ID NO: 133157 - DNA, 30 bp, Artificial Sequence
  Synthetic oligonucleotide
gtaaatgcgcattggcctgtcgacttgctg

SEQ ID NO: 133158 - DNA, 30 bp, Artificial Sequence
  Synthetic oligonucleotide
acgtagtgtggccctgagctcggaaatctg

SEQ ID NO: 133159 - DNA, 30 bp, Artificial Sequence
  Synthetic oligonucleotide
ccgcgggcttcatcggcagttctaaatctg

SEQ ID NO: 133160 - DNA, 30 bp, Artificial Sequence
  Synthetic oligonucleotide
ggttcagaactcagattatcgaccaatctg

SEQ ID NO: 133161 - DNA, 30 bp, Artificial Sequence
  Synthetic oligonucleotide
tatgggaggcaacctagaggtcctaatctg

SEQ ID NO: 133162 - DNA, 30 bp, Artificial Sequence
  Synthetic oligonucleotide
ggctaacgtcgatagtcagtttttaatctg

SEQ ID NO: 133163 - DNA, 30 bp, Artificial Sequence
  Synthetic oligonucleotide
tcaacgtggtcaatatgctcaccacatctg

SEQ ID NO: 133164 - DNA, 30 bp, Artificial Sequence
  Synthetic oligonucleotide
agaagcggggacattcttagtctacatctg

SEQ ID NO: 133165 - DNA, 30 bp, Artificial Sequence
  Synthetic oligonucleotide
gccggtggaatgaatacagaacggcatctg

SEQ ID NO: 133166 - DNA, 30 bp, Artificial Sequence
  Synthetic oligonucleotide
ctggctacgtggtttattaactgtcatctg

SEQ ID NO: 133167 - DNA, 30 bp, Artificial Sequence
  Synthetic oligonucleotide
acatccaggacagcgtgacgggcagatctg

SEQ ID NO: 133168 - DNA, 30 bp, Artificial Sequence
  Synthetic oligonucleotide
taccccgatacaaaacagtcgagagatctg

SEQ ID NO: 133169 - DNA, 30 bp, Artificial Sequence
  Synthetic oligonucleotide
cgagccgaaaagcatatgtcaggggatctg

SEQ ID NO: 133170 - DNA, 30 bp, Artificial Sequence
  Synthetic oligonucleotide
tgcgattaaaggtaaaggagtggctatctg

SEQ ID NO: 133171 - DNA, 30 bp, Artificial Sequence
  Synthetic oligonucleotide
gtcgagagtactgtgccgccaaggtatctg

SEQ ID NO: 133172 - DNA, 30 bp, Artificial Sequence
  Synthetic oligonucleotide
cgtcaaggcctttcacaactcccaactctg

SEQ ID NO: 133173 - DNA, 30 bp, Artificial Sequence
  Synthetic oligonucleotide
aatagcagaagggagcctatatcaactctg

SEQ ID NO: 133174 - DNA, 30 bp, Artificial Sequence
  Synthetic oligonucleotide
gggattacgcataaggttcttatcactctg

SEQ ID NO: 133175 - DNA, 30 bp, Artificial Sequence
  Synthetic oligonucleotide
gaagtctcctttgatacactaagtactctg

SEQ ID NO: 133176 - DNA, 30 bp, Artificial Sequence
  Synthetic oligonucleotide
gaagcgaaatatgcgcttgaagcacctctg

SEQ ID NO: 133177 - DNA, 30 bp, Artificial Sequence
  Synthetic oligonucleotide
tccatgggataaatcgtagacttacctctg

SEQ ID NO: 133178 - DNA, 30 bp, Artificial Sequence
  Synthetic oligonucleotide
agagcggtcatttatcgaaagttcgctctg

SEQ ID NO: 133179 - DNA, 30 bp, Artificial Sequence
  Synthetic oligonucleotide
aaacataatcagacattgggtgtggctctg

SEQ ID NO: 133180 - DNA, 30 bp, Artificial Sequence
  Synthetic oligonucleotide
agtccaacacggtaccgtaccgctgctctg

SEQ ID NO: 133181 - DNA, 30 bp, Artificial Sequence
  Synthetic oligonucleotide
gagtccgttccaaaaccaaggattgctctg

SEQ ID NO: 133182 - DNA, 30 bp, Artificial Sequence
  Synthetic oligonucleotide
gatggcattagcactatatggatatctctg

SEQ ID NO: 133183 - DNA, 30 bp, Artificial Sequence
  Synthetic oligonucleotide
ccgcacgatcaggacagcacgccaagtctg

SEQ ID NO: 133184 - DNA, 30 bp, Artificial Sequence
  Synthetic oligonucleotide
gggttctaaggaagaaagtcacccagtctg

SEQ ID NO: 133185 - DNA, 30 bp, Artificial Sequence
  Synthetic oligonucleotide
ctgtcatcggagagggtaacgagccgtctg

SEQ ID NO: 133186 - DNA, 30 bp, Artificial Sequence
  Synthetic oligonucleotide
gtcaaccgtaacaactgggtttcgcgtctg

SEQ ID NO: 133187 - DNA, 30 bp, Artificial Sequence
  Synthetic oligonucleotide
ttatcgtaactagtcgccgagcttcgtctg

SEQ ID NO: 133188 - DNA, 30 bp, Artificial Sequence
  Synthetic oligonucleotide
gcataaagggccgtaagaagcaagggtctg

SEQ ID NO: 133189 - DNA, 30 bp, Artificial Sequence
  Synthetic oligonucleotide
ctcgaatgacgtaattatatgcggggtctg

SEQ ID NO: 133190 - DNA, 30 bp, Artificial Sequence
  Synthetic oligonucleotide
cagtcattctgtaactatcctctgggtctg

SEQ ID NO: 133191 - DNA, 30 bp, Artificial Sequence
  Synthetic oligonucleotide
tcgcgttgttctgaggggggtattggtctg

SEQ ID NO: 133192 - DNA, 30 bp, Artificial Sequence
  Synthetic oligonucleotide
gtcacgtactattctgagggttttggtctg

SEQ ID NO: 133193 - DNA, 30 bp, Artificial Sequence
  Synthetic oligonucleotide
attgctcacgcaattcccacttgatgtctg

SEQ ID NO: 133194 - DNA, 30 bp, Artificial Sequence
  Synthetic oligonucleotide
tgtgccggaggcacggccggaatctgtctg

SEQ ID NO: 133195 - DNA, 30 bp, Artificial Sequence
  Synthetic oligonucleotide
gtcagatagtgggatatcagtccgtgtctg

SEQ ID NO: 133196 - DNA, 30 bp, Artificial Sequence
  Synthetic oligonucleotide
agtaggatcattgtagcaatcgggtgtctg

SEQ ID NO: 133197 - DNA, 30 bp, Artificial Sequence
  Synthetic oligonucleotide
ctacggtatggtatcgtgtagagttgtctg

SEQ ID NO: 133198 - DNA, 30 bp, Artificial Sequence
  Synthetic oligonucleotide
ctcgggtccgacagggttggggaaattctg

SEQ ID NO: 133199 - DNA, 30 bp, Artificial Sequence
  Synthetic oligonucleotide
gtcatcaaatagtggtcctcttcaattctg

SEQ ID NO: 133200 - DNA, 30 bp, Artificial Sequence
  Synthetic oligonucleotide
ggtgtgcttcacacttagataattattctg

SEQ ID NO: 133201 - DNA, 30 bp, Artificial Sequence
  Synthetic oligonucleotide
cgtaagcgcaataaagcacgcgttattctg

SEQ ID NO: 133202 - DNA, 30 bp, Artificial Sequence
  Synthetic oligonucleotide
gcggataacggaagttatggcacacttctg

SEQ ID NO: 133203 - DNA, 30 bp, Artificial Sequence
  Synthetic oligonucleotide
gatcgcgaagggatacccgtgacacttctg

SEQ ID NO: 133204 - DNA, 30 bp, Artificial Sequence
  Synthetic oligonucleotide
agacagagtatacaggccgtacaccttctg

SEQ ID NO: 133205 - DNA, 30 bp, Artificial Sequence
  Synthetic oligonucleotide
ggtatctgatgaaatgctcatcaccttctg

SEQ ID NO: 133206 - DNA, 30 bp, Artificial Sequence
  Synthetic oligonucleotide
tgtacctgtagcggggggaagacccttctg

SEQ ID NO: 133207 - DNA, 30 bp, Artificial Sequence
  Synthetic oligonucleotide
ctaaaccttggggcaaatgcgccagttctg

SEQ ID NO: 133208 - DNA, 30 bp, Artificial Sequence
  Synthetic oligonucleotide
taaggagttaacggggggtctagagttctg

SEQ ID NO: 133209 - DNA, 30 bp, Artificial Sequence
  Synthetic oligonucleotide
cagtaggctatctcgccacctaaggttctg

SEQ ID NO: 133210 - DNA, 30 bp, Artificial Sequence
  Synthetic oligonucleotide
gcgcaagcttacgctgtgagcccatttctg

SEQ ID NO: 133211 - DNA, 30 bp, Artificial Sequence
  Synthetic oligonucleotide
ccagccgaacaggtcgctccggactttctg

SEQ ID NO: 133212 - DNA, 30 bp, Artificial Sequence
  Synthetic oligonucleotide
acctcaggctagcgcacaacttggtttctg

SEQ ID NO: 133213 - DNA, 30 bp, Artificial Sequence
  Synthetic oligonucleotide
agcaaagatcttattctgcggggcaaagtg

SEQ ID NO: 133214 - DNA, 30 bp, Artificial Sequence
  Synthetic oligonucleotide
acaaaggtgtgggcatgcgtactcaaagtg

SEQ ID NO: 133215 - DNA, 30 bp, Artificial Sequence
  Synthetic oligonucleotide
acatgtaagtaagcttagtatcaacaagtg

SEQ ID NO: 133216 - DNA, 30 bp, Artificial Sequence
  Synthetic oligonucleotide
cccacgcctgtgtggggataaacccaagtg

SEQ ID NO: 133217 - DNA, 30 bp, Artificial Sequence
  Synthetic oligonucleotide
agttcgtggccattagtcggtcggcaagtg

SEQ ID NO: 133218 - DNA, 30 bp, Artificial Sequence
  Synthetic oligonucleotide
ggggtgaacttacttagtaccgctcaagtg

SEQ ID NO: 133219 - DNA, 30 bp, Artificial Sequence
  Synthetic oligonucleotide
ggtaggtgcaactttgcattatctcaagtg

SEQ ID NO: 133220 - DNA, 30 bp, Artificial Sequence
  Synthetic oligonucleotide
aagagggggaacagccaattaggtcaagtg

SEQ ID NO: 133221 - DNA, 30 bp, Artificial Sequence
  Synthetic oligonucleotide
tgcgtacgccaattcctgcagtgagaagtg

SEQ ID NO: 133222 - DNA, 30 bp, Artificial Sequence
  Synthetic oligonucleotide
cgtattcgtcactcataatgaggataagtg

SEQ ID NO: 133223 - DNA, 30 bp, Artificial Sequence
  Synthetic oligonucleotide
ctgcatacaattcaaagagcaggctaagtg

SEQ ID NO: 133224 - DNA, 30 bp, Artificial Sequence
  Synthetic oligonucleotide
ccaatgggagcggacgttccagtctaagtg

SEQ ID NO: 133225 - DNA, 30 bp, Artificial Sequence
  Synthetic oligonucleotide
ccaaaccaatatctgaacactcattaagtg

SEQ ID NO: 133226 - DNA, 30 bp, Artificial Sequence
  Synthetic oligonucleotide
aaattacgaaaccggcgaactagaacagtg

SEQ ID NO: 133227 - DNA, 30 bp, Artificial Sequence
  Synthetic oligonucleotide
atacactagcgcgcgacacgatacacagtg

SEQ ID NO: 133228 - DNA, 30 bp, Artificial Sequence
  Synthetic oligonucleotide
cattgggtgtccaggtgagcaaagacagtg

SEQ ID NO: 133229 - DNA, 30 bp, Artificial Sequence
  Synthetic oligonucleotide
attaggaacgctggaaggacaacgacagtg

SEQ ID NO: 133230 - DNA, 30 bp, Artificial Sequence
  Synthetic oligonucleotide
ccatatccactcttgccatgcaatacagtg

SEQ ID NO: 133231 - DNA, 30 bp, Artificial Sequence
  Synthetic oligonucleotide
gttccgcatgtgaggattttgtgtacagtg

SEQ ID NO: 133232 - DNA, 30 bp, Artificial Sequence
  Synthetic oligonucleotide
cagctgtgtcggcttatgtccggaccagtg

SEQ ID NO: 133233 - DNA, 30 bp, Artificial Sequence
  Synthetic oligonucleotide
tacagatgattgtgttgggagttgccagtg

SEQ ID NO: 133234 - DNA, 30 bp, Artificial Sequence
  Synthetic oligonucleotide
acgtggacgttaactgccgtacaagcagtg

SEQ ID NO: 133235 - DNA, 30 bp, Artificial Sequence
  Synthetic oligonucleotide
ggaagccacaggtttgaactgtgtgcagtg

SEQ ID NO: 133236 - DNA, 30 bp, Artificial Sequence
  Synthetic oligonucleotide
atctggcgtagggacggtctgccatcagtg

SEQ ID NO: 133237 - DNA, 30 bp, Artificial Sequence
  Synthetic oligonucleotide
tagaaggtccgacctcgcacaatatcagtg

SEQ ID NO: 133238 - DNA, 30 bp, Artificial Sequence
  Synthetic oligonucleotide
ttgcaggtgcgcagaaattcgttctcagtg

SEQ ID NO: 133239 - DNA, 30 bp, Artificial Sequence
  Synthetic oligonucleotide
gatagctagcgtctcgttgtcgcaagagtg

SEQ ID NO: 133240 - DNA, 30 bp, Artificial Sequence
  Synthetic oligonucleotide
agggcgtaggtgcgggctcggggaagagtg

SEQ ID NO: 133241 - DNA, 30 bp, Artificial Sequence
  Synthetic oligonucleotide
ggttatttgcttacataaattgccagagtg

SEQ ID NO: 133242 - DNA, 30 bp, Artificial Sequence
  Synthetic oligonucleotide
agagcgcggtgtagcgggcttaatagagtg

SEQ ID NO: 133243 - DNA, 30 bp, Artificial Sequence
  Synthetic oligonucleotide
caaattgatggaaactccgtaactagagtg

SEQ ID NO: 133244 - DNA, 30 bp, Artificial Sequence
  Synthetic oligonucleotide
tagagcggtctgtccggtaagtgacgagtg

SEQ ID NO: 133245 - DNA, 30 bp, Artificial Sequence
  Synthetic oligonucleotide
gtttcctgtttacgacgaatcctacgagtg

SEQ ID NO: 133246 - DNA, 30 bp, Artificial Sequence
  Synthetic oligonucleotide
gcaatgggtgacgatgctccatagcgagtg

SEQ ID NO: 133247 - DNA, 30 bp, Artificial Sequence
  Synthetic oligonucleotide
tctctcatttggcgacgtcgaatgcgagtg

SEQ ID NO: 133248 - DNA, 30 bp, Artificial Sequence
  Synthetic oligonucleotide
gcaaaactagagtccaaagacgatcgagtg

SEQ ID NO: 133249 - DNA, 30 bp, Artificial Sequence
  Synthetic oligonucleotide
tcaccattgcaggagtatcacactcgagtg

SEQ ID NO: 133250 - DNA, 30 bp, Artificial Sequence
  Synthetic oligonucleotide
gcgagacacccggcagtccagagtcgagtg

SEQ ID NO: 133251 - DNA, 30 bp, Artificial Sequence
  Synthetic oligonucleotide
gttagtttttgttacagcaaacgaggagtg

SEQ ID NO: 133252 - DNA, 30 bp, Artificial Sequence
  Synthetic oligonucleotide
ttgcgagggccggccgagtaacgaggagtg

SEQ ID NO: 133253 - DNA, 30 bp, Artificial Sequence
  Synthetic oligonucleotide
gttaacgaggctctttggatcgagggagtg

SEQ ID NO: 133254 - DNA, 30 bp, Artificial Sequence
  Synthetic oligonucleotide
gtaatatatcggttgcggggtatgggagtg

SEQ ID NO: 133255 - DNA, 30 bp, Artificial Sequence
  Synthetic oligonucleotide
gatgttgaatattatatacgtcaatgagtg

SEQ ID NO: 133256 - DNA, 30 bp, Artificial Sequence
  Synthetic oligonucleotide
atagagcacatctgagtcgtaaattgagtg

SEQ ID NO: 133257 - DNA, 30 bp, Artificial Sequence
  Synthetic oligonucleotide
ggagtgaaacacgattctggtagttgagtg

SEQ ID NO: 133258 - DNA, 30 bp, Artificial Sequence
  Synthetic oligonucleotide
agaaagttggttcggtagttatccatagtg

SEQ ID NO: 133259 - DNA, 30 bp, Artificial Sequence
  Synthetic oligonucleotide
aataaagcatcaggaacggggggcatagtg

SEQ ID NO: 133260 - DNA, 30 bp, Artificial Sequence
  Synthetic oligonucleotide
ttccaggtcgatgctgtatgcgtactagtg

SEQ ID NO: 133261 - DNA, 30 bp, Artificial Sequence
  Synthetic oligonucleotide
cgccacgaagacatatgactggtactagtg

SEQ ID NO: 133262 - DNA, 30 bp, Artificial Sequence
  Synthetic oligonucleotide
tcagtcgctagtagcagaccacacctagtg

SEQ ID NO: 133263 - DNA, 30 bp, Artificial Sequence
  Synthetic oligonucleotide
cgcgttcatcgagggctaagtagtctagtg

SEQ ID NO: 133264 - DNA, 30 bp, Artificial Sequence
  Synthetic oligonucleotide
gaagtatagcacgacgggggtatagtagtg

SEQ ID NO: 133265 - DNA, 30 bp, Artificial Sequence
  Synthetic oligonucleotide
cgggtaacgggattactggaagccgtagtg

SEQ ID NO: 133266 - DNA, 30 bp, Artificial Sequence
  Synthetic oligonucleotide
cgagctaggaatgcaatcggcacggtagtg

SEQ ID NO: 133267 - DNA, 30 bp, Artificial Sequence
  Synthetic oligonucleotide
ataatagaatagctgctgctgagggtagtg

SEQ ID NO: 133268 - DNA, 30 bp, Artificial Sequence
  Synthetic oligonucleotide
ggactgctgacttcgcagagaatggtagtg

SEQ ID NO: 133269 - DNA, 30 bp, Artificial Sequence
  Synthetic oligonucleotide
acaaatattatcgagttgcgaggtgtagtg

SEQ ID NO: 133270 - DNA, 30 bp, Artificial Sequence
  Synthetic oligonucleotide
gtgcttcggtactaccttaagcttgtagtg

SEQ ID NO: 133271 - DNA, 30 bp, Artificial Sequence
  Synthetic oligonucleotide
aggacttagagaaaccccgttgcgttagtg

SEQ ID NO: 133272 - DNA, 30 bp, Artificial Sequence
  Synthetic oligonucleotide
ctctggcgtaaacgaaacggggggttagtg

SEQ ID NO: 133273 - DNA, 30 bp, Artificial Sequence
  Synthetic oligonucleotide
cggttctagtgttgaatgcgtatgttagtg

SEQ ID NO: 133274 - DNA, 30 bp, Artificial Sequence
  Synthetic oligonucleotide
tgggtattgtggtgattgtatagaaacgtg

SEQ ID NO: 133275 - DNA, 30 bp, Artificial Sequence
  Synthetic oligonucleotide
cagcgtaggctaatggggtgattaaacgtg

SEQ ID NO: 133276 - DNA, 30 bp, Artificial Sequence
  Synthetic oligonucleotide
acatagccggaatgcaaatagttaaacgtg

SEQ ID NO: 133277 - DNA, 30 bp, Artificial Sequence
  Synthetic oligonucleotide
tctcattcattggcctattccttcaacgtg

SEQ ID NO: 133278 - DNA, 30 bp, Artificial Sequence
  Synthetic oligonucleotide
ggatacttacagttaaacccctataacgtg

SEQ ID NO: 133279 - DNA, 30 bp, Artificial Sequence
  Synthetic oligonucleotide
ggacgcttaaataggtgcatagaacacgtg

SEQ ID NO: 133280 - DNA, 30 bp, Artificial Sequence
  Synthetic oligonucleotide
aacgcgagcatctcagggagaccacacgtg

SEQ ID NO: 133281 - DNA, 30 bp, Artificial Sequence
  Synthetic oligonucleotide
tgtaggtgagaggtgtgccaactacacgtg

SEQ ID NO: 133282 - DNA, 30 bp, Artificial Sequence
  Synthetic oligonucleotide
tctggacatggtactaagaaataccacgtg

SEQ ID NO: 133283 - DNA, 30 bp, Artificial Sequence
  Synthetic oligonucleotide
acaactcaaccgtaatagtgacctcacgtg

SEQ ID NO: 133284 - DNA, 30 bp, Artificial Sequence
  Synthetic oligonucleotide
tctaaaggggagttaacgcgtattcacgtg

SEQ ID NO: 133285 - DNA, 30 bp, Artificial Sequence
  Synthetic oligonucleotide
tagccatgggcgtgttgcatggaagacgtg

SEQ ID NO: 133286 - DNA, 30 bp, Artificial Sequence
  Synthetic oligonucleotide
ccattataacccaggcaatgataggacgtg

SEQ ID NO: 133287 - DNA, 30 bp, Artificial Sequence
  Synthetic oligonucleotide
gacatggcgggtccggagatacgttacgtg

SEQ ID NO: 133288 - DNA, 30 bp, Artificial Sequence
  Synthetic oligonucleotide
tagcgtgttgggctccgcccggcacccgtg

SEQ ID NO: 133289 - DNA, 30 bp, Artificial Sequence
  Synthetic oligonucleotide
ggagtcccgcaagcgtgcaaagtacccgtg

SEQ ID NO: 133290 - DNA, 30 bp, Artificial Sequence
  Synthetic oligonucleotide
cattgtctacatttgtaccaatatcccgtg

SEQ ID NO: 133291 - DNA, 30 bp, Artificial Sequence
  Synthetic oligonucleotide
aacaaaccgtagaagctactggttcccgtg

SEQ ID NO: 133292 - DNA, 30 bp, Artificial Sequence
  Synthetic oligonucleotide
ggggtggacgacaagcccaaaaaagccgtg

SEQ ID NO: 133293 - DNA, 30 bp, Artificial Sequence
  Synthetic oligonucleotide
tacgagcgctggtggaatttaagagccgtg

SEQ ID NO: 133294 - DNA, 30 bp, Artificial Sequence
  Synthetic oligonucleotide
tcacgctttaacattccacagttagccgtg

SEQ ID NO: 133295 - DNA, 30 bp, Artificial Sequence
  Synthetic oligonucleotide
agagagtaggttgtaaccaagagcgccgtg

SEQ ID NO: 133296 - DNA, 30 bp, Artificial Sequence
  Synthetic oligonucleotide
acacgccttatgtcaccatatacggccgtg

SEQ ID NO: 133297 - DNA, 30 bp, Artificial Sequence
  Synthetic oligonucleotide
tccatctatcatatattaacctttgccgtg

SEQ ID NO: 133298 - DNA, 30 bp, Artificial Sequence
  Synthetic oligonucleotide
acgccaacgaatcagtgatcgtactccgtg

SEQ ID NO: 133299 - DNA, 30 bp, Artificial Sequence
  Synthetic oligonucleotide
atgtaggctggtaacgtagtccagtccgtg

SEQ ID NO: 133300 - DNA, 30 bp, Artificial Sequence
  Synthetic oligonucleotide
cgctcacgaaattgaatgtgtcattccgtg

SEQ ID NO: 133301 - DNA, 30 bp, Artificial Sequence
  Synthetic oligonucleotide
tctgggacagggtgggctacaacttccgtg

SEQ ID NO: 133302 - DNA, 30 bp, Artificial Sequence
  Synthetic oligonucleotide
catggaagtcaactcctaggattttccgtg

SEQ ID NO: 133303 - DNA, 30 bp, Artificial Sequence
  Synthetic oligonucleotide
ctcacaaattggacatttgacataagcgtg

SEQ ID NO: 133304 - DNA, 30 bp, Artificial Sequence
  Synthetic oligonucleotide
tgcgcaggaaggttaaccatgaggagcgtg

SEQ ID NO: 133305 - DNA, 30 bp, Artificial Sequence
  Synthetic oligonucleotide
gtgcttaggaccattagtggccttcgcgtg

SEQ ID NO: 133306 - DNA, 30 bp, Artificial Sequence
  Synthetic oligonucleotide
ctgtgatatgtgacttacttctaaggcgtg

SEQ ID NO: 133307 - DNA, 30 bp, Artificial Sequence
  Synthetic oligonucleotide
tttcacatcagagctttgtggtgtggcgtg

SEQ ID NO: 133308 - DNA, 30 bp, Artificial Sequence
  Synthetic oligonucleotide
tgtgtttgaggacagtggatgtgtggcgtg

SEQ ID NO: 133309 - DNA, 30 bp, Artificial Sequence
  Synthetic oligonucleotide
aacagtcttactgcgtggtagaactgcgtg

SEQ ID NO: 133310 - DNA, 30 bp, Artificial Sequence
  Synthetic oligonucleotide
atcaggaattaacattcagagtactgcgtg

SEQ ID NO: 133311 - DNA, 30 bp, Artificial Sequence
  Synthetic oligonucleotide
cggtcttttaccccagatggtgattgcgtg

SEQ ID NO: 133312 - DNA, 30 bp, Artificial Sequence
  Synthetic oligonucleotide
ggcggaccctgtacccctgcccgttgcgtg

SEQ ID NO: 133313 - DNA, 30 bp, Artificial Sequence
  Synthetic oligonucleotide
cgtaaaggcagctagcattcaatcctcgtg

SEQ ID NO: 133314 - DNA, 30 bp, Artificial Sequence
  Synthetic oligonucleotide
ggctctgcactgaaatggccgccgctcgtg

SEQ ID NO: 133315 - DNA, 30 bp, Artificial Sequence
  Synthetic oligonucleotide
gggattagcataccgttaactggagtcgtg

SEQ ID NO: 133316 - DNA, 30 bp, Artificial Sequence
  Synthetic oligonucleotide
gtgttgactaaattgtctggctgagtcgtg

SEQ ID NO: 133317 - DNA, 30 bp, Artificial Sequence
  Synthetic oligonucleotide
cgaatgggtttatgacacgcactggtcgtg

SEQ ID NO: 133318 - DNA, 30 bp, Artificial Sequence
  Synthetic oligonucleotide
aactgttggggagggtcggcgtgattcgtg

SEQ ID NO: 133319 - DNA, 30 bp, Artificial Sequence
  Synthetic oligonucleotide
tggaaacacaattatttgggaaacttcgtg

SEQ ID NO: 133320 - DNA, 30 bp, Artificial Sequence
  Synthetic oligonucleotide
ggatcgagtgtgtatgttccggagttcgtg

SEQ ID NO: 133321 - DNA, 30 bp, Artificial Sequence
  Synthetic oligonucleotide
ccatcaattggaaccagtttcacgttcgtg

SEQ ID NO: 133322 - DNA, 30 bp, Artificial Sequence
  Synthetic oligonucleotide
tagctagaggattccccagcgatgttcgtg

SEQ ID NO: 133323 - DNA, 30 bp, Artificial Sequence
  Synthetic oligonucleotide
aagggcaattagacctgagagagtttcgtg

SEQ ID NO: 133324 - DNA, 30 bp, Artificial Sequence
  Synthetic oligonucleotide
ggctagtgaaacgaaaggtttgataaggtg

SEQ ID NO: 133325 - DNA, 31 bp, Artificial Sequence
  Synthetic oligonucleotide
tggtgtatattcatgtacagcacttaaggtg

SEQ ID NO: 133326 - DNA, 30 bp, Artificial Sequence
  Synthetic oligonucleotide
gtagattgctaaaattgcgtaatacaggtg

SEQ ID NO: 133327 - DNA, 30 bp, Artificial Sequence
  Synthetic oligonucleotide
cggccgacggaacgccaggcagtccaggtg

SEQ ID NO: 133328 - DNA, 30 bp, Artificial Sequence
  Synthetic oligonucleotide
attggtattgtactgttatgggctcaggtg

SEQ ID NO: 133329 - DNA, 30 bp, Artificial Sequence
  Synthetic oligonucleotide
tttcacacacgttcgggcgttggtcaggtg

SEQ ID NO: 133330 - DNA, 30 bp, Artificial Sequence
  Synthetic oligonucleotide
gtatagtaccgactcgagcagacagaggtg

SEQ ID NO: 133331 - DNA, 30 bp, Artificial Sequence
  Synthetic oligonucleotide
cgatggtgatgctgggtgggtcatgaggtg

SEQ ID NO: 133332 - DNA, 30 bp, Artificial Sequence
  Synthetic oligonucleotide
atccagagtaatactaaacaggatgaggtg

SEQ ID NO: 133333 - DNA, 30 bp, Artificial Sequence
  Synthetic oligonucleotide
ggctatccggaagcaaagtgataataggtg

SEQ ID NO: 133334 - DNA, 30 bp, Artificial Sequence
  Synthetic oligonucleotide
cttcgggatataaagcaccatgcgtaggtg

SEQ ID NO: 133335 - DNA, 30 bp, Artificial Sequence
  Synthetic oligonucleotide
cggatttcagggagtcaaaaatcgtaggtg

SEQ ID NO: 133336 - DNA, 30 bp, Artificial Sequence
  Synthetic oligonucleotide
gaacatggcaggctttggagacgttaggtg

SEQ ID NO: 133337 - DNA, 30 bp, Artificial Sequence
  Synthetic oligonucleotide
ggatgggttagcactgcttacatagcggtg

SEQ ID NO: 133338 - DNA, 30 bp, Artificial Sequence
  Synthetic oligonucleotide
ccttatacctgcggggagcatcgcgcggtg

SEQ ID NO: 133339 - DNA, 30 bp, Artificial Sequence
  Synthetic oligonucleotide
taacacagacgagtcacggcacgatcggtg

SEQ ID NO: 133340 - DNA, 30 bp, Artificial Sequence
  Synthetic oligonucleotide
gatggacggttgacaggacttgagagggtg

SEQ ID NO: 133341 - DNA, 30 bp, Artificial Sequence
  Synthetic oligonucleotide
ggcttgtgttaacatgagttgattagggtg

SEQ ID NO: 133342 - DNA, 30 bp, Artificial Sequence
  Synthetic oligonucleotide
catgtaaccagaatatctaactcccgggtg

SEQ ID NO: 133343 - DNA, 30 bp, Artificial Sequence
  Synthetic oligonucleotide
tgtgaaatacttaccatcctagcgcgggtg

SEQ ID NO: 133344 - DNA, 30 bp, Artificial Sequence
  Synthetic oligonucleotide
ccgcctggttcagaagtcacaatgcgggtg

SEQ ID NO: 133345 - DNA, 30 bp, Artificial Sequence
  Synthetic oligonucleotide
ctcaaataagtggtgtcggcggtgcgggtg

SEQ ID NO: 133346 - DNA, 30 bp, Artificial Sequence
  Synthetic oligonucleotide
ctggtgtgcaaaaccgtggttcccggggtg

SEQ ID NO: 133347 - DNA, 30 bp, Artificial Sequence
  Synthetic oligonucleotide
tgcgaaactcagcgagaaacatatggggtg

SEQ ID NO: 133348 - DNA, 30 bp, Artificial Sequence
  Synthetic oligonucleotide
gtaatcgtagggaggcgcgtgcttggggtg

SEQ ID NO: 133349 - DNA, 30 bp, Artificial Sequence
  Synthetic oligonucleotide
gaacagattatatataacgtcgaatgggtg

SEQ ID NO: 133350 - DNA, 30 bp, Artificial Sequence
  Synthetic oligonucleotide
ttaagaaacacgctgagtcattcctgggtg

SEQ ID NO: 133351 - DNA, 30 bp, Artificial Sequence
  Synthetic oligonucleotide
ggaatcaggaaaggccgcgataacatggtg

SEQ ID NO: 133352 - DNA, 30 bp, Artificial Sequence
  Synthetic oligonucleotide
gagctgggtggggcgccgtcgcccatggtg

SEQ ID NO: 133353 - DNA, 30 bp, Artificial Sequence
  Synthetic oligonucleotide
ccctaaggccctcgattagcttttatggtg

SEQ ID NO: 133354 - DNA, 30 bp, Artificial Sequence
  Synthetic oligonucleotide
gattttgagcaatagtatagtaaactggtg

SEQ ID NO: 133355 - DNA, 30 bp, Artificial Sequence
  Synthetic oligonucleotide
agctctcgtcgcgctagttattctctggtg

SEQ ID NO: 133356 - DNA, 30 bp, Artificial Sequence
  Synthetic oligonucleotide
ctagtagccggtcagaggtgttaagtggtg

SEQ ID NO: 133357 - DNA, 30 bp, Artificial Sequence
  Synthetic oligonucleotide
agggcgctgcgaaatgtaccgtgagtggtg

SEQ ID NO: 133358 - DNA, 30 bp, Artificial Sequence
  Synthetic oligonucleotide
tagctcatggtacgggaaaattacgtggtg

SEQ ID NO: 133359 - DNA, 30 bp, Artificial Sequence
  Synthetic oligonucleotide
ataagttacgggggtggagttgtcgtggtg

SEQ ID NO: 133360 - DNA, 30 bp, Artificial Sequence
  Synthetic oligonucleotide
tgaagcatcaaatggtcgccaactgtggtg

SEQ ID NO: 133361 - DNA, 30 bp, Artificial Sequence
  Synthetic oligonucleotide
tgtatgggtattatggctgagtacttggtg

SEQ ID NO: 133362 - DNA, 30 bp, Artificial Sequence
  Synthetic oligonucleotide
tacctagaccgaaaacgagctcgtttggtg

SEQ ID NO: 133363 - DNA, 30 bp, Artificial Sequence
  Synthetic oligonucleotide
gggggaagctttcttcacccgcgcaatgtg

SEQ ID NO: 133364 - DNA, 30 bp, Artificial Sequence
  Synthetic oligonucleotide
gtctagtacgataagcctgtagcccatgtg

SEQ ID NO: 133365 - DNA, 30 bp, Artificial Sequence
  Synthetic oligonucleotide
acaggtggtgtgaatgattcaaccgatgtg

SEQ ID NO: 133366 - DNA, 30 bp, Artificial Sequence
  Synthetic oligonucleotide
atgtactgccagatgaaaggttggtatgtg

SEQ ID NO: 133367 - DNA, 30 bp, Artificial Sequence
  Synthetic oligonucleotide
ccagcaaagtactgtaaacataaaactgtg

SEQ ID NO: 133368 - DNA, 30 bp, Artificial Sequence
  Synthetic oligonucleotide
actgtttacccgtagttccatcaacctgtg

SEQ ID NO: 133369 - DNA, 30 bp, Artificial Sequence
  Synthetic oligonucleotide
aactgttcgagtaggaagtctatccctgtg

SEQ ID NO: 133370 - DNA, 30 bp, Artificial Sequence
  Synthetic oligonucleotide
ccggcattcggaacactctcaagatctgtg

SEQ ID NO: 133371 - DNA, 30 bp, Artificial Sequence
  Synthetic oligonucleotide
gacttgaaagatacctggatgatctctgtg

SEQ ID NO: 133372 - DNA, 30 bp, Artificial Sequence
  Synthetic oligonucleotide
ttgagggcgtctaaccacacaaccagtgtg

SEQ ID NO: 133373 - DNA, 30 bp, Artificial Sequence
  Synthetic oligonucleotide
cgggtgttacgccaatgtctcagcagtgtg

SEQ ID NO: 133374 - DNA, 30 bp, Artificial Sequence
  Synthetic oligonucleotide
gtcggcgcggggtcatggtctgggagtgtg

SEQ ID NO: 133375 - DNA, 30 bp, Artificial Sequence
  Synthetic oligonucleotide
aaataacaatcagtcgagaaggtacgtgtg

SEQ ID NO: 133376 - DNA, 30 bp, Artificial Sequence
  Synthetic oligonucleotide
ttgggggcttgatctagctgttagcgtgtg

SEQ ID NO: 133377 - DNA, 30 bp, Artificial Sequence
  Synthetic oligonucleotide
ctccctaacaaaggtaaaaatcggcgtgtg

SEQ ID NO: 133378 - DNA, 30 bp, Artificial Sequence
  Synthetic oligonucleotide
gtatcctacgagggacaactagatcgtgtg

SEQ ID NO: 133379 - DNA, 30 bp, Artificial Sequence
  Synthetic oligonucleotide
agatgtagatgggacttaagatatcgtgtg

SEQ ID NO: 133380 - DNA, 30 bp, Artificial Sequence
  Synthetic oligonucleotide
cataagctaagccaggactcatttcgtgtg

SEQ ID NO: 133381 - DNA, 35 bp, Artificial Sequence
  Synthetic oligonucleotide
ggtgaaagggtcgccgcggcatggaagtgggtgtg

SEQ ID NO: 133382 - DNA, 30 bp, Artificial Sequence
  Synthetic oligonucleotide
taaacgtatgatattcgtacggtcattgtg

SEQ ID NO: 133383 - DNA, 30 bp, Artificial Sequence
  Synthetic oligonucleotide
agcttatgataagcaagagccgagattgtg

SEQ ID NO: 133384 - DNA, 30 bp, Artificial Sequence
  Synthetic oligonucleotide
ggcaaatcataccccggatgatagattgtg

SEQ ID NO: 133385 - DNA, 30 bp, Artificial Sequence
  Synthetic oligonucleotide
caatcccaacataaggcttagcggattgtg

SEQ ID NO: 133386 - DNA, 30 bp, Artificial Sequence
  Synthetic oligonucleotide
catcaggcatcgagaacttatcggattgtg

SEQ ID NO: 133387 - DNA, 30 bp, Artificial Sequence
  Synthetic oligonucleotide
tagaaggtagtggatgggatgcctcttgtg

SEQ ID NO: 133388 - DNA, 30 bp, Artificial Sequence
  Synthetic oligonucleotide
ctcagcgcgaactgaatggatgaggttgtg

SEQ ID NO: 133389 - DNA, 30 bp, Artificial Sequence
  Synthetic oligonucleotide
cagacatacggctaccggagttcggttgtg

SEQ ID NO: 133390 - DNA, 30 bp, Artificial Sequence
  Synthetic oligonucleotide
tgaggcggacatggtgacctttaatttgtg

SEQ ID NO: 133391 - DNA, 30 bp, Artificial Sequence
  Synthetic oligonucleotide
atgcgttggcgagccgaatggttatttgtg

SEQ ID NO: 133392 - DNA, 30 bp, Artificial Sequence
  Synthetic oligonucleotide
tgtgtagtttagtaaactacagccaaattg

SEQ ID NO: 133393 - DNA, 30 bp, Artificial Sequence
  Synthetic oligonucleotide
atggccggcctaactcccagggagaaattg

SEQ ID NO: 133394 - DNA, 30 bp, Artificial Sequence
  Synthetic oligonucleotide
tcccaccgcattctcgagggcatccaattg

SEQ ID NO: 133395 - DNA, 30 bp, Artificial Sequence
  Synthetic oligonucleotide
gtcgggtatgatgaagtggcttgagaattg

SEQ ID NO: 133396 - DNA, 30 bp, Artificial Sequence
  Synthetic oligonucleotide
cattgtggtccgtcagtgcagcaggaattg

SEQ ID NO: 133397 - DNA, 30 bp, Artificial Sequence
  Synthetic oligonucleotide
aacacgcaatgggtagcataatatgaattg

SEQ ID NO: 133398 - DNA, 30 bp, Artificial Sequence
  Synthetic oligonucleotide
gtcctgcagccacgacaaccgactgaattg

SEQ ID NO: 133399 - DNA, 30 bp, Artificial Sequence
  Synthetic oligonucleotide
tgctaagctacgccacgtgggtctgaattg

SEQ ID NO: 133400 - DNA, 30 bp, Artificial Sequence
  Synthetic oligonucleotide
atgcgtaacggcagcaagtacggctaattg

SEQ ID NO: 133401 - DNA, 30 bp, Artificial Sequence
  Synthetic oligonucleotide
ttccgtagtctgtaatctgagaattaattg

SEQ ID NO: 133402 - DNA, 30 bp, Artificial Sequence
  Synthetic oligonucleotide
tcagagaccaatatcgccagaataacattg

SEQ ID NO: 133403 - DNA, 30 bp, Artificial Sequence
  Synthetic oligonucleotide
ggtcgttggacgcatctgaccgagacattg

SEQ ID NO: 133404 - DNA, 30 bp, Artificial Sequence
  Synthetic oligonucleotide
gacatggctataggacatagggcaccattg

SEQ ID NO: 133405 - DNA, 30 bp, Artificial Sequence
  Synthetic oligonucleotide
atagcgttctcagtgactcaaaagccattg

SEQ ID NO: 133406 - DNA, 30 bp, Artificial Sequence
  Synthetic oligonucleotide
caattatggactgcacagcgatagccattg

SEQ ID NO: 133407 - DNA, 30 bp, Artificial Sequence
  Synthetic oligonucleotide
catgtaaatacctcgtcataggaagcattg

SEQ ID NO: 133408 - DNA, 30 bp, Artificial Sequence
  Synthetic oligonucleotide
gaattgcaggctacatctaatatggcattg

SEQ ID NO: 133409 - DNA, 30 bp, Artificial Sequence
  Synthetic oligonucleotide
cgattctggatagtccgcatgaaatcattg

SEQ ID NO: 133410 - DNA, 30 bp, Artificial Sequence
  Synthetic oligonucleotide
tatgtcaatgcacaggatttcccatcattg

SEQ ID NO: 133411 - DNA, 30 bp, Artificial Sequence
  Synthetic oligonucleotide
ccaggtaactggggtcgggtagactcattg

SEQ ID NO: 133412 - DNA, 30 bp, Artificial Sequence
  Synthetic oligonucleotide
tgtcgaaagggattgtctatggtctcattg

SEQ ID NO: 133413 - DNA, 30 bp, Artificial Sequence
  Synthetic oligonucleotide
gagttacatgcgagacaaacgacgtcattg

SEQ ID NO: 133414 - DNA, 30 bp, Artificial Sequence
  Synthetic oligonucleotide
ctcgtggttgtgtaataggcgagaagattg

SEQ ID NO: 133415 - DNA, 30 bp, Artificial Sequence
  Synthetic oligonucleotide
cgtcctaataatctgtactgtataagattg

SEQ ID NO: 133416 - DNA, 30 bp, Artificial Sequence
  Synthetic oligonucleotide
gcaaacccggaatatacggcacacagattg

SEQ ID NO: 133417 - DNA, 30 bp, Artificial Sequence
  Synthetic oligonucleotide
ccgcaggagatgacgtccgaccgcagattg

SEQ ID NO: 133418 - DNA, 30 bp, Artificial Sequence
  Synthetic oligonucleotide
ggcgatacttactatggtaccaagagattg

SEQ ID NO: 133419 - DNA, 30 bp, Artificial Sequence
  Synthetic oligonucleotide
agaactgtttttgaacgatgggttagattg

SEQ ID NO: 133420 - DNA, 30 bp, Artificial Sequence
  Synthetic oligonucleotide
cgcaattgattatgagtagaaggacgattg

SEQ ID NO: 133421 - DNA, 30 bp, Artificial Sequence
  Synthetic oligonucleotide
tagagtccatgatcaagtacggcgcgattg

SEQ ID NO: 133422 - DNA, 30 bp, Artificial Sequence
  Synthetic oligonucleotide
agggcacaacatctatcgggccgtcgattg

SEQ ID NO: 133423 - DNA, 30 bp, Artificial Sequence
  Synthetic oligonucleotide
atcagattttagagtggagacatcggattg

SEQ ID NO: 133424 - DNA, 30 bp, Artificial Sequence
  Synthetic oligonucleotide
aacgggtaggatctaaagtcgtgttgattg

SEQ ID NO: 133425 - DNA, 30 bp, Artificial Sequence
  Synthetic oligonucleotide
gtcttacgacatacgcgattccgaatattg

SEQ ID NO: 133426 - DNA, 30 bp, Artificial Sequence
  Synthetic oligonucleotide
cagtagggtgggaaatatggtggcatattg

SEQ ID NO: 133427 - DNA, 30 bp, Artificial Sequence
  Synthetic oligonucleotide
gcttacgtgaatatcaaagacaagatattg

SEQ ID NO: 133428 - DNA, 30 bp, Artificial Sequence
  Synthetic oligonucleotide
tacgtaaaaaccactcgcaaagttatattg

SEQ ID NO: 133429 - DNA, 30 bp, Artificial Sequence
  Synthetic oligonucleotide
cgtgaaggcagccgtgtttcagacctattg

SEQ ID NO: 133430 - DNA, 30 bp, Artificial Sequence
  Synthetic oligonucleotide
atgtatgttatccgatgggattggctattg

SEQ ID NO: 133431 - DNA, 30 bp, Artificial Sequence
  Synthetic oligonucleotide
ggcgatgcagggtttcaacggcgtctattg

SEQ ID NO: 133432 - DNA, 30 bp, Artificial Sequence
  Synthetic oligonucleotide
aatggtgggtcaacacctgtccaggtattg

SEQ ID NO: 133433 - DNA, 30 bp, Artificial Sequence
  Synthetic oligonucleotide
gcgtgcggccggccagctaagacattattg

SEQ ID NO: 133434 - DNA, 30 bp, Artificial Sequence
  Synthetic oligonucleotide
gatgcatggacgggtctcgattatttattg

SEQ ID NO: 133435 - DNA, 30 bp, Artificial Sequence
  Synthetic oligonucleotide
agtgccaaccgctccgtatgagccaacttg

SEQ ID NO: 133436 - DNA, 30 bp, Artificial Sequence
  Synthetic oligonucleotide
aagaccaataaaacgtgaggtaagaacttg

SEQ ID NO: 133437 - DNA, 30 bp, Artificial Sequence
  Synthetic oligonucleotide
cagttgccggaatgcaaacatattaacttg

SEQ ID NO: 133438 - DNA, 30 bp, Artificial Sequence
  Synthetic oligonucleotide
tgacgcataaatacaccataaagccacttg

SEQ ID NO: 133439 - DNA, 30 bp, Artificial Sequence
  Synthetic oligonucleotide
cagggaccgttggggtcggtatagcacttg

SEQ ID NO: 133440 - DNA, 30 bp, Artificial Sequence
  Synthetic oligonucleotide
cttgattcgtactaaatagaaaatcacttg

SEQ ID NO: 133441 - DNA, 30 bp, Artificial Sequence
  Synthetic oligonucleotide
agactcattgggtgagtcgaaagagacttg

SEQ ID NO: 133442 - DNA, 30 bp, Artificial Sequence
  Synthetic oligonucleotide
gccttcgaaagccaactacaaatcgacttg

SEQ ID NO: 133443 - DNA, 30 bp, Artificial Sequence
  Synthetic oligonucleotide
cataccgacagccacccatcaaaatacttg

SEQ ID NO: 133444 - DNA, 30 bp, Artificial Sequence
  Synthetic oligonucleotide
tggaccgcatggtcggtgcttacatacttg

SEQ ID NO: 133445 - DNA, 30 bp, Artificial Sequence
  Synthetic oligonucleotide
tattcgtaaagctgtacgaacagatacttg

SEQ ID NO: 133446 - DNA, 30 bp, Artificial Sequence
  Synthetic oligonucleotide
atctaacctggacgttcccagacgtacttg

SEQ ID NO: 133447 - DNA, 30 bp, Artificial Sequence
  Synthetic oligonucleotide
tataggccgataaacagatgtacgtacttg

SEQ ID NO: 133448 - DNA, 30 bp, Artificial Sequence
  Synthetic oligonucleotide
ggtgagcggggtcgatagcaggtgtacttg

SEQ ID NO: 133449 - DNA, 30 bp, Artificial Sequence
  Synthetic oligonucleotide
accatattcaggtccatagaaaacaccttg

SEQ ID NO: 133450 - DNA, 30 bp, Artificial Sequence
  Synthetic oligonucleotide
acgacaaggagcctgccgatttttaccttg

SEQ ID NO: 133451 - DNA, 30 bp, Artificial Sequence
  Synthetic oligonucleotide
cgaagatcgacgttatcggggtgacccttg

SEQ ID NO: 133452 - DNA, 30 bp, Artificial Sequence
  Synthetic oligonucleotide
atggaagatttcaagacgatccgagccttg

SEQ ID NO: 133453 - DNA, 30 bp, Artificial Sequence
  Synthetic oligonucleotide
ggcgggccgagcgggttttacaatgccttg

SEQ ID NO: 133454 - DNA, 30 bp, Artificial Sequence
  Synthetic oligonucleotide
cgtcccccgttggccgtctttagtgccttg

SEQ ID NO: 133455 - DNA, 30 bp, Artificial Sequence
  Synthetic oligonucleotide
ggatggttacacctgaggtactactccttg

SEQ ID NO: 133456 - DNA, 30 bp, Artificial Sequence
  Synthetic oligonucleotide
tccgatcacaacgtactaagaaggtccttg

SEQ ID NO: 133457 - DNA, 30 bp, Artificial Sequence
  Synthetic oligonucleotide
cacatcctcaaatatcatagatcaagcttg

SEQ ID NO: 133458 - DNA, 30 bp, Artificial Sequence
  Synthetic oligonucleotide
tgggcactatatgacttaagtggcagcttg

SEQ ID NO: 133459 - DNA, 30 bp, Artificial Sequence
  Synthetic oligonucleotide
cttacaaactaatgaacaacacatagcttg

SEQ ID NO: 133460 - DNA, 30 bp, Artificial Sequence
  Synthetic oligonucleotide
gctggatatatgagagccggggctagcttg

SEQ ID NO: 133461 - DNA, 30 bp, Artificial Sequence
  Synthetic oligonucleotide
taaccgttacggtgacagcgacaaggcttg

SEQ ID NO: 133462 - DNA, 30 bp, Artificial Sequence
  Synthetic oligonucleotide
acgattgtagtggtcacggtaacaatcttg

SEQ ID NO: 133463 - DNA, 30 bp, Artificial Sequence
  Synthetic oligonucleotide
tccgttagggaaagggtacatatcatcttg

SEQ ID NO: 133464 - DNA, 30 bp, Artificial Sequence
  Synthetic oligonucleotide
cacgttaccggctccatacttcttctcttg

SEQ ID NO: 133465 - DNA, 30 bp, Artificial Sequence
  Synthetic oligonucleotide
agagcccagctcttgagatgaccagtcttg

SEQ ID NO: 133466 - DNA, 30 bp, Artificial Sequence
  Synthetic oligonucleotide
agagtaagagacaacgcatcaggcgtcttg

SEQ ID NO: 133467 - DNA, 30 bp, Artificial Sequence
  Synthetic oligonucleotide
ctgaagttctatgagagactgatcgtcttg

SEQ ID NO: 133468 - DNA, 30 bp, Artificial Sequence
  Synthetic oligonucleotide
gttgcaattgcgcctgattatcaggtcttg

SEQ ID NO: 133469 - DNA, 30 bp, Artificial Sequence
  Synthetic oligonucleotide
tcgagttaatttagaaatagtatggtcttg

SEQ ID NO: 133470 - DNA, 30 bp, Artificial Sequence
  Synthetic oligonucleotide
gctacaattcaccatgaagtgtatgtcttg

SEQ ID NO: 133471 - DNA, 30 bp, Artificial Sequence
  Synthetic oligonucleotide
agggtccaggccagatatactactgtcttg

SEQ ID NO: 133472 - DNA, 30 bp, Artificial Sequence
  Synthetic oligonucleotide
aactcctccacgtaaagaatgcgattcttg

SEQ ID NO: 133473 - DNA, 30 bp, Artificial Sequence
  Synthetic oligonucleotide
gaaaatggtaagagataataaggcttcttg

SEQ ID NO: 133474 - DNA, 30 bp, Artificial Sequence
  Synthetic oligonucleotide
tcatcaggtgcccgccccccggggcagttg

SEQ ID NO: 133475 - DNA, 30 bp, Artificial Sequence
  Synthetic oligonucleotide
acggctctccggaaaaacgtcggagagttg

SEQ ID NO: 133476 - DNA, 30 bp, Artificial Sequence
  Synthetic oligonucleotide
tggatccatctaattggactcctcgagttg

SEQ ID NO: 133477 - DNA, 30 bp, Artificial Sequence
  Synthetic oligonucleotide
tgttgtccaaaagcggtaagatcggagttg

SEQ ID NO: 133478 - DNA, 30 bp, Artificial Sequence
  Synthetic oligonucleotide
gagtagaatgtgtcaggccgtggggagttg

SEQ ID NO: 133479 - DNA, 30 bp, Artificial Sequence
  Synthetic oligonucleotide
ttagctccggatgggagaaaggaatagttg

SEQ ID NO: 133480 - DNA, 30 bp, Artificial Sequence
  Synthetic oligonucleotide
ctaatgttcgtaacaggacgattgtagttg

SEQ ID NO: 133481 - DNA, 30 bp, Artificial Sequence
  Synthetic oligonucleotide
cgacacgcccgttatttaaacgtaacgttg

SEQ ID NO: 133482 - DNA, 30 bp, Artificial Sequence
  Synthetic oligonucleotide
agacttaaaaacattgcaatagagacgttg

SEQ ID NO: 133483 - DNA, 30 bp, Artificial Sequence
  Synthetic oligonucleotide
aacccggtgagcaaagagagggagacgttg

SEQ ID NO: 133484 - DNA, 30 bp, Artificial Sequence
  Synthetic oligonucleotide
tgtccaaagcaagcggccggaagaccgttg

SEQ ID NO: 133485 - DNA, 30 bp, Artificial Sequence
  Synthetic oligonucleotide
gcgtcgccaaagagcgtcagcccgccgttg

SEQ ID NO: 133486 - DNA, 30 bp, Artificial Sequence
  Synthetic oligonucleotide
gtccgggtcaatatgtaggctggggcgttg

SEQ ID NO: 133487 - DNA, 30 bp, Artificial Sequence
  Synthetic oligonucleotide
ctggggcttaattaccgaactaactcgttg

SEQ ID NO: 133488 - DNA, 30 bp, Artificial Sequence
  Synthetic oligonucleotide
tgcaggacatggggagctaggagctcgttg

SEQ ID NO: 133489 - DNA, 30 bp, Artificial Sequence
  Synthetic oligonucleotide
gctataagatgagtggaatcaatctcgttg

SEQ ID NO: 133490 - DNA, 30 bp, Artificial Sequence
  Synthetic oligonucleotide
atctcaatggtactcggtcaactttcgttg

SEQ ID NO: 133491 - DNA, 30 bp, Artificial Sequence
  Synthetic oligonucleotide
ataagcgcatacaataatccccgaaggttg

SEQ ID NO: 133492 - DNA, 30 bp, Artificial Sequence
  Synthetic oligonucleotide
gggtgtggaatcgtaacgcggttaaggttg

SEQ ID NO: 133493 - DNA, 30 bp, Artificial Sequence
  Synthetic oligonucleotide
tgctggaaagctgcccgcgcgcagaggttg

SEQ ID NO: 133494 - DNA, 30 bp, Artificial Sequence
  Synthetic oligonucleotide
taccatagatcgtaggtaattctccggttg

SEQ ID NO: 133495 - DNA, 30 bp, Artificial Sequence
  Synthetic oligonucleotide
tagttaggctcaacgcgagcccggcggttg

SEQ ID NO: 133496 - DNA, 30 bp, Artificial Sequence
  Synthetic oligonucleotide
gcgtggccaacggataggatttggcggttg

SEQ ID NO: 133497 - DNA, 30 bp, Artificial Sequence
  Synthetic oligonucleotide
cgtaggggacggggcgtactgcacgggttg

SEQ ID NO: 133498 - DNA, 30 bp, Artificial Sequence
  Synthetic oligonucleotide
cacgggcagtcccgcacttcggccgggttg

SEQ ID NO: 133499 - DNA, 30 bp, Artificial Sequence
  Synthetic oligonucleotide
ggggcagtgtggcggtgctgcagggggttg

SEQ ID NO: 133500 - DNA, 30 bp, Artificial Sequence
  Synthetic oligonucleotide
aggggatgtcgtcagtatcggatatggttg

SEQ ID NO: 133501 - DNA, 30 bp, Artificial Sequence
  Synthetic oligonucleotide
tgcttaccataagtttttctggcctggttg

SEQ ID NO: 133502 - DNA, 30 bp, Artificial Sequence
  Synthetic oligonucleotide
ccatgctatcggtctaagtgagcgtggttg

SEQ ID NO: 133503 - DNA, 30 bp, Artificial Sequence
  Synthetic oligonucleotide
gctttcaaagatctaaagagtagaatgttg

SEQ ID NO: 133504 - DNA, 30 bp, Artificial Sequence
  Synthetic oligonucleotide
gctggtgacctaggcatcatacgaatgttg

SEQ ID NO: 133505 - DNA, 30 bp, Artificial Sequence
  Synthetic oligonucleotide
tcctgtggtgtttagaccctccccatgttg

SEQ ID NO: 133506 - DNA, 30 bp, Artificial Sequence
  Synthetic oligonucleotide
accaaaaatagcggagagagtcagatgttg

SEQ ID NO: 133507 - DNA, 30 bp, Artificial Sequence
  Synthetic oligonucleotide
gcggacgacggcaccctcaagccgatgttg

SEQ ID NO: 133508 - DNA, 30 bp, Artificial Sequence
  Synthetic oligonucleotide
attgtcagggctctcgccacgtggatgttg

SEQ ID NO: 133509 - DNA, 30 bp, Artificial Sequence
  Synthetic oligonucleotide
taaacttagcaaattccaccactgatgttg

SEQ ID NO: 133510 - DNA, 30 bp, Artificial Sequence
  Synthetic oligonucleotide
ctgcgatacaggatggtggatactatgttg

SEQ ID NO: 133511 - DNA, 30 bp, Artificial Sequence
  Synthetic oligonucleotide
tatgggtacatcggttctcgtccgctgttg

SEQ ID NO: 133512 - DNA, 30 bp, Artificial Sequence
  Synthetic oligonucleotide
gtttgcagaggtagtagccaactagtgttg

SEQ ID NO: 133513 - DNA, 30 bp, Artificial Sequence
  Synthetic oligonucleotide
cgaatctggggcattgtcgccgcggtgttg

SEQ ID NO: 133514 - DNA, 30 bp, Artificial Sequence
  Synthetic oligonucleotide
gatcacaaatgcctaaaaactggtgtgttg

SEQ ID NO: 133515 - DNA, 30 bp, Artificial Sequence
  Synthetic oligonucleotide
ttgacatggtttgtaatggattggttgttg

SEQ ID NO: 133516 - DNA, 30 bp, Artificial Sequence
  Synthetic oligonucleotide
agttcactactagcctcgtgtgtgttgttg

SEQ ID NO: 133517 - DNA, 30 bp, Artificial Sequence
  Synthetic oligonucleotide
atgatatattgtaaaagttcagttttgttg

SEQ ID NO: 133518 - DNA, 30 bp, Artificial Sequence
  Synthetic oligonucleotide
taggattacgtacggggggtgggaaatttg

SEQ ID NO: 133519 - DNA, 30 bp, Artificial Sequence
  Synthetic oligonucleotide
gagaacggcgatggagtagattgaaatttg

SEQ ID NO: 133520 - DNA, 30 bp, Artificial Sequence
  Synthetic oligonucleotide
gggaaacgttacgtagaagacctaaatttg

SEQ ID NO: 133521 - DNA, 30 bp, Artificial Sequence
  Synthetic oligonucleotide
accacacatctgaagaaaaaaaccaatttg

SEQ ID NO: 133522 - DNA, 30 bp, Artificial Sequence
  Synthetic oligonucleotide
atagagctgtaggtaacccacagcaatttg

SEQ ID NO: 133523 - DNA, 30 bp, Artificial Sequence
  Synthetic oligonucleotide
cacacagtacttgcatatacttataatttg

SEQ ID NO: 133524 - DNA, 30 bp, Artificial Sequence
  Synthetic oligonucleotide
ttccgaataaacggcaagaaatttaatttg

SEQ ID NO: 133525 - DNA, 30 bp, Artificial Sequence
  Synthetic oligonucleotide
ccactttccacatctacaaaataacatttg

SEQ ID NO: 133526 - DNA, 30 bp, Artificial Sequence
  Synthetic oligonucleotide
atgacgagtgagcgatcttgctgtcatttg

SEQ ID NO: 133527 - DNA, 30 bp, Artificial Sequence
  Synthetic oligonucleotide
tttggagccgtgactgtttcccgcgatttg

SEQ ID NO: 133528 - DNA, 30 bp, Artificial Sequence
  Synthetic oligonucleotide
tagcatgagacgtaaccatccaaggatttg

SEQ ID NO: 133529 - DNA, 30 bp, Artificial Sequence
  Synthetic oligonucleotide
gcattggcccatatcctagattgtgatttg

SEQ ID NO: 133530 - DNA, 30 bp, Artificial Sequence
  Synthetic oligonucleotide
ccctacgatgtaaatagagtgattgatttg

SEQ ID NO: 133531 - DNA, 30 bp, Artificial Sequence
  Synthetic oligonucleotide
gggctgctgtcggagacctcaaattatttg

SEQ ID NO: 133532 - DNA, 30 bp, Artificial Sequence
  Synthetic oligonucleotide
tcatggttacacgaaaaacactcttatttg

SEQ ID NO: 133533 - DNA, 30 bp, Artificial Sequence
  Synthetic oligonucleotide
tggcctactgctgacatataagaaactttg

SEQ ID NO: 133534 - DNA, 30 bp, Artificial Sequence
  Synthetic oligonucleotide
tgcgtgacagcccgctcctgtgccactttg

SEQ ID NO: 133535 - DNA, 30 bp, Artificial Sequence
  Synthetic oligonucleotide
accgaggccgcgctgcctttccgcactttg

SEQ ID NO: 133536 - DNA, 30 bp, Artificial Sequence
  Synthetic oligonucleotide
gtgactgaatgacgggaggcgcggactttg

SEQ ID NO: 133537 - DNA, 30 bp, Artificial Sequence
  Synthetic oligonucleotide
ggcactggtctaaagtacatatagcctttg

SEQ ID NO: 133538 - DNA, 30 bp, Artificial Sequence
  Synthetic oligonucleotide
tggattggactaaagggcggttacagtttg

SEQ ID NO: 133539 - DNA, 30 bp, Artificial Sequence
  Synthetic oligonucleotide
atatcgcgcatctttgtggcataacgtttg

SEQ ID NO: 133540 - DNA, 30 bp, Artificial Sequence
  Synthetic oligonucleotide
agaggaggcccttagttgcgaatgcgtttg

SEQ ID NO: 133541 - DNA, 30 bp, Artificial Sequence
  Synthetic oligonucleotide
ttcgcgaatggtttggacagaaatggtttg

SEQ ID NO: 133542 - DNA, 30 bp, Artificial Sequence
  Synthetic oligonucleotide
aaggaacgtgcctgatgtaggtctggtttg

SEQ ID NO: 133543 - DNA, 30 bp, Artificial Sequence
  Synthetic oligonucleotide
acgacattccttcttgagtcaggatgtttg

SEQ ID NO: 133544 - DNA, 30 bp, Artificial Sequence
  Synthetic oligonucleotide
tctgacctaattgtgatgtttctctgtttg

SEQ ID NO: 133545 - DNA, 30 bp, Artificial Sequence
  Synthetic oligonucleotide
gatgatcgagaaccgggcaggccgtgtttg

SEQ ID NO: 133546 - DNA, 30 bp, Artificial Sequence
  Synthetic oligonucleotide
tagttgccaggtcgcataatgagaattttg

SEQ ID NO: 133547 - DNA, 30 bp, Artificial Sequence
  Synthetic oligonucleotide
gatcgagctagcctcgggcgagacattttg

SEQ ID NO: 133548 - DNA, 30 bp, Artificial Sequence
  Synthetic oligonucleotide
agaactctggatacagggcccagtattttg

SEQ ID NO: 133549 - DNA, 30 bp, Artificial Sequence
  Synthetic oligonucleotide
acttccaaacgatttcaaaacctgcttttg

SEQ ID NO: 133550 - DNA, 30 bp, Artificial Sequence
  Synthetic oligonucleotide
cttatgactgggtgttggtgatatcttttg

SEQ ID NO: 133551 - DNA, 30 bp, Artificial Sequence
  Synthetic oligonucleotide
cgggtacacatgcttcgatgggtagttttg

SEQ ID NO: 133552 - DNA, 30 bp, Artificial Sequence
  Synthetic oligonucleotide
ctgaagaaattcagacgtgctgtggttttg

SEQ ID NO: 133553 - DNA, 30 bp, Artificial Sequence
  Synthetic oligonucleotide
acagcttgagcggggatcgagctatttttg

SEQ ID NO: 133554 - DNA, 30 bp, Artificial Sequence
  Synthetic oligonucleotide
aaggggacgggacgtacacattaccaaaat

SEQ ID NO: 133555 - DNA, 30 bp, Artificial Sequence
  Synthetic oligonucleotide
agcaccagcttggctgaccccatgcaaaat

SEQ ID NO: 133556 - DNA, 30 bp, Artificial Sequence
  Synthetic oligonucleotide
ctctcaattggtacgaatcatagcgaaaat

SEQ ID NO: 133557 - DNA, 30 bp, Artificial Sequence
  Synthetic oligonucleotide
cgtgtcttagaagtgtgaccgcaggaaaat

SEQ ID NO: 133558 - DNA, 30 bp, Artificial Sequence
  Synthetic oligonucleotide
tcggtaacctaatctttctggccggaaaat

SEQ ID NO: 133559 - DNA, 30 bp, Artificial Sequence
  Synthetic oligonucleotide
tcctcgtcctaaatatacagcgcggaaaat

SEQ ID NO: 133560 - DNA, 30 bp, Artificial Sequence
  Synthetic oligonucleotide
tgcaagctgtcaatcagtgctgcggaaaat

SEQ ID NO: 133561 - DNA, 30 bp, Artificial Sequence
  Synthetic oligonucleotide
agaaaaatgggtctgaaccgaagataaaat

SEQ ID NO: 133562 - DNA, 30 bp, Artificial Sequence
  Synthetic oligonucleotide
catcagtagaaccttccagagtaaacaaat

SEQ ID NO: 133563 - DNA, 30 bp, Artificial Sequence
  Synthetic oligonucleotide
gcatagctgacggccggaaatttaacaaat

SEQ ID NO: 133564 - DNA, 30 bp, Artificial Sequence
  Synthetic oligonucleotide
cccatgggttgcagggattaggcgacaaat

SEQ ID NO: 133565 - DNA, 30 bp, Artificial Sequence
  Synthetic oligonucleotide
ttgatcaagccagctgaccaacggacaaat

SEQ ID NO: 133566 - DNA, 30 bp, Artificial Sequence
  Synthetic oligonucleotide
atacttgaaaagggtagcccagggacaaat

SEQ ID NO: 133567 - DNA, 30 bp, Artificial Sequence
  Synthetic oligonucleotide
tggctagcaccgtgtggcagcgggacaaat

SEQ ID NO: 133568 - DNA, 30 bp, Artificial Sequence
  Synthetic oligonucleotide
gggcttgctgtcctgtagtctaaaccaaat

SEQ ID NO: 133569 - DNA, 30 bp, Artificial Sequence
  Synthetic oligonucleotide
aaaaggctagtacatggttgcaacccaaat

SEQ ID NO: 133570 - DNA, 30 bp, Artificial Sequence
  Synthetic oligonucleotide
gaagcgggagagcctagcccgaacccaaat

SEQ ID NO: 133571 - DNA, 30 bp, Artificial Sequence
  Synthetic oligonucleotide
tcaacattgtagaacgccgtgtcagcaaat

SEQ ID NO: 133572 - DNA, 30 bp, Artificial Sequence
  Synthetic oligonucleotide
gctaccagcctggtgggataaagagcaaat

SEQ ID NO: 133573 - DNA, 30 bp, Artificial Sequence
  Synthetic oligonucleotide
aatacagagagtgcggtggtagaggcaaat

SEQ ID NO: 133574 - DNA, 30 bp, Artificial Sequence
  Synthetic oligonucleotide
tgagtaagcccttctaaccacattgcaaat

SEQ ID NO: 133575 - DNA, 31 bp, Artificial Sequence
  Synthetic oligonucleotide
ggaacgagtgtcggtggatttcacctcaaat

SEQ ID NO: 133576 - DNA, 30 bp, Artificial Sequence
  Synthetic oligonucleotide
aaatgcgtgagacggcgaggtagctcaaat

SEQ ID NO: 133577 - DNA, 30 bp, Artificial Sequence
  Synthetic oligonucleotide
gacggataaaaaggtgtacaatcttcaaat

SEQ ID NO: 133578 - DNA, 30 bp, Artificial Sequence
  Synthetic oligonucleotide
agacttgccgacagactatctagcagaaat

SEQ ID NO: 133579 - DNA, 30 bp, Artificial Sequence
  Synthetic oligonucleotide
ccgcaccctaaaaaatcatagggacgaaat

SEQ ID NO: 133580 - DNA, 30 bp, Artificial Sequence
  Synthetic oligonucleotide
ttgccgaagagtatttaccaagaccgaaat

SEQ ID NO: 133581 - DNA, 30 bp, Artificial Sequence
  Synthetic oligonucleotide
gaagatcatcccgtcacgccggaccgaaat

SEQ ID NO: 133582 - DNA, 30 bp, Artificial Sequence
  Synthetic oligonucleotide
acgcgagaggactccaccccgtcccgaaat

SEQ ID NO: 133583 - DNA, 30 bp, Artificial Sequence
  Synthetic oligonucleotide
atctgggatgtatccgagccggtccgaaat

SEQ ID NO: 133584 - DNA, 30 bp, Artificial Sequence
  Synthetic oligonucleotide
cgcataaccaattaacaattggaaggaaat

SEQ ID NO: 133585 - DNA, 30 bp, Artificial Sequence
  Synthetic oligonucleotide
ctgttgacaagttaataggtcacgggaaat

SEQ ID NO: 133586 - DNA, 30 bp, Artificial Sequence
  Synthetic oligonucleotide
tcgagtgatggcgttggtggaactggaaat

SEQ ID NO: 133587 - DNA, 30 bp, Artificial Sequence
  Synthetic oligonucleotide
gttacagtacctacagaggcccactgaaat

SEQ ID NO: 133588 - DNA, 30 bp, Artificial Sequence
  Synthetic oligonucleotide
tcgaagaacactaccggcgggtcctgaaat

SEQ ID NO: 133589 - DNA, 31 bp, Artificial Sequence
  Synthetic oligonucleotide
gagttggtattagtaagggcaaagttgaaat

SEQ ID NO: 133590 - DNA, 30 bp, Artificial Sequence
  Synthetic oligonucleotide
acatgataggccagaatcggcaacataaat

SEQ ID NO: 133591 - DNA, 30 bp, Artificial Sequence
  Synthetic oligonucleotide
aagagcagtcggttctgtgggggcataaat

SEQ ID NO: 133592 - DNA, 30 bp, Artificial Sequence
  Synthetic oligonucleotide
gtcctgacccagttcgtgcgacagataaat

SEQ ID NO: 133593 - DNA, 30 bp, Artificial Sequence
  Synthetic oligonucleotide
gatcgccggaaaaatgtactccggataaat

SEQ ID NO: 133594 - DNA, 30 bp, Artificial Sequence
  Synthetic oligonucleotide
gatagcgagattagtggggtaggcctaaat

SEQ ID NO: 133595 - DNA, 30 bp, Artificial Sequence
  Synthetic oligonucleotide
tgttggggtaaaaagagtacgtgcctaaat

SEQ ID NO: 133596 - DNA, 30 bp, Artificial Sequence
  Synthetic oligonucleotide
aaggtcggcgtgaaaagtagtatgctaaat

SEQ ID NO: 133597 - DNA, 30 bp, Artificial Sequence
  Synthetic oligonucleotide
gtcctccataaccggcttggaaacgtaaat

SEQ ID NO: 133598 - DNA, 30 bp, Artificial Sequence
  Synthetic oligonucleotide
ggtcacaatagtctgtgggaacacgtaaat

SEQ ID NO: 133599 - DNA, 30 bp, Artificial Sequence
  Synthetic oligonucleotide
gaaacgtaacgactgaatatccacgtaaat

SEQ ID NO: 133600 - DNA, 30 bp, Artificial Sequence
  Synthetic oligonucleotide
cgcctgcacgtctaatagacacgggtaaat

SEQ ID NO: 133601 - DNA, 30 bp, Artificial Sequence
  Synthetic oligonucleotide
ggagggccacccgccgggtaatggttaaat

SEQ ID NO: 133602 - DNA, 30 bp, Artificial Sequence
  Synthetic oligonucleotide
ttgagcgtttagcccatgggatctttaaat

SEQ ID NO: 133603 - DNA, 30 bp, Artificial Sequence
  Synthetic oligonucleotide
tacgaattgtatggtagattcccaaacaat

SEQ ID NO: 133604 - DNA, 30 bp, Artificial Sequence
  Synthetic oligonucleotide
ggctcgagttttactgccaccacgaacaat

SEQ ID NO: 133605 - DNA, 30 bp, Artificial Sequence
  Synthetic oligonucleotide
tcggcaacttgtgggccgaaatctaacaat

SEQ ID NO: 133606 - DNA, 30 bp, Artificial Sequence
  Synthetic oligonucleotide
gacacttcgagttaatgtctatgacacaat

SEQ ID NO: 133607 - DNA, 30 bp, Artificial Sequence
  Synthetic oligonucleotide
cgaacagatgttcggccccccactcacaat

SEQ ID NO: 133608 - DNA, 30 bp, Artificial Sequence
  Synthetic oligonucleotide
aatatatggaagaatgtcaataaagacaat

SEQ ID NO: 133609 - DNA, 30 bp, Artificial Sequence
  Synthetic oligonucleotide
cacgccaattccaattgggggtcggacaat

SEQ ID NO: 133610 - DNA, 30 bp, Artificial Sequence
  Synthetic oligonucleotide
tgctgtaaacctttaaaaggtggggacaat

SEQ ID NO: 133611 - DNA, 30 bp, Artificial Sequence
  Synthetic oligonucleotide
gtcatacgacgaatgtgcgactatgacaat

SEQ ID NO: 133612 - DNA, 30 bp, Artificial Sequence
  Synthetic oligonucleotide
aagggtgccgctggacgagacgggtacaat

SEQ ID NO: 133613 - DNA, 30 bp, Artificial Sequence
  Synthetic oligonucleotide
gcatgactcgatccgatttttgggtacaat

SEQ ID NO: 133614 - DNA, 30 bp, Artificial Sequence
  Synthetic oligonucleotide
atatgcgcgttagaaaagagagggaccaat

SEQ ID NO: 133615 - DNA, 30 bp, Artificial Sequence
  Synthetic oligonucleotide
atagtgacaatacaaacataaactcccaat

SEQ ID NO: 133616 - DNA, 30 bp, Artificial Sequence
  Synthetic oligonucleotide
cagacctgattctatcttcataacgccaat

SEQ ID NO: 133617 - DNA, 30 bp, Artificial Sequence
  Synthetic oligonucleotide
aatgcaatggaaaggatttaagccgccaat

SEQ ID NO: 133618 - DNA, 30 bp, Artificial Sequence
  Synthetic oligonucleotide
gctaagaggcctccccgacgattcgccaat

SEQ ID NO: 133619 - DNA, 30 bp, Artificial Sequence
  Synthetic oligonucleotide
tgatcgcaaggaactaccgaaactgccaat

SEQ ID NO: 133620 - DNA, 30 bp, Artificial Sequence
  Synthetic oligonucleotide
agcgaatcgtttagtgtccacagctccaat

SEQ ID NO: 133621 - DNA, 30 bp, Artificial Sequence
  Synthetic oligonucleotide
cgcggtgcgatctagacccgctcgtccaat

SEQ ID NO: 133622 - DNA, 31 bp, Artificial Sequence
  Synthetic oligonucleotide
cgatcagtagcaatgcccctagtaaagcaat

SEQ ID NO: 133623 - DNA, 30 bp, Artificial Sequence
  Synthetic oligonucleotide
acttggaggagctcatcttgatcaagcaat

SEQ ID NO: 133624 - DNA, 30 bp, Artificial Sequence
  Synthetic oligonucleotide
ggaggtagtccggtgtcgcttctaagcaat

SEQ ID NO: 133625 - DNA, 30 bp, Artificial Sequence
  Synthetic oligonucleotide
tgccgtgcaggagggtacagcaccagcaat

SEQ ID NO: 133626 - DNA, 30 bp, Artificial Sequence
  Synthetic oligonucleotide
tgagaagagaattggctcgatttcagcaat

SEQ ID NO: 133627 - DNA, 30 bp, Artificial Sequence
  Synthetic oligonucleotide
tcgacatcgcgaaaaactgccccgagcaat

SEQ ID NO: 133628 - DNA, 30 bp, Artificial Sequence
  Synthetic oligonucleotide
atgcatagtaagggtatggattggagcaat

SEQ ID NO: 133629 - DNA, 30 bp, Artificial Sequence
  Synthetic oligonucleotide
taagtgacaagaacagcaacggtgagcaat

SEQ ID NO: 133630 - DNA, 30 bp, Artificial Sequence
  Synthetic oligonucleotide
aaattaagatacctaggaggggctagcaat

SEQ ID NO: 133631 - DNA, 30 bp, Artificial Sequence
  Synthetic oligonucleotide
ttaatgcatcaaccagagagagaacgcaat

SEQ ID NO: 133632 - DNA, 30 bp, Artificial Sequence
  Synthetic oligonucleotide
gtgagcgcgcgcagggagaaattacgcaat

SEQ ID NO: 133633 - DNA, 30 bp, Artificial Sequence
  Synthetic oligonucleotide
tcatcgtgttcgtcgtcgcatcacggcaat

SEQ ID NO: 133634 - DNA, 30 bp, Artificial Sequence
  Synthetic oligonucleotide
cggcgtcagtgatccagtgcctatggcaat

SEQ ID NO: 133635 - DNA, 30 bp, Artificial Sequence
  Synthetic oligonucleotide
cgctcgtgtcacttagtggtgagtggcaat

SEQ ID NO: 133636 - DNA, 30 bp, Artificial Sequence
  Synthetic oligonucleotide
ttcaatcgagtattaagtgataaatgcaat

SEQ ID NO: 133637 - DNA, 30 bp, Artificial Sequence
  Synthetic oligonucleotide
gtaaattgacactaacagagcagctgcaat

SEQ ID NO: 133638 - DNA, 30 bp, Artificial Sequence
  Synthetic oligonucleotide
tgtagtgggaaaactaatgtgaagtgcaat

SEQ ID NO: 133639 - DNA, 30 bp, Artificial Sequence
  Synthetic oligonucleotide
accaccgacgagtgcgcattgtcaatcaat

SEQ ID NO: 133640 - DNA, 30 bp, Artificial Sequence
  Synthetic oligonucleotide
tggttcttgtaactgatcacacatatcaat

SEQ ID NO: 133641 - DNA, 30 bp, Artificial Sequence
  Synthetic oligonucleotide
agatgtaactactcaggcatggatatcaat

SEQ ID NO: 133642 - DNA, 30 bp, Artificial Sequence
  Synthetic oligonucleotide
cagtaaaggccacagtaagtttcgctcaat

SEQ ID NO: 133643 - DNA, 30 bp, Artificial Sequence
  Synthetic oligonucleotide
gacaggtctaagattggtacgagggtcaat

SEQ ID NO: 133644 - DNA, 30 bp, Artificial Sequence
  Synthetic oligonucleotide
atattgccaggaacatcaacaagtttcaat

SEQ ID NO: 133645 - DNA, 30 bp, Artificial Sequence
  Synthetic oligonucleotide
tgaccgtcagggataggattgtcaaagaat

SEQ ID NO: 133646 - DNA, 30 bp, Artificial Sequence
  Synthetic oligonucleotide
gaggtagatccacggaagcttgacaagaat

SEQ ID NO: 133647 - DNA, 30 bp, Artificial Sequence
  Synthetic oligonucleotide
ggcgatgtcgtgtggcgctctcataagaat

SEQ ID NO: 133648 - DNA, 30 bp, Artificial Sequence
  Synthetic oligonucleotide
tttgcaaagtagagaggaacttgacagaat

SEQ ID NO: 133649 - DNA, 30 bp, Artificial Sequence
  Synthetic oligonucleotide
ggcgaggtcccatagtgtaggccccagaat

SEQ ID NO: 133650 - DNA, 30 bp, Artificial Sequence
  Synthetic oligonucleotide
acataacgaattacatgactcattcagaat

SEQ ID NO: 133651 - DNA, 30 bp, Artificial Sequence
  Synthetic oligonucleotide
atattcgcgagcgcgttaccttaagagaat

SEQ ID NO: 133652 - DNA, 30 bp, Artificial Sequence
  Synthetic oligonucleotide
caacagaggattcgattgactttcgagaat

SEQ ID NO: 133653 - DNA, 30 bp, Artificial Sequence
  Synthetic oligonucleotide
gggctcagcgaggctgaaagttaggagaat

SEQ ID NO: 133654 - DNA, 30 bp, Artificial Sequence
  Synthetic oligonucleotide
catggctcgttcgggtcgggttaggagaat

SEQ ID NO: 133655 - DNA, 30 bp, Artificial Sequence
  Synthetic oligonucleotide
gactgggaaactgcaagcactttatagaat

SEQ ID NO: 133656 - DNA, 30 bp, Artificial Sequence
  Synthetic oligonucleotide
tgtgttcatgggagtatgaggagctagaat

SEQ ID NO: 133657 - DNA, 30 bp, Artificial Sequence
  Synthetic oligonucleotide
ttagcctacagtttgaagggggcgtagaat

SEQ ID NO: 133658 - DNA, 30 bp, Artificial Sequence
  Synthetic oligonucleotide
aaaaggccggacccactagcgacttagaat

SEQ ID NO: 133659 - DNA, 30 bp, Artificial Sequence
  Synthetic oligonucleotide
gtaattgacacaggaccgggatgcacgaat

SEQ ID NO: 133660 - DNA, 30 bp, Artificial Sequence
  Synthetic oligonucleotide
gcaaggacgtgcgttcatctagtgacgaat

SEQ ID NO: 133661 - DNA, 30 bp, Artificial Sequence
  Synthetic oligonucleotide
agagccgacaccggctccgtcgtgacgaat

SEQ ID NO: 133662 - DNA, 30 bp, Artificial Sequence
  Synthetic oligonucleotide
atccgtgacagaaagtctgttggtacgaat

SEQ ID NO: 133663 - DNA, 30 bp, Artificial Sequence
  Synthetic oligonucleotide
gttcgcctaaataatatggtaattacgaat

SEQ ID NO: 133664 - DNA, 30 bp, Artificial Sequence
  Synthetic oligonucleotide
tctcacccggtaagcgaccccgttacgaat

SEQ ID NO: 133665 - DNA, 31 bp, Artificial Sequence
  Synthetic oligonucleotide
tgcaaggttgccatgagatttcgttacgaat

SEQ ID NO: 133666 - DNA, 30 bp, Artificial Sequence
  Synthetic oligonucleotide
tcgaaaaggttatggttctggtaaccgaat

SEQ ID NO: 133667 - DNA, 30 bp, Artificial Sequence
  Synthetic oligonucleotide
cagtcccagggactgaggatatcaccgaat

SEQ ID NO: 133668 - DNA, 30 bp, Artificial Sequence
  Synthetic oligonucleotide
atcggcggggcaatacaacctagcccgaat

SEQ ID NO: 133669 - DNA, 30 bp, Artificial Sequence
  Synthetic oligonucleotide
acatacgcccacaatgcgtcactggcgaat

SEQ ID NO: 133670 - DNA, 30 bp, Artificial Sequence
  Synthetic oligonucleotide
aatcaactaagttttcccgtccggtcgaat

SEQ ID NO: 133671 - DNA, 30 bp, Artificial Sequence
  Synthetic oligonucleotide
atatgaaaccatggccaacgtcggtcgaat

SEQ ID NO: 133672 - DNA, 30 bp, Artificial Sequence
  Synthetic oligonucleotide
tacccaacttggaaacctcatatgtcgaat

SEQ ID NO: 133673 - DNA, 30 bp, Artificial Sequence
  Synthetic oligonucleotide
agacaaagattgcggcccaatttgtcgaat

SEQ ID NO: 133674 - DNA, 30 bp, Artificial Sequence
  Synthetic oligonucleotide
gtggagggaaactgctctggacattcgaat

SEQ ID NO: 133675 - DNA, 30 bp, Artificial Sequence
  Synthetic oligonucleotide
catatggagtggtaggctgaaggttcgaat

SEQ ID NO: 133676 - DNA, 30 bp, Artificial Sequence
  Synthetic oligonucleotide
ctaacgtatgcaaagaagtaactaaggaat

SEQ ID NO: 133677 - DNA, 30 bp, Artificial Sequence
  Synthetic oligonucleotide
atccaagactccgagagacgaaggaggaat

SEQ ID NO: 133678 - DNA, 30 bp, Artificial Sequence
  Synthetic oligonucleotide
ccgtcgggacagctgatgacctgtaggaat

SEQ ID NO: 133679 - DNA, 30 bp, Artificial Sequence
  Synthetic oligonucleotide
tgtcgtaacgagagactaacagttaggaat

SEQ ID NO: 133680 - DNA, 30 bp, Artificial Sequence
  Synthetic oligonucleotide
tctattaggaaacacgcctcagttaggaat

SEQ ID NO: 133681 - DNA, 30 bp, Artificial Sequence
  Synthetic oligonucleotide
atgacgcggtcgagagaggatctacggaat

SEQ ID NO: 133682 - DNA, 30 bp, Artificial Sequence
  Synthetic oligonucleotide
acagcttagcttctgctcggaagtcggaat

SEQ ID NO: 133683 - DNA, 30 bp, Artificial Sequence
  Synthetic oligonucleotide
ggatgatatcaaggcaggaccttagggaat

SEQ ID NO: 133684 - DNA, 30 bp, Artificial Sequence
  Synthetic oligonucleotide
catcattcggaggctcgaccgctcgggaat

SEQ ID NO: 133685 - DNA, 30 bp, Artificial Sequence
  Synthetic oligonucleotide
ggagtatagaaagttggatttgaggggaat

SEQ ID NO: 133686 - DNA, 30 bp, Artificial Sequence
  Synthetic oligonucleotide
actagagatccaatcgtgcttgatgggaat

SEQ ID NO: 133687 - DNA, 30 bp, Artificial Sequence
  Synthetic oligonucleotide
tcctgggcggagtgtcaacgtagtgggaat

SEQ ID NO: 133688 - DNA, 30 bp, Artificial Sequence
  Synthetic oligonucleotide
tgtatggctgaattgatacgcattgggaat

SEQ ID NO: 133689 - DNA, 30 bp, Artificial Sequence
  Synthetic oligonucleotide
atccaaacatgggggctgctgaactggaat

SEQ ID NO: 133690 - DNA, 30 bp, Artificial Sequence
  Synthetic oligonucleotide
atcatacggggctgataatttaggtggaat

SEQ ID NO: 133691 - DNA, 30 bp, Artificial Sequence
  Synthetic oligonucleotide
accggacatgtataggggccatacatgaat

SEQ ID NO: 133692 - DNA, 30 bp, Artificial Sequence
  Synthetic oligonucleotide
cgaacaacactaaaaagccactacatgaat

SEQ ID NO: 133693 - DNA, 30 bp, Artificial Sequence
  Synthetic oligonucleotide
aggatggtatagcgatagacgactatgaat

SEQ ID NO: 133694 - DNA, 30 bp, Artificial Sequence
  Synthetic oligonucleotide
gactgaagacacataaaactctcgctgaat

SEQ ID NO: 133695 - DNA, 30 bp, Artificial Sequence
  Synthetic oligonucleotide
tatgcgggtcaagcgctagatggagtgaat

SEQ ID NO: 133696 - DNA, 30 bp, Artificial Sequence
  Synthetic oligonucleotide
gtgtgttcagggggacatcagtacgtgaat

SEQ ID NO: 133697 - DNA, 30 bp, Artificial Sequence
  Synthetic oligonucleotide
ggggctacgaccttgcaggcatgattgaat

SEQ ID NO: 133698 - DNA, 30 bp, Artificial Sequence
  Synthetic oligonucleotide
tttctactcaagcggaagacatagttgaat

SEQ ID NO: 133699 - DNA, 30 bp, Artificial Sequence
  Synthetic oligonucleotide
cgcggttagctgacataattctgaaataat

SEQ ID NO: 133700 - DNA, 30 bp, Artificial Sequence
  Synthetic oligonucleotide
accggactctacgcataggtaaccaataat

SEQ ID NO: 133701 - DNA, 30 bp, Artificial Sequence
  Synthetic oligonucleotide
tcagatctatgggtcaattactgcaataat

SEQ ID NO: 133702 - DNA, 30 bp, Artificial Sequence
  Synthetic oligonucleotide
tcagcattgaagttaaatgcttggaataat

SEQ ID NO: 133703 - DNA, 30 bp, Artificial Sequence
  Synthetic oligonucleotide
tggtggtaggtcggttataggagtaataat

SEQ ID NO: 133704 - DNA, 30 bp, Artificial Sequence
  Synthetic oligonucleotide
attcggacacaagtattagatcgtaataat

SEQ ID NO: 133705 - DNA, 30 bp, Artificial Sequence
  Synthetic oligonucleotide
cggatgttgttttgggtggaatgtaataat

SEQ ID NO: 133706 - DNA, 30 bp, Artificial Sequence
  Synthetic oligonucleotide
cactattggtcaggcctacttagggataat

SEQ ID NO: 133707 - DNA, 30 bp, Artificial Sequence
  Synthetic oligonucleotide
gcttacgaaagctgtatgtgatgtgataat

SEQ ID NO: 133708 - DNA, 30 bp, Artificial Sequence
  Synthetic oligonucleotide
aagctaatagcgagtaggagtctctataat

SEQ ID NO: 133709 - DNA, 30 bp, Artificial Sequence
  Synthetic oligonucleotide
ccgtcagaagccatttacaacggttataat

SEQ ID NO: 133710 - DNA, 30 bp, Artificial Sequence
  Synthetic oligonucleotide
ttgggatggatggtcgtgtagggttataat

SEQ ID NO: 133711 - DNA, 30 bp, Artificial Sequence
  Synthetic oligonucleotide
ctaaggtgtgacagaggggttaaaactaat

SEQ ID NO: 133712 - DNA, 30 bp, Artificial Sequence
  Synthetic oligonucleotide
tcgtagggtgccgcaacatcagccactaat

SEQ ID NO: 133713 - DNA, 30 bp, Artificial Sequence
  Synthetic oligonucleotide
ggttagacatggggcggaggaaatactaat

SEQ ID NO: 133714 - DNA, 30 bp, Artificial Sequence
  Synthetic oligonucleotide
tcttggaaggattaatggctaaaacctaat

SEQ ID NO: 133715 - DNA, 30 bp, Artificial Sequence
  Synthetic oligonucleotide
taaccgttgaaggggttaaactcacctaat

SEQ ID NO: 133716 - DNA, 40 bp, Artificial Sequence
  Synthetic oligonucleotide
atagtcacgaatcatccatgtagtatgtaagtaagctaat

SEQ ID NO: 133717 - DNA, 30 bp, Artificial Sequence
  Synthetic oligonucleotide
cgatggtagtacgtgcctctacacgctaat

SEQ ID NO: 133718 - DNA, 30 bp, Artificial Sequence
  Synthetic oligonucleotide
tgtaatgtgccgtcactaatgcgcgctaat

SEQ ID NO: 133719 - DNA, 30 bp, Artificial Sequence
  Synthetic oligonucleotide
gcgaactgggatagattcgaatactctaat

SEQ ID NO: 133720 - DNA, 30 bp, Artificial Sequence
  Synthetic oligonucleotide
tgaacatggcgataatatcataaaagtaat

SEQ ID NO: 133721 - DNA, 30 bp, Artificial Sequence
  Synthetic oligonucleotide
ccatggttggggacctacctgtgtagtaat

SEQ ID NO: 133722 - DNA, 30 bp, Artificial Sequence
  Synthetic oligonucleotide
gtgggggaaaagtacctagtgtgacgtaat

SEQ ID NO: 133723 - DNA, 30 bp, Artificial Sequence
  Synthetic oligonucleotide
tccaaccgtcgattcatggcgacccgtaat

SEQ ID NO: 133724 - DNA, 30 bp, Artificial Sequence
  Synthetic oligonucleotide
gcgagtcactcgaaagtgatggtccgtaat

SEQ ID NO: 133725 - DNA, 30 bp, Artificial Sequence
  Synthetic oligonucleotide
atgggttatgattgtcatcagtggcgtaat

SEQ ID NO: 133726 - DNA, 30 bp, Artificial Sequence
  Synthetic oligonucleotide
ccgataccgagtgactgataaatgcgtaat

SEQ ID NO: 133727 - DNA, 30 bp, Artificial Sequence
  Synthetic oligonucleotide
gtcggtgttgtgtccacacggagaggtaat

SEQ ID NO: 133728 - DNA, 30 bp, Artificial Sequence
  Synthetic oligonucleotide
aggcagcagctgctggtcaagcacggtaat

SEQ ID NO: 133729 - DNA, 30 bp, Artificial Sequence
  Synthetic oligonucleotide
ggacgttatcttctcggaggatacggtaat

SEQ ID NO: 133730 - DNA, 30 bp, Artificial Sequence
  Synthetic oligonucleotide
gtgcgtacgcgcgggcttacccggggtaat

SEQ ID NO: 133731 - DNA, 30 bp, Artificial Sequence
  Synthetic oligonucleotide
atgtcacttaaagctgacaacgttggtaat

SEQ ID NO: 133732 - DNA, 30 bp, Artificial Sequence
  Synthetic oligonucleotide
taggaaaacttaacgcacgtgggatgtaat

SEQ ID NO: 133733 - DNA, 30 bp, Artificial Sequence
  Synthetic oligonucleotide
ttgattacaacacaacgtaacttgtgtaat

SEQ ID NO: 133734 - DNA, 30 bp, Artificial Sequence
  Synthetic oligonucleotide
tcttccaccaggctcgagatattttgtaat

SEQ ID NO: 133735 - DNA, 30 bp, Artificial Sequence
  Synthetic oligonucleotide
tgattgtagggactccggggtaccattaat

SEQ ID NO: 133736 - DNA, 30 bp, Artificial Sequence
  Synthetic oligonucleotide
tcgatcgggcgaacacgtgcacgcattaat

SEQ ID NO: 133737 - DNA, 30 bp, Artificial Sequence
  Synthetic oligonucleotide
gctatacggcagtccagagcggtcattaat

SEQ ID NO: 133738 - DNA, 31 bp, Artificial Sequence
  Synthetic oligonucleotide
tgatataaggtcaaatgtgctggacgttaat

SEQ ID NO: 133739 - DNA, 30 bp, Artificial Sequence
  Synthetic oligonucleotide
gaacgatagtcaaaccgcggagccgttaat

SEQ ID NO: 133740 - DNA, 30 bp, Artificial Sequence
  Synthetic oligonucleotide
tcgtgtttgacactcacacgtatggttaat

SEQ ID NO: 133741 - DNA, 30 bp, Artificial Sequence
  Synthetic oligonucleotide
caacaacggcgacctcgtctgctggttaat

SEQ ID NO: 133742 - DNA, 30 bp, Artificial Sequence
  Synthetic oligonucleotide
tgtacttggaacgatcctgccttggttaat

SEQ ID NO: 133743 - DNA, 30 bp, Artificial Sequence
  Synthetic oligonucleotide
atgagccgcgacacataccgcgatgttaat

SEQ ID NO: 133744 - DNA, 30 bp, Artificial Sequence
  Synthetic oligonucleotide
tcgtattatcgtatgtacatggatgttaat

SEQ ID NO: 133745 - DNA, 30 bp, Artificial Sequence
  Synthetic oligonucleotide
tgctcgcgggatcgccagtgctaatttaat

SEQ ID NO: 133746 - DNA, 30 bp, Artificial Sequence
  Synthetic oligonucleotide
ggtgtaaagagataagcgttaaagtttaat

SEQ ID NO: 133747 - DNA, 30 bp, Artificial Sequence
  Synthetic oligonucleotide
cattgaaaggcgctagttaacgacaaacat

SEQ ID NO: 133748 - DNA, 30 bp, Artificial Sequence
  Synthetic oligonucleotide
tgctccccagccaactcaatcatcaaacat

SEQ ID NO: 133749 - DNA, 30 bp, Artificial Sequence
  Synthetic oligonucleotide
cggacagagttaggttcgcatggtaaacat

SEQ ID NO: 133750 - DNA, 30 bp, Artificial Sequence
  Synthetic oligonucleotide
tgttctaaattcagttggaaattacaacat

SEQ ID NO: 133751 - DNA, 30 bp, Artificial Sequence
  Synthetic oligonucleotide
cccttgagttaattaagcaacggtcaacat

SEQ ID NO: 133752 - DNA, 30 bp, Artificial Sequence
  Synthetic oligonucleotide
acctcaaatacatgattaaatcacgaacat

SEQ ID NO: 133753 - DNA, 30 bp, Artificial Sequence
  Synthetic oligonucleotide
gatcgtccgtcgcctcctagatacgaacat

SEQ ID NO: 133754 - DNA, 30 bp, Artificial Sequence
  Synthetic oligonucleotide
taagcgggcggatgtcatggacgaacacat

SEQ ID NO: 133755 - DNA, 30 bp, Artificial Sequence
  Synthetic oligonucleotide
taaatgggcttatggtagataatcacacat

SEQ ID NO: 133756 - DNA, 30 bp, Artificial Sequence
  Synthetic oligonucleotide
cccgaactcatcacagggcccaatacacat

SEQ ID NO: 133757 - DNA, 30 bp, Artificial Sequence
  Synthetic oligonucleotide
gtgggcgaatcggctaattatcttacacat

SEQ ID NO: 133758 - DNA, 30 bp, Artificial Sequence
  Synthetic oligonucleotide
actatggttgcataaatctccgtgccacat

SEQ ID NO: 133759 - DNA, 30 bp, Artificial Sequence
  Synthetic oligonucleotide
ggggggctgcccaaagtgacaactccacat

SEQ ID NO: 133760 - DNA, 30 bp, Artificial Sequence
  Synthetic oligonucleotide
tgacaactacgaatcggaccacgggcacat

SEQ ID NO: 133761 - DNA, 30 bp, Artificial Sequence
  Synthetic oligonucleotide
acaaaaaagcctgtgagggggcgtgcacat

SEQ ID NO: 133762 - DNA, 30 bp, Artificial Sequence
  Synthetic oligonucleotide
taaatgagcaattacattagctcctcacat

SEQ ID NO: 133763 - DNA, 30 bp, Artificial Sequence
  Synthetic oligonucleotide
tcctcattaataaagcacatgatgtcacat

SEQ ID NO: 133764 - DNA, 30 bp, Artificial Sequence
  Synthetic oligonucleotide
aaagcgtggaagtggccgttgcgttcacat

SEQ ID NO: 133765 - DNA, 30 bp, Artificial Sequence
  Synthetic oligonucleotide
agatgcctgccaagatgcggtaagagacat

SEQ ID NO: 133766 - DNA, 30 bp, Artificial Sequence
  Synthetic oligonucleotide
agaccatcgtaagtttagccgattagacat

SEQ ID NO: 133767 - DNA, 30 bp, Artificial Sequence
  Synthetic oligonucleotide
acgaagtcattccgtctcaaacgccgacat

SEQ ID NO: 133768 - DNA, 30 bp, Artificial Sequence
  Synthetic oligonucleotide
tggtcgtgtgaaaagaaagagatccgacat

SEQ ID NO: 133769 - DNA, 30 bp, Artificial Sequence
  Synthetic oligonucleotide
acgtaccccgagatacattttttccgacat

SEQ ID NO: 133770 - DNA, 30 bp, Artificial Sequence
  Synthetic oligonucleotide
ccattcaatcatttgcgcgaaaaaggacat

SEQ ID NO: 133771 - DNA, 30 bp, Artificial Sequence
  Synthetic oligonucleotide
aaagaaaggggacatgccggggcaggacat

SEQ ID NO: 133772 - DNA, 30 bp, Artificial Sequence
  Synthetic oligonucleotide
gagcggaaataagggtcgagccagggacat

SEQ ID NO: 133773 - DNA, 30 bp, Artificial Sequence
  Synthetic oligonucleotide
ccggagggatgtttgtcggttactggacat

SEQ ID NO: 133774 - DNA, 30 bp, Artificial Sequence
  Synthetic oligonucleotide
agggggcctagggtagcgataataatacat

SEQ ID NO: 133775 - DNA, 30 bp, Artificial Sequence
  Synthetic oligonucleotide
gagagcaacgtattcgagtggtacctacat

SEQ ID NO: 133776 - DNA, 30 bp, Artificial Sequence
  Synthetic oligonucleotide
agcataggtcggttacgaaaagtggtacat

SEQ ID NO: 133777 - DNA, 30 bp, Artificial Sequence
  Synthetic oligonucleotide
gcggggaagacggggagtaaacctgtacat

SEQ ID NO: 133778 - DNA, 30 bp, Artificial Sequence
  Synthetic oligonucleotide
cggacgatctgacgaggcttggaattacat

SEQ ID NO: 133779 - DNA, 30 bp, Artificial Sequence
  Synthetic oligonucleotide
caacaactcggtcacatgagtcccttacat

SEQ ID NO: 133780 - DNA, 31 bp, Artificial Sequence
  Synthetic oligonucleotide
gcctaattaaggtaaatatactaatttacat

SEQ ID NO: 133781 - DNA, 30 bp, Artificial Sequence
  Synthetic oligonucleotide
cagacgaaatcaacgaattgcgctttacat

SEQ ID NO: 133782 - DNA, 30 bp, Artificial Sequence
  Synthetic oligonucleotide
actcgaaaggggtatagttgtaaaaaccat

SEQ ID NO: 133783 - DNA, 30 bp, Artificial Sequence
  Synthetic oligonucleotide
cgctcgggcacgattatatggccacaccat

SEQ ID NO: 133784 - DNA, 30 bp, Artificial Sequence
  Synthetic oligonucleotide
agacgatttctgtttcttgagggacaccat

SEQ ID NO: 133785 - DNA, 31 bp, Artificial Sequence
  Synthetic oligonucleotide
cgagcgttcggcatcaactacaggagaccat

SEQ ID NO: 133786 - DNA, 30 bp, Artificial Sequence
  Synthetic oligonucleotide
tggtgcaccaaccactgatttaaggaccat

SEQ ID NO: 133787 - DNA, 30 bp, Artificial Sequence
  Synthetic oligonucleotide
cggacttgcagtatgttatcttaggaccat

SEQ ID NO: 133788 - DNA, 30 bp, Artificial Sequence
  Synthetic oligonucleotide
atcaccacttaactatcctagactgaccat

SEQ ID NO: 133789 - DNA, 30 bp, Artificial Sequence
  Synthetic oligonucleotide
aacactcataaaactgtcataacgtaccat

SEQ ID NO: 133790 - DNA, 30 bp, Artificial Sequence
  Synthetic oligonucleotide
ttccggtcgggaccaccattaaggtaccat

SEQ ID NO: 133791 - DNA, 30 bp, Artificial Sequence
  Synthetic oligonucleotide
gcagaccgctattcaacctggacttaccat

SEQ ID NO: 133792 - DNA, 30 bp, Artificial Sequence
  Synthetic oligonucleotide
aaggttagttcactgtggacccggacccat

SEQ ID NO: 133793 - DNA, 30 bp, Artificial Sequence
  Synthetic oligonucleotide
atctattgtggataacggcgggggacccat

SEQ ID NO: 133794 - DNA, 30 bp, Artificial Sequence
  Synthetic oligonucleotide
aaaacgagcgtccgaggtgactacccccat

SEQ ID NO: 133795 - DNA, 30 bp, Artificial Sequence
  Synthetic oligonucleotide
cgtaaaaggatggccagatgagggccccat

SEQ ID NO: 133796 - DNA, 30 bp, Artificial Sequence
  Synthetic oligonucleotide
gtcggaaatcccaactccaaccatccccat

SEQ ID NO: 133797 - DNA, 30 bp, Artificial Sequence
  Synthetic oligonucleotide
tgggggtcgccccgtgcaaagtctgcccat

SEQ ID NO: 133798 - DNA, 30 bp, Artificial Sequence
  Synthetic oligonucleotide
caaagaagtactcactagtcgccaagccat

SEQ ID NO: 133799 - DNA, 30 bp, Artificial Sequence
  Synthetic oligonucleotide
aggcgcatgtagcgcggtgctaacagccat

SEQ ID NO: 133800 - DNA, 30 bp, Artificial Sequence
  Synthetic oligonucleotide
gtgcggcttcgttatgagtgcatcagccat

SEQ ID NO: 133801 - DNA, 30 bp, Artificial Sequence
  Synthetic oligonucleotide
agtctagggataacctagatcggtagccat

SEQ ID NO: 133802 - DNA, 30 bp, Artificial Sequence
  Synthetic oligonucleotide
gctgcgattaggaacggatgatatcgccat

SEQ ID NO: 133803 - DNA, 30 bp, Artificial Sequence
  Synthetic oligonucleotide
ttgaagtagcaatatgaggggcgtggccat

SEQ ID NO: 133804 - DNA, 30 bp, Artificial Sequence
  Synthetic oligonucleotide
gggctccactattggcgagtcccctgccat

SEQ ID NO: 133805 - DNA, 30 bp, Artificial Sequence
  Synthetic oligonucleotide
acacgagatctgaattatcggccctgccat

SEQ ID NO: 133806 - DNA, 30 bp, Artificial Sequence
  Synthetic oligonucleotide
gagtccacgtcatcgaccacgggcatccat

SEQ ID NO: 133807 - DNA, 30 bp, Artificial Sequence
  Synthetic oligonucleotide
tctacagttttggtccgtgtcattgtccat

SEQ ID NO: 133808 - DNA, 30 bp, Artificial Sequence
  Synthetic oligonucleotide
ttcgaggagagatcggtagatcaattccat

SEQ ID NO: 133809 - DNA, 30 bp, Artificial Sequence
  Synthetic oligonucleotide
gtgtgccgtattatcgaattctcgttccat

SEQ ID NO: 133810 - DNA, 30 bp, Artificial Sequence
  Synthetic oligonucleotide
ccctttcaacggaagggcacaggtttccat

SEQ ID NO: 133811 - DNA, 30 bp, Artificial Sequence
  Synthetic oligonucleotide
gctatagctgtcataaggtaggttttccat

SEQ ID NO: 133812 - DNA, 30 bp, Artificial Sequence
  Synthetic oligonucleotide
cgtcgaccctcaaacttcggaggcaagcat

SEQ ID NO: 133813 - DNA, 30 bp, Artificial Sequence
  Synthetic oligonucleotide
gttccgatcagcgttcggtgattacagcat

SEQ ID NO: 133814 - DNA, 30 bp, Artificial Sequence
  Synthetic oligonucleotide
aagcgagtcgtctaaggtcaagagcagcat

SEQ ID NO: 133815 - DNA, 30 bp, Artificial Sequence
  Synthetic oligonucleotide
tcttggattgtaaagggcttaatggagcat

SEQ ID NO: 133816 - DNA, 30 bp, Artificial Sequence
  Synthetic oligonucleotide
tgggctcagtattctggttaaccatagcat

SEQ ID NO: 133817 - DNA, 30 bp, Artificial Sequence
  Synthetic oligonucleotide
ttaggtataataaggcaagttatctagcat

SEQ ID NO: 133818 - DNA, 30 bp, Artificial Sequence
  Synthetic oligonucleotide
tcaggcacctctagattcggcatttagcat

SEQ ID NO: 133819 - DNA, 30 bp, Artificial Sequence
  Synthetic oligonucleotide
gaatgggattcaagaaacgatgttacgcat

SEQ ID NO: 133820 - DNA, 30 bp, Artificial Sequence
  Synthetic oligonucleotide
gtacccgtggcgtaaaaataggcagcgcat

SEQ ID NO: 133821 - DNA, 30 bp, Artificial Sequence
  Synthetic oligonucleotide
ttgactagtcccaaagtagaaagagcgcat

SEQ ID NO: 133822 - DNA, 30 bp, Artificial Sequence
  Synthetic oligonucleotide
ccctttcattcgagggatgtggtggcgcat

SEQ ID NO: 133823 - DNA, 30 bp, Artificial Sequence
  Synthetic oligonucleotide
attaaacccggatgatggccgcctgcgcat

SEQ ID NO: 133824 - DNA, 30 bp, Artificial Sequence
  Synthetic oligonucleotide
ggcaagttgtgtaggttgtgtaattcgcat

SEQ ID NO: 133825 - DNA, 30 bp, Artificial Sequence
  Synthetic oligonucleotide
tctaacgcgtgccggctgggggtaaggcat

SEQ ID NO: 133826 - DNA, 30 bp, Artificial Sequence
  Synthetic oligonucleotide
ttagcctcgcgagagaaccagagtaggcat

SEQ ID NO: 133827 - DNA, 30 bp, Artificial Sequence
  Synthetic oligonucleotide
ggagcagtcaaggcactgctgggacggcat

SEQ ID NO: 133828 - DNA, 30 bp, Artificial Sequence
  Synthetic oligonucleotide
gataaacccagaacctttttgtagcggcat

SEQ ID NO: 133829 - DNA, 30 bp, Artificial Sequence
  Synthetic oligonucleotide
cctcacttccagtgaagcgctagtcggcat

SEQ ID NO: 133830 - DNA, 30 bp, Artificial Sequence
  Synthetic oligonucleotide
gaagcgggcgtgagtcgcaaggcagggcat

SEQ ID NO: 133831 - DNA, 30 bp, Artificial Sequence
  Synthetic oligonucleotide
tggggatgttggtcgtgacacatagggcat

SEQ ID NO: 133832 - DNA, 30 bp, Artificial Sequence
  Synthetic oligonucleotide
gttcactgggagtgagaccaggtggggcat

SEQ ID NO: 133833 - DNA, 30 bp, Artificial Sequence
  Synthetic oligonucleotide
tcagagttcacattaacaatcagtgggcat

SEQ ID NO: 133834 - DNA, 30 bp, Artificial Sequence
  Synthetic oligonucleotide
gtggattttccggtacgaataatgtggcat

SEQ ID NO: 133835 - DNA, 30 bp, Artificial Sequence
  Synthetic oligonucleotide
acacttgatatttcaaaggtgaaaatgcat

SEQ ID NO: 133836 - DNA, 30 bp, Artificial Sequence
  Synthetic oligonucleotide
cgtcatcagctcaaatattccaagatgcat

SEQ ID NO: 133837 - DNA, 30 bp, Artificial Sequence
  Synthetic oligonucleotide
tcggatgcgtgcggttgctgagagttgcat

SEQ ID NO: 133838 - DNA, 31 bp, Artificial Sequence
  Synthetic oligonucleotide
ggggatcattaacgagcggcccttaaatcat

SEQ ID NO: 133839 - DNA, 30 bp, Artificial Sequence
  Synthetic oligonucleotide
gtcatgctccataaggggactaagcatcat

SEQ ID NO: 133840 - DNA, 30 bp, Artificial Sequence
  Synthetic oligonucleotide
cccagaccggcggtctacgcaaggcatcat

SEQ ID NO: 133841 - DNA, 30 bp, Artificial Sequence
  Synthetic oligonucleotide
caacacatcatggagtggtatcatcatcat

SEQ ID NO: 133842 - DNA, 30 bp, Artificial Sequence
  Synthetic oligonucleotide
tggctggctaattgcgcctaatcctatcat

SEQ ID NO: 133843 - DNA, 30 bp, Artificial Sequence
  Synthetic oligonucleotide
ttggcaccacatgtgatctacacgtatcat

SEQ ID NO: 133844 - DNA, 30 bp, Artificial Sequence
  Synthetic oligonucleotide
agaatgcggtgcctggagctaccgtatcat

SEQ ID NO: 133845 - DNA, 30 bp, Artificial Sequence
  Synthetic oligonucleotide
gagggttaaataacttaagaagtgactcat

SEQ ID NO: 133846 - DNA, 31 bp, Artificial Sequence
  Synthetic oligonucleotide
tttggccacaaccgtactgcatctccctcat

SEQ ID NO: 133847 - DNA, 30 bp, Artificial Sequence
  Synthetic oligonucleotide
gggtggactgcgccacaacattaagctcat

SEQ ID NO: 133848 - DNA, 30 bp, Artificial Sequence
  Synthetic oligonucleotide
gcggttttcaacgattgtatgagagctcat

SEQ ID NO: 133849 - DNA, 30 bp, Artificial Sequence
  Synthetic oligonucleotide
gcgggtaacgcgtaagcttaagccgctcat

SEQ ID NO: 133850 - DNA, 30 bp, Artificial Sequence
  Synthetic oligonucleotide
aggataatttgttactgcgcgggatctcat

SEQ ID NO: 133851 - DNA, 30 bp, Artificial Sequence
  Synthetic oligonucleotide
gtggttagggtgggtctaagggtacgtcat

SEQ ID NO: 133852 - DNA, 30 bp, Artificial Sequence
  Synthetic oligonucleotide
acttgagatgtatacgaaatataccgtcat

SEQ ID NO: 133853 - DNA, 30 bp, Artificial Sequence
  Synthetic oligonucleotide
ctggcgagtccaaaaatcacgtcaggtcat

SEQ ID NO: 133854 - DNA, 30 bp, Artificial Sequence
  Synthetic oligonucleotide
gacttgtgataaggctagctcaacggtcat

SEQ ID NO: 133855 - DNA, 30 bp, Artificial Sequence
  Synthetic oligonucleotide
acgggctttgtgcgggacatagggggtcat

SEQ ID NO: 133856 - DNA, 30 bp, Artificial Sequence
  Synthetic oligonucleotide
taaggcaacgaatggagccggtcatgtcat

SEQ ID NO: 133857 - DNA, 30 bp, Artificial Sequence
  Synthetic oligonucleotide
caaggggtgaactgcgacttcacctgtcat

SEQ ID NO: 133858 - DNA, 30 bp, Artificial Sequence
  Synthetic oligonucleotide
gcctacaaggttgtgtcaatactttgtcat

SEQ ID NO: 133859 - DNA, 30 bp, Artificial Sequence
  Synthetic oligonucleotide
ggcgggaatggttctcgacaaaacattcat

SEQ ID NO: 133860 - DNA, 30 bp, Artificial Sequence
  Synthetic oligonucleotide
tccgaggcttcgttcaaagtgcacattcat

SEQ ID NO: 133861 - DNA, 30 bp, Artificial Sequence
  Synthetic oligonucleotide
cacgcgattacaacaccttgggatcttcat

SEQ ID NO: 133862 - DNA, 30 bp, Artificial Sequence
  Synthetic oligonucleotide
ggtgatcatcacgccaatatgtctcttcat

SEQ ID NO: 133863 - DNA, 30 bp, Artificial Sequence
  Synthetic oligonucleotide
aggaaattggctcgtgcaaccacggttcat

SEQ ID NO: 133864 - DNA, 30 bp, Artificial Sequence
  Synthetic oligonucleotide
gtcggggattaccaatgtacaaaatttcat

SEQ ID NO: 133865 - DNA, 30 bp, Artificial Sequence
  Synthetic oligonucleotide
gaggatcacaagaggcgggccgagaaagat

SEQ ID NO: 133866 - DNA, 30 bp, Artificial Sequence
  Synthetic oligonucleotide
gaacaaggaagatagcgtcggactcaagat

SEQ ID NO: 133867 - DNA, 30 bp, Artificial Sequence
  Synthetic oligonucleotide
ccgggtatatgccaattacgctcagaagat

SEQ ID NO: 133868 - DNA, 30 bp, Artificial Sequence
  Synthetic oligonucleotide
attgacaacggtaagcaagggtcctaagat

SEQ ID NO: 133869 - DNA, 30 bp, Artificial Sequence
  Synthetic oligonucleotide
taacggtaagtataaatacctagaacagat

SEQ ID NO: 133870 - DNA, 30 bp, Artificial Sequence
  Synthetic oligonucleotide
gaaaaccacctaggtagaacccatacagat

SEQ ID NO: 133871 - DNA, 30 bp, Artificial Sequence
  Synthetic oligonucleotide
agttgcggggcaccgttaggaattacagat

SEQ ID NO: 133872 - DNA, 30 bp, Artificial Sequence
  Synthetic oligonucleotide
caccccaaccccccgcttcaccaaccagat

SEQ ID NO: 133873 - DNA, 30 bp, Artificial Sequence
  Synthetic oligonucleotide
ccatggcggaaagccaggagagtaccagat

SEQ ID NO: 133874 - DNA, 30 bp, Artificial Sequence
  Synthetic oligonucleotide
tcattgtccgacacaatgggccccccagat

SEQ ID NO: 133875 - DNA, 29 bp, Artificial Sequence
  Synthetic oligonucleotide
catacatatgggcgttcattatcccagat

SEQ ID NO: 133876 - DNA, 30 bp, Artificial Sequence
  Synthetic oligonucleotide
aaacaacggacttaaaacccggtcccagat

SEQ ID NO: 133877 - DNA, 30 bp, Artificial Sequence
  Synthetic oligonucleotide
tctgtggagtcacatggtcgcaatccagat

SEQ ID NO: 133878 - DNA, 30 bp, Artificial Sequence
  Synthetic oligonucleotide
atgcagcgtacgggtctatgccgtccagat

SEQ ID NO: 133879 - DNA, 30 bp, Artificial Sequence
  Synthetic oligonucleotide
tcattctggcgctccagttaattagcagat

SEQ ID NO: 133880 - DNA, 30 bp, Artificial Sequence
  Synthetic oligonucleotide
actcgactcgtattggttatttcggcagat

SEQ ID NO: 133881 - DNA, 30 bp, Artificial Sequence
  Synthetic oligonucleotide
ggtagaatcgcaagtgatcctctatcagat

SEQ ID NO: 133882 - DNA, 30 bp, Artificial Sequence
  Synthetic oligonucleotide
tacgcactttggtctcaggtagggtcagat

SEQ ID NO: 133883 - DNA, 30 bp, Artificial Sequence
  Synthetic oligonucleotide
actataattcaccacgatgttatgtcagat

SEQ ID NO: 133884 - DNA, 30 bp, Artificial Sequence
  Synthetic oligonucleotide
agctagcatttgactagcagagtgtcagat

SEQ ID NO: 133885 - DNA, 30 bp, Artificial Sequence
  Synthetic oligonucleotide
atacgaccatgttcgaggtagttgtcagat

SEQ ID NO: 133886 - DNA, 30 bp, Artificial Sequence
  Synthetic oligonucleotide
gattcgaatatcaagcccggattttcagat

SEQ ID NO: 133887 - DNA, 30 bp, Artificial Sequence
  Synthetic oligonucleotide
ccctgccggtggtagtggtaacaaagagat

SEQ ID NO: 133888 - DNA, 30 bp, Artificial Sequence
  Synthetic oligonucleotide
tctacgcacaaatggaacggcaagagagat

SEQ ID NO: 133889 - DNA, 30 bp, Artificial Sequence
  Synthetic oligonucleotide
ctgtagatagtacaagtgagtagtagagat

SEQ ID NO: 133890 - DNA, 30 bp, Artificial Sequence
  Synthetic oligonucleotide
ggtgatacaggtgtcgaacaatgcggagat

SEQ ID NO: 133891 - DNA, 30 bp, Artificial Sequence
  Synthetic oligonucleotide
ggcccagagtcgacccgagtcagctgagat

SEQ ID NO: 133892 - DNA, 30 bp, Artificial Sequence
  Synthetic oligonucleotide
gttggctcccaacaatcaaccaagtgagat

SEQ ID NO: 133893 - DNA, 30 bp, Artificial Sequence
  Synthetic oligonucleotide
aagtactagggatgcgaccacggaatagat

SEQ ID NO: 133894 - DNA, 30 bp, Artificial Sequence
  Synthetic oligonucleotide
caatggcatgtagtctaaccgcgcatagat

SEQ ID NO: 133895 - DNA, 30 bp, Artificial Sequence
  Synthetic oligonucleotide
catcacaaagggtgagaccggtagatagat

SEQ ID NO: 133896 - DNA, 30 bp, Artificial Sequence
  Synthetic oligonucleotide
cagcggccggcgcggtaatgtacgatagat

SEQ ID NO: 133897 - DNA, 30 bp, Artificial Sequence
  Synthetic oligonucleotide
ggtcacttgcagggggacaaacgtatagat

SEQ ID NO: 133898 - DNA, 30 bp, Artificial Sequence
  Synthetic oligonucleotide
tactcataatcgatcactccataactagat

SEQ ID NO: 133899 - DNA, 30 bp, Artificial Sequence
  Synthetic oligonucleotide
tggatggatagctctaccatcatactagat

SEQ ID NO: 133900 - DNA, 31 bp, Artificial Sequence
  Synthetic oligonucleotide
ataggttcaaattaccgtaagtgacctagat

SEQ ID NO: 133901 - DNA, 30 bp, Artificial Sequence
  Synthetic oligonucleotide
gaacgtgtaacaaatgccgcgtccctagat

SEQ ID NO: 133902 - DNA, 30 bp, Artificial Sequence
  Synthetic oligonucleotide
agactacggttgccgttttgtgtcctagat

SEQ ID NO: 133903 - DNA, 30 bp, Artificial Sequence
  Synthetic oligonucleotide
gtctgtcgccggaggatggcaaaagtagat

SEQ ID NO: 133904 - DNA, 30 bp, Artificial Sequence
  Synthetic oligonucleotide
atacgggcccaggtcacaaatacagtagat

SEQ ID NO: 133905 - DNA, 30 bp, Artificial Sequence
  Synthetic oligonucleotide
ggacaagttgtttattccttgggagtagat

SEQ ID NO: 133906 - DNA, 30 bp, Artificial Sequence
  Synthetic oligonucleotide
tacggcgaattcttgcaccgggccgtagat

SEQ ID NO: 133907 - DNA, 30 bp, Artificial Sequence
  Synthetic oligonucleotide
ttagcggattgcaattagacagaggtagat

SEQ ID NO: 133908 - DNA, 30 bp, Artificial Sequence
  Synthetic oligonucleotide
tgtcatctgctcgtgtcggcgggggtagat

SEQ ID NO: 133909 - DNA, 30 bp, Artificial Sequence
  Synthetic oligonucleotide
ctccacggaagtatcaaagttttgttagat

SEQ ID NO: 133910 - DNA, 30 bp, Artificial Sequence
  Synthetic oligonucleotide
agtagtgtccatttcatctagcgtttagat

SEQ ID NO: 133911 - DNA, 30 bp, Artificial Sequence
  Synthetic oligonucleotide
gatccaatacaggctaaaggtgaaaacgat

SEQ ID NO: 133912 - DNA, 30 bp, Artificial Sequence
  Synthetic oligonucleotide
acgttgtaggcatatgacagataaaacgat

SEQ ID NO: 133913 - DNA, 30 bp, Artificial Sequence
  Synthetic oligonucleotide
ttaggacatgggatcagtacctaaaacgat

SEQ ID NO: 133914 - DNA, 30 bp, Artificial Sequence
  Synthetic oligonucleotide
cgcaatctggtcacagggaatcacaacgat

SEQ ID NO: 133915 - DNA, 30 bp, Artificial Sequence
  Synthetic oligonucleotide
tagtatacgacgttggacctacggaacgat

SEQ ID NO: 133916 - DNA, 30 bp, Artificial Sequence
  Synthetic oligonucleotide
ggtgaatttagttcgtatccctcacacgat

SEQ ID NO: 133917 - DNA, 30 bp, Artificial Sequence
  Synthetic oligonucleotide
tacgagcgcttggtcgatagacaccacgat

SEQ ID NO: 133918 - DNA, 30 bp, Artificial Sequence
  Synthetic oligonucleotide
catccaagtcttcaaatggagcggcacgat

SEQ ID NO: 133919 - DNA, 30 bp, Artificial Sequence
  Synthetic oligonucleotide
gacaggggggcttggctgccacgagacgat

SEQ ID NO: 133920 - DNA, 30 bp, Artificial Sequence
  Synthetic oligonucleotide
cgcacttgaagtccgggaggagacgacgat

SEQ ID NO: 133921 - DNA, 30 bp, Artificial Sequence
  Synthetic oligonucleotide
atcgtgtggtgaacgtgtgtggcggacgat

SEQ ID NO: 133922 - DNA, 30 bp, Artificial Sequence
  Synthetic oligonucleotide
gcgcaacctccgattacgacatatgacgat

SEQ ID NO: 133923 - DNA, 30 bp, Artificial Sequence
  Synthetic oligonucleotide
taaggggattaatgccttaggaaatacgat

SEQ ID NO: 133924 - DNA, 30 bp, Artificial Sequence
  Synthetic oligonucleotide
ctaaacaatttaaggcgtggctagtacgat

SEQ ID NO: 133925 - DNA, 30 bp, Artificial Sequence
  Synthetic oligonucleotide
ggagcacaactcaatgctaccgtgtacgat

SEQ ID NO: 133926 - DNA, 30 bp, Artificial Sequence
  Synthetic oligonucleotide
gtgggagaaacgcaggacatattaaccgat

SEQ ID NO: 133927 - DNA, 30 bp, Artificial Sequence
  Synthetic oligonucleotide
tacattcccggaaacataagggggcccgat

SEQ ID NO: 133928 - DNA, 30 bp, Artificial Sequence
  Synthetic oligonucleotide
cgccacgatcaacgcaggtgccaagccgat

SEQ ID NO: 133929 - DNA, 30 bp, Artificial Sequence
  Synthetic oligonucleotide
caaagtggttaggctagcagggtggccgat

SEQ ID NO: 133930 - DNA, 30 bp, Artificial Sequence
  Synthetic oligonucleotide
gaggaagttatttattacccaaatgccgat

SEQ ID NO: 133931 - DNA, 30 bp, Artificial Sequence
  Synthetic oligonucleotide
tccgtcgggtggagcctttattgtgccgat

SEQ ID NO: 133932 - DNA, 30 bp, Artificial Sequence
  Synthetic oligonucleotide
cgtagggcttggtgattagcacttagcgat

SEQ ID NO: 133933 - DNA, 30 bp, Artificial Sequence
  Synthetic oligonucleotide
ccttaacaaggataacagtaggcacgcgat

SEQ ID NO: 133934 - DNA, 30 bp, Artificial Sequence
  Synthetic oligonucleotide
gatcgcgcggggggtcgggtcgaccgcgat

SEQ ID NO: 133935 - DNA, 30 bp, Artificial Sequence
  Synthetic oligonucleotide
tgcaaagtgaggacggatcagtaaatcgat

SEQ ID NO: 133936 - DNA, 30 bp, Artificial Sequence
  Synthetic oligonucleotide
gctggaagtaccgacatgtagccaatcgat

SEQ ID NO: 133937 - DNA, 30 bp, Artificial Sequence
  Synthetic oligonucleotide
gtcaccatccatactatgttgatgatcgat

SEQ ID NO: 133938 - DNA, 30 bp, Artificial Sequence
  Synthetic oligonucleotide
aaaagcccaggacgtgagagaagtatcgat

SEQ ID NO: 133939 - DNA, 30 bp, Artificial Sequence
  Synthetic oligonucleotide
acgggtgacgctcatacaccgtttatcgat

SEQ ID NO: 133940 - DNA, 30 bp, Artificial Sequence
  Synthetic oligonucleotide
acattaaactggccctcttcgtatctcgat

SEQ ID NO: 133941 - DNA, 30 bp, Artificial Sequence
  Synthetic oligonucleotide
ttctagagactgacatggattctcgtcgat

SEQ ID NO: 133942 - DNA, 30 bp, Artificial Sequence
  Synthetic oligonucleotide
aaactactaattgaagatttgcctgtcgat

SEQ ID NO: 133943 - DNA, 30 bp, Artificial Sequence
  Synthetic oligonucleotide
gttgaaatgattaaactaacattgttcgat

SEQ ID NO: 133944 - DNA, 30 bp, Artificial Sequence
  Synthetic oligonucleotide
ctgggtctagggtaaggctaaagtttcgat

SEQ ID NO: 133945 - DNA, 30 bp, Artificial Sequence
  Synthetic oligonucleotide
agagatataactggtttcatcagaaaggat

SEQ ID NO: 133946 - DNA, 30 bp, Artificial Sequence
  Synthetic oligonucleotide
aactcgcgatttgagaacgggcacaaggat

SEQ ID NO: 133947 - DNA, 30 bp, Artificial Sequence
  Synthetic oligonucleotide
gacaaaccaatcatcaaggctcgtaaggat

SEQ ID NO: 133948 - DNA, 30 bp, Artificial Sequence
  Synthetic oligonucleotide
tcgaataaacgatctttgggaaaacaggat

SEQ ID NO: 133949 - DNA, 30 bp, Artificial Sequence
  Synthetic oligonucleotide
tgatgacaacaatgccaatctgttcaggat

SEQ ID NO: 133950 - DNA, 30 bp, Artificial Sequence
  Synthetic oligonucleotide
cagcgtagatggccatccatataggaggat

SEQ ID NO: 133951 - DNA, 30 bp, Artificial Sequence
  Synthetic oligonucleotide
caagcatggcactcccaattcgcggaggat

SEQ ID NO: 133952 - DNA, 30 bp, Artificial Sequence
  Synthetic oligonucleotide
ggaaatgggggggtcttgaatggctaggat

SEQ ID NO: 133953 - DNA, 30 bp, Artificial Sequence
  Synthetic oligonucleotide
tgaacccttaccaattgttggcattaggat

SEQ ID NO: 133954 - DNA, 30 bp, Artificial Sequence
  Synthetic oligonucleotide
acatggtttaccgattcgctccaaacggat

SEQ ID NO: 133955 - DNA, 29 bp, Artificial Sequence
  Synthetic oligonucleotide
gaaagcaagatcgttggatgagtacggat

SEQ ID NO: 133956 - DNA, 30 bp, Artificial Sequence
  Synthetic oligonucleotide
agaaaaaccatcaacattgattacccggat

SEQ ID NO: 133957 - DNA, 30 bp, Artificial Sequence
  Synthetic oligonucleotide
ccattgaagtgcccatttcaacagccggat

SEQ ID NO: 133958 - DNA, 30 bp, Artificial Sequence
  Synthetic oligonucleotide
ggcggaggtgatatttttggccacagggat

SEQ ID NO: 133959 - DNA, 30 bp, Artificial Sequence
  Synthetic oligonucleotide
tagtagcagcgcgtcatttatgtcagggat

SEQ ID NO: 133960 - DNA, 30 bp, Artificial Sequence
  Synthetic oligonucleotide
catataattcaggactatctgtgtagggat

SEQ ID NO: 133961 - DNA, 30 bp, Artificial Sequence
  Synthetic oligonucleotide
tggggacgatcgtgaaagatataacgggat

SEQ ID NO: 133962 - DNA, 30 bp, Artificial Sequence
  Synthetic oligonucleotide
gtgataatgaggtattcaaacggacgggat

SEQ ID NO: 133963 - DNA, 30 bp, Artificial Sequence
  Synthetic oligonucleotide
tgtccgtggattactacgattaaccgggat

SEQ ID NO: 133964 - DNA, 30 bp, Artificial Sequence
  Synthetic oligonucleotide
agatctgacgcttgaatggtcacccgggat

SEQ ID NO: 133965 - DNA, 30 bp, Artificial Sequence
  Synthetic oligonucleotide
gcgtatcgggattaacacgtcgtccgggat

SEQ ID NO: 133966 - DNA, 30 bp, Artificial Sequence
  Synthetic oligonucleotide
agcgagggttcggcgtcggatgtccgggat

SEQ ID NO: 133967 - DNA, 30 bp, Artificial Sequence
  Synthetic oligonucleotide
ctgtcgatggttcttctctcgaatcgggat

SEQ ID NO: 133968 - DNA, 30 bp, Artificial Sequence
  Synthetic oligonucleotide
gatgaaattgcaaatactatcagcggggat

SEQ ID NO: 133969 - DNA, 30 bp, Artificial Sequence
  Synthetic oligonucleotide
gagcagatgaaggtgcagactaggtgggat

SEQ ID NO: 133970 - DNA, 30 bp, Artificial Sequence
  Synthetic oligonucleotide
gtcagccggtcactgttaggaaaaatggat

SEQ ID NO: 133971 - DNA, 30 bp, Artificial Sequence
  Synthetic oligonucleotide
tcggaggcgcgacccgagccagtaatggat

SEQ ID NO: 133972 - DNA, 30 bp, Artificial Sequence
  Synthetic oligonucleotide
taccgtgcaagacaaaagaacgttatggat

SEQ ID NO: 133973 - DNA, 30 bp, Artificial Sequence
  Synthetic oligonucleotide
caaaggaaacaaattgttgccgttatggat

SEQ ID NO: 133974 - DNA, 30 bp, Artificial Sequence
  Synthetic oligonucleotide
gtaagcaaaaccaccgtgaggtaactggat

SEQ ID NO: 133975 - DNA, 30 bp, Artificial Sequence
  Synthetic oligonucleotide
tcctgtcagaggactacatggcacgtggat

SEQ ID NO: 133976 - DNA, 30 bp, Artificial Sequence
  Synthetic oligonucleotide
ttcatgatcaggcttgtaacgttggtggat

SEQ ID NO: 133977 - DNA, 30 bp, Artificial Sequence
  Synthetic oligonucleotide
ccgttcactcaagctgctattaaattggat

SEQ ID NO: 133978 - DNA, 30 bp, Artificial Sequence
  Synthetic oligonucleotide
aggaacaaccgttatggctaggcattggat

SEQ ID NO: 133979 - DNA, 31 bp, Artificial Sequence
  Synthetic oligonucleotide
atccgagcctgatcttaagaaaagattggat

SEQ ID NO: 133980 - DNA, 29 bp, Artificial Sequence
  Synthetic oligonucleotide
atgaaggttgaaacggaaatgggaatgat

SEQ ID NO: 133981 - DNA, 30 bp, Artificial Sequence
  Synthetic oligonucleotide
acaggtaatactattctgtagtaacatgat

SEQ ID NO: 133982 - DNA, 30 bp, Artificial Sequence
  Synthetic oligonucleotide
aacgtatggcgattaggacagcgggatgat

SEQ ID NO: 133983 - DNA, 30 bp, Artificial Sequence
  Synthetic oligonucleotide
attcgctacgttttgagggaatgggatgat

SEQ ID NO: 133984 - DNA, 30 bp, Artificial Sequence
  Synthetic oligonucleotide
aggccgccgctgccaatgcaaggtgatgat

SEQ ID NO: 133985 - DNA, 30 bp, Artificial Sequence
  Synthetic oligonucleotide
agctacggcgacaggaaaatagcgtatgat

SEQ ID NO: 133986 - DNA, 30 bp, Artificial Sequence
  Synthetic oligonucleotide
aaataaacacccaagtaaagggcaactgat

SEQ ID NO: 133987 - DNA, 30 bp, Artificial Sequence
  Synthetic oligonucleotide
acgaccttatggcggaactcactaactgat

SEQ ID NO: 133988 - DNA, 30 bp, Artificial Sequence
  Synthetic oligonucleotide
taagtgagagggtttaacctgcctactgat

SEQ ID NO: 133989 - DNA, 30 bp, Artificial Sequence
  Synthetic oligonucleotide
taaacttgcgccgagcatgtcgtgcctgat

SEQ ID NO: 133990 - DNA, 30 bp, Artificial Sequence
  Synthetic oligonucleotide
agcagtgaggaaattgcatggtgtcctgat

SEQ ID NO: 133991 - DNA, 30 bp, Artificial Sequence
  Synthetic oligonucleotide
tctcgtaagaggggtagaggtagggctgat

SEQ ID NO: 133992 - DNA, 30 bp, Artificial Sequence
  Synthetic oligonucleotide
agcggctataaagtggttatcaggtctgat

SEQ ID NO: 133993 - DNA, 30 bp, Artificial Sequence
  Synthetic oligonucleotide
tggtcggcatagacgtacgaggcaagtgat

SEQ ID NO: 133994 - DNA, 30 bp, Artificial Sequence
  Synthetic oligonucleotide
aaagctcagaccacataccgtaacagtgat

SEQ ID NO: 133995 - DNA, 30 bp, Artificial Sequence
  Synthetic oligonucleotide
cgccgggtgggcgcaggtaggagcagtgat

SEQ ID NO: 133996 - DNA, 30 bp, Artificial Sequence
  Synthetic oligonucleotide
tagtgcagatggagcgccaagatcagtgat

SEQ ID NO: 133997 - DNA, 30 bp, Artificial Sequence
  Synthetic oligonucleotide
ggaaaagtagtcggacagtgagcgagtgat

SEQ ID NO: 133998 - DNA, 30 bp, Artificial Sequence
  Synthetic oligonucleotide
caacgaacatggtaacgcacacatagtgat

SEQ ID NO: 133999 - DNA, 30 bp, Artificial Sequence
  Synthetic oligonucleotide
tcgtgttgtcataatacaccccatagtgat

SEQ ID NO: 134000 - DNA, 30 bp, Artificial Sequence
  Synthetic oligonucleotide
gaggatggtagcatgaggagtcagcgtgat

SEQ ID NO: 134001 - DNA, 30 bp, Artificial Sequence
  Synthetic oligonucleotide
ctgccaacattgtcagcagaggtcggtgat

SEQ ID NO: 134002 - DNA, 30 bp, Artificial Sequence
  Synthetic oligonucleotide
gtcgcaggggtaggagctgctacgggtgat

SEQ ID NO: 134003 - DNA, 30 bp, Artificial Sequence
  Synthetic oligonucleotide
gacggaaaagccgtggctgtcgaatgtgat

SEQ ID NO: 134004 - DNA, 30 bp, Artificial Sequence
  Synthetic oligonucleotide
agctggtcgtcgtaagagatccactgtgat

SEQ ID NO: 134005 - DNA, 30 bp, Artificial Sequence
  Synthetic oligonucleotide
ctcgggaggacgtgatggtcccgctgtgat

SEQ ID NO: 134006 - DNA, 30 bp, Artificial Sequence
  Synthetic oligonucleotide
gcgtttcgtgtaatcttagcgtcgtgtgat

SEQ ID NO: 134007 - DNA, 30 bp, Artificial Sequence
  Synthetic oligonucleotide
tgtgcgcacgtgggattaaagtaaattgat

SEQ ID NO: 134008 - DNA, 30 bp, Artificial Sequence
  Synthetic oligonucleotide
ccggccagagaacaaggatcaatgcttgat

SEQ ID NO: 134009 - DNA, 30 bp, Artificial Sequence
  Synthetic oligonucleotide
agaaactagacggtaaaaccgacaaaatat

SEQ ID NO: 134010 - DNA, 30 bp, Artificial Sequence
  Synthetic oligonucleotide
tgtgagaatccagtagtggaaagaaaatat

SEQ ID NO: 134011 - DNA, 31 bp, Artificial Sequence
  Synthetic oligonucleotide
tcggatatgttcgaaccaattgaacaaatat

SEQ ID NO: 134012 - DNA, 30 bp, Artificial Sequence
  Synthetic oligonucleotide
actgactggtgggaccatgggtacaaatat

SEQ ID NO: 134013 - DNA, 30 bp, Artificial Sequence
  Synthetic oligonucleotide
gaaggttcgggactcactcctgtgaaatat

SEQ ID NO: 134014 - DNA, 30 bp, Artificial Sequence
  Synthetic oligonucleotide
ggagcctgatgttgcgtgaaagctaaatat

SEQ ID NO: 134015 - DNA, 30 bp, Artificial Sequence
  Synthetic oligonucleotide
cgcactgtggcacagtccgtcaagcaatat

SEQ ID NO: 134016 - DNA, 30 bp, Artificial Sequence
  Synthetic oligonucleotide
aatagaccgagctcgagcgggcccgaatat

SEQ ID NO: 134017 - DNA, 30 bp, Artificial Sequence
  Synthetic oligonucleotide
ataattgtggctgtaactatcagcgaatat

SEQ ID NO: 134018 - DNA, 30 bp, Artificial Sequence
  Synthetic oligonucleotide
agcaaagaccaaggtgctaggatcgaatat

SEQ ID NO: 134019 - DNA, 30 bp, Artificial Sequence
  Synthetic oligonucleotide
aagagtggaaaataattaagcatggaatat

SEQ ID NO: 134020 - DNA, 30 bp, Artificial Sequence
  Synthetic oligonucleotide
ggtagtggtgtaacttcaaacgcataatat

SEQ ID NO: 134021 - DNA, 30 bp, Artificial Sequence
  Synthetic oligonucleotide
acttcctaatggagaggagatgactaatat

SEQ ID NO: 134022 - DNA, 30 bp, Artificial Sequence
  Synthetic oligonucleotide
cgtatcagttcacgacctgaggcgtaatat

SEQ ID NO: 134023 - DNA, 30 bp, Artificial Sequence
  Synthetic oligonucleotide
tagtcgggggatgacgctcaacgaacatat

SEQ ID NO: 134024 - DNA, 30 bp, Artificial Sequence
  Synthetic oligonucleotide
tgcgctcatattgcagcatggattacatat

SEQ ID NO: 134025 - DNA, 30 bp, Artificial Sequence
  Synthetic oligonucleotide
aaccacctagggaatcagtggtgcccatat

SEQ ID NO: 134026 - DNA, 30 bp, Artificial Sequence
  Synthetic oligonucleotide
tagatgcgttgagttaaagctatggcatat

SEQ ID NO: 134027 - DNA, 30 bp, Artificial Sequence
  Synthetic oligonucleotide
gctacatcagagaccggagaattggcatat

SEQ ID NO: 134028 - DNA, 30 bp, Artificial Sequence
  Synthetic oligonucleotide
acgaaattgcctggaagatgaagctcatat

SEQ ID NO: 134029 - DNA, 30 bp, Artificial Sequence
  Synthetic oligonucleotide
taagggatcgaacgtcacagcttctcatat

SEQ ID NO: 134030 - DNA, 30 bp, Artificial Sequence
  Synthetic oligonucleotide
aaacgagtttgacgacgagggctgtcatat

SEQ ID NO: 134031 - DNA, 30 bp, Artificial Sequence
  Synthetic oligonucleotide
agtccaaacaattaagtcatggtaagatat

SEQ ID NO: 134032 - DNA, 30 bp, Artificial Sequence
  Synthetic oligonucleotide
cgaagaaagtagaatcactgtcagagatat

SEQ ID NO: 134033 - DNA, 30 bp, Artificial Sequence
  Synthetic oligonucleotide
catcgggtagtatggggaggtcgccgatat

SEQ ID NO: 134034 - DNA, 30 bp, Artificial Sequence
  Synthetic oligonucleotide
gtgcgcccccaccaaaacaggaggcgatat

SEQ ID NO: 134035 - DNA, 30 bp, Artificial Sequence
  Synthetic oligonucleotide
attgggccactgatgtggagttccggatat

SEQ ID NO: 134036 - DNA, 30 bp, Artificial Sequence
  Synthetic oligonucleotide
tgtgacgaaagcggagtcacaaagggatat

SEQ ID NO: 134037 - DNA, 30 bp, Artificial Sequence
  Synthetic oligonucleotide
aggtgcgagttatacgggcatgctggatat

SEQ ID NO: 134038 - DNA, 30 bp, Artificial Sequence
  Synthetic oligonucleotide
actcgaacgttggcagatgaagattgatat

SEQ ID NO: 134039 - DNA, 30 bp, Artificial Sequence
  Synthetic oligonucleotide
ccagtaagaccccacgaccaagggatatat

SEQ ID NO: 134040 - DNA, 30 bp, Artificial Sequence
  Synthetic oligonucleotide
taaccgcgaggtcagcgatgtagactatat

SEQ ID NO: 134041 - DNA, 30 bp, Artificial Sequence
  Synthetic oligonucleotide
agggaaaaggcgtaaattaagatactatat

SEQ ID NO: 134042 - DNA, 30 bp, Artificial Sequence
  Synthetic oligonucleotide
ccagtcaaggcaaatcatgccagtctatat

SEQ ID NO: 134043 - DNA, 30 bp, Artificial Sequence
  Synthetic oligonucleotide
atagggagtgaccagggttggaaagtatat

SEQ ID NO: 134044 - DNA, 30 bp, Artificial Sequence
  Synthetic oligonucleotide
cggttaatgtgcttggcgaggatattatat

SEQ ID NO: 134045 - DNA, 30 bp, Artificial Sequence
  Synthetic oligonucleotide
tatgaaaacaagactcgtacaaccttatat

SEQ ID NO: 134046 - DNA, 30 bp, Artificial Sequence
  Synthetic oligonucleotide
gcgattagcgactcgaacgataaaaactat

SEQ ID NO: 134047 - DNA, 30 bp, Artificial Sequence
  Synthetic oligonucleotide
gacggggaagatattacctcgtgaaactat

SEQ ID NO: 134048 - DNA, 30 bp, Artificial Sequence
  Synthetic oligonucleotide
agaacatcaacttgggctcaagacaactat

SEQ ID NO: 134049 - DNA, 30 bp, Artificial Sequence
  Synthetic oligonucleotide
cgcggggggttggttgcgtattccaactat

SEQ ID NO: 134050 - DNA, 30 bp, Artificial Sequence
  Synthetic oligonucleotide
ccggagtatctctcgcagtgtagccactat

SEQ ID NO: 134051 - DNA, 30 bp, Artificial Sequence
  Synthetic oligonucleotide
tctctagaggtgtagccataaattcactat

SEQ ID NO: 134052 - DNA, 30 bp, Artificial Sequence
  Synthetic oligonucleotide
aaccggagagttgcgatacacagcgactat

SEQ ID NO: 134053 - DNA, 30 bp, Artificial Sequence
  Synthetic oligonucleotide
gagaacaaaaggagggcaccctaggactat

SEQ ID NO: 134054 - DNA, 30 bp, Artificial Sequence
  Synthetic oligonucleotide
cacaaaaatccggtgtcagactgtgactat

SEQ ID NO: 134055 - DNA, 30 bp, Artificial Sequence
  Synthetic oligonucleotide
ttcaggaccaaaagcacgcatgaatactat

SEQ ID NO: 134056 - DNA, 30 bp, Artificial Sequence
  Synthetic oligonucleotide
ggagtcggggggtagcagacattctactat

SEQ ID NO: 134057 - DNA, 31 bp, Artificial Sequence
  Synthetic oligonucleotide
gacgtaattcagctatgtggtaggttactat

SEQ ID NO: 134058 - DNA, 30 bp, Artificial Sequence
  Synthetic oligonucleotide
aacgattatccaccgtaccgatagacctat

SEQ ID NO: 134059 - DNA, 30 bp, Artificial Sequence
  Synthetic oligonucleotide
acgcattacgtccgggtgattggtacctat

SEQ ID NO: 134060 - DNA, 30 bp, Artificial Sequence
  Synthetic oligonucleotide
tcaaccaactattgcctgaaagtaccctat

SEQ ID NO: 134061 - DNA, 30 bp, Artificial Sequence
  Synthetic oligonucleotide
gtggtcctcacgcttccgaagacagcctat

SEQ ID NO: 134062 - DNA, 30 bp, Artificial Sequence
  Synthetic oligonucleotide
actaaaactgtaatcagggatgtcgcctat

SEQ ID NO: 134063 - DNA, 30 bp, Artificial Sequence
  Synthetic oligonucleotide
ccgtgtgcaacacgacataagcggtcctat

SEQ ID NO: 134064 - DNA, 30 bp, Artificial Sequence
  Synthetic oligonucleotide
agacacatacttatgttagctaagagctat

SEQ ID NO: 134065 - DNA, 30 bp, Artificial Sequence
  Synthetic oligonucleotide
catataaagatgattcttcgagctagctat

SEQ ID NO: 134066 - DNA, 30 bp, Artificial Sequence
  Synthetic oligonucleotide
tggtagttaaacgatcggaaggtacgctat

SEQ ID NO: 134067 - DNA, 30 bp, Artificial Sequence
  Synthetic oligonucleotide
agatacaaaaaaagattgcgaacaggctat

SEQ ID NO: 134068 - DNA, 30 bp, Artificial Sequence
  Synthetic oligonucleotide
ccgcatacactgtagcaatggtacggctat

SEQ ID NO: 134069 - DNA, 30 bp, Artificial Sequence
  Synthetic oligonucleotide
ataatcccagtagttatagccaccggctat

SEQ ID NO: 134070 - DNA, 30 bp, Artificial Sequence
  Synthetic oligonucleotide
ttccgctcaatgaaaaatagtctgggctat

SEQ ID NO: 134071 - DNA, 30 bp, Artificial Sequence
  Synthetic oligonucleotide
gggcatttccgggcaaaagaaaagtgctat

SEQ ID NO: 134072 - DNA, 30 bp, Artificial Sequence
  Synthetic oligonucleotide
tgcacacgcggcatgactacatctatctat

SEQ ID NO: 134073 - DNA, 30 bp, Artificial Sequence
  Synthetic oligonucleotide
agtcgaaatgctaaagaaatattcctctat

SEQ ID NO: 134074 - DNA, 30 bp, Artificial Sequence
  Synthetic oligonucleotide
ttcgcatactgggtggtatgttagctctat

SEQ ID NO: 134075 - DNA, 30 bp, Artificial Sequence
  Synthetic oligonucleotide
agccgaacgcgtgcggatcaaatgctctat

SEQ ID NO: 134076 - DNA, 30 bp, Artificial Sequence
  Synthetic oligonucleotide
gacatggagtaacggttgttaatcgtctat

SEQ ID NO: 134077 - DNA, 30 bp, Artificial Sequence
  Synthetic oligonucleotide
cctgcacagctacaacagggctatgtctat

SEQ ID NO: 134078 - DNA, 30 bp, Artificial Sequence
  Synthetic oligonucleotide
gctggggcgcgttttcaaatctgcaagtat

SEQ ID NO: 134079 - DNA, 29 bp, Artificial Sequence
  Synthetic oligonucleotide
cacaaataatatgctcgtataagcagtat

SEQ ID NO: 134080 - DNA, 30 bp, Artificial Sequence
  Synthetic oligonucleotide
atgttggacggctcacaggggcctcagtat

SEQ ID NO: 134081 - DNA, 30 bp, Artificial Sequence
  Synthetic oligonucleotide
gtaggcgcggataacacaaatgcggagtat

SEQ ID NO: 134082 - DNA, 30 bp, Artificial Sequence
  Synthetic oligonucleotide
atgctcggtggactcagtataagggagtat

SEQ ID NO: 134083 - DNA, 30 bp, Artificial Sequence
  Synthetic oligonucleotide
gggcgcgacattatccccgagaactagtat

SEQ ID NO: 134084 - DNA, 30 bp, Artificial Sequence
  Synthetic oligonucleotide
ggcctaagcaggaaaataaattggtagtat

SEQ ID NO: 134085 - DNA, 30 bp, Artificial Sequence
  Synthetic oligonucleotide
ccggcccggaaggggtctagattgtagtat

SEQ ID NO: 134086 - DNA, 30 bp, Artificial Sequence
  Synthetic oligonucleotide
cggcacacgatttcaccctcaataacgtat

SEQ ID NO: 134087 - DNA, 30 bp, Artificial Sequence
  Synthetic oligonucleotide
ggtcatcgtataaacctcacaaacacgtat

SEQ ID NO: 134088 - DNA, 30 bp, Artificial Sequence
  Synthetic oligonucleotide
tcgactgttaggaagactccctcgacgtat

SEQ ID NO: 134089 - DNA, 30 bp, Artificial Sequence
  Synthetic oligonucleotide
gagagtgcaatctataaagaggccccgtat

SEQ ID NO: 134090 - DNA, 30 bp, Artificial Sequence
  Synthetic oligonucleotide
atacgtgcaacttccaagcacgatccgtat

SEQ ID NO: 134091 - DNA, 30 bp, Artificial Sequence
  Synthetic oligonucleotide
gcgcagctgaaggagaatagttgagcgtat

SEQ ID NO: 134092 - DNA, 30 bp, Artificial Sequence
  Synthetic oligonucleotide
cccaaaatcacacagcggtagcacgcgtat

SEQ ID NO: 134093 - DNA, 30 bp, Artificial Sequence
  Synthetic oligonucleotide
tgcacatgaggaactgttctcttcgcgtat

SEQ ID NO: 134094 - DNA, 30 bp, Artificial Sequence
  Synthetic oligonucleotide
atgatactgccgcgggcggacagggcgtat

SEQ ID NO: 134095 - DNA, 30 bp, Artificial Sequence
  Synthetic oligonucleotide
ggaagcaagtggcgaacccttaaatcgtat

SEQ ID NO: 134096 - DNA, 30 bp, Artificial Sequence
  Synthetic oligonucleotide
actgtcacggcacgatgagcattatcgtat

SEQ ID NO: 134097 - DNA, 30 bp, Artificial Sequence
  Synthetic oligonucleotide
tgcgtcatgtgcggtccgggttactcgtat

SEQ ID NO: 134098 - DNA, 30 bp, Artificial Sequence
  Synthetic oligonucleotide
aagagggatgtgttccataaaaattcgtat

SEQ ID NO: 134099 - DNA, 30 bp, Artificial Sequence
  Synthetic oligonucleotide
gtcgtctagacactgggtaagcattcgtat

SEQ ID NO: 134100 - DNA, 30 bp, Artificial Sequence
  Synthetic oligonucleotide
atagccccagtcgagagaactgcgaggtat

SEQ ID NO: 134101 - DNA, 30 bp, Artificial Sequence
  Synthetic oligonucleotide
ccgacaatgaatcatgtcttcagtaggtat

SEQ ID NO: 134102 - DNA, 30 bp, Artificial Sequence
  Synthetic oligonucleotide
cgggcctgatctgtcataggcgggcggtat

SEQ ID NO: 134103 - DNA, 30 bp, Artificial Sequence
  Synthetic oligonucleotide
cggattgataactctatattccgagggtat

SEQ ID NO: 134104 - DNA, 30 bp, Artificial Sequence
  Synthetic oligonucleotide
cgagtggccgccctgtaacataaggggtat

SEQ ID NO: 134105 - DNA, 30 bp, Artificial Sequence
  Synthetic oligonucleotide
tgctaaggcttagtacgatagtgtgggtat

SEQ ID NO: 134106 - DNA, 30 bp, Artificial Sequence
  Synthetic oligonucleotide
atggagaactctaggccaaaataatggtat

SEQ ID NO: 134107 - DNA, 30 bp, Artificial Sequence
  Synthetic oligonucleotide
acgacggacgggcgagcgggaggctggtat

SEQ ID NO: 134108 - DNA, 30 bp, Artificial Sequence
  Synthetic oligonucleotide
ggcgaatgccgtggcacaagggggtggtat

SEQ ID NO: 134109 - DNA, 30 bp, Artificial Sequence
  Synthetic oligonucleotide
tcgaggtctgagcgatcgtcccggctgtat

SEQ ID NO: 134110 - DNA, 30 bp, Artificial Sequence
  Synthetic oligonucleotide
gtagcctaaataccgcgatcaaaagtgtat

SEQ ID NO: 134111 - DNA, 30 bp, Artificial Sequence
  Synthetic oligonucleotide
tcccctgaaggaccgggattgggcgtgtat

SEQ ID NO: 134112 - DNA, 30 bp, Artificial Sequence
  Synthetic oligonucleotide
tcttatctgttgtgttttcttcttgtgtat

SEQ ID NO: 134113 - DNA, 30 bp, Artificial Sequence
  Synthetic oligonucleotide
acaagagtacttgcgcactttgtattgtat

SEQ ID NO: 134114 - DNA, 30 bp, Artificial Sequence
  Synthetic oligonucleotide
ctgcgagaagtagggcgattgagaaattat

SEQ ID NO: 134115 - DNA, 30 bp, Artificial Sequence
  Synthetic oligonucleotide
gcttgacgacctccttgtcagatacattat

SEQ ID NO: 134116 - DNA, 30 bp, Artificial Sequence
  Synthetic oligonucleotide
cagctaaatgaagagttagcctgccattat

SEQ ID NO: 134117 - DNA, 30 bp, Artificial Sequence
  Synthetic oligonucleotide
agcaaggaagatccggtcatgagcgattat

SEQ ID NO: 134118 - DNA, 30 bp, Artificial Sequence
  Synthetic oligonucleotide
gcctgggtgtaagatgttcaatgtgattat

SEQ ID NO: 134119 - DNA, 30 bp, Artificial Sequence
  Synthetic oligonucleotide
tgggatttgagctggtgcggtgcatattat

SEQ ID NO: 134120 - DNA, 30 bp, Artificial Sequence
  Synthetic oligonucleotide
tagtgaatcaagtggaggtcgtagtattat

SEQ ID NO: 134121 - DNA, 30 bp, Artificial Sequence
  Synthetic oligonucleotide
ctagtataacagtatctctggctcacttat

SEQ ID NO: 134122 - DNA, 30 bp, Artificial Sequence
  Synthetic oligonucleotide
acatgagtagctgcaagatggtagccttat

SEQ ID NO: 134123 - DNA, 30 bp, Artificial Sequence
  Synthetic oligonucleotide
tgatagttaaagaagggggtgatgccttat

SEQ ID NO: 134124 - DNA, 30 bp, Artificial Sequence
  Synthetic oligonucleotide
aggcgcaaggtgtcatgggtctatgcttat

SEQ ID NO: 134125 - DNA, 30 bp, Artificial Sequence
  Synthetic oligonucleotide
caatcacactccgtagcgttcaggtcttat

SEQ ID NO: 134126 - DNA, 30 bp, Artificial Sequence
  Synthetic oligonucleotide
actcggaagcggctgttggtacgttcttat

SEQ ID NO: 134127 - DNA, 28 bp, Artificial Sequence
  Synthetic oligonucleotide
cgtggaaatagtcaggccgtgttcttat

SEQ ID NO: 134128 - DNA, 30 bp, Artificial Sequence
  Synthetic oligonucleotide
actccgtcacagtaaagccagaacagttat

SEQ ID NO: 134129 - DNA, 30 bp, Artificial Sequence
  Synthetic oligonucleotide
tcagcctcggtaatgttcacagacagttat

SEQ ID NO: 134130 - DNA, 30 bp, Artificial Sequence
  Synthetic oligonucleotide
cccagggatggactctaaagcgtcagttat

SEQ ID NO: 134131 - DNA, 30 bp, Artificial Sequence
  Synthetic oligonucleotide
cagtacgggcggtctaccttttagagttat

SEQ ID NO: 134132 - DNA, 30 bp, Artificial Sequence
  Synthetic oligonucleotide
gtcatctgcgcaaggccatccgcacgttat

SEQ ID NO: 134133 - DNA, 30 bp, Artificial Sequence
  Synthetic oligonucleotide
agctcagtgcccgggcgcggggtacgttat

SEQ ID NO: 134134 - DNA, 30 bp, Artificial Sequence
  Synthetic oligonucleotide
ggctatacatagctactgcttcagcgttat

SEQ ID NO: 134135 - DNA, 30 bp, Artificial Sequence
  Synthetic oligonucleotide
aaaggattaaccatagagtacgagcgttat

SEQ ID NO: 134136 - DNA, 30 bp, Artificial Sequence
  Synthetic oligonucleotide
ccacgtctcgagttttggggagaaggttat

SEQ ID NO: 134137 - DNA, 30 bp, Artificial Sequence
  Synthetic oligonucleotide
agtctcactgcgaagccgaaacacggttat

SEQ ID NO: 134138 - DNA, 30 bp, Artificial Sequence
  Synthetic oligonucleotide
taagacggtcggacgaaaccgagatgttat

SEQ ID NO: 134139 - DNA, 30 bp, Artificial Sequence
  Synthetic oligonucleotide
ttcacaacgtcaacaggaggacagtgttat

SEQ ID NO: 134140 - DNA, 30 bp, Artificial Sequence
  Synthetic oligonucleotide
tggttggatcgaatagttgtggagtgttat

SEQ ID NO: 134141 - DNA, 30 bp, Artificial Sequence
  Synthetic oligonucleotide
gggctcggatacaaaggtagaaattgttat

SEQ ID NO: 134142 - DNA, 30 bp, Artificial Sequence
  Synthetic oligonucleotide
gtgggaaaagtacttggacttacactttat

SEQ ID NO: 134143 - DNA, 30 bp, Artificial Sequence
  Synthetic oligonucleotide
ccggaacaggttaatgatgatacgctttat

SEQ ID NO: 134144 - DNA, 30 bp, Artificial Sequence
  Synthetic oligonucleotide
cgcttcgtaaggatcagccatcgtaaaact

SEQ ID NO: 134145 - DNA, 30 bp, Artificial Sequence
  Synthetic oligonucleotide
ctaggagccggagtcaccattcgtaaaact

SEQ ID NO: 134146 - DNA, 30 bp, Artificial Sequence
  Synthetic oligonucleotide
atgtcaaaattacggagggtactacaaact

SEQ ID NO: 134147 - DNA, 30 bp, Artificial Sequence
  Synthetic oligonucleotide
agagtgataggacaataagggctacaaact

SEQ ID NO: 134148 - DNA, 30 bp, Artificial Sequence
  Synthetic oligonucleotide
ggaatcaaattgcgattagtaaggcaaact

SEQ ID NO: 134149 - DNA, 30 bp, Artificial Sequence
  Synthetic oligonucleotide
tgtgtggacggaccgagtctcgtgcaaact

SEQ ID NO: 134150 - DNA, 30 bp, Artificial Sequence
  Synthetic oligonucleotide
ctgatcctatgggacggagggagagaaact

SEQ ID NO: 134151 - DNA, 30 bp, Artificial Sequence
  Synthetic oligonucleotide
tagaaccggcggactaaacagattgaaact

SEQ ID NO: 134152 - DNA, 30 bp, Artificial Sequence
  Synthetic oligonucleotide
attgacgatagtcgcggggtagcgtaaact

SEQ ID NO: 134153 - DNA, 30 bp, Artificial Sequence
  Synthetic oligonucleotide
aaccatgagacacgtcacagacaaacaact

SEQ ID NO: 134154 - DNA, 30 bp, Artificial Sequence
  Synthetic oligonucleotide
gatggggtgtggaaaaaaacaaagacaact

SEQ ID NO: 134155 - DNA, 30 bp, Artificial Sequence
  Synthetic oligonucleotide
caagccccaggatacgccacgacgccaact

SEQ ID NO: 134156 - DNA, 30 bp, Artificial Sequence
  Synthetic oligonucleotide
acacgctaacaaagcaatactaatccaact

SEQ ID NO: 134157 - DNA, 29 bp, Artificial Sequence
  Synthetic oligonucleotide
atggtgacccgagtcttgtcgctccaact

SEQ ID NO: 134158 - DNA, 30 bp, Artificial Sequence
  Synthetic oligonucleotide
gtaaaaattgtgccctctcgaacagcaact

SEQ ID NO: 134159 - DNA, 30 bp, Artificial Sequence
  Synthetic oligonucleotide
gatgtgatgacttaatgcatcagggcaact

SEQ ID NO: 134160 - DNA, 30 bp, Artificial Sequence
  Synthetic oligonucleotide
caccgtgcacataaccaggggcgggcaact

SEQ ID NO: 134161 - DNA, 30 bp, Artificial Sequence
  Synthetic oligonucleotide
cgtatcgagttaccgaggtcttcatcaact

SEQ ID NO: 134162 - DNA, 30 bp, Artificial Sequence
  Synthetic oligonucleotide
gggtctcggtatttgtaatctggaagaact

SEQ ID NO: 134163 - DNA, 30 bp, Artificial Sequence
  Synthetic oligonucleotide
ctggtgaccacacattgaagatacagaact

SEQ ID NO: 134164 - DNA, 30 bp, Artificial Sequence
  Synthetic oligonucleotide
ggtacaattagtatcacaacggtcagaact

SEQ ID NO: 134165 - DNA, 30 bp, Artificial Sequence
  Synthetic oligonucleotide
cgatcatagtacgtggatcatttcagaact

SEQ ID NO: 134166 - DNA, 30 bp, Artificial Sequence
  Synthetic oligonucleotide
ctgctctcaccgtgcaactcaaaccgaact

SEQ ID NO: 134167 - DNA, 30 bp, Artificial Sequence
  Synthetic oligonucleotide
cgggtaaattcatggggtccaccaggaact

SEQ ID NO: 134168 - DNA, 30 bp, Artificial Sequence
  Synthetic oligonucleotide
acacgtaccgagccggtccgtactggaact

SEQ ID NO: 134169 - DNA, 30 bp, Artificial Sequence
  Synthetic oligonucleotide
cgcctcaggcgaaaagcaggtttatgaact

SEQ ID NO: 134170 - DNA, 30 bp, Artificial Sequence
  Synthetic oligonucleotide
ggatgttaaaggatcccgtcagcgtgaact

SEQ ID NO: 134171 - DNA, 30 bp, Artificial Sequence
  Synthetic oligonucleotide
cgcctttactaatcatcaagtgcaataact

SEQ ID NO: 134172 - DNA, 30 bp, Artificial Sequence
  Synthetic oligonucleotide
gataatggcctaatataacgtcaactaact

SEQ ID NO: 134173 - DNA, 30 bp, Artificial Sequence
  Synthetic oligonucleotide
acacccgctatactctagttcaacgtaact

SEQ ID NO: 134174 - DNA, 30 bp, Artificial Sequence
  Synthetic oligonucleotide
gcgctgaatcctagggtcagtcaggtaact

SEQ ID NO: 134175 - DNA, 30 bp, Artificial Sequence
  Synthetic oligonucleotide
caggtgcaaaaaaatgatcggtgggtaact

SEQ ID NO: 134176 - DNA, 30 bp, Artificial Sequence
  Synthetic oligonucleotide
tatggtaatatcggagtggcttcaaacact

SEQ ID NO: 134177 - DNA, 30 bp, Artificial Sequence
  Synthetic oligonucleotide
tgtcgggtgaacaagagctaccacaacact

SEQ ID NO: 134178 - DNA, 31 bp, Artificial Sequence
  Synthetic oligonucleotide
ggaacgtaatatgatagcgcacggacacact

SEQ ID NO: 134179 - DNA, 30 bp, Artificial Sequence
  Synthetic oligonucleotide
acagtacacagggttcgaatagcggacact

SEQ ID NO: 134180 - DNA, 30 bp, Artificial Sequence
  Synthetic oligonucleotide
ctcgcctgataacattaccctatctacact

SEQ ID NO: 134181 - DNA, 30 bp, Artificial Sequence
  Synthetic oligonucleotide
taggggccggatgtgcgacaactttacact

SEQ ID NO: 134182 - DNA, 30 bp, Artificial Sequence
  Synthetic oligonucleotide
tgtcgcactgccaacgaggagtgcaccact

SEQ ID NO: 134183 - DNA, 30 bp, Artificial Sequence
  Synthetic oligonucleotide
gggcacgcccaagtacgttcggaacccact

SEQ ID NO: 134184 - DNA, 30 bp, Artificial Sequence
  Synthetic oligonucleotide
atgttggtccgtactgaaagcctacccact

SEQ ID NO: 134185 - DNA, 30 bp, Artificial Sequence
  Synthetic oligonucleotide
aggagatgaacaaagttttcacctcccact

SEQ ID NO: 134186 - DNA, 30 bp, Artificial Sequence
  Synthetic oligonucleotide
ttcgtatcaactcaaagttaagtatccact

SEQ ID NO: 134187 - DNA, 30 bp, Artificial Sequence
  Synthetic oligonucleotide
tcggtcataaagttcaggtgatcttccact

SEQ ID NO: 134188 - DNA, 30 bp, Artificial Sequence
  Synthetic oligonucleotide
acattcagatctcgataccttcacagcact

SEQ ID NO: 134189 - DNA, 30 bp, Artificial Sequence
  Synthetic oligonucleotide
ccgtactcgggaagcctagagggcagcact

SEQ ID NO: 134190 - DNA, 30 bp, Artificial Sequence
  Synthetic oligonucleotide
gagcgtgggggttaccttatgaggagcact

SEQ ID NO: 134191 - DNA, 30 bp, Artificial Sequence
  Synthetic oligonucleotide
tctttcctgcgatcagctcattggagcact

SEQ ID NO: 134192 - DNA, 30 bp, Artificial Sequence
  Synthetic oligonucleotide
ccgaggaggaccgcggtatgtcgccgcact

SEQ ID NO: 134193 - DNA, 30 bp, Artificial Sequence
  Synthetic oligonucleotide
acctgcgtccaccccaatattacctgcact

SEQ ID NO: 134194 - DNA, 30 bp, Artificial Sequence
  Synthetic oligonucleotide
cttagaagaatgccaatagcgcccatcact

SEQ ID NO: 134195 - DNA, 30 bp, Artificial Sequence
  Synthetic oligonucleotide
gttggcgggaatagagaagggtggatcact

SEQ ID NO: 134196 - DNA, 30 bp, Artificial Sequence
  Synthetic oligonucleotide
tgagcctacggaattgtaatctatatcact

SEQ ID NO: 134197 - DNA, 30 bp, Artificial Sequence
  Synthetic oligonucleotide
agaccgaaatccgaatcgtatcaactcact

SEQ ID NO: 134198 - DNA, 30 bp, Artificial Sequence
  Synthetic oligonucleotide
agcggaccgcgacatgctaacacactcact

SEQ ID NO: 134199 - DNA, 30 bp, Artificial Sequence
  Synthetic oligonucleotide
ttactgggtaggagaccatgattactcact

SEQ ID NO: 134200 - DNA, 30 bp, Artificial Sequence
  Synthetic oligonucleotide
ggaataatggatacagcgaagtacctcact

SEQ ID NO: 134201 - DNA, 30 bp, Artificial Sequence
  Synthetic oligonucleotide
ccgcgcggtaccaggtgacgcaccgtcact

SEQ ID NO: 134202 - DNA, 30 bp, Artificial Sequence
  Synthetic oligonucleotide
ggtgtaatgtaagtgaaaaggtaattcact

SEQ ID NO: 134203 - DNA, 30 bp, Artificial Sequence
  Synthetic oligonucleotide
ggtacagaagtgtatctagtggaaaagact

SEQ ID NO: 134204 - DNA, 30 bp, Artificial Sequence
  Synthetic oligonucleotide
ccgtgtgtcggtaggggtagctcaaagact

SEQ ID NO: 134205 - DNA, 30 bp, Artificial Sequence
  Synthetic oligonucleotide
cgcaaactaaataagcaaaggtggaagact

SEQ ID NO: 134206 - DNA, 30 bp, Artificial Sequence
  Synthetic oligonucleotide
cctggggaaaaacggtggtatattaagact

SEQ ID NO: 134207 - DNA, 30 bp, Artificial Sequence
  Synthetic oligonucleotide
gagcaataggagggtgatacctgccagact

SEQ ID NO: 134208 - DNA, 30 bp, Artificial Sequence
  Synthetic oligonucleotide
ggctgggtctatcgtcaaagcatgcagact

SEQ ID NO: 134209 - DNA, 30 bp, Artificial Sequence
  Synthetic oligonucleotide
cgcttgggcttcggttgtacgatatagact

SEQ ID NO: 134210 - DNA, 30 bp, Artificial Sequence
  Synthetic oligonucleotide
aattgggtggtatacaacaggggttagact

SEQ ID NO: 134211 - DNA, 30 bp, Artificial Sequence
  Synthetic oligonucleotide
agcatttcggtagaatgatattgttagact

SEQ ID NO: 134212 - DNA, 30 bp, Artificial Sequence
  Synthetic oligonucleotide
tagattgtgccatgaggtctagccacgact

SEQ ID NO: 134213 - DNA, 30 bp, Artificial Sequence
  Synthetic oligonucleotide
tcgccggtgcatgtctgatcctcaccgact

SEQ ID NO: 134214 - DNA, 30 bp, Artificial Sequence
  Synthetic oligonucleotide
aacaactggcgagatgacttcaccccgact

SEQ ID NO: 134215 - DNA, 30 bp, Artificial Sequence
  Synthetic oligonucleotide
ggtgcgaatccggtataagaccgctcgact

SEQ ID NO: 134216 - DNA, 30 bp, Artificial Sequence
  Synthetic oligonucleotide
aatttgacagtctaaaccgttggctcgact

SEQ ID NO: 134217 - DNA, 30 bp, Artificial Sequence
  Synthetic oligonucleotide
agaagcggactactgaccacactttcgact

SEQ ID NO: 134218 - DNA, 30 bp, Artificial Sequence
  Synthetic oligonucleotide
atgagcgttagtgtccagaagggaaggact

SEQ ID NO: 134219 - DNA, 30 bp, Artificial Sequence
  Synthetic oligonucleotide
cccggacaacattctctagcccacaggact

SEQ ID NO: 134220 - DNA, 30 bp, Artificial Sequence
  Synthetic oligonucleotide
tgaacttgcgagcacagattgatcaggact

SEQ ID NO: 134221 - DNA, 30 bp, Artificial Sequence
  Synthetic oligonucleotide
gttatcattcagtcgtgacagcaccggact

SEQ ID NO: 134222 - DNA, 30 bp, Artificial Sequence
  Synthetic oligonucleotide
atcgtgggaaataataagaggaggcggact

SEQ ID NO: 134223 - DNA, 30 bp, Artificial Sequence
  Synthetic oligonucleotide
catcctggtggtatttgaactgtgcggact

SEQ ID NO: 134224 - DNA, 30 bp, Artificial Sequence
  Synthetic oligonucleotide
caggcgacttgggaattgcaagccgggact

SEQ ID NO: 134225 - DNA, 30 bp, Artificial Sequence
  Synthetic oligonucleotide
acatttacggaacggtcgattgccatgact

SEQ ID NO: 134226 - DNA, 30 bp, Artificial Sequence
  Synthetic oligonucleotide
aggacaacccatcgagtcgtaaatatgact

SEQ ID NO: 134227 - DNA, 30 bp, Artificial Sequence
  Synthetic oligonucleotide
cgtgcgccctaggcggactcatctatgact

SEQ ID NO: 134228 - DNA, 30 bp, Artificial Sequence
  Synthetic oligonucleotide
tctatacggaacgagtttccgcgtatgact

SEQ ID NO: 134229 - DNA, 30 bp, Artificial Sequence
  Synthetic oligonucleotide
cccaaatattccacacacaagaagctgact

SEQ ID NO: 134230 - DNA, 30 bp, Artificial Sequence
  Synthetic oligonucleotide
taagcctatttcaaagatgtgccgctgact

SEQ ID NO: 134231 - DNA, 30 bp, Artificial Sequence
  Synthetic oligonucleotide
gcacggaaggtccagtaaggggggctgact

SEQ ID NO: 134232 - DNA, 30 bp, Artificial Sequence
  Synthetic oligonucleotide
aatcccaccagtctcaaacacatagtgact

SEQ ID NO: 134233 - DNA, 30 bp, Artificial Sequence
  Synthetic oligonucleotide
aaccaagtaaagtatatgagccagttgact

SEQ ID NO: 134234 - DNA, 30 bp, Artificial Sequence
  Synthetic oligonucleotide
tgagacgaatccgcgttctctgcgttgact

SEQ ID NO: 134235 - DNA, 30 bp, Artificial Sequence
  Synthetic oligonucleotide
ctgaggacaacaaagtgtacgatcaatact

SEQ ID NO: 134236 - DNA, 30 bp, Artificial Sequence
  Synthetic oligonucleotide
acattcgtggcgctacggcctacagatact

SEQ ID NO: 134237 - DNA, 30 bp, Artificial Sequence
  Synthetic oligonucleotide
tgggcgaacgaccattcatctggcgatact

SEQ ID NO: 134238 - DNA, 30 bp, Artificial Sequence
  Synthetic oligonucleotide
cgatgttgcacatataaatcgtatgatact

SEQ ID NO: 134239 - DNA, 30 bp, Artificial Sequence
  Synthetic oligonucleotide
cgtacggtaatcacgggagaggaatatact

SEQ ID NO: 134240 - DNA, 30 bp, Artificial Sequence
  Synthetic oligonucleotide
attgatacatggaagtgactcttatatact

SEQ ID NO: 134241 - DNA, 30 bp, Artificial Sequence
  Synthetic oligonucleotide
ataaacttttggagactactatggtatact

SEQ ID NO: 134242 - DNA, 30 bp, Artificial Sequence
  Synthetic oligonucleotide
ctccgacattaaggacgactgagcactact

SEQ ID NO: 134243 - DNA, 30 bp, Artificial Sequence
  Synthetic oligonucleotide
tctacgaggtaacgtaggagattgactact

SEQ ID NO: 134244 - DNA, 30 bp, Artificial Sequence
  Synthetic oligonucleotide
ctcgctgggtgatcaacaaacggacctact

SEQ ID NO: 134245 - DNA, 30 bp, Artificial Sequence
  Synthetic oligonucleotide
agatgaatattaggtacttaggatcctact

SEQ ID NO: 134246 - DNA, 30 bp, Artificial Sequence
  Synthetic oligonucleotide
aatcggcgagctagccagggcagcgctact

SEQ ID NO: 134247 - DNA, 30 bp, Artificial Sequence
  Synthetic oligonucleotide
acagccgggaaggaaaccgtggactctact

SEQ ID NO: 134248 - DNA, 30 bp, Artificial Sequence
  Synthetic oligonucleotide
ataagcggatagtgaagtgactcgtctact

SEQ ID NO: 134249 - DNA, 30 bp, Artificial Sequence
  Synthetic oligonucleotide
acaaaggagcgccactgagaatgttctact

SEQ ID NO: 134250 - DNA, 30 bp, Artificial Sequence
  Synthetic oligonucleotide
catctgatggttgtacggcaaaaaagtact

SEQ ID NO: 134251 - DNA, 30 bp, Artificial Sequence
  Synthetic oligonucleotide
ccaccccgttataatgcggggtaaagtact

SEQ ID NO: 134252 - DNA, 30 bp, Artificial Sequence
  Synthetic oligonucleotide
ctgggagctaaactaagaaacaaccgtact

SEQ ID NO: 134253 - DNA, 30 bp, Artificial Sequence
  Synthetic oligonucleotide
gggaaaccacgatgtggagaagcccgtact

SEQ ID NO: 134254 - DNA, 30 bp, Artificial Sequence
  Synthetic oligonucleotide
cacgtgggtaacctgtacagcggatgtact

SEQ ID NO: 134255 - DNA, 30 bp, Artificial Sequence
  Synthetic oligonucleotide
cgtggccaaaaacattatcgtatatgtact

SEQ ID NO: 134256 - DNA, 30 bp, Artificial Sequence
  Synthetic oligonucleotide
caagactcatctagcagcttccagtgtact

SEQ ID NO: 134257 - DNA, 30 bp, Artificial Sequence
  Synthetic oligonucleotide
aggacacccacgtatcgtacctagtgtact

SEQ ID NO: 134258 - DNA, 30 bp, Artificial Sequence
  Synthetic oligonucleotide
cgtcacttattgttcaatatgtcgattact

SEQ ID NO: 134259 - DNA, 30 bp, Artificial Sequence
  Synthetic oligonucleotide
ggttaaccgtggttaggagctggacttact

SEQ ID NO: 134260 - DNA, 30 bp, Artificial Sequence
  Synthetic oligonucleotide
ggtgggagcgcggtccatgtcagtgttact

SEQ ID NO: 134261 - DNA, 30 bp, Artificial Sequence
  Synthetic oligonucleotide
gcaaaggtagatcaacagacctaatttact

SEQ ID NO: 134262 - DNA, 30 bp, Artificial Sequence
  Synthetic oligonucleotide
ctaggtgacatggagtgctatgactttact

SEQ ID NO: 134263 - DNA, 30 bp, Artificial Sequence
  Synthetic oligonucleotide
tacttattggctctcaataagtcgtttact

SEQ ID NO: 134264 - DNA, 30 bp, Artificial Sequence
  Synthetic oligonucleotide
ccagaaggtagtgggaccggcccaaaacct

SEQ ID NO: 134265 - DNA, 30 bp, Artificial Sequence
  Synthetic oligonucleotide
aatggcagtgataacaggtcagggaaacct

SEQ ID NO: 134266 - DNA, 30 bp, Artificial Sequence
  Synthetic oligonucleotide
tgacatatggatcggattactaataaacct

SEQ ID NO: 134267 - DNA, 30 bp, Artificial Sequence
  Synthetic oligonucleotide
agtgggggtgtgatcaggttacctaaacct

SEQ ID NO: 134268 - DNA, 30 bp, Artificial Sequence
  Synthetic oligonucleotide
tccatgcgctaaggactcgcataacaacct

SEQ ID NO: 134269 - DNA, 30 bp, Artificial Sequence
  Synthetic oligonucleotide
agacacaccgtgagcgcaatgacacaacct

SEQ ID NO: 134270 - DNA, 30 bp, Artificial Sequence
  Synthetic oligonucleotide
tgctactgctacgtttgacgtaaggaacct

SEQ ID NO: 134271 - DNA, 30 bp, Artificial Sequence
  Synthetic oligonucleotide
aatggtatgcgggccaatgatcttgaacct

SEQ ID NO: 134272 - DNA, 30 bp, Artificial Sequence
  Synthetic oligonucleotide
cgagtgattccattccatacggtctaacct

SEQ ID NO: 134273 - DNA, 30 bp, Artificial Sequence
  Synthetic oligonucleotide
ggcactaagggactttcatggatttaacct

SEQ ID NO: 134274 - DNA, 30 bp, Artificial Sequence
  Synthetic oligonucleotide
cagatatacgttgaagggaggtgaccacct

SEQ ID NO: 134275 - DNA, 36 bp, Artificial Sequence
  Synthetic oligonucleotide
ctcaagtagacttaatcgacacatcgtactccacct

SEQ ID NO: 134276 - DNA, 30 bp, Artificial Sequence
  Synthetic oligonucleotide
gagaaacaaaatcacaaccagacagcacct

SEQ ID NO: 134277 - DNA, 30 bp, Artificial Sequence
  Synthetic oligonucleotide
gtcggactacctatacccgctaagagacct

SEQ ID NO: 134278 - DNA, 30 bp, Artificial Sequence
  Synthetic oligonucleotide
caggtagacaccatggtggggtctagacct

SEQ ID NO: 134279 - DNA, 30 bp, Artificial Sequence
  Synthetic oligonucleotide
gaacactatgaggagacgtctataggacct

SEQ ID NO: 134280 - DNA, 31 bp, Artificial Sequence
  Synthetic oligonucleotide
gcggtagcagaagctataaccttcatgacct

SEQ ID NO: 134281 - DNA, 30 bp, Artificial Sequence
  Synthetic oligonucleotide
attgaagacggccggctgagccactgacct

SEQ ID NO: 134282 - DNA, 30 bp, Artificial Sequence
  Synthetic oligonucleotide
gcgggacaagtgtgggtaaacacaatacct

SEQ ID NO: 134283 - DNA, 30 bp, Artificial Sequence
  Synthetic oligonucleotide
gtacatccactaaattagacaggcctacct

SEQ ID NO: 134284 - DNA, 30 bp, Artificial Sequence
  Synthetic oligonucleotide
caggtatggccacgacttggtatagtacct

SEQ ID NO: 134285 - DNA, 30 bp, Artificial Sequence
  Synthetic oligonucleotide
ccggcgtacgatcttcccggtagggtacct

SEQ ID NO: 134286 - DNA, 30 bp, Artificial Sequence
  Synthetic oligonucleotide
caacctaacgaatgactaggactgaaccct

SEQ ID NO: 134287 - DNA, 30 bp, Artificial Sequence
  Synthetic oligonucleotide
aggctagcgacacaccgttcggcgcaccct

SEQ ID NO: 134288 - DNA, 30 bp, Artificial Sequence
  Synthetic oligonucleotide
tttaagcgtacttacgagggcggggaccct

SEQ ID NO: 134289 - DNA, 30 bp, Artificial Sequence
  Synthetic oligonucleotide
ggacttccattgtaaggaactgtgtaccct

SEQ ID NO: 134290 - DNA, 30 bp, Artificial Sequence
  Synthetic oligonucleotide
ggggggcatgtacctagacgcaccacccct

SEQ ID NO: 134291 - DNA, 30 bp, Artificial Sequence
  Synthetic oligonucleotide
tttggacaggtagtgaatggaacaccccct

SEQ ID NO: 134292 - DNA, 31 bp, Artificial Sequence
  Synthetic oligonucleotide
tggtggacattcggcgtagagagccgcccct

SEQ ID NO: 134293 - DNA, 30 bp, Artificial Sequence
  Synthetic oligonucleotide
agctggccgtcaacacaattggaatcccct

SEQ ID NO: 134294 - DNA, 30 bp, Artificial Sequence
  Synthetic oligonucleotide
cgaggaaaaacgcgatggggggttcgccct

SEQ ID NO: 134295 - DNA, 30 bp, Artificial Sequence
  Synthetic oligonucleotide
ggtctcggccgcaaccgacagtgaggccct

SEQ ID NO: 134296 - DNA, 30 bp, Artificial Sequence
  Synthetic oligonucleotide
tgcggcgacttgcggagggtagatggccct

SEQ ID NO: 134297 - DNA, 30 bp, Artificial Sequence
  Synthetic oligonucleotide
agaaaagacacgacgctggtcccctgccct

SEQ ID NO: 134298 - DNA, 30 bp, Artificial Sequence
  Synthetic oligonucleotide
tacgggcttgccggctcaccaacactccct

SEQ ID NO: 134299 - DNA, 30 bp, Artificial Sequence
  Synthetic oligonucleotide
gactgtaactgggcaatttgcgcaaagcct

SEQ ID NO: 134300 - DNA, 30 bp, Artificial Sequence
  Synthetic oligonucleotide
ggaaaccaaacacgcctgtagtataagcct

SEQ ID NO: 134301 - DNA, 30 bp, Artificial Sequence
  Synthetic oligonucleotide
aaacgagcagattaacacaaatcgcagcct

SEQ ID NO: 134302 - DNA, 30 bp, Artificial Sequence
  Synthetic oligonucleotide
gactaggtggaagcaatattgtgagagcct

SEQ ID NO: 134303 - DNA, 30 bp, Artificial Sequence
  Synthetic oligonucleotide
ctacagcttacttcagaatcaatggagcct

SEQ ID NO: 134304 - DNA, 30 bp, Artificial Sequence
  Synthetic oligonucleotide
gttgaaaaagtcgtgcaccgtggttagcct

SEQ ID NO: 134305 - DNA, 30 bp, Artificial Sequence
  Synthetic oligonucleotide
gctttgttgcattcacaaaaagtttagcct

SEQ ID NO: 134306 - DNA, 30 bp, Artificial Sequence
  Synthetic oligonucleotide
acacaccgaaaacgtacgccggaaacgcct

SEQ ID NO: 134307 - DNA, 30 bp, Artificial Sequence
  Synthetic oligonucleotide
acacagcgcatctcgtaagtgggcccgcct

SEQ ID NO: 134308 - DNA, 30 bp, Artificial Sequence
  Synthetic oligonucleotide
cgggggttgaatcagactgtaatcgcgcct

SEQ ID NO: 134309 - DNA, 30 bp, Artificial Sequence
  Synthetic oligonucleotide
ctacactatatacgaactgtgtgaaggcct

SEQ ID NO: 134310 - DNA, 30 bp, Artificial Sequence
  Synthetic oligonucleotide
caggcccgcgctagtgcgacaataaggcct

SEQ ID NO: 134311 - DNA, 30 bp, Artificial Sequence
  Synthetic oligonucleotide
atcattgcaactcgcgtgcgtgggaggcct

SEQ ID NO: 134312 - DNA, 30 bp, Artificial Sequence
  Synthetic oligonucleotide
acattcagcattcaagaagtaaaacggcct

SEQ ID NO: 134313 - DNA, 30 bp, Artificial Sequence
  Synthetic oligonucleotide
gggacatcatactccacccggaaagggcct

SEQ ID NO: 134314 - DNA, 30 bp, Artificial Sequence
  Synthetic oligonucleotide
agggatgtaggggtcagtaaagacgggcct

SEQ ID NO: 134315 - DNA, 30 bp, Artificial Sequence
  Synthetic oligonucleotide
gtaaattgcgggccagaaccgggtgggcct

SEQ ID NO: 134316 - DNA, 30 bp, Artificial Sequence
  Synthetic oligonucleotide
tatgtgaggggacgtatattgtcatggcct

SEQ ID NO: 134317 - DNA, 30 bp, Artificial Sequence
  Synthetic oligonucleotide
caataatcagtctgcgcaatataaatgcct

SEQ ID NO: 134318 - DNA, 30 bp, Artificial Sequence
  Synthetic oligonucleotide
gggatgaggtgctcttttaaagatatgcct

SEQ ID NO: 134319 - DNA, 30 bp, Artificial Sequence
  Synthetic oligonucleotide
aaaaaaacggggtcttgggggctactgcct

SEQ ID NO: 134320 - DNA, 30 bp, Artificial Sequence
  Synthetic oligonucleotide
agggaagcggcaacagcgaagatcctgcct

SEQ ID NO: 134321 - DNA, 30 bp, Artificial Sequence
  Synthetic oligonucleotide
caaaccgggatcgttggtgctgaagtgcct

SEQ ID NO: 134322 - DNA, 30 bp, Artificial Sequence
  Synthetic oligonucleotide
caggtaggtatggagtggttgagtttgcct

SEQ ID NO: 134323 - DNA, 30 bp, Artificial Sequence
  Synthetic oligonucleotide
agagaaacgagctacgtgaaaaacaatcct

SEQ ID NO: 134324 - DNA, 30 bp, Artificial Sequence
  Synthetic oligonucleotide
cgtaattgatctcgtaggggcggacatcct

SEQ ID NO: 134325 - DNA, 30 bp, Artificial Sequence
  Synthetic oligonucleotide
cacttcaataatatgggctaactgcatcct

SEQ ID NO: 134326 - DNA, 30 bp, Artificial Sequence
  Synthetic oligonucleotide
gggttacgaacacggaaatattttcatcct

SEQ ID NO: 134327 - DNA, 30 bp, Artificial Sequence
  Synthetic oligonucleotide
tgagggatatatcggtgcggcaatgatcct

SEQ ID NO: 134328 - DNA, 30 bp, Artificial Sequence
  Synthetic oligonucleotide
acgggtgtagtgccggagtggttgtctcct

SEQ ID NO: 134329 - DNA, 30 bp, Artificial Sequence
  Synthetic oligonucleotide
ctgagaacacgggaagttaacacttctcct

SEQ ID NO: 134330 - DNA, 30 bp, Artificial Sequence
  Synthetic oligonucleotide
caaggaccatcatcgcccaccaaacgtcct

SEQ ID NO: 134331 - DNA, 30 bp, Artificial Sequence
  Synthetic oligonucleotide
ctcgaagttcgttaaggctcgtgacgtcct

SEQ ID NO: 134332 - DNA, 30 bp, Artificial Sequence
  Synthetic oligonucleotide
ggcgtggcagtaacttgagagtgccgtcct

SEQ ID NO: 134333 - DNA, 30 bp, Artificial Sequence
  Synthetic oligonucleotide
cgtgatacccctgcaaccaggcatcgtcct

SEQ ID NO: 134334 - DNA, 30 bp, Artificial Sequence
  Synthetic oligonucleotide
cttgaacaaagtagttgcgtcaagtgtcct

SEQ ID NO: 134335 - DNA, 30 bp, Artificial Sequence
  Synthetic oligonucleotide
gggtgtagcagtacgacgaacgctattcct

SEQ ID NO: 134336 - DNA, 30 bp, Artificial Sequence
  Synthetic oligonucleotide
ataacgggacctgtctctaaatctgttcct

SEQ ID NO: 134337 - DNA, 30 bp, Artificial Sequence
  Synthetic oligonucleotide
tggagggtgccgtctaatgtcacatttcct

SEQ ID NO: 134338 - DNA, 30 bp, Artificial Sequence
  Synthetic oligonucleotide
gcacggaataggcatgaaagtcgttttcct

SEQ ID NO: 134339 - DNA, 30 bp, Artificial Sequence
  Synthetic oligonucleotide
gcgactctggaactctgctcgtgcaaagct

SEQ ID NO: 134340 - DNA, 30 bp, Artificial Sequence
  Synthetic oligonucleotide
aaaggcgtctttaaacaggatcagaaagct

SEQ ID NO: 134341 - DNA, 30 bp, Artificial Sequence
  Synthetic oligonucleotide
tatttggagagatgcatacagggtaaagct

SEQ ID NO: 134342 - DNA, 30 bp, Artificial Sequence
  Synthetic oligonucleotide
tataccagattgacaagatattttaaagct

SEQ ID NO: 134343 - DNA, 30 bp, Artificial Sequence
  Synthetic oligonucleotide
tatacgatggggcacgcgcgggatcaagct

SEQ ID NO: 134344 - DNA, 30 bp, Artificial Sequence
  Synthetic oligonucleotide
tccgacgtgtctcataagatggtcgaagct

SEQ ID NO: 134345 - DNA, 30 bp, Artificial Sequence
  Synthetic oligonucleotide
acaatagcttgatttgggtaaacataagct

SEQ ID NO: 134346 - DNA, 30 bp, Artificial Sequence
  Synthetic oligonucleotide
tcgtactgtaggggcactctaggataagct

SEQ ID NO: 134347 - DNA, 30 bp, Artificial Sequence
  Synthetic oligonucleotide
tgaagtcagcgtgcaggaatagagacagct

SEQ ID NO: 134348 - DNA, 30 bp, Artificial Sequence
  Synthetic oligonucleotide
cgtgacaatatgtccagtatacctgcagct

SEQ ID NO: 134349 - DNA, 30 bp, Artificial Sequence
  Synthetic oligonucleotide
atcgaggtagaatattttcaaggatcagct

SEQ ID NO: 134350 - DNA, 30 bp, Artificial Sequence
  Synthetic oligonucleotide
ggtggtatgctatacagaaggatatcagct

SEQ ID NO: 134351 - DNA, 30 bp, Artificial Sequence
  Synthetic oligonucleotide
aatcgcgattcgtaatcctagggctcagct

SEQ ID NO: 134352 - DNA, 30 bp, Artificial Sequence
  Synthetic oligonucleotide
tcccgcgaggcacatatacagtagtcagct

SEQ ID NO: 134353 - DNA, 30 bp, Artificial Sequence
  Synthetic oligonucleotide
gtacgagtatgttacccggttaagagagct

SEQ ID NO: 134354 - DNA, 30 bp, Artificial Sequence
  Synthetic oligonucleotide
aacccacgaagaagactgcagttgagagct

SEQ ID NO: 134355 - DNA, 30 bp, Artificial Sequence
  Synthetic oligonucleotide
tagaacacctatcagctgagcactagagct

SEQ ID NO: 134356 - DNA, 30 bp, Artificial Sequence
  Synthetic oligonucleotide
tgaatttaaatgaagatgtatgagcgagct

SEQ ID NO: 134357 - DNA, 30 bp, Artificial Sequence
  Synthetic oligonucleotide
gtgggacatgcccgaagaaaccgaggagct

SEQ ID NO: 134358 - DNA, 30 bp, Artificial Sequence
  Synthetic oligonucleotide
caataccgcacctaaaattcaatcggagct

SEQ ID NO: 134359 - DNA, 30 bp, Artificial Sequence
  Synthetic oligonucleotide
ggcccggaaagaagtgtgtatagtggagct

SEQ ID NO: 134360 - DNA, 30 bp, Artificial Sequence
  Synthetic oligonucleotide
acaaaatgtgttcttggtcaattatgagct

SEQ ID NO: 134361 - DNA, 30 bp, Artificial Sequence
  Synthetic oligonucleotide
gagcataaaaccgcgacacatttctgagct

SEQ ID NO: 134362 - DNA, 30 bp, Artificial Sequence
  Synthetic oligonucleotide
tagtaccccgttgtcgtctcaaagtgagct

SEQ ID NO: 134363 - DNA, 30 bp, Artificial Sequence
  Synthetic oligonucleotide
ccttgtacataaaagacttagtattgagct

SEQ ID NO: 134364 - DNA, 30 bp, Artificial Sequence
  Synthetic oligonucleotide
gacgccagggtccccccagccggcatagct

SEQ ID NO: 134365 - DNA, 30 bp, Artificial Sequence
  Synthetic oligonucleotide
tggttcacaaaatgagccagtaaagtagct

SEQ ID NO: 134366 - DNA, 30 bp, Artificial Sequence
  Synthetic oligonucleotide
gaacaaactaacaacgctcaaatagtagct

SEQ ID NO: 134367 - DNA, 30 bp, Artificial Sequence
  Synthetic oligonucleotide
actgccgatcattagcgggagcgggtagct

SEQ ID NO: 134368 - DNA, 30 bp, Artificial Sequence
  Synthetic oligonucleotide
agtttggagttacgtgcgcgttgtgtagct

SEQ ID NO: 134369 - DNA, 30 bp, Artificial Sequence
  Synthetic oligonucleotide
cctcaccctaggcatcgcttcgcattagct

SEQ ID NO: 134370 - DNA, 30 bp, Artificial Sequence
  Synthetic oligonucleotide
taacggattataggtgacagatcgttagct

SEQ ID NO: 134371 - DNA, 30 bp, Artificial Sequence
  Synthetic oligonucleotide
tcgtctaaggttctggccatccaaaacgct

SEQ ID NO: 134372 - DNA, 30 bp, Artificial Sequence
  Synthetic oligonucleotide
tagcaacgagtagtgagtcctgccaacgct

SEQ ID NO: 134373 - DNA, 30 bp, Artificial Sequence
  Synthetic oligonucleotide
acggacagtcacattacgaatactaacgct

SEQ ID NO: 134374 - DNA, 30 bp, Artificial Sequence
  Synthetic oligonucleotide
cctaagaaggaggctacggccttatacgct

SEQ ID NO: 134375 - DNA, 30 bp, Artificial Sequence
  Synthetic oligonucleotide
aatagcagagcacacgggatatggaccgct

SEQ ID NO: 134376 - DNA, 30 bp, Artificial Sequence
  Synthetic oligonucleotide
gaaatacgacacgtgaaatgattgtccgct

SEQ ID NO: 134377 - DNA, 30 bp, Artificial Sequence
  Synthetic oligonucleotide
cgagcgacccgggctgtatagcattccgct

SEQ ID NO: 134378 - DNA, 30 bp, Artificial Sequence
  Synthetic oligonucleotide
acttggatacctcggtcattctgttccgct

SEQ ID NO: 134379 - DNA, 30 bp, Artificial Sequence
  Synthetic oligonucleotide
gccaatggaacttttattaggctaagcgct

SEQ ID NO: 134380 - DNA, 30 bp, Artificial Sequence
  Synthetic oligonucleotide
cttctaagtgaaacgaggcgaaacagcgct

SEQ ID NO: 134381 - DNA, 30 bp, Artificial Sequence
  Synthetic oligonucleotide
aacggtaaagtgaatcgccacaacagcgct

SEQ ID NO: 134382 - DNA, 30 bp, Artificial Sequence
  Synthetic oligonucleotide
gcgaaacttccggccatactaaagagcgct

SEQ ID NO: 134383 - DNA, 30 bp, Artificial Sequence
  Synthetic oligonucleotide
aagaacgtacacatctggccttattgcgct

SEQ ID NO: 134384 - DNA, 30 bp, Artificial Sequence
  Synthetic oligonucleotide
gatacggggagttggatgaaacaaatcgct

SEQ ID NO: 134385 - DNA, 30 bp, Artificial Sequence
  Synthetic oligonucleotide
tactatgcccgacaatataattacatcgct

SEQ ID NO: 134386 - DNA, 30 bp, Artificial Sequence
  Synthetic oligonucleotide
tgttggacgtgtcaacctctaactatcgct

SEQ ID NO: 134387 - DNA, 30 bp, Artificial Sequence
  Synthetic oligonucleotide
agggggcataatatggggtatcgtatcgct

SEQ ID NO: 134388 - DNA, 30 bp, Artificial Sequence
  Synthetic oligonucleotide
cgttcaaataaagggctgctgcccctcgct

SEQ ID NO: 134389 - DNA, 30 bp, Artificial Sequence
  Synthetic oligonucleotide
aacaattggggaagtatgaggagcgtcgct

SEQ ID NO: 134390 - DNA, 30 bp, Artificial Sequence
  Synthetic oligonucleotide
gacgcgatgcactaccaacagatcgtcgct

SEQ ID NO: 134391 - DNA, 30 bp, Artificial Sequence
  Synthetic oligonucleotide
agatataatccgacggaccgtctggtcgct

SEQ ID NO: 134392 - DNA, 30 bp, Artificial Sequence
  Synthetic oligonucleotide
cccctgttaagacaggaaaagaagttcgct

SEQ ID NO: 134393 - DNA, 30 bp, Artificial Sequence
  Synthetic oligonucleotide
acttaagtaggttaggggatggaagaggct

SEQ ID NO: 134394 - DNA, 30 bp, Artificial Sequence
  Synthetic oligonucleotide
gtctacccataaccgccgagaaccgaggct

SEQ ID NO: 134395 - DNA, 30 bp, Artificial Sequence
  Synthetic oligonucleotide
caactaatagagattggcgccggctaggct

SEQ ID NO: 134396 - DNA, 30 bp, Artificial Sequence
  Synthetic oligonucleotide
gatgctcatgtggaaatatacgaaacggct

SEQ ID NO: 134397 - DNA, 30 bp, Artificial Sequence
  Synthetic oligonucleotide
tgaggctggtacatttagggtccaacggct

SEQ ID NO: 134398 - DNA, 30 bp, Artificial Sequence
  Synthetic oligonucleotide
agtgctggtaactacatgctcagaacggct

SEQ ID NO: 134399 - DNA, 30 bp, Artificial Sequence
  Synthetic oligonucleotide
agttagttagacttagaagattgaccggct

SEQ ID NO: 134400 - DNA, 30 bp, Artificial Sequence
  Synthetic oligonucleotide
cgacggctcagaaggacggggcacccggct

SEQ ID NO: 134401 - DNA, 30 bp, Artificial Sequence
  Synthetic oligonucleotide
cacgaaaaatacagtcggataaagccggct

SEQ ID NO: 134402 - DNA, 30 bp, Artificial Sequence
  Synthetic oligonucleotide
tcacccaagatgtgtcgatgccaggcggct

SEQ ID NO: 134403 - DNA, 30 bp, Artificial Sequence
  Synthetic oligonucleotide
cccatggtcacgcgcaatttatgggcggct

SEQ ID NO: 134404 - DNA, 30 bp, Artificial Sequence
  Synthetic oligonucleotide
caccaacattcgagcagaaatgtggcggct

SEQ ID NO: 134405 - DNA, 30 bp, Artificial Sequence
  Synthetic oligonucleotide
aaacccaaggtgaactaccagacatcggct

SEQ ID NO: 134406 - DNA, 30 bp, Artificial Sequence
  Synthetic oligonucleotide
gatgaaattatccaccctgcaaggtcggct

SEQ ID NO: 134407 - DNA, 30 bp, Artificial Sequence
  Synthetic oligonucleotide
tgcactgtggtccatagcgcgctttcggct

SEQ ID NO: 134408 - DNA, 30 bp, Artificial Sequence
  Synthetic oligonucleotide
tcggagggtatcatataggcggaacgggct

SEQ ID NO: 134409 - DNA, 30 bp, Artificial Sequence
  Synthetic oligonucleotide
catcggcgcgccccacagaaaacgcgggct

SEQ ID NO: 134410 - DNA, 30 bp, Artificial Sequence
  Synthetic oligonucleotide
gtgacgtgatggaggtgagtacatcgggct

SEQ ID NO: 134411 - DNA, 30 bp, Artificial Sequence
  Synthetic oligonucleotide
tctgaatattgaacctacgtccatcgggct

SEQ ID NO: 134412 - DNA, 30 bp, Artificial Sequence
  Synthetic oligonucleotide
cttaatggaggtgataacgctacgggggct

SEQ ID NO: 134413 - DNA, 30 bp, Artificial Sequence
  Synthetic oligonucleotide
ttcggaccgaccacttagcggtggggggct

SEQ ID NO: 134414 - DNA, 30 bp, Artificial Sequence
  Synthetic oligonucleotide
ggcgcaaaacctggattaacttactgggct

SEQ ID NO: 134415 - DNA, 30 bp, Artificial Sequence
  Synthetic oligonucleotide
aaacaagaattggggctaggtggctgggct

SEQ ID NO: 134416 - DNA, 30 bp, Artificial Sequence
  Synthetic oligonucleotide
gaagatcggggtggcgtggatgtgtgggct

SEQ ID NO: 134417 - DNA, 30 bp, Artificial Sequence
  Synthetic oligonucleotide
ttaggcaaccacaggaagactttgtgggct

SEQ ID NO: 134418 - DNA, 30 bp, Artificial Sequence
  Synthetic oligonucleotide
tactgagtggacgggctgatgtgcatggct

SEQ ID NO: 134419 - DNA, 30 bp, Artificial Sequence
  Synthetic oligonucleotide
ttaccggatctggcaatacgtgggatggct

SEQ ID NO: 134420 - DNA, 30 bp, Artificial Sequence
  Synthetic oligonucleotide
ccatgccaaacggttggcgcctaagtggct

SEQ ID NO: 134421 - DNA, 30 bp, Artificial Sequence
  Synthetic oligonucleotide
gtcgcctaaaaaaactaacagtacgtggct

SEQ ID NO: 134422 - DNA, 30 bp, Artificial Sequence
  Synthetic oligonucleotide
ttatgccgtacgatagacagatgcgtggct

SEQ ID NO: 134423 - DNA, 30 bp, Artificial Sequence
  Synthetic oligonucleotide
gaggaatacccactagaaagattcgtggct

SEQ ID NO: 134424 - DNA, 30 bp, Artificial Sequence
  Synthetic oligonucleotide
gaaatgcaagaattgtaacggagtgtggct

SEQ ID NO: 134425 - DNA, 29 bp, Artificial Sequence
  Synthetic oligonucleotide
taagatgcgttctgctaatgcaattggct

SEQ ID NO: 134426 - DNA, 30 bp, Artificial Sequence
  Synthetic oligonucleotide
gtgcgcttgtataaagggatactattggct

SEQ ID NO: 134427 - DNA, 30 bp, Artificial Sequence
  Synthetic oligonucleotide
gaaaaactgtgactgccaattggcttggct

SEQ ID NO: 134428 - DNA, 30 bp, Artificial Sequence
  Synthetic oligonucleotide
ctgaatatgacgggcgctgtgtagttggct

SEQ ID NO: 134429 - DNA, 30 bp, Artificial Sequence
  Synthetic oligonucleotide
cataggggaccccataggacaccaaatgct

SEQ ID NO: 134430 - DNA, 30 bp, Artificial Sequence
  Synthetic oligonucleotide
tgttagcaacgttcaactctcattaatgct

SEQ ID NO: 134431 - DNA, 30 bp, Artificial Sequence
  Synthetic oligonucleotide
gctgatacaaaaacaggaaggagcgatgct

SEQ ID NO: 134432 - DNA, 30 bp, Artificial Sequence
  Synthetic oligonucleotide
agtatcagggacccaagcgtgatggatgct

SEQ ID NO: 134433 - DNA, 30 bp, Artificial Sequence
  Synthetic oligonucleotide
tgaccttagggagtgagataatggtatgct

SEQ ID NO: 134434 - DNA, 30 bp, Artificial Sequence
  Synthetic oligonucleotide
gatgtgcgtgtggggcggcacgtgtatgct

SEQ ID NO: 134435 - DNA, 30 bp, Artificial Sequence
  Synthetic oligonucleotide
tgactttagttgagggacagttgaactgct

SEQ ID NO: 134436 - DNA, 30 bp, Artificial Sequence
  Synthetic oligonucleotide
ctggaaagctacttctaattatgcactgct

SEQ ID NO: 134437 - DNA, 30 bp, Artificial Sequence
  Synthetic oligonucleotide
taattgagggcacaaaattccgaacctgct

SEQ ID NO: 134438 - DNA, 30 bp, Artificial Sequence
  Synthetic oligonucleotide
catgaaccctcctagggcctgagcgctgct

SEQ ID NO: 134439 - DNA, 30 bp, Artificial Sequence
  Synthetic oligonucleotide
ccggcgtaagagggcgttgatttggctgct

SEQ ID NO: 134440 - DNA, 30 bp, Artificial Sequence
  Synthetic oligonucleotide
taagccaaaagcaacactattaggtctgct

SEQ ID NO: 134441 - DNA, 30 bp, Artificial Sequence
  Synthetic oligonucleotide
cgatcacgatagtttggccttcccagtgct

SEQ ID NO: 134442 - DNA, 30 bp, Artificial Sequence
  Synthetic oligonucleotide
ttatttcgagcggtgagtcaactgagtgct

SEQ ID NO: 134443 - DNA, 30 bp, Artificial Sequence
  Synthetic oligonucleotide
agtagctgggggtacactggataacgtgct

SEQ ID NO: 134444 - DNA, 30 bp, Artificial Sequence
  Synthetic oligonucleotide
cgagcgtcctactgtgtaatatttcgtgct

SEQ ID NO: 134445 - DNA, 30 bp, Artificial Sequence
  Synthetic oligonucleotide
tgagaagtttacgataaacaagaaggtgct

SEQ ID NO: 134446 - DNA, 30 bp, Artificial Sequence
  Synthetic oligonucleotide
ctcttgtcgagacatcggggaacgggtgct

SEQ ID NO: 134447 - DNA, 30 bp, Artificial Sequence
  Synthetic oligonucleotide
cgcgggtgtctagtagcacaggggggtgct

SEQ ID NO: 134448 - DNA, 30 bp, Artificial Sequence
  Synthetic oligonucleotide
aaggaccttgcgaatgcattgagtggtgct

SEQ ID NO: 134449 - DNA, 30 bp, Artificial Sequence
  Synthetic oligonucleotide
ttggcaaaggagacaagcgagaactgtgct

SEQ ID NO: 134450 - DNA, 30 bp, Artificial Sequence
  Synthetic oligonucleotide
ctatgggcaagttgcatgctaaagtgtgct

SEQ ID NO: 134451 - DNA, 30 bp, Artificial Sequence
  Synthetic oligonucleotide
gcccgggggatatgctggagtggcattgct

SEQ ID NO: 134452 - DNA, 30 bp, Artificial Sequence
  Synthetic oligonucleotide
atgacctacgactcgcctgtccgtattgct

SEQ ID NO: 134453 - DNA, 30 bp, Artificial Sequence
  Synthetic oligonucleotide
cggggcttgccaaacatacaacgagttgct

SEQ ID NO: 134454 - DNA, 30 bp, Artificial Sequence
  Synthetic oligonucleotide
cgagggaaaagacctagccgggtcaaatct

SEQ ID NO: 134455 - DNA, 30 bp, Artificial Sequence
  Synthetic oligonucleotide
catgaataaagcaaccgtatgcgggaatct

SEQ ID NO: 134456 - DNA, 30 bp, Artificial Sequence
  Synthetic oligonucleotide
ggaacctgtgctcagcgacctgaataatct

SEQ ID NO: 134457 - DNA, 30 bp, Artificial Sequence
  Synthetic oligonucleotide
caatcatcgaggtgaatgtgagcgtaatct

SEQ ID NO: 134458 - DNA, 30 bp, Artificial Sequence
  Synthetic oligonucleotide
gcgtatcgcagagacgttgatcggacatct

SEQ ID NO: 134459 - DNA, 30 bp, Artificial Sequence
  Synthetic oligonucleotide
cgtttcagtttaaggactaggatcgcatct

SEQ ID NO: 134460 - DNA, 30 bp, Artificial Sequence
  Synthetic oligonucleotide
atcctagtccaagttcacaaacgtgcatct

SEQ ID NO: 134461 - DNA, 30 bp, Artificial Sequence
  Synthetic oligonucleotide
ggctatgtacctttcacgagcacatcatct

SEQ ID NO: 134462 - DNA, 30 bp, Artificial Sequence
  Synthetic oligonucleotide
cttaccgtacaccttgccacacgatcatct

SEQ ID NO: 134463 - DNA, 30 bp, Artificial Sequence
  Synthetic oligonucleotide
tctcagcccgttaatcaggctaactcatct

SEQ ID NO: 134464 - DNA, 30 bp, Artificial Sequence
  Synthetic oligonucleotide
gatgcggtgaggctaaccggtccctcatct

SEQ ID NO: 134465 - DNA, 30 bp, Artificial Sequence
  Synthetic oligonucleotide
ggcgacagagcgcctgttgtttcctcatct

SEQ ID NO: 134466 - DNA, 30 bp, Artificial Sequence
  Synthetic oligonucleotide
acggtctgataacgtaggctaacttcatct

SEQ ID NO: 134467 - DNA, 30 bp, Artificial Sequence
  Synthetic oligonucleotide
acaacgtgagcattagcggaacgcagatct

SEQ ID NO: 134468 - DNA, 30 bp, Artificial Sequence
  Synthetic oligonucleotide
tgtggtcatctagaagaagcaaagagatct

SEQ ID NO: 134469 - DNA, 30 bp, Artificial Sequence
  Synthetic oligonucleotide
cccagtaatactaagataaactcacgatct

SEQ ID NO: 134470 - DNA, 30 bp, Artificial Sequence
  Synthetic oligonucleotide
acgtttttatcgagtcattatttacgatct

SEQ ID NO: 134471 - DNA, 30 bp, Artificial Sequence
  Synthetic oligonucleotide
taacaccgtctctttgcgaggggtcgatct

SEQ ID NO: 134472 - DNA, 30 bp, Artificial Sequence
  Synthetic oligonucleotide
gagacggcaaaaggtcgaatttggggatct

SEQ ID NO: 134473 - DNA, 30 bp, Artificial Sequence
  Synthetic oligonucleotide
aatcaggtgcagttgggcaggtgtggatct

SEQ ID NO: 134474 - DNA, 30 bp, Artificial Sequence
  Synthetic oligonucleotide
tttacggttagcgccagtgtaacgtgatct

SEQ ID NO: 134475 - DNA, 30 bp, Artificial Sequence
  Synthetic oligonucleotide
attaggcccatccacgaaattatgtgatct

SEQ ID NO: 134476 - DNA, 30 bp, Artificial Sequence
  Synthetic oligonucleotide
aaacaccaatcaccaagccggccactatct

SEQ ID NO: 134477 - DNA, 30 bp, Artificial Sequence
  Synthetic oligonucleotide
aacgaagttctgatgtaggacaagctatct

SEQ ID NO: 134478 - DNA, 30 bp, Artificial Sequence
  Synthetic oligonucleotide
tcgagcggtgtttcgcgccctgctctatct

SEQ ID NO: 134479 - DNA, 30 bp, Artificial Sequence
  Synthetic oligonucleotide
gtaggccttatgtaagataggtgtctatct

SEQ ID NO: 134480 - DNA, 30 bp, Artificial Sequence
  Synthetic oligonucleotide
gggggattgggttcaacctcagtagtatct

SEQ ID NO: 134481 - DNA, 30 bp, Artificial Sequence
  Synthetic oligonucleotide
ccagacgatgattcgggtgatgccgtatct

SEQ ID NO: 134482 - DNA, 30 bp, Artificial Sequence
  Synthetic oligonucleotide
agacagtcattgaaggtggacatcgtatct

SEQ ID NO: 134483 - DNA, 30 bp, Artificial Sequence
  Synthetic oligonucleotide
atcgaggaaacacgcgaccacgttgtatct

SEQ ID NO: 134484 - DNA, 30 bp, Artificial Sequence
  Synthetic oligonucleotide
agcccacgtccccgaggaacggagttatct

SEQ ID NO: 134485 - DNA, 30 bp, Artificial Sequence
  Synthetic oligonucleotide
ggatagtaacaagggtcacgtactttatct

SEQ ID NO: 134486 - DNA, 30 bp, Artificial Sequence
  Synthetic oligonucleotide
gcaaaattgggtcgaatctagcgcaactct

SEQ ID NO: 134487 - DNA, 30 bp, Artificial Sequence
  Synthetic oligonucleotide
acgctaacacttatctgccaatataactct

SEQ ID NO: 134488 - DNA, 30 bp, Artificial Sequence
  Synthetic oligonucleotide
ggaactggactttgaagctacagtaactct

SEQ ID NO: 134489 - DNA, 30 bp, Artificial Sequence
  Synthetic oligonucleotide
ccggagacggtgctcaagacacaccactct

SEQ ID NO: 134490 - DNA, 30 bp, Artificial Sequence
  Synthetic oligonucleotide
tcgtccgagggccggctctaacgtcactct

SEQ ID NO: 134491 - DNA, 30 bp, Artificial Sequence
  Synthetic oligonucleotide
cgcactatctaaattgtcccccatgactct

SEQ ID NO: 134492 - DNA, 30 bp, Artificial Sequence
  Synthetic oligonucleotide
gaagaagcggtctccactgaaaaagcctct

SEQ ID NO: 134493 - DNA, 30 bp, Artificial Sequence
  Synthetic oligonucleotide
cgaaagaaggcaaccatgtttgaagcctct

SEQ ID NO: 134494 - DNA, 30 bp, Artificial Sequence
  Synthetic oligonucleotide
ccatatccagtgatacaactgatagcctct

SEQ ID NO: 134495 - DNA, 30 bp, Artificial Sequence
  Synthetic oligonucleotide
gtaacctggggtcgggtagataatgcctct

SEQ ID NO: 134496 - DNA, 30 bp, Artificial Sequence
  Synthetic oligonucleotide
taagggcggagtaaacactatggatcctct

SEQ ID NO: 134497 - DNA, 30 bp, Artificial Sequence
  Synthetic oligonucleotide
agacctataattaattggcagctatcctct

SEQ ID NO: 134498 - DNA, 30 bp, Artificial Sequence
  Synthetic oligonucleotide
tacatatcaatttagtttcttgatagctct

SEQ ID NO: 134499 - DNA, 30 bp, Artificial Sequence
  Synthetic oligonucleotide
cgtaataaactcataactaatactcgctct

SEQ ID NO: 134500 - DNA, 30 bp, Artificial Sequence
  Synthetic oligonucleotide
tcgcgaaactgcattaagccagtatgctct

SEQ ID NO: 134501 - DNA, 30 bp, Artificial Sequence
  Synthetic oligonucleotide
tacaacttaagagggtccgggtggtgctct

SEQ ID NO: 134502 - DNA, 30 bp, Artificial Sequence
  Synthetic oligonucleotide
ccagacaccgctgaggactcgatcatctct

SEQ ID NO: 134503 - DNA, 30 bp, Artificial Sequence
  Synthetic oligonucleotide
actatgcagagcaacagtaagacgctctct

SEQ ID NO: 134504 - DNA, 30 bp, Artificial Sequence
  Synthetic oligonucleotide
actgatctggcacaaccacgcgatctctct

SEQ ID NO: 134505 - DNA, 30 bp, Artificial Sequence
  Synthetic oligonucleotide
agcgcgataatttgtgtgacgagtctctct

SEQ ID NO: 134506 - DNA, 30 bp, Artificial Sequence
  Synthetic oligonucleotide
agtaatacgttctgatacgaggtggtctct

SEQ ID NO: 134507 - DNA, 30 bp, Artificial Sequence
  Synthetic oligonucleotide
ctaagctctgcctaaggtagttcgaagtct

SEQ ID NO: 134508 - DNA, 30 bp, Artificial Sequence
  Synthetic oligonucleotide
cggtctctgtggcacagccattttaagtct

SEQ ID NO: 134509 - DNA, 30 bp, Artificial Sequence
  Synthetic oligonucleotide
ctgcggatggtaatggtaccgcggcagtct

SEQ ID NO: 134510 - DNA, 30 bp, Artificial Sequence
  Synthetic oligonucleotide
ggtcaacaggcctgcgagcgtgtgcagtct

SEQ ID NO: 134511 - DNA, 30 bp, Artificial Sequence
  Synthetic oligonucleotide
ctcgtggaggggagagtcaacgcttagtct

SEQ ID NO: 134512 - DNA, 30 bp, Artificial Sequence
  Synthetic oligonucleotide
gcgttaaaagcaattaatgagccaacgtct

SEQ ID NO: 134513 - DNA, 30 bp, Artificial Sequence
  Synthetic oligonucleotide
acatgacttgacaacacaaaccccacgtct

SEQ ID NO: 134514 - DNA, 30 bp, Artificial Sequence
  Synthetic oligonucleotide
acgactaatcacatagtgaggcagacgtct

SEQ ID NO: 134515 - DNA, 30 bp, Artificial Sequence
  Synthetic oligonucleotide
atacacccacgatatctcgactttacgtct

SEQ ID NO: 134516 - DNA, 30 bp, Artificial Sequence
  Synthetic oligonucleotide
ttataaattcatcgactgaacgacccgtct

SEQ ID NO: 134517 - DNA, 30 bp, Artificial Sequence
  Synthetic oligonucleotide
tgctgaaggttgacttgtggaatgccgtct

SEQ ID NO: 134518 - DNA, 30 bp, Artificial Sequence
  Synthetic oligonucleotide
ggttaattaagtggctaaccgcgtgcgtct

SEQ ID NO: 134519 - DNA, 30 bp, Artificial Sequence
  Synthetic oligonucleotide
tggggccggggcagtataactcgctcgtct

SEQ ID NO: 134520 - DNA, 30 bp, Artificial Sequence
  Synthetic oligonucleotide
gcgaacgcgagtccgtatgcgctctcgtct

SEQ ID NO: 134521 - DNA, 30 bp, Artificial Sequence
  Synthetic oligonucleotide
agggtatacgcaactcccccgtcgtcgtct

SEQ ID NO: 134522 - DNA, 30 bp, Artificial Sequence
  Synthetic oligonucleotide
gtaaagatatagtaaatagtgcattcgtct

SEQ ID NO: 134523 - DNA, 30 bp, Artificial Sequence
  Synthetic oligonucleotide
tctcggctagcgcatcgaattcgcaggtct

SEQ ID NO: 134524 - DNA, 30 bp, Artificial Sequence
  Synthetic oligonucleotide
ggagctgatatgattctagtggtgaggtct

SEQ ID NO: 134525 - DNA, 30 bp, Artificial Sequence
  Synthetic oligonucleotide
ccaaagaaggggagggcgtcggtacggtct

SEQ ID NO: 134526 - DNA, 30 bp, Artificial Sequence
  Synthetic oligonucleotide
gggacaatgtgagggattgacactcggtct

SEQ ID NO: 134527 - DNA, 30 bp, Artificial Sequence
  Synthetic oligonucleotide
gccttgatcaaccatttataattagggtct

SEQ ID NO: 134528 - DNA, 30 bp, Artificial Sequence
  Synthetic oligonucleotide
gcaccaaaaatatcaaaaagtttcgggtct

SEQ ID NO: 134529 - DNA, 30 bp, Artificial Sequence
  Synthetic oligonucleotide
cacttcggacaggattgaactagggggtct

SEQ ID NO: 134530 - DNA, 30 bp, Artificial Sequence
  Synthetic oligonucleotide
gaatagccctggaggcaccggggggggtct

SEQ ID NO: 134531 - DNA, 30 bp, Artificial Sequence
  Synthetic oligonucleotide
ggggagatctggtgactccatcagtggtct

SEQ ID NO: 134532 - DNA, 30 bp, Artificial Sequence
  Synthetic oligonucleotide
cgactaattctcacatacgcatagtggtct

SEQ ID NO: 134533 - DNA, 30 bp, Artificial Sequence
  Synthetic oligonucleotide
gccgacaacactcaggaacggaaaatgtct

SEQ ID NO: 134534 - DNA, 30 bp, Artificial Sequence
  Synthetic oligonucleotide
gcagatcacggagattgtccttgcgtgtct

SEQ ID NO: 134535 - DNA, 30 bp, Artificial Sequence
  Synthetic oligonucleotide
ccgcactatgcaaataagagtggtaattct

SEQ ID NO: 134536 - DNA, 30 bp, Artificial Sequence
  Synthetic oligonucleotide
tccgtgccgatcacttgctcgaaacattct

SEQ ID NO: 134537 - DNA, 30 bp, Artificial Sequence
  Synthetic oligonucleotide
cctacgagcatgtaggacacgatacattct

SEQ ID NO: 134538 - DNA, 30 bp, Artificial Sequence
  Synthetic oligonucleotide
atcaggtggttgtaaagacgtaggcattct

SEQ ID NO: 134539 - DNA, 30 bp, Artificial Sequence
  Synthetic oligonucleotide
tagatgaggagaatgggggagtaggattct

SEQ ID NO: 134540 - DNA, 30 bp, Artificial Sequence
  Synthetic oligonucleotide
aacgtgaggtgatatgttgacttaacttct

SEQ ID NO: 134541 - DNA, 30 bp, Artificial Sequence
  Synthetic oligonucleotide
gcgcgagcgcggccgtgacctgcgacttct

SEQ ID NO: 134542 - DNA, 30 bp, Artificial Sequence
  Synthetic oligonucleotide
acatagatctcgggaacgaagaacccttct

SEQ ID NO: 134543 - DNA, 30 bp, Artificial Sequence
  Synthetic oligonucleotide
ccggtgtaaaacgcaataggggaagcttct

SEQ ID NO: 134544 - DNA, 30 bp, Artificial Sequence
  Synthetic oligonucleotide
acctcatacgaagttaatttcgaaagttct

SEQ ID NO: 134545 - DNA, 30 bp, Artificial Sequence
  Synthetic oligonucleotide
cggctcacatgccgaacatttctcagttct

SEQ ID NO: 134546 - DNA, 30 bp, Artificial Sequence
  Synthetic oligonucleotide
caagatagcattgtacaatccttaggttct

SEQ ID NO: 134547 - DNA, 30 bp, Artificial Sequence
  Synthetic oligonucleotide
cgttggcagaaggttcttacgattggttct

SEQ ID NO: 134548 - DNA, 30 bp, Artificial Sequence
  Synthetic oligonucleotide
acaaggcaccgatggcgtgcgagctgttct

SEQ ID NO: 134549 - DNA, 30 bp, Artificial Sequence
  Synthetic oligonucleotide
gatagggcatgctcagtagcctggtgttct

SEQ ID NO: 134550 - DNA, 30 bp, Artificial Sequence
  Synthetic oligonucleotide
taatgtcgctctgtcgccttacacatttct

SEQ ID NO: 134551 - DNA, 30 bp, Artificial Sequence
  Synthetic oligonucleotide
ctcgtcatcctaagtctttctgcgctttct

SEQ ID NO: 134552 - DNA, 30 bp, Artificial Sequence
  Synthetic oligonucleotide
caactacaaggaagatcggtataagtttct

SEQ ID NO: 134553 - DNA, 30 bp, Artificial Sequence
  Synthetic oligonucleotide
agatgggaaagagaatagttgtcagtttct

SEQ ID NO: 134554 - DNA, 30 bp, Artificial Sequence
  Synthetic oligonucleotide
cttggaccgtggggctaatatgtcgtttct

SEQ ID NO: 134555 - DNA, 30 bp, Artificial Sequence
  Synthetic oligonucleotide
gctataaccacgatcgtataaaccttttct

SEQ ID NO: 134556 - DNA, 30 bp, Artificial Sequence
  Synthetic oligonucleotide
tcgcgtcgacgggtggatctaaccaaaagt

SEQ ID NO: 134557 - DNA, 30 bp, Artificial Sequence
  Synthetic oligonucleotide
atgaaaggatactaaggcaacatcaaaagt

SEQ ID NO: 134558 - DNA, 30 bp, Artificial Sequence
  Synthetic oligonucleotide
ccgtggcgcaactgtgagagcacgaaaagt

SEQ ID NO: 134559 - DNA, 30 bp, Artificial Sequence
  Synthetic oligonucleotide
cacggggaccaatgttgcgtaaaacaaagt

SEQ ID NO: 134560 - DNA, 30 bp, Artificial Sequence
  Synthetic oligonucleotide
aaggtagcaatcggtcgcgtatcacaaagt

SEQ ID NO: 134561 - DNA, 30 bp, Artificial Sequence
  Synthetic oligonucleotide
aacggctgtgatgattttagagcccaaagt

SEQ ID NO: 134562 - DNA, 30 bp, Artificial Sequence
  Synthetic oligonucleotide
actgctgtggaaggtggacaagagcaaagt

SEQ ID NO: 134563 - DNA, 30 bp, Artificial Sequence
  Synthetic oligonucleotide
acgacataacctattgcgatatatcaaagt

SEQ ID NO: 134564 - DNA, 30 bp, Artificial Sequence
  Synthetic oligonucleotide
ttgaggcagacccagtgtttagcagaaagt

SEQ ID NO: 134565 - DNA, 30 bp, Artificial Sequence
  Synthetic oligonucleotide
agcgcgcttcactctaccttaagggaaagt

SEQ ID NO: 134566 - DNA, 30 bp, Artificial Sequence
  Synthetic oligonucleotide
tctgatctcgagtgtggcttatgctaaagt

SEQ ID NO: 134567 - DNA, 30 bp, Artificial Sequence
  Synthetic oligonucleotide
aatgatgatcggaaacaaaatacttaaagt

SEQ ID NO: 134568 - DNA, 30 bp, Artificial Sequence
  Synthetic oligonucleotide
agagcggtcttgtacacggaaagttaaagt

SEQ ID NO: 134569 - DNA, 30 bp, Artificial Sequence
  Synthetic oligonucleotide
ttccagcgtataggagttcggcaaacaagt

SEQ ID NO: 134570 - DNA, 30 bp, Artificial Sequence
  Synthetic oligonucleotide
aaacactttttggaaccgcaacacacaagt

SEQ ID NO: 134571 - DNA, 30 bp, Artificial Sequence
  Synthetic oligonucleotide
aacgtttggatattatcttagcaaccaagt

SEQ ID NO: 134572 - DNA, 30 bp, Artificial Sequence
  Synthetic oligonucleotide
gccataaacctgcaagttggggggccaagt

SEQ ID NO: 134573 - DNA, 30 bp, Artificial Sequence
  Synthetic oligonucleotide
aagcaacgcaaccgtacacccagagcaagt

SEQ ID NO: 134574 - DNA, 30 bp, Artificial Sequence
  Synthetic oligonucleotide
ggacaattttccctttaactgagggcaagt

SEQ ID NO: 134575 - DNA, 30 bp, Artificial Sequence
  Synthetic oligonucleotide
gtcgctgtgaaagaaggatggctggcaagt

SEQ ID NO: 134576 - DNA, 30 bp, Artificial Sequence
  Synthetic oligonucleotide
gcaggggaaatttggcgtcctgagtcaagt

SEQ ID NO: 134577 - DNA, 30 bp, Artificial Sequence
  Synthetic oligonucleotide
cgacgcatacaaaagcacacttcgtcaagt

SEQ ID NO: 134578 - DNA, 30 bp, Artificial Sequence
  Synthetic oligonucleotide
tgaaatcttaggtccgaacacaattcaagt

SEQ ID NO: 134579 - DNA, 30 bp, Artificial Sequence
  Synthetic oligonucleotide
tatgtacagtgaatccgaggtggttcaagt

SEQ ID NO: 134580 - DNA, 30 bp, Artificial Sequence
  Synthetic oligonucleotide
tggagtgtataggtagggctgatttcaagt

SEQ ID NO: 134581 - DNA, 30 bp, Artificial Sequence
  Synthetic oligonucleotide
cgacgacggagtataagagcacgcagaagt

SEQ ID NO: 134582 - DNA, 30 bp, Artificial Sequence
  Synthetic oligonucleotide
tatggctaaatgggggcatatatgagaagt

SEQ ID NO: 134583 - DNA, 30 bp, Artificial Sequence
  Synthetic oligonucleotide
ggaagtcccagcgcccaaaatctacgaagt

SEQ ID NO: 134584 - DNA, 30 bp, Artificial Sequence
  Synthetic oligonucleotide
gacggagtggaccaactaccattccgaagt

SEQ ID NO: 134585 - DNA, 30 bp, Artificial Sequence
  Synthetic oligonucleotide
ggcggtgaatcctgctccctttcgcgaagt

SEQ ID NO: 134586 - DNA, 30 bp, Artificial Sequence
  Synthetic oligonucleotide
atacgtccttggggacgacgacgtggaagt

SEQ ID NO: 134587 - DNA, 30 bp, Artificial Sequence
  Synthetic oligonucleotide
accacgactaatcgggcccccggtggaagt

SEQ ID NO: 134588 - DNA, 30 bp, Artificial Sequence
  Synthetic oligonucleotide
atcattaagcggattctaactggtggaagt

SEQ ID NO: 134589 - DNA, 30 bp, Artificial Sequence
  Synthetic oligonucleotide
cgcacggatgtgccttgtaccccatgaagt

SEQ ID NO: 134590 - DNA, 30 bp, Artificial Sequence
  Synthetic oligonucleotide
acacgtttcgaacctcaattgttatgaagt

SEQ ID NO: 134591 - DNA, 30 bp, Artificial Sequence
  Synthetic oligonucleotide
gtgggatcacttacctctttaggctgaagt

SEQ ID NO: 134592 - DNA, 30 bp, Artificial Sequence
  Synthetic oligonucleotide
gacaaccactcgtttgtacccaagtgaagt

SEQ ID NO: 134593 - DNA, 30 bp, Artificial Sequence
  Synthetic oligonucleotide
gtagtggtccgggctgggagttcgtgaagt

SEQ ID NO: 134594 - DNA, 30 bp, Artificial Sequence
  Synthetic oligonucleotide
tcaactttacctggagtgggacccataagt

SEQ ID NO: 134595 - DNA, 30 bp, Artificial Sequence
  Synthetic oligonucleotide
tgagaaggtaagtcactcatcggactaagt

SEQ ID NO: 134596 - DNA, 30 bp, Artificial Sequence
  Synthetic oligonucleotide
cttcccaacgtcggaacctggcccgtaagt

SEQ ID NO: 134597 - DNA, 30 bp, Artificial Sequence
  Synthetic oligonucleotide
aatataaggcaatgggaccattgtgtaagt

SEQ ID NO: 134598 - DNA, 30 bp, Artificial Sequence
  Synthetic oligonucleotide
gtcttcgtcgaacgtgagaggatcttaagt

SEQ ID NO: 134599 - DNA, 30 bp, Artificial Sequence
  Synthetic oligonucleotide
agagctgagcactaaactaggtggttaagt

SEQ ID NO: 134600 - DNA, 30 bp, Artificial Sequence
  Synthetic oligonucleotide
accggcggtaacgggaaataatctttaagt

SEQ ID NO: 134601 - DNA, 30 bp, Artificial Sequence
  Synthetic oligonucleotide
tagtatgcatgagatgttggatgaaacagt

SEQ ID NO: 134602 - DNA, 30 bp, Artificial Sequence
  Synthetic oligonucleotide
gggcgcatttggccctagggggtaaacagt

SEQ ID NO: 134603 - DNA, 30 bp, Artificial Sequence
  Synthetic oligonucleotide
ggtaatacatccaaagaacacaccaacagt

SEQ ID NO: 134604 - DNA, 30 bp, Artificial Sequence
  Synthetic oligonucleotide
ctagaattttgaagttcgagggtgaacagt

SEQ ID NO: 134605 - DNA, 30 bp, Artificial Sequence
  Synthetic oligonucleotide
gcctagcatgcatggcaggttgctaacagt

SEQ ID NO: 134606 - DNA, 30 bp, Artificial Sequence
  Synthetic oligonucleotide
ggaacaagtctactggtatgggagcacagt

SEQ ID NO: 134607 - DNA, 30 bp, Artificial Sequence
  Synthetic oligonucleotide
agtttaaggataggtacattaagtcacagt

SEQ ID NO: 134608 - DNA, 30 bp, Artificial Sequence
  Synthetic oligonucleotide
cgacgcaaggtgtcctcgggccgtcacagt

SEQ ID NO: 134609 - DNA, 30 bp, Artificial Sequence
  Synthetic oligonucleotide
aaacatggatttcggacggatgttcacagt

SEQ ID NO: 134610 - DNA, 30 bp, Artificial Sequence
  Synthetic oligonucleotide
ttgatagtaaaaccaagagaccgctacagt

SEQ ID NO: 134611 - DNA, 30 bp, Artificial Sequence
  Synthetic oligonucleotide
tcgtccgaggtcgctaacgatacttacagt

SEQ ID NO: 134612 - DNA, 30 bp, Artificial Sequence
  Synthetic oligonucleotide
aaatacgggttaggatatgcgcgttacagt

SEQ ID NO: 134613 - DNA, 30 bp, Artificial Sequence
  Synthetic oligonucleotide
ggataggtccccatcgtaggactttacagt

SEQ ID NO: 134614 - DNA, 30 bp, Artificial Sequence
  Synthetic oligonucleotide
cagtggtacacgaatgtacgctccaccagt

SEQ ID NO: 134615 - DNA, 30 bp, Artificial Sequence
  Synthetic oligonucleotide
tgtcacatcgaaacatgtgtaaggaccagt

SEQ ID NO: 134616 - DNA, 30 bp, Artificial Sequence
  Synthetic oligonucleotide
tctgatctagaattcccgcagagggccagt

SEQ ID NO: 134617 - DNA, 30 bp, Artificial Sequence
  Synthetic oligonucleotide
gacgtccccgtcaagtgtgggcgtgccagt

SEQ ID NO: 134618 - DNA, 30 bp, Artificial Sequence
  Synthetic oligonucleotide
tgccaggacttatatcagaggattgccagt

SEQ ID NO: 134619 - DNA, 30 bp, Artificial Sequence
  Synthetic oligonucleotide
ggtccgcacgcttgttctctcaaatccagt

SEQ ID NO: 134620 - DNA, 30 bp, Artificial Sequence
  Synthetic oligonucleotide
tgtaagttccctcaacaaaggcgatccagt

SEQ ID NO: 134621 - DNA, 30 bp, Artificial Sequence
  Synthetic oligonucleotide
taccacgaatacgatctaaatatcagcagt

SEQ ID NO: 134622 - DNA, 30 bp, Artificial Sequence
  Synthetic oligonucleotide
tcgatttcacggaatagggaatcgagcagt

SEQ ID NO: 134623 - DNA, 30 bp, Artificial Sequence
  Synthetic oligonucleotide
aaatgcattaactacagcaccaagcgcagt

SEQ ID NO: 134624 - DNA, 30 bp, Artificial Sequence
  Synthetic oligonucleotide
ggtcgattcaaaagcggtgattagtgcagt

SEQ ID NO: 134625 - DNA, 30 bp, Artificial Sequence
  Synthetic oligonucleotide
cacatgacggcaacccaattggtgtgcagt

SEQ ID NO: 134626 - DNA, 30 bp, Artificial Sequence
  Synthetic oligonucleotide
caatatgatcataattaggatctttgcagt

SEQ ID NO: 134627 - DNA, 30 bp, Artificial Sequence
  Synthetic oligonucleotide
ttggcagaaggaatcgttacggtgatcagt

SEQ ID NO: 134628 - DNA, 30 bp, Artificial Sequence
  Synthetic oligonucleotide
tcgtgtgacctgggaaattcagatatcagt

SEQ ID NO: 134629 - DNA, 30 bp, Artificial Sequence
  Synthetic oligonucleotide
ccgagattcgtattcataatggacctcagt

SEQ ID NO: 134630 - DNA, 30 bp, Artificial Sequence
  Synthetic oligonucleotide
acatttggatgacctcttaggagcctcagt

SEQ ID NO: 134631 - DNA, 30 bp, Artificial Sequence
  Synthetic oligonucleotide
cctgtacaacggtaagggtgcggtctcagt

SEQ ID NO: 134632 - DNA, 30 bp, Artificial Sequence
  Synthetic oligonucleotide
gtaaagcaccgtaattgctcatacgtcagt

SEQ ID NO: 134633 - DNA, 30 bp, Artificial Sequence
  Synthetic oligonucleotide
ggatcaggggtaagggttccgcaggtcagt

SEQ ID NO: 134634 - DNA, 30 bp, Artificial Sequence
  Synthetic oligonucleotide
aacacgctcgtggacagttacctattcagt

SEQ ID NO: 134635 - DNA, 30 bp, Artificial Sequence
  Synthetic oligonucleotide
tagatacgcgctagcgtccgcccaaagagt

SEQ ID NO: 134636 - DNA, 30 bp, Artificial Sequence
  Synthetic oligonucleotide
aagtctggaactcacgggggttcaaagagt

SEQ ID NO: 134637 - DNA, 29 bp, Artificial Sequence
  Synthetic oligonucleotide
tagttacccaaagatcgcactacaagagt

SEQ ID NO: 134638 - DNA, 30 bp, Artificial Sequence
  Synthetic oligonucleotide
tagggatgttggaattgtaattacaagagt

SEQ ID NO: 134639 - DNA, 30 bp, Artificial Sequence
  Synthetic oligonucleotide
gtcaacaaggatagatttgaaaggaagagt

SEQ ID NO: 134640 - DNA, 30 bp, Artificial Sequence
  Synthetic oligonucleotide
aaactggaagtgatccatgcctggaagagt

SEQ ID NO: 134641 - DNA, 30 bp, Artificial Sequence
  Synthetic oligonucleotide
tagttatagacagggctggaagttaagagt

SEQ ID NO: 134642 - DNA, 30 bp, Artificial Sequence
  Synthetic oligonucleotide
ggacggccacaagaactcctcacacagagt

SEQ ID NO: 134643 - DNA, 30 bp, Artificial Sequence
  Synthetic oligonucleotide
tagtagagctctacaattcacgtacagagt

SEQ ID NO: 134644 - DNA, 30 bp, Artificial Sequence
  Synthetic oligonucleotide
aatcgttcacggacgttatagcttcagagt

SEQ ID NO: 134645 - DNA, 31 bp, Artificial Sequence
  Synthetic oligonucleotide
catcggagtgaaaaagaacgcttttcagagt

SEQ ID NO: 134646 - DNA, 30 bp, Artificial Sequence
  Synthetic oligonucleotide
tgacatgtttaatggccttggggagagagt

SEQ ID NO: 134647 - DNA, 30 bp, Artificial Sequence
  Synthetic oligonucleotide
ggaggtaagacgctacagacatccgagagt

SEQ ID NO: 134648 - DNA, 30 bp, Artificial Sequence
  Synthetic oligonucleotide
tagagggggggggacaataggagggagagt

SEQ ID NO: 134649 - DNA, 30 bp, Artificial Sequence
  Synthetic oligonucleotide
ttggcggggattttccagaagctatagagt

SEQ ID NO: 134650 - DNA, 30 bp, Artificial Sequence
  Synthetic oligonucleotide
caacctctatcaaaaatatccgactagagt

SEQ ID NO: 134651 - DNA, 30 bp, Artificial Sequence
  Synthetic oligonucleotide
tgacatggcccttgtaggtcgtactagagt

SEQ ID NO: 134652 - DNA, 30 bp, Artificial Sequence
  Synthetic oligonucleotide
cctcccaggctaagtgggtacagctagagt

SEQ ID NO: 134653 - DNA, 30 bp, Artificial Sequence
  Synthetic oligonucleotide
ccgtcgaagtgtctagtaggttgctagagt

SEQ ID NO: 134654 - DNA, 30 bp, Artificial Sequence
  Synthetic oligonucleotide
gaggtattccatagaatttcccgttagagt

SEQ ID NO: 134655 - DNA, 30 bp, Artificial Sequence
  Synthetic oligonucleotide
ccccggtgatagaggatccatttaacgagt

SEQ ID NO: 134656 - DNA, 30 bp, Artificial Sequence
  Synthetic oligonucleotide
cctgcgtattcgtaatcagccgtcacgagt

SEQ ID NO: 134657 - DNA, 30 bp, Artificial Sequence
  Synthetic oligonucleotide
agatggtgatccggaccaggcttcacgagt

SEQ ID NO: 134658 - DNA, 30 bp, Artificial Sequence
  Synthetic oligonucleotide
cttaaggatatcccgtgcatgaggacgagt

SEQ ID NO: 134659 - DNA, 30 bp, Artificial Sequence
  Synthetic oligonucleotide
ataggtggatactaccatttactcccgagt

SEQ ID NO: 134660 - DNA, 30 bp, Artificial Sequence
  Synthetic oligonucleotide
cagactaacacaatatattatctagcgagt

SEQ ID NO: 134661 - DNA, 30 bp, Artificial Sequence
  Synthetic oligonucleotide
gcgctgcatattgtaggctacacggcgagt

SEQ ID NO: 134662 - DNA, 30 bp, Artificial Sequence
  Synthetic oligonucleotide
aaaattcccggaaaatgaaggtcgtcgagt

SEQ ID NO: 134663 - DNA, 30 bp, Artificial Sequence
  Synthetic oligonucleotide
tcggcaacgtagttcttagagtcttcgagt

SEQ ID NO: 134664 - DNA, 30 bp, Artificial Sequence
  Synthetic oligonucleotide
cgacagtgggtgagcagccgaagttcgagt

SEQ ID NO: 134665 - DNA, 30 bp, Artificial Sequence
  Synthetic oligonucleotide
gggtgatctcctcccggcaccgtcaggagt

SEQ ID NO: 134666 - DNA, 30 bp, Artificial Sequence
  Synthetic oligonucleotide
atgatgttcgtgatagtcaaagggcggagt

SEQ ID NO: 134667 - DNA, 31 bp, Artificial Sequence
  Synthetic oligonucleotide
gcaatagcatcggcactcggtactgcggagt

SEQ ID NO: 134668 - DNA, 30 bp, Artificial Sequence
  Synthetic oligonucleotide
ccagcatcgagttaacggacgtacgggagt

SEQ ID NO: 134669 - DNA, 30 bp, Artificial Sequence
  Synthetic oligonucleotide
tacgtactatcttttgcgtaggggtggagt

SEQ ID NO: 134670 - DNA, 30 bp, Artificial Sequence
  Synthetic oligonucleotide
ggctagcttccaggagcattataaatgagt

SEQ ID NO: 134671 - DNA, 30 bp, Artificial Sequence
  Synthetic oligonucleotide
aatcgggtgggatttctggcctaaatgagt

SEQ ID NO: 134672 - DNA, 30 bp, Artificial Sequence
  Synthetic oligonucleotide
gattcaagagtggttcagctatacatgagt

SEQ ID NO: 134673 - DNA, 30 bp, Artificial Sequence
  Synthetic oligonucleotide
tcaataggggccttacccgggttcatgagt

SEQ ID NO: 134674 - DNA, 30 bp, Artificial Sequence
  Synthetic oligonucleotide
atacgaaggaagctgttgagggagatgagt

SEQ ID NO: 134675 - DNA, 30 bp, Artificial Sequence
  Synthetic oligonucleotide
tccctagaacacaacagtgatttcctgagt

SEQ ID NO: 134676 - DNA, 30 bp, Artificial Sequence
  Synthetic oligonucleotide
tcataaaaatgagacagttcgccagtgagt

SEQ ID NO: 134677 - DNA, 30 bp, Artificial Sequence
  Synthetic oligonucleotide
tccagtctgtcccgcaagaaggcggtgagt

SEQ ID NO: 134678 - DNA, 30 bp, Artificial Sequence
  Synthetic oligonucleotide
aagtgcaattatgctcccggtagcttgagt

SEQ ID NO: 134679 - DNA, 30 bp, Artificial Sequence
  Synthetic oligonucleotide
ccggattcacagggctccgagcggttgagt

SEQ ID NO: 134680 - DNA, 30 bp, Artificial Sequence
  Synthetic oligonucleotide
ggccctaaggcccacgtggacggtttgagt

SEQ ID NO: 134681 - DNA, 30 bp, Artificial Sequence
  Synthetic oligonucleotide
gaacgcaagacatcactagccacaaatagt

SEQ ID NO: 134682 - DNA, 30 bp, Artificial Sequence
  Synthetic oligonucleotide
cgcacgtacgcccgatcgcaagtaaatagt

SEQ ID NO: 134683 - DNA, 30 bp, Artificial Sequence
  Synthetic oligonucleotide
aagagggggaagcctgccgttctcaatagt

SEQ ID NO: 134684 - DNA, 30 bp, Artificial Sequence
  Synthetic oligonucleotide
gggcgggggggagacatatggtcgaatagt

SEQ ID NO: 134685 - DNA, 30 bp, Artificial Sequence
  Synthetic oligonucleotide
ggcttaagggaaaggcaaggtctccatagt

SEQ ID NO: 134686 - DNA, 30 bp, Artificial Sequence
  Synthetic oligonucleotide
taccgtggaaacgtccctgagagagatagt

SEQ ID NO: 134687 - DNA, 30 bp, Artificial Sequence
  Synthetic oligonucleotide
tctgctgtccatcatcgcagagtagatagt

SEQ ID NO: 134688 - DNA, 30 bp, Artificial Sequence
  Synthetic oligonucleotide
cgtgattttgtgcagtttgggcaggatagt

SEQ ID NO: 134689 - DNA, 30 bp, Artificial Sequence
  Synthetic oligonucleotide
cgatgatcttgaaaatggagcgtggatagt

SEQ ID NO: 134690 - DNA, 30 bp, Artificial Sequence
  Synthetic oligonucleotide
ggaaccacctagcgagtactggactatagt

SEQ ID NO: 134691 - DNA, 30 bp, Artificial Sequence
  Synthetic oligonucleotide
tgggaagctcgcggctaggagtagtatagt

SEQ ID NO: 134692 - DNA, 30 bp, Artificial Sequence
  Synthetic oligonucleotide
acgcgagtcaaagggacgcatacgtatagt

SEQ ID NO: 134693 - DNA, 30 bp, Artificial Sequence
  Synthetic oligonucleotide
gtaccgttcaggcacaaagacgaaactagt

SEQ ID NO: 134694 - DNA, 30 bp, Artificial Sequence
  Synthetic oligonucleotide
atggttaacgaataagagttcaccactagt

SEQ ID NO: 134695 - DNA, 30 bp, Artificial Sequence
  Synthetic oligonucleotide
ctaaaggctctataaaatacagaagctagt

SEQ ID NO: 134696 - DNA, 30 bp, Artificial Sequence
  Synthetic oligonucleotide
gttagggatcccacgttatggggggctagt

SEQ ID NO: 134697 - DNA, 30 bp, Artificial Sequence
  Synthetic oligonucleotide
acgggaagatcgctaggatcgcattctagt

SEQ ID NO: 134698 - DNA, 30 bp, Artificial Sequence
  Synthetic oligonucleotide
ggttggcagaaaacggtgcaactaagtagt

SEQ ID NO: 134699 - DNA, 30 bp, Artificial Sequence
  Synthetic oligonucleotide
taaatacttaggaagtggaatttaagtagt

SEQ ID NO: 134700 - DNA, 30 bp, Artificial Sequence
  Synthetic oligonucleotide
aacagcttggggccattataaaacagtagt

SEQ ID NO: 134701 - DNA, 30 bp, Artificial Sequence
  Synthetic oligonucleotide
accggcgaatgtgcagctgcatgacgtagt

SEQ ID NO: 134702 - DNA, 30 bp, Artificial Sequence
  Synthetic oligonucleotide
ctggagccacctgaaaacccgacgcgtagt

SEQ ID NO: 134703 - DNA, 30 bp, Artificial Sequence
  Synthetic oligonucleotide
gacacatcaccgcaagcgttctggcgtagt

SEQ ID NO: 134704 - DNA, 30 bp, Artificial Sequence
  Synthetic oligonucleotide
atacctgtgtcgttcaggaggtgaggtagt

SEQ ID NO: 134705 - DNA, 30 bp, Artificial Sequence
  Synthetic oligonucleotide
ccttaattcgttgagtccccactaggtagt

SEQ ID NO: 134706 - DNA, 30 bp, Artificial Sequence
  Synthetic oligonucleotide
cctagtgtgccaatcgtgtccaggggtagt

SEQ ID NO: 134707 - DNA, 30 bp, Artificial Sequence
  Synthetic oligonucleotide
acggtcttcagggagtcaaataaatgtagt

SEQ ID NO: 134708 - DNA, 30 bp, Artificial Sequence
  Synthetic oligonucleotide
gcagacagagacctcgcttgatgttgtagt

SEQ ID NO: 134709 - DNA, 30 bp, Artificial Sequence
  Synthetic oligonucleotide
tccttacgaagaagccgatccgccattagt

SEQ ID NO: 134710 - DNA, 30 bp, Artificial Sequence
  Synthetic oligonucleotide
ctcatggcaatctccgagcatggcgttagt

SEQ ID NO: 134711 - DNA, 30 bp, Artificial Sequence
  Synthetic oligonucleotide
gctgcacggcctgagaatacaaaggttagt

SEQ ID NO: 134712 - DNA, 30 bp, Artificial Sequence
  Synthetic oligonucleotide
agcgacaattttaacgggaaaacctttagt

SEQ ID NO: 134713 - DNA, 30 bp, Artificial Sequence
  Synthetic oligonucleotide
caacgggaggagatactagttttctttagt

SEQ ID NO: 134714 - DNA, 30 bp, Artificial Sequence
  Synthetic oligonucleotide
gcgccgaaagcagcaatgcctgagtttagt

SEQ ID NO: 134715 - DNA, 30 bp, Artificial Sequence
  Synthetic oligonucleotide
caaccatgcgcgatccgaaggctgtttagt

SEQ ID NO: 134716 - DNA, 30 bp, Artificial Sequence
  Synthetic oligonucleotide
acgttagtgatagtagcataggataaacgt

SEQ ID NO: 134717 - DNA, 30 bp, Artificial Sequence
  Synthetic oligonucleotide
gcggaagttgggagacatcatgtacaacgt

SEQ ID NO: 134718 - DNA, 30 bp, Artificial Sequence
  Synthetic oligonucleotide
ctgccgaagtcatatagttaacggcaacgt

SEQ ID NO: 134719 - DNA, 30 bp, Artificial Sequence
  Synthetic oligonucleotide
agactcggaatggatccccgctaagaacgt

SEQ ID NO: 134720 - DNA, 30 bp, Artificial Sequence
  Synthetic oligonucleotide
gttccaacgtagttgtgggcactagaacgt

SEQ ID NO: 134721 - DNA, 30 bp, Artificial Sequence
  Synthetic oligonucleotide
tccacgttccaaacgtgtagcagcgaacgt

SEQ ID NO: 134722 - DNA, 30 bp, Artificial Sequence
  Synthetic oligonucleotide
gctggcggatcgcgaggtacagaataacgt

SEQ ID NO: 134723 - DNA, 30 bp, Artificial Sequence
  Synthetic oligonucleotide
ggctaatccactttaactacaagataacgt

SEQ ID NO: 134724 - DNA, 30 bp, Artificial Sequence
  Synthetic oligonucleotide
tcaggacttctctagctgacgatataacgt

SEQ ID NO: 134725 - DNA, 30 bp, Artificial Sequence
  Synthetic oligonucleotide
aaatacaaagtggtaaaacctagtacacgt

SEQ ID NO: 134726 - DNA, 30 bp, Artificial Sequence
  Synthetic oligonucleotide
ctcatatgcgatttcgcgtggcaggcacgt

SEQ ID NO: 134727 - DNA, 30 bp, Artificial Sequence
  Synthetic oligonucleotide
ccgtgcatcggacagtcgagcgaggcacgt

SEQ ID NO: 134728 - DNA, 30 bp, Artificial Sequence
  Synthetic oligonucleotide
cgctacaataaattggaatggagggcacgt

SEQ ID NO: 134729 - DNA, 30 bp, Artificial Sequence
  Synthetic oligonucleotide
cacactacatcagtgaacggtccatcacgt

SEQ ID NO: 134730 - DNA, 30 bp, Artificial Sequence
  Synthetic oligonucleotide
gcagaggattcacagggggcactatcacgt

SEQ ID NO: 134731 - DNA, 30 bp, Artificial Sequence
  Synthetic oligonucleotide
tttggggagtggtgaatgaaggactcacgt

SEQ ID NO: 134732 - DNA, 30 bp, Artificial Sequence
  Synthetic oligonucleotide
gtcccagcgaccaaagcggtattctcacgt

SEQ ID NO: 134733 - DNA, 30 bp, Artificial Sequence
  Synthetic oligonucleotide
catactgccaaggtctcaaaaaagtcacgt

SEQ ID NO: 134734 - DNA, 30 bp, Artificial Sequence
  Synthetic oligonucleotide
cgtgcttgtgaacttggaatgatcagacgt

SEQ ID NO: 134735 - DNA, 30 bp, Artificial Sequence
  Synthetic oligonucleotide
ggcgtggtttggcatgtaccattacgacgt

SEQ ID NO: 134736 - DNA, 30 bp, Artificial Sequence
  Synthetic oligonucleotide
cgagggaaatattttcctgttggccgacgt

SEQ ID NO: 134737 - DNA, 30 bp, Artificial Sequence
  Synthetic oligonucleotide
aaaatgtgcacgtcacttggaacgggacgt

SEQ ID NO: 134738 - DNA, 30 bp, Artificial Sequence
  Synthetic oligonucleotide
tgtttcaagaaggagcggactccaatacgt

SEQ ID NO: 134739 - DNA, 30 bp, Artificial Sequence
  Synthetic oligonucleotide
ccctataaaacacggcctaagtcaatacgt

SEQ ID NO: 134740 - DNA, 30 bp, Artificial Sequence
  Synthetic oligonucleotide
attggagaatccaccatccggcgaatacgt

SEQ ID NO: 134741 - DNA, 30 bp, Artificial Sequence
  Synthetic oligonucleotide
ccaaatcgagaaggaaccttcatgatacgt

SEQ ID NO: 134742 - DNA, 30 bp, Artificial Sequence
  Synthetic oligonucleotide
tcacgtgtcgcattaaccgccaagctacgt

SEQ ID NO: 134743 - DNA, 30 bp, Artificial Sequence
  Synthetic oligonucleotide
gagttcgcggaagagagagtatacgtacgt

SEQ ID NO: 134744 - DNA, 30 bp, Artificial Sequence
  Synthetic oligonucleotide
ctggacatttggattagtgaccatttacgt

SEQ ID NO: 134745 - DNA, 30 bp, Artificial Sequence
  Synthetic oligonucleotide
aggttggtacacttcacgcccaacaaccgt

SEQ ID NO: 134746 - DNA, 30 bp, Artificial Sequence
  Synthetic oligonucleotide
agagtgcgccgggacgcttctacgaaccgt

SEQ ID NO: 134747 - DNA, 30 bp, Artificial Sequence
  Synthetic oligonucleotide
tgccatgggctgcgactttcagcgaaccgt

SEQ ID NO: 134748 - DNA, 30 bp, Artificial Sequence
  Synthetic oligonucleotide
aggctacccgcagattgcgaacgtaaccgt

SEQ ID NO: 134749 - DNA, 30 bp, Artificial Sequence
  Synthetic oligonucleotide
ttaatagggaggaaactaaggcacgaccgt

SEQ ID NO: 134750 - DNA, 30 bp, Artificial Sequence
  Synthetic oligonucleotide
gacggggcgaagtgttgtggtgtcgaccgt

SEQ ID NO: 134751 - DNA, 31 bp, Artificial Sequence
  Synthetic oligonucleotide
gtggtctcttggttaaatagagcgtgaccgt

SEQ ID NO: 134752 - DNA, 30 bp, Artificial Sequence
  Synthetic oligonucleotide
tgtacatcgacttcaagaggaattgaccgt

SEQ ID NO: 134753 - DNA, 30 bp, Artificial Sequence
  Synthetic oligonucleotide
accggccgtaacacgactagcagataccgt

SEQ ID NO: 134754 - DNA, 30 bp, Artificial Sequence
  Synthetic oligonucleotide
cgagagcgcctggaaaagccgcgttaccgt

SEQ ID NO: 134755 - DNA, 30 bp, Artificial Sequence
  Synthetic oligonucleotide
agtaggttcaatgtgtctgaggtttaccgt

SEQ ID NO: 134756 - DNA, 31 bp, Artificial Sequence
  Synthetic oligonucleotide
gaatggaattcaggcgtgcggaaagacccgt

SEQ ID NO: 134757 - DNA, 30 bp, Artificial Sequence
  Synthetic oligonucleotide
tcatgtacgtcctcacagtctgatacccgt

SEQ ID NO: 134758 - DNA, 30 bp, Artificial Sequence
  Synthetic oligonucleotide
agtcacggcgtcactagtgacactacccgt

SEQ ID NO: 134759 - DNA, 30 bp, Artificial Sequence
  Synthetic oligonucleotide
gagggtcacctcgggagtcgctgtacccgt

SEQ ID NO: 134760 - DNA, 30 bp, Artificial Sequence
  Synthetic oligonucleotide
catcgtcagagccctaaagtggccgcccgt

SEQ ID NO: 134761 - DNA, 30 bp, Artificial Sequence
  Synthetic oligonucleotide
aagcccgtcattgacaacaaatgatcccgt

SEQ ID NO: 134762 - DNA, 30 bp, Artificial Sequence
  Synthetic oligonucleotide
aaagctgacattatggctgggcactcccgt

SEQ ID NO: 134763 - DNA, 30 bp, Artificial Sequence
  Synthetic oligonucleotide
gggcacagtggagacagcaacctttcccgt

SEQ ID NO: 134764 - DNA, 30 bp, Artificial Sequence
  Synthetic oligonucleotide
gcggtgttgtcataatgatctgtcagccgt

SEQ ID NO: 134765 - DNA, 30 bp, Artificial Sequence
  Synthetic oligonucleotide
tttcagatgggtacatattaagtaggccgt

SEQ ID NO: 134766 - DNA, 30 bp, Artificial Sequence
  Synthetic oligonucleotide
aagcgttaatggtatcctcaaatgggccgt

SEQ ID NO: 134767 - DNA, 30 bp, Artificial Sequence
  Synthetic oligonucleotide
tgaagtattgtatcaatgcaaagtggccgt

SEQ ID NO: 134768 - DNA, 30 bp, Artificial Sequence
  Synthetic oligonucleotide
tgcccccacggtaaggccggtcactgccgt

SEQ ID NO: 134769 - DNA, 30 bp, Artificial Sequence
  Synthetic oligonucleotide
gtaggcgttacgttcgagcacgagtgccgt

SEQ ID NO: 134770 - DNA, 30 bp, Artificial Sequence
  Synthetic oligonucleotide
tgctattgccggtggttgtgacaaatccgt

SEQ ID NO: 134771 - DNA, 30 bp, Artificial Sequence
  Synthetic oligonucleotide
atgggagatttggaggtccagcaaatccgt

SEQ ID NO: 134772 - DNA, 30 bp, Artificial Sequence
  Synthetic oligonucleotide
cgtgcgtgatctactctatcggaaatccgt

SEQ ID NO: 134773 - DNA, 30 bp, Artificial Sequence
  Synthetic oligonucleotide
ggcgtagagccggtgggaaccgccatccgt

SEQ ID NO: 134774 - DNA, 30 bp, Artificial Sequence
  Synthetic oligonucleotide
aggtcgccaaaaatcagcctcgtcatccgt

SEQ ID NO: 134775 - DNA, 30 bp, Artificial Sequence
  Synthetic oligonucleotide
atcgttatcgacaataaactatgcctccgt

SEQ ID NO: 134776 - DNA, 30 bp, Artificial Sequence
  Synthetic oligonucleotide
cacgtggtctacggcgtgctgggtctccgt

SEQ ID NO: 134777 - DNA, 30 bp, Artificial Sequence
  Synthetic oligonucleotide
agaccacgatgccatagatactcagtccgt

SEQ ID NO: 134778 - DNA, 30 bp, Artificial Sequence
  Synthetic oligonucleotide
ctgcggaaagtgtgttcacgtagggtccgt

SEQ ID NO: 134779 - DNA, 30 bp, Artificial Sequence
  Synthetic oligonucleotide
gtcgtgacaagacgattcaagggtaagcgt

SEQ ID NO: 134780 - DNA, 30 bp, Artificial Sequence
  Synthetic oligonucleotide
tagataacctcgcatatatttcaccagcgt

SEQ ID NO: 134781 - DNA, 30 bp, Artificial Sequence
  Synthetic oligonucleotide
tcgacgtgtgctacccaacgaaaagagcgt

SEQ ID NO: 134782 - DNA, 30 bp, Artificial Sequence
  Synthetic oligonucleotide
tgacaggacgtaaggagttcccaggagcgt

SEQ ID NO: 134783 - DNA, 30 bp, Artificial Sequence
  Synthetic oligonucleotide
cggcggatgcggagagccgtgtcggagcgt

SEQ ID NO: 134784 - DNA, 30 bp, Artificial Sequence
  Synthetic oligonucleotide
tgttcgaggtatccgcgggccaatgagcgt

SEQ ID NO: 134785 - DNA, 30 bp, Artificial Sequence
  Synthetic oligonucleotide
accctgtaaccgggcgaggtttgatagcgt

SEQ ID NO: 134786 - DNA, 30 bp, Artificial Sequence
  Synthetic oligonucleotide
tcaaaatcattgtaaccaccctcctagcgt

SEQ ID NO: 134787 - DNA, 30 bp, Artificial Sequence
  Synthetic oligonucleotide
ggcgagaagcgatccgttcgtgaaacgcgt

SEQ ID NO: 134788 - DNA, 30 bp, Artificial Sequence
  Synthetic oligonucleotide
tggagtgccaaataaagagcacgaacgcgt

SEQ ID NO: 134789 - DNA, 30 bp, Artificial Sequence
  Synthetic oligonucleotide
accgatatccctgcgggagccatgccgcgt

SEQ ID NO: 134790 - DNA, 30 bp, Artificial Sequence
  Synthetic oligonucleotide
cgaatccaccattgtatccaacttccgcgt

SEQ ID NO: 134791 - DNA, 30 bp, Artificial Sequence
  Synthetic oligonucleotide
aagccggggaatcgacgaccggaagcgcgt

SEQ ID NO: 134792 - DNA, 30 bp, Artificial Sequence
  Synthetic oligonucleotide
gtaaggtgggcgacagcacatccagcgcgt

SEQ ID NO: 134793 - DNA, 30 bp, Artificial Sequence
  Synthetic oligonucleotide
gggggacgatgttgccatgagggcgcgcgt

SEQ ID NO: 134794 - DNA, 30 bp, Artificial Sequence
  Synthetic oligonucleotide
tggtccgctataaatcgtgcataatcgcgt

SEQ ID NO: 134795 - DNA, 30 bp, Artificial Sequence
  Synthetic oligonucleotide
atgggttaaccccattcgtaacgttcgcgt

SEQ ID NO: 134796 - DNA, 30 bp, Artificial Sequence
  Synthetic oligonucleotide
atgcgccctgcagccgattgggtaaggcgt

SEQ ID NO: 134797 - DNA, 30 bp, Artificial Sequence
  Synthetic oligonucleotide
cgtttaaaaactcgatgtccataacggcgt

SEQ ID NO: 134798 - DNA, 30 bp, Artificial Sequence
  Synthetic oligonucleotide
gacgggctattgtctgcagctaggcggcgt

SEQ ID NO: 134799 - DNA, 30 bp, Artificial Sequence
  Synthetic oligonucleotide
aggcgagtgtagtgagaccatctgcggcgt

SEQ ID NO: 134800 - DNA, 30 bp, Artificial Sequence
  Synthetic oligonucleotide
ggtgttctgagcgaagcccgcgtagggcgt

SEQ ID NO: 134801 - DNA, 30 bp, Artificial Sequence
  Synthetic oligonucleotide
cggcacttttgagattcatggatcgggcgt

SEQ ID NO: 134802 - DNA, 30 bp, Artificial Sequence
  Synthetic oligonucleotide
gcaagtggcttgacaagtccaagatggcgt

SEQ ID NO: 134803 - DNA, 30 bp, Artificial Sequence
  Synthetic oligonucleotide
tgacgtagaaaaggtttgtagacctggcgt

SEQ ID NO: 134804 - DNA, 30 bp, Artificial Sequence
  Synthetic oligonucleotide
caagtacatggagcccttagaggctggcgt

SEQ ID NO: 134805 - DNA, 30 bp, Artificial Sequence
  Synthetic oligonucleotide
ccacgtattggtcttccacacaaaatgcgt

SEQ ID NO: 134806 - DNA, 30 bp, Artificial Sequence
  Synthetic oligonucleotide
ttgcgcagaagggcgcgggaagcaatgcgt

SEQ ID NO: 134807 - DNA, 30 bp, Artificial Sequence
  Synthetic oligonucleotide
tcagaaagatcggccaacagaatcatgcgt

SEQ ID NO: 134808 - DNA, 30 bp, Artificial Sequence
  Synthetic oligonucleotide
cacttaatagcgagctctgtgaagatgcgt

SEQ ID NO: 134809 - DNA, 30 bp, Artificial Sequence
  Synthetic oligonucleotide
gtgcttgttaccggggtgaccgatatgcgt

SEQ ID NO: 134810 - DNA, 30 bp, Artificial Sequence
  Synthetic oligonucleotide
gcaaaagagtgcaccgtgggtagactgcgt

SEQ ID NO: 134811 - DNA, 30 bp, Artificial Sequence
  Synthetic oligonucleotide
ggccaacggcggagtccgcgctgagtgcgt

SEQ ID NO: 134812 - DNA, 30 bp, Artificial Sequence
  Synthetic oligonucleotide
tgttatcccctagtgacagcacaggtgcgt

SEQ ID NO: 134813 - DNA, 30 bp, Artificial Sequence
  Synthetic oligonucleotide
catgcgcccggacccgtaaagtttgtgcgt

SEQ ID NO: 134814 - DNA, 30 bp, Artificial Sequence
  Synthetic oligonucleotide
gcggcctggcacgtacgcgcgatcttgcgt

SEQ ID NO: 134815 - DNA, 30 bp, Artificial Sequence
  Synthetic oligonucleotide
ccaaagtgtagtaacacggcggaaaatcgt

SEQ ID NO: 134816 - DNA, 30 bp, Artificial Sequence
  Synthetic oligonucleotide
ggggacacgcaacctgctatagtcaatcgt

SEQ ID NO: 134817 - DNA, 30 bp, Artificial Sequence
  Synthetic oligonucleotide
atgcgtgctcacttccacgaggaacatcgt

SEQ ID NO: 134818 - DNA, 30 bp, Artificial Sequence
  Synthetic oligonucleotide
gtgtaacaaacgtagagaaccacacatcgt

SEQ ID NO: 134819 - DNA, 30 bp, Artificial Sequence
  Synthetic oligonucleotide
cgcctttgtagtaagctaggcaatcatcgt

SEQ ID NO: 134820 - DNA, 30 bp, Artificial Sequence
  Synthetic oligonucleotide
ttccagaaggcgtaagtttctacagatcgt

SEQ ID NO: 134821 - DNA, 30 bp, Artificial Sequence
  Synthetic oligonucleotide
gcataagaggatactcccgttacagatcgt

SEQ ID NO: 134822 - DNA, 30 bp, Artificial Sequence
  Synthetic oligonucleotide
gcgaacgtaatttgggcatgtgccgatcgt

SEQ ID NO: 134823 - DNA, 30 bp, Artificial Sequence
  Synthetic oligonucleotide
acgtgaccaatcttgggcccggaggatcgt

SEQ ID NO: 134824 - DNA, 30 bp, Artificial Sequence
  Synthetic oligonucleotide
ctgaatcgaatcctgacgtaaacggatcgt

SEQ ID NO: 134825 - DNA, 30 bp, Artificial Sequence
  Synthetic oligonucleotide
tggagatcactcctacaccaaagggatcgt

SEQ ID NO: 134826 - DNA, 30 bp, Artificial Sequence
  Synthetic oligonucleotide
atgatcaaatccggaagatatttctatcgt

SEQ ID NO: 134827 - DNA, 30 bp, Artificial Sequence
  Synthetic oligonucleotide
gagaatactaactggtcaggcctgtatcgt

SEQ ID NO: 134828 - DNA, 30 bp, Artificial Sequence
  Synthetic oligonucleotide
caactgagtccagaatctaaccctactcgt

SEQ ID NO: 134829 - DNA, 30 bp, Artificial Sequence
  Synthetic oligonucleotide
gcaaagctaacatgatatcttgctactcgt

SEQ ID NO: 134830 - DNA, 30 bp, Artificial Sequence
  Synthetic oligonucleotide
aagtatgggggggattatagtctgcctcgt

SEQ ID NO: 134831 - DNA, 30 bp, Artificial Sequence
  Synthetic oligonucleotide
ggtataaaccgatgcatgggttttcctcgt

SEQ ID NO: 134832 - DNA, 30 bp, Artificial Sequence
  Synthetic oligonucleotide
cggacataagccaaatcaggtcacgctcgt

SEQ ID NO: 134833 - DNA, 30 bp, Artificial Sequence
  Synthetic oligonucleotide
gttgtgctagggcatcacctatgcgctcgt

SEQ ID NO: 134834 - DNA, 30 bp, Artificial Sequence
  Synthetic oligonucleotide
aacaaaaaaacaagatctgcggtatctcgt

SEQ ID NO: 134835 - DNA, 30 bp, Artificial Sequence
  Synthetic oligonucleotide
aggggctacagagccaagcggttatctcgt

SEQ ID NO: 134836 - DNA, 30 bp, Artificial Sequence
  Synthetic oligonucleotide
ctggataccgaataaaccgttctctctcgt

SEQ ID NO: 134837 - DNA, 30 bp, Artificial Sequence
  Synthetic oligonucleotide
gcgcggacgtaacccattttgagttctcgt

SEQ ID NO: 134838 - DNA, 30 bp, Artificial Sequence
  Synthetic oligonucleotide
cccttatatagacgaacccgctgttctcgt

SEQ ID NO: 134839 - DNA, 30 bp, Artificial Sequence
  Synthetic oligonucleotide
gtcaaaacgaaataggcaccggaacgtcgt

SEQ ID NO: 134840 - DNA, 30 bp, Artificial Sequence
  Synthetic oligonucleotide
aagatagtagatgtctttagatggcgtcgt

SEQ ID NO: 134841 - DNA, 30 bp, Artificial Sequence
  Synthetic oligonucleotide
caaagttgaaggagggccaatgttcgtcgt

SEQ ID NO: 134842 - DNA, 30 bp, Artificial Sequence
  Synthetic oligonucleotide
tacgtggaaactgattcaggccgaggtcgt

SEQ ID NO: 134843 - DNA, 30 bp, Artificial Sequence
  Synthetic oligonucleotide
cgtatactagtaggtggagtctatggtcgt

SEQ ID NO: 134844 - DNA, 30 bp, Artificial Sequence
  Synthetic oligonucleotide
ttcggcgggccggacgatagttatggtcgt

SEQ ID NO: 134845 - DNA, 30 bp, Artificial Sequence
  Synthetic oligonucleotide
agagaacgtatgccgagttcgaaccttcgt

SEQ ID NO: 134846 - DNA, 30 bp, Artificial Sequence
  Synthetic oligonucleotide
ggacgacggcccttaaatcatctcgttcgt

SEQ ID NO: 134847 - DNA, 30 bp, Artificial Sequence
  Synthetic oligonucleotide
ataggatcctctatgcactgtctcgttcgt

SEQ ID NO: 134848 - DNA, 30 bp, Artificial Sequence
  Synthetic oligonucleotide
ggggggatcacgtgccgtgtgcgtgttcgt

SEQ ID NO: 134849 - DNA, 30 bp, Artificial Sequence
  Synthetic oligonucleotide
ggggccaaagtcgttaacggtttctttcgt

SEQ ID NO: 134850 - DNA, 30 bp, Artificial Sequence
  Synthetic oligonucleotide
aagtaaagcttcggaaatagccgttttcgt

SEQ ID NO: 134851 - DNA, 31 bp, Artificial Sequence
  Synthetic oligonucleotide
tcgggtagaaagataataagtcagaaaaggt

SEQ ID NO: 134852 - DNA, 30 bp, Artificial Sequence
  Synthetic oligonucleotide
cctagtatgtgcgtgttctacataaaaggt

SEQ ID NO: 134853 - DNA, 30 bp, Artificial Sequence
  Synthetic oligonucleotide
gggtcagacttggaagggcttgagaaaggt

SEQ ID NO: 134854 - DNA, 30 bp, Artificial Sequence
  Synthetic oligonucleotide
aagttaggatcagctcaactaacgaaaggt

SEQ ID NO: 134855 - DNA, 30 bp, Artificial Sequence
  Synthetic oligonucleotide
taagttaggtgtttcggaggagataaaggt

SEQ ID NO: 134856 - DNA, 30 bp, Artificial Sequence
  Synthetic oligonucleotide
gcgtaaaacctgatcgagcgttggcaaggt

SEQ ID NO: 134857 - DNA, 30 bp, Artificial Sequence
  Synthetic oligonucleotide
acataaaacttcaatcaggtactgcaaggt

SEQ ID NO: 134858 - DNA, 30 bp, Artificial Sequence
  Synthetic oligonucleotide
ccggccgaatttgaccgtcaagtgcaaggt

SEQ ID NO: 134859 - DNA, 30 bp, Artificial Sequence
  Synthetic oligonucleotide
agcgatctctacgttcagagcggtcaaggt

SEQ ID NO: 134860 - DNA, 30 bp, Artificial Sequence
  Synthetic oligonucleotide
tcgctgttagtggtagcagaagtggaaggt

SEQ ID NO: 134861 - DNA, 30 bp, Artificial Sequence
  Synthetic oligonucleotide
acaatataactataaactcttggctaaggt

SEQ ID NO: 134862 - DNA, 30 bp, Artificial Sequence
  Synthetic oligonucleotide
ggccgaattttacggtttacaatcacaggt

SEQ ID NO: 134863 - DNA, 30 bp, Artificial Sequence
  Synthetic oligonucleotide
ctggccaggcgtagtatgcacaagacaggt

SEQ ID NO: 134864 - DNA, 30 bp, Artificial Sequence
  Synthetic oligonucleotide
accggccggagggccagaaggaagccaggt

SEQ ID NO: 134865 - DNA, 30 bp, Artificial Sequence
  Synthetic oligonucleotide
tccattggatagcaaaaccaaggggcaggt

SEQ ID NO: 134866 - DNA, 30 bp, Artificial Sequence
  Synthetic oligonucleotide
aactgtaaggtggatggagtcgttgcaggt

SEQ ID NO: 134867 - DNA, 30 bp, Artificial Sequence
  Synthetic oligonucleotide
gaggtgtagcctgtatggcggggatcaggt

SEQ ID NO: 134868 - DNA, 30 bp, Artificial Sequence
  Synthetic oligonucleotide
actcaaaagtgggagtcaccgctatcaggt

SEQ ID NO: 134869 - DNA, 30 bp, Artificial Sequence
  Synthetic oligonucleotide
actgagaccacatggctgatcacctcaggt

SEQ ID NO: 134870 - DNA, 30 bp, Artificial Sequence
  Synthetic oligonucleotide
tctcgtttttcgagattttgtcagtcaggt

SEQ ID NO: 134871 - DNA, 30 bp, Artificial Sequence
  Synthetic oligonucleotide
agagttggcgtttcagtacgatagtcaggt

SEQ ID NO: 134872 - DNA, 31 bp, Artificial Sequence
  Synthetic oligonucleotide
gtcgtcggcctcgcagaaagagggttcaggt

SEQ ID NO: 134873 - DNA, 30 bp, Artificial Sequence
  Synthetic oligonucleotide
atagacgtggacaattaagatatttcaggt

SEQ ID NO: 134874 - DNA, 30 bp, Artificial Sequence
  Synthetic oligonucleotide
cgggttacttgacatacaatatgaagaggt

SEQ ID NO: 134875 - DNA, 30 bp, Artificial Sequence
  Synthetic oligonucleotide
tgacatcatgggtttgtaacaaagagaggt

SEQ ID NO: 134876 - DNA, 30 bp, Artificial Sequence
  Synthetic oligonucleotide
agaagtctccaataaacacttcctagaggt

SEQ ID NO: 134877 - DNA, 30 bp, Artificial Sequence
  Synthetic oligonucleotide
gagccaaggagaggtgcctgttctcgaggt

SEQ ID NO: 134878 - DNA, 30 bp, Artificial Sequence
  Synthetic oligonucleotide
ggtaatattaagaatatctgctccggaggt

SEQ ID NO: 134879 - DNA, 30 bp, Artificial Sequence
  Synthetic oligonucleotide
ctgccaagacaaactcccagtcgtggaggt

SEQ ID NO: 134880 - DNA, 30 bp, Artificial Sequence
  Synthetic oligonucleotide
tgggagctgagaaacggaggtgtaataggt

SEQ ID NO: 134881 - DNA, 30 bp, Artificial Sequence
  Synthetic oligonucleotide
tgcaaggtgggatagtagtaatgcataggt

SEQ ID NO: 134882 - DNA, 30 bp, Artificial Sequence
  Synthetic oligonucleotide
ggttgactaagggcggtcatgtctctaggt

SEQ ID NO: 134883 - DNA, 30 bp, Artificial Sequence
  Synthetic oligonucleotide
cgcggggacaaagatgtggaataagtaggt

SEQ ID NO: 134884 - DNA, 30 bp, Artificial Sequence
  Synthetic oligonucleotide
cggaggtttaattcgattccaaaggtaggt

SEQ ID NO: 134885 - DNA, 30 bp, Artificial Sequence
  Synthetic oligonucleotide
ggtaccgtggtctagtggtagcgggtaggt

SEQ ID NO: 134886 - DNA, 30 bp, Artificial Sequence
  Synthetic oligonucleotide
cacatgtgaaaagcaacaaagaacttaggt

SEQ ID NO: 134887 - DNA, 30 bp, Artificial Sequence
  Synthetic oligonucleotide
cgtggcacgggtaatcagcaacccttaggt

SEQ ID NO: 134888 - DNA, 30 bp, Artificial Sequence
  Synthetic oligonucleotide
cgaatagaccgcgaattgacatctcacggt

SEQ ID NO: 134889 - DNA, 30 bp, Artificial Sequence
  Synthetic oligonucleotide
ggcacgtacaagtgtatcaaaagggacggt

SEQ ID NO: 134890 - DNA, 30 bp, Artificial Sequence
  Synthetic oligonucleotide
gtcaagcaaagcggccgaaaagttgacggt

SEQ ID NO: 134891 - DNA, 30 bp, Artificial Sequence
  Synthetic oligonucleotide
gtctcagaagggcagaggggatcatacggt

SEQ ID NO: 134892 - DNA, 30 bp, Artificial Sequence
  Synthetic oligonucleotide
cgtcaaaacttcgtgcgttacagctacggt

SEQ ID NO: 134893 - DNA, 30 bp, Artificial Sequence
  Synthetic oligonucleotide
cggtgcagcatgtttgggctaatttacggt

SEQ ID NO: 134894 - DNA, 30 bp, Artificial Sequence
  Synthetic oligonucleotide
tagtcgctcaggggaagggtattaaccggt

SEQ ID NO: 134895 - DNA, 30 bp, Artificial Sequence
  Synthetic oligonucleotide
aacagagggaaaggtttcccgatcaccggt

SEQ ID NO: 134896 - DNA, 30 bp, Artificial Sequence
  Synthetic oligonucleotide
cataagtcaaaagggtagcggaagaccggt

SEQ ID NO: 134897 - DNA, 30 bp, Artificial Sequence
  Synthetic oligonucleotide
gtgacatcctgatgggctgggggtgccggt

SEQ ID NO: 134898 - DNA, 30 bp, Artificial Sequence
  Synthetic oligonucleotide
ccaggggtcgacattgaactcttatccggt

SEQ ID NO: 134899 - DNA, 30 bp, Artificial Sequence
  Synthetic oligonucleotide
cgggttggtagtcacgtaactggttccggt

SEQ ID NO: 134900 - DNA, 30 bp, Artificial Sequence
  Synthetic oligonucleotide
cgagagtttttggtgcattgggaaagcggt

SEQ ID NO: 134901 - DNA, 30 bp, Artificial Sequence
  Synthetic oligonucleotide
tcgccggaaggaaaatctgcagtcagcggt

SEQ ID NO: 134902 - DNA, 30 bp, Artificial Sequence
  Synthetic oligonucleotide
gctggatgatgtcaggtcacagagagcggt

SEQ ID NO: 134903 - DNA, 30 bp, Artificial Sequence
  Synthetic oligonucleotide
taaggtacaaaacacgtattatggagcggt

SEQ ID NO: 134904 - DNA, 30 bp, Artificial Sequence
  Synthetic oligonucleotide
ggagaattaaaggtgataccgacacgcggt

SEQ ID NO: 134905 - DNA, 30 bp, Artificial Sequence
  Synthetic oligonucleotide
caaagcggcactaaagcaccgaagggcggt

SEQ ID NO: 134906 - DNA, 30 bp, Artificial Sequence
  Synthetic oligonucleotide
agctactttcagggagggaaagcgggcggt

SEQ ID NO: 134907 - DNA, 30 bp, Artificial Sequence
  Synthetic oligonucleotide
agaataacgttggattaataacggggcggt

SEQ ID NO: 134908 - DNA, 30 bp, Artificial Sequence
  Synthetic oligonucleotide
tctaaaccgcggagtccatcaaaatgcggt

SEQ ID NO: 134909 - DNA, 30 bp, Artificial Sequence
  Synthetic oligonucleotide
tgacttaagagtgcctcgcatacatgcggt

SEQ ID NO: 134910 - DNA, 30 bp, Artificial Sequence
  Synthetic oligonucleotide
tgaacgtgcggcgagtgtatgttttgcggt

SEQ ID NO: 134911 - DNA, 30 bp, Artificial Sequence
  Synthetic oligonucleotide
atgacgtggtgcatattgctgtatatcggt

SEQ ID NO: 134912 - DNA, 30 bp, Artificial Sequence
  Synthetic oligonucleotide
tgaggcggcgatgatcgccctacactcggt

SEQ ID NO: 134913 - DNA, 30 bp, Artificial Sequence
  Synthetic oligonucleotide
gaggaggatcgagcgctgggatcactcggt

SEQ ID NO: 134914 - DNA, 30 bp, Artificial Sequence
  Synthetic oligonucleotide
aacgaccgtttaagtctgtcatagctcggt

SEQ ID NO: 134915 - DNA, 30 bp, Artificial Sequence
  Synthetic oligonucleotide
gacgggccgagttatgtattatcagtcggt

SEQ ID NO: 134916 - DNA, 30 bp, Artificial Sequence
  Synthetic oligonucleotide
cccaggggtagcgaacccccgtcattcggt

SEQ ID NO: 134917 - DNA, 30 bp, Artificial Sequence
  Synthetic oligonucleotide
accgggtgctagattacgaaagagttcggt

SEQ ID NO: 134918 - DNA, 29 bp, Artificial Sequence
  Synthetic oligonucleotide
ggctaaatactggagaaaatcgacagggt

SEQ ID NO: 134919 - DNA, 30 bp, Artificial Sequence
  Synthetic oligonucleotide
taaatctatcacaaatcggttggccagggt

SEQ ID NO: 134920 - DNA, 30 bp, Artificial Sequence
  Synthetic oligonucleotide
acgcgatctatgtatggggtgatagagggt

SEQ ID NO: 134921 - DNA, 30 bp, Artificial Sequence
  Synthetic oligonucleotide
ggagatatccaaaagggacctttcgagggt

SEQ ID NO: 134922 - DNA, 30 bp, Artificial Sequence
  Synthetic oligonucleotide
aggcggcatgtagtgtattgcagggagggt

SEQ ID NO: 134923 - DNA, 30 bp, Artificial Sequence
  Synthetic oligonucleotide
tatcgtagaaccgaataagtatctgagggt

SEQ ID NO: 134924 - DNA, 30 bp, Artificial Sequence
  Synthetic oligonucleotide
tcagtcgtgagttgactatgtcgtgagggt

SEQ ID NO: 134925 - DNA, 30 bp, Artificial Sequence
  Synthetic oligonucleotide
ctatgaggattgactacggtgcgctagggt

SEQ ID NO: 134926 - DNA, 30 bp, Artificial Sequence
  Synthetic oligonucleotide
ccacggcgagggttagggatatgctagggt

SEQ ID NO: 134927 - DNA, 30 bp, Artificial Sequence
  Synthetic oligonucleotide
gatgtgaaaattgcgttagttttgtagggt

SEQ ID NO: 134928 - DNA, 30 bp, Artificial Sequence
  Synthetic oligonucleotide
tgcggtaattacgacggtcctcgttagggt

SEQ ID NO: 134929 - DNA, 30 bp, Artificial Sequence
  Synthetic oligonucleotide
atgattaagcgatgtgagacgttaacgggt

SEQ ID NO: 134930 - DNA, 30 bp, Artificial Sequence
  Synthetic oligonucleotide
tggatgggcctgtctgaaccaatcacgggt

SEQ ID NO: 134931 - DNA, 30 bp, Artificial Sequence
  Synthetic oligonucleotide
tcgttcactgtcctcaaagaggtgacgggt

SEQ ID NO: 134932 - DNA, 30 bp, Artificial Sequence
  Synthetic oligonucleotide
tcgtgggcggcacatgataagtctacgggt

SEQ ID NO: 134933 - DNA, 30 bp, Artificial Sequence
  Synthetic oligonucleotide
tgaacatcagactacaagcgttctacgggt

SEQ ID NO: 134934 - DNA, 30 bp, Artificial Sequence
  Synthetic oligonucleotide
tcaaaccgtcagcaagtatcgtcaccgggt

SEQ ID NO: 134935 - DNA, 31 bp, Artificial Sequence
  Synthetic oligonucleotide
ttatcgtaattgagtcactcgtgcatcgggt

SEQ ID NO: 134936 - DNA, 30 bp, Artificial Sequence
  Synthetic oligonucleotide
tctgagcaacgataccgcgagagctcgggt

SEQ ID NO: 134937 - DNA, 30 bp, Artificial Sequence
  Synthetic oligonucleotide
ggatggacataacagtcgatttggaggggt

SEQ ID NO: 134938 - DNA, 30 bp, Artificial Sequence
  Synthetic oligonucleotide
ttactgcataaagggtaggaaaatcggggt

SEQ ID NO: 134939 - DNA, 30 bp, Artificial Sequence
  Synthetic oligonucleotide
ggagtcaataatcggcttgcccatcggggt

SEQ ID NO: 134940 - DNA, 30 bp, Artificial Sequence
  Synthetic oligonucleotide
ctcgatcgtatgtcagggaaggatcggggt

SEQ ID NO: 134941 - DNA, 30 bp, Artificial Sequence
  Synthetic oligonucleotide
gggcttatcaagggtaaatcaagtcggggt

SEQ ID NO: 134942 - DNA, 30 bp, Artificial Sequence
  Synthetic oligonucleotide
ctaatttcaagaccggcccagaaatggggt

SEQ ID NO: 134943 - DNA, 30 bp, Artificial Sequence
  Synthetic oligonucleotide
acaatacggtggacgggctataccatgggt

SEQ ID NO: 134944 - DNA, 30 bp, Artificial Sequence
  Synthetic oligonucleotide
acagggcagtgtcaatcctgcgccatgggt

SEQ ID NO: 134945 - DNA, 30 bp, Artificial Sequence
  Synthetic oligonucleotide
cgactgccagagaatttaggccggatgggt

SEQ ID NO: 134946 - DNA, 30 bp, Artificial Sequence
  Synthetic oligonucleotide
gttcacagatatgcgactatgttgctgggt

SEQ ID NO: 134947 - DNA, 30 bp, Artificial Sequence
  Synthetic oligonucleotide
tattacgcgacttagctaaagagggtgggt

SEQ ID NO: 134948 - DNA, 31 bp, Artificial Sequence
  Synthetic oligonucleotide
aagacagattcttggataccgataattgggt

SEQ ID NO: 134949 - DNA, 30 bp, Artificial Sequence
  Synthetic oligonucleotide
ccttcgggattacatacatagggattgggt

SEQ ID NO: 134950 - DNA, 30 bp, Artificial Sequence
  Synthetic oligonucleotide
gcccctgcgaggaatggcattgagaatggt

SEQ ID NO: 134951 - DNA, 30 bp, Artificial Sequence
  Synthetic oligonucleotide
ggtcgattagtgagcgtgtcattccatggt

SEQ ID NO: 134952 - DNA, 30 bp, Artificial Sequence
  Synthetic oligonucleotide
gcaaagaggcaatatcggggacagcatggt

SEQ ID NO: 134953 - DNA, 30 bp, Artificial Sequence
  Synthetic oligonucleotide
tccttatccgcgcagaaggtcgagcatggt

SEQ ID NO: 134954 - DNA, 30 bp, Artificial Sequence
  Synthetic oligonucleotide
agtaaaagggcggtgtaccgtgtggatggt

SEQ ID NO: 134955 - DNA, 30 bp, Artificial Sequence
  Synthetic oligonucleotide
caacgagcagtttatccatctcggtatggt

SEQ ID NO: 134956 - DNA, 30 bp, Artificial Sequence
  Synthetic oligonucleotide
ttgggacctgagttagtcgcgatgtatggt

SEQ ID NO: 134957 - DNA, 30 bp, Artificial Sequence
  Synthetic oligonucleotide
agagtacaaggtaatacttacgatactggt

SEQ ID NO: 134958 - DNA, 30 bp, Artificial Sequence
  Synthetic oligonucleotide
atcggctaaagcgaacaataggttactggt

SEQ ID NO: 134959 - DNA, 30 bp, Artificial Sequence
  Synthetic oligonucleotide
gcagtctaggcgtacaaggagagccctggt

SEQ ID NO: 134960 - DNA, 30 bp, Artificial Sequence
  Synthetic oligonucleotide
gtaaccctgatggtctaatcgtacgctggt

SEQ ID NO: 134961 - DNA, 30 bp, Artificial Sequence
  Synthetic oligonucleotide
gcctgactacatatgtgtaagaaggctggt

SEQ ID NO: 134962 - DNA, 30 bp, Artificial Sequence
  Synthetic oligonucleotide
gtttgtcggagaatagcgaagaagtctggt

SEQ ID NO: 134963 - DNA, 30 bp, Artificial Sequence
  Synthetic oligonucleotide
cacaaagttacatgcggagggtattctggt

SEQ ID NO: 134964 - DNA, 30 bp, Artificial Sequence
  Synthetic oligonucleotide
gggccaaataaacggccggaggtaagtggt

SEQ ID NO: 134965 - DNA, 30 bp, Artificial Sequence
  Synthetic oligonucleotide
cgaggttcgagtttaaaagaagctagtggt

SEQ ID NO: 134966 - DNA, 30 bp, Artificial Sequence
  Synthetic oligonucleotide
tcacggggagcagggagcgcccgtagtggt

SEQ ID NO: 134967 - DNA, 30 bp, Artificial Sequence
  Synthetic oligonucleotide
tcctctaggtacagcgaatgaacacgtggt

SEQ ID NO: 134968 - DNA, 30 bp, Artificial Sequence
  Synthetic oligonucleotide
ggacggtgactggttgtttctccgcgtggt

SEQ ID NO: 134969 - DNA, 30 bp, Artificial Sequence
  Synthetic oligonucleotide
agaaccggggctcagtgtccggcatgtggt

SEQ ID NO: 134970 - DNA, 30 bp, Artificial Sequence
  Synthetic oligonucleotide
actcatcatcctggtttataagactgtggt

SEQ ID NO: 134971 - DNA, 30 bp, Artificial Sequence
  Synthetic oligonucleotide
taatgtacattgttgtcttcacgaattggt

SEQ ID NO: 134972 - DNA, 30 bp, Artificial Sequence
  Synthetic oligonucleotide
accagagccacgcgacttgcagtgattggt

SEQ ID NO: 134973 - DNA, 30 bp, Artificial Sequence
  Synthetic oligonucleotide
tactgggtcatttaaaaacagagacttggt

SEQ ID NO: 134974 - DNA, 30 bp, Artificial Sequence
  Synthetic oligonucleotide
acctatacaccatagaactgcgaccttggt

SEQ ID NO: 134975 - DNA, 30 bp, Artificial Sequence
  Synthetic oligonucleotide
gcacgcggtactacaaacattcgccttggt

SEQ ID NO: 134976 - DNA, 29 bp, Artificial Sequence
  Synthetic oligonucleotide
tcagagctcctgcttccaagtctcttggt

SEQ ID NO: 134977 - DNA, 30 bp, Artificial Sequence
  Synthetic oligonucleotide
cagtgtatttccatggaaaattaggttggt

SEQ ID NO: 134978 - DNA, 30 bp, Artificial Sequence
  Synthetic oligonucleotide
agtgcgtcgtgatggttactgcgtgttggt

SEQ ID NO: 134979 - DNA, 30 bp, Artificial Sequence
  Synthetic oligonucleotide
ggggggccgaagcagacctacgcctttggt

SEQ ID NO: 134980 - DNA, 30 bp, Artificial Sequence
  Synthetic oligonucleotide
atagcggcagtgaatccatagaggtttggt

SEQ ID NO: 134981 - DNA, 30 bp, Artificial Sequence
  Synthetic oligonucleotide
agaagcatgggtctttataccagaaaatgt

SEQ ID NO: 134982 - DNA, 30 bp, Artificial Sequence
  Synthetic oligonucleotide
gcttcggaatacgtatcatctgcgaaatgt

SEQ ID NO: 134983 - DNA, 30 bp, Artificial Sequence
  Synthetic oligonucleotide
atctgcagagaccagaatcctaataaatgt

SEQ ID NO: 134984 - DNA, 31 bp, Artificial Sequence
  Synthetic oligonucleotide
cgtacaattcaagaacggggtcaaacaatgt

SEQ ID NO: 134985 - DNA, 30 bp, Artificial Sequence
  Synthetic oligonucleotide
acggtatacgtgatttaggtggcagaatgt

SEQ ID NO: 134986 - DNA, 30 bp, Artificial Sequence
  Synthetic oligonucleotide
tctagctgtccctctcaacatggagaatgt

SEQ ID NO: 134987 - DNA, 30 bp, Artificial Sequence
  Synthetic oligonucleotide
agaatctccctgccgacaattcctgaatgt

SEQ ID NO: 134988 - DNA, 30 bp, Artificial Sequence
  Synthetic oligonucleotide
accctaaatttagatttgccggctgaatgt

SEQ ID NO: 134989 - DNA, 30 bp, Artificial Sequence
  Synthetic oligonucleotide
cggactctaggtacgaggttgttataatgt

SEQ ID NO: 134990 - DNA, 30 bp, Artificial Sequence
  Synthetic oligonucleotide
atgggtgcggctgagtggcagacctaatgt

SEQ ID NO: 134991 - DNA, 30 bp, Artificial Sequence
  Synthetic oligonucleotide
ccgggtacaggattgagcccactaccatgt

SEQ ID NO: 134992 - DNA, 30 bp, Artificial Sequence
  Synthetic oligonucleotide
cggcaatcaacccgtgcagatgagccatgt

SEQ ID NO: 134993 - DNA, 30 bp, Artificial Sequence
  Synthetic oligonucleotide
gttgcagactcgcacggatggcatgcatgt

SEQ ID NO: 134994 - DNA, 30 bp, Artificial Sequence
  Synthetic oligonucleotide
gacggtcaaactgggttccacgtctcatgt

SEQ ID NO: 134995 - DNA, 30 bp, Artificial Sequence
  Synthetic oligonucleotide
gtcatgcgtcgtagtacgggactgagatgt

SEQ ID NO: 134996 - DNA, 30 bp, Artificial Sequence
  Synthetic oligonucleotide
tggtccaaaaccttaagcttcgttagatgt

SEQ ID NO: 134997 - DNA, 30 bp, Artificial Sequence
  Synthetic oligonucleotide
atgtcgtttcacgtaagtaccccaggatgt

SEQ ID NO: 134998 - DNA, 30 bp, Artificial Sequence
  Synthetic oligonucleotide
cgacgaagtctctaggcatcggtaggatgt

SEQ ID NO: 134999 - DNA, 30 bp, Artificial Sequence
  Synthetic oligonucleotide
cgttcaaatctagcagtaaccatcggatgt

SEQ ID NO: 135000 - DNA, 30 bp, Artificial Sequence
  Synthetic oligonucleotide
cggcaatgtgatctaggaatgggtggatgt

SEQ ID NO: 135001 - DNA, 30 bp, Artificial Sequence
  Synthetic oligonucleotide
tccgcggagatgaggcggagaattggatgt

SEQ ID NO: 135002 - DNA, 30 bp, Artificial Sequence
  Synthetic oligonucleotide
tctgcgttgcggcggatgagggcctgatgt

SEQ ID NO: 135003 - DNA, 30 bp, Artificial Sequence
  Synthetic oligonucleotide
ggacagtaaacaacgagatcgtgttgatgt

SEQ ID NO: 135004 - DNA, 30 bp, Artificial Sequence
  Synthetic oligonucleotide
ggcgtagcaaggaactatagagacatatgt

SEQ ID NO: 135005 - DNA, 30 bp, Artificial Sequence
  Synthetic oligonucleotide
aacgggggatcgtcgacagtagacctatgt

SEQ ID NO: 135006 - DNA, 30 bp, Artificial Sequence
  Synthetic oligonucleotide
gtcatcgcggaagaccgagtcatgctatgt

SEQ ID NO: 135007 - DNA, 30 bp, Artificial Sequence
  Synthetic oligonucleotide
tgtaaatcgtggcacgaacaagctctatgt

SEQ ID NO: 135008 - DNA, 30 bp, Artificial Sequence
  Synthetic oligonucleotide
ggcgaggtctcatacgcgtattgtctatgt

SEQ ID NO: 135009 - DNA, 30 bp, Artificial Sequence
  Synthetic oligonucleotide
tgcgtcttgagggcgtggcattaagtatgt

SEQ ID NO: 135010 - DNA, 30 bp, Artificial Sequence
  Synthetic oligonucleotide
cgatgagaagcaactagttcagtggtatgt

SEQ ID NO: 135011 - DNA, 30 bp, Artificial Sequence
  Synthetic oligonucleotide
atgtacaagggaagatgaacgtatgtatgt

SEQ ID NO: 135012 - DNA, 30 bp, Artificial Sequence
  Synthetic oligonucleotide
tgttctagcatgcgtgtgggtataaactgt

SEQ ID NO: 135013 - DNA, 30 bp, Artificial Sequence
  Synthetic oligonucleotide
catgtcatagcgcaagggtcaatcaactgt

SEQ ID NO: 135014 - DNA, 30 bp, Artificial Sequence
  Synthetic oligonucleotide
cacagggtgaaagcacgaaatcgccactgt

SEQ ID NO: 135015 - DNA, 30 bp, Artificial Sequence
  Synthetic oligonucleotide
tgtactttcgatgcgattggatgtcactgt

SEQ ID NO: 135016 - DNA, 30 bp, Artificial Sequence
  Synthetic oligonucleotide
ggtgtggcaaatataacgtgttaggactgt

SEQ ID NO: 135017 - DNA, 30 bp, Artificial Sequence
  Synthetic oligonucleotide
tcaggcagtcttgatgggtaaatggactgt

SEQ ID NO: 135018 - DNA, 30 bp, Artificial Sequence
  Synthetic oligonucleotide
acaaccagaacctggataaaataatactgt

SEQ ID NO: 135019 - DNA, 30 bp, Artificial Sequence
  Synthetic oligonucleotide
acgcgtcacatcttcaaggaatgctactgt

SEQ ID NO: 135020 - DNA, 30 bp, Artificial Sequence
  Synthetic oligonucleotide
ctaatgcgcctaaggtaaagtctctactgt

SEQ ID NO: 135021 - DNA, 30 bp, Artificial Sequence
  Synthetic oligonucleotide
aatcgggaagtgcgaggtaggtgcacctgt

SEQ ID NO: 135022 - DNA, 30 bp, Artificial Sequence
  Synthetic oligonucleotide
taggcctgtaaaaggtctccagcgacctgt

SEQ ID NO: 135023 - DNA, 30 bp, Artificial Sequence
  Synthetic oligonucleotide
taaataagaactagcttgatctgggcctgt

SEQ ID NO: 135024 - DNA, 30 bp, Artificial Sequence
  Synthetic oligonucleotide
ttaaggattcggcgaatcggctctgcctgt

SEQ ID NO: 135025 - DNA, 30 bp, Artificial Sequence
  Synthetic oligonucleotide
cagacgaatgtacaatggcgaggctcctgt

SEQ ID NO: 135026 - DNA, 30 bp, Artificial Sequence
  Synthetic oligonucleotide
gatcgtcaaatccgatggtgattgtcctgt

SEQ ID NO: 135027 - DNA, 30 bp, Artificial Sequence
  Synthetic oligonucleotide
accggggtgtatcgggggatcatgcgctgt

SEQ ID NO: 135028 - DNA, 30 bp, Artificial Sequence
  Synthetic oligonucleotide
ccactcagagtatgtccaaagaatcgctgt

SEQ ID NO: 135029 - DNA, 30 bp, Artificial Sequence
  Synthetic oligonucleotide
aaagagagaggggcatgagatggtcgctgt

SEQ ID NO: 135030 - DNA, 30 bp, Artificial Sequence
  Synthetic oligonucleotide
gcgaatgtccatagggctaagtgaggctgt

SEQ ID NO: 135031 - DNA, 30 bp, Artificial Sequence
  Synthetic oligonucleotide
tcaacagatcgtacccatcctcatggctgt

SEQ ID NO: 135032 - DNA, 30 bp, Artificial Sequence
  Synthetic oligonucleotide
acgtgcgtagcgtatcaccgctccatctgt

SEQ ID NO: 135033 - DNA, 30 bp, Artificial Sequence
  Synthetic oligonucleotide
tctttacccatcatggtactggaccagtgt

SEQ ID NO: 135034 - DNA, 30 bp, Artificial Sequence
  Synthetic oligonucleotide
agatatgagtctggaagaaagttagagtgt

SEQ ID NO: 135035 - DNA, 30 bp, Artificial Sequence
  Synthetic oligonucleotide
cttcaataagcattagtgtcagcggagtgt

SEQ ID NO: 135036 - DNA, 30 bp, Artificial Sequence
  Synthetic oligonucleotide
gggacgcctagaatcggagacggggagtgt

SEQ ID NO: 135037 - DNA, 30 bp, Artificial Sequence
  Synthetic oligonucleotide
gtaagcaatctcagtggtcgccaatagtgt

SEQ ID NO: 135038 - DNA, 30 bp, Artificial Sequence
  Synthetic oligonucleotide
ggtcagccctgcaaataaaataattagtgt

SEQ ID NO: 135039 - DNA, 30 bp, Artificial Sequence
  Synthetic oligonucleotide
cgtgtggagtaagcgttacgcaggacgtgt

SEQ ID NO: 135040 - DNA, 30 bp, Artificial Sequence
  Synthetic oligonucleotide
gttgtctgtggcttaagggatgatccgtgt

SEQ ID NO: 135041 - DNA, 30 bp, Artificial Sequence
  Synthetic oligonucleotide
tggcgaactccggcaagcggaagtccgtgt

SEQ ID NO: 135042 - DNA, 30 bp, Artificial Sequence
  Synthetic oligonucleotide
gattactcgtgtgggaagggtccagcgtgt

SEQ ID NO: 135043 - DNA, 30 bp, Artificial Sequence
  Synthetic oligonucleotide
cggattgttccctccacgacgagagcgtgt

SEQ ID NO: 135044 - DNA, 30 bp, Artificial Sequence
  Synthetic oligonucleotide
taacgagattccggagctagtggagcgtgt

SEQ ID NO: 135045 - DNA, 30 bp, Artificial Sequence
  Synthetic oligonucleotide
agtgacgtgccgcctccatgaagcgcgtgt

SEQ ID NO: 135046 - DNA, 30 bp, Artificial Sequence
  Synthetic oligonucleotide
cgcttctgatctactcggtggcactcgtgt

SEQ ID NO: 135047 - DNA, 30 bp, Artificial Sequence
  Synthetic oligonucleotide
tgtatcgcgtatgggttccaggggtcgtgt

SEQ ID NO: 135048 - DNA, 30 bp, Artificial Sequence
  Synthetic oligonucleotide
taccgacgtggtctgatcgatcccaggtgt

SEQ ID NO: 135049 - DNA, 30 bp, Artificial Sequence
  Synthetic oligonucleotide
ttcatgcatagccgaagtcgtcagaggtgt

SEQ ID NO: 135050 - DNA, 30 bp, Artificial Sequence
  Synthetic oligonucleotide
ctcatcagaagcaggaaatacgataggtgt

SEQ ID NO: 135051 - DNA, 30 bp, Artificial Sequence
  Synthetic oligonucleotide
gggccatgacatgatacttataaacggtgt

SEQ ID NO: 135052 - DNA, 30 bp, Artificial Sequence
  Synthetic oligonucleotide
agttaatcagctatgtaagggtgacggtgt

SEQ ID NO: 135053 - DNA, 30 bp, Artificial Sequence
  Synthetic oligonucleotide
tggccagggtcctatcagatacaccggtgt

SEQ ID NO: 135054 - DNA, 30 bp, Artificial Sequence
  Synthetic oligonucleotide
tagggacggttcaaattcgctgaccggtgt

SEQ ID NO: 135055 - DNA, 30 bp, Artificial Sequence
  Synthetic oligonucleotide
cgcatagagctgtgttaatcatgtcggtgt

SEQ ID NO: 135056 - DNA, 30 bp, Artificial Sequence
  Synthetic oligonucleotide
cgggtagccaagcacaactccggatggtgt

SEQ ID NO: 135057 - DNA, 30 bp, Artificial Sequence
  Synthetic oligonucleotide
tgcccatagtgcggaagccgtaactggtgt

SEQ ID NO: 135058 - DNA, 30 bp, Artificial Sequence
  Synthetic oligonucleotide
ccgtatggcccgtagtctaaatccatgtgt

SEQ ID NO: 135059 - DNA, 30 bp, Artificial Sequence
  Synthetic oligonucleotide
ttacggtaagggtcttcgaagacgttgtgt

SEQ ID NO: 135060 - DNA, 30 bp, Artificial Sequence
  Synthetic oligonucleotide
gtcaacaaaaagtgcattcacaggttgtgt

SEQ ID NO: 135061 - DNA, 30 bp, Artificial Sequence
  Synthetic oligonucleotide
gggatagagctgtggataaccgggttgtgt

SEQ ID NO: 135062 - DNA, 30 bp, Artificial Sequence
  Synthetic oligonucleotide
ttacggaacgtaagttggaacataaattgt

SEQ ID NO: 135063 - DNA, 30 bp, Artificial Sequence
  Synthetic oligonucleotide
aaatcaacaagtaaagatgttaggaattgt

SEQ ID NO: 135064 - DNA, 30 bp, Artificial Sequence
  Synthetic oligonucleotide
tatgggcgtgaagatggacaaacacattgt

SEQ ID NO: 135065 - DNA, 30 bp, Artificial Sequence
  Synthetic oligonucleotide
cgggcgtacactggtagagtagaccattgt

SEQ ID NO: 135066 - DNA, 30 bp, Artificial Sequence
  Synthetic oligonucleotide
tgcttgacatgcaaggggcacaagcattgt

SEQ ID NO: 135067 - DNA, 30 bp, Artificial Sequence
  Synthetic oligonucleotide
cgctgggatcacgccaaagaacggcattgt

SEQ ID NO: 135068 - DNA, 30 bp, Artificial Sequence
  Synthetic oligonucleotide
gtacggagggtgtagccgaattctcattgt

SEQ ID NO: 135069 - DNA, 30 bp, Artificial Sequence
  Synthetic oligonucleotide
tgtgtaataacaaaacgagaacgtcattgt

SEQ ID NO: 135070 - DNA, 30 bp, Artificial Sequence
  Synthetic oligonucleotide
ccgagacagcggcaaggggtagtggattgt

SEQ ID NO: 135071 - DNA, 30 bp, Artificial Sequence
  Synthetic oligonucleotide
cctgagaagcgccgaggcgaatctgattgt

SEQ ID NO: 135072 - DNA, 30 bp, Artificial Sequence
  Synthetic oligonucleotide
ttcgcgcacataaacgcgtatgactattgt

SEQ ID NO: 135073 - DNA, 30 bp, Artificial Sequence
  Synthetic oligonucleotide
gttcgaaaccacccaacggttccctattgt

SEQ ID NO: 135074 - DNA, 30 bp, Artificial Sequence
  Synthetic oligonucleotide
tcacgccacatcgcggaggtcgggtattgt

SEQ ID NO: 135075 - DNA, 30 bp, Artificial Sequence
  Synthetic oligonucleotide
gtctcggaattggctggatacgattattgt

SEQ ID NO: 135076 - DNA, 30 bp, Artificial Sequence
  Synthetic oligonucleotide
acatttgcatcacctgtgcgctagacttgt

SEQ ID NO: 135077 - DNA, 30 bp, Artificial Sequence
  Synthetic oligonucleotide
tgtgtgagtagtatgggttgggtgacttgt

SEQ ID NO: 135078 - DNA, 30 bp, Artificial Sequence
  Synthetic oligonucleotide
gcgagccagcaattcaatccagggccttgt

SEQ ID NO: 135079 - DNA, 30 bp, Artificial Sequence
  Synthetic oligonucleotide
cggatagattgcgtatatatatccagttgt

SEQ ID NO: 135080 - DNA, 30 bp, Artificial Sequence
  Synthetic oligonucleotide
atgtccgacatggcagttaagcgtcgttgt

SEQ ID NO: 135081 - DNA, 30 bp, Artificial Sequence
  Synthetic oligonucleotide
ataacgggctacggatgtctgatcggttgt

SEQ ID NO: 135082 - DNA, 30 bp, Artificial Sequence
  Synthetic oligonucleotide
tggtatccccgcagtggcgcgatactttgt

SEQ ID NO: 135083 - DNA, 30 bp, Artificial Sequence
  Synthetic oligonucleotide
gggcagggtgtccttaaatgcaggttttgt

SEQ ID NO: 135084 - DNA, 30 bp, Artificial Sequence
  Synthetic oligonucleotide
ggtaggctgattaagtacacttcaaaaatt

SEQ ID NO: 135085 - DNA, 30 bp, Artificial Sequence
  Synthetic oligonucleotide
gcagaatggtgttctcgggaagacaaaatt

SEQ ID NO: 135086 - DNA, 30 bp, Artificial Sequence
  Synthetic oligonucleotide
cacgcatcgtaagacgtcctttacaaaatt

SEQ ID NO: 135087 - DNA, 30 bp, Artificial Sequence
  Synthetic oligonucleotide
atcctcacggtcggttaaatcgcgaaaatt

SEQ ID NO: 135088 - DNA, 30 bp, Artificial Sequence
  Synthetic oligonucleotide
gacagtaaccagccctatgtgacacaaatt

SEQ ID NO: 135089 - DNA, 30 bp, Artificial Sequence
  Synthetic oligonucleotide
gagacagatgcgaacccagtaagtcaaatt

SEQ ID NO: 135090 - DNA, 30 bp, Artificial Sequence
  Synthetic oligonucleotide
tatgccaatgaactgacatgagaagaaatt

SEQ ID NO: 135091 - DNA, 30 bp, Artificial Sequence
  Synthetic oligonucleotide
aaacttaaaaagcgcgtgggctacgaaatt

SEQ ID NO: 135092 - DNA, 30 bp, Artificial Sequence
  Synthetic oligonucleotide
tttgcagagaaactggtacgaggcgaaatt

SEQ ID NO: 135093 - DNA, 30 bp, Artificial Sequence
  Synthetic oligonucleotide
ggaaccgagacctacagtaccggctaaatt

SEQ ID NO: 135094 - DNA, 30 bp, Artificial Sequence
  Synthetic oligonucleotide
tgcgtaatgtgaagagccatccggtaaatt

SEQ ID NO: 135095 - DNA, 30 bp, Artificial Sequence
  Synthetic oligonucleotide
ctggcgatgctcacagaggtcacttaaatt

SEQ ID NO: 135096 - DNA, 30 bp, Artificial Sequence
  Synthetic oligonucleotide
cgggaagttctaagttcatggtaaacaatt

SEQ ID NO: 135097 - DNA, 30 bp, Artificial Sequence
  Synthetic oligonucleotide
accccagaggacaagaccatggcaacaatt

SEQ ID NO: 135098 - DNA, 30 bp, Artificial Sequence
  Synthetic oligonucleotide
agcttgtgtgtggtgagcgtctagacaatt

SEQ ID NO: 135099 - DNA, 30 bp, Artificial Sequence
  Synthetic oligonucleotide
tcggccagcccgtgcgtgttactgacaatt

SEQ ID NO: 135100 - DNA, 30 bp, Artificial Sequence
  Synthetic oligonucleotide
cgtgactcccgtgcagcattcgatacaatt

SEQ ID NO: 135101 - DNA, 30 bp, Artificial Sequence
  Synthetic oligonucleotide
agttgtgggaaacggcttctgacaccaatt

SEQ ID NO: 135102 - DNA, 30 bp, Artificial Sequence
  Synthetic oligonucleotide
tgacacggatccacgctcccgccaccaatt

SEQ ID NO: 135103 - DNA, 30 bp, Artificial Sequence
  Synthetic oligonucleotide
cgttctgaggtcggaaagagtcatgcaatt

SEQ ID NO: 135104 - DNA, 30 bp, Artificial Sequence
  Synthetic oligonucleotide
tccaaaaccctataattaggatatgcaatt

SEQ ID NO: 135105 - DNA, 30 bp, Artificial Sequence
  Synthetic oligonucleotide
agatcctaataggacctaaggccatcaatt

SEQ ID NO: 135106 - DNA, 30 bp, Artificial Sequence
  Synthetic oligonucleotide
agagcccctaagaagcaagacatgtcaatt

SEQ ID NO: 135107 - DNA, 30 bp, Artificial Sequence
  Synthetic oligonucleotide
ccttctgtaatagatggctgggcttcaatt

SEQ ID NO: 135108 - DNA, 30 bp, Artificial Sequence
  Synthetic oligonucleotide
ttcagacaacgttatgcaagtctaagaatt

SEQ ID NO: 135109 - DNA, 30 bp, Artificial Sequence
  Synthetic oligonucleotide
caaatcacaacagcataaggttaacgaatt

SEQ ID NO: 135110 - DNA, 30 bp, Artificial Sequence
  Synthetic oligonucleotide
ggtgatatgcacagattcagcacaggaatt

SEQ ID NO: 135111 - DNA, 30 bp, Artificial Sequence
  Synthetic oligonucleotide
tgtggacgaagattcgaggggaaatgaatt

SEQ ID NO: 135112 - DNA, 30 bp, Artificial Sequence
  Synthetic oligonucleotide
catcatatgactatgcgaggactaataatt

SEQ ID NO: 135113 - DNA, 30 bp, Artificial Sequence
  Synthetic oligonucleotide
aagacgtgccaaaagtgctagagagtaatt

SEQ ID NO: 135114 - DNA, 30 bp, Artificial Sequence
  Synthetic oligonucleotide
ccattgatgttagtgtgcgattatgtaatt

SEQ ID NO: 135115 - DNA, 30 bp, Artificial Sequence
  Synthetic oligonucleotide
aaggggaggtatataacgggacctgtaatt

SEQ ID NO: 135116 - DNA, 30 bp, Artificial Sequence
  Synthetic oligonucleotide
tatggaaggtactagagatgttgtgtaatt

SEQ ID NO: 135117 - DNA, 30 bp, Artificial Sequence
  Synthetic oligonucleotide
aggagaggcgcgtaatacacggaattaatt

SEQ ID NO: 135118 - DNA, 30 bp, Artificial Sequence
  Synthetic oligonucleotide
aacaagcataaagagtccccgagattaatt

SEQ ID NO: 135119 - DNA, 30 bp, Artificial Sequence
  Synthetic oligonucleotide
catcgctctgcatacgatctgatattaatt

SEQ ID NO: 135120 - DNA, 30 bp, Artificial Sequence
  Synthetic oligonucleotide
cggggtaacaggtagagtcactacaacatt

SEQ ID NO: 135121 - DNA, 30 bp, Artificial Sequence
  Synthetic oligonucleotide
taagagccccaagagaataagctcaacatt

SEQ ID NO: 135122 - DNA, 30 bp, Artificial Sequence
  Synthetic oligonucleotide
accgtctagagagggcatagtagacacatt

SEQ ID NO: 135123 - DNA, 30 bp, Artificial Sequence
  Synthetic oligonucleotide
ctgaagattgcatgcgaacgcctacacatt

SEQ ID NO: 135124 - DNA, 30 bp, Artificial Sequence
  Synthetic oligonucleotide
taatatggaaacttcttgaaaaggcacatt

SEQ ID NO: 135125 - DNA, 30 bp, Artificial Sequence
  Synthetic oligonucleotide
ccacagatgtcggattaatgaatagacatt

SEQ ID NO: 135126 - DNA, 30 bp, Artificial Sequence
  Synthetic oligonucleotide
gcgtactgacaagacataccctgcgacatt

SEQ ID NO: 135127 - DNA, 30 bp, Artificial Sequence
  Synthetic oligonucleotide
aaagaccaacgtcacaggctgattgacatt

SEQ ID NO: 135128 - DNA, 30 bp, Artificial Sequence
  Synthetic oligonucleotide
accctgaataaccaagtgtgtgcatacatt

SEQ ID NO: 135129 - DNA, 30 bp, Artificial Sequence
  Synthetic oligonucleotide
ggcctggtatcatagctccaagggtacatt

SEQ ID NO: 135130 - DNA, 30 bp, Artificial Sequence
  Synthetic oligonucleotide
agagaggagctctaacgggatcttgccatt

SEQ ID NO: 135131 - DNA, 30 bp, Artificial Sequence
  Synthetic oligonucleotide
ccgctaactcgctaaccaatccaatccatt

SEQ ID NO: 135132 - DNA, 30 bp, Artificial Sequence
  Synthetic oligonucleotide
tcgctatagagcaagggttagttatccatt

SEQ ID NO: 135133 - DNA, 30 bp, Artificial Sequence
  Synthetic oligonucleotide
taccataagtcacacagcgtcataagcatt

SEQ ID NO: 135134 - DNA, 30 bp, Artificial Sequence
  Synthetic oligonucleotide
catcgcatgccatttttgtgatccggcatt

SEQ ID NO: 135135 - DNA, 30 bp, Artificial Sequence
  Synthetic oligonucleotide
ctatagtgctcgcctcagatgcgcggcatt

SEQ ID NO: 135136 - DNA, 30 bp, Artificial Sequence
  Synthetic oligonucleotide
aggcggcgatgttacccagaaccgggcatt

SEQ ID NO: 135137 - DNA, 30 bp, Artificial Sequence
  Synthetic oligonucleotide
ctggaacgaaattgggctctacgtggcatt

SEQ ID NO: 135138 - DNA, 30 bp, Artificial Sequence
  Synthetic oligonucleotide
aagtaacaaggccttgcgggcggatgcatt

SEQ ID NO: 135139 - DNA, 30 bp, Artificial Sequence
  Synthetic oligonucleotide
agcggcaaatttcgagcagagtggtgcatt

SEQ ID NO: 135140 - DNA, 30 bp, Artificial Sequence
  Synthetic oligonucleotide
gtgtcaaggaaaaattagtaacattgcatt

SEQ ID NO: 135141 - DNA, 30 bp, Artificial Sequence
  Synthetic oligonucleotide
acgcttggtgcgtgccaagccttaatcatt

SEQ ID NO: 135142 - DNA, 30 bp, Artificial Sequence
  Synthetic oligonucleotide
acttgccctgagcacgtggactgcatcatt

SEQ ID NO: 135143 - DNA, 30 bp, Artificial Sequence
  Synthetic oligonucleotide
gacacgacgggcgcctctattgcagtcatt

SEQ ID NO: 135144 - DNA, 30 bp, Artificial Sequence
  Synthetic oligonucleotide
ttgggatcagcttggtgagaagtcgtcatt

SEQ ID NO: 135145 - DNA, 30 bp, Artificial Sequence
  Synthetic oligonucleotide
agccgccacggcgcattgcggcaattcatt

SEQ ID NO: 135146 - DNA, 30 bp, Artificial Sequence
  Synthetic oligonucleotide
tgaacttgttcccgacgagtcacaaagatt

SEQ ID NO: 135147 - DNA, 30 bp, Artificial Sequence
  Synthetic oligonucleotide
tggatatataagacacgagctcaacagatt

SEQ ID NO: 135148 - DNA, 30 bp, Artificial Sequence
  Synthetic oligonucleotide
aagctgtacaaaacactagtagtacagatt

SEQ ID NO: 135149 - DNA, 30 bp, Artificial Sequence
  Synthetic oligonucleotide
tccgacgtggggtgcgctacactccagatt

SEQ ID NO: 135150 - DNA, 30 bp, Artificial Sequence
  Synthetic oligonucleotide
tcgacaactagtttgcttaatccagagatt

SEQ ID NO: 135151 - DNA, 30 bp, Artificial Sequence
  Synthetic oligonucleotide
ttaaccaaggacttatgctcaaacacgatt

SEQ ID NO: 135152 - DNA, 30 bp, Artificial Sequence
  Synthetic oligonucleotide
ggaaaagggccatctaagatatctccgatt

SEQ ID NO: 135153 - DNA, 30 bp, Artificial Sequence
  Synthetic oligonucleotide
agcatgccagctttccgaagtagcgcgatt

SEQ ID NO: 135154 - DNA, 30 bp, Artificial Sequence
  Synthetic oligonucleotide
cagttgcccagacccacgtaagaggcgatt

SEQ ID NO: 135155 - DNA, 30 bp, Artificial Sequence
  Synthetic oligonucleotide
ggacgtagtgcgaacgaaccaatggcgatt

SEQ ID NO: 135156 - DNA, 30 bp, Artificial Sequence
  Synthetic oligonucleotide
tccgggggcgccacacgctctttggcgatt

SEQ ID NO: 135157 - DNA, 30 bp, Artificial Sequence
  Synthetic oligonucleotide
atgattcagtgcaactgctgatgatcgatt

SEQ ID NO: 135158 - DNA, 30 bp, Artificial Sequence
  Synthetic oligonucleotide
gatgcaccacgtcacatctctctctcgatt

SEQ ID NO: 135159 - DNA, 30 bp, Artificial Sequence
  Synthetic oligonucleotide
ataagagggaccccgcgactaagttcgatt

SEQ ID NO: 135160 - DNA, 30 bp, Artificial Sequence
  Synthetic oligonucleotide
ataaacatgtcatagagaccatcaaggatt

SEQ ID NO: 135161 - DNA, 30 bp, Artificial Sequence
  Synthetic oligonucleotide
agccgggttgctccgtacaggggaaggatt

SEQ ID NO: 135162 - DNA, 30 bp, Artificial Sequence
  Synthetic oligonucleotide
gacacaaggtttatggattgcgtaaggatt

SEQ ID NO: 135163 - DNA, 30 bp, Artificial Sequence
  Synthetic oligonucleotide
gagctgtagagtaagtaatatgaacggatt

SEQ ID NO: 135164 - DNA, 30 bp, Artificial Sequence
  Synthetic oligonucleotide
tagcggggctcactgtagaacgaccggatt

SEQ ID NO: 135165 - DNA, 30 bp, Artificial Sequence
  Synthetic oligonucleotide
gcgtacgccatcgcgactgtcctgcggatt

SEQ ID NO: 135166 - DNA, 30 bp, Artificial Sequence
  Synthetic oligonucleotide
cttactagattgtgggggacacacgggatt

SEQ ID NO: 135167 - DNA, 30 bp, Artificial Sequence
  Synthetic oligonucleotide
ggcttgaagcgggatgcgtaccacgggatt

SEQ ID NO: 135168 - DNA, 30 bp, Artificial Sequence
  Synthetic oligonucleotide
ctaagcgccataggtcgtaggtgatggatt

SEQ ID NO: 135169 - DNA, 30 bp, Artificial Sequence
  Synthetic oligonucleotide
taattgcatggactgaatcgaaagtggatt

SEQ ID NO: 135170 - DNA, 30 bp, Artificial Sequence
  Synthetic oligonucleotide
tcggtcttagaagaatatatgtctatgatt

SEQ ID NO: 135171 - DNA, 30 bp, Artificial Sequence
  Synthetic oligonucleotide
agtgtaatatccaaaggcgaatttatgatt

SEQ ID NO: 135172 - DNA, 30 bp, Artificial Sequence
  Synthetic oligonucleotide
agacacctcgctcaggtatacaaagtgatt

SEQ ID NO: 135173 - DNA, 30 bp, Artificial Sequence
  Synthetic oligonucleotide
gtgacaacacaggttactacgccagtgatt

SEQ ID NO: 135174 - DNA, 30 bp, Artificial Sequence
  Synthetic oligonucleotide
cttcgaacagaaataaagtagatcgtgatt

SEQ ID NO: 135175 - DNA, 30 bp, Artificial Sequence
  Synthetic oligonucleotide
tgacaaatgacctcagtcaactgggtgatt

SEQ ID NO: 135176 - DNA, 30 bp, Artificial Sequence
  Synthetic oligonucleotide
ctcggggggagttaggatatagaattgatt

SEQ ID NO: 135177 - DNA, 30 bp, Artificial Sequence
  Synthetic oligonucleotide
gacgtgataagcagcccaatgaggttgatt

SEQ ID NO: 135178 - DNA, 30 bp, Artificial Sequence
  Synthetic oligonucleotide
agttagggcgagttgatccgtgagaatatt

SEQ ID NO: 135179 - DNA, 30 bp, Artificial Sequence
  Synthetic oligonucleotide
tctacaattgaaacgttaaaacggcatatt

SEQ ID NO: 135180 - DNA, 30 bp, Artificial Sequence
  Synthetic oligonucleotide
gacataagcagtgcccatggaagggatatt

SEQ ID NO: 135181 - DNA, 30 bp, Artificial Sequence
  Synthetic oligonucleotide
tgtgggcaggccgactcccgataatatatt

SEQ ID NO: 135182 - DNA, 31 bp, Artificial Sequence
  Synthetic oligonucleotide
gacactgggtaccgaacatctcctgtatatt

SEQ ID NO: 135183 - DNA, 30 bp, Artificial Sequence
  Synthetic oligonucleotide
atgagagcgagactcattcgaacgactatt

SEQ ID NO: 135184 - DNA, 30 bp, Artificial Sequence
  Synthetic oligonucleotide
ttaacgttatatggcaaggaggtcgctatt

SEQ ID NO: 135185 - DNA, 30 bp, Artificial Sequence
  Synthetic oligonucleotide
gttgtgcgaagtagagcaatcctggctatt

SEQ ID NO: 135186 - DNA, 30 bp, Artificial Sequence
  Synthetic oligonucleotide
tggcgcgtgcacgatgttgaacctgctatt

SEQ ID NO: 135187 - DNA, 30 bp, Artificial Sequence
  Synthetic oligonucleotide
ttatgcaattaaggagtgctacctgctatt

SEQ ID NO: 135188 - DNA, 30 bp, Artificial Sequence
  Synthetic oligonucleotide
aaggacaaacagcttggtgaggcctctatt

SEQ ID NO: 135189 - DNA, 30 bp, Artificial Sequence
  Synthetic oligonucleotide
cagcccgggtagcgcgaagagggctctatt

SEQ ID NO: 135190 - DNA, 30 bp, Artificial Sequence
  Synthetic oligonucleotide
tcgggaccaagcgttctgccgatctctatt

SEQ ID NO: 135191 - DNA, 30 bp, Artificial Sequence
  Synthetic oligonucleotide
agtggatacaaaagggttaatggaagtatt

SEQ ID NO: 135192 - DNA, 30 bp, Artificial Sequence
  Synthetic oligonucleotide
ggtgacgaatcacgcctaaaccgtagtatt

SEQ ID NO: 135193 - DNA, 30 bp, Artificial Sequence
  Synthetic oligonucleotide
ccatatcttacgtcatcccgtccccgtatt

SEQ ID NO: 135194 - DNA, 30 bp, Artificial Sequence
  Synthetic oligonucleotide
cacgcactcttagtgtattgagcccgtatt

SEQ ID NO: 135195 - DNA, 30 bp, Artificial Sequence
  Synthetic oligonucleotide
agacggcaggtcttgcatcggtcgcgtatt

SEQ ID NO: 135196 - DNA, 30 bp, Artificial Sequence
  Synthetic oligonucleotide
tgcttagctagcggtagctatgtgcgtatt

SEQ ID NO: 135197 - DNA, 30 bp, Artificial Sequence
  Synthetic oligonucleotide
tctggaagaggaaacgtgtacgaaggtatt

SEQ ID NO: 135198 - DNA, 30 bp, Artificial Sequence
  Synthetic oligonucleotide
tagttcgggattagttagtgtcgaggtatt

SEQ ID NO: 135199 - DNA, 30 bp, Artificial Sequence
  Synthetic oligonucleotide
gagagtgtgcaaggataaggatgaggtatt

SEQ ID NO: 135200 - DNA, 30 bp, Artificial Sequence
  Synthetic oligonucleotide
gtagggattgccctaagagtctgaggtatt

SEQ ID NO: 135201 - DNA, 30 bp, Artificial Sequence
  Synthetic oligonucleotide
atgtgattcccaccccgcgacaccggtatt

SEQ ID NO: 135202 - DNA, 30 bp, Artificial Sequence
  Synthetic oligonucleotide
catcgtgtcacaggaaaacgcaaatgtatt

SEQ ID NO: 135203 - DNA, 30 bp, Artificial Sequence
  Synthetic oligonucleotide
ggcagtatacccggacagagtgggtgtatt

SEQ ID NO: 135204 - DNA, 30 bp, Artificial Sequence
  Synthetic oligonucleotide
ttaaacgaatcagattgatgatacattatt

SEQ ID NO: 135205 - DNA, 30 bp, Artificial Sequence
  Synthetic oligonucleotide
gacagacggaatgccttaacacctattatt

SEQ ID NO: 135206 - DNA, 30 bp, Artificial Sequence
  Synthetic oligonucleotide
gtggtagagaagtgctaagacgtcgttatt

SEQ ID NO: 135207 - DNA, 30 bp, Artificial Sequence
  Synthetic oligonucleotide
ctgttaggatgggtgtcggcaaagaaactt

SEQ ID NO: 135208 - DNA, 30 bp, Artificial Sequence
  Synthetic oligonucleotide
gtgagtacgggaaacggtctcattaaactt

SEQ ID NO: 135209 - DNA, 30 bp, Artificial Sequence
  Synthetic oligonucleotide
gagcagtgacactaatctttcccgcaactt

SEQ ID NO: 135210 - DNA, 30 bp, Artificial Sequence
  Synthetic oligonucleotide
ctggagacaatttcgtgtgagactcaactt

SEQ ID NO: 135211 - DNA, 30 bp, Artificial Sequence
  Synthetic oligonucleotide
tcgtacaccgaaatatcagtcccataactt

SEQ ID NO: 135212 - DNA, 30 bp, Artificial Sequence
  Synthetic oligonucleotide
cgaattgcgcttcagatggtggcgtaactt

SEQ ID NO: 135213 - DNA, 30 bp, Artificial Sequence
  Synthetic oligonucleotide
agattaagtcgtccatagtgtgcgtaactt

SEQ ID NO: 135214 - DNA, 30 bp, Artificial Sequence
  Synthetic oligonucleotide
cctctgggccttgcgagcatgaaaacactt

SEQ ID NO: 135215 - DNA, 30 bp, Artificial Sequence
  Synthetic oligonucleotide
gtcaaaacgggatacaggcgtatcacactt

SEQ ID NO: 135216 - DNA, 30 bp, Artificial Sequence
  Synthetic oligonucleotide
taaggaggagttttatacatggccccactt

SEQ ID NO: 135217 - DNA, 30 bp, Artificial Sequence
  Synthetic oligonucleotide
acgtaataatcacagggtcaccgtccactt

SEQ ID NO: 135218 - DNA, 30 bp, Artificial Sequence
  Synthetic oligonucleotide
agaagactaacgcgtagttgagcatcactt

SEQ ID NO: 135219 - DNA, 30 bp, Artificial Sequence
  Synthetic oligonucleotide
cgcaccacttcaatatagtaaatctcactt

SEQ ID NO: 135220 - DNA, 30 bp, Artificial Sequence
  Synthetic oligonucleotide
gtgtatcgtcaggtagacagtaattcactt

SEQ ID NO: 135221 - DNA, 30 bp, Artificial Sequence
  Synthetic oligonucleotide
ctgtgttactacggtatcacacaaagactt

SEQ ID NO: 135222 - DNA, 30 bp, Artificial Sequence
  Synthetic oligonucleotide
caaattgaggggcccacagggtaaagactt

SEQ ID NO: 135223 - DNA, 30 bp, Artificial Sequence
  Synthetic oligonucleotide
cggtaagcacgggctgacgctttcagactt

SEQ ID NO: 135224 - DNA, 31 bp, Artificial Sequence
  Synthetic oligonucleotide
cttgcatccgcgaggacggaccgggcgactt

SEQ ID NO: 135225 - DNA, 30 bp, Artificial Sequence
  Synthetic oligonucleotide
gacgatattatgccctaaaattccggactt

SEQ ID NO: 135226 - DNA, 30 bp, Artificial Sequence
  Synthetic oligonucleotide
ggaacgcgctggagttcgaccgactgactt

SEQ ID NO: 135227 - DNA, 30 bp, Artificial Sequence
  Synthetic oligonucleotide
tgcggaacgtggatccctagcgattgactt

SEQ ID NO: 135228 - DNA, 30 bp, Artificial Sequence
  Synthetic oligonucleotide
cgaccggcagggacgttacgtctaatactt

SEQ ID NO: 135229 - DNA, 30 bp, Artificial Sequence
  Synthetic oligonucleotide
caaacttcagtaataccgacacacatactt

SEQ ID NO: 135230 - DNA, 30 bp, Artificial Sequence
  Synthetic oligonucleotide
cgtatcggacggtcatcgcgggttatactt

SEQ ID NO: 135231 - DNA, 30 bp, Artificial Sequence
  Synthetic oligonucleotide
gaaggagaaggcttgtatttacaactactt

SEQ ID NO: 135232 - DNA, 30 bp, Artificial Sequence
  Synthetic oligonucleotide
ggtgatgaggcatctgcatccctactactt

SEQ ID NO: 135233 - DNA, 30 bp, Artificial Sequence
  Synthetic oligonucleotide
tctcgggtccgttatacacgtcacctactt

SEQ ID NO: 135234 - DNA, 30 bp, Artificial Sequence
  Synthetic oligonucleotide
cactctccttaggagggcggactgctactt

SEQ ID NO: 135235 - DNA, 30 bp, Artificial Sequence
  Synthetic oligonucleotide
ttgctcgggtgacgaattatagaagtactt

SEQ ID NO: 135236 - DNA, 30 bp, Artificial Sequence
  Synthetic oligonucleotide
taaaggtgctgaggggagtcgtgagtactt

SEQ ID NO: 135237 - DNA, 30 bp, Artificial Sequence
  Synthetic oligonucleotide
gatgagaggggaacgacaagagtcttactt

SEQ ID NO: 135238 - DNA, 30 bp, Artificial Sequence
  Synthetic oligonucleotide
cgattcaacccttacgtgtccaagttactt

SEQ ID NO: 135239 - DNA, 30 bp, Artificial Sequence
  Synthetic oligonucleotide
cctgagaacgtaagcggcgcgaagttactt

SEQ ID NO: 135240 - DNA, 30 bp, Artificial Sequence
  Synthetic oligonucleotide
catggcctgaaacatctaatggctttactt

SEQ ID NO: 135241 - DNA, 30 bp, Artificial Sequence
  Synthetic oligonucleotide
tcacggtattataaaatagaactaaacctt

SEQ ID NO: 135242 - DNA, 30 bp, Artificial Sequence
  Synthetic oligonucleotide
gctcgaggggcgtcacagtacaataacctt

SEQ ID NO: 135243 - DNA, 30 bp, Artificial Sequence
  Synthetic oligonucleotide
gcgtgaaaacacagcgcttgtccgcacctt

SEQ ID NO: 135244 - DNA, 30 bp, Artificial Sequence
  Synthetic oligonucleotide
gagaagattacgcctacctccactcacctt

SEQ ID NO: 135245 - DNA, 30 bp, Artificial Sequence
  Synthetic oligonucleotide
gatctgagctcataggggtggcttcacctt

SEQ ID NO: 135246 - DNA, 30 bp, Artificial Sequence
  Synthetic oligonucleotide
ggatgctttggtgagacggaattagacctt

SEQ ID NO: 135247 - DNA, 30 bp, Artificial Sequence
  Synthetic oligonucleotide
acaaggggcaaatcgaaaggctgcgacctt

SEQ ID NO: 135248 - DNA, 30 bp, Artificial Sequence
  Synthetic oligonucleotide
ccggggacatgactgttatggtgggacctt

SEQ ID NO: 135249 - DNA, 30 bp, Artificial Sequence
  Synthetic oligonucleotide
aagggcatctggatatagtattaatacctt

SEQ ID NO: 135250 - DNA, 30 bp, Artificial Sequence
  Synthetic oligonucleotide
tgcaacagtaggaacgtccacggatacctt

SEQ ID NO: 135251 - DNA, 30 bp, Artificial Sequence
  Synthetic oligonucleotide
gaggaaaggtcttaatttcccgcctccctt

SEQ ID NO: 135252 - DNA, 30 bp, Artificial Sequence
  Synthetic oligonucleotide
gtatctcaagcctacgcttatggcagcctt

SEQ ID NO: 135253 - DNA, 30 bp, Artificial Sequence
  Synthetic oligonucleotide
gatgagaccaggaaacgtgtcaatcgcctt

SEQ ID NO: 135254 - DNA, 30 bp, Artificial Sequence
  Synthetic oligonucleotide
aagaaaggagcaggcgagcttcatcgcctt

SEQ ID NO: 135255 - DNA, 30 bp, Artificial Sequence
  Synthetic oligonucleotide
tcatcttctgatataactgtgccatgcctt

SEQ ID NO: 135256 - DNA, 30 bp, Artificial Sequence
  Synthetic oligonucleotide
tgaacggtccagtcttaaaaacacatcctt

SEQ ID NO: 135257 - DNA, 30 bp, Artificial Sequence
  Synthetic oligonucleotide
gggcgaggctggagttgaatctggatcctt

SEQ ID NO: 135258 - DNA, 30 bp, Artificial Sequence
  Synthetic oligonucleotide
acgatgatctgaatggcgatagatatcctt

SEQ ID NO: 135259 - DNA, 30 bp, Artificial Sequence
  Synthetic oligonucleotide
tacgcgggctacgatagggggggagtcctt

SEQ ID NO: 135260 - DNA, 30 bp, Artificial Sequence
  Synthetic oligonucleotide
cggtcgagattgcgtgaaaaagcggtcctt

SEQ ID NO: 135261 - DNA, 30 bp, Artificial Sequence
  Synthetic oligonucleotide
gaatagtgttaggagggaatgtggaagctt

SEQ ID NO: 135262 - DNA, 30 bp, Artificial Sequence
  Synthetic oligonucleotide
tcgtgaccttcccctgaaggaaataagctt

SEQ ID NO: 135263 - DNA, 30 bp, Artificial Sequence
  Synthetic oligonucleotide
tcaacgaagtattaggctatcaaacagctt

SEQ ID NO: 135264 - DNA, 30 bp, Artificial Sequence
  Synthetic oligonucleotide
tcagtggccaccagaatgttttaccagctt

SEQ ID NO: 135265 - DNA, 30 bp, Artificial Sequence
  Synthetic oligonucleotide
acaatgagtatcaaggcaatgtcatagctt

SEQ ID NO: 135266 - DNA, 30 bp, Artificial Sequence
  Synthetic oligonucleotide
acatatttagggcttcgaatgggatagctt

SEQ ID NO: 135267 - DNA, 30 bp, Artificial Sequence
  Synthetic oligonucleotide
aaggtgaactaatatcgactatgcacgctt

SEQ ID NO: 135268 - DNA, 30 bp, Artificial Sequence
  Synthetic oligonucleotide
gcctgcccacatgcgtatgtactagcgctt

SEQ ID NO: 135269 - DNA, 30 bp, Artificial Sequence
  Synthetic oligonucleotide
gaatgcattatcgtaatatggtcggcgctt

SEQ ID NO: 135270 - DNA, 30 bp, Artificial Sequence
  Synthetic oligonucleotide
gtaggcgggcagccgtattcggcaaggctt

SEQ ID NO: 135271 - DNA, 30 bp, Artificial Sequence
  Synthetic oligonucleotide
tgtctatcgctcggtcgttatgtaaggctt

SEQ ID NO: 135272 - DNA, 30 bp, Artificial Sequence
  Synthetic oligonucleotide
gagagccatgtggataagtagttaaggctt

SEQ ID NO: 135273 - DNA, 30 bp, Artificial Sequence
  Synthetic oligonucleotide
caaatacattcacgcatgattgctaggctt

SEQ ID NO: 135274 - DNA, 30 bp, Artificial Sequence
  Synthetic oligonucleotide
gccaaacgggacgtatttgagcatgggctt

SEQ ID NO: 135275 - DNA, 30 bp, Artificial Sequence
  Synthetic oligonucleotide
agaattagactcaagagtgatctatggctt

SEQ ID NO: 135276 - DNA, 30 bp, Artificial Sequence
  Synthetic oligonucleotide
ccgagagctacgatgttgttccactggctt

SEQ ID NO: 135277 - DNA, 30 bp, Artificial Sequence
  Synthetic oligonucleotide
atcagtgcggagctcagaagatgctggctt

SEQ ID NO: 135278 - DNA, 30 bp, Artificial Sequence
  Synthetic oligonucleotide
agctagtccgacaggcctaacatttggctt

SEQ ID NO: 135279 - DNA, 30 bp, Artificial Sequence
  Synthetic oligonucleotide
ttccgtaggtggcaagaacgtcggatgctt

SEQ ID NO: 135280 - DNA, 30 bp, Artificial Sequence
  Synthetic oligonucleotide
ggcgggtggtctaggggttaatgtatgctt

SEQ ID NO: 135281 - DNA, 30 bp, Artificial Sequence
  Synthetic oligonucleotide
gcgaggtatactggcgggtaaagtctgctt

SEQ ID NO: 135282 - DNA, 30 bp, Artificial Sequence
  Synthetic oligonucleotide
cgaattgcgaccaccttctcaattctgctt

SEQ ID NO: 135283 - DNA, 30 bp, Artificial Sequence
  Synthetic oligonucleotide
agaattaatcatataagatagcgattgctt

SEQ ID NO: 135284 - DNA, 30 bp, Artificial Sequence
  Synthetic oligonucleotide
caacaagggacgtgattgattttattgctt

SEQ ID NO: 135285 - DNA, 30 bp, Artificial Sequence
  Synthetic oligonucleotide
aggctattctaacagtgtatgtggttgctt

SEQ ID NO: 135286 - DNA, 29 bp, Artificial Sequence
  Synthetic oligonucleotide
tgcgagataggtattagagattgttgctt

SEQ ID NO: 135287 - DNA, 30 bp, Artificial Sequence
  Synthetic oligonucleotide
gagatcgcgtaagatgtggcacatttgctt

SEQ ID NO: 135288 - DNA, 30 bp, Artificial Sequence
  Synthetic oligonucleotide
aaagtggatactgacaccgtacgggatctt

SEQ ID NO: 135289 - DNA, 30 bp, Artificial Sequence
  Synthetic oligonucleotide
ttgctgaacttcaaggggtatttggatctt

SEQ ID NO: 135290 - DNA, 30 bp, Artificial Sequence
  Synthetic oligonucleotide
cgggatctggcagtccaggtgactgatctt

SEQ ID NO: 135291 - DNA, 30 bp, Artificial Sequence
  Synthetic oligonucleotide
accaacggtaaccacaggcactctgatctt

SEQ ID NO: 135292 - DNA, 30 bp, Artificial Sequence
  Synthetic oligonucleotide
gggtatcaagcaaaaccgatgtagtatctt

SEQ ID NO: 135293 - DNA, 30 bp, Artificial Sequence
  Synthetic oligonucleotide
tatgggactagatcgtgacgaatgtatctt

SEQ ID NO: 135294 - DNA, 30 bp, Artificial Sequence
  Synthetic oligonucleotide
aaggtaaagtccgacgaagacgtcactctt

SEQ ID NO: 135295 - DNA, 30 bp, Artificial Sequence
  Synthetic oligonucleotide
aggtgacgattacttcgtcggatgcctctt

SEQ ID NO: 135296 - DNA, 30 bp, Artificial Sequence
  Synthetic oligonucleotide
ccactccgagccaggaaatgtcttcctctt

SEQ ID NO: 135297 - DNA, 30 bp, Artificial Sequence
  Synthetic oligonucleotide
cagtctacgaagggaccagtatttcctctt

SEQ ID NO: 135298 - DNA, 30 bp, Artificial Sequence
  Synthetic oligonucleotide
tggggcattacggaggacaatagatctctt

SEQ ID NO: 135299 - DNA, 30 bp, Artificial Sequence
  Synthetic oligonucleotide
tttggacattcgttgggtctggcgtctctt

SEQ ID NO: 135300 - DNA, 30 bp, Artificial Sequence
  Synthetic oligonucleotide
ctacagatcttcagaagcggggggtctctt

SEQ ID NO: 135301 - DNA, 30 bp, Artificial Sequence
  Synthetic oligonucleotide
gcatgggaggaatgtacctcgaaaagtctt

SEQ ID NO: 135302 - DNA, 30 bp, Artificial Sequence
  Synthetic oligonucleotide
agtgccagtgagcggaatctcgcgagtctt

SEQ ID NO: 135303 - DNA, 30 bp, Artificial Sequence
  Synthetic oligonucleotide
gctagggtaatgagtaccccgtgccgtctt

SEQ ID NO: 135304 - DNA, 30 bp, Artificial Sequence
  Synthetic oligonucleotide
cgggtctcggttcgaccacaccgaattctt

SEQ ID NO: 135305 - DNA, 30 bp, Artificial Sequence
  Synthetic oligonucleotide
tctgagtgagtcacggctcccaaacttctt

SEQ ID NO: 135306 - DNA, 30 bp, Artificial Sequence
  Synthetic oligonucleotide
tatgagaagacgtacataccgacaaaagtt

SEQ ID NO: 135307 - DNA, 30 bp, Artificial Sequence
  Synthetic oligonucleotide
ctcaagagtccacggctagaaggcaaagtt

SEQ ID NO: 135308 - DNA, 30 bp, Artificial Sequence
  Synthetic oligonucleotide
agtaagcgaccacggtaagcggcacaagtt

SEQ ID NO: 135309 - DNA, 30 bp, Artificial Sequence
  Synthetic oligonucleotide
gggctataaccagtgccattaagacaagtt

SEQ ID NO: 135310 - DNA, 30 bp, Artificial Sequence
  Synthetic oligonucleotide
gacataagcgggttagcaagcatccaagtt

SEQ ID NO: 135311 - DNA, 30 bp, Artificial Sequence
  Synthetic oligonucleotide
ttgagtgatagtaaaattgtcgtccaagtt

SEQ ID NO: 135312 - DNA, 30 bp, Artificial Sequence
  Synthetic oligonucleotide
tagcgccctccaacggagctgaagcaagtt

SEQ ID NO: 135313 - DNA, 30 bp, Artificial Sequence
  Synthetic oligonucleotide
cgaaccacgttcatgtaacgtaggcaagtt

SEQ ID NO: 135314 - DNA, 30 bp, Artificial Sequence
  Synthetic oligonucleotide
ctgtattatgctacctaagggactcaagtt

SEQ ID NO: 135315 - DNA, 30 bp, Artificial Sequence
  Synthetic oligonucleotide
tagaaacacgactaaactgcgatagaagtt

SEQ ID NO: 135316 - DNA, 30 bp, Artificial Sequence
  Synthetic oligonucleotide
caatccgatatgggcacgttcgtggaagtt

SEQ ID NO: 135317 - DNA, 30 bp, Artificial Sequence
  Synthetic oligonucleotide
aacagagaattattgatggagacttaagtt

SEQ ID NO: 135318 - DNA, 30 bp, Artificial Sequence
  Synthetic oligonucleotide
gcaggcacaagaccgctgtgaggttaagtt

SEQ ID NO: 135319 - DNA, 30 bp, Artificial Sequence
  Synthetic oligonucleotide
gcggcagttatcctagtcgcatgttaagtt

SEQ ID NO: 135320 - DNA, 30 bp, Artificial Sequence
  Synthetic oligonucleotide
ctaagattgacatgcccgaactgaacagtt

SEQ ID NO: 135321 - DNA, 30 bp, Artificial Sequence
  Synthetic oligonucleotide
cgtgagtggtagtctactatattaccagtt

SEQ ID NO: 135322 - DNA, 30 bp, Artificial Sequence
  Synthetic oligonucleotide
cacacgaaaccacattcagttcagccagtt

SEQ ID NO: 135323 - DNA, 30 bp, Artificial Sequence
  Synthetic oligonucleotide
aaatcgactaggagctccatcgatccagtt

SEQ ID NO: 135324 - DNA, 30 bp, Artificial Sequence
  Synthetic oligonucleotide
aggtctttgcacaaaatttcaaccgcagtt

SEQ ID NO: 135325 - DNA, 30 bp, Artificial Sequence
  Synthetic oligonucleotide
tggattatgggaacgtaatatatatcagtt

SEQ ID NO: 135326 - DNA, 30 bp, Artificial Sequence
  Synthetic oligonucleotide
cgatcgtctatcatcggtaggcactcagtt

SEQ ID NO: 135327 - DNA, 30 bp, Artificial Sequence
  Synthetic oligonucleotide
gtcttcaaatttgggaaaggctagtcagtt

SEQ ID NO: 135328 - DNA, 30 bp, Artificial Sequence
  Synthetic oligonucleotide
ccgcctataggggtaggggatatttcagtt

SEQ ID NO: 135329 - DNA, 30 bp, Artificial Sequence
  Synthetic oligonucleotide
aggggttctcatattcaagataaaagagtt

SEQ ID NO: 135330 - DNA, 30 bp, Artificial Sequence
  Synthetic oligonucleotide
caagagtgtgggagcacattcgaaagagtt

SEQ ID NO: 135331 - DNA, 30 bp, Artificial Sequence
  Synthetic oligonucleotide
caagcaaaccggaccggttattaaagagtt

SEQ ID NO: 135332 - DNA, 30 bp, Artificial Sequence
  Synthetic oligonucleotide
caaaggtaagtatctcagaagggcagagtt

SEQ ID NO: 135333 - DNA, 30 bp, Artificial Sequence
  Synthetic oligonucleotide
taaaggtatctcagactgaatactcgagtt

SEQ ID NO: 135334 - DNA, 30 bp, Artificial Sequence
  Synthetic oligonucleotide
gctggtacctgatgtatctgcataggagtt

SEQ ID NO: 135335 - DNA, 31 bp, Artificial Sequence
  Synthetic oligonucleotide
gaagagtctgacagggtgctcagccggagtt

SEQ ID NO: 135336 - DNA, 30 bp, Artificial Sequence
  Synthetic oligonucleotide
tccgcctccaaagaaggttgacactgagtt

SEQ ID NO: 135337 - DNA, 30 bp, Artificial Sequence
  Synthetic oligonucleotide
atggacactggcgttagtgtatattgagtt

SEQ ID NO: 135338 - DNA, 30 bp, Artificial Sequence
  Synthetic oligonucleotide
aacaggcggttacattccgcaaacatagtt

SEQ ID NO: 135339 - DNA, 30 bp, Artificial Sequence
  Synthetic oligonucleotide
acacaaaaacgtaccccttcacccatagtt

SEQ ID NO: 135340 - DNA, 30 bp, Artificial Sequence
  Synthetic oligonucleotide
cacgggaaagaatatataaggcagatagtt

SEQ ID NO: 135341 - DNA, 30 bp, Artificial Sequence
  Synthetic oligonucleotide
caccctaaaactgaaagaaccatactagtt

SEQ ID NO: 135342 - DNA, 30 bp, Artificial Sequence
  Synthetic oligonucleotide
atttcgcgcatagtgatcgtcgccctagtt

SEQ ID NO: 135343 - DNA, 30 bp, Artificial Sequence
  Synthetic oligonucleotide
tcgacttcgaatcgatacccctatctagtt

SEQ ID NO: 135344 - DNA, 30 bp, Artificial Sequence
  Synthetic oligonucleotide
acgcgatgattgaggtcaaagcaggtagtt

SEQ ID NO: 135345 - DNA, 30 bp, Artificial Sequence
  Synthetic oligonucleotide
tgcgagaagtaagccggtcaccatttagtt

SEQ ID NO: 135346 - DNA, 31 bp, Artificial Sequence
  Synthetic oligonucleotide
gtactgtgcccactctcgcaaaagcaacgtt

SEQ ID NO: 135347 - DNA, 30 bp, Artificial Sequence
  Synthetic oligonucleotide
cactacgtgggcggataaaagatgaacgtt

SEQ ID NO: 135348 - DNA, 30 bp, Artificial Sequence
  Synthetic oligonucleotide
atcttcatagatggcagagttcgccacgtt

SEQ ID NO: 135349 - DNA, 30 bp, Artificial Sequence
  Synthetic oligonucleotide
tcaccgaggtgggagtaagcttgagacgtt

SEQ ID NO: 135350 - DNA, 30 bp, Artificial Sequence
  Synthetic oligonucleotide
actcatcgatgcgccaggccgacttacgtt

SEQ ID NO: 135351 - DNA, 30 bp, Artificial Sequence
  Synthetic oligonucleotide
aatgggatgtaaacatcgtatggcaccgtt

SEQ ID NO: 135352 - DNA, 30 bp, Artificial Sequence
  Synthetic oligonucleotide
ccaacggccgtggaagggtcctattccgtt

SEQ ID NO: 135353 - DNA, 30 bp, Artificial Sequence
  Synthetic oligonucleotide
ctgaatagtgcatcaagtatacaaagcgtt

SEQ ID NO: 135354 - DNA, 30 bp, Artificial Sequence
  Synthetic oligonucleotide
agtaggtacttaacatttcgaggaagcgtt

SEQ ID NO: 135355 - DNA, 30 bp, Artificial Sequence
  Synthetic oligonucleotide
gcgccggcggaacgggctgagttaagcgtt

SEQ ID NO: 135356 - DNA, 30 bp, Artificial Sequence
  Synthetic oligonucleotide
ctgatgtatgtaacagacaaagccagcgtt

SEQ ID NO: 135357 - DNA, 30 bp, Artificial Sequence
  Synthetic oligonucleotide
cctcgcgctaggtgaacatataagagcgtt

SEQ ID NO: 135358 - DNA, 30 bp, Artificial Sequence
  Synthetic oligonucleotide
cgaaaccatagacaaaatcccgtccgcgtt

SEQ ID NO: 135359 - DNA, 30 bp, Artificial Sequence
  Synthetic oligonucleotide
agggttaagttcagaacagttgtccgcgtt

SEQ ID NO: 135360 - DNA, 30 bp, Artificial Sequence
  Synthetic oligonucleotide
tgatcaaacaacgagtctctgcgcggcgtt

SEQ ID NO: 135361 - DNA, 30 bp, Artificial Sequence
  Synthetic oligonucleotide
ggagacgagccagtgagtgtatttggcgtt

SEQ ID NO: 135362 - DNA, 30 bp, Artificial Sequence
  Synthetic oligonucleotide
taaccgcgggctgcggggctaggatgcgtt

SEQ ID NO: 135363 - DNA, 30 bp, Artificial Sequence
  Synthetic oligonucleotide
gggtgattgtacattcaggttcactgcgtt

SEQ ID NO: 135364 - DNA, 30 bp, Artificial Sequence
  Synthetic oligonucleotide
gacagagtggcaggtcgcaaggtgtgcgtt

SEQ ID NO: 135365 - DNA, 30 bp, Artificial Sequence
  Synthetic oligonucleotide
aggtaaagccgttatggcgactgggtcgtt

SEQ ID NO: 135366 - DNA, 30 bp, Artificial Sequence
  Synthetic oligonucleotide
caggtaagggtcatagagaagtatgtcgtt

SEQ ID NO: 135367 - DNA, 30 bp, Artificial Sequence
  Synthetic oligonucleotide
gcgtggcaattaagccattaaccaaaggtt

SEQ ID NO: 135368 - DNA, 30 bp, Artificial Sequence
  Synthetic oligonucleotide
tgtctggagcaagaatgctagggaaaggtt

SEQ ID NO: 135369 - DNA, 30 bp, Artificial Sequence
  Synthetic oligonucleotide
caagaaaaatgttcactcgtgttaaaggtt

SEQ ID NO: 135370 - DNA, 30 bp, Artificial Sequence
  Synthetic oligonucleotide
gtagggaataggctaacctataagaaggtt

SEQ ID NO: 135371 - DNA, 30 bp, Artificial Sequence
  Synthetic oligonucleotide
acgcaattggtcagcagttgccgtaaggtt

SEQ ID NO: 135372 - DNA, 30 bp, Artificial Sequence
  Synthetic oligonucleotide
gcttagaagagacatatggctatacaggtt

SEQ ID NO: 135373 - DNA, 30 bp, Artificial Sequence
  Synthetic oligonucleotide
ggcggtatcggttagctgtcccttcaggtt

SEQ ID NO: 135374 - DNA, 30 bp, Artificial Sequence
  Synthetic oligonucleotide
acgaatccgcgaattgcgttggccgaggtt

SEQ ID NO: 135375 - DNA, 30 bp, Artificial Sequence
  Synthetic oligonucleotide
gtaacggatatagtgagatcacttgaggtt

SEQ ID NO: 135376 - DNA, 30 bp, Artificial Sequence
  Synthetic oligonucleotide
cttatacagtgcactttcacactataggtt

SEQ ID NO: 135377 - DNA, 30 bp, Artificial Sequence
  Synthetic oligonucleotide
agctagctacatgttattcaggggtaggtt

SEQ ID NO: 135378 - DNA, 30 bp, Artificial Sequence
  Synthetic oligonucleotide
ttggggcagtgctttgatgtgtaagcggtt

SEQ ID NO: 135379 - DNA, 30 bp, Artificial Sequence
  Synthetic oligonucleotide
aacggacgactaatcatgtttttagcggtt

SEQ ID NO: 135380 - DNA, 30 bp, Artificial Sequence
  Synthetic oligonucleotide
aggaaggtaggtattcaggcattaagggtt

SEQ ID NO: 135381 - DNA, 30 bp, Artificial Sequence
  Synthetic oligonucleotide
gggtgcagcgcaaggttaagcaacagggtt

SEQ ID NO: 135382 - DNA, 30 bp, Artificial Sequence
  Synthetic oligonucleotide
tcctacagaacacctataacgacaggggtt

SEQ ID NO: 135383 - DNA, 30 bp, Artificial Sequence
  Synthetic oligonucleotide
ttcgctgcgagcgggacctactcaggggtt

SEQ ID NO: 135384 - DNA, 30 bp, Artificial Sequence
  Synthetic oligonucleotide
tcgggattcagcctatgccagctaggggtt

SEQ ID NO: 135385 - DNA, 30 bp, Artificial Sequence
  Synthetic oligonucleotide
ttgtacattacgacggtcgtacggggggtt

SEQ ID NO: 135386 - DNA, 30 bp, Artificial Sequence
  Synthetic oligonucleotide
cgtaaccgccaaaatgcgtcgccctgggtt

SEQ ID NO: 135387 - DNA, 30 bp, Artificial Sequence
  Synthetic oligonucleotide
cgcgatagccggttgtatctcccttgggtt

SEQ ID NO: 135388 - DNA, 30 bp, Artificial Sequence
  Synthetic oligonucleotide
cttcgtggagttcatgtcaaggcttgggtt

SEQ ID NO: 135389 - DNA, 30 bp, Artificial Sequence
  Synthetic oligonucleotide
aagtgcagggactacagatgggacatggtt

SEQ ID NO: 135390 - DNA, 30 bp, Artificial Sequence
  Synthetic oligonucleotide
cgaccggacggtcagagagaggtcatggtt

SEQ ID NO: 135391 - DNA, 30 bp, Artificial Sequence
  Synthetic oligonucleotide
atatcgcgggatgagaatggtctgatggtt

SEQ ID NO: 135392 - DNA, 30 bp, Artificial Sequence
  Synthetic oligonucleotide
tcgaatctagtgattttatatatggtggtt

SEQ ID NO: 135393 - DNA, 30 bp, Artificial Sequence
  Synthetic oligonucleotide
gcatattacgaacgatgtatacgattggtt

SEQ ID NO: 135394 - DNA, 30 bp, Artificial Sequence
  Synthetic oligonucleotide
taggtccgtagagacagtggtggaaatgtt

SEQ ID NO: 135395 - DNA, 30 bp, Artificial Sequence
  Synthetic oligonucleotide
tggtggcattgcgaataacggtggaatgtt

SEQ ID NO: 135396 - DNA, 30 bp, Artificial Sequence
  Synthetic oligonucleotide
gccggaaaagtggagacaaagtataatgtt

SEQ ID NO: 135397 - DNA, 30 bp, Artificial Sequence
  Synthetic oligonucleotide
gcagggttaatgtcgaggcgataggatgtt

SEQ ID NO: 135398 - DNA, 30 bp, Artificial Sequence
  Synthetic oligonucleotide
atagaatagaggtaaaccgaagtggatgtt

SEQ ID NO: 135399 - DNA, 30 bp, Artificial Sequence
  Synthetic oligonucleotide
aacagaagccaggtcgatacagaatatgtt

SEQ ID NO: 135400 - DNA, 30 bp, Artificial Sequence
  Synthetic oligonucleotide
tcgggcatatagcagggattgaaaactgtt

SEQ ID NO: 135401 - DNA, 30 bp, Artificial Sequence
  Synthetic oligonucleotide
atgcagcggttaccgccagagagtactgtt

SEQ ID NO: 135402 - DNA, 30 bp, Artificial Sequence
  Synthetic oligonucleotide
acacaacagtgcattggacaccgacctgtt

SEQ ID NO: 135403 - DNA, 30 bp, Artificial Sequence
  Synthetic oligonucleotide
ttcaggaacaattcgtaacccgggcctgtt

SEQ ID NO: 135404 - DNA, 30 bp, Artificial Sequence
  Synthetic oligonucleotide
cggatgctcgatggcgttgaaagtcctgtt

SEQ ID NO: 135405 - DNA, 30 bp, Artificial Sequence
  Synthetic oligonucleotide
gcgcgagtgagtatgagacctttagctgtt

SEQ ID NO: 135406 - DNA, 31 bp, Artificial Sequence
  Synthetic oligonucleotide
gccgtccaggtaaaagtagatagtcagtgtt

SEQ ID NO: 135407 - DNA, 30 bp, Artificial Sequence
  Synthetic oligonucleotide
atcgttaaggtcgtataaataaaccgtgtt

SEQ ID NO: 135408 - DNA, 30 bp, Artificial Sequence
  Synthetic oligonucleotide
cgtctctgaagaaggggctggagtcgtgtt

SEQ ID NO: 135409 - DNA, 30 bp, Artificial Sequence
  Synthetic oligonucleotide
tgccctgtgtgcgggtctatgtgtcgtgtt

SEQ ID NO: 135410 - DNA, 30 bp, Artificial Sequence
  Synthetic oligonucleotide
ccgtccgaaaacacgctagaccttcgtgtt

SEQ ID NO: 135411 - DNA, 30 bp, Artificial Sequence
  Synthetic oligonucleotide
ccagatacgagcggttagcaagttcgtgtt

SEQ ID NO: 135412 - DNA, 30 bp, Artificial Sequence
  Synthetic oligonucleotide
cggagctctcgtccaaatctgcatggtgtt

SEQ ID NO: 135413 - DNA, 30 bp, Artificial Sequence
  Synthetic oligonucleotide
acgcgtattctcttcaagtgggcctgtgtt

SEQ ID NO: 135414 - DNA, 30 bp, Artificial Sequence
  Synthetic oligonucleotide
gatacgggagctcgattcgttcgttgtgtt

SEQ ID NO: 135415 - DNA, 30 bp, Artificial Sequence
  Synthetic oligonucleotide
gcgtctgagaaaagccttccagaaattgtt

SEQ ID NO: 135416 - DNA, 30 bp, Artificial Sequence
  Synthetic oligonucleotide
gtagggatcactgcatgctgcccaattgtt

SEQ ID NO: 135417 - DNA, 30 bp, Artificial Sequence
  Synthetic oligonucleotide
catgaggtcaatagatgagatactattgtt

SEQ ID NO: 135418 - DNA, 30 bp, Artificial Sequence
  Synthetic oligonucleotide
tcacggcccgagccggtcaccggtattgtt

SEQ ID NO: 135419 - DNA, 30 bp, Artificial Sequence
  Synthetic oligonucleotide
cgcggggggggacaatgttccaaacttgtt

SEQ ID NO: 135420 - DNA, 30 bp, Artificial Sequence
  Synthetic oligonucleotide
acagtggcgaacgggagccgtgcgcttgtt

SEQ ID NO: 135421 - DNA, 31 bp, Artificial Sequence
  Synthetic oligonucleotide
cgtgcggtatgattgtctccttgttcttgtt

SEQ ID NO: 135422 - DNA, 30 bp, Artificial Sequence
  Synthetic oligonucleotide
tggtactgcttgacgtatcagtcggttgtt

SEQ ID NO: 135423 - DNA, 30 bp, Artificial Sequence
  Synthetic oligonucleotide
tactcaagggcaatggtcgcttatgttgtt

SEQ ID NO: 135424 - DNA, 30 bp, Artificial Sequence
  Synthetic oligonucleotide
tgctcaaagcgcatggctacaggaaaattt

SEQ ID NO: 135425 - DNA, 30 bp, Artificial Sequence
  Synthetic oligonucleotide
gcagagtgcgttgcacttccacataaattt

SEQ ID NO: 135426 - DNA, 30 bp, Artificial Sequence
  Synthetic oligonucleotide
gaacacaggaccatgtgtttacacgaattt

SEQ ID NO: 135427 - DNA, 30 bp, Artificial Sequence
  Synthetic oligonucleotide
aggcaatgggagaatcgcaaactggaattt

SEQ ID NO: 135428 - DNA, 30 bp, Artificial Sequence
  Synthetic oligonucleotide
ccgcagatgacggtgcgtaactacacattt

SEQ ID NO: 135429 - DNA, 30 bp, Artificial Sequence
  Synthetic oligonucleotide
cagcggcgtgggggaacttgagggacattt

SEQ ID NO: 135430 - DNA, 30 bp, Artificial Sequence
  Synthetic oligonucleotide
tacgatatatagtgaggcttagatacattt

SEQ ID NO: 135431 - DNA, 30 bp, Artificial Sequence
  Synthetic oligonucleotide
tgaccccaccaggataacggggctacattt

SEQ ID NO: 135432 - DNA, 30 bp, Artificial Sequence
  Synthetic oligonucleotide
tacagggcaagcacctaaaatgtcccattt

SEQ ID NO: 135433 - DNA, 30 bp, Artificial Sequence
  Synthetic oligonucleotide
ccgtctgctcatctgctctgtaatccattt

SEQ ID NO: 135434 - DNA, 30 bp, Artificial Sequence
  Synthetic oligonucleotide
ctgattcggagactataagtaaccgcattt

SEQ ID NO: 135435 - DNA, 30 bp, Artificial Sequence
  Synthetic oligonucleotide
acagactgaaaacagtaagttaccgcattt

SEQ ID NO: 135436 - DNA, 30 bp, Artificial Sequence
  Synthetic oligonucleotide
ctatggcgtcagaacagctaacaggcattt

SEQ ID NO: 135437 - DNA, 30 bp, Artificial Sequence
  Synthetic oligonucleotide
aataaaataagatgggaaccatatgcattt

SEQ ID NO: 135438 - DNA, 30 bp, Artificial Sequence
  Synthetic oligonucleotide
ccagccaccgacttgcgaagcgcatcattt

SEQ ID NO: 135439 - DNA, 30 bp, Artificial Sequence
  Synthetic oligonucleotide
caaccacgaaaagaagatttccagtcattt

SEQ ID NO: 135440 - DNA, 30 bp, Artificial Sequence
  Synthetic oligonucleotide
cgaaggtaaggtagtaccgtatagtcattt

SEQ ID NO: 135441 - DNA, 30 bp, Artificial Sequence
  Synthetic oligonucleotide
gggaaagggccagcaatatttcgcagattt

SEQ ID NO: 135442 - DNA, 30 bp, Artificial Sequence
  Synthetic oligonucleotide
ggccacttggaaaacagttggaaacgattt

SEQ ID NO: 135443 - DNA, 30 bp, Artificial Sequence
  Synthetic oligonucleotide
accagggacgtatgcatgcccagccgattt

SEQ ID NO: 135444 - DNA, 30 bp, Artificial Sequence
  Synthetic oligonucleotide
tctgttgcggaaagtaaccattcgcgattt

SEQ ID NO: 135445 - DNA, 30 bp, Artificial Sequence
  Synthetic oligonucleotide
gcccaaacgagttgcagtatagcgggattt

SEQ ID NO: 135446 - DNA, 30 bp, Artificial Sequence
  Synthetic oligonucleotide
gggcgtgagaaggcaattcctaatggattt

SEQ ID NO: 135447 - DNA, 30 bp, Artificial Sequence
  Synthetic oligonucleotide
tcgtccccggggttgagttggtttctattt

SEQ ID NO: 135448 - DNA, 30 bp, Artificial Sequence
  Synthetic oligonucleotide
cgtgtcgtgaagtgcaacagactggtattt

SEQ ID NO: 135449 - DNA, 30 bp, Artificial Sequence
  Synthetic oligonucleotide
ttacacacagaccaattccactttgtattt

SEQ ID NO: 135450 - DNA, 30 bp, Artificial Sequence
  Synthetic oligonucleotide
ctcgtcctgaaggctcgaattcgcttattt

SEQ ID NO: 135451 - DNA, 30 bp, Artificial Sequence
  Synthetic oligonucleotide
acggaactgaaagtaagtaaccttcacttt

SEQ ID NO: 135452 - DNA, 30 bp, Artificial Sequence
  Synthetic oligonucleotide
agagtaggaggcacctcaagggttcacttt

SEQ ID NO: 135453 - DNA, 30 bp, Artificial Sequence
  Synthetic oligonucleotide
cgaccagtaggatgatatccgtacgacttt

SEQ ID NO: 135454 - DNA, 30 bp, Artificial Sequence
  Synthetic oligonucleotide
gtcgacttatcccggatcgggcgtgacttt

SEQ ID NO: 135455 - DNA, 30 bp, Artificial Sequence
  Synthetic oligonucleotide
ggtatagcgaagtcttttgtgtgctacttt
